United States Patent Application Publication US 2014/0259212 A1 - sequence listing, part 17

SEQ ID NO: 53769 - protein, 380 aa, Glycine max
MVQAQPLQHVGNGAGKEDQAYFDPSAPPPFKIANIRAAIPKHCWEKNTLRSLSYVLRDVLVVTALVAAAIGFNSWFFWPLYWPAQGTMFWALFVLGHDCGHGSFSNSPLLNSIVGHILHSSILVPYHGWRISHRTHHQNHGHVEKDESWVPLTEKVYKNLDNMTRMMRFTLPFPIFAYPFYLWSRSPGKEGSHFNPYSNLFSPGERRDVLTSTLCWGIMLSVLLYLSLTMGPLFMLKLYGVPYLIFVMWLDFVTYLHHHGYKQKLPWYRGQEWSYLRGGLTTVDRDYGWINNIHHDIGTHVIHHLFPQIPHYHLIEATKAAKAVLGKYYREPQKSGPLPLHLIKYLLHSISQDHFVSDSGDIVYYQTDSQLHKDSWTQSN

SEQ ID NO: 53770 - DNA, 1140 bp, Arachis duranensis
  CDS (1)..(1140)
atgggagctggagggcgtgtcactaagattgaagctcaaaagaagcctctttcaagggttccacattcaaaccctccattcagtgttggccaactcaagaaagcaattccaccacattgctttgaacgttctcttttcatatcattctcctatgttgtctatgatctcttagtggcctacttactcttctacattgccaccacttatttccacaagcttccatacccattttccttccttgcttggccaatctattgggccatccaaggctgcattctcactggtgtttgggtgattgctcatgagtgtggccaccatgccttcagcaagtaccaacttgttgatgacatggttggtttgacccttcactcttgtctattagttccttatttctcatggaaaatcagccaccgccgccaccactccaacaccggttccctcgaccgcgacgaagtgtttgtcccaaaaccaaaatcaaaggtatcatggtataacaagtacatgaacaatccaccagggagggctatctccctcttcatcacactcacactaggatggcccttgtacttggccttcaatgtttctggcagaccctatgatagatttgcaagccactatgacccttatgctcccatatactctaacagggaaaggcttctaatttatgtctcagattcatctgtctttgctgtaacatatctgctatatcacatagcaactctgaaaggtttgggttgggtggtatgtgtttatggggtgccattgctcattgtgaatgggtttctagttaccataacctatttgcagcacacacatgcatcattgcctcactatgattcatccgaatgggactggttaagaggagcattggcaacagtggacagagattatgggatactgaataaagcatttcatcatataactgatacgcatgtggctcatcatttgttctcaacaatgcctcattaccatgcaatggaagcaaccaatgcaataaagccaatattgggtgattactaccaatttgatggcaccccattttacaaagcattgtggagagaagccaaagagtgcctctatgtggagccagatgatggagcttctaagaagggtgtttattggtacaagaacaagttctga

SEQ ID NO: 53771 - protein, 379 aa, Arachis duranensis
MGAGGRVTKIEAQKKPLSRVPHSNPPFSVGQLKKAIPPHCFERSLFISFSYVVYDLLVAYLLFYIATTYFHKLPYPFSFLAWPIYWAIQGCILTGVWVIAHECGHHAFSKYQLVDDMVGLTLHSCLLVPYFSWKISHRRHHSNTGSLDRDEVFVPKPKSKVSWYNKYMNNPPGRAISLFITLTLGWPLYLAFNVSGRPYDRFASHYDPYAPIYSNRERLLIYVSDSSVFAVTYLLYHIATLKGLGWVVCVYGVPLLIVNGFLVTITYLQHTHASLPHYDSSEWDWLRGALATVDRDYGILNKAFHHITDTHVAHHLFSTMPHYHAMEATNAIKPILGDYYQFDGTPFYKALWREAKECLYVEPDDGASKKGVYWYKNKF

SEQ ID NO: 53772 - DNA, 1155 bp, Brassica napus
  CDS (1)..(1155)
atgggtgcaggtggaagaatgcaagtgtctcctccctccaagaagtccgaaaccgacaccatcaagcgcgtaccctgcgagacaccgcccttcactgtcggagaactcaagaaagcaatcccaccgcactgtttcaaacgctcgatccctcgctctttctcctacctcatctgggacatcatcatagcctcctgcttctactacgtcgccaccacttacttccctctcctccctcaccctctctcctacttcgcctggcctctctactgggcctgccaagggtgcgtcctaaccggcgtctgggtcatagcccacgagtgcggccaccacgccttcagcgactaccagtggcttgacgacaccgtcggtctcatcttccactccttcctcctcgtcccttacttctcctggaagtacagtcatcgacgccaccattccaacactggctccctcgagagagacgaagtgtttgtccccaagaagaagtcagacatcaagtggtacggcaagtacctcaacaaccctttgggacgcaccgtgatgttaacggttcagttcactctcggctggccgttgtacttagccttcaacgtctcgggaagaccttacgacggcggcttcgcttgccatttccaccccaacgctcccatctacaacgaccgcgagcgtctccagatatacatctccgacgctggcatcctcgccgtctgctacggtctcttccgttacgccgccgcgcagggagtggcctcgatggtctgcttctacggagtcccgcttctgattgtcaatggtctcctcgtgttgatcacttacttgcagcacacgcatccttccctgcctcactacgattcgtccgagtgggattggttgaggggagctttggctaccgttgacagagactacggaatcttgaacaaggtcttccacaatattaccgacacgcacgtggcgcatcatctgttctccacgatgccgcattatcacgcgatggaagctaccaaggcgataaagccgatactgggagagtattatcagttcgatgggacgccggtggttaaggcgatgtggagggaggcgaaggagtgtatctatgtggaaccggacaggcaaggtgagaagaaaggtgtgttctggtacaacaataagttatga

SEQ ID NO: 53773 - protein, 384 aa, Brassica napus
MGAGGRMQVSPPSKKSETDTIKRVPCETPPFTVGELKKAIPPHCFKRSIPRSFSYLIWDIIIASCFYYVATTYFPLLPHPLSYFAWPLYWACQGCVLTGVWVIAHECGHHAFSDYQWLDDTVGLIFHSFLLVPYFSWKYSHRRHHSNTGSLERDEVFVPKKKSDIKWYGKYLNNPLGRTVMLTVQFTLGWPLYLAFNVSGRPYDGGFACHFHPNAPIYNDRERLQIYISDAGILAVCYGLFRYAAAQGVASMVCFYGVPLLIVNGLLVLITYLQHTHPSLPHYDSSEWDWLRGALATVDRDYGILNKVFHNITDTHVAHHLFSTMPHYHAMEATKAIKPILGEYYQFDGTPVVKAMWREAKECIYVEPDRQGEKKGVFWYNNKL

SEQ ID NO: 53774 - DNA, 1290 bp, Brassica juncea
  CDS (1)..(1290)
atggcgaacttggtcttatccgaatgtggcataagacctctccccagaatctacaccacacccagatccactttcctctccaacaccaccttcaaactcaaaccatcacctgcgtttcgtctgaatgggttctccactaagaactgggcgttgaatgtcaccacgcctctaacagttgactcatctcctccaacctcagaagaacacgaaacgcagaggttcgacccaggcgcgcctcctccgttcaacttagctgatatcagagcagctattcctaagcattgttgggttaagaacccatggaagtctatgagttatgttgtgagagatgttgctattgtatttgcattggctgctggagctgcttacctcaacagctggcttgtttggcctctctattggcttgctcaaggaaccatgttctgggctctctttgttcttggccatgactgtggacatggtagcttctccaatgatccgagattgaacagtgtggttggtcaccttcttcattcctcaatcctagtcccttaccatggctggagaattagccacaggactcaccaccagaaccatggacatgttgagaacgacgaatcatggcatcctatgtctgagaaaatcttcaagactttggatagaccaactcggttctttagatttacactgcctctcgtgatgctcgcgtaccctttctacttgtgggctcgaagtccggggaaaaagggttctcattacaatccggacagcgacttgttccttcctaaagagagaaatgatgttcttacttctactgcttgttggactgcaatggctgctctgcttgtctgtctcaactttgtgatgggtcctatgcaaatgctcaaactctatggcattccttactggataaatgtgatgtggttggactttgtgacttacctgcatcaccatggtcatgaagataagctcccttggtaccgtgggaaggaatggagttacttgagaggaggacttacaacattggatcgtgactacggagtgatcaataacatccatcacgacattggaactcatgtgatacatcatcttttcccacagatcccacattatcatctagtagaagcgacagaagcagctaaaccagtattagggaagtattacagggagcctgataagtctggacctttgccattacatttacttggaatcttagcaaaaagcatgaaagaagatcattatgtgagcgacgaaggagatgttgtatactataaagcagatcctaatctatatggagaggtcaaagtttaa

SEQ ID NO: 53775 - protein, 429 aa, Brassica juncea
MANLVLSECGIRPLPRIYTTPRSTFLSNTTFKLKPSPAFRLNGFSTKNWALNVTTPLTVDSSPPTSEEHETQRFDPGAPPPFNLADIRAAIPKHCWVKNPWKSMSYVVRDVAIVFALAAGAAYLNSWLVWPLYWLAQGTMFWALFVLGHDCGHGSFSNDPRLNSVVGHLLHSSILVPYHGWRISHRTHHQNHGHVENDESWHPMSEKIFKTLDRPTRFFRFTLPLVMLAYPFYLWARSPGKKGSHYNPDSDLFLPKERNDVLTSTACWTAMAALLVCLNFVMGPMQMLKLYGIPYWINVMWLDFVTYLHHHGHEDKLPWYRGKEWSYLRGGLTTLDRDYGVINNIHHDIGTHVIHHLFPQIPHYHLVEATEAAKPVLGKYYREPDKSGPLPLHLLGILAKSMKEDHYVSDEGDVVYYKADPNLYGEVKV

SEQ ID NO: 53776 - DNA, 1562 bp, Capsicum annuum
  CDS (40)..(1356)
gagagagattgagaagcttttctctttttttctcccaaaatggcaagttgggttctatcagaatgtggtgtcagaccactgccaagaatctacccaaagcccagaccagggttagctagctccaccgccaccaccaatataaatatgagaatttcacctacacgcacagatctggtgtcgaggaactgctgggcattgagggttagtgcaccacttaggatccaaactgtgggagaagaagaaagagatataaaagacagacagtatgatgaatatttcgacccaggggcaccacccccattcaagctatctgatattagggcagctattcctaagcattgttgggtcaaaaatccatggaggtccatgagttatgtcgtgagggatgtcgctattgtcttgggactggcggctgccgctgcttatttgaacaattgggttgtttggcctctttattggtttgctcagagtacaatgttttgggcacttttcgttctcggtcatgattgtggccatggaagcttttcaaacaaccacaagttgaacagcgttgctggacatatccttcattcttccattcttgttccttaccatggatggagaataagccacaggactcatcatcagaaccatggacatgttgagaatgacgagtcctggcatcctttatctgagaaggtttacaacagtttggattatgccacaaagaaattgaggttcactctacccttccccttgctggcatatcctttctacctgtggggtagaagccctggaaagaaaggttctcactttgattcaaacagtgatttgtttgtcccaagtgagaagaaagatgtgattacttcaactttgtgctggacggcaatggctgcatttctcgtgggtttgtcctttgtcatgggtcctatccaattgcttaagctctatgtcattccctattggggctttgtcatgtggctggatatagttacctatttgcatcaccatggccatgatgataaacttccttggtacagaggagaggaatggagttatctgagaggagggcttacaacgcttgaccgtgattatggatggattaacaacatccaccatgacatagggacacatgtgatacatcatctcttccctcaaatcccacactatcatttggtagaagcaactgaagctgctaaaccagtgttagggaaatattataaggagccaaagaagtcagggcctctaccattttacttgttgggatatctcattaaaagcatggaggaggatcactatgtcagtgacacagggaacgtagtatattatcaactgatcctaaccttctggatgtcagaaatagaattcctagtatagcaaatacctgttaatcaggcaggtgattctttttcactaacactatggacatgcttcattcgattcaagttggttgtataaccacaagtgagtcagctccccccctccattaaagaatggggaaagttctatattcaattgtttccatattgtaataattgagtggagaaagatattactactaaaaaaaaaaaaaaaaaaaaaaa

SEQ ID NO: 53777 - protein, 438 aa, Capsicum annuum
MASWVLSECGVRPLPRIYPKPRPGLASSTATTNINMRISPTRTDLVSRNCWALRVSAPLRIQTVGEEERDIKDRQYDEYFDPGAPPPFKLSDIRAAIPKHCWVKNPWRSMSYVVRDVAIVLGLAAAAAYLNNWVVWPLYWFAQSTMFWALFVLGHDCGHGSFSNNHKLNSVAGHILHSSILVPYHGWRISHRTHHQNHGHVENDESWHPLSEKVYNSLDYATKKLRFTLPFPLLAYPFYLWGRSPGKKGSHFDSNSDLFVPSEKKDVITSTLCWTAMAAFLVGLSFVMGPIQLLKLYVIPYWGFVMWLDIVTYLHHHGHDDKLPWYRGEEWSYLRGGLTTLDRDYGWINNIHHDIGTHVIHHLFPQIPHYHLVEATEAAKPVLGKYYKEPKKSGPLPFYLLGYLIKSMEEDHYVSDTGNVVYYQLILTFWMSEIEFLV

SEQ ID NO: 53778 - DNA, 1507 bp, Vernonia galamensis
  CDS (96)..(1247)
ggcacgagtttcgaacggccgtttcgctcgctattaccatttacagagacaaaggggtgtccttacggtccaagtttcattcaggtcattgaacaatgggtgcaggtgggcgaatgtcgaatccccccaaggatgaaaagaaagcagagcatgaagctctccaacgagtgccttaccaaaaaccacctttcacggttggagatatcaagaaagccatcccaccccattgtttcaatcgatcagtcattcggtctttctcatatgttgtttatgatcttacaatttccttcatcttttattaccttgccaccaattacatccctcttctccctcaccctctttcatacgtggcatggcccgtttactggatctttcaaggctgtgtcctaactggtgtttgggtgatagcccacgaatgtggccatcacgccttcagtgactaccaatggctcgatgacaccgtaggccttatcctacattctgcactccttgttccttacttctcctggaaatacagtcaccgacgccaccactccaacaccggatcaattgaacatgatgaagttttcgtcccaaaattgaaatccaatgtccggtcaacagctagatacctcaacaatccaccgggcaggatcctcacactcctcgtcacccttaccctaggctggcctttgtacctcatgttcaatgtttcaggcagatactacgatagattcgcttgccatttcgatccaaacagtcccatttactccaaccgcgaacgtgctcagatcttcatctctgatgctgggatccttgctgtcttttacggactcttcaaactcgcgatggccaagggactcacctgggtcctgtgcatgtacggaggaccgttacttgtagtcaacggcttcctcgtattaatcacattcttgcagcacacacacccttcattgcctcactacgacacaacagaatgggactggttacgaggagctctagccaccatcgacagagactacgggatcctaaacaaggtgttccacaacatcacagatactcatgtcgctcaccatttgttttctacgatgcctcattatcacgcaatggaggccaccaaggtgataaaaccgatattgggagagtattatcagttcgatgggacgtcaattttcaaggccatgtatagggaaacaaaggagtgcatctatgtggataaagatgagaacgtgaaggacggcgtgtactggtaccgtaataagatctgatagacgattatgatgatgacggatgaaagagagcggcaattgacaaatcaaaccccccttcttcgttttggtttttgtttgctactggtgtatgatttggtttttgaactgtagtagtcagtcagatgaataacttttgtactggaaccatggtaactgtagccattctgtgttagttcttttttttaatgcatcaaacttttagcatcaatttctcgtttttatggtattcgacttttaacaaaaaaaaaaaaaaaaaa

SEQ ID NO: 53779 - protein, 383 aa, Vernonia galamensis
MGAGGRMSNPPKDEKKAEHEALQRVPYQKPPFTVGDIKKAIPPHCFNRSVIRSFSYVVYDLTISFIFYYLATNYIPLLPHPLSYVAWPVYWIFQGCVLTGVWVIAHECGHHAFSDYQWLDDTVGLILHSALLVPYFSWKYSHRRHHSNTGSIEHDEVFVPKLKSNVRSTARYLNNPPGRILTLLVTLTLGWPLYLMFNVSGRYYDRFACHFDPNSPIYSNRERAQIFISDAGILAVFYGLFKLAMAKGLTWVLCMYGGPLLVVNGFLVLITFLQHTHPSLPHYDTTEWDWLRGALATIDRDYGILNKVFHNITDTHVAHHLFSTMPHYHAMEATKVIKPILGEYYQFDGTSIFKAMYRETKECIYVDKDENVKDGVYWYRNKI

SEQ ID NO: 53780 - DNA, 1456 bp, Impatiens balsamina
  CDS (19)..(1170)
catttggatagaggaatcatgggagaagtgggacccacaaaccgaaccaaaaccaagttggacaagcaacaagaatccgaaaacagggttcctcacgagccacctccattcacactaagtgaccttaagaaagccatcccaccccattgcttcgagcgctccctcgtgaaatcattctaccacgtgattcacgacattatcatcctgtcctttttctactatgtcgccgccaattacatccccatgctaccccaaaacctccgttacgttgcatggccaatttattgggccatccaaggctgtgtccaacttggtatattggtcttaggccatgaatgcggccaccacgccttcagcgactaccaatgggtagacgacatggtcgggttcgtcctccactcgtcccaattgattccctacttctcatggaaacatagccaccgtcgccaccactccaacacggcctccatcgagcgcgacgaggtctacccgcccgcgtacaaaaacgacctgccgtggttcgccaaatacctacgcaaccccgtcggtcgtttcctcatgattttcggggcgctactgttcggctggccgtcgtaccttctgttcaacgcgaacggccgtctctacgaccgcttcgcttcccactacgacccgcaatccccgatcttcaacaaccgcgagaggctgcaagtgatcgcgtccgacgtcgggctcgtcttcgcgtactttgtcctgtacaagatcgcgctggccaagggatttgtgtggttaatttgtgtgtatggcgtcccgtacgtgatcctcaacgggcttatcgtcttgatcacgttcctacagcacacgcacccgaatctgccccgttacgacctttccgagtgggactggcttaggggagccctgtcgactgtggaccgcgattacgggatgttgaataaggtgttccataacgtgacggacacgcacttggtgcatcatttgttcacgaccatgccacattatcgcgccaaggaggcgaccgaggtgattaaaccgatattgggagactactataagtttgacgacactccgtttctcaaagcgttgtggaaggacatgggaaagtgtatttatgtggagtcggacgtgcctggcaagaacaagggagtttattggtacaataacgacatttgaagaggaaatggttgccggtgtctttaatgttttgtttagtttgtgttgtttcgttcaatgttatattgtgtcatgttcaaataaaataaaacggtccatgtattttgtggttgtattgtctattgtaattttacaattattctaagaaatatgtctaaaagaatttgggtcggcccaatactagtcgggtcaatccaaccccatgtcatccaacccgaatctgtgttgtaatttggccagggtggatcctctgtcccgaatcctcctgtgtcctctgtccgctatc

SEQ ID NO: 53781 - protein, 383 aa, Impatiens balsamina
MGEVGPTNRTKTKLDKQQESENRVPHEPPPFTLSDLKKAIPPHCFERSLVKSFYHVIHDIIILSFFYYVAANYIPMLPQNLRYVAWPIYWAIQGCVQLGILVLGHECGHHAFSDYQWVDDMVGFVLHSSQLIPYFSWKHSHRRHHSNTASIERDEVYPPAYKNDLPWFAKYLRNPVGRFLMIFGALLFGWPSYLLFNANGRLYDRFASHYDPQSPIFNNRERLQVIASDVGLVFAYFVLYKIALAKGFVWLICVYGVPYVILNGLIVLITFLQHTHPNLPRYDLSEWDWLRGALSTVDRDYGMLNKVFHNVTDTHLVHHLFTTMPHYRAKEATEVIKPILGDYYKFDDTPFLKALWKDMGKCIYVESDVPGKNKGVYWYNNDI

SEQ ID NO: 53782 - DNA, 1544 bp, Perilla frutescens
  CDS (156)..(1331)
cggcacgagctcctccacaaatctcagttacacacacatcgcccccctctctctctaaacactttcctctctctctatatatatgccaacctcatgtattccatttgttctaactgaaactcgctagtttattgattcaaaccctccccaaaagaatggccgtttcttccggtgcccgcctctcgaagagtggcgctgatggagaggttttcgacggccaacaacaatacgaaggaatcggaaaacgtgcggccgacaaattcgaccccgccgcgccgccgccgttcaagatcgccgacatccgagcggccataccggcgcattgctgggtgaagaatccgtggcgctcattgagctacgtcgtttgggacgtcgccgccgtcttcgcgctgctcgccgccgccgtttacatcaacagctgggcgttttggccggtttactggattgctcagggaaccatgttttgggcccttttcgttcttgggcatgattgtgggcacgggagtttttcggacaataccacgctgaataacgtggtgggacatgtgcttcactcatcaattcttgtaccgtatcatggatggcgaatcagccatagaactcaccaccaaaaccatggacatgtcgagaaggacgagtcgtgggtgccgttgcctgagaatttgtacaagaagttggatttttccaccaaattcttgagatacaaaatcccattccccatgtttgcataccctttatatttgtggtatagaagtccgggaaaaactggatctcacttcaacccttacagcgatttgtttaaaccaaatgagaggggtttgatagtgacttcaacaatgtgctgggctgcaatgggtgttttcctcctctatgcctccaccattgttggtccaaacatgatgttcaagctctacggcgtaccgtatttgatattcgtgatgtggttggacacggtaacatacttacaccaccacggttatgacaagaaactcccttggtaccgcagcaaggaatggagttatttacgaggaggattgacgaccgtagatcaagattatggattttttaataaaattcaccacgatattggcacccatgttatacaccatctattccctcagatcccacattaccacttagtggaggcgacaagggaggcgaaaagggtgctggggaattactacagggagcccagaaaatctgggccagttccactacacttaattcctgccttgttgaaaagtcttggtagagatcattatgttagtgataatggagacatagtttattatcaaacagatgatgagctctttccttccaaaaagatttagtgatggactcttgattgccaaattagatttaatttacagtagtcctttgtgccacaatattttgtttaggccaggaaatattgtgtgcacaaattaaataactctagtgagtttttttttggatcaagtgtttgttaccttttttttttttttttttcctgtgataaatgtaatgttccttaaataaacttatttttggttattttgttgacc

SEQ ID NO: 53783 - protein, 391 aa, Perilla frutescens
MAVSSGARLSKSGADGEVFDGQQQYEGIGKRAADKFDPAAPPPFKIADIRAAIPAHCWVKNPWRSLSYVVWDVAAVFALLAAAVYINSWAFWPVYWIAQGTMFWALFVLGHDCGHGSFSDNTTLNNVVGHVLHSSILVPYHGWRISHRTHHQNHGHVEKDESWVPLPENLYKKLDFSTKFLRYKIPFPMFAYPLYLWYRSPGKTGSHFNPYSDLFKPNERGLIVTSTMCWAAMGVFLLYASTIVGPNMMFKLYGVPYLIFVMWLDTVTYLHHHGYDKKLPWYRSKEWSYLRGGLTTVDQDYGFFNKIHHDIGTHVIHHLFPQIPHYHLVEATREAKRVLGNYYREPRKSGPVPLHLIPALLKSLGRDHYVSDNGDIVYYQTDDELFPSKKI

SEQ ID NO: 53784 - DNA, 1358 bp, Vernicia fordii
  CDS (39)..(1202)
gtgatagtcgaaacttatcttcctttagcttgaaagccatgaagcagcaacagtacaaagacaccccaattctaaatggcgttaatggttttcatgctaaagaagaagaagaagaagaggatttcgacttaagcaatcctcctccattcaatattggtcagatccgagctgccattcctaaacattgctgggtcaagaatccatggaggtctctcacttacgtttttagggatgttgttgtggtttttgctttagccgcagctgccttttacttcaattcttggctcttttggcctctttattggtttgctcagggaacaatgttctgggctatctttgttcttggacatgactgtggccatggaagcttttcaaataactcctcgttaaataatgtggtggggcatctcttgcattcctcaattcttgttccttaccatggatggagaattagccacaggactcaccatcaaaatcatggaaatgtggaaaaggatgaatcttgggttccgttacctgagaagatctataaagaaatggatttaagcactcggattttgagatactctgtgcctctccctatgtttgcattgcctttttatctgtggtggaggagcccagggaaagaaggttcacacttcaatccaaatagtgacttctttgcccctcatgagaggaaagctgtgttaacttcaaatttttgttttagcataatggctcttctgctactctattcatgctttgtttttggacctgttcaagtgttgaagttctatggtattccatatttggtttttgttatgtggttagactttgttacatacatgcatcaccatggacatgaggagaaacttccctggtaccgcggcaaggaatggagttatttgagaggaggtctacaaacagttgatcgtgattatggatggattaataatatccaccatgatattggcacacatgttatccatcatctttttcctcaaatcccacattatcatttaattgaagctacaaaagcagctaagccagttcttggaaagtactatagagaaccaaagaaatcagggccatttccatttcatttgttcagcaatctagtaagaagcatgagtgaagatcattatgtgagcgatattggagatattgtgttctatcagactgatcctgacatatacaaagttgataaaagcaagttgaactgatgattctttcttttttatgtttcctacataatttgattgtgtttcctccaactatgcggagagaaagggatgtattcagtatcagtaggaaataatttagaaagttatggcggttgataaataaagtaatgattttcattaaaaaaaaaaaaaaaa

SEQ ID NO: 53785 - protein, 387 aa, Vernicia fordii
MKQQQYKDTPILNGVNGFHAKEEEEEEDFDLSNPPPFNIGQIRAAIPKHCWVKNPWRSLTYVFRDVVVVFALAAAAFYFNSWLFWPLYWFAQGTMFWAIFVLGHDCGHGSFSNNSSLNNVVGHLLHSSILVPYHGWRISHRTHHQNHGNVEKDESWVPLPEKIYKEMDLSTRILRYSVPLPMFALPFYLWWRSPGKEGSHFNPNSDFFAPHERKAVLTSNFCFSIMALLLLYSCFVFGPVQVLKFYGIPYLVFVMWLDFVTYMHHHGHEEKLPWYRGKEWSYLRGGLQTVDRDYGWINNIHHDIGTHVIHHLFPQIPHYHLIEATKAAKPVLGKYYREPKKSGPFPFHLFSNLVRSMSEDHYVSDIGDIVFYQTDPDIYKVDKSKLN

SEQ ID NO: 53786 - DNA, 1203 bp, Mortierella isabellina
  CDS (1)..(1203)
atggcacctcccaacactatcgatgccggcttgacccagcgtcatatcaccaccacggccgccccaacctcggccaagcccgctttcgagcgcaactaccagctccccgagttcactatcaaggagatccgagagtgcatccctgcccactgctttgagcgctccggtcttcgtggtctctgccacgttgccattgatctgacctgggcctcgctcttgttcctggctgcaacccagatcgacaagttcgagaaccccttgatccgctatctggcctggcctgcgtactggatcatgcagggcattgtctgcaccggcatatgggtgctggcccacgagtgcggtcaccagtccttctcgacctccaagactctcaacaacaccgtcggctggatcctgcactcgatgctcttggtcccctaccactcctggagaatctcgcactcgaagcaccacaaggccactggccacatgaccaaggaccaggtctttgttcccaagacccgctcccaggttggtttgcctcccaaggagagcgctgctgctgccgttcaagaggaggacatgtccgtgcacctggatgaggaggcccctattgtgactttgttctggatggtgatccagttcctgttcggatggcctgcatacctgatcatgaacgcctctggtcaggactatggccgctggacctcgcacttccacacttactcgcccatctttgagccccgcaacttcttcgacattatcatctcggatctcggtgtgttggctgccctcggtgccctgatctacgcttccatgcagctgtcgctcttgaccgtgaccaagtactacatcatcccgtacctgtttgtcaacttttggttggtcctgattactttcttgcagcacaccgaccccaagctgccccattaccgtgagggtgcctggaacttccagcgtggagccctctgcaccgttgaccgctcgtttggcaagttcttggaccatatgttccacggcatcgtccatacccatgtggcccatcacttgttctcgcagatgccgttctaccatgctgaagaagctacctaccatctcaagaaactgctgggagagtactacgtttacgacccatccccgatcgtcgttgcggtctggaggtcgttccgcgagtgccgattcgtggaggatcatggagacgtggtctttttcaagaagtaa

SEQ ID NO: 53787 - protein, 400 aa, Mortierella isabellina
MAPPNTIDAGLTQRHITTTAAPTSAKPAFERNYQLPEFTIKEIRECIPAHCFERSGLRGLCHVAIDLTWASLLFLAATQIDKFENPLIRYLAWPAYWIMQGIVCTGIWVLAHECGHQSFSTSKTLNNTVGWILHSMLLVPYHSWRISHSKHHKATGHMTKDQVFVPKTRSQVGLPPKESAAAAVQEEDMSVHLDEEAPIVTLFWMVIQFLFGWPAYLIMNASGQDYGRWTSHFHTYSPIFEPRNFFDIIISDLGVLAALGALIYASMQLSLLTVTKYYIIPYLFVNFWLVLITFLQHTDPKLPHYREGAWNFQRGALCTVDRSFGKFLDHMFHGIVHTHVAHHLFSQMPFYHAEEATYHLKKLLGEYYVYDPSPIVVAVWRSFRECRFVEDHGDVVFFKK

SEQ ID NO: 53788 - DNA, 1958 bp, Ricinus communis
  CDS (345)..(1727)
ggtcaacttgaaaacttttcacaccccacaattccacagcaaaagccatcaaaccaatcacacacaatgagaggaaagccacactgaacccaaacttgtgcatgtacatgactcctcaaaccaattatttatatataaatataatacatgtacctctctacttggtaaaaagataggacaggcagcaataagcacaactttcaattgttggaagttgaggagagaaatctctgtgttatctcctcttcctcttatacagttctgagataagcttcaatttatatctctgtagctcaaaataacagaattgctgaattcttgcatttttagcttctgggttttcaatggctgctggttgggtattatcagaatgtggtttaaggcctctcccaagaatctactcacgacccagaattggttttacatcgaaaaccaccaatcttcttaagcttagagaattaccagattcaaaaagttacaatctttgttcttcttttaaggtctcaagttggtctaattctaaacaaagcaactgggcactaaatgttgctgttccagttaatgtgagtactgttagtggagaagacgatagagaaagagaggaatttaatggtattgttaatgtagatgaaggtaaaggtgaattctttgacgctggtgccccaccaccttttacattagctgatataagagcagctataccaaaacattgttgggttaagaatccatggagatctatgagctacgttttgagagatgttgttgtggtttttggattagctgctgttgctgcttactttaacaattgggttgcttggcctctttactggttttgtcaggggactatgttctgggctctctttgttcttggccacgattgtggtcatggaagtttctccaataatccaaagctgaatagtgtggttggtcatctgcttcattcttcaatccttgttccttatcatggatggagaatcagtcacagaacccatcatcaaaaccatggacatgttgagaatgatgaatcttggcatccattgtctgagaaaatcttcaaaagcttggataatgtcacaaagacattgaggttcagtttgcctttccccatgcttgcttatcctttctatctgtggagtagaagtcctggaaagaagggctctcattttcatccagacagtggtttgtttgtcccaaaggaaagaaaggatataattacctcaactgcctgttggactgcaatggcagcgttgcttgtttacttaaacttttcaatgggtcctgtccaaatgcttaaactctatggcattccctactggatctttgtcatgtggttggactttgtgacctacttgcaccaccatggtcacgaggataaacttccctggtatcgcggaaaggcatggagttatctaagaggagggcttacaacccttgatcgcgactacggatggatcaataacatccaccatgacataggaacccacgttattcatcatctcttccctcaaatcccacactaccacttagtcgaagcaactgaagcagctaagcctgtaatggggaaatactaccgggaaccaaagaaatctggacctcttccattgcacctgctaggaagtcttgtaagaagcatgaaagaggatcattatgtaagtgatactggagatgtcgtatactatcaaaaagatcctaagctgtctggaattggaggtgagaaaacagagtgaagcatgctgcaataagtttttacaagtaaagcctaccaaaccaaaagaattctttgtaaccagagatttaacttctgacaagtgacaagaactccatattgccttacaggcactggggatagccattgtagcctgccatgtattttgctttcacttcttatttgataagaggaattgcagatagataatgttagccagatatgttgtaatatgcgcgcaaaaaggctcacc

SEQ ID NO: 53789 - protein, 460 aa, Ricinus communis
MAAGWVLSECGLRPLPRIYSRPRIGFTSKTTNLLKLRELPDSKSYNLCSSFKVSSWSNSKQSNWALNVAVPVNVSTVSGEDDREREEFNGIVNVDEGKGEFFDAGAPPPFTLADIRAAIPKHCWVKNPWRSMSYVLRDVVVVFGLAAVAAYFNNWVAWPLYWFCQGTMFWALFVLGHDCGHGSFSNNPKLNSVVGHLLHSSILVPYHGWRISHRTHHQNHGHVENDESWHPLSEKIFKSLDNVTKTLRFSLPFPMLAYPFYLWSRSPGKKGSHFHPDSGLFVPKERKDIITSTACWTAMAALLVYLNFSMGPVQMLKLYGIPYWIFVMWLDFVTYLHHHGHEDKLPWYRGKAWSYLRGGLTTLDRDYGWINNIHHDIGTHVIHHLFPQIPHYHLVEATEAAKPVMGKYYREPKKSGPLPLHLLGSLVRSMKEDHYVSDTGDVVYYQKDPKLSGIGGEKTE

SEQ ID NO: 53790 - DNA, 1622 bp, Sesamum indicum
  CDS (5)..(1348)
taaaatggcgagttgggttttatcagaatgtggtctgaggccactcccgagggtctatcctaagccaagaactggccaccctttgttgaattccaatcccacaaagctgagattttcaagaacagatcttggaaatggttcttcattctgtttgtcgagtgggattcttagggagaaaaactgggctctgagggtgagtgctccgctgagagttctgcaagtggaagaagaagaagaaaataaggaaggggagagagtgataaatggcggagaagaatttgaccctggggcaccgcctccatttaagttatctgacattagggaagccattccgaagcattgttgggttaaggatccatggaggtctatgggctatgtggttagggatgtggctgtcgtttttggattggcggctgtggcagcctatttcaacaattgggttgtttggcctttgtattggtttgctcagagtactatgttctgggctctctttgtcttgggacatgattgtggtcatgggagcttttcaaatgatcccaagttgaatagtgtggttggtcatattctgcattcttctattctggttccataccatggatggagaattagtcacaggactcatcatcagaatcatgggcatgttgagaacgatgaatcttggcacccgttgtctgagaagatttacaagaatttggacactgctaccaagaaattgaggttcacattgcctttccctctgttggcatatcccatctatctttggagcagaagtcctgggaaacaaggatctcatttccacccagacagtgatttgtttgtcccaaacgaaaagaaagatgtgataacatcaacagtttgttggacggcaatgcttgcgttacttgtagggttgtcttttgttatcggtccggtccaattgctcaaactatacggcattccttacttgggaaatgtaatgtggcttgacttagtgacctacttacaccaccatggccatgaggacaagcttccttggtaccgcggaaaggaatggagttatttgagaggggggcttacgactcttgatcgtgattatggatggatcaataacatccaccacgatatagggactcatgtgatacatcacctcttccctcaaatcccacattatcatttgatagaagctactgaagctgctaagccagtactgggcaagtattacagggagcccaaaaaatcggctcctctcccattccacttactgggagatctcacacgaagcttgaagagggatcactatgtgagcgatgtgggtgacgttgtctattatcagacagatcctcagctgactggagctgagaaatcgtgatcttgataatatcaatggctgaaaagccaactctaagatctcgatacttggcaagtcatgactaactctctgttagctgttgcagacactggtatgagctcatataaccataattaactgcagggccttggattctttcaccaagagaattgaattttttcctcccgtgatggagtacaatatagttgttatagatcacaaacacttgacgcctatttgtgcaaggatgtaacgatgtcgcgatgtacttcgatattgaaggaaaattttctca

SEQ ID NO: 53791 - protein, 447 aa, Sesamum indicum
MASWVLSECGLRPLPRVYPKPRTGHPLLNSNPTKLRFSRTDLGNGSSFCLSSGILREKNWALRVSAPLRVLQVEEEEENKEGERVINGGEEFDPGAPPPFKLSDIREAIPKHCWVKDPWRSMGYVVRDVAVVFGLAAVAAYFNNWVVWPLYWFAQSTMFWALFVLGHDCGHGSFSNDPKLNSVVGHILHSSILVPYHGWRISHRTHHQNHGHVENDESWHPLSEKIYKNLDTATKKLRFTLPFPLLAYPIYLWSRSPGKQGSHFHPDSDLFVPNEKKDVITSTVCWTAMLALLVGLSFVIGPVQLLKLYGIPYLGNVMWLDLVTYLHHHGHEDKLPWYRGKEWSYLRGGLTTLDRDYGWINNIHHDIGTHVIHHLFPQIPHYHLIEATEAAKPVLGKYYREPKKSAPLPFHLLGDLTRSLKRDHYVSDVGDVVYYQTDPQLTGAEKS

SEQ ID NO: 53792 - DNA, 1323 bp, Phaseolus aureus
  CDS (9)..(1151)
tctaaaaaatgattcaagcacaaactctgcaacattttggtaatggggcaagggaaggagatcaaagttattttgatccaggtgctccaccaccctttaagattgcagatatcagagcagcaattcccaagcattgctgggagaaaagcacactcagatctctgagttatgttctcagggatgttttagtcgtcacagcattggcggcttcagcaatttccttcaatagctggttcttctggccactctattggcctgcacaaggcacaatgttttgggctctgtttgttcttggacatgattgcgggcatggaagtttttcaaacagttccaagttgaatagctttgtgggccacatcttgcactccttgatccttgtaccatacaatggatggagaatcagccacaggactcaccaccaaaaccacggccatgttgagaaggatgaatcctgggttccgttaacggagaaggtttacaagaatctagacgacatgacaagaatgctgagatactcttttccttttccaatctttgcatatcccttttatttgtggaacagaagcccagggaaagaaggttctcatttcaacccttacagcaacttgttctcccctggtgagagaaaaggcgtggtaacttcgaccctgtgttggggcatcgttctttctgtgcttctctatctttccctaacaataggtccaattttcatgctcaagctctatggggtaccctatttgatcttcgtcatgtggctcgatttcgtcacctacttgcatcatcatggttacacgcataaactaccttggtaccgtggccaggaatggagctatctaaggggtggtcttacaacagtagatcgtgactatggttggattaacaacgttcaccatgacattggcacccatgttatccatcaccttttccctcaaattccacattaccatttggtggaagcgactaaatcagcaaaatcagtgcttggaaagtattatcgtgagcctcagaaatctgggccattgccatttcatctattgaagtacttgctacaaagcataagtcaggatcacttcgttagcgacactggcgacattgtgtactatcagactgatcccaagctccaccaagattcttggaccaagtccaagtaaaaaagttttgatgctaccaaattcatctatttctccctaaaatatttgctatgtaactaagaacatatatgtgttacctactcaaatcaattgttaggtaacatgtataagctttcataaaagcacttacttggaaaagcatgctatgttagaaatgaatcagtttctcaac

SEQ ID NO: 53793 - protein, 380 aa, Phaseolus aureus
MIQAQTLQHFGNGAREGDQSYFDPGAPPPFKIADIRAAIPKHCWEKSTLRSLSYVLRDVLVVTALAASAISFNSWFFWPLYWPAQGTMFWALFVLGHDCGHGSFSNSSKLNSFVGHILHSLILVPYNGWRISHRTHHQNHGHVEKDESWVPLTEKVYKNLDDMTRMLRYSFPFPIFAYPFYLWNRSPGKEGSHFNPYSNLFSPGERKGVVTSTLCWGIVLSVLLYLSLTIGPIFMLKLYGVPYLIFVMWLDFVTYLHHHGYTHKLPWYRGQEWSYLRGGLTTVDRDYGWINNVHHDIGTHVIHHLFPQIPHYHLVEATKSAKSVLGKYYREPQKSGPLPFHLLKYLLQSISQDHFVSDTGDIVYYQTDPKLHQDSWTKSK

SEQ ID NO: 53794 - DNA, 1143 bp, Glycine max
  CDS (1)..(1143)
atggttaaagacacaaagcctttagcctatgctgccaataatggataccaacaaaagggttcttcttttgattttgatcctagcgctcctccaccgtttaagattgcagaaatcagagcttcaataccaaaacattgctgggtcaagaatccatggagatccctcagttatgttctcagggatgtgcttgtaattgctgcattggtggctgcagcaattcacttcgacaactggcttctctggctaatctattgccccattcaaggcacaatgttctgggctctctttgttcttggacatgattgtggccatggaagcttttcagatagccctttgctgaatagcctggtgggacacatcttgcattcctcaattcttgtgccataccatggatggagaattagccacagaactcaccatcaaaaccatggacacattgagaaggatgagtcatgggttccattaacagagaagatttacaagaatctagacagcatgacaagactcattagattcactgtgccatttccattgtttgtgtatccaatttatttgttttcaagaagccccggaaaggaaggctctcacttcaatccctacagcaatctgttcccacccagtgagagaaaaggaatagcaatatcaacactgtgttgggctaccatgttttctctgcttatctatctctcattcataactagtccacttctagtgctcaagctctatggaattccatattggatatttgttatgtggctggactttgtcacatacttgcatcaccatggtcaccaccagaaactgccttggtaccgcggcaaggaatggagttatttaagaggtggcctcaccactgtggatcgtgactatggttggatctataacattcaccatgacattggcacccatgttatccaccatcttttcccccaaattcctcattatcacctcgttgaagcgacacaagcagcaaaaccagttcttggagattactaccgtgagccagaaagatctgcgccattaccatttcatctaataaagtatttaattcagagtatgagacaagaccacttcgtaagtgacactggagatgttgtttattatcagactgattctctgctcctccactcgcaacgagactga

SEQ ID NO: 53795 - protein, 380 aa, Glycine max
MVKDTKPLAYAANNGYQQKGSSFDFDPSAPPPFKIAEIRASIPKHCWVKNPWRSLSYVLRDVLVIAALVAAAIHFDNWLLWLIYCPIQGTMFWALFVLGHDCGHGSFSDSPLLNSLVGHILHSSILVPYHGWRISHRTHHQNHGHIEKDESWVPLTEKIYKNLDSMTRLIRFTVPFPLFVYPIYLFSRSPGKEGSHFNPYSNLFPPSERKGIAISTLCWATMFSLLIYLSFITSPLLVLKLYGIPYWIFVMWLDFVTYLHHHGHHQKLPWYRGKEWSYLRGGLTTVDRDYGWIYNIHHDIGTHVIHHLFPQIPHYHLVEATQAAKPVLGDYYREPERSAPLPFHLIKYLIQSMRQDHFVSDTGDVVYYQTDSLLLHSQRD

SEQ ID NO: 53796 - DNA, 1140 bp, Nicotiana tabacum
  CDS (1)..(1140)
atggggtctctgggaataagtgagatttatgataagaacagctttaacgagatggagtttgaattcgacccgagtgcccctcctccgtttaggctggctgagatacgaaatgtcatccctaagcattgctgggttaaagatccacttaggtccttgagctatgttgtgagggacgtaatatttgttgctaccttgattggcatagcaattcacttggatagttggttattttacccactttactgggctatccaaggcaccatgttttgggcaatctttgttcttggacatgattgtggccatggcagcttttcagacagccagttgctaaataatgtggttggtcacatacttcattctgccattctggtaccctaccatggctggagaatcagccataaaactcaccatcagaaccatggaaatgtggagactgatgagtcttgggtgccgatgcctgaaaagctatacaacaaagtgggctattcaaccaagttcctaagatacaagatcccttttcccttgttagcatatccaatgtacctgatgaagagaagtccaggaaaatctggttctcatttcaacccatatagtgatttgttccaaccccatgagaggaagtatgtggtaacatcaactctgtgctggactgtcatggcagctctcctcctctatctctgcactgcctttggttctctccaaatgtttaagatttatggcgctccttacttgatttttgtaatgtggctggattttgttacctacttgcatcaccatggttatgagaagaagcttccctggtaccgcggcaaggaatggagttatcttagaggaggactaaccacagttgatagagactacggattgtttaacaacatacatcatgacattggaacacatgttatccaccatctatttcctcagataccacattatcacttgagagaagcgaccaaagcagcaaagccagtacttggcaagtattacagggaacccaagaaatcagggccaattccttttcacttggttaaggatttaacaaggagcatgaagcaggatcattatgttagcgattccggggagattgttttctatcagaccgatccacacatcttccgatctgctccaaaggatgaatga

SEQ ID NO: 53797 - protein, 379 aa, Nicotiana tabacum
MGSLGISEIYDKNSFNEMEFEFDPSAPPPFRLAEIRNVIPKHCWVKDPLRSLSYVVRDVIFVATLIGIAIHLDSWLFYPLYWAIQGTMFWAIFVLGHDCGHGSFSDSQLLNNVVGHILHSAILVPYHGWRISHKTHHQNHGNVETDESWVPMPEKLYNKVGYSTKFLRYKIPFPLLAYPMYLMKRSPGKSGSHFNPYSDLFQPHERKYVVTSTLCWTVMAALLLYLCTAFGSLQMFKIYGAPYLIFVMWLDFVTYLHHHGYEKKLPWYRGKEWSYLRGGLTTVDRDYGLFNNIHHDIGTHVIHHLFPQIPHYHLREATKAAKPVLGKYYREPKKSGPIPFHLVKDLTRSMKQDHYVSDSGEIVFYQTDPHIFRSAPKDE

SEQ ID NO: 53798 - DNA, 1167 bp, Oryza sativa
  CDS (1)..(1167)
atgggtgccggcggcaggatgacggagaaggagcgggaggagcagcagaagctgctcggccgcgccggcaatggcgcggccgtgcagcggtcgccgacggacaagccgccgttcacgctggggcagatcaagaaggccatcccgcctcactgcttccagcgctcggtgatcaagtccttctcctacgtggtccatgacctcgtgatcgtcgccgcgctgctctacttcgcgctggtcatgatccccgtgctgccgagcgggatggagttcgcggcatggccgctctactggatcgcgcagggctgcgtgctcaccggcgtgtgggtcatcgcgcacgagtgcggccaccatgccttctccgactactcggtgctcgacgacatcgtcggcctcgtgctgcactcgtcgctgctcgtcccctacttctcgtggaagtacagccaccggcgccaccactccaacaccgggtcgctggagcgcgacgaggtgttcgtcccgaagcagaagtcggcgatggcgtggtacaccccgtacgtgtaccacaacccgatcggccggctggtgcacatcttcgtgcagctcaccctcgggtggccgctgtacctggcgttcaacgtgtccggccgcccgtacccgcgcttcgcgtgccacttcgacccctacggcccgatctacaacgaccgggagcgcgtccagatcttcatctccgacgtcggcgtcgtgtccgcggggctcgccctgttcaagctgtcgtcggcgttcgggttctggtgggtggtgcgcgtctacggcgtgccgctgctgatcgtgaacgcgtggctggtgctcatcacctacctgcagcacacccacccggcgctgccgcactacgactcgagcgagtgggactggctccgcggcgcgctggccaccgtggaccgcgactacggcatcctcaacaaggtgttccacaacatcacggacacgcacgtcgcgcaccacctcttctccaccatgccgcactaccacgccatggaggccactaaggcgatccgccccatcctcggcgagtactaccagttcgacccgacgcccgtcgccaaggcgacatggcgcgaggccaaggagtgcatctacgtcgagcctgaggacaacaagggcgtcttctggtacaacaacaagttctaa

SEQ ID NO: 53799 - protein, 388 aa, Oryza sativa
MGAGGRMTEKEREEQQKLLGRAGNGAAVQRSPTDKPPFTLGQIKKAIPPHCFQRSVIKSFSYVVHDLVIVAALLYFALVMIPVLPSGMEFAAWPLYWIAQGCVLTGVWVIAHECGHHAFSDYSVLDDIVGLVLHSSLLVPYFSWKYSHRRHHSNTGSLERDEVFVPKQKSAMAWYTPYVYHNPIGRLVHIFVQLTLGWPLYLAFNVSGRPYPRFACHFDPYGPIYNDRERVQIFISDVGVVSAGLALFKLSSAFGFWWVVRVYGVPLLIVNAWLVLITYLQHTHPALPHYDSSEWDWLRGALATVDRDYGILNKVFHNITDTHVAHHLFSTMPHYHAMEATKAIRPILGEYYQFDPTPVAKATWREAKECIYVEPEDNKGVFWYNNKF

SEQ ID NO: 53800 - DNA, 1377 bp, Oryza sativa
  CDS (1)..(1377)
atggcacggctcgtcctctccgagtgctgcggcctcacgccgctccgcctgcgcgggcgcggcgccattgcgctgccggcgcctcccagcctcgccgcggggccgcgccgccccgtgtccgccgccgccgcggggggagccatccaccgcgagtgggcgctccgcgtctccgcccccacccgcctcacctccgtcgtcgaggaggataatagaggggaggaggtggtggaggaggaggccaggggttcgttggcggcggccgaggcggcggcgggggaggtaggaggggacggagacgggttcgaccccggggcgccgccgccgttcgggctcgcggagatccgcgcggccatccccaagcactgctgggtgaaggacccctggaggtccatgagctacgtgctgcgcgacgtcgtcgtggtgctcggcctcgccgccgccgccgcgcgcgtcgacagctggctcgtctggccgctctactgggccgcgcagggcaccatgttctgggcgctcttcgtgctgggtcacgactgtggccatgggagcttctcaagcaacgccaagttgaacagcgtggttggacacatactccactcctccatccttgtcccataccacggctggaggattagccacaggacgcaccaccagaaccacggtcatgtcgagaaagacgagtcctggcaaccgctgtctgagaggctgtacaatagcctggactatatgacgaagaaattgaggttcaccatgccgtttcccatgctggcattcccattatacttgtttgcaaggagtccagggaaaaaaggttcacacttcaacccaagcagtgatctgttccaaccaaatgagaagaaggatgtgataacatcaactgcatcctggctggcaatggttgggattcttgctggtctgacctttgtgatggggcccctcaaaatgttaaagctctatgctgttccatacgtgatatttgttatgtggcttgattttgtcacatatttgcaccatcatggccatgaggacaagcttccttggtaccgtggaaaggagtggagctatctgcgcggaggattgacaacacttgatcgggactacgggtggatcaacaacgtacaccatgacattggaacccatgtcattcatcatcttttcccacaaatcccacattaccatcttgttgaggcgactgaggcagcaaaaccagtgctgggaaaatactacaaagagccagagaaatcagctcccctcccattccacttacttggtgtgctagcaaagagcttaaacagcgaccactatgttagtgacaccggagacgtagtgtactaccaaactgacttgaaaactagttcttctgcacaaagctcggattga

SEQ ID NO: 53801 - protein, 458 aa, Oryza sativa
MARLVLSECCGLTPLRLRGRGAIALPAPPSLAAGPRRPVSAAAAGGAIHREWALRVSAPTRLTSVVEEDNRGEEVVEEEARGSLAAAEAAAGEVGGDGDGFDPGAPPPFGLAEIRAAIPKHCWVKDPWRSMSYVLRDVVVVLGLAAAAARVDSWLVWPLYWAAQGTMFWALFVLGHDCGHGSFSSNAKLNSVVGHILHSSILVPYHGWRISHRTHHQNHGHVEKDESWQPLSERLYNSLDYMTKKLRFTMPFPMLAFPLYLFARSPGKKGSHFNPSSDLFQPNEKKDVITSTASWLAMVGILAGLTFVMGPLKMLKLYAVPYVIFVMWLDFVTYLHHHGHEDKLPWYRGKEWSYLRGGLTTLDRDYGWINNVHHDIGTHVIHHLFPQIPHYHLVEATEAAKPVLGKYYKEPEKSAPLPFHLLGVLAKSLNSDHYVSDTGDVVYYQTDLKTSSSAQSSD

SEQ ID NO: 53802 - DNA, 1173 bp, Oryza sativa
  CDS (1)..(1173)
atgggtaccagcagccggccgacgacggtgaaggaggggaagaaactagaggcgccccgccgtgccggcagccatgcagccgtgaagcgctctccggtggacaagccgccgttcacgctgggcgacatcagaaaggccatcccaccgcactgcttccaccgctccgtgatcaagtcattctcctacctgctccacgaccttgccattgccgcgggcctcctctactttgctctggtcgtcatccctgccctcccaggcgtcctccgcctcgtcgcctggccgttctactgggccgcgcaggggtgcttcctgttcggggtgtggatcatcgcgcacgagtgcgggcaccacgcgttctcgggccacgcactcctcgacgacaccctcggcctggtcctgcactcatggctcctagcgccatacttctcgtggaaatacacccaccaacggcaccactccaacaccagctcacaggagcgcgacgaggtgttcgtccccaggttcaagtccgacctgccgtggtactccccatacgtgtacaagtacaacaaccccgtcgctcggctgctgctcctcgtcgtgcagctcaccgtcgggtggccgatgtatttggtgttcaacacctggggtcgccagtacccaaggttcgccagccacttcgatccctctgggcccatctacaaggggcgggagcgcgtcttcatcgccatctcggacatcggcatgctggccgtgtcgctcgcgctgtacaggcttgcggagggttacgggttttggtgggtggtgcgcgtctacggcgtgccgctgcttgtcgtcaacgcgtggcttgtggtcgtcacgtacctgcatcacactcaccgggcgatcccacactacgactccagcgagtgggactggttgcgcggggcgctcgccaccgtggaccgcgactacagcttccttaaccgagtgtttcacaacatcacggacacacacgtcgtgcaccacctgttccctaccatcccgcactaccacgctgtggaggcgaccaaggcgatccgccctatcctcggcgagtactaccagttcgatcccacacccatcgtcaaggcgatatggcgcgaggctaaggagtgcatctacatccagtccgaggaccacaagggcgtcttctggtacagcaacaagttctag

SEQ ID NO: 53803 - protein, 390 aa, Oryza sativa
MGTSSRPTTVKEGKKLEAPRRAGSHAAVKRSPVDKPPFTLGDIRKAIPPHCFHRSVIKSFSYLLHDLAIAAGLLYFALVVIPALPGVLRLVAWPFYWAAQGCFLFGVWIIAHECGHHAFSGHALLDDTLGLVLHSWLLAPYFSWKYTHQRHHSNTSSQERDEVFVPRFKSDLPWYSPYVYKYNNPVARLLLLVVQLTVGWPMYLVFNTWGRQYPRFASHFDPSGPIYKGRERVFIAISDIGMLAVSLALYRLAEGYGFWWVVRVYGVPLLVVNAWLVVVTYLHHTHRAIPHYDSSEWDWLRGALATVDRDYSFLNRVFHNITDTHVVHHLFPTIPHYHAVEATKAIRPILGEYYQFDPTPIVKAIWREAKECIYIQSEDHKGVFWYSNKF

SEQ ID NO: 53804 - DNA, 1089 bp, Oryza sativa
  CDS (1)..(1089)
atgcagcgctcaccggtggacaaaccgccgttcacgctgggggacataaagaaggccatcccgccgcactgcttccaccgctccgtgatcaagtcattctcctacctgctccacgaccttgccatcgccgctggcctcctctactttgctctggtcggcatccctgccctcccaagcatcctccgcctcgtcgcctggccgctctactgggccgcgcagggcagtgtactcaccggcgtgtgggtcatcgggcacgagtgtggccaccacgccttctcggactacttgctcctcgacaacctcgtgggcctagtgctccactcggcgcttctcacgcccttcttctcgtggaagtacagccaccggcggcaccacgccaacaccggctccatggagaaagacgaggtgtacgtcgcgaagaagaagtccgcgctgccgtggtacaccccgtacgtgttcggcaaccccgtcgggcggctggtgtacatcgccctgcagctcaccctcgcgtggccactctacctcgcgttcaacctgtccgggcagccgtacccacgcctcgtcacctgccactacgacccctacagcccgctgttcagcgaccaggagcgcgtccaagtcctcgtctccgacgccgccatcctggccgtgctgctcgcgctgcacaggctgacggcggcgtacgggctctggtgggtggtgcgcgtgtacggcgtgccggtgatgatcgtgggcgcgctgttcgtgctcatcacgtacctgcaccacacccaccgggcgctcccgcactacgactccagcgagtgggagtggctgcgtggctcgctcgccaccgtcgaccgcgactacggcgtcctcaaccgcgtgctgcacaacgtcacggacacgcacgtcctccaccacctcttccccagcatgccacactaccacgccatggaggccaccagggcagcgaggcccgtcctcggtgagtactacaagtttgaccgcacgcccatcatcgaggcaacatggcgtgaggccaaggagtgcatgtacgttgagcccagggagcgcgatggtatctactggtacaacaacaagttttag

SEQ ID NO: 53805 - protein, 362 aa, Oryza sativa
MQRSPVDKPPFTLGDIKKAIPPHCFHRSVIKSFSYLLHDLAIAAGLLYFALVGIPALPSILRLVAWPLYWAAQGSVLTGVWVIGHECGHHAFSDYLLLDNLVGLVLHSALLTPFFSWKYSHRRHHANTGSMEKDEVYVAKKKSALPWYTPYVFGNPVGRLVYIALQLTLAWPLYLAFNLSGQPYPRLVTCHYDPYSPLFSDQERVQVLVSDAAILAVLLALHRLTAAYGLWWVVRVYGVPVMIVGALFVLITYLHHTHRALPHYDSSEWEWLRGSLATVDRDYGVLNRVLHNVTDTHVLHHLFPSMPHYHAMEATRAARPVLGEYYKFDRTPIIEATWREAKECMYVEPRERDGIYWYNNKF

SEQ ID NO: 53806 - DNA, 1158 bp, Oryza sativa
  CDS (1)..(1158)
atggcggcgtcggcgacccaggaggcggactgcaaggcttccgaggacgcccgtctcttcttcgacgccgccaagcccccgcccttccgcatcggcgacgtccgcgccgccatccccgcccactgctggcgcaagacccccctccgctccctctcctacgtcgcccgcgacctcctcatcgtcgccgccctcttcgccgcagccgccactcggattgacgtctccgtcgcctgggcggcctggccgctctactgggcggcgcagggcaccatgttctgggcgctcttcgtcctcggccacgactgtgggcacgggagcttctccgacagcgccatgctcaacaacgtcgtcggccacctcctgcactccttcatcctcgtcccctaccatggatggagaatcagccacagaacacaccatcagaaccacggtcatatcgagaaggacgagtcctggcacccgatcaccgagaaattgtaccggaagctggagacgcgcaccaagaaactgcgctttacattaccatttccattgcttgccttccctgtctacctctggtacagaagtccgggcaagaccggatctcactttctgccgagcagcgatctgttcagccccaaggagaagagtgacgtgattgtctccaccacctgctggtgcatcatgatttcgttgctcgtcgccttggcgtgcgtgtttgggtctgttccggtgctcatgctatacggtgtcccatatcttgtattcgtgatgtggcttgatttggtgacttatctgcaccaccacggtcacaatgaccttccctggtatcgtggagaggaatggagctacctccgcggtggcctgacaacggtggatcgggactacgggtggatcaacaacatccaccatgacattggcacccatgtcatccaccaccttttcccccaaattcctcattatcacctcgtagaagcaacaaaggcagcaaggccagtgctgggcagatactacagggagccagagaagtcaggtccgctgccacttcacctgtttggcgttctgctgaggagcttgagagttgatcactttgtcagcgacgtcggggatgttgtttactaccaaacagatcacagcttgaacggcactgactgggccgaagatgctaagcacaagtga

SEQ ID NO: 53807 - protein, 385 aa, Oryza sativa
MAASATQEADCKASEDARLFFDAAKPPPFRIGDVRAAIPAHCWRKTPLRSLSYVARDLLIVAALFAAAATRIDVSVAWAAWPLYWAAQGTMFWALFVLGHDCGHGSFSDSAMLNNVVGHLLHSFILVPYHGWRISHRTHHQNHGHIEKDESWHPITEKLYRKLETRTKKLRFTLPFPLLAFPVYLWYRSPGKTGSHFLPSSDLFSPKEKSDVIVSTTCWCIMISLLVALACVFGSVPVLMLYGVPYLVFVMWLDLVTYLHHHGHNDLPWYRGEEWSYLRGGLTTVDRDYGWINNIHHDIGTHVIHHLFPQIPHYHLVEATKAARPVLGRYYREPEKSGPLPLHLFGVLLRSLRVDHFVSDVGDVVYYQTDHSLNGTDWAEDAKHK

SEQ ID NO: 53808 - DNA, 1152 bp, Brassica napus
  CDS (1)..(1152)
atggttgttgttatggaccaacgcaccaatgtgaacggagatgccggtgcccggaaggaagaagggtttgatccgagcgcacaaccgccgtttaagatcggggacataagggctgcgattcctaagcattgttgggtgaaaagtcctttgagatctatgagctacgtagccagagacatttgtgccgtcgcggctttggccattgccgccgtgtattttgatagctggttcctctgtcctctctattgggtcgcccaaggaacccttttctgggccatcttcgtcctcggccacgactgtggacatgggagtttctcagacattcctctgctgaatagtgtggttggccatattcttcattccttcatcctcgttccttaccatggttggagaataagccatcggacacaccaccagaaccatggccatgttgaaaacgacgagtcttgggttccgttaccagaaaggttatacaagaatttaccccacagtactcggatgctcagatacactgtccctctgcccatgctcgcttacccgatctatctgtggtacagaagtcctggaaaagaagggtcacattttaacccatacagtggtttatttgctccaagcgagagaaagcttattgcaacttcgactacttgctggtccataatgttggcaattcttatctgtctttccttcctcgttggtccagtcacagttctcaaagtatacggtgttccttacattatctttgtgatgtggttggacgctgtcacttacttgcatcaccatggtcatgatgagaagttgccttggtacagaggcaaggaatggagttacttacgtggaggattaacaactattgatagagattacggaattttcaacaacattcatcacgacattggaactcacgtgatccatcatcttttcccacaaatccctcactatcacttggtcgatgctacaaaagcagctaaacatgtgttgggaagatactacagagaaccaaagacgtcaggagcaataccgatccacttggtggagagtttggtagcaagtattaagaaagatcattacgtcagtgacactggtgacattgtcttctacgagactgatccagatctctacgtttatgcttctgtcaaatcgaaaatcaattaa

SEQ ID NO: 53809 - protein, 383 aa, Brassica napus
MVVVMDQRTNVNGDAGARKEEGFDPSAQPPFKIGDIRAAIPKHCWVKSPLRSMSYVARDICAVAALAIAAVYFDSWFLCPLYWVAQGTLFWAIFVLGHDCGHGSFSDIPLLNSVVGHILHSFILVPYHGWRISHRTHHQNHGHVENDESWVPLPERLYKNLPHSTRMLRYTVPLPMLAYPIYLWYRSPGKEGSHFNPYSGLFAPSERKLIATSTTCWSIMLAILICLSFLVGPVTVLKVYGVPYIIFVMWLDAVTYLHHHGHDEKLPWYRGKEWSYLRGGLTTIDRDYGIFNNIHHDIGTHVIHHLFPQIPHYHLVDATKAAKHVLGRYYREPKTSGAIPIHLVESLVASIKKDHYVSDTGDIVFYETDPDLYVYASVKSKIN

SEQ ID NO: 53810 - DNA, 1152 bp, Brassica napus
  CDS (1)..(1152)
atggttgttgctatggaccagcgcagcaatgttaacggagattccggtgcccggaaggaagaagggtttgatccaagcgaacaaccaccgtttaagatcggagatatcagggcggcgattcctaagcattgttgggtgaagagtcctttgagatctatgagctacgtcgccagagacattttcgccgtcgcggctctggccatggccgccgtgtattttgatagctggttcctctggccactctactgggttgcccaaggaacccttttctgggccatcttcgttcttggccacgactgtggacatgggagtttttcagacattcctctgctgaacagtgtggttggtcacattcttcattcattcatcctcgttccttaccatggttggagaataagccatcggacacaccaccagaaccatggccatgttgaaaacgacgagtcttgggttccgttgccagaaaagttgtacaagaacttgccccatagtactcggatgctcagatacactgttcctctgcccatgctcgcttacccgatctatctgtggtacagaagtcctggaaaagaagggtcacattttaacccatacagtagtttatttgctccaagcgagaggaagcttattgcaacttcaacaacttgctggtccataatgttggccactcttgtttatctatcgttcctcgttggtccagtcacagttctcaaagtctatggtgttccttacattatctttgtaatgtggttggacgctgtcacgtacttgcatcatcatggtcacgatgagaagttgccttggtacagaggcaaggaatggagttatttacgtggaggattaacaactattgatagagattacggaatcttcaacaacatccatcacgacattggaactcacgtgatccatcatcttttcccacaaatccctcactatcacttggtcgatgcgacgagagcagctaaacatgtgttaggaagatactacagagagccgaagacgtcaggagcaataccgattcacttggtggagagtttggtcgcaagtattaaaaaagatcattacgtcagtgacactggtgatattgtcttctacgagacagatccagatctctacgtttatgcttcggacaaatctaaaatcaattaa

SEQ ID NO: 53811 - protein, 383 aa, Brassica napus
MVVAMDQRSNVNGDSGARKEEGFDPSEQPPFKIGDIRAAIPKHCWVKSPLRSMSYVARDIFAVAALAMAAVYFDSWFLWPLYWVAQGTLFWAIFVLGHDCGHGSFSDIPLLNSVVGHILHSFILVPYHGWRISHRTHHQNHGHVENDESWVPLPEKLYKNLPHSTRMLRYTVPLPMLAYPIYLWYRSPGKEGSHFNPYSSLFAPSERKLIATSTTCWSIMLATLVYLSFLVGPVTVLKVYGVPYIIFVMWLDAVTYLHHHGHDEKLPWYRGKEWSYLRGGLTTIDRDYGIFNNIHHDIGTHVIHHLFPQIPHYHLVDATRAAKHVLGRYYREPKTSGAIPIHLVESLVASIKKDHYVSDTGDIVFYETDPDLYVYASDKSKIN

SEQ ID NO: 53812 - DNA, 1146 bp, Glycine max
  CDS (1)..(1146)
atggttcaagcacagcctctacaacatgttggtaatggtgcagggaaagaagatctagcttataattttgatccaagtgctccaccacccttcaagattgcagatatcagagcagcaattccaaagcattgctgggagaagaacacattgagatctctgagttacgttctgagggatgtgttgatagtttctgcattggtagctgcagcaattggcttcaatagctggctcttctggccaccctattggtctgcacaaggcacaatgttttgggcactttttgttcttggacatgattgtggtcatggaagtttttccaacagtcctatgttgaacagcattgtgggccacatcttgcactcttcaatccttgtaccataccatggatggagaattagccacaggactcaccatcagaaccatggccatgttgagaaggatgaatcatgggttccgctttcagagaaagtttacaagaatctagacaacatgacaagaatgatgagattcactcttcctttccccatctttgcataccccttttatttgtggagcagaagcccaggaaaagaaggttctcatttcaacccttacagcaacttgttctcccctggtgagagaagagatgtgataacttcaactctttgttggggcatcatgctttctctgcttctctatctttccctcacattggatccactttttatgttcaagctttatggggttccttatttgatcttcgtcgtgtggctggatttcgtcacatacttgcatcatcatggttacaagcagaaactaccttggtaccgtggccaggaatggacttatctaaggggtggtcttacaaccgtagatcgtgactatggttggatcaacaacattcaccatgacattggcacccatgtcatccatcaccttttccctcagattccacattatcatttggttgaagcgactaaagcagctaaggcagtgctaggaaagtattatcgtgagcctcagaaatcagggccattgccacttcatcttatcaagtacttgctacacagcataagtcaggatcacttcgttagtgactatggtgacattgtgtactaccaaactgattctcagttccacaaagattcttggaccaagtccaactaa

SEQ ID NO: 53813 - protein, 381 aa, Glycine max
MVQAQPLQHVGNGAGKEDLAYNFDPSAPPPFKIADIRAAIPKHCWEKNTLRSLSYVLRDVLIVSALVAAAIGFNSWLFWPPYWSAQGTMFWALFVLGHDCGHGSFSNSPMLNSIVGHILHSSILVPYHGWRISHRTHHQNHGHVEKDESWVPLSEKVYKNLDNMTRMMRFTLPFPIFAYPFYLWSRSPGKEGSHFNPYSNLFSPGERRDVITSTLCWGIMLSLLLYLSLTLDPLFMFKLYGVPYLIFVVWLDFVTYLHHHGYKQKLPWYRGQEWTYLRGGLTTVDRDYGWINNIHHDIGTHVIHHLFPQIPHYHLVEATKAAKAVLGKYYREPQKSGPLPLHLIKYLLHSISQDHFVSDYGDIVYYQTDSQFHKDSWTKSN

SEQ ID NO: 53814 - DNA, 1152 bp, Triticum aestivum
  CDS (1)..(1152)
atggcccccgcaatgaggccggagcaggaggcgagctgcaaggccaccgaggaccaccgctccgagttcgacgccgccaagccgccgcccttccgcatcggcgacgtccgcgccgccgtgccggcccactgctggcgcaagagccccctgcgctccctctcctacgtcgcccgcgacgtcgttgtcgtggcggcgctggccgccgccgcgtggcgggccgacagctgggccctctggccgctctactgggccgtccagggcaccatgttctgggcgctcttcgtcctcggacacgactgtggtcacgggagcttctcggacagcggcacgctcaacagcgtcgtcggccacctgctgcacacatttattctcgtcccgtacaatggctggaggatcagccacagaacgcaccatcagaaccatggccacatcgaaaaggacgagtcatggcacccgatcactgagaaggtgtaccagaaattggaaccacggacaaagacactgcgcttctcagtaccgttcccactgctggctttccctgtttacctctggtacagaagcccgggcaaggagggctcacacttcaatccgagcagcgatctgtttactcccaaggagaggcgtgatgtgatcatctccaccacctgctggttcacgatgattgcgctgctcatcggcatggcgtgtgtctttggcctggtaccggtgctcaagctgtacggggttccatatattgtgaatgtcatgtggcttgatttggtgacgtatcttcaccaccatggtcaccaggacctcccttggtaccgcggcgaggaatggagctacctccgtggtggcctgacgaccgtggaccgggactatggatggatcaacaacatccaccatgacattggcacccatgtcatccaccacctcttcccccaaatacctcattaccacctagtagaagcaaccaaggcagcaaggccagtactgggcagatactaccgggagccggagaagtcaggcccgctcccaatgtacctcatcaccgtcctcctcaagagcttgagagtcgatcactttgtcagcgacgtgggagatgtcgtcttctaccaaaccgaccccagcttgagcggcgacaagtggaccggaaccgacaagcagaagtga

SEQ ID NO: 53815 - protein, 383 aa, Triticum aestivum
MAPAMRPEQEASCKATEDHRSEFDAAKPPPFRIGDVRAAVPAHCWRKSPLRSLSYVARDVVVVAALAAAAWRADSWALWPLYWAVQGTMFWALFVLGHDCGHGSFSDSGTLNSVVGHLLHTFILVPYNGWRISHRTHHQNHGHIEKDESWHPITEKVYQKLEPRTKTLRFSVPFPLLAFPVYLWYRSPGKEGSHFNPSSDLFTPKERRDVIISTTCWFTMIALLIGMACVFGLVPVLKLYGVPYIVNVMWLDLVTYLHHHGHQDLPWYRGEEWSYLRGGLTTVDRDYGWINNIHHDIGTHVIHHLFPQIPHYHLVEATKAARPVLGRYYREPEKSGPLPMYLITVLLKSLRVDHFVSDVGDVVFYQTDPSLSGDKWTGTDKQK

SEQ ID NO: 53816 - DNA, 1179 bp, Zea mays
  CDS (1)..(1179)
atgggtgccggaggcaggatgaccgagaaggagcgggagaagcatgagcaggagcaggtcgcccgtgctaccggcggtggcgcggcagtgcagcggtcgccggtggagaagccgccgttcacgttggggcagatcaagaaggcgatcccgccgcactgcttcgagcgctccgtgctgaggtccttctcgtacgtggcccacgacctgtcgctcgccgcggcgctcctctacctcgcggtggccgtgataccggcgctaccctgcccgctccgctacgcggcctggccgctgtactgggtggcccaggggtgcgtgtgcacgggcgtgtgggtgatcgcgcacgagtgcggccaccacgccttctccgaccacgcgctcctggacgacgccgtcggcctggcgctgcactcggcgctgctggtgccctacttctcgtggaagtacagccaccggcgccaccactccaacacggggtccctggagcgcgacgaggtgttcgtgccgaggaccaaggaggcgctgccgtggtacgccccgtacgtgcacggcagccccgcgggccggctggcgcacgtcgccgtgcagctcaccctgggctggccgctgtacctggccaccaacgcgtcggggcgcccgtacccgcgcttcgcctgccacttcgacccctacggcccgatctacggcgaccgggagcgcgcccagatcttcgtctcggacgccggcgtcgcggccgtggcgttcgggctgtacaagctggcggcggcgttcgggctctggtgggtggtgcgcgtgtacgccgtgccgctgctgatcgtcaacgcgtggctggtgctcatcacgtacctgcagcacacccacccggcgctgccccactacgactcgggcgagtgggactggctgcgcggcgcgctcgccaccgtcgaccgagactacggcgtcctcaaccgcgtgttccaccacatcacggacacgcacgtcgcgcaccacctcttctccaccatgccgcactaccacgccgtggaggccaccagggcgatcaggcccgtcctcggcgagtactaccagttcgacccgacccctgtcgccaaggccacctggcgcgaggccagggagtgcatctacgtcgagcctgagaaccgcaaccgcaagggcgtcttctggtacaacagcaagttctag

SEQ ID NO: 53817 - protein, 392 aa, Zea mays
MGAGGRMTEKEREKHEQEQVARATGGGAAVQRSPVEKPPFTLGQIKKAIPPHCFERSVLRSFSYVAHDLSLAAALLYLAVAVIPALPCPLRYAAWPLYWVAQGCVCTGVWVIAHECGHHAFSDHALLDDAVGLALHSALLVPYFSWKYSHRRHHSNTGSLERDEVFVPRTKEALPWYAPYVHGSPAGRLAHVAVQLTLGWPLYLATNASGRPYPRFACHFDPYGPIYGDRERAQIFVSDAGVAAVAFGLYKLAAAFGLWWVVRVYAVPLLIVNAWLVLITYLQHTHPALPHYDSGEWDWLRGALATVDRDYGVLNRVFHHITDTHVAHHLFSTMPHYHAVEATRAIRPVLGEYYQFDPTPVAKATWREARECIYVEPENRNRKGVFWYNSKF

SEQ ID NO: 53818 - DNA, 1362 bp, Glycine max
  CDS (1)..(1362)
atggcaacctgggttttatcagaatgtggcttaaggcctcttccaccagtgtttccacggtcaacaagacccatttcgtgccaaaaaccttcaaagtctagatttttaagcacaaacaagggtgtgccagatctgaatctccaagcaagagggttaacatgctgtagttttagggatagaaagtgggaattgggagtgagtgctccactgaaatttgccaccaatgagggagaggaagaagagagaaccaatggggctaataatggggttggtgaggaagtttcagaatttgaccctagtgcaccaccacccttcaaattggcagatattagagctgccattcctaaacactgttgggtgaaggacccttggaagtccatgagttatgttgttagagatgtcattgtggtttttgggttggctgctgctgcagcttatctcaacaattgggttgtttggcctctctattgggctgctcagggaaccatgttctgggccctctttgttcttggtcatgattgtggtcatggaagcttttcaaacaatcccaagttgaacagtgttgctggccacttgctgcattcatcaattctagtaccttatcatggatggagaatcagtcatagaacacatcatcaaaaccatggccatgtcgaaaatgatgaatcttggcacccattgccagagaaaattttcaagagcttggataatgtaacacgcattttaagatttactctacctttcccattgcttgcatatcctatctacctgtggagcaggagtcccgggaagactggttctcactttaatccagacagtgacttgtttgttcccagtgagagaaaagatgttattacttcaacaatttgttggacagctatggctgctttgcttgttggtctgggatttgtgatgggtccagttcaattgcttaagctttatggcattccctatgcgatttttgttatgtggttggatttggtgacttatttgcatcaccatggccatgaagacaaattaccttggtatcgtggagaggaatggagctaccttaggggtggccttacaactattgatcgtgactacggatggatcaataacacccaccacgacattggaacccatgtcattcatcacctctttcctcaaataccacactatcacttaatagaagcaactgaagcagctaagccagttcttggtcaatactaccgcgaaccaaagaagtctagtcctcttccaatttacctcattggagaattgttaagaagcatgaagaaagaccattttgtcagtgacagtggcgatattgtatactatcaaacagaccctacacttagtagctcttccacatcacagtaa

SEQ ID NO: 53819 - protein, 453 aa, Glycine max
MATWVLSECGLRPLPPVFPRSTRPISCQKPSKSRFLSTNKGVPDLNLQARGLTCCSFRDRKWELGVSAPLKFATNEGEEEERTNGANNGVGEEVSEFDPSAPPPFKLADIRAAIPKHCWVKDPWKSMSYVVRDVIVVFGLAAAAAYLNNWVVWPLYWAAQGTMFWALFVLGHDCGHGSFSNNPKLNSVAGHLLHSSILVPYHGWRISHRTHHQNHGHVENDESWHPLPEKIFKSLDNVTRILRFTLPFPLLAYPIYLWSRSPGKTGSHFNPDSDLFVPSERKDVITSTICWTAMAALLVGLGFVMGPVQLLKLYGIPYAIFVMWLDLVTYLHHHGHEDKLPWYRGEEWSYLRGGLTTIDRDYGWINNTHHDIGTHVIHHLFPQIPHYHLIEATEAAKPVLGQYYREPKKSSPLPIYLIGELLRSMKKDHFVSDSGDIVYYQTDPTLSSSSTSQ

SEQ ID NO: 53820 - DNA, 1146 bp, Triticum aestivum
  CDS (1)..(1146)
atgggcgccgtggcgaggagggcgcccgagcaggagcaaagctgcaaggccacggaggacttcgacgccgccaagccgccgcccttccgcatcggcgacgtgcgcgccgccgtgcccgcccactgctggcacaagagcccactccggtccctctcctacgtcgcccgcgacgtcgccgtcgtggccgcgctggccgtggccgcatggtggctcaacagctgggccgtgtggccgctctactgggcagcgcagggcaccatgttctgggcgctcttcgtcctcggccacgactgtggtcacgggagcttctcggacagcgggacgctcaacagcgtcgtcggccacctgctgcacaccttcatccttgtcccatacaacggatggaggatcagccacaggacgcaccatcagaaccatggccacatcgacaaggacgagtcatggcacccgatcaccgagaatgtgtacaaggagatggagccaagcaccaagaagctacgcttctcgctgccgtacccgctcctggctttccctgtctacctctggtacagaagcccgggcaagaacggctcgcatttcaacccaagcagcgatttgttcagccccagggagaggcttgacgttatcgtctccaccacttgctggttcacgatgatcgcgctgctcatcgccatggcgtgtgcgtttgggccggtgccggtgctcaagctctacggggttccatatgctgtgtttgtgatgtggctcgatttggtgacgtaccttcaccaccatggtcaccaggacctcccttggtatcgcggcgaggaatggagctacctccgtggtggcctaacgaccgtggaccgggactatggatggatcaacaacatccaccatgacattggcactcatgtcatccaccacctcttccctcaaatacctcactaccacctagtagaagcaaccaaggcagcaaggccagtactgggaagatattaccgcgagccagagaagtcaggtccactgccacttcacctcttccatgtcctcctcaggagcttgagagtcgatcacttcgtaagcgatgttggagatgttgtcttctaccaaactgacccaagcttgaatggtgataactgggcgaaagatggcaagcacaagtga

SEQ ID NO: 53821 - protein, 381 aa, Triticum aestivum
MGAVARRAPEQEQSCKATEDFDAAKPPPFRIGDVRAAVPAHCWHKSPLRSLSYVARDVAVVAALAVAAWWLNSWAVWPLYWAAQGTMFWALFVLGHDCGHGSFSDSGTLNSVVGHLLHTFILVPYNGWRISHRTHHQNHGHIDKDESWHPITENVYKEMEPSTKKLRFSLPYPLLAFPVYLWYRSPGKNGSHFNPSSDLFSPRERLDVIVSTTCWFTMIALLIAMACAFGPVPVLKLYGVPYAVFVMWLDLVTYLHHHGHQDLPWYRGEEWSYLRGGLTTVDRDYGWINNIHHDIGTHVIHHLFPQIPHYHLVEATKAARPVLGRYYREPEKSGPLPLHLFHVLLRSLRVDHFVSDVGDVVFYQTDPSLNGDNWAKDGKHK

SEQ ID NO: 53822 - DNA, 1164 bp, Hordeum vulgare
  CDS (1)..(1164)
atgggtgccggcggcaggatgaccgagaaggagcgggagaagcaggagcagctcggccgcgccggcggcggcgcagccttccagcgctcgccgacggacaagccgccgttcacgctcggtcagatcaagaaggcgatcccgcctcactgcttccagcgctccatcatcaagtccttctcctacgtggttcatgacctggtcatcatcgccgccctgctgtacgccgctctggtctggatccccaccctccctaccgtgttgcagctgggcgcgtggccgctctactggatcgttcagggctgcgtcatgaccggcgtctgggtcatcgcgcacgagtgcggccaccatgccttctctgactactcgctgctcgacgacaccgtcggcctggtgctccactcgtggctgctcgtcccatacttctcgtggaagtacagccaccgtcgccaccactccaacaccgggtcgctggagcgcgacgaggtgtttgtccccaagcagaaggaggcgctggcatggtacactccctacatctacaacaaccccatcggccgtctggtgcacatcgtggtgcagctcaccctcgggtggccgctgtacctggcgctcaacgcctcaggccgtccgtacccgcgcttcgcctgccacttcgacccctacggcccgatctacaacgaccgggagcgagcccagattttcatctcggatgtcggcgtgttggccgtctccttggccctgctcaagcttgtgtcgtcgtttgggttctggtgggtggtgcgggtctacggcgtgccgctgctgatcgtgaacgcgtggctggtcctgatcacctacctgcagcacacccacccagcgctgccgcactacgactcgacggagtgggactggctgcggggggcgctcgccaccatggaccgggactacggcattctcaaccgcgtgttccacaacatcacggacacgcacgtggcgcaccacctcttctccaacatgccgcactaccacgccatggaggccaccaaggcgatcaagcccatcctcggcgagtactaccagtttgacggcaccccggtcgccaaggccacatggcgcgaggccaaggagtgcatctacgttgagcccgaggaccgcaagggggtcttctggtacagcaacaagttctag

SEQ ID NO: 53823 - protein, 387 aa, Hordeum vulgare
MGAGGRMTEKEREKQEQLGRAGGGAAFQRSPTDKPPFTLGQIKKAIPPHCFQRSIIKSFSYVVHDLVIIAALLYAALVWIPTLPTVLQLGAWPLYWIVQGCVMTGVWVIAHECGHHAFSDYSLLDDTVGLVLHSWLLVPYFSWKYSHRRHHSNTGSLERDEVFVPKQKEALAWYTPYIYNNPIGRLVHIVVQLTLGWPLYLALNASGRPYPRFACHFDPYGPIYNDRERAQIFISDVGVLAVSLALLKLVSSFGFWWVVRVYGVPLLIVNAWLVLITYLQHTHPALPHYDSTEWDWLRGALATMDRDYGILNRVFHNITDTHVAHHLFSNMPHYHAMEATKAIKPILGEYYQFDGTPVAKATWREAKECIYVEPEDRKGVFWYSNKF

SEQ ID NO: 53824 - DNA, 1146 bp, Hordeum vulgare
  CDS (1)..(1146)
atgggcgccgcggcgaggagggcgcccgagcaggagcaaagctgcaaggccaccgaggacttcgacgccgccaagcctccgccgttccgcatcggcgacgtgcgtgccgccgtgcccgcccactgctggcgcaagagcccactccggtccctctcctacgtcgcccgcgacgtcgccgttgtggccgcgctggccgtggtcgcatggtggctcaacagctgggccgtgtggccgctctactgggcagcgcagggcaccatgttctgggcgctcttcgtcctcggccacgactgtggtcacgggagcttctcggacagcttgacgctcaacagcgtcgtcggccacctgctgcacaccttcatccttgtcccatacaacggatggaggatcagccacaggacgcaccatcagaaccatggccacatcgacaaggacgagtcatggcacccgattaccgagaatgtgtacaaggagatggaaccaagcaccaagaagctacgcttctcattgccatatccactcctggctttccctgtctacctttggtacagaagcccgggcaagaacggctcgcatttcaacccaagcagcgatttgttcagccccaaggagaggcgtgacgtgattgtctccaccacttgctggttcacgatgatcgcgctgctcatcgccatggcgtgtgtgttcggaccggtgccagtgctcaagctctacggggttccatatgctgtgtttgtgatgtggctcgatttggtaacgtaccttcaccaccatggtcaccaggacctcccttggtatcgcggcgaggaatggagctacctccgtggtggcctgacgactgtggaccgggactatggatggatcaacaacatccaccatgacattggcactcatgtcatccaccacctcttccctcaaatacctcactaccacctagtagaagcgaccaaggcagcaaggccagtgctgggaagatattaccgcgagccagagaagtcgggtccactgccacttcacctcttccatgtcctcctcaggagcttgagagccgatcacttcgtaagtgatgttggagatgttgtcttctaccaaacggacccaagcttgaatggtgataactggacgaaaaatggcaagcacaagtga

SEQ ID NO: 53825 - protein, 381 aa, Hordeum vulgare
MGAAARRAPEQEQSCKATEDFDAAKPPPFRIGDVRAAVPAHCWRKSPLRSLSYVARDVAVVAALAVVAWWLNSWAVWPLYWAAQGTMFWALFVLGHDCGHGSFSDSLTLNSVVGHLLHTFILVPYNGWRISHRTHHQNHGHIDKDESWHPITENVYKEMEPSTKKLRFSLPYPLLAFPVYLWYRSPGKNGSHFNPSSDLFSPKERRDVIVSTTCWFTMIALLIAMACVFGPVPVLKLYGVPYAVFVMWLDLVTYLHHHGHQDLPWYRGEEWSYLRGGLTTVDRDYGWINNIHHDIGTHVIHHLFPQIPHYHLVEATKAARPVLGRYYREPEKSGPLPLHLFHVLLRSLRADHFVSDVGDVVFYQTDPSLNGDNWTKNGKHK

SEQ ID NO: 53826 - DNA, 1164 bp, Zea mays
  CDS (1)..(1164)
atgggtgccggcggcaggatgaccgagaaggagcgggagaagcaggagcagctcgcccgtgctaccggtggcgccgcgatgcagcggtcgccggtggagaagcctccgttcactctgggtcagatcaagaaggccatcccgccacactgcttcgagcgctcggtgctcaagtccttctcgtacgtggtccacgacctggtgatcgccgcggcgctcctctacttcgcgctggccatcataccggcgctcccaagcccgctccgctacgcggcctggccgctgtactggatcgcgcaggggtgcgtgtgcaccggcgtgtgggtcatcgcgcacgagtgcggccaccacgccttctcggactactcgctcctggacgacgtggtcggcctggtgctgcactcgtcgctcatggtgccctacttctcgtggaagtacagccaccggcgccaccactccaacacggggtccctggagcgcgacgaggtgttcgtgcccaagaagaaggaggcgctgccgtggtacaccccgtacgtgtacaacaacccggtcggccggctggtgcacatcgtggtgcagctcaccctcgggtggccgctgtacctggcgaccaacgcgtcggggcggccgtacccgcgcttcgcctgccacttcgacccctacggccccatctacaacgaccgggagcgcgcccagatcttcgtctcggacgccggcgtcgtggccgtggcgttcgggctgtacaagctggcggcggcgttcggggtctggtgggtggtgcgcgtgtacgccgtgccgctgctgatcgtgaacgcgtggctggtgctcatcacctacctgcagcacacccacccgtcgctcccccactacgactcgagcgagtgggactggctgcgcggcgcgctggccaccatggaccgcgactacggcatcctcaaccgcgtgttccacaacatcacggacacgcacgtcgcgcaccacctcttctccaccatgccgcactaccacgccatggaggccaccaaggcgatcaggcccatcctcggggactactaccacttcgacccgacccctgttgccaaggcgacctggcgcgaggccagggagtgcatctacgtcgagcccgaggaccgcaagggcgtcttctggtacaacaagaagttctag

SEQ ID NO: 53827 - protein, 387 aa, Zea mays
MGAGGRMTEKEREKQEQLARATGGAAMQRSPVEKPPFTLGQIKKAIPPHCFERSVLKSFSYVVHDLVIAAALLYFALAIIPALPSPLRYAAWPLYWIAQGCVCTGVWVIAHECGHHAFSDYSLLDDVVGLVLHSSLMVPYFSWKYSHRRHHSNTGSLERDEVFVPKKKEALPWYTPYVYNNPVGRLVHIVVQLTLGWPLYLATNASGRPYPRFACHFDPYGPIYNDRERAQIFVSDAGVVAVAFGLYKLAAAFGVWWVVRVYAVPLLIVNAWLVLITYLQHTHPSLPHYDSSEWDWLRGALATMDRDYGILNRVFHNITDTHVAHHLFSTMPHYHAMEATKAIRPILGDYYHFDPTPVAKATWREARECIYVEPEDRKGVFWYNKKF

SEQ ID NO: 53828 - DNA, 1299 bp, Brassica napus
  CDS (1)..(1299)
atggtgagctgtgttttatcaaaatgtggtatcagacctctccctaggttctaccctaaacccacaaactcttttgcctctaacccatcacccactctcaaactcaacccgctacattctctcaactcccgaagtgtgttcttgcctagaacaagaaactgggcgttgaatgtggccacaccattaacaactctcgagactccaccggaggaagaagaagacgcgagtaggttcgaccttggtgcgcctcctcctttcaacttggctgacataagagcagccattcccaagcattgttgggtcaagaatccatggaggtctatgagttacgttgtgagagatgtagctatcgtttttggattggctgctgtagctgcttacttcaatagctggcttctctggcctctctactggtttgctcaaggaaccatgttctgggctctctttgttcttggccatgactgtggacatggtagcttctccaatgatccgaggttgaacagtgtagctggtcatcttcttcattcctcaattctagtcccttaccatggctggagaattagccacagaactcaccaccagaaccatgggcatgttgagaatgatgaatcttggcatcctttgcctgaaagcctctacaagaaactggaaaagactactctaaattttaggttcacactgccattcccaatgctcgcataccctttctacttgtggggaagaagtccagggaaaaatggttctcattttgatccagacagtgacttgtttcttcccaaggagaagaaagatgttgtgacatcaactgcatgttggactgcaatggctgctttgcttgtctgtctcaacttcgtcatgggtccaatccaaatgctcaaactatatggcattccttactggatatttgtaatgtggttggactttgtgacttacttgcatcaccatggccatgaagacaagctcccttggtaccgtggaaaggaatggagttacctgagaggagggctcacaacactggaccgtgattatggatggatcaataacatccaccatgacattggaactcatgtgatacatcatcttttcccgcagatcccacattatcatctagtggaagcaacagaagcagctaaaccaataataggaaagtactacagagaaccgaaaaactctggacctttgccacttcacttattgggaagcctcataaaaagtatgaaacaagaccatttcgtaagcgatacaggagacgtcgtgtactatgaggcagatccaaaactcagtggacaaagaacttga

SEQ ID NO: 53829 - protein, 432 aa, Brassica napus
MVSCVLSKCGIRPLPRFYPKPTNSFASNPSPTLKLNPLHSLNSRSVFLPRTRNWALNVATPLTTLETPPEEEEDASRFDLGAPPPFNLADIRAAIPKHCWVKNPWRSMSYVVRDVAIVFGLAAVAAYFNSWLLWPLYWFAQGTMFWALFVLGHDCGHGSFSNDPRLNSVAGHLLHSSILVPYHGWRISHRTHHQNHGHVENDESWHPLPESLYKKLEKTTLNFRFTLPFPMLAYPFYLWGRSPGKNGSHFDPDSDLFLPKEKKDVVTSTACWTAMAALLVCLNFVMGPIQMLKLYGIPYWIFVMWLDFVTYLHHHGHEDKLPWYRGKEWSYLRGGLTTLDRDYGWINNIHHDIGTHVIHHLFPQIPHYHLVEATEAAKPIIGKYYREPKNSGPLPLHLLGSLIKSMKQDHFVSDTGDVVYYEADPKLSGQRT

SEQ ID NO: 53830 - DNA, 1299 bp, Brassica napus
  CDS (1)..(1299)
atggcgaacttggtcttatccgaatgtggcataagacctctccccagaatctacaccacacccagatccactttcctctccaacaccaccttcaaactcaaaccatcacctgcgtttcgtctgaatgggttctccactaaaaactgggcgttgaatgtcaccacacctctaacagtcgactcatctcctccaacctcagaagaacacaaaacgcagaggttcgacccaggcgcccctcctccgttcaacttagctgatatcagagcagctattcctaagcattgttgggtgaagaacccatggaagtctatgagttatgttgtgagagatgttgccattgtgtttgcattggctgctggagctgcttacctcaacagctggcttgtttggcctctctattggcttgctcaaggaaccatgttctgggctctctttgttcttggccatgactgtggacatggtagcttctcaaatgatccaaggttaaacagtgtggtgggtcaccttcttcattcctcaatcctagtcccgtaccatggctggagaattagccacagaactcaccaccagaaccatggacatgttgagaacgatgaatcatggcatcctatgtctgagaaaatctacaagactttggacaaaccaactcggttctttagatttacactgcctctcgtgatgctcgcgtaccctttctacttgtgggcaagaagtccagggaagaagggttctcattaccatccagacagcgacttgttcctccctaaagagaaaaacgatgttctcacttctaccgcttgttggactgcaatggctgctctgcttgtctgtctcaacttcgtgatgggtccaatgcaaatgctcaaactctatggaattccttactggataaatgtaatgtggttggactttgtgacttacctgcatcaccatggtcatgaagataagctcccttggtaccgtgggaaggaatggagttacttgagaggaggacttacaacattggaccgggactacggagtgatcaacaacatccatcacgacattggaactcatgtgatacatcatcttttcccacagatcccacattatcatctagtagaagcaacagaagcagctaaaccagtattagggaagtattacagggagcctaataagtctggacctttgccattacatttacttggaatcttagcaaaaagcatgaaagaagatcattatgtgagcgacgaaggagatgttgtatactataaagcagatcctaatctatatggagagatcaaggtaacagcagagtaa

SEQ ID NO: 53831 - protein, 432 aa, Brassica napus
MANLVLSECGIRPLPRIYTTPRSTFLSNTTFKLKPSPAFRLNGFSTKNWALNVTTPLTVDSSPPTSEEHKTQRFDPGAPPPFNLADIRAAIPKHCWVKNPWKSMSYVVRDVAIVFALAAGAAYLNSWLVWPLYWLAQGTMFWALFVLGHDCGHGSFSNDPRLNSVVGHLLHSSILVPYHGWRISHRTHHQNHGHVENDESWHPMSEKIYKTLDKPTRFFRFTLPLVMLAYPFYLWARSPGKKGSHYHPDSDLFLPKEKNDVLTSTACWTAMAALLVCLNFVMGPMQMLKLYGIPYWINVMWLDFVTYLHHHGHEDKLPWYRGKEWSYLRGGLTTLDRDYGVINNIHHDIGTHVIHHLFPQIPHYHLVEATEAAKPVLGKYYREPNKSGPLPLHLLGILAKSMKEDHYVSDEGDVVYYKADPNLYGEIKVTAE

SEQ ID NO: 53832 - DNA, 1134 bp, Brassica napus
  CDS (1)..(1134)
atggttgtcgctatggaccagcgtagcaatgcgaacggagacgaaaggtttgatccgagcgcacaaccaccgttcaagatcggagatataagggcggccattcctaagcattgttgggtaaagagtcctttgagatccatgagctatgtcgccagagacattttcgccgtcgtggctcttgccgtcgccgccgtgtattttgatagctggttcttttggcctctttattgggccgcccaaggaaccctgttctgggctatcttcgtactcggccacgactgtggacatgggagcttctcagacattccccttctgaatactgcggttggtcatattcttcattccttcattctcgttccataccatggttggagaataagccatcggacacaccaccagaaccatggccatgttgaaaacgacgagtcttgggttccgttgccagaaaaattatacaagaatttgtcccacagtacacggatgctcagatacactgtccctctccccatgctcgcttaccctctctatctgtggtacagaagtcctggtaaagaagggtcacattataacccatacagtagtttatttgccccaagcgagagaaagcttattgcaacttcaactacttgctggtcgatcatgttggccactcttgtttatctatcattcctcgttggtccagtcacagttctaaaagtctatggtgttccttacattatctttgtaatgtggttggacgctgtcacgtacttgcatcatcatggtcacgatgataagttgccttggtacagaggcaaggaatggagttatttacgtggaggattaacaactattgatagagattacgggatcttcaacaacattcatcacgatattggaactcacgtgatccatcatcttttcccacaaatccctcactatcacttggtcgatgccacgaaagcagctaaacatgtgttgggaagatactacagagaaccaaagacgtcaggagcaataccgatccacttggtggagagtttggtagcaagtattaagaaagatcattacgtcagtgacactggtgatattgtcttctacgagacagatccagatctctacgtttatgcttctgacaaatccaaaatcaattaa

SEQ ID NO: 53833 - protein, 377 aa, Brassica napus
MVVAMDQRSNANGDERFDPSAQPPFKIGDIRAAIPKHCWVKSPLRSMSYVARDIFAVVALAVAAVYFDSWFFWPLYWAAQGTLFWAIFVLGHDCGHGSFSDIPLLNTAVGHILHSFILVPYHGWRISHRTHHQNHGHVENDESWVPLPEKLYKNLSHSTRMLRYTVPLPMLAYPLYLWYRSPGKEGSHYNPYSSLFAPSERKLIATSTTCWSIMLATLVYLSFLVGPVTVLKVYGVPYIIFVMWLDAVTYLHHHGHDDKLPWYRGKEWSYLRGGLTTIDRDYGIFNNIHHDIGTHVIHHLFPQIPHYHLVDATKAAKHVLGRYYREPKTSGAIPIHLVESLVASIKKDHYVSDTGDIVFYETDPDLYVYASDKSKIN

SEQ ID NO: 53834 - DNA, 1155 bp, Brassica napus
  CDS (1)..(1155)
atgggtgcaggtggaagaatgcaagtgtctcctccctccaaaaagtctgaaaccgacaacatcaagcgcgtaccctgcgagacaccgcccttcactgtcggagaactcaagaaagcaatcccaccgcactgtttcaaacgctcgatccctcgctctttctcctacctcatctgggacatcatcatagcctcctgcttctactacgtcgccaccacttacttccctctcctccctcaccctctctcctacttcgcctggcctctctactgggcctgccagggctgcgtcctaaccggcgtctgggtcatagcccacgagtgcggccaccacgccttcagcgactaccagtggctggacgacaccgtcggcctcatcttccactccttcctcctcgtcccttacttctcctggaagtacagtcatcgacgccaccattccaacactggctccctcgagagagacgaagtgtttgtccccaagaagaagtcagacatcaagtggtacggcaagtacctcaacaaccctttgggacgcaccgtgatgttaacggttcagttcactctcggctggcctttgtacttagccttcaacgtctcggggagaccttacgacggcggcttcgcttgccatttccaccccaacgctcccatctacaacgaccgcgagcgtctccagatatacatctccgacgctggcatcctcgccgtctgctacggtctctaccgctacgctgctgtccaaggagttgcctcgatggtctgcttctacggagttccgcttctgattgtcaatgggttcttagttttgatcacttacttgcagcacacgcatccttccctgcctcactatgactcgtctgagtgggattggttgaggggagctttggccaccgttgacagagactacggaatcttgaacaaggtcttccacaatatcacggacacgcacgtggcgcatcacctgttctcgaccatgccgcattatcatgcgatggaagctacgaaggcgataaagccgatactgggagagtattatcagttccatgggacgccggtggttaaggcgatgtggagggaggcgaaggagtgtatctatgtggaaccggacaggcaaggtgagaagaaaggtgtgttctggtacaacaataagttatga

SEQ ID NO: 53835 - protein, 384 aa, Brassica napus
MGAGGRMQVSPPSKKSETDNIKRVPCETPPFTVGELKKAIPPHCFKRSIPRSFSYLIWDIIIASCFYYVATTYFPLLPHPLSYFAWPLYWACQGCVLTGVWVIAHECGHHAFSDYQWLDDTVGLIFHSFLLVPYFSWKYSHRRHHSNTGSLERDEVFVPKKKSDIKWYGKYLNNPLGRTVMLTVQFTLGWPLYLAFNVSGRPYDGGFACHFHPNAPIYNDRERLQIYISDAGILAVCYGLYRYAAVQGVASMVCFYGVPLLIVNGFLVLITYLQHTHPSLPHYDSSEWDWLRGALATVDRDYGILNKVFHNITDTHVAHHLFSTMPHYHAMEATKAIKPILGEYYQFHGTPVVKAMWREAKECIYVEPDRQGEKKGVFWYNNKL

SEQ ID NO: 53836 - DNA, 1152 bp, Brassica napus
  CDS (1)..(1152)
atggttgttgctatggaccagcgcagcaatgtgaacggagattccggtgcccggaaggaagaagggtttgatccgagcgcacaaccaccgttcaagatcggagatataagggcggccattcctaagcattgttgggtaaagagtcctttgagatccatgagctacgtcgccagagacattttcgccgtcgtggctctggccgtcgccgccgtgtattttgatagctggttcttctggcctctctattgggccgcccaaggaacccttttctgggccatcttcgtactcggccacgactgtggacatgggagtttctcagacattcctcttctgaatactgcggttggtcatattcttcattccttcattctcgttccataccatggttggagaataagccatcggacacaccaccagaaccatggccatgttgaaaacgacgagtcttgggttccgttgccagaaaaattatacaagaatttgtcccacagtacacggatgctcagatacactgtccctctccccatgctcgcttaccctctctatctgtggtacagaagtcctggtaaagaagggtcacattataacccatacagtagtttatttgccccaagcgagagaaagcttattgcaacttcaactacttgctggtcgatcatgttggccactcttgtttatctatcattcctcgttggtccagtcacagttctaaaagtctatggtgttccttacattatctttgtaatgtggttggacgctgtcacgtacttgcatcatcatggtcacgatgataagttgccttggtacagaggcaaggaatggagttatttacgtggaggattaacaactattgatagagattacgggatcttcaacaacattcatcacgatattggaactcacgtgatccatcatcttttcccacaaatccctcactatcacttggtcgatgccacgaaagcagctaaacatgtgttgggaagatactacagagaaccaaagacgtcaggagcaataccgatccacttggtggaaagtttggtggcaagtattaagaaagatcattacgtcagtgacactggtgatattgtcttctacgagacagatccagatctctacgtttatgcttctgacaaatccaaaatcaattaa

SEQ ID NO: 53837 - protein, 383 aa, Brassica napus
MVVAMDQRSNVNGDSGARKEEGFDPSAQPPFKIGDIRAAIPKHCWVKSPLRSMSYVARDIFAVVALAVAAVYFDSWFFWPLYWAAQGTLFWAIFVLGHDCGHGSFSDIPLLNTAVGHILHSFILVPYHGWRISHRTHHQNHGHVENDESWVPLPEKLYKNLSHSTRMLRYTVPLPMLAYPLYLWYRSPGKEGSHYNPYSSLFAPSERKLIATSTTCWSIMLATLVYLSFLVGPVTVLKVYGVPYIIFVMWLDAVTYLHHHGHDDKLPWYRGKEWSYLRGGLTTIDRDYGIFNNIHHDIGTHVIHHLFPQIPHYHLVDATKAAKHVLGRYYREPKTSGAIPIHLVESLVASIKKDHYVSDTGDIVFYETDPDLYVYASDKSKIN

SEQ ID NO: 53838 - DNA, 1299 bp, Brassica napus
  CDS (1)..(1299)
atggtgagttgtgttttatcaaaatgtggtatcagacctctccctaggttctaccctaaacccacaaactcttttgcctctaacccatcacccactctcaaactcaacccaccatcttctctcaactcccgaagtgtgttcttgcctagaacaagaaactgggcgttgaatgtggccataccattaacaactctcgagactccaccggaggaagaaaaagacgcgagtaggttcgaccctggtgcgcctcctcctttcaacttggcagacataagagcagccattcccaagcattgttgggtcaagaatccatggaagtcgatgagttacgttgtgagagatgtaccaatcgtttttggattggctgctgtagctgcttacttcaacagctggcttctctggcctctctactggtttgctcaaggaaccatgttctgggctctctttgttcttggccatgactgtggacatggtagcttctccaatgatccgaggttgaacagtgtagctggtcatcttcttcattcctcaattctagtcccttaccatggctggagaattagccacagaactcaccaccagaaccatgggcatgttgagaatgatgaatcttggcatcctttgcctgaaagcctctacaagaaactggaaaagactactctaaattttaggttcacactgccattcccaatgctcgcataccctttctacttgtggggaagaagtccagggaaaaatggttctcattttgatccagacagtgacttgtttcttcccaaggagaagaaagatgtagtgacatcaactgcatcttggactgcaatggctgctttgcttgtctgtctcaacttcgccatgggcccaatccaaatgctcaaactatatggcattccttactggatatttgtaatgtggttggactttgtgacttacttgcatcaccatggccatgaagacaagctcccttggtaccgtggaaaggaatggagttacctgagaggagggctcacaacactggaccgtgattatggatggatcaataacatccaccatgacattggaactcatgtgatacatcatcttttccctcagatcccacattatcatctagtggaagcaacagaagcagctaaaccaataataggaaagtactacagagaaccgaaaaactctggacctttgccacttcacttattgggaagcctcataaaaagtatgaaacaagaccatttcgtaagcgatacaggagacgtcgtgtactatgaggcagatccaaaactcagtggacaaagaacgtga

SEQ ID NO: 53839 - protein, 432 aa, Brassica napus
MVSCVLSKCGIRPLPRFYPKPTNSFASNPSPTLKLNPPSSLNSRSVFLPRTRNWALNVAIPLTTLETPPEEEKDASRFDPGAPPPFNLADIRAAIPKHCWVKNPWKSMSYVVRDVPIVFGLAAVAAYFNSWLLWPLYWFAQGTMFWALFVLGHDCGHGSFSNDPRLNSVAGHLLHSSILVPYHGWRISHRTHHQNHGHVENDESWHPLPESLYKKLEKTTLNFRFTLPFPMLAYPFYLWGRSPGKNGSHFDPDSDLFLPKEKKDVVTSTASWTAMAALLVCLNFAMGPIQMLKLYGIPYWIFVMWLDFVTYLHHHGHEDKLPWYRGKEWSYLRGGLTTLDRDYGWINNIHHDIGTHVIHHLFPQIPHYHLVEATEAAKPIIGKYYREPKNSGPLPLHLLGSLIKSMKQDHFVSDTGDVVYYEADPKLSGQRT

SEQ ID NO: 53840 - DNA, 1152 bp, Brassica napus
  CDS (1)..(1152)
atggttgttgctatggaccagcgcagcaatgctaacggagattccggtgcccggaaggaagaagggtttgatccaagcgcacaaccaccgtttaagatcggagatatcagggcggcgattcctaagcattgctgggtgaagagtcctttgagatctatgagctacgtcgccagagacattttcgccgtcgcggctctggccatggccgccgtgtattttgatagctggttcctctggccactctactgggttgcccaaggaacccttttctgggccatcttcgttcttggccacgactgtggacatgggagtttttcagacattcctctgctgaacagtgtggttggtcacattcttcattcattcatcctcgttccttaccatggttggagaataagccatcggacacaccaccagaaccatggccatgttgaaaacgacgagtcttgggttccgttgccagaaaagttatacaagaatttgtcccacagtacacggatgctcagatacactgtccctctccccatgctcgcttaccctctctatctgtggtacagaagtcctggtaaagaagggtcacattataacccatacagtagtttatttgccccaagcgagagaaagcttattgcaacttcaactacttgctggtcgatcatgttggccactcttgtttatctatcattcctcgttggtccagtcacagttctaaaagtctatggtgttccttacattatctttgtaatgtggttggacgctgtcacgtacttgcatcatcatggtcacgatgataagctgccttggtacagaggcaaggaatggagttatttacgtggaggattaacaactattgatagagattacgggatcttcaacaacattcatcacgatattggaactcacgtgatccatcatcttttcccacaaatccctcactatcacttggtcgatgccacgaaagcagctaaacatgtgttgggaagatactacagagaaccaaagacgtcaggagcaataccgatccacttggtggagagtttggtagcaagtattaagaaagatcattacgtcagtgacactggtgacattgtcttctacgagactgatccagatctctacgtttatgcttctgtcaaatccaaaatcaattaa

SEQ ID NO: 53841 - protein, 383 aa, Brassica napus
MVVAMDQRSNANGDSGARKEEGFDPSAQPPFKIGDIRAAIPKHCWVKSPLRSMSYVARDIFAVAALAMAAVYFDSWFLWPLYWVAQGTLFWAIFVLGHDCGHGSFSDIPLLNSVVGHILHSFILVPYHGWRISHRTHHQNHGHVENDESWVPLPEKLYKNLSHSTRMLRYTVPLPMLAYPLYLWYRSPGKEGSHYNPYSSLFAPSERKLIATSTTCWSIMLATLVYLSFLVGPVTVLKVYGVPYIIFVMWLDAVTYLHHHGHDDKLPWYRGKEWSYLRGGLTTIDRDYGIFNNIHHDIGTHVIHHLFPQIPHYHLVDATKAAKHVLGRYYREPKTSGAIPIHLVESLVASIKKDHYVSDTGDIVFYETDPDLYVYASVKSKIN

SEQ ID NO: 53842 - DNA, 1155 bp, Brassica napus
  CDS (1)..(1155)
atgggtgcaggtggaagaatgcaagtgtctcctccctccaaaaagtctgaaaccgacaacatcaagcgcgtaccctgcgagacaccgcccttcactgtcggagaactcaagaaagcaatcccaccgcactgtttcaaacgctcgatccctcgctctttctcctacctcatctgggacatcatcatagcctcctgcttctactacgtcgccaccacttacttccctctcctccctcaccctctctcctacttcgcctggcctctctactgggcctgccaagggtgcgtcctaaccggcgtctgggtcatagcccacgagtgcggccaccacgccttcagcgactaccagtggcttgacgacaccgtcggtctcatcttccactccttcctcctcgtcccttacttctcctggaagtacagtcatcgacgccaccattccaacactggctccctcgagagagacgaagtgtttgtccccaagaagaagtcagacatcaagtggtacggcaagtacctcaacaaccctttgggacgcaccgtgatgttaacggttcagttcactctcggctggcctttgtacttagccttcaacgtctcggggagaccttacgacggcggcttcgcttgccatttccaccccaacgctcccatctacaacgaccgtgagcgtctccagatatacatctccgacgctggcatcctcgccgtctgctacggtctctaccgctacgctgctgtccaaggagttgcctcgatggtctgcttctacggagttcctcttctgattgtcaacgggttcttcgttttgatcacttacttgcagcacacgcatccttccctgcctcactatgactcgtctgagtgggattggttgaggggagctttggccaccgttgacagagactacggaatcttgaacaaggtcttccacaatatcacggacacgcacgtggcgcatcacctgttctcgaccatgccgcattatcatgcgatggaagctacgaaggcgataaagccgatactgggagagtattatcagttcgatgggacgccggtggttaaggcgatgtggagggaggcgaaggagtgtatctatgtggaaccggacaggcaaggtgagaagaaaggtgtgttctggtacaacaataagttatga

SEQ ID NO: 53843 - protein, 384 aa, Brassica napus
MGAGGRMQVSPPSKKSETDNIKRVPCETPPFTVGELKKAIPPHCFKRSIPRSFSYLIWDIIIASCFYYVATTYFPLLPHPLSYFAWPLYWACQGCVLTGVWVIAHECGHHAFSDYQWLDDTVGLIFHSFLLVPYFSWKYSHRRHHSNTGSLERDEVFVPKKKSDIKWYGKYLNNPLGRTVMLTVQFTLGWPLYLAFNVSGRPYDGGFACHFHPNAPIYNDRERLQIYISDAGILAVCYGLYRYAAVQGVASMVCFYGVPLLIVNGFFVLITYLQHTHPSLPHYDSSEWDWLRGALATVDRDYGILNKVFHNITDTHVAHHLFSTMPHYHAMEATKAIKPILGEYYQFDGTPVVKAMWREAKECIYVEPDRQGEKKGVFWYNNKL

SEQ ID NO: 53844 - DNA, 1179 bp, Zea mays
  CDS (1)..(1179)
atgggtgccggaggcaggatgaccgagaaggagcgggagaagcatgagcaggagcaggtcgcccgtgctaccggcggtggcgcggcagtgcagcggtcgccggtggagaagccgccgttcacgttggggcagatcaagaaggcgatcccgccgcactgcttcgagcgctccgtgctgaggtccttctcgtacgtggcccacgacctgtcgctcgccgcggcgctcctctacctcgcggtggccgtgataccggcgctaccctgcccgctccgctacgcggcctggccgctgtactgggtggcccaggggtgcgtgtgcacgggcgtgtgggtgatcgcgcacgagtgcggccaccacgccttctccgaccacgcgctcctggacgacgccgtcggcctggcgctgcactcggcgctgctggtgccctacttctcgtggaagtacagccaccggcgccaccactccaacacggggtccctggagcgcgacgaggtgttcgtgccgaggacgaaggaggcgctgccgtggtacgccccgtacgtgtacggcagcccggtgggccggctggtgcacgtcgtggtgcagctcaccctggggtggccgctgtacctggcgaccaacgcgtcggggcggccgtacccgcgcttcgcctgccacttcgacccctacggcccgatctacggcgaccgggagcgcgcccagatcttcgtctcggacgccggcgtcgtggccgtggcgttcgggctgtacaagctggcggcggcgttcggggtctggtgggtggtgcgcgtgtacgccgtgccgctgctgatcgtcaacgcgtggctggtgctcatcacgtacctgcagcacacccacccggcgctgccccactacgactcgggcgagtgggactggctgcgcggcgcgctcgccaccgtcgaccgagactacggcgtcctcaaccgcgtgttccaccacatcacggacacgcacgtcgcgcaccacctcttctccaccatgccgcactaccacgccgtggaggccaccagggcgatcaggcccgtcctcggcgagtactaccagttcgacccgacccctgtcgccaaggccacctggcgcgaggccagggagtgcatctacgtcgagcctgagaaccgcaaccgcaagggcgtcttctggtacaacagcaagttctag

SEQ ID NO: 53845 - protein, 392 aa, Zea mays
MGAGGRMTEKEREKHEQEQVARATGGGAAVQRSPVEKPPFTLGQIKKAIPPHCFERSVLRSFSYVAHDLSLAAALLYLAVAVIPALPCPLRYAAWPLYWVAQGCVCTGVWVIAHECGHHAFSDHALLDDAVGLALHSALLVPYFSWKYSHRRHHSNTGSLERDEVFVPRTKEALPWYAPYVYGSPVGRLVHVVVQLTLGWPLYLATNASGRPYPRFACHFDPYGPIYGDRERAQIFVSDAGVVAVAFGLYKLAAAFGVWWVVRVYAVPLLIVNAWLVLITYLQHTHPALPHYDSGEWDWLRGALATVDRDYGVLNRVFHHITDTHVAHHLFSTMPHYHAVEATRAIRPVLGEYYQFDPTPVAKATWREARECIYVEPENRNRKGVFWYNSKF

SEQ ID NO: 53846 - DNA, 1152 bp, Glycine max
  CDS (1)..(1152)
atgggggcgggtggccgaactgatgttcctcctgccaacaggaagtcagaggttgaccctttgaagcgggtgccatttgaaaaacctccatttagtctcagccaaatcaagaaggtcattccacctcactgtttccagcgttctgttttccgctcattctcctatgttgtttacgacctcaccatagccttctgcctctattatgttgccacccattacttccacctccttcccagccctctctctttcttggcatggccaatctactgggctgtccaaggttgcatccttactggagtttgggtcattgcccatgagtgtggccaccatgcattcagtgactaccagttgcttgatgatattgttggccttgtcctccactccggtctcctagtcccatacttttcatggaaatacagccatcgccgtcaccactccaacactggttctcttgagcgggatgaagtatttgtgccaaagcagaagtcctgtatcaagtggtactctaaataccttaacaatcctccaggcagagtcctcactcttgctgtcaccctcacacttggttggcccttgtacttggctttaaatgtttctggaaggccttatgatagatttgcttgccactatgacccatatggtcccatttactctgatcgtgaacgacttcaaatatatatatcagatgcaggagtacttgcagtatgctatggccttttccgtcttgccatggcaaaaggacttgcctgggtggtgtgtgtttatggagttccattgctagtggtcaatggatttttggtgttgattacattcttgcagcatactcaccctgcattgccacattacacttcctctgagtgggactggttgagaggagctttagcaacagtggatagagattatggaatcctgaacaaggtcttccataatattacagacactcatgtagcacatcacttgttctccacaatgccacattatcatgcaatggaggctacaaaggcaataaaacccattttgggagagtattatcggtttgatgagactccatttgtcaaggcaatgtggagagaggcaagagagtgtatttatgtggagccagatcaaagtaccgagagcaaaggtgtattttggtacaacaataagttgtga

SEQ ID NO: 53847 - protein, 383 aa, Glycine max
MGAGGRTDVPPANRKSEVDPLKRVPFEKPPFSLSQIKKVIPPHCFQRSVFRSFSYVVYDLTIAFCLYYVATHYFHLLPSPLSFLAWPIYWAVQGCILTGVWVIAHECGHHAFSDYQLLDDIVGLVLHSGLLVPYFSWKYSHRRHHSNTGSLERDEVFVPKQKSCIKWYSKYLNNPPGRVLTLAVTLTLGWPLYLALNVSGRPYDRFACHYDPYGPIYSDRERLQIYISDAGVLAVCYGLFRLAMAKGLAWVVCVYGVPLLVVNGFLVLITFLQHTHPALPHYTSSEWDWLRGALATVDRDYGILNKVFHNITDTHVAHHLFSTMPHYHAMEATKAIKPILGEYYRFDETPFVKAMWREARECIYVEPDQSTESKGVFWYNNKL

SEQ ID NO: 53848 - DNA, 1164 bp, Glycine max
  CDS (1)..(1164)
atgggtctagcaaaggaaacaacaatgggaggtagaggtcgtgtggccaaagtggaagttcaagggaagaagcctctctcaagggttccaaacacaaagccaccattcactgttggccaactcaagaaagcaattccaccacactgctttcagcgctccctcctcacttcattctcctatgttgtttatgacctttcatttgccttcattttctacattgccaccacctacttccacctccttcctcaacccttttccctcattgcatggccaatctattgggttctccaaggttgccttctcactggtgtgtgggtgattgctcacgagtgtggtcaccatgccttcagcaagtaccaatgggttgatgatgttgtgggtttgacccttcactcaacacttttagtcccttatttctcatggaaaataagccatcgccgccatcactccaacacaggttcccttgaccgtgatgaagtgtttgtcccaaaaccaaaatccaaagttgcatggttttccaagtacttaaacaaccctctaggaagggctgtttctcttctcgtcacactcacaatagggtggcctatgtatttagccttcaatgtctctggtagaccctatgatagttttgcaagccactaccacccttatgctcccatatattctaaccgtgagaggcttctgatctatgtctctgatgttgctttgttttctgtgacttactctctctaccgtgttgcaaccctgaaagggttggtttggctgctatgtgtttatggggtgcctttgctcattgtgaacggttttcttgtgactatcacatatttgcagcacacacactttgccttgcctcattacgattcatcagaatgggactggctgaagggagctttggcaactatggacagagattatgggattctgaacaaggtgtttcatcacataactgatactcatgtggctcaccatctcttctctacaatgccacattaccatgcaatggaggcaaccaatgcaatcaagccaatattgggtgagtactaccaatttgatgacacaccattttacaaggcactgtggagagaagcgagagagtgcctctatgtggagccagatgaaggaacatccgagaagggcgtgtattggtacaggaacaagtattga

SEQ ID NO: 53849 - protein, 387 aa, Glycine max
MGLAKETTMGGRGRVAKVEVQGKKPLSRVPNTKPPFTVGQLKKAIPPHCFQRSLLTSFSYVVYDLSFAFIFYIATTYFHLLPQPFSLIAWPIYWVLQGCLLTGVWVIAHECGHHAFSKYQWVDDVVGLTLHSTLLVPYFSWKISHRRHHSNTGSLDRDEVFVPKPKSKVAWFSKYLNNPLGRAVSLLVTLTIGWPMYLAFNVSGRPYDSFASHYHPYAPIYSNRERLLIYVSDVALFSVTYSLYRVATLKGLVWLLCVYGVPLLIVNGFLVTITYLQHTHFALPHYDSSEWDWLKGALATMDRDYGILNKVFHHITDTHVAHHLFSTMPHYHAMEATNAIKPILGEYYQFDDTPFYKALWREARECLYVEPDEGTSEKGVYWYRNKY

SEQ ID NO: 53850 - DNA, 1146 bp, Glycine max
  CDS (1)..(1146)
atggttcaagcacagcctctacaacatgttggtaatggtgcagggaaagaagatcaagcttataattttgatccaagtgctccaccacccttcaagattgcaaatatcagagcagcaattccaaaacattgctgggagaagaacacattgagatctctgagttacgttctgagggatgtgttgatagtgactgcattggtagctgcagcaatcggcttcaatagctggctcttctggccaccctattggcctgcacaaggcacaatgttttgggcactttttgttcttggacatgattgtggtcatggaagtttttcaaacagtcctatgttgaacagcattgtgggccacatcttgcactcttcaatccttgtaccataccatggatggagaattagccacaggactcaccatcagaaccatggccatgttgagaaggatgaatcatgggttccgctttcagagaaagtttacaagaatctagacaacatgacaagaatgatgagattcactcttccttcccccatctttgcataccccttttatttgtggagcagaagcccaggaaaagaaggttctcatttcaacccttacagcaacttgttctcccctggtgagagaagagatgtgataacttcaactctttgttggggcatcatgctttctctgcttctctatctttccctcacattggatccactttttatgttcaagctttatggggttccttatttgatcttcgtcgtgtggctggatttcgtcacatacttgcatcatcatggttacaagcagaaactaccttggtaccgtggccaggaatggacttatctaaggggtggtcttacaaccgtagatcgtgactatggttggatcaacaacattcaccatgacattggcacccatgtcatccatcaccttttccctcagattccacattatcatttggttgaagcgactaaagcagctaaggcagtgctaggaaagtattatcgtgagcctcagaaatcagggccattgccacttcatcttatcaagtacttgctacacagcataagtcaggatcacttcgttagtgactatggtgacattgtgtactaccaaactgattctcagttccacaaagattcttggaccaagtccaactaa

SEQ ID NO: 53851 - protein, 381 aa, Glycine max
MVQAQPLQHVGNGAGKEDQAYNFDPSAPPPFKIANIRAAIPKHCWEKNTLRSLSYVLRDVLIVTALVAAAIGFNSWLFWPPYWPAQGTMFWALFVLGHDCGHGSFSNSPMLNSIVGHILHSSILVPYHGWRISHRTHHQNHGHVEKDESWVPLSEKVYKNLDNMTRMMRFTLPSPIFAYPFYLWSRSPGKEGSHFNPYSNLFSPGERRDVITSTLCWGIMLSLLLYLSLTLDPLFMFKLYGVPYLIFVVWLDFVTYLHHHGYKQKLPWYRGQEWTYLRGGLTTVDRDYGWINNIHHDIGTHVIHHLFPQIPHYHLVEATKAAKAVLGKYYREPQKSGPLPLHLIKYLLHSISQDHFVSDYGDIVYYQTDSQFHKDSWTKSN

SEQ ID NO: 53852 - DNA, 1362 bp, Glycine max
  CDS (1)..(1362)
atggcaacctgggttttatcagaatgtggcttaaggcctcttccaccagtgtttccacggtcaacaagacccatttcgtgccaaaaaccttcaaagtctagatttttaagcacaaacaagggtgtgccagatctgaatctccaagcaagagggttaacatgctgtagttttagggatagaaagtgggaattgggagtgagtgctccactgaaatttgccaccaatgagggagaggaagaagagagaaccaatggggctaataatggggttggtgaggaagtttcagaatttgaccctagtgcaccaccacccttcaaattggcagatattagagctgccattcctaaacactgttgggtgaaggacccttggaagtccatgagttatgttgttagagatgtcattgtggtttttgggttggctgctgctgcagcttatctcaacaattgggttgtttggcctctctattgggctgctcagggaaccatgttctgggccctctttgttcttggtcatgattgtggtcatggaagcttttcaaacaatcccaagttgaacagtgttgctggccacttgctgcattcatcaattctagtaccttatcatggatggagaatcagtcatagaacacatcatcaaaaccatggccatgtcgaaaatgatgaatcttggcacccattgccagagaaaattttcaagagcttggataatgtaacacgcattttaagatttactctacctttcccattgcttgcatatcctatctacctgtggagcaggagtcccgggaagactggttctcactttaatccagacagtgacttgtttgttcccagtgagagaaaagatgttattacttcaacaatttgttggacagctatggctgctttgcttgttggtctgggatttgtgatgggtccagttcaattgcttaagctttatggcattccctatgcgatttttgttatgtggttggatttggtgacttatttgcatcaccatggccatgaagacaaattaccttggtatcgtggagaggaatggagctaccttaggggtggccttacaactattgatcgtgactacggatggatcaataacatccaccacgacattggaacccatgtcattcatcacctctttcctcaaataccacactatcacttaatagaagcaactgaagcagctaagccagttcttggtcaatactaccgcgaaccaaagaagtctagtcctcttccaatttacctcattggagaattgttaagaagcatgaagaaagaccattttgtcagtgacagtggcgatattgtatactatcaaacagaccctacacttagtagctcttccacatcacagtaa

SEQ ID NO: 53853 - protein, 453 aa, Glycine max
MATWVLSECGLRPLPPVFPRSTRPISCQKPSKSRFLSTNKGVPDLNLQARGLTCCSFRDRKWELGVSAPLKFATNEGEEEERTNGANNGVGEEVSEFDPSAPPPFKLADIRAAIPKHCWVKDPWKSMSYVVRDVIVVFGLAAAAAYLNNWVVWPLYWAAQGTMFWALFVLGHDCGHGSFSNNPKLNSVAGHLLHSSILVPYHGWRISHRTHHQNHGHVENDESWHPLPEKIFKSLDNVTRILRFTLPFPLLAYPIYLWSRSPGKTGSHFNPDSDLFVPSERKDVITSTICWTAMAALLVGLGFVMGPVQLLKLYGIPYAIFVMWLDLVTYLHHHGHEDKLPWYRGEEWSYLRGGLTTIDRDYGWINNIHHDIGTHVIHHLFPQIPHYHLIEATEAAKPVLGQYYREPKKSSPLPIYLIGELLRSMKKDHFVSDSGDIVYYQTDPTLSSSSTSQ

SEQ ID NO: 53854 - DNA, 1362 bp, Glycine max
  CDS (1)..(1362)
atggcaacttggatattatcagaatgtggcttgaagcctcttgctccagtaattcctagacctagaactggggctgctttgtccagcacctcaagggttgaatttttggacacaaacaaggtagtggcaggtcctaagtttcaacctttgaggtgcaacctcagggagaggaattgggggctgaaagtgagtgcccctttgagggttgcttccattgaagaggagcaaaagagtgttgatttaaccaatgggactaatggggttgagcatgagaagcttccagaatttgaccctggtgctccgccaccattcaacttggctgatattagagcagccattccaaagcattgctgggtgaaggacccttggaggtccatgagctatgtggtgagggatgtgattgctgtctttggtttggctgctgctgctgcgtatctcaataattggttggtttggcctctctattgggctgctcaaggcactatgttctgggctctgtttgttcttggtcatgattgtggtcatggaagcttttcaaacaactccaaattgaacagtgttgttggacatctgctgcattcttcaattctagtgccatatcatggatggagaatcagtcataggactcatcaccaacatcatggtcatgctgaaaatgatgaatcatggcatccgttgcctgaaaaattgttcagaagcttggacactgtaactcgtatgttaagattcacagcaccttttccacttcttgcatttcctgtgtacctttttagtaggagtcctgggaagactggttctcactttgaccccagcagtgacttgttcgttcccaatgaaagaaaagatgttattacttccacagcttgttgggctgctatgttgggattgcttgttggattggggtttgtaatgggtccaattcaacttcttaagctttatggtgttccctatgttatattcgttatgtggttggatttggtgacttatttgcaccatcatggccatgaagacaaattaccttggtaccgtggaaaggaatggagctacctcaggggtggtctaactactcttgatcgtgattatggatggatcaataacattcaccatgacattggcactcatgtcattcatcacctatttcctcaaattccacactatcacttagttgaggctactgaggctgctaagccagtgtttggaaaatattatagagaaccaaagaaatcagcagcacctcttccttttcaccttattggggaaataataaggagcttcaagactgaccattttgttagtgacacgggggatgttgtgtactatcaaaccgactctaagattaatggctcttccaaattagagtga

SEQ ID NO: 53855 - protein, 453 aa, Glycine max
MATWILSECGLKPLAPVIPRPRTGAALSSTSRVEFLDTNKVVAGPKFQPLRCNLRERNWGLKVSAPLRVASIEEEQKSVDLTNGTNGVEHEKLPEFDPGAPPPFNLADIRAAIPKHCWVKDPWRSMSYVVRDVIAVFGLAAAAAYLNNWLVWPLYWAAQGTMFWALFVLGHDCGHGSFSNNSKLNSVVGHLLHSSILVPYHGWRISHRTHHQHHGHAENDESWHPLPEKLFRSLDTVTRMLRFTAPFPLLAFPVYLFSRSPGKTGSHFDPSSDLFVPNERKDVITSTACWAAMLGLLVGLGFVMGPIQLLKLYGVPYVIFVMWLDLVTYLHHHGHEDKLPWYRGKEWSYLRGGLTTLDRDYGWINNIHHDIGTHVIHHLFPQIPHYHLVEATEAAKPVFGKYYREPKKSAAPLPFHLIGEIIRSFKTDHFVSDTGDVVYYQTDSKINGSSKLE

SEQ ID NO: 53856 - DNA, 1359 bp, Glycine max
  CDS (1)..(1359)
atggcaacatgggttttatcagaatgtggcttaaggtctcttccaccagtgtttcccaggccaacaagacccatttcgtgccaaaagccttcaaagtttagatttttaagcataaacaagggggtggcagatctgaatctccaaccaagagggttcacatgttataactctagggagagaaagtgggaatcgggagtgagtgctccactgaaggttgccaccactgagggagaggaagaagagggaatcaatggggctaatggggttgttgaggaagtaccagaatttgaccctagtgcaccaccacccttcaaattggcagatattagagcttccattcctaaacactgttgggtgaaggacccttggaagtccatgagttatgttgttagagatgtcattgtggtttttgggttggctgttgctgcagcttatctcaacaattgggttgtttggcctctctattgggctgctcagggaaccatgttctgggccctctttgttcttggacatgattgtggtcatggaagcttttcaaacaatcctaagctgaacagtgttgctggccacttgctgcattcttcaattctagtaccatatcatggatggagaattagtcatagaacacatcatcaaaaccatggccatgttgaaaacgatgaatcttggcacccgttgccggagaaaattttcaagagcttggataatgtaacacgtattttaagatttacattaccttttccattgcttgcatatcctatctacctgtggagcaggagtcccgggaagactggttctcactttaatcctgacagtgacttgtttgttcccagtgagagaaaagatgttattacctcaacagattgttggacagctatggctgctttgcttgttggtttgggatttgtgatgggtcctgttcaattgcttaagctttatggcattccctatgtgatttttgttatgtggttggatttggtgacttatttgcatcaccatggccatgaagacaagttaccttggtatcgtggagaggaatggagctaccttaggggtggccttacaactattgatcgtgactatggatggatcaacaacattcaccatgacattggaacccatgtcattcatcacctctttcctcaaataccacactatcacttaatagaagcaactgaggcagctaagccggttcttggcctatactaccgggagccaaagaagtctagtcctcttccaatttaccttattggagaattgttaagaagcatgaagaaagaccattttgtcagtaacactggtgatattgtgtactatcaaacagaccctacacttagtagctcttccacatcacagtaa

SEQ ID NO: 53857 - protein, 452 aa, Glycine max
MATWVLSECGLRSLPPVFPRPTRPISCQKPSKFRFLSINKGVADLNLQPRGFTCYNSRERKWESGVSAPLKVATTEGEEEEGINGANGVVEEVPEFDPSAPPPFKLADIRASIPKHCWVKDPWKSMSYVVRDVIVVFGLAVAAAYLNNWVVWPLYWAAQGTMFWALFVLGHDCGHGSFSNNPKLNSVAGHLLHSSILVPYHGWRISHRTHHQNHGHVENDESWHPLPEKIFKSLDNVTRILRFTLPFPLLAYPIYLWSRSPGKTGSHFNPDSDLFVPSERKDVITSTDCWTAMAALLVGLGFVMGPVQLLKLYGIPYVIFVMWLDLVTYLHHHGHEDKLPWYRGEEWSYLRGGLTTIDRDYGWINNIHHDIGTHVIHHLFPQIPHYHLIEATEAAKPVLGLYYREPKKSSPLPIYLIGELLRSMKKDHFVSNTGDIVYYQTDPTLSSSSTSQ

SEQ ID NO: 53858 - DNA, 1146 bp, Glycine max
  CDS (1)..(1146)
atggttcaagcacagcctctacaacatgttggtaatggtgcagggaaagaagatctatcttataattttgatccaagtgctccaccacccttcaagattgcagatatcagagcagcaattccaaagcattgctgggagaagaacacattgagatctctgagttacgttctgagggatgtgttgatagtttctgcattggtagctgcagcaattggcttcaatagctggctcttctggccaccctattggtctgcacaaggcacaatgttttgggcactttttgttcttggacatgattgtggtcatggaagtttttccaacagtcctatgttgaacagcattgtgggccacatcttgcactcttcaatccttgtaccataccatggatggagaattagccacaggactcaccatcagaaccatggccatgttgagaaggatgaatcatgggttccgctttcagagaaagtttacaagaatctagacaacatgacaagaatgatgagattcactcttcctttccccatctttgcataccccttttatttgtggagcagaagcccaggaaaagaaggttctcatttcaacccttacagcaacttgttctcccctggtgagagaagagatgtgataacttcaactctgtgttggggcatcatgctttctctgcttctctatctttccctcacaatgggtccactttttatgctcaagctctatggggttccctatttgatcttcgtcatgtggctggatttcgtcacatacttgcatcatcatggttacaagcagaaactaccttggtaccgtggccaggaatggacttatctaaggggtggtcttacaaccgtagatcgtgactatggttggatcaacaacattcaccatgacattggcacccatgttatccatcaccttttccctcaaattccacattatcatttaatcgaagcgactaaagcagcaaaggcagtgctaggaaagtattatcgtgagcctcagaaatctgggccattgccacttcatctaataaagtacttgctacacagcataagtcaggatcacttcgttagcgactctggcgacattgtgtactaccagactgattcccagctccacaaagattcttggacccagtccaactaa

SEQ ID NO: 53859 - protein, 381 aa, Glycine max
MVQAQPLQHVGNGAGKEDLSYNFDPSAPPPFKIADIRAAIPKHCWEKNTLRSLSYVLRDVLIVSALVAAAIGFNSWLFWPPYWSAQGTMFWALFVLGHDCGHGSFSNSPMLNSIVGHILHSSILVPYHGWRISHRTHHQNHGHVEKDESWVPLSEKVYKNLDNMTRMMRFTLPFPIFAYPFYLWSRSPGKEGSHFNPYSNLFSPGERRDVITSTLCWGIMLSLLLYLSLTMGPLFMLKLYGVPYLIFVMWLDFVTYLHHHGYKQKLPWYRGQEWTYLRGGLTTVDRDYGWINNIHHDIGTHVIHHLFPQIPHYHLIEATKAAKAVLGKYYREPQKSGPLPLHLIKYLLHSISQDHFVSDSGDIVYYQTDSQLHKDSWTQSN

SEQ ID NO: 53860 - DNA, 1164 bp, Zea mays
  CDS (1)..(1164)
atgggtgccggcggcaggatgacggagaaggagcgggagaagcaggagcagctcggccgcgccaacggcggcgcagcctaccagcgctcgccgacggacaagccgccgttcacgctgggtcagatcaagaaggcaatcccgcctcactgcttccagcgctcgatcatcaagtccttctcctacgtggtccatgacctggtcatcgtcgcggccctgctgtacgcggcgctggtctggatccccaccctcccgagcgtgctgcagctgggcgcctggccgctctactgggtcgtgcagggctgcgtcatgaccggcgtctgggtcatcgcgcacgagtgcggccaccacgccttctccgactactcgctgctcgacgacaccgtcggcctggtgctccactcgtggctgctcgtcccctacttctcgtggaagtacagccaccgtcgccaccactccaacaccgggtcgctggagcgcgatgaggtgttcgtccccaagcagaaggaggcgctggcgtggtacaccccttacatctacaacaaccccgtcggccgtctggtgcacatcgtcgtgcagctcaccctcgggtggccgctgtacctggcgctcaacgcctcaggccgcccgtacccgcgcttcgcctgccacttcgacccctacggcccgatctacaacgaccgggagcgagcccagatcttcatctcagacgccggcgtcgtggccgtggcgttcgggctgtacaagctggcggcggcgttcggggtctggtgggtggtgcgcgtgtacgccgtgccgctgctgatcgtgaacgcgtggctggtgctcatcacctacctgcagcacacccacccgtcgctcccccactacgactcgagcgagtgggactggctgcgcggcgcgctggccaccatggaccgcgactacggcatcctcaaccgcgtgttccacaacatcacggacacgcacgtcgcgcaccacctcttctccaccatgccgcactaccacgccatggaggccaccaaggcgatcaggcccatcctcggcgactactaccacttcgacccgacccctgtcgccaaggcgacctggcgcgaggccggggaatgcatctacgtcgagcccgaggaccgcaagggcgtcttctggtacaacaagaagttctag

SEQ ID NO: 53861 - protein, 387 aa, Zea mays
MGAGGRMTEKEREKQEQLGRANGGAAYQRSPTDKPPFTLGQIKKAIPPHCFQRSIIKSFSYVVHDLVIVAALLYAALVWIPTLPSVLQLGAWPLYWVVQGCVMTGVWVIAHECGHHAFSDYSLLDDTVGLVLHSWLLVPYFSWKYSHRRHHSNTGSLERDEVFVPKQKEALAWYTPYIYNNPVGRLVHIVVQLTLGWPLYLALNASGRPYPRFACHFDPYGPIYNDRERAQIFISDAGVVAVAFGLYKLAAAFGVWWVVRVYAVPLLIVNAWLVLITYLQHTHPSLPHYDSSEWDWLRGALATMDRDYGILNRVFHNITDTHVAHHLFSTMPHYHAMEATKAIRPILGDYYHFDPTPVAKATWREAGECIYVEPEDRKGVFWYNKKF

SEQ ID NO: 53862 - DNA, 1332 bp, Zea mays
  CDS (1)..(1332)
atggcccggctcgtgctctccgagtgctgcggcctcgcgccgctccgccgcctgcgcgccggccggggcgccattgcggcgccgtcaccccccgcgctctccgcggcgccgcgccgtcgtcccgcgtccgcgtccatccaccgcgactgggcgctccgcgtctccgcgcccacccgcctcgcctccgccgccgtcgaggaggacaagccgagcgccgcgccggggcaggaggagggcgcggcggccggcggggagttcgacccgggggcgccgccgccgttcgggctggcggagatccgcgccgccatccccaagcactgctgggtcaaggacccctggcgctccatgagctacgtgctgcgcgacgtcgccgtcgtcctgggcctcgccgcagcggccgcgcgcctcgacagctggctcgtctggccgctctactgggccgcgcagggcaccatgttctgggcgctcttcgtcctcggccacgactgtggacacgggagcttctcgaacaaccccaagttaaacagcgtcgtcggccacatactccattcctccattcttgtgccataccacggatggaggattagccacaggacgcaccatcaaaaccacggtcacgttgagaaggacgagtcctggcacccgctaccagagaggctgtacaaaagcctggactttatgactaggaaactgcggttcaccatgccgttccccttgctcgcgttcccgttatacttgtttgcgaggagtccagggaagtcaggatcacacttcaacccaggcagtgatctgttccaacctactgaaaagaatgacatcataacatcgacggcgtcctggctggccatggttggtgttctggccggtctcacctttctgatgggtcctgttccgatgctaaagctctacggagtcccatacttggtatttgttgcttggctggatatggtcacatacttgcaccatcatggccacgaagacaagcttccctggtaccgtggaaaggagtggagttatctgcgtggaggactgacgacgctcgaccgggactacggatggatcaacaacatccatcacgacatcggaactcatgtcatccatcacctcttccctcagatcccgcattaccatctcatcgaggcgaccgaggcagcaaagccggttcttggcaagtactacaaagagccgaagaagtcgggtgctctgccgtggcacctattccgggtgctggcacagagcttgaagcaagaccactatgtcagtgataccggagatgtggtctactaccaagctgagtcgaaaacgagcacctctgcacaaaaatccgattga

SEQ ID NO: 53863 - protein, 443 aa, Zea mays
MARLVLSECCGLAPLRRLRAGRGAIAAPSPPALSAAPRRRPASASIHRDWALRVSAPTRLASAAVEEDKPSAAPGQEEGAAAGGEFDPGAPPPFGLAEIRAAIPKHCWVKDPWRSMSYVLRDVAVVLGLAAAAARLDSWLVWPLYWAAQGTMFWALFVLGHDCGHGSFSNNPKLNSVVGHILHSSILVPYHGWRISHRTHHQNHGHVEKDESWHPLPERLYKSLDFMTRKLRFTMPFPLLAFPLYLFARSPGKSGSHFNPGSDLFQPTEKNDIITSTASWLAMVGVLAGLTFLMGPVPMLKLYGVPYLVFVAWLDMVTYLHHHGHEDKLPWYRGKEWSYLRGGLTTLDRDYGWINNIHHDIGTHVIHHLFPQIPHYHLIEATEAAKPVLGKYYKEPKKSGALPWHLFRVLAQSLKQDHYVSDTGDVVYYQAESKTSTSAQKSD

SEQ ID NO: 53864 - DNA, 1164 bp, Zea mays
  CDS (1)..(1164)
atgggtgccggcggcaggatgaccgagaaggagcgggagaagcaggagcagctcgcccgagctaccggtggcgccgcgatgcagcggtcgccggtggagaagcctccgttcactctgggtcagatcaagaaggccatcccgccacactgcttcgagcgctcggtgctcaagtccttctcgtacgtggtccacgacctggtgatcgccgcggcgctcctctacttcgcgctggccatcataccggcgctcccaagcccgctccgctacgcggcctggccgctgtactggatcgcgcaggggtgcgtgtgcaccggcgtgtgggtcatcgcgcacgagtgcggccaccacgccttctcggactactcgctcctggacgacgtggtcggcctggtgctgcactcgtcgctcatggtgccctacttctcgtggaagtacagccaccggcgccaccactccaacacggggtccctggagcgcgacgaggtgttcgtgcccaagaagaaggaggcgctgccgtggtacaccccgtacgtgtacaacaacccggtcggccgggtggtgcacatcgtggtgcagctcaccctcgggtggccgctgtacctggcgaccaacgcgtcggggcggccgtacccgcgcttcgcctgccacttcgacccctacggccccatctacaacgaccgggagcgcgcccagatcttcgtctcggacgccggcgtcgtggccgtggcgttcgggctgtacaagctggcggcggcgttcggggtctggtgggtggtgcgcgtgtacgccgtgccgctgctgatcgtgaacgcgtggctggtgctcatcacctacctgcagcacacccacccgtcgctcccccactacgactcgagcgagtgggactggctgcgcggcgcgctggccaccatggaccgcgactacggcatcctcaaccgcgtgttccacaacatcacggacacgcacgtcgcgcaccacctcttctccaccatgccgcactaccacgccatggaggccaccaaggcgatcaggcccatcctcggggactactaccacttcgacccgacccctgttgccaaggcgacctggcgcgaggccagggagtgcatctacgtcgagcccgaggaccgcaagggcgtcttctggtacaacaagaagttctag

SEQ ID NO: 53865 - protein, 387 aa, Zea mays
MGAGGRMTEKEREKQEQLARATGGAAMQRSPVEKPPFTLGQIKKAIPPHCFERSVLKSFSYVVHDLVIAAALLYFALAIIPALPSPLRYAAWPLYWIAQGCVCTGVWVIAHECGHHAFSDYSLLDDVVGLVLHSSLMVPYFSWKYSHRRHHSNTGSLERDEVFVPKKKEALPWYTPYVYNNPVGRVVHIVVQLTLGWPLYLATNASGRPYPRFACHFDPYGPIYNDRERAQIFVSDAGVVAVAFGLYKLAAAFGVWWVVRVYAVPLLIVNAWLVLITYLQHTHPSLPHYDSSEWDWLRGALATMDRDYGILNRVFHNITDTHVAHHLFSTMPHYHAMEATKAIRPILGDYYHFDPTPVAKATWREARECIYVEPEDRKGVFWYNKKF

SEQ ID NO: 53866 - DNA, 1179 bp, Zea mays
  CDS (1)..(1179)
atgggtgccggaggcaggatgaccgagaaggagcgggagaagcatgagcaggagcaggtcgcccgtgctaccggcggtggcgcggcagtgcagcggtcgccggtggagaagccgccgttcacgttggggcagatcaagaaggcgatcccgccgcactgcttcgagcgctccgtgctgaggtccttctcgtacgtggcccacgacctggcgctcgccgcggcgctcctctacctcgcggtggccgtgataccggcgctaccctgcccgctccgctacgcggcctggccgctgtactgggtggcccaggggtgcgtgtgcacgggcgtgtgggtgatcgcgcacgagtgcggccaccacgccttctccgaccacgcgctcctggacgacgccgtcggcctggcgctgcactcggcgctgctggtgccctacttctcgtggaagtacagccaccggcgccaccactccaacacggggtccctggagcgcgacgaggtgttcgtgccgaggaccaaggaggcgctgccgtggtacgccccgtacgtgcacggcagccccgcgggccggctggcgcacgtcgccgtgcagctcaccctgggctggccgctgtacctggccaccaacgcgtcgggccgcccgtacccgcgcttcgcctgccacttcgacccctacggcccgatctacggcgaccgggagcgcgcccagatcttcgtctcggacgccggcgtcgcggccgtggcgttcgggctgtacaagctggcggcggcgttcgggctctggtgggtggtgcgcgtgtacgccgtgccgctgctgatcgtcaacgcgtggctggtgctcatcacgtacctgcagcacacccacccggcgctgccccactacgactcgggcgagtgggactggctgcgcggcgcgctcgccaccgtcgaccgcgactacggcgtcctcaaccgcgtgttccaccacatcacggacacgcacgtcgcgcaccacctcttctccaccatgccgcactaccacgccgtggaggccaccagggcgatcaggcccgtcctcggcgactactaccagttcgacccgacccctgtcgccaaggccacctggcgcgaggccagggagtgcatctacgtcgagcctgagatccgcaacagcaagggcgtcttctggtacaacagcaagttctag

SEQ ID NO: 53867 - protein, 392 aa, Zea mays
MGAGGRMTEKEREKHEQEQVARATGGGAAVQRSPVEKPPFTLGQIKKAIPPHCFERSVLRSFSYVAHDLALAAALLYLAVAVIPALPCPLRYAAWPLYWVAQGCVCTGVWVIAHECGHHAFSDHALLDDAVGLALHSALLVPYFSWKYSHRRHHSNTGSLERDEVFVPRTKEALPWYAPYVHGSPAGRLAHVAVQLTLGWPLYLATNASGRPYPRFACHFDPYGPIYGDRERAQIFVSDAGVAAVAFGLYKLAAAFGLWWVVRVYAVPLLIVNAWLVLITYLQHTHPALPHYDSGEWDWLRGALATVDRDYGVLNRVFHHITDTHVAHHLFSTMPHYHAVEATRAIRPVLGDYYQFDPTPVAKATWREARECIYVEPEIRNSKGVFWYNSKF

SEQ ID NO: 53868 - DNA, 1155 bp, Zea mays
  CDS (1)..(1155)
atgagcggccggcggcgggtggacgacgaccacgaccacgacgtcgtcttcgacgccgggaaaccgccgccgttccgcatcggcgacgtgcgggcggcggtgccggagcactgctggcgcaagaacccctggcggtcgctgtggtacgtggcgcgggacgtggcggtggtggcggcgctgggcgcggcggcggcgggcatggacagttgggcggtgtggccgctgtactgggcggcgcaggggaccatgttctgggcgctcttcgtgctgggacacgactgtggccatggcagcttctcggacagcgcgacgctcaacagcgtcgtgggccatctccttcactccttcatcctcgtcccttaccatggatggaggatcagccacagaacacaccatcagaaccacggccacatccacagggacgagtcatggcacccgatcacggagaagctgtaccggcaactagagccacgcaccaagaagctgagattcacggtgcccttcccgctgctcgcattccccgtctacctcttgtacaggagccccggcaagtcgggctcccacttccttcccagcagcgacctgttcagccccaaggagaagagcgacgtcatggtgtcaaccacctgctggtgcatcatgctcgcctccctcctcgccatggcgtgcgcgttcggcccactccaggtgctcaagatgtacggcatcccatacctggtgttcgtgatgtggcttgacctggtgacgtacctgcaccaccatgggcaccatcagcttcctctcccctggtaccgcggccaggagtggagctacctgcgcggcggcctcaccacggtggacagggactacggctggatcaacaacgtccaccacgacatcggcacccacgtcattcatcacctcttcccgcagatcccgcactaccatctcgtcgaagctaccaaggcagccaagccggtgctggggcgatactaccgggagccgcacaagtcaggcccgctgccacttcacctcctcgtcgtgctcctcaggagcctcagagtcgaccacttcgtcagcgaccacggggatgtcgtctactaccaaaccgaccatgacttgaacactagcagtgctcatggctgggccaaccaaaaccaccataagcaaaaataa

SEQ ID NO: 53869 - protein, 384 aa, Zea mays
MSGRRRVDDDHDHDVVFDAGKPPPFRIGDVRAAVPEHCWRKNPWRSLWYVARDVAVVAALGAAAAGMDSWAVWPLYWAAQGTMFWALFVLGHDCGHGSFSDSATLNSVVGHLLHSFILVPYHGWRISHRTHHQNHGHIHRDESWHPITEKLYRQLEPRTKKLRFTVPFPLLAFPVYLLYRSPGKSGSHFLPSSDLFSPKEKSDVMVSTTCWCIMLASLLAMACAFGPLQVLKMYGIPYLVFVMWLDLVTYLHHHGHHQLPLPWYRGQEWSYLRGGLTTVDRDYGWINNVHHDIGTHVIHHLFPQIPHYHLVEATKAAKPVLGRYYREPHKSGPLPLHLLVVLLRSLRVDHFVSDHGDVVYYQTDHDLNTSSAHGWANQNHHKQK

SEQ ID NO: 53870 - DNA, 1224 bp, Zea mays
  CDS (1)..(1224)
atggcacgcctgctcctctccgtctcagtccccatgtccgctagcagcagccgccgcattgtggttcctggtaccgcgcggcaccgaggccgcagcggcgtctgtgtcgctgtgcccgccacctccaccgccaccgccacccaacaagaatttgaccccgcggcggcgccaccgttcgggctgggcgacatccgcgccgccatccccaagcactgctgggtgaaggacccctggcgctccatgggctacgtggtgcgcgacgtggtcctggtgctgggtctcgccgccgccgcggcgcgcctcgacagctggctcgtctggccgctctactgggcggcacagggcaccatgttctgggcgctcttcgtgctgggacacgactgcggccacggcagcttctccaacaaccccatactcaacagcgtggtcggtcacattctgcactcatccatcctggtgccatacaacggctggcggattagccacaggacgcaccaccagaaccacggccacgtggacaaggacgagtcatggcatccactccccgagcgcctgttcaagagcctggacagcgtcgtcctgatgctgcgcttcaggctgcccttccctatgctcgtctacccattctacctggccaacaggagccccggcaagtccggctcccatttccacccggccagcgacctcttccagcccagcgagagcaaacaagtgctcacctccacggcgtgctggctcgccatggccgcactcctagctggcctcgccttcctcatgggccctctgcagatgctcaagctctacctggtcccctactgggtttttgtcatgtggctcgacttcgtcacctacctgcatcatcacggacacaatgacaagcttccatggtaccgaggaaaggaatggacctatcttcggggtggcctgacaacgctcgaccgggactacgggtggatcaacaacatccaccatgacattgggactcatgtcatccaccatctcttcccgcagatcccacactaccatctcatagaggcaacagaggcagccaaaccggtgctgggaaattactacagagagccgcaaaagtctggccctctccccttgcatctacttggtgatctggttcagagcttgaggcgtgaccactatgtcagcgacacaggggatgtcgtctactaccaaactgaccccaccattagctgttctggtccattcacttga

SEQ ID NO: 53871 - protein, 407 aa, Zea mays
MARLLLSVSVPMSASSSRRIVVPGTARHRGRSGVCVAVPATSTATATQQEFDPAAAPPFGLGDIRAAIPKHCWVKDPWRSMGYVVRDVVLVLGLAAAAARLDSWLVWPLYWAAQGTMFWALFVLGHDCGHGSFSNNPILNSVVGHILHSSILVPYNGWRISHRTHHQNHGHVDKDESWHPLPERLFKSLDSVVLMLRFRLPFPMLVYPFYLANRSPGKSGSHFHPASDLFQPSESKQVLTSTACWLAMAALLAGLAFLMGPLQMLKLYLVPYWVFVMWLDFVTYLHHHGHNDKLPWYRGKEWTYLRGGLTTLDRDYGWINNIHHDIGTHVIHHLFPQIPHYHLIEATEAAKPVLGNYYREPQKSGPLPLHLLGDLVQSLRRDHYVSDTGDVVYYQTDPTISCSGPFT

SEQ ID NO: 53872 - DNA, 1122 bp, Zea mays
  CDS (1)..(1122)
atgcgtgccggtgccaggttgatcgagaaggagcagcaggagcagcgcgcaccggtggagaagcctccgttcaccctgggtcagatcaagaaggccatcccgccacactgcttcgagcgctcggtgctcaagtccttctcctacgtgctccgtgacctcgtcaccgccgcggcgctcctgtacttggcgctggtcaccatcccggcgctcccgagcccgctccagtacgccgcctggccgctctactggatcgcacaaggctgcgtgtgcaccggcctgtgggtcatcgggcacgagtgtggccacaacgccttctcggagtacccgctcctcgacgacatcgttggcctggtgctgcactcgtcgctgatggtcccgtacttctcgtggaagtacagccaccggcgccaccactccaacattggctccctggagcgcgacgaggtgtttgtgcccaagaagaaggaagcgctgccgtggtacacgccgtacgtgtgcaacagccccgtgggccgtctgctgcagatcgtcgtgcagctaaccctcgggtggccactgtacctggccaccaacgtgtcgggtcgcccgtacccgcgcttcgcctgccactacgacccctacggcccgatctacagcgaccgggagcgcgcccaggtcttcgtctcggacgccggcgtcgtggccgcgtggttcgggctgtacaagctggcggcgacgttcgggttctggtgggtggtgcgcgtctacgccgtgccgctggtgattgtgaacgcgtggctggtgatcgtcaccttcctccagcacacccacccggctctcccccgctacgactccagcgagtgggactggctgcgcggcgcgctagccaccatggaccgcgactacggcgccctcaaccgcgtgttccacaacatcaccgacacacacgtcgtgcaccatctcttgtccaccgtgccgcactaccacgccgtggaggctaccaaggcgatcaagcccatcctcggcgagtactatcagttcgaccccacccccatcgccaaggcgatgtggcgcgaagctagggagtgcatctacgtcgagcccgagaacggcaggggcatcttatggtacaacaagttctag

SEQ ID NO: 53873 - protein, 373 aa, Zea mays
MRAGARLIEKEQQEQRAPVEKPPFTLGQIKKAIPPHCFERSVLKSFSYVLRDLVTAAALLYLALVTIPALPSPLQYAAWPLYWIAQGCVCTGLWVIGHECGHNAFSEYPLLDDIVGLVLHSSLMVPYFSWKYSHRRHHSNIGSLERDEVFVPKKKEALPWYTPYVCNSPVGRLLQIVVQLTLGWPLYLATNVSGRPYPRFACHYDPYGPIYSDRERAQVFVSDAGVVAAWFGLYKLAATFGFWWVVRVYAVPLVIVNAWLVIVTFLQHTHPALPRYDSSEWDWLRGALATMDRDYGALNRVFHNITDTHVVHHLLSTVPHYHAVEATKAIKPILGEYYQFDPTPIAKAMWREARECIYVEPENGRGILWYNKF

SEQ ID NO: 53874 - DNA, 20 bp, Artificial sequence
  primer
atgcgtctagaaatttcatc

SEQ ID NO: 53875 - DNA, 20 bp, Artificial sequence
  primer
ttaaggtttcttttgatatc

SEQ ID NO: 53876 - protein, 409 aa, Artificial sequence
  consensus sequence
  Variant (2)..(4): Xaa in position 2 to 4 is any amino acid
  Variant (8)..(14): Xaa in position 8 to 14 is any amino acid
  Variant (18)..(18): Xaa in position 18 is any amino acid
  Variant (21)..(27): Xaa in position 21 to 27 is any amino acid
  Variant (29)..(29): Xaa in position 29 is any amino acid
  Variant (33)..(34): Xaa in position 33 to 34 is any amino acid
  Variant (36)..(41): Xaa in position 36 to 41 is any amino acid
  Variant (43)..(44): Xaa in position 43 to 44 is any amino acid
  Variant (45)..(45): Xaa in position 45 is any or no amino acid
  Variant (47)..(54): Xaa in position 47 to 54 is any amino acid
  Variant (55)..(70): Xaa in position 55 to 70 is any or no amino acid
  Variant (73)..(73): Xaa in position 73 is any amino acid
  Variant (76)..(77): Xaa in position 76 to 77 is any amino acid
  Variant (80)..(86): Xaa in position 80 to 86 is any amino acid
  Variant (88)..(89): Xaa in position 88 to 89 is any amino acid
  Variant (91)..(91): Xaa in position 91 is any amino acid
  Variant (95)..(96): Xaa in position 95 to 96 is any amino acid
  Variant (99)..(102): Xaa in position 99 to 102 is any amino acid
  Variant (104)..(106): Xaa in position 104 to 106 is any amino acid
  Variant (109)..(110): Xaa in position 109 to 110 is any amino acid
  Variant (114)..(115): Xaa in position 114 to 115 is any amino acid
  Variant (120)..(121): Xaa in position 120 to 121 is any amino acid
  Variant (123)..(124): Xaa in position 123 to 124 is any amino acid
  Variant (128)..(128): Xaa in position 128 is any amino acid
  Variant (131)..(131): Xaa in position 131 is any amino acid
  Variant (133)..(133): Xaa in position 133 is any amino acid
  Variant (135)..(136): Xaa in position 135 to 136 is any amino acid
  Variant (138)..(138): Xaa in position 138 is any amino acid
  Variant (141)..(143): Xaa in position 141 to 143 is any amino acid
  Variant (145)..(169): Xaa in position 145 to 169 is any amino acid
  Variant (170)..(197): Xaa in position 170 to 197 is any or no amino acid
  Variant (199)..(199): Xaa in position 199 is any amino acid
  Variant (202)..(204): Xaa in position 202 to 204 is any amino acid
  Variant (205)..(205): Xaa in position 205 is any or no amino acid
  Variant (207)..(212): Xaa in position 207 to 212 is any amino acid
  Variant (213)..(231): Xaa in position 213 to 231 is any or no amino acid
  Variant (233)..(234): Xaa in position 233 to 234 is any amino acid
  Variant (236)..(243): Xaa in position 236 to 243 is any amino acid
  Variant (245)..(245): Xaa in position 245 is any amino acid
  Variant (246)..(250): Xaa in position 246 to 250 is any or no amino acid
  Variant (252)..(261): Xaa in position 252 to 261 is any amino acid
  Variant (263)..(269): Xaa in position 263 to 269 is any amino acid
  Variant (271)..(277): Xaa in position 271 to 277 is any amino acid
  Variant (279)..(280): Xaa in position 279 to 280 is any amino acid
  Variant (282)..(287): Xaa in position 282 to 287 is any amino acid
  Variant (290)..(292): Xaa in position 290 to 292 is any amino acid
  Variant (296)..(296): Xaa in position 296 is any amino acid
  Variant (298)..(304): Xaa in position 298 to 304 is any amino acid
  Variant (305)..(309): Xaa in position 305 to 309 is any or no amino acid
  Variant (311)..(313): Xaa in position 311 to 313 is any amino acid
  Variant (316)..(317): Xaa in position 316 to 317 is any amino acid
  Variant (321)..(321): Xaa in position 321 is any amino acid
  Variant (323)..(323): Xaa in position 323 is any amino acid
  Variant (325)..(325): Xaa in position 325 is any amino acid
  Variant (328)..(328): Xaa in position 328 is any amino acid
  Variant (332)..(333): Xaa in position 332 to 333 is any amino acid
  Variant (335)..(336): Xaa in position 335 to 336 is any amino acid
  Variant (337)..(338): Xaa in position 337 to 338 is any or no amino acid
  Variant (340)..(343): Xaa in position 340 to 343 is any amino acid
  Variant (347)..(347): Xaa in position 347 is any amino acid
  Variant (352)..(354): Xaa in position 352 to 354 is any amino acid
  Variant (359)..(360): Xaa in position 359 to 360 is any amino acid
  Variant (364)..(364): Xaa in position 364 is any amino acid
  Variant (366)..(366): Xaa in position 366 is any amino acid
  Variant (368)..(369): Xaa in position 368 to 369 is any amino acid
  Variant (372)..(372): Xaa in position 372 is any amino acid
  Variant (375)..(400): Xaa in position 375 to 400 is any amino acid
  Variant (401)..(408): Xaa in position 401 to 408 is any or no amino acid
PXXXPPFXXXXXXXAIPXHCXXXXXXXSXSYVXXDXXXXXXLXXXAXXXXXXXXXXXXXXXXXXXXXXXXWPXYWXXQGXXXXXXXVXXHXCGHXXFSXXXXLXXXVGXXLHSXXLVPYXXWXXSHRXHHXNXGXXEXDEXXXPXXXXXXXXXXXXXXXXXXXXXXXXXXXXXXXXXXXXXXXXXXXXXXXXXXXXXPXYLXXXXSXXXXXXXXXXXXXXXXXXXXXXXXXHXXPXXXXXXXXEXXXXXXSXXXXXXXXXXLXXXXXXXGXXXXXXXYXXPXXXXXXWLXXXTYLXHXXXXXXXXXXXXYXXXEWXXLRGXLXTXDRXDYGXXNXXXXHXXXXTHVXHHLFXXXPHYHXXEATXAXKXXLGXYYXXXXXXXXXXXXXXXXXXXXXXXXXXXXXXXXXXV

SEQ ID NO: 53877 - protein, 21 aa, Artificial sequence
  protein pattern
  Variant (2)..(2): Xaa in position 2 is Phe or Tyr
  Variant (3)..(3): Xaa in position 3 is any amino acid
  Variant (5)..(5): Xaa in position 5 is any amino acid
  Variant (6)..(6): Xaa in position 6 is Gly or Ser
  Variant (7)..(7): Xaa in position 7 is Asp, Asn, Pro or Ser
  Variant (8)..(8): Xaa in position 8 is Ile or Leu
  Variant (9)..(9): Xaa in position 9 is Phe or Tyr
  Variant (10)..(12): Xaa in position 10 to 12 is any amino acid
  Variant (14)..(16): Xaa in position 14 to 16 is any amino acid
  Variant (17)..(17): Xaa in position 17 is Ile or Val
  Variant (18)..(19): Xaa in position 18 to 19 is any amino acid
  Variant (21)..(21): Xaa in position 21 is Asp, Asn, Ser or Thr
HXXPXXXXXXXXEXXXXXXSX

SEQ ID NO: 53878 - DNA, 1659 bp, Synechocystis sp.; identical to SEQ ID NO: 31636
  CDS (1)..(1659): transl_table=11

SEQ ID NO: 53879 - protein, 552 aa, Synechocystis sp.; identical to SEQ ID NO: 31637

SEQ ID NO: 53880 - DNA, 2086 bp, Oryza sativa
  CDS (15)..(1760)
gtcaatctttccccatggcggagcccggggaggatgcggcagcggcagcggcggcggcgtcgaccaagtacgtgctcatcaccggcggcgtcgtcagcgggctcgggaagggggtcacggccagcagcgtcggcgtcgtcctcaaggcctgcggcctccgcgtcacctgcatcaagatcgatccatatttaaacacagatgctggtacaatgtctccttttgagcatggtgaggtctttgtgcttgacgatggtggagaggttgacttggatttagggaattatgagcgtttcttggatgttactctgacaagggataacaacattacaactggaaagatatatcagtctgtcattgagaaggagaggaagggtgactatcttggaaagacggtccaggttgttcctcatgtaactgatgaaattaaacagtggatacagtcagtatcttctgttcctgtggatgggcagactcgtccagctgatgtttgtgtcattgaattgggaggcactgtaggtgatattgaatcaatgccattcattgaagctctgcgccagttgtcattttctcttggtaaggacaatttctgcctcatacatgtgagccttgttccggtattgggtgtagttggtgagcagaaaactaagccaacacaacacagtgtacgagaactaagggccttgggtctgactcctgatcttctagcatgccgatccgcacagccactaataggatctgtcaaggagaaactttcacaattttgtcatgtaccggttgagaatatacttaacatccatgatgttccaaacttgtggcatgttccacttattcttagaaaccaaaaggttcacgaggctataatcaaacaacttaaccttggaaggtctgctggaccccctgagttacgagataggacacagatggctgagtcatatgatgacctcaaaaactctgttaaaatcgctttggttgggaaatatactaatctgaccgattcctacttatcagtggtgaaggctcttctacatgcgagtgttgcatgttcattgaaaccttctatccagtggattgcagcttcagatcttgaagatgcaactgcaacaagtgcaccagatgcccatgctaaagcttgggaaactcttaagggttcctcttgcattttgataccaggaggattcggggatcgtggaatatctgggatgatattggctgcaaaatatgctcgtgagaataaagttccataccttggcatttgcttgggaatgcagatatcagtgattgagatgtccagaaatgttcttggcctaaaggatgcagacagtgaagagttcaactcagaaacaccatttcgtgtggttatgtacatgcctgaggtttcaaaaacgcacatgggaaatacaatgaggttgggttgccgaagaacgttctttcgcaggacagattgtcttacatcaaaactatatgggagccctgagcatgtagatgagcgtcatcgtcacagatatgaggtgaacccttctttcgttgctatgcttgaaaacgctggccttcattttgttggttgcgatgaaagtggaaagaggatggaggttgtagagctacaagaccacccattttacataggtgttcaattccatccagaatttaagtcaaggcctcggagaccttcacctccatttactggtctaatattggcagcagctgaatacatgggaacacctgcaaataactcaaatggacatgttggaacatctgagtaatgccatccttaatctatcagatggaggtcattgatccctttttggtgttttgttgaggcatctgcttgttgctgctgagatgaggattctagtcattttggtcacatacataatcatgtaccggagataacacttaaagctggaagagaatttttgttatcccagagacctgtaattgcatagctgatcatggattcatgatacagtgtgcaacggattttagcgtggtaattttgttgggtgctcagagttttaacttctgatagtaattgtatcctgttaaacccgtgctccgttcaagttaaaatgaaaacttgcattatctt

SEQ ID NO: 53881 - protein, 581 aa, Oryza sativa
MAEPGEDAAAAAAAASTKYVLITGGVVSGLGKGVTASSVGVVLKACGLRVTCIKIDPYLNTDAGTMSPFEHGEVFVLDDGGEVDLDLGNYERFLDVTLTRDNNITTGKIYQSVIEKERKGDYLGKTVQVVPHVTDEIKQWIQSVSSVPVDGQTRPADVCVIELGGTVGDIESMPFIEALRQLSFSLGKDNFCLIHVSLVPVLGVVGEQKTKPTQHSVRELRALGLTPDLLACRSAQPLIGSVKEKLSQFCHVPVENILNIHDVPNLWHVPLILRNQKVHEAIIKQLNLGRSAGPPELRDRTQMAESYDDLKNSVKIALVGKYTNLTDSYLSVVKALLHASVACSLKPSIQWIAASDLEDATATSAPDAHAKAWETLKGSSCILIPGGFGDRGISGMILAAKYARENKVPYLGICLGMQISVIEMSRNVLGLKDADSEEFNSETPFRVVMYMPEVSKTHMGNTMRLGCRRTFFRRTDCLTSKLYGSPEHVDERHRHRYEVNPSFVAMLENAGLHFVGCDESGKRMEVVELQDHPFYIGVQFHPEFKSRPRRPSPPFTGLILAAAEYMGTPANNSNGHVGTSE

SEQ ID NO: 53882 - DNA, 1638 bp, Haemophilus influenzae; identical to SEQ ID NO: 31416
  CDS (1)..(1638): transl_table=11

SEQ ID NO: 53883 - protein, 545 aa, Haemophilus influenzae; identical to SEQ ID NO: 31417

SEQ ID NO: 53884 - DNA, 1611 bp, Staphylococcus aureus
  CDS (1)..(1611): transl_table=11
atgacaaaatttatttttgtaacaggtggcgtagtttcatcattagggaagggtattacagcatcttctctaggtagattattaaaagatagaggtctaaatgtaacaattcaaaaattcgatccatacttaaatgttgacccaggtacaatgagtccttatcaacatggtgaagtattcgtaacggatgatggtgcagaaactgacctagacttaggacattacgaaagatttattgatattaatttaaacaagttttcaaatgtaacagccggtaaagtgtattcacacgtattgaaaaaagaacgtcgtggtgattacttaggcggaacagttcaagttattccgcatatcacaaatgaaattaaagaacgtttattacttgcaggggaaagtacgaatgcagacgttgttatcactgaaattggcggtacaacaggtgatattgagtcattaccgtttattgaagcgattcgtcaaattcgtagcgatttaggtagagaaaatgttatgtatgttcactgtacattactgccttatattaaagctgctggagaaatgaaaacgaagccgacacaacatagtgttaaagaattacgaggcttaggtattcaaccagacttaatcgttgtaagaactgaatatgaaatgacacaagatttaaaagataaaattgcattattctgtgacattaataaagaaagtgttattgaatgtcgtgatgcagactctttatacgaaattccattacaattaagccaacaaaatatggatgatatcgttattaaacgtttacaattaaacgcgaaatatgaaacacagcttgatgaatggaaacagttgttagatatcgttaataatttagatggtaaaattacaattggcttagttggtaagtatgttagcttacaagatgcatacttatctgtagttgaatcattaaaacatgccggatatcctttcgctaaagatattgatattagatggattgattcaagtgaagttacagatgaaaatgcggctgaataccttgcagatgtcgacggtattttagtaccaggtggatttggtttccgtgcaagtgaaggtaaaattagtgcaattaagtatgctagagaaaacaatgtaccattctttggtatttgtttaggaatgcaacttgcaacagttgaattttcgagaaacgtattaggccttgaaggcgcacattcagctgaattagaccctgcaacaccatacccaattatagatttattaccagaacaaaaagatatcgaagatttaggtggtacattacgcttaggcttatatccatgttcaattaaagaaggcacattggcacaagatgtttatggtaaagcggaaattgaagaaagacatcgtcatcgttatgaatttaacaatgactatagagaacaattagaagcgaatggtatggtgatttctggtacaagtccagatggacgtttagtagaaatggtagagattccgacaaatgatttctttattgcttgtcaattccacccagaattcttatctagaccaaatcgtccgcacccgatttttaaatcatttattgaagcttcattaaaatatcaacaaaataaataa

SEQ ID NO: 53885 - protein, 536 aa, Staphylococcus aureus
MTKFIFVTGGVVSSLGKGITASSLGRLLKDRGLNVTIQKFDPYLNVDPGTMSPYQHGEVFVTDDGAETDLDLGHYERFIDINLNKFSNVTAGKVYSHVLKKERRGDYLGGTVQVIPHITNEIKERLLLAGESTNADVVITEIGGTTGDIESLPFIEAIRQIRSDLGRENVMYVHCTLLPYIKAAGEMKTKPTQHSVKELRGLGIQPDLIVVRTEYEMTQDLKDKIALFCDINKESVIECRDADSLYEIPLQLSQQNMDDIVIKRLQLNAKYETQLDEWKQLLDIVNNLDGKITIGLVGKYVSLQDAYLSVVESLKHAGYPFAKDIDIRWIDSSEVTDENAAEYLADVDGILVPGGFGFRASEGKISAIKYARENNVPFFGICLGMQLATVEFSRNVLGLEGAHSAELDPATPYPIIDLLPEQKDIEDLGGTLRLGLYPCSIKEGTLAQDVYGKAEIEERHRHRYEFNNDYREQLEANGMVISGTSPDGRLVEMVEIPTNDFFIACQFHPEFLSRPNRPHPIFKSFIEASLKYQQNK

SEQ ID NO: 53886 - DNA, 1641 bp, Myxococcus xanthus; identical to SEQ ID NO: 31488
  CDS (1)..(1641): transl_table=11

SEQ ID NO: 53887 - protein, 546 aa, Myxococcus xanthus; identical to SEQ ID NO: 31489

SEQ ID NO: 53888 - DNA, 1608 bp, Clostridium acetobutylicum; identical to SEQ ID NO: 31354
  CDS (1)..(1608): transl_table=11

SEQ ID NO: 53889 - protein, 535 aa, Clostridium acetobutylicum; identical to SEQ ID NO: 31355

SEQ ID NO: 53890 - DNA, 1635 bp, Neisseria meningitidis; identical to SEQ ID NO: 31492
  CDS (1)..(1635): transl_table=11

SEQ ID NO: 53891 - protein, 544 aa, Neisseria meningitidis; identical to SEQ ID NO: 31493

SEQ ID NO: 53892 - DNA, 1632 bp, Bradyrhizobium sp. ORS278; identical to SEQ ID NO: 31102
  CDS (1)..(1632): transl_table=11

SEQ ID NO: 53893 - protein, 543 aa, Bradyrhizobium sp. ORS278; identical to SEQ ID NO: 31103

SEQ ID NO: 53894 - DNA, 1635 bp, Dichelobacter nodosus VCS1703A; identical to SEQ ID NO: 31104
  CDS (1)..(1635): transl_table=11

SEQ ID NO: 53895 - protein, 544 aa, Dichelobacter nodosus VCS1703A; identical to SEQ ID NO: 31105

SEQ ID NO: 53896 - DNA, 1809 bp, Oryza sativa (japonica cultivar-group); identical to SEQ ID NO: 31688
  CDS (1)..(1809)

SEQ ID NO: 53897 - protein, 602 aa, Oryza sativa (japonica cultivar-group); identical to SEQ ID NO: 31689

SEQ ID NO: 53898 - DNA, 1794 bp, Arabidopsis thaliana; identical to SEQ ID NO: 31036
  CDS (1)..(1794)

SEQ ID NO: 53899 - protein, 597 aa, Arabidopsis thaliana; identical to SEQ ID NO: 31037

SEQ ID NO: 53900 - DNA, 1695 bp, Saccharomyces cerevisiae; identical to SEQ ID NO: 31038
  CDS (1)..(1695)

SEQ ID NO: 53901 - protein, 564 aa, Saccharomyces cerevisiae; identical to SEQ ID NO: 31039

SEQ ID NO: 53902 - DNA, 1803 bp, Arabidopsis thaliana; identical to SEQ ID NO: 31040
  CDS (1)..(1803)

SEQ ID NO: 53903 - protein, 600 aa, Arabidopsis thaliana; identical to SEQ ID NO: 31041

SEQ ID NO: 53904 - DNA, 1776 bp, Arabidopsis thaliana; identical to SEQ ID NO: 31044
  CDS (1)..(1776)

SEQ ID NO: 53905 - protein, 591 aa, Arabidopsis thaliana; identical to SEQ ID NO: 31045

SEQ ID NO: 53906 - DNA, 1671 bp, Arabidopsis thaliana; identical to SEQ ID NO: 31046
  CDS (1)..(1671)

SEQ ID NO: 53907 - protein, 556 aa, Arabidopsis thaliana; identical to SEQ ID NO: 31047

SEQ ID NO: 53908 - DNA, 1761 bp, Mycobacterium tuberculosis CDC1551; identical to SEQ ID NO: 31048
  CDS (1)..(1761): transl_table=11

SEQ ID NO: 53909 - protein, 586 aa, Mycobacterium tuberculosis CDC1551; identical to SEQ ID NO: 31049

SEQ ID NO: 53910 - DNA, 1737 bp, Agrobacterium tumefaciens str. C58; identical to SEQ ID NO: 31050
  CDS (1)..(1737): transl_table=11

SEQ ID NO: 53911 - protein, 578 aa, Agrobacterium tumefaciens str. C58; identical to SEQ ID NO: 31051

SEQ ID NO: 53912 - DNA, 1638 bp, Pyrococcus furiosus DSM 3638; identical to SEQ ID NO: 31052
  CDS (1)..(1638): transl_table=11

SEQ ID NO: 53913 - protein, 545 aa, Pyrococcus furiosus DSM 3638; identical to SEQ ID NO: 31053

SEQ ID NO: 53914 - DNA, 1692 bp, Xanthomonas campestris pv. campestris str. ATCC 33913; identical to SEQ ID NO: 31054
  CDS (1)..(1692): transl_table=11

SEQ ID NO: 53915 - protein, 563 aa, Xanthomonas campestris pv. campestris str. ATCC 33913; identical to SEQ ID NO: 31055

SEQ ID NO: 53916 - DNA, 1623 bp, Mycoplasma gallisepticum R; identical to SEQ ID NO: 31058
  CDS (1)..(1623): transl_table=4

SEQ ID NO: 53917 - protein, 540 aa, Mycoplasma gallisepticum R; identical to SEQ ID NO: 31059

SEQ ID NO: 53918 - DNA, 1659 bp, Wigglesworthia glossinidia endosymbiont of Glossina brevipalpis; identical to SEQ ID NO: 31060
  CDS (1)..(1659): transl_table=11

SEQ ID NO: 53919 - protein, 552 aa, Wigglesworthia glossinidia endosymbiont of Glossina brevipalpis; identical to SEQ ID NO: 31061

SEQ ID NO: 53920 - DNA, 1665 bp, Bdellovibrio bacteriovorus HD100; identical to SEQ ID NO: 31066
  CDS (1)..(1665): transl_table=11

SEQ ID NO: 53921 - protein, 554 aa, Bdellovibrio bacteriovorus HD100; identical to SEQ ID NO: 31067

SEQ ID NO: 53922 - DNA, 1743 bp, Magnaporthe grisea 70-15; identical to SEQ ID NO: 31068
  CDS (1)..(1743)

SEQ ID NO: 53923 - protein, 580 aa, Magnaporthe grisea 70-15; identical to SEQ ID NO: 31069

SEQ ID NO: 53924 - DNA, 1737 bp, Kluyveromyces lactis NRRL Y-1140; identical to SEQ ID NO: 31070
  CDS (1)..(1737)

SEQ ID NO: 53925 - protein, 578 aa, Kluyveromyces lactis NRRL Y-1140; identical to SEQ ID NO: 31071

SEQ ID NO: 53926 - DNA, 1728 bp, Debaryomyces hansenii CBS767; identical to SEQ ID NO: 31072
  CDS (1)..(1728)

SEQ ID NO: 53927 - protein, 575 aa, Debaryomyces hansenii CBS767; identical to SEQ ID NO: 31073

SEQ ID NO: 53928 - DNA, 1719 bp, Yarrowia lipolytica CLIB122; identical to SEQ ID NO: 31074
  CDS (1)..(1719)

SEQ ID NO: 53929 - protein, 572 aa, Yarrowia lipolytica CLIB122; identical to SEQ ID NO: 31075

SEQ ID NO: 53930 - DNA, 1815 bp, Apis mellifera; identical to SEQ ID NO: 31076
  CDS (1)..(1815)

SEQ ID NO: 53931 - protein, 604 aa, Apis mellifera; identical to SEQ ID NO: 31077

SEQ ID NO: 53932 - DNA, 1650 bp, Aspergillus nidulans FGSC A4; identical to SEQ ID NO: 31078
  CDS (1)..(1650)

SEQ ID NO: 53933 - protein, 549 aa, Aspergillus nidulans FGSC A4; identical to SEQ ID NO: 31079

SEQ ID NO: 53934 - DNA, 1722 bp, Candida albicans SC5314; identical to SEQ ID NO: 31080
  CDS (1)..(1722): transl_table=12

SEQ ID NO: 53935 - protein, 573 aa, Candida albicans SC5314; identical to SEQ ID NO: 31081

SEQ ID NO: 53936 - DNA, 1611 bp, Prochlorococcus marinus str. MIT 9515; identical to SEQ ID NO: 31086
  CDS (1)..(1611): transl_table=11

SEQ ID NO: 53937 - protein, 536 aa, Prochlorococcus marinus str. MIT 9515; identical to SEQ ID NO: 31087

SEQ ID NO: 53938 - DNA, 1668 bp, Prochlorococcus marinus str. NATL1A; identical to SEQ ID NO: 31088
  CDS (1)..(1668): transl_table=11

SEQ ID NO: 53939 - protein, 555 aa, Prochlorococcus marinus str. NATL1A; identical to SEQ ID NO: 31089

SEQ ID NO: 53940 - DNA, 1677 bp, Prochlorococcus marinus str. MIT 9303; identical to SEQ ID NO: 31090
  CDS (1)..(1677): transl_table=11

SEQ ID NO: 53941 - protein, 558 aa, Prochlorococcus marinus str. MIT 9303; identical to SEQ ID NO: 31091

SEQ ID NO: 53942 - DNA, 1629 bp, Clostridium thermocellum ATCC 27405; identical to SEQ ID NO: 31092
  CDS (1)..(1629): transl_table=11

SEQ ID NO: 53943 - protein, 542 aa, Clostridium thermocellum ATCC 27405; identical to SEQ ID NO: 31093

SEQ ID NO: 53944 - DNA, 1611 bp, Prochlorococcus marinus str. MIT 9301; identical to SEQ ID NO: 31096
  CDS (1)..(1611): transl_table=11

SEQ ID NO: 53945 - protein, 536 aa, Prochlorococcus marinus str. MIT 9301; identical to SEQ ID NO: 31097

SEQ ID NO: 53946 - DNA, 1659 bp, Herminiimonas arsenicoxydans; identical to SEQ ID NO: 31098
  CDS (1)..(1659): transl_table=11

SEQ ID NO: 53947 - protein, 552 aa, Herminiimonas arsenicoxydans; identical to SEQ ID NO: 31099

SEQ ID NO: 53948 - DNA, 1632 bp, Synechococcus sp. WH 7803; identical to SEQ ID NO: 31106
  CDS (1)..(1632): transl_table=11

SEQ ID NO: 53949 - protein, 543 aa, Synechococcus sp. WH 7803; identical to SEQ ID NO: 31107

SEQ ID NO: 53950 - DNA, 1635 bp, Candidatus Protochlamydia amoebophila UWE25; identical to SEQ ID NO: 31108
  CDS (1)..(1635): transl_table=11

SEQ ID NO: 53951 - protein, 544 aa, Candidatus Protochlamydia amoebophila UWE25; identical to SEQ ID NO: 31109

SEQ ID NO: 53952 - DNA, 1722 bp, Leifsonia xyli subsp. xyli str. CTCB07; identical to SEQ ID NO: 31112
  CDS (1)..(1722): transl_table=11

SEQ ID NO: 53953 - protein, 573 aa, Leifsonia xyli subsp. xyli str. CTCB07; identical to SEQ ID NO: 31113

SEQ ID NO: 53954 - DNA, 1683 bp, Mannheimia succiniciproducens MBEL55E; identical to SEQ ID NO: 31114
  CDS (1)..(1683): transl_table=11

SEQ ID NO: 53955 - protein, 560 aa, Mannheimia succiniciproducens MBEL55E; identical to SEQ ID NO: 31115

SEQ ID NO: 53956 - DNA, 1608 bp, Bacillus licheniformis ATCC 14580; identical to SEQ ID NO: 31116
  CDS (1)..(1608): transl_table=11

SEQ ID NO: 53957 - protein, 535 aa, Bacillus licheniformis ATCC 14580; identical to SEQ ID NO: 31117

SEQ ID NO: 53958 - DNA, 1695 bp, Synechococcus elongatus PCC 6301; identical to SEQ ID NO: 31118
  CDS (1)..(1695): transl_table=11

SEQ ID NO: 53959 - protein, 564 aa, Synechococcus elongatus PCC 6301; identical to SEQ ID NO: 31119

SEQ ID NO: 53960 - DNA, 1746 bp, Thermobifida fusca YX; identical to SEQ ID NO: 31120
  CDS (1)..(1746): transl_table=11

SEQ ID NO: 53961 - protein, 581 aa, Thermobifida fusca YX; identical to SEQ ID NO: 31121

SEQ ID NO: 53962 - DNA, 1695 bp, Synechococcus elongatus PCC 7942; identical to SEQ ID NO: 31122
  CDS (1)..(1695): transl_table=11

SEQ ID NO: 53963 - protein, 564 aa, Synechococcus elongatus PCC 7942; identical to SEQ ID NO: 31123

SEQ ID NO: 53964 - DNA, 1638 bp, Mesorhizobium sp. BNC1; identical to SEQ ID NO: 31124
  CDS (1)..(1638): transl_table=11

SEQ ID NO: 53965 - protein, 545 aa, Mesorhizobium sp. BNC1; identical to SEQ ID NO: 31125

SEQ ID NO: 53966 - DNA, 1692 bp, Haemophilus somnus 129PT; identical to SEQ ID NO: 31126
  CDS (1)..(1692): transl_table=11

SEQ ID NO: 53967 - protein, 563 aa, Haemophilus somnus 129PT; identical to SEQ ID NO: 31127

SEQ ID NO: 53968 - DNA, 1599 bp, Pediococcus pentosaceus ATCC 25745; identical to SEQ ID NO: 31128
  CDS (1)..(1599): transl_table=11

SEQ ID NO: 53969 - protein, 532 aa, Pediococcus pentosaceus ATCC 25745; identical to SEQ ID NO: 31129

SEQ ID NO: 53970 - DNA, 1635 bp, Oenococcus oeni PSU-1; identical to SEQ ID NO: 31130
  CDS (1)..(1635): transl_table=11

SEQ ID NO: 53971 - protein, 544 aa, Oenococcus oeni PSU-1; identical to SEQ ID NO: 31131

SEQ ID NO: 53972 - DNA, 1641 bp, Solibacter usitatus Ellin6076; identical to SEQ ID NO: 31134
  CDS (1)..(1641): transl_table=11

SEQ ID NO: 53973 - protein, 546 aa, Solibacter usitatus Ellin6076; identical to SEQ ID NO: 31135

SEQ ID NO: 53974 - DNA, 1644 bp, Magnetococcus sp. MC-1; identical to SEQ ID NO: 31136
  CDS (1)..(1644): transl_table=11

SEQ ID NO: 53975 - protein, 547 aa, Magnetococcus sp. MC-1; identical to SEQ ID NO: 31137

SEQ ID NO: 53976 - DNA, 1641 bp, Shewanella sp. ANA-3; identical to SEQ ID NO: 31138
  CDS (1)..(1641): transl_table=11

SEQ ID NO: 53977 - protein, 546 aa, Shewanella sp. ANA-3; identical to SEQ ID NO: 31139

SEQ ID NO: 53978 - DNA, 1773 bp, Mycobacterium smegmatis str. MC2 155; identical to SEQ ID NO: 31140
  CDS (1)..(1773): transl_table=11

SEQ ID NO: 53979 - protein, 590 aa, Mycobacterium smegmatis str. MC2 155; identical to SEQ ID NO: 31141

SEQ ID NO: 53980 - DNA, 1710 bp, Nocardioides sp. JS614; identical to SEQ ID NO: 31142
  CDS (1)..(1710): transl_table=11

SEQ ID NO: 53981 - protein, 569 aa, Nocardioides sp. JS614; identical to SEQ ID NO: 31143

SEQ ID NO: 53982 - DNA, 1641 bp, Azoarcus sp. BH72; identical to SEQ ID NO: 31144
  CDS (1)..(1641): transl_table=11

SEQ ID NO: 53983 - protein, 546 aa, Azoarcus sp. BH72; identical to SEQ ID NO: 31145

SEQ ID NO: 53984 - DNA, 1635 bp, Neisseria meningitidis FAM18; identical to SEQ ID NO: 31146
  CDS (1)..(1635): transl_table=11

SEQ ID NO: 53985 - protein, 544 aa, Neisseria meningitidis FAM18; identical to SEQ ID NO: 31147

SEQ ID NO: 53986 - DNA, 1659 bp, Acidovorax sp. JS42; identical to SEQ ID NO: 31148
  CDS (1)..(1659): transl_table=11

SEQ ID NO: 53987 - protein, 552 aa, Acidovorax sp. JS42; identical to SEQ ID NO: 31149

SEQ ID NO: 53988 - DNA, 1626 bp, Magnetospirillum magnetotacticum MS-1; identical to SEQ ID NO: 31150
  CDS (1)..(1626): transl_table=11

SEQ ID NO: 53989 - protein, 541 aa, Magnetospirillum magnetotacticum MS-1; identical to SEQ ID NO: 31151

SEQ ID NO: 53990 - DNA, 1638 bp, Nostoc punctiforme PCC 73102; identical to SEQ ID NO: 31152
  CDS (1)..(1638): transl_table=11

SEQ ID NO: 53991 - protein, 545 aa, Nostoc punctiforme PCC 73102; identical to SEQ ID NO: 31153

SEQ ID NO: 53992 - DNA, 1638 bp, Actinobacillus pleuropneumoniae serovar 1 str. 4074; identical to SEQ ID NO: 31154
  CDS (1)..(1638): transl_table=11

SEQ ID NO: 53993 - protein, 545 aa, Actinobacillus pleuropneumoniae serovar 1 str. 4074; identical to SEQ ID NO: 31155

SEQ ID NO: 53994 - DNA, 1638 bp, Haemophilus influenzae R2866
  CDS (1)..(1638): transl_table=11
atggctacaaattatattttcgtcactggcggtgtggtttcatcgttaggtaaaggcattgcggcagcatcattggcggcaattttagaagcacgtggtttaaacgtaaccattatgaagttagatccatatattaatgtggatcctggtacgatgagcccaacccaacacggggaagttttcgtcactcaagatggcgcagaaacagatttagacttaggtcactatgagcgtttcatccgcacgaaaatgaccaaacgtaataacttcactacaggtaaaatttattctgaagtattacgtaaagagcgtcgtggcgattatcttggtgcaacaattcaagtgattccacatatcactaatgaaattaaagatcgcgttattgctggtgctcaaggtcacgacgttgtgattgttgaagtgggcggcactgttggggatattgaatcacttccattcttagaagcattacgtcaattagccgttcaagttggtcgtgaacatacgttatttatgcatttaactttagtgccttatattccaacggcgggtgaggtaaaaactaaaccaactcaacattcggtaaaagaattgctttctattggtattcaacctgatgtgttgatttgccgttcagatcgtatgattccaccaaatgaacgtgcgaaaattgctttattttgtaatgttgcagaacgtgcagtcatttcattaaaagatgtgaattcaatttatcaaatccccgcattattaaaatctcaaggtttagatgatttcgtctgtgatcgtttccgtttaacttgcccagaagcagatcttactgaatgggagcaagtgctttacaagcaagccaatcctgtgggagaagtaaccatcggtatggtaggtaaatacactgagttacccgatgcctataaatcagtaaatgaagccttaaaacacgcaggtttaacgaaccgtttaagtgtaaacattaaatatattgattcccaagatgttgaaaccaaaggtgttgaagtattaaaaggcgttgatggcattcttgttccagggggatttggttatcgtggtgtagagggtaaaattcgtactgcacaatatgcacgagaaaacaaaattccttacttgggtatttgcttaggtatgcagatcgcattgattgaatatgcacgtaatgtagcgggtttaactaaagccaattcatctgaatttgataaagattgtgaacaacctgtggtggcattaatcacagaatggcaagatgcggatggaaatacagaaatgcgtaccgatgaatcagatcttggtggaacaatgcgtttaggtgcacaacaatgtcatttggcgtcaggcagccgcgctcgtgagctttatggccaagaaaccattgaagaacgtcatcgtcatcgctatgaagtaaataataccttacttccacaaattgaaaaagcaggattgaaagtaactggattatctgcagataaaaaattggtagaaattatcgaagtgccaaatcatccttggtttgtcgcttgccaattccatccagaatttacctcgactcctcgtgatggtcatccgttatttgcaggctttgtaaaagcagcttatgaaaatcacaaacaatctgtgaagtaa

SEQ ID NO: 53995 - protein, 545 aa, Haemophilus influenzae R2866
MATNYIFVTGGVVSSLGKGIAAASLAAILEARGLNVTIMKLDPYINVDPGTMSPTQHGEVFVTQDGAETDLDLGHYERFIRTKMTKRNNFTTGKIYSEVLRKERRGDYLGATIQVIPHITNEIKDRVIAGAQGHDVVIVEVGGTVGDIESLPFLEALRQLAVQVGREHTLFMHLTLVPYIPTAGEVKTKPTQHSVKELLSIGIQPDVLICRSDRMIPPNERAKIALFCNVAERAVISLKDVNSIYQIPALLKSQGLDDFVCDRFRLTCPEADLTEWEQVLYKQANPVGEVTIGMVGKYTELPDAYKSVNEALKHAGLTNRLSVNIKYIDSQDVETKGVEVLKGVDGILVPGGFGYRGVEGKIRTAQYARENKIPYLGICLGMQIALIEYARNVAGLTKANSSEFDKDCEQPVVALITEWQDADGNTEMRTDESDLGGTMRLGAQQCHLASGSRARELYGQETIEERHRHRYEVNNTLLPQIEKAGLKVTGLSADKKLVEIIEVPNHPWFVACQFHPEFTSTPRDGHPLFAGFVKAAYENHKQSVK

SEQ ID NO: 53996 - DNA, 1608 bp, Crocosphaera watsonii WH 8501; identical to SEQ ID NO: 31162
  CDS (1)..(1608): transl_table=11

SEQ ID NO: 53997 - protein, 535 aa, Crocosphaera watsonii WH 8501; identical to SEQ ID NO: 31163

SEQ ID NO: 53998 - DNA, 1596 bp, Exiguobacterium sibiricum 255-15; identical to SEQ ID NO: 31164
  CDS (1)..(1596): transl_table=11

SEQ ID NO: 53999 - protein, 531 aa, Exiguobacterium sibiricum 255-15; identical to SEQ ID NO: 31165

SEQ ID NO: 54000 - DNA, 1695 bp, Prosthecochloris aestuarii DSM 271; identical to SEQ ID NO: 31166
  CDS (1)..(1695): transl_table=11

SEQ ID NO: 54001 - protein, 564 aa, Prosthecochloris aestuarii DSM 271; identical to SEQ ID NO: 31167

SEQ ID NO: 54002 - DNA, 1605 bp, Streptococcus suis 89/1591; identical to SEQ ID NO: 31174
  CDS (1)..(1605): transl_table=11

SEQ ID NO: 54003 - protein, 534 aa, Streptococcus suis 89/1591; identical to SEQ ID NO: 31175

SEQ ID NO: 54004 - DNA, 1620 bp, Croceibacter atlanticus HTCC2559; identical to SEQ ID NO: 31176
  CDS (1)..(1620): transl_table=11

SEQ ID NO: 54005 - protein, 539 aa, Croceibacter atlanticus HTCC2559; identical to SEQ ID NO: 31177

SEQ ID NO: 54006 - DNA, 1644 bp, Roseovarius nubinhibens ISM; identical to SEQ ID NO: 31178
  CDS (1)..(1644): transl_table=11

SEQ ID NO: 54007 - protein, 547 aa, Roseovarius nubinhibens ISM; identical to SEQ ID NO: 31179

SEQ ID NO: 54008 - DNA, 1644 bp, Oceanicola batsensis HTCC2597; identical to SEQ ID NO: 31180
  CDS (1)..(1644): transl_table=11

SEQ ID NO: 54009 - protein, 547 aa, Oceanicola batsensis HTCC2597; identical to SEQ ID NO: 31181

SEQ ID NO: 54010 - DNA, 1668 bp, Prochlorococcus marinus str. MIT 9211; identical to SEQ ID NO: 31182
  CDS (1)..(1668): transl_table=11

SEQ ID NO: 54011 - protein, 555 aa, Prochlorococcus marinus str. MIT 9211; identical to SEQ ID NO: 31183

SEQ ID NO: 54012 - DNA, 1638 bp, Erythrobacter sp. NAP1; identical to SEQ ID NO: 31184
  CDS (1)..(1638): transl_table=11

SEQ ID NO: 54013 - protein, 545 aa, Erythrobacter sp. NAP1; identical to SEQ ID NO: 31185

SEQ ID NO: 54014 - DNA, 1602 bp, Synechococcus sp. RS9917; identical to SEQ ID NO: 31186
  CDS (1)..(1602): transl_table=11

SEQ ID NO: 54015 - protein, 533 aa, Synechococcus sp. RS9917; identical to SEQ ID NO: 31187

SEQ ID NO: 54016 - DNA, 1635 bp, Synechococcus sp. WH 5701; identical to SEQ ID NO: 31188
  CDS (1)..(1635): transl_table=11

SEQ ID NO: 54017 - protein, 544 aa, Synechococcus sp. WH 5701; identical to SEQ ID NO: 31189

SEQ ID NO: 54018 - DNA, 1632 bp, Synechococcus sp. WH 7805; identical to SEQ ID NO: 31190
  CDS (1)..(1632): transl_table=11

SEQ ID NO: 54019 - protein, 543 aa, Synechococcus sp. WH 7805; identical to SEQ ID NO: 31191

SEQ ID NO: 54020 - DNA, 1635 bp, Pseudoalteromonas tunicata D2; identical to SEQ ID NO: 31192
  CDS (1)..(1635): transl_table=11

SEQ ID NO: 54021 - protein, 544 aa, Pseudoalteromonas tunicata D2; identical to SEQ ID NO: 31193

SEQ ID NO: 54022 - DNA, 1641 bp, Photobacterium sp. SKA34; identical to SEQ ID NO: 31194
  CDS (1)..(1641): transl_table=11

SEQ ID NO: 54023 - protein, 546 aa, Photobacterium sp. SKA34; identical to SEQ ID NO: 31195

SEQ ID NO: 54024 - DNA, 1629 bp, Oceanospirillum sp. MED92; identical to SEQ ID NO: 31196
  CDS (1)..(1629): transl_table=11

SEQ ID NO: 54025 - protein, 542 aa, Oceanospirillum sp. MED92; identical to SEQ ID NO: 31197

SEQ ID NO: 54026 - DNA, 1629 bp, Xanthobacter autotrophicus Py2; identical to SEQ ID NO: 31034
  CDS (1)..(1629): transl_table=11

SEQ ID NO: 54027 - protein, 542 aa, Xanthobacter autotrophicus Py2; identical to SEQ ID NO: 31035

SEQ ID NO: 54028 - DNA, 1605 bp, Flavobacteria bacterium BBFL7; identical to SEQ ID NO: 31198
  CDS (1)..(1605): transl_table=11

SEQ ID NO: 54029 - protein, 534 aa, Flavobacteria bacterium BBFL7; identical to SEQ ID NO: 31199

SEQ ID NO: 54030 - DNA, 1644 bp, marine gamma proteobacterium HTCC2207
  CDS (1)..(1644): transl_table=11
atgacacgttttatttttgttaccggtggtgttgtctcgtctttgggtaaaggtatatcagcggcatcgctggctgctgtgctcgaatcccgaggactcaatgtcacaatcctgaagctcgacccctatttgaatgtcgatcccggaaccatgagcccctatcagcacggtgaagtttacgtgactgaagatggtgcagagacagatttagatcttggccactacgagcgttttttacgttcgaagatgaccaagaacaataacttcaccagcggtcaggtctacgaaacagttttgcgtcgcgagcgtcgcggtgactatctgggtggcactgtgcaggttattccgcacctgacaaatgagattaagcgccgtgtctatgccggtgctggagatgccgatatagctgttgttgagatcggtggcacggtcggtgatattgaatcacagccgtttctcgaagcggttcgccaactaaaggttgagctcggtcacaagcgagcattgttattgcacctcactttggttccctatattgcctctgctggcgaaactaaaactaagccaacccagcactcggtaaaagagatgcgttctattggcctgcagcctgacgtgttgctgtgtcgctctgaagtaccgattgaagagagtcaacgccagaaaatctcgctgttcaccaacgttgaagagcgtgcggtgattccagtaattgatgcgccgactatttatcaaattccacgtatgctccacgagcgcggcttggaccaatttgttgtcgatcgctttgaacttgatgtgcctgatgcggatctcagcgagtgggattttgtagttcagagccaactgcatgctgacggtcaggtgaccatcgctatggtcggtaagtatatggagctgctggatgcctacaagtctgttactgaagccttgactcacgccggcattcataacaagaccaaagttaagattcgctatgttgattccgaactgttggagcaggatcactcattactcaatggtgtcgacgctattctggttcctggcggttttggtactcgaggcaccgaaggcaaagtctttgcggttaaaacagcccgagaaaacaatatcccctacctgggtatctgtctgggtatgcagattgcgattattgaatatgcgcgcaatgtctgcggccttgaaggggctaatagcaccgaatttgataccacagcagctaacccagtggtggggctgattgctgagtggatcgatgcctcaggcaataaagagtcccgcaccgaagactctgatctcggcggcaccatgcgtcttggctctcaggtctgtcatctggttcctggctctatggcccacggtatctacggcaatgatcaggtggaagaacgtcaccgtcatcgctttgaggtaaacaataattacttgcccgccctgaaagaggccggtctggtggttggcggtctgtctcacgacaagacattggtagaaacgatcgaactgcctaatcatccctggttcttcgccagccagttccacccggaattcaactcgacgccccgagatggccatccgctgtttgaaggcttcgtgagtgcggcactaaagtatcaaaagcaatcatctgcccagggtgacaaataa

SEQ ID NO: 54031 - protein, 547 aa, marine gamma proteobacterium HTCC2207
MTRFIFVTGGVVSSLGKGISAASLAAVLESRGLNVTILKLDPYLNVDPGTMSPYQHGEVYVTEDGAETDLDLGHYERFLRSKMTKNNNFTSGQVYETVLRRERRGDYLGGTVQVIPHLTNEIKRRVYAGAGDADIAVVEIGGTVGDIESQPFLEAVRQLKVELGHKRALLLHLTLVPYIASAGETKTKPTQHSVKEMRSIGLQPDVLLCRSEVPIEESQRQKISLFTNVEERAVIPVIDAPTIYQIPRMLHERGLDQFVVDRFELDVPDADLSEWDFVVQSQLHADGQVTIAMVGKYMELLDAYKSVTEALTHAGIHNKTKVKIRYVDSELLEQDHSLLNGVDAILVPGGFGTRGTEGKVFAVKTARENNIPYLGICLGMQIAIIEYARNVCGLEGANSTEFDTTAANPVVGLIAEWIDASGNKESRTEDSDLGGTMRLGSQVCHLVPGSMAHGIYGNDQVEERHRHRFEVNNNYLPALKEAGLVVGGLSHDKTLVETIELPNHPWFFASQFHPEFNSTPRDGHPLFEGFVSAALKYQKQSSAQGDK

SEQ ID NO: 54032 - DNA, 1659 bp, delta proteobacterium MLMS-1; identical to SEQ ID NO: 31200
  CDS (1)..(1659): transl_table=11

SEQ ID NO: 54033 - protein, 552 aa, delta proteobacterium MLMS-1; identical to SEQ ID NO: 31201

SEQ ID NO: 54034 - DNA, 1662 bp, Rickettsiella grylli; identical to SEQ ID NO: 31202
  CDS (1)..(1662): transl_table=11

SEQ ID NO: 54035 - protein, 553 aa, Rickettsiella grylli; identical to SEQ ID NO: 31203

SEQ ID NO: 54036 - DNA, 1632 bp, Oceanobacter sp. RED65; identical to SEQ ID NO: 31204
  CDS (1)..(1632): transl_table=11

SEQ ID NO: 54037 - protein, 543 aa, Oceanobacter sp. RED65; identical to SEQ ID NO: 31205

SEQ ID NO: 54038 - DNA, 1659 bp, Synechococcus sp. RS9916; identical to SEQ ID NO: 31206
  CDS (1)..(1659): transl_table=11

SEQ ID NO: 54039 - protein, 552 aa, Synechococcus sp. RS9916; identical to SEQ ID NO: 31207

SEQ ID NO: 54040 - DNA, 1635 bp, Alteromonadales bacterium TW-7; identical to SEQ ID NO: 31208
  CDS (1)..(1635): transl_table=11

SEQ ID NO: 54041 - protein, 544 aa, Alteromonadales bacterium TW-7; identical to SEQ ID NO: 31209

SEQ ID NO: 54042 - DNA, 1632 bp, marine gamma proteobacterium HTCC2143; identical to SEQ ID NO: 31210
  CDS (1)..(1632): transl_table=11

SEQ ID NO: 54043 - protein, 543 aa, marine gamma proteobacterium HTCC2143; identical to SEQ ID NO: 31211

SEQ ID NO: 54044 - DNA, 1653 bp, marine gamma proteobacterium HTCC2080; identical to SEQ ID NO: 31212
  CDS (1)..(1653): transl_table=11

SEQ ID NO: 54045 - protein, 550 aa, marine gamma proteobacterium HTCC2080; identical to SEQ ID NO: 31213

SEQ ID NO: 54046 - DNA, 1662 bp, Candidatus Desulfococcus oleovorans Hxd3; identical to SEQ ID NO: 31214
  CDS (1)..(1662): transl_table=11

SEQ ID NO: 54047 - protein, 553 aa, Candidatus Desulfococcus oleovorans Hxd3; identical to SEQ ID NO: 31215

SEQ ID NO: 54048 - DNA, 1629 bp, Pseudomonas putida GB-1; identical to SEQ ID NO: 31216
  CDS (1)..(1629): transl_table=11

SEQ ID NO: 54049 - protein, 542 aa, Pseudomonas putida GB-1; identical to SEQ ID NO: 31217

SEQ ID NO: 54050 - DNA, 1629 bp, Marinobacter sp. ELB17; identical to SEQ ID NO: 31218
  CDS (1)..(1629): transl_table=11

SEQ ID NO: 54051 - protein, 542 aa, Marinobacter sp. ELB17; identical to SEQ ID NO: 31219

SEQ ID NO: 54052 - DNA, 1818 bp, Medicago truncatula; identical to SEQ ID NO: 31226
  CDS (1)..(1818)

SEQ ID NO: 54053 - protein, 605 aa, Medicago truncatula; identical to SEQ ID NO: 31227

SEQ ID NO: 54054 - DNA, 1671 bp, Herbaspirillum seropedicae; identical to SEQ ID NO: 31228
  CDS (1)..(1671): transl_table=11

SEQ ID NO: 54055 - protein, 556 aa, Herbaspirillum seropedicae; identical to SEQ ID NO: 31229

SEQ ID NO: 54056 - DNA, 1662 bp, Arabidopsis thaliana; identical to SEQ ID NO: 31236
  CDS (1)..(1662)

SEQ ID NO: 54057 - protein, 553 aa, Arabidopsis thaliana; identical to SEQ ID NO: 31237

SEQ ID NO: 54058 - DNA, 1689 bp, Medicago truncatula; identical to SEQ ID NO: 31240
  CDS (1)..(1689)

SEQ ID NO: 54059 - protein, 562 aa, Medicago truncatula; identical to SEQ ID NO: 31241

SEQ ID NO: 54060 - DNA, 1632 bp, Western X phytoplasma; identical to SEQ ID NO: 31246
  CDS (1)..(1632): transl_table=11

SEQ ID NO: 54061 - protein, 543 aa, Western X phytoplasma; identical to SEQ ID NO: 31247

SEQ ID NO: 54062 - DNA, 1617 bp, Aeropyrum pernix; identical to SEQ ID NO: 31254
  CDS (1)..(1617): transl_table=11

SEQ ID NO: 54063 - protein, 538 aa, Aeropyrum pernix; identical to SEQ ID NO: 31255

SEQ ID NO: 54064 - DNA, 1623 bp, Alkalilimnicola ehrlichei; identical to SEQ ID NO: 31258
  CDS (1)..(1623): transl_table=11

SEQ ID NO: 54065 - protein, 540 aa, Alkalilimnicola ehrlichei; identical to SEQ ID NO: 31259

SEQ ID NO: 54066 - DNA, 1683 bp, Anaplasma marginale; identical to SEQ ID NO: 31260
  CDS (1)..(1683): transl_table=11

SEQ ID NO: 54067 - protein, 560 aa, Anaplasma marginale; identical to SEQ ID NO: 31261

SEQ ID NO: 54068 - DNA, 1596 bp, Aquifex aeolicus; identical to SEQ ID NO: 31266
  CDS (1)..(1596): transl_table=11

SEQ ID NO: 54069 - protein, 531 aa, Aquifex aeolicus; identical to SEQ ID NO: 31267

SEQ ID NO: 54070 - DNA, 1599 bp, Archaeoglobus fulgidus; identical to SEQ ID NO: 31268
  CDS (1)..(1599): transl_table=11

SEQ ID NO: 54071 - protein, 532 aa, Archaeoglobus fulgidus; identical to SEQ ID NO: 31269

SEQ ID NO: 54072 - DNA, 1731 bp, Ashbya gossypii; identical to SEQ ID NO: 31270
  CDS (1)..(1731)

SEQ ID NO: 54073 - protein, 576 aa, Ashbya gossypii; identical to SEQ ID NO: 31271

SEQ ID NO: 54074 - DNA, 2587 bp, Azospirillum brasilense
  CDS (44)..(1678): transl_table=11
gaattcggggaacggatcaggctctgaaggtcttcggacggacatgactcgctacatcttcatcaccggtggcgtcgtttcctcgctgggcaaaggtctggcgtcggcggcgcttggggcgcttctccaggcgcgcggctacaaggtgcggcttgcgaagctggacccgtacctgaacgtggaccccggcacgatgagcccgtaccagcacggcgaggtctatgtgaccgacgacggcgctgagaccgacctcgacctcggccattacgagcgcttcaccggcgtggccgcgcgccgtggcgacaacatcaccacgggccgcatctattcgaacgtgatcgccaaggagcgccgcggcgactatctgggcgccaccgtgcaggtgattccgcacgtcaccgaccagatcaaggacttcatcggcgctgagacgaccgacgaggacttcatcctctgcgagatcggcggcacggtgggcgacatcgagtcgacccccttcctggaagccatccgccagttcggcaacgaggtcggtccggagaacgccctgttcatccacctgaccctgctgccctacattccgacggcgggcgagctgaagaccaagccgacgcagcattccgtgaaggagctgctgggcatgggcatccaggccaacatcctgctctgccgcgccgaccgcccgattccggagaacgagcgcaagaagatcgcgctgttctgcaacatccggccggagcgcgtcatcgccgccctggacgtcgattcgatctatcaggtgccggtcagctaccacgaggaaggcttcgacacccaggtgctggcctatttcggcctgccgaccgagggcaagccggacctgtcgcgctggaccagcattgtcgagcgcgtgcgcaagccgcagggcgaggtgaccatcgccgtcgtcggcaagtacaccagcctgctcgacagctacaagtcgctggccgaggcgctgacccacggcggcatcgccaacaacgtgaaggtcaagctcgactggatcgactcggagatcttcgaggacgagagcgcggttcagcggctggagaacgtccacggcatcctggtgcccggcggcttcggctcgcgcggcacggaaggcaagatccgcgccgcccagttcgcccgtgagcgcaaggtgccgtatttcggcatctgcttcggcatgcagatggcggtgatcgaatcggcccgcaacatggccggaatcgtcgacgccggctcgaccgagcttggcaagcccggcaacccggtggtcggcctcctcggcctgatgaccgagtggatgcgcggcaacagcctggagaagcgcacggagggcaccgatgtcggcggcaccatgcgtctcggcacctatccggcgaagctggtccccggcagcaaggtcgcggaggtctacgggaccaccgacatcaccgagcggcaccgccaccgctacgaggtgaacgtctattacaaggaccgtctggagaaggtcggcctgctgttctccggcctgtcgccgacgcaactgcccgagatcgtcgagatcccggaccatccctggtttatcggcgtgcagttccacccggagctgaagtccaagcctttcgacccgcacccgctcttcacctccttcatcaaggcggcgatcgagcagagccggctggtctgatgtgaccaatcgggggagggcattcctcccccgcgtgttccggttccgaggtttcggtgggtatagtggaagcggcggccgagccaacggccgccgttttgcgttacgggccagggaaacaaccaagaggctggagacaccatgaccgacatcagcatccccgccggcgacgacggcagcttttccgcctatgtggccaagccggcgggcggcgggccggcgccgggactcgtcgtcatccaggaaatcttcggggtcaatcaggtcatgcgcgacctgtgcgacgcgttcgccgcccagggctggctcgctgtctgcccggacttgttctggcggcaggagccgggcgtgcagatcaccgacaagacccaggaggaatggaaccgcgccttcgccctgatgaacggcatggaccaggacaagcggtggacgacctcaaggccaccctgccgtggttgcgccagaatccggattgcaccggcaaagcgggtcggtcggctactgcttgggcgccggctggccttcatgatggcggcgcgctccgattccgacgccaacgtcagctattacggcgtcggtctggacggtctggtcggcgaggcggcgagcatcaccaagccgctgctgatgcacatcgccgagaaggaccagttcgtcccggcggaggcgcgggaaaaggtgctggccgcggtgaagggcaacccgaacgtcaccgcccacgtctatccgggtgtggaccatgccttcgcccgcgctggcggcgcccatttcgagcccgaggcggcggagctggccaacgggcgcacggcagccttcttcaagcagcatctgggttgacgccattccggttgaccgggatcgccgatatctgggaaggaaggagcagcgcaggggggccttcggcatgcg

SEQ ID NO: 54075 - protein, 544 aa, Azospirillum brasilense; identical to SEQ ID NO: 31273

SEQ ID NO: 54076 - DNA, 1638 bp, Azoarcus sp; identical to SEQ ID NO: 31274
  CDS (1)..(1638): transl_table=11

SEQ ID NO: 54077 - protein, 545 aa, Azoarcus sp; identical to SEQ ID NO: 31275

SEQ ID NO: 54078 - DNA, 1608 bp, Bacillus anthracis; identical to SEQ ID NO: 31276
  CDS (1)..(1608): transl_table=11

SEQ ID NO: 54079 - protein, 535 aa, Bacillus anthracis; identical to SEQ ID NO: 31277

SEQ ID NO: 54080 - DNA, 1608 bp, Bacillus cereus; identical to SEQ ID NO: 31278
  CDS (1)..(1608): transl_table=11

SEQ ID NO: 54081 - protein, 535 aa, Bacillus cereus; identical to SEQ ID NO: 31279

SEQ ID NO: 54082 - DNA, 1599 bp, Bacillus halodurans; identical to SEQ ID NO: 31286
  CDS (1)..(1599): transl_table=11

SEQ ID NO: 54083 - protein, 532 aa, Bacillus halodurans; identical to SEQ ID NO: 31287

SEQ ID NO: 54084 - DNA, 1608 bp, Bacillus thuringiensis subsp; identical to SEQ ID NO: 31288
  CDS (1)..(1608): transl_table=11

SEQ ID NO: 54085 - protein, 535 aa, Bacillus thuringiensis subsp; identical to SEQ ID NO: 31289

SEQ ID NO: 54086 - DNA, 1605 bp, Bacillus clausii; identical to SEQ ID NO: 31290
  CDS (1)..(1605): transl_table=11

SEQ ID NO: 54087 - protein, 534 aa, Bacillus clausii; identical to SEQ ID NO: 31291

SEQ ID NO: 54088 - DNA, 1608 bp, Bacillus subtilis; identical to SEQ ID NO: 31292
  CDS (1)..(1608): transl_table=11

SEQ ID NO: 54089 - protein, 535 aa, Bacillus subtilis; identical to SEQ ID NO: 31293

SEQ ID NO: 54090 - DNA, 1653 bp, Bordetella bronchiseptica; identical to SEQ ID NO: 31304
  CDS (1)..(1653): transl_table=11

SEQ ID NO: 54091 - protein, 550 aa, Bordetella bronchiseptica; identical to SEQ ID NO: 31305

SEQ ID NO: 54092 - DNA, 1602 bp, Borrelia burgdorferi; identical to SEQ ID NO: 31306
  CDS (1)..(1602): transl_table=11

SEQ ID NO: 54093 - protein, 533 aa, Borrelia burgdorferi; identical to SEQ ID NO: 31307

SEQ ID NO: 54094 - DNA, 1602 bp, Borrelia garinii; identical to SEQ ID NO: 31308
  CDS (1)..(1602): transl_table=11

SEQ ID NO: 54095 - protein, 533 aa, Borrelia garinii; identical to SEQ ID NO: 31309

SEQ ID NO: 54096 - DNA, 1632 bp, Bradyrhizobium japonicum; identical to SEQ ID NO: 31310
  CDS (1)..(1632): transl_table=11

SEQ ID NO: 54097 - protein, 543 aa, Bradyrhizobium japonicum; identical to SEQ ID NO: 31311

SEQ ID NO: 54098 - DNA, 1629 bp, Brucella melitensis; identical to SEQ ID NO: 31312
  CDS (1)..(1629): transl_table=11

SEQ ID NO: 54099 - protein, 542 aa, Brucella melitensis; identical to SEQ ID NO: 31313

SEQ ID NO: 54100 - DNA, 1662 bp, Burkholderia mallei; identical to SEQ ID NO: 31322
  CDS (1)..(1662): transl_table=11

SEQ ID NO: 54101 - protein, 553 aa, Burkholderia mallei; identical to SEQ ID NO: 31323

SEQ ID NO: 54102 - DNA, 1653 bp, Burkholderia sp; identical to SEQ ID NO: 31324
  CDS (1)..(1653): transl_table=11

SEQ ID NO: 54103 - protein, 550 aa, Burkholderia sp; identical to SEQ ID NO: 31325

SEQ ID NO: 54104 - DNA, 1662 bp, Burkholderia thailandensis; identical to SEQ ID NO: 31326
  CDS (1)..(1662): transl_table=11

SEQ ID NO: 54105 - protein, 553 aa, Burkholderia thailandensis; identical to SEQ ID NO: 31327

SEQ ID NO: 54106 - DNA, 1632 bp, Campylobacter jejuni; identical to SEQ ID NO: 31330
  CDS (1)..(1632): transl_table=11

SEQ ID NO: 54107 - protein, 543 aa, Campylobacter jejuni; identical to SEQ ID NO: 31331

SEQ ID NO: 54108 - DNA, 1737 bp, Candida glabrata; identical to SEQ ID NO: 31334
  CDS (1)..(1737)

SEQ ID NO: 54109 - protein, 578 aa, Candida glabrata; identical to SEQ ID NO: 31335

SEQ ID NO: 54110 - DNA, 1608 bp, Carboxydothermus hydrogenoformans; identical to SEQ ID NO: 31336
  CDS (1)..(1608): transl_table=11

SEQ ID NO: 54111 - protein, 535 aa, Carboxydothermus hydrogenoformans; identical to SEQ ID NO: 31337

SEQ ID NO: 54112 - DNA, 1653 bp, Caulobacter crescentus; identical to SEQ ID NO: 31338
  CDS (1)..(1653): transl_table=11

SEQ ID NO: 54113 - protein, 550 aa, Caulobacter crescentus; identical to SEQ ID NO: 31339

SEQ ID NO: 54114 - DNA, 1614 bp, Chlamydophila abortus; identical to SEQ ID NO: 31340
  CDS (1)..(1614): transl_table=11

SEQ ID NO: 54115 - protein, 537 aa, Chlamydophila abortus; identical to SEQ ID NO: 31341

SEQ ID NO: 54116 - DNA, 1698 bp, Chlorobium tepidum; identical to SEQ ID NO: 31348
  CDS (1)..(1698): transl_table=11

SEQ ID NO: 54117 - protein, 565 aa, Chlorobium tepidum; identical to SEQ ID NO: 31349

SEQ ID NO: 54118 - DNA, 1641 bp, Chromobacterium violaceum; identical to SEQ ID NO: 31352
  CDS (1)..(1641): transl_table=11

SEQ ID NO: 54119 - protein, 546 aa, Chromobacterium violaceum; identical to SEQ ID NO: 31353

SEQ ID NO: 54120 - DNA, 1608 bp, Clostridium perfringens; identical to SEQ ID NO: 31356
  CDS (1)..(1608): transl_table=11

SEQ ID NO: 54121 - protein, 535 aa, Clostridium perfringens; identical to SEQ ID NO: 31357

SEQ ID NO: 54122 - DNA, 1629 bp, Colwellia psychrerythraea; identical to SEQ ID NO: 31358
  CDS (1)..(1629): transl_table=11

SEQ ID NO: 54123 - protein, 542 aa, Colwellia psychrerythraea; identical to SEQ ID NO: 31359

SEQ ID NO: 54124 - DNA, 1680 bp, Corynebacterium efficiens; identical to SEQ ID NO: 31360
  CDS (1)..(1680): transl_table=11

SEQ ID NO: 54125 - protein, 559 aa, Corynebacterium efficiens; identical to SEQ ID NO: 31361

SEQ ID NO: 54126 - DNA, 1665 bp, Corynebacterium glutamicum; identical to SEQ ID NO: 31362
  CDS (1)..(1665): transl_table=11

SEQ ID NO: 54127 - protein, 554 aa, Corynebacterium glutamicum; identical to SEQ ID NO: 31363

SEQ ID NO: 54128 - DNA, 1668 bp, Coxiella burnetii; identical to SEQ ID NO: 31364
  CDS (1)..(1668): transl_table=11

SEQ ID NO: 54129 - protein, 555 aa, Coxiella burnetii; identical to SEQ ID NO: 31365

SEQ ID NO: 54130 - DNA, 1620 bp, Cytophaga hutchinsonii; identical to SEQ ID NO: 31366
  CDS (1)..(1620): transl_table=11

SEQ ID NO: 54131 - protein, 539 aa, Cytophaga hutchinsonii; identical to SEQ ID NO: 31367

SEQ ID NO: 54132 - DNA, 1641 bp, Dechloromonas aromatica; identical to SEQ ID NO: 31368
  CDS (1)..(1641): transl_table=11

SEQ ID NO: 54133 - protein, 546 aa, Dechloromonas aromatica; identical to SEQ ID NO: 31369

SEQ ID NO: 54134 - DNA, 1635 bp, Dehalococcoides ethenogenes; identical to SEQ ID NO: 31370
  CDS (1)..(1635): transl_table=11

SEQ ID NO: 54135 - protein, 544 aa, Dehalococcoides ethenogenes; identical to SEQ ID NO: 31371

SEQ ID NO: 54136 - DNA, 1635 bp, Dehalococcoides sp; identical to SEQ ID NO: 31372
  CDS (1)..(1635): transl_table=11

SEQ ID NO: 54137 - protein, 544 aa, Dehalococcoides sp; identical to SEQ ID NO: 31373

SEQ ID NO: 54138 - DNA, 1635 bp, Deinococcus radiodurans; identical to SEQ ID NO: 31374
  CDS (1)..(1635): transl_table=11

SEQ ID NO: 54139 - protein, 544 aa, Deinococcus radiodurans; identical to SEQ ID NO: 31375

SEQ ID NO: 54140 - DNA, 1647 bp, Desulfovibrio desulfuricans; identical to SEQ ID NO: 31376
  CDS (1)..(1647): transl_table=11

SEQ ID NO: 54141 - protein, 548 aa, Desulfovibrio desulfuricans; identical to SEQ ID NO: 31377

SEQ ID NO: 54142 - DNA, 1599 bp, Desulfitobacterium hafniense; identical to SEQ ID NO: 31378
  CDS (1)..(1599): transl_table=11

SEQ ID NO: 54143 - protein, 532 aa, Desulfitobacterium hafniense; identical to SEQ ID NO: 31379

SEQ ID NO: 54144 - DNA, 1656 bp, Desulfotalea psychrophila; identical to SEQ ID NO: 31380
  CDS (1)..(1656): transl_table=11

SEQ ID NO: 54145 - protein, 551 aa, Desulfotalea psychrophila; identical to SEQ ID NO: 31381

SEQ ID NO: 54146 - DNA, 1644 bp, Desulfovibrio vulgaris; identical to SEQ ID NO: 31382
  CDS (1)..(1644): transl_table=11

SEQ ID NO: 54147 - protein, 547 aa, Desulfovibrio vulgaris; identical to SEQ ID NO: 31383

SEQ ID NO: 54148 - DNA, 1884 bp, Drosophila melanogaster; identical to SEQ ID NO: 31384
  CDS (1)..(1884)

SEQ ID NO: 54149 - protein, 627 aa, Drosophila melanogaster; identical to SEQ ID NO: 31385

SEQ ID NO: 54150 - DNA, 1617 bp, Ehrlichia canis; identical to SEQ ID NO: 31388
  CDS (1)..(1617): transl_table=11

SEQ ID NO: 54151 - protein, 538 aa, Ehrlichia canis; identical to SEQ ID NO: 31389

SEQ ID NO: 54152 - DNA, 1608 bp, Encephalitozoon cuniculi
  CDS (1)..(1608)
atgaagtacgttatcgtttccggaggagttatttctggagttggaaagggcatagtcagcagcagtatcggcgcactgctgaagtcgaggggccatgttgtgacacactttaaaattgacccatacctgaactacaatgctggaaggatgcacccatatgagcatggggaggtctatgtccttgatgatggacatgagtgtgatatggattttgggaactacgaaagattcaatgggataaagctctcgggtgccaacagtatacccggtgggaggctacttcatgatattgtaaaatgcgagcgggaggggtcttttcttgggaagacactgcagatcaacccgcacataatagatgaggtgatcaggagaatcagggctgttgcagacacccctgtcgagagcttcggcggcggccaggccgcagtgccagacgtcgtcgtcgtcgagctcgggggaaccgtcggcgagtacgagtcgtcgatatacacagaggccctggcaaagttccagtacgtcgtcggaaaggccaactgtgcatttgtgtctgtggactacatcgtggagctggagaccggggagcagaagacaaagggcatccagatggggtgtaggaacttcaggaggtttgggctcaactacgacatcgtcatatgcaggggccggagggagccgaacatggagacccgcaggaagatatcgacaagctgctgggtcaaggaggagaatgtgctggggcttccgaacctcgagtctgtgtaccttgcgccgatgtttcttgagaagcacgggattgtcgaggccctgaacaggattctggggctggacgacaagggaatggaccggaggatgctggacatattctccatggttgggaggagacaccgggacggggtgcggattgggatagttgggaagtacgcgccggagtttgacagctacacgtctcttgtgaatgcactgaagttttccggggcgcacatcggggtgaatgtggagattgtgtggattaactctgagtcgtactctgtgtgtgactttgagcggtgcgacggggttgtgatacctgggggatttggggcgcgggggatttctgggaagattgaggcgatccggcatgcgcgggagaacggggttccgcttctggggatctgcctcgggtaccagctgtctgtgattgagatgtgcaggaacattctcgggatgtctgatgcattttccgaggagttccagccctcggggaagaatcttgttgtccggtttatcagcgacgagaacggggtggtggacaagaggctgcgtgtcgggggatatggggttgagctgcgtgacgggctggtgaagaagctgtatgggggcgtggagactgtacgggagaggcaccggcaccggtttgaggtggcgcaggagaaggtgcgcgggcttttgcagcacggagtgaggtttgtggggttcagcagtggagggaagaagataaatgtttttgaggttgaatcgcacccgttttttgttggggtgcagttccaccctgagttcaatgcaaggcctgaccgcccacaccctctgataaccgggcttgtgtctgcatcgtacgaaagatcgaaatga

SEQ ID NO: 54153 - protein, 535 aa, Encephalitozoon cuniculi; identical to SEQ ID NO: 31395

SEQ ID NO: 54154 - DNA, 1611 bp, Enterococcus faecalis; identical to SEQ ID NO: 31396
  CDS (1)..(1611): transl_table=11

SEQ ID NO: 54155 - protein, 536 aa, Enterococcus faecalis; identical to SEQ ID NO: 31397

SEQ ID NO: 54156 - DNA, 1596 bp, Geobacillus kaustophilus; identical to SEQ ID NO: 31402
  CDS (1)..(1596): transl_table=11

SEQ ID NO: 54157 - protein, 531 aa, Geobacillus kaustophilus; identical to SEQ ID NO: 31403

SEQ ID NO: 54158 - DNA, 1611 bp, Geobacter sulfurreducens; identical to SEQ ID NO: 31406
  CDS (1)..(1611): transl_table=11

SEQ ID NO: 54159 - protein, 536 aa, Geobacter sulfurreducens; identical to SEQ ID NO: 31407

SEQ ID NO: 54160 - DNA, 1650 bp, Gloeobacter violaceus; identical to SEQ ID NO: 31408
  CDS (1)..(1650): transl_table=11

SEQ ID NO: 54161 - protein, 549 aa, Gloeobacter violaceus; identical to SEQ ID NO: 31409

SEQ ID NO: 54162 - DNA, 1632 bp, Gluconobacter oxydans; identical to SEQ ID NO: 31410
  CDS (1)..(1632): transl_table=11

SEQ ID NO: 54163 - protein, 543 aa, Gluconobacter oxydans; identical to SEQ ID NO: 31411

SEQ ID NO: 54164 - DNA, 1638 bp, Haemophilus influenzae; identical to SEQ ID NO: 31414
  CDS (1)..(1638): transl_table=11

SEQ ID NO: 54165 - protein, 545 aa, Haemophilus influenzae; identical to SEQ ID NO: 31415

SEQ ID NO: 54166 - DNA, 1623 bp, Helicobacter hepaticus; identical to SEQ ID NO: 31424
  CDS (1)..(1623): transl_table=11

SEQ ID NO: 54167 - protein, 540 aa, Helicobacter hepaticus; identical to SEQ ID NO: 31425

SEQ ID NO: 54168 - DNA, 1617 bp, Helicobacter pylori; identical to SEQ ID NO: 31428
  CDS (1)..(1617): transl_table=11

SEQ ID NO: 54169 - protein, 538 aa, Helicobacter pylori; identical to SEQ ID NO: 31429

SEQ ID NO: 54170 - DNA, 1638 bp, Idiomarina loihiensis; identical to SEQ ID NO: 31432
  CDS (1)..(1638): transl_table=11

SEQ ID NO: 54171 - protein, 545 aa, Idiomarina loihiensis; identical to SEQ ID NO: 31433

SEQ ID NO: 54172 - DNA, 1620 bp, Lactobacillus acidophilus; identical to SEQ ID NO: 31434
  CDS (1)..(1620): transl_table=11

SEQ ID NO: 54173 - protein, 539 aa, Lactobacillus acidophilus; identical to SEQ ID NO: 31435

SEQ ID NO: 54174 - DNA, 1623 bp, Lactobacillus johnsonii; identical to SEQ ID NO: 31436
  CDS (1)..(1623): transl_table=11

SEQ ID NO: 54175 - protein, 540 aa, Lactobacillus johnsonii; identical to SEQ ID NO: 31437

SEQ ID NO: 54176 - DNA, 1599 bp, Listeria monocytogenes
  CDS (1)..(1599): transl_table=11
atgacaaagtatattttcgttacaggtggcgtagtttcgtcaatcggaaaaggaattacagcagcatcactaggacgtttgctgaaaaatcgtggacttagtgtaaccattcaaaaatttgatccatacatcaacgtggatccaggaacaatgagcccataccaacacggggaagtttatgtgacagatgacggcgcggaaacggacctagaccttggccattacgaacgttttatcgatattaacttaaataaatacagcaacgtgacaactggtaaagtttactcagaagttattaaaaaagaacgtcgcggggattacttaggtggaactgtgcaagttattccacacattacaaacgaattgaaagatcgtgttttccgtgcagcgcgcatgaccaattcagatattatcatcactgaaattggtggaacagttggggatatcgaatctttaccattcttagaagcaattcgtcaaattaaaggggatgttggtgcggaaaacgtactttatatccacacaactttaattccttacatcaaagcagcaggcgaaatgaaaacaaaaccaacacaacatagtgtaaaagaacttcgcagcttaggaattcaaccaaacattatcgttgttcgtacagagcaaccagtttcacaagaaatgaaagacaagattgcgctattttgtgatattaaagcttctgaggttattgaatctcgtgatgaagaaacactttataacgtaccactttctttacaaaaacaaaaaatggatgatatcgtccttgaacacttgcaattagaagcaccacaagcggaaatgactgattggaaaaacctggtacaccgtgtgaaaaacctttccaaaaaagttcgtatcggtttagttggtaaatatgtttccttgcaagatgcttacctttctgtagcagaagcacttcgtcatgcaggatatgatcatgatgcagaaatcgaaatcgactggattgattccgaaaaagtaacaaaagaaaacgttgctgaaatcatgaaagatgtcgacggtatcttagttcctggtggtttcggtgatcgtgccattgaaggtaaaattgctgctatcgagtatgcacgcgtaaataaagtaccttatttcggtatttgtttaggtatgcaactagcaactgttgaatttgcccgcaatgttcttggtcttgaaggagctcattctgcagaaatcgaaccagaaacaaatcataatatcattgacttattaccagaacaaaaaaatatcgaaaacatgggtggaacgcttcgtttaggtctttatccagcgcgtattaagcaaggaaccaaagcggaggctgcttatggtacaacacttgtagaagagcgtcatcgtcatcgttatgagtttaataatgaatatagagaacaaatggaagaagctggcatgattgtttctgcaacgagcccagatggtcgtttagttgaagtagttgaactgattgatcacccttggtttgtcgcttgtcaatatcacccagaattcatttctcgtccaaaccgtccacaaagcttgtttaaagattttgttggcgcagcacttaaaaataaataa

SEQ ID NO: 54177 - protein, 532 aa, Listeria monocytogenes; identical to SEQ ID NO: 31449

SEQ ID NO: 54178 - DNA, 1605 bp, Methanosarcina acetivorans; identical to SEQ ID NO: 31454
  CDS (1)..(1605): transl_table=11

SEQ ID NO: 54179 - protein, 534 aa, Methanosarcina acetivorans; identical to SEQ ID NO: 31455

SEQ ID NO: 54180 - DNA, 1659 bp, Methylococcus capsulatus; identical to SEQ ID NO: 31460
  CDS (1)..(1659): transl_table=11

SEQ ID NO: 54181 - protein, 552 aa, Methylococcus capsulatus; identical to SEQ ID NO: 31461

SEQ ID NO: 54182 - DNA, 1629 bp, Methylobacillus flagellatus; identical to SEQ ID NO: 31462
  CDS (1)..(1629): transl_table=11

SEQ ID NO: 54183 - protein, 542 aa, Methylobacillus flagellatus; identical to SEQ ID NO: 31463

SEQ ID NO: 54184 - DNA, 1623 bp, Methanococcus jannaschii; identical to SEQ ID NO: 31464
  CDS (1)..(1623): transl_table=11

SEQ ID NO: 54185 - protein, 540 aa, Methanococcus jannaschii; identical to SEQ ID NO: 31465

SEQ ID NO: 54186 - DNA, 1602 bp, Methanococcus maripaludis; identical to SEQ ID NO: 31470
  CDS (1)..(1602): transl_table=11

SEQ ID NO: 54187 - protein, 533 aa, Methanococcus maripaludis; identical to SEQ ID NO: 31471

SEQ ID NO: 54188 - DNA, 1614 bp, Moorella thermoacetica; identical to SEQ ID NO: 31474
  CDS (1)..(1614): transl_table=11

SEQ ID NO: 54189 - protein, 537 aa, Moorella thermoacetica; identical to SEQ ID NO: 31475

SEQ ID NO: 54190 - DNA, 1740 bp, Mycobacterium sp; identical to SEQ ID NO: 31486
  CDS (1)..(1740): transl_table=11

SEQ ID NO: 54191 - protein, 579 aa, Mycobacterium sp; identical to SEQ ID NO: 31487

SEQ ID NO: 54192 - DNA, 1635 bp, Neisseria gonorrhoeae; identical to SEQ ID NO: 31490
  CDS (1)..(1635): transl_table=11

SEQ ID NO: 54193 - protein, 544 aa, Neisseria gonorrhoeae; identical to SEQ ID NO: 31491

SEQ ID NO: 54194 - DNA, 1695 bp, Nitrosomonas europaea; identical to SEQ ID NO: 31498
  CDS (1)..(1695): transl_table=11

SEQ ID NO: 54195 - protein, 564 aa, Nitrosomonas europaea; identical to SEQ ID NO: 31499

SEQ ID NO: 54196 - DNA, 1632 bp, Novosphingobium aromaticivorans; identical to SEQ ID NO: 31502
  CDS (1)..(1632): transl_table=11

SEQ ID NO: 54197 - protein, 543 aa, Novosphingobium aromaticivorans; identical to SEQ ID NO: 31503

SEQ ID NO: 54198 - DNA, 1629 bp, Pasteurella multocida; identical to SEQ ID NO: 31508
  CDS (1)..(1629): transl_table=11

SEQ ID NO: 54199 - protein, 542 aa, Pasteurella multocida; identical to SEQ ID NO: 31509

SEQ ID NO: 54200 - DNA, 1638 bp, Photobacterium profundum; identical to SEQ ID NO: 31512
  CDS (1)..(1638): transl_table=11

SEQ ID NO: 54201 - protein, 545 aa, Photobacterium profundum; identical to SEQ ID NO: 31513

SEQ ID NO: 54202 - DNA, 1605 bp, Picrophilus torridus; identical to SEQ ID NO: 31514
  CDS (1)..(1605): transl_table=11

SEQ ID NO: 54203 - protein, 534 aa, Picrophilus torridus; identical to SEQ ID NO: 31515

SEQ ID NO: 54204 - DNA, 1620 bp, Porphyromonas gingivalis; identical to SEQ ID NO: 31516
  CDS (1)..(1620): transl_table=11

SEQ ID NO: 54205 - protein, 539 aa, Porphyromonas gingivalis; identical to SEQ ID NO: 31517

SEQ ID NO: 54206 - DNA, 1611 bp, Prochlorococcus marinus
  CDS (1)..(1611): transl_table=11
atgtcaaaatttgtttttgtcaccggaggagtagtttctagcattggtaaaggaattgtagctgcaagcttagggagattattaaagtctagaggatatagtgtttcaatattaaaactagatccatacctaaatgttgatccaggcacaatgagccctttccaacatggagaagtatttgtaaccgaagatggggctgaaacagatttagatttaggtcactatgaaagatttactgatactgcaatgactaggttaaatagtgtgactacgggatctatctatcaagcagttattaataaagaaagaagaggtagttataacggtggaactgtgcaagtaattcctcacataacgagagaaataagagaaagaattcatagagtagcctccaacagcaatgcggatattattattactgaaattggtggaacagttggtgatattgaatctttaccttttttagaggcaataagagaatttaaaaatgatgtcaataggaatgatgttgcatacatccacgtaacattacttccttacatcaaaacctctggcgaaataaaaactaaaccaacacaacattcagtgaaagaattaagatcaattggaattcagccagatttacttgtatgtcgcagtgacaaatcaatcaatgaaggtcttaaaaagaagcttagtggattttgtggagttaatataaactctgtaattgaagcattagacgcagatagtatttattctgttcctctttctttaaaaaaagaaggtttgtgcaaagaaactctgaagtatctagaacttgaagataaagaatgtgatttgaaaaattgggaaaaactagttcacaatctaagaaatcctggaactcctataaaagttgctctagtaggtaaatatattgaacttggagatgcatatttatctgttgttgaagctttaagacatgcatgcattgaacaaaaggctttattagatttacattgggtaagcgctgaaatgatagaaaaagattcagcagaaacttacttgaatgaagtggatgcgattgtcgtacctgggggctttggaaataggggagttaatggcaaaatttcggctataaaattcgcaagagagaataaaattccatttttaggcctgtgccttggtatgcaatgtgcagttatagaatgggctagaaatgtagcgaatcttccagatgcatctagttcggaactagacccaaaaactcccaatccagttatacatttattaccagaacaggaagatgtagttgatttaggcgggacaatgagacttggagtttatccatgtagattgacaaataatacaattgggaaaaaattgtatgatgaagatgttatttatgagagacatcgacatagatacgaatttaataattactacaagcaaagttttttaaattctggatacaaaattagtggtacatctccagatggcagactagtagagttaattgagttagacaatcatccttattttttggcatgtcaatatcatcctgagtttttatcaagacctggcaaacctcatcctttatttaaaggcttaataaaatcctctcaagaaaacttaactcaatcaaattaa

SEQ ID NO: 54207 - protein, 536 aa, Prochlorococcus marinus
MSKFVFVTGGVVSSIGKGIVAASLGRLLKSRGYSVSILKLDPYLNVDPGTMSPFQHGEVFVTEDGAETDLDLGHYERFTDTAMTRLNSVTTGSIYQAVINKERRGSYNGGTVQVIPHITREIRERIHRVASNSNADIIITEIGGTVGDIESLPFLEAIREFKNDVNRNDVAYIHVTLLPYIKTSGEIKTKPTQHSVKELRSIGIQPDLLVCRSDKSINEGLKKKLSGFCGVNINSVIEALDADSIYSVPLSLKKEGLCKETLKYLELEDKECDLKNWEKLVHNLRNPGTPIKVALVGKYIELGDAYLSVVEALRHACIEQKALLDLHWVSAEMIEKDSAETYLNEVDAIVVPGGFGNRGVNGKISAIKFARENKIPFLGLCLGMQCAVIEWARNVANLPDASSSELDPKTPNPVIHLLPEQEDVVDLGGTMRLGVYPCRLTNNTIGKKLYDEDVIYERHRHRYEFNNYYKQSFLNSGYKISGTSPDGRLVELIELDNHPYFLACQYHPEFLSRPGKPHPLFKGLIKSSQENLTQSN

SEQ ID NO: 54208 - DNA, 1656 bp, Prochlorococcus marinus; identical to SEQ ID NO: 31520
  CDS (1)..(1656): transl_table=11

SEQ ID NO: 54209 - protein, 551 aa, Prochlorococcus marinus; identical to SEQ ID NO: 31521

SEQ ID NO: 54210 - DNA, 1677 bp, Prochlorococcus marinus; identical to SEQ ID NO: 31522
  CDS (1)..(1677): transl_table=11

SEQ ID NO: 54211 - protein, 558 aa, Prochlorococcus marinus; identical to SEQ ID NO: 31523

SEQ ID NO: 54212 - DNA, 1611 bp, Prochlorococcus marinus subsp; identical to SEQ ID NO: 31524
  CDS (1)..(1611): transl_table=11

SEQ ID NO: 54213 - protein, 536 aa, Prochlorococcus marinus subsp; identical to SEQ ID NO: 31525

SEQ ID NO: 54214 - DNA, 1668 bp, Prochlorococcus marinus; identical to SEQ ID NO: 31526
  CDS (1)..(1668): transl_table=11

SEQ ID NO: 54215 - protein, 555 aa, Prochlorococcus marinus; identical to SEQ ID NO: 31527

SEQ ID NO: 54216 - DNA, 1632 bp, Pseudomonas syringae pv; identical to SEQ ID NO: 31528
  CDS (1)..(1632): transl_table=11

SEQ ID NO: 54217 - protein, 543 aa, Pseudomonas syringae pv; identical to SEQ ID NO: 31529

SEQ ID NO: 54218 - DNA, 1629 bp, Pseudomonas aeruginosa; identical to SEQ ID NO: 31530
  CDS (1)..(1629): transl_table=11

SEQ ID NO: 54219 - protein, 542 aa, Pseudomonas aeruginosa; identical to SEQ ID NO: 31531

SEQ ID NO: 54220 - DNA, 1632 bp, Pseudomonas fluorescens; identical to SEQ ID NO: 31534
  CDS (1)..(1632): transl_table=11

SEQ ID NO: 54221 - protein, 543 aa, Pseudomonas fluorescens; identical to SEQ ID NO: 31535

SEQ ID NO: 54222 - DNA, 1629 bp, Pseudomonas putida; identical to SEQ ID NO: 31536
  CDS (1)..(1629): transl_table=11

SEQ ID NO: 54223 - protein, 542 aa, Pseudomonas putida; identical to SEQ ID NO: 31537

SEQ ID NO: 54224 - DNA, 1614 bp, Pyrococcus abyssi; identical to SEQ ID NO: 31540
  CDS (1)..(1614): transl_table=11

SEQ ID NO: 54225 - protein, 537 aa, Pyrococcus abyssi; identical to SEQ ID NO: 31541

SEQ ID NO: 54226 - DNA, 1614 bp, Pyrococcus furiosus
  CDS (1)..(1614): transl_table=11
atgacgaagtacatatttgttactggaggagttgtgagtgggcttggaaagggaatcacaagcgcttcaatagggcttctcatgaaagctagaggctacaaaacaaccaacatcaaaattgatccttacatcaactatgatgctggaactatgaacccctatcagcacggagaagtcttcgttcttgacgatggtggagaagtggatcttgatttaggaaattatgaaagattcttagacacagaattgacttttgaccataacataacaactggaaaggtatattctactgtaatagaaaaggagagaagaggagaatatctcggagccactgtccaagttattcctcacatcacagatgaaataaagaggagaataagagagatagctaaggattacgaagtcgttgtagtggagataggaggcaccgtgggagatatagaaagcatgcctttcctcgaggcagcgagacaaatgcagctagaagaaggaagagacaacgtggcattcgttcatgtaacatacgttccaaaactcaaggtagttggagaacagaagacaaagccaacccaacacagcgtcaaagagctccgctccctgggaatacaaccagatgcaattgttgccagaagtgaagatccccttgaagaggccgcaagaaagaaaataagcctatttaccaacgttccagaggaagccgttatcagcgcgtatgacgttgaagatacatatgaagttcccctcctactggagagagaaggactcggaaaatatctaacaaaaaggctcaagcttgaagatagggaaccagacctaaaagattgggaaaagatggttgcaaaatacaaggccctaactgaaactgttgagattgcaatagttggaaagtacgtcaaattgcaagattcttaccttagcattaaagaagcattaaaacatgccagcgttagtaatgaagtcaaggtaaagataagatggattgaggccgaggacgttgaaactcatggaacgaagcttcttgaaggagttgatggtattataatcccaggaggatttggggcaaggggagctgaaggaaagatacaggcaataagatatgcaagagaaaatgacatccccttcctaggcatatgctttggcttccaactaacagttgttgagtttgcaagaaatgttttaggaatgaagggagcccattcaactgaaatagatccccaaactccatatccagttgttgacctaatgccagagcagcgaaacctagacaggcttggaggaactatgagacttggagcttacccagtaaagataaagaaaggaaccttagcatattccctttacaataaggaactcgtatatgagagacataggcacaggtgggaggtcaatcctaattacattgaagctcttgagaaagctggattagtgtttagtggagttgcgggggacgatgaaagaagaatggaaattctagaattgccagataagagatacttcatagcaactcagttccacccagaatttaagtcgaggccaatgagaccagctccagtctttcacggactcgttagagcagcaaaagaatacaaacaggagaaaaatgttactcactaa

SEQ ID NO: 54227 - protein, 537 aa, Pyrococcus furiosus; identical to SEQ ID NO: 31545

SEQ ID NO: 54228 - DNA, 1602 bp, Pyrococcus kodakaraensis; identical to SEQ ID NO: 31548
  CDS (1)..(1602): transl_table=11

SEQ ID NO: 54229 - protein, 533 aa, Pyrococcus kodakaraensis; identical to SEQ ID NO: 31549

SEQ ID NO: 54230 - DNA, 1665 bp, Ralstonia solanacearum; identical to SEQ ID NO: 31554
  CDS (1)..(1665): transl_table=11

SEQ ID NO: 54231 - protein, 554 aa, Ralstonia solanacearum; identical to SEQ ID NO: 31555

SEQ ID NO: 54232 - DNA, 1629 bp, Rhizobium loti; identical to SEQ ID NO: 31558
  CDS (1)..(1629): transl_table=11

SEQ ID NO: 54233 - protein, 542 aa, Rhizobium loti; identical to SEQ ID NO: 31559

SEQ ID NO: 54234 - DNA, 1629 bp, Rhizobium meliloti; identical to SEQ ID NO: 31560
  CDS (1)..(1629): transl_table=11

SEQ ID NO: 54235 - protein, 542 aa, Rhizobium meliloti; identical to SEQ ID NO: 31561

SEQ ID NO: 54236 - DNA, 1656 bp, Rhodopirellula baltica; identical to SEQ ID NO: 31562
  CDS (1)..(1656): transl_table=11

SEQ ID NO: 54237 - protein, 551 aa, Rhodopirellula baltica; identical to SEQ ID NO: 31563

SEQ ID NO: 54238 - DNA, 1632 bp, Rhodopseudomonas palustris; identical to SEQ ID NO: 31564
  CDS (1)..(1632): transl_table=11

SEQ ID NO: 54239 - protein, 543 aa, Rhodopseudomonas palustris; identical to SEQ ID NO: 31565

SEQ ID NO: 54240 - DNA, 1614 bp, Rickettsia conorii; identical to SEQ ID NO: 31572
  CDS (1)..(1614): transl_table=11

SEQ ID NO: 54241 - protein, 537 aa, Rickettsia conorii; identical to SEQ ID NO: 31573

SEQ ID NO: 54242 - DNA, 1656 bp, Rubrobacter xylanophilus; identical to SEQ ID NO: 31580
  CDS (1)..(1656): transl_table=11

SEQ ID NO: 54243 - protein, 551 aa, Rubrobacter xylanophilus; identical to SEQ ID NO: 31581

SEQ ID NO: 54244 - DNA, 1632 bp, Saccharophagus degradans; identical to SEQ ID NO: 31582
  CDS (1)..(1632): transl_table=11

SEQ ID NO: 54245 - protein, 543 aa, Saccharophagus degradans; identical to SEQ ID NO: 31583

SEQ ID NO: 54246 - DNA, 1803 bp, Schizosaccharomyces pombe; identical to SEQ ID NO: 31586
  CDS (1)..(1803)

SEQ ID NO: 54247 - protein, 600 aa, Schizosaccharomyces pombe; identical to SEQ ID NO: 31587

SEQ ID NO: 54248 - DNA, 1641 bp, Shewanella oneidensis; identical to SEQ ID NO: 31588
  CDS (1)..(1641): transl_table=11

SEQ ID NO: 54249 - protein, 546 aa, Shewanella oneidensis; identical to SEQ ID NO: 31589

SEQ ID NO: 54250 - DNA, 1644 bp, Silicibacter pomeroyi; identical to SEQ ID NO: 31594
  CDS (1)..(1644): transl_table=11

SEQ ID NO: 54251 - protein, 547 aa, Silicibacter pomeroyi; identical to SEQ ID NO: 31595

SEQ ID NO: 54252 - DNA, 1632 bp, Sphingopyxis alaskensis; identical to SEQ ID NO: 31598
  CDS (1)..(1632): transl_table=11

SEQ ID NO: 54253 - protein, 543 aa, Sphingopyxis alaskensis; identical to SEQ ID NO: 31599

SEQ ID NO: 54254 - DNA, 1608 bp, Staphylococcus epidermidis; identical to SEQ ID NO: 31604
  CDS (1)..(1608): transl_table=11

SEQ ID NO: 54255 - protein, 535 aa, Staphylococcus epidermidis; identical to SEQ ID NO: 31605

SEQ ID NO: 54256 - DNA, 1605 bp, Streptococcus agalactiae serotype V; identical to SEQ ID NO: 31606
  CDS (1)..(1605): transl_table=11

SEQ ID NO: 54257 - protein, 534 aa, Streptococcus agalactiae serotype V; identical to SEQ ID NO: 31607

SEQ ID NO: 54258 - DNA, 1650 bp, Streptomyces avermitilis; identical to SEQ ID NO: 31608
  CDS (1)..(1650): transl_table=11

SEQ ID NO: 54259 - protein, 549 aa, Streptomyces avermitilis; identical to SEQ ID NO: 31609

SEQ ID NO: 54260 - DNA, 1650 bp, Streptomyces coelicolor; identical to SEQ ID NO: 31610
  CDS (1)..(1650): transl_table=11

SEQ ID NO: 54261 - protein, 549 aa, Streptomyces coelicolor; identical to SEQ ID NO: 31611

SEQ ID NO: 54262 - DNA, 1611 bp, Streptococcus mutans; identical to SEQ ID NO: 31612
  CDS (1)..(1611): transl_table=11

SEQ ID NO: 54263 - protein, 536 aa, Streptococcus mutans; identical to SEQ ID NO: 31613

SEQ ID NO: 54264 - DNA, 1626 bp, Symbiobacterium thermophilum; identical to SEQ ID NO: 31622
  CDS (1)..(1626): transl_table=11

SEQ ID NO: 54265 - protein, 541 aa, Symbiobacterium thermophilum; identical to SEQ ID NO: 31623

SEQ ID NO: 54266 - DNA, 1641 bp, Synechococcus sp; identical to SEQ ID NO: 31628
  CDS (1)..(1641): transl_table=11

SEQ ID NO: 54267 - protein, 546 aa, Synechococcus sp; identical to SEQ ID NO: 31629

SEQ ID NO: 54268 - DNA, 1635 bp, Synechococcus sp; identical to SEQ ID NO: 31630
  CDS (1)..(1635): transl_table=11

SEQ ID NO: 54269 - protein, 544 aa, Synechococcus sp; identical to SEQ ID NO: 31631

SEQ ID NO: 54270 - DNA, 1674 bp, Synechococcus sp; identical to SEQ ID NO: 31632
  CDS (1)..(1674): transl_table=11

SEQ ID NO: 54271 - protein, 557 aa, Synechococcus sp; identical to SEQ ID NO: 31633

SEQ ID NO: 54272 - DNA, 1650 bp, Synechococcus sp; identical to SEQ ID NO: 31634
  CDS (1)..(1650): transl_table=11

SEQ ID NO: 54273 - protein, 549 aa, Synechococcus sp; identical to SEQ ID NO: 31635

SEQ ID NO: 54274 - DNA, 1638 bp, Thermoplasma acidophilum; identical to SEQ ID NO: 31638
  CDS (1)..(1638): transl_table=11

SEQ ID NO: 54275 - protein, 545 aa, Thermoplasma acidophilum; identical to SEQ ID NO: 31639

SEQ ID NO: 54276 - DNA, 1575 bp, Thermotoga maritima; identical to SEQ ID NO: 31640
  CDS (1)..(1575): transl_table=11

SEQ ID NO: 54277 - protein, 524 aa, Thermotoga maritima; identical to SEQ ID NO: 31641

SEQ ID NO: 54278 - DNA, 1614 bp, Thermoanaerobacter tengcongensis; identical to SEQ ID NO: 31644
  CDS (1)..(1614): transl_table=11

SEQ ID NO: 54279 - protein, 537 aa, Thermoanaerobacter tengcongensis; identical to SEQ ID NO: 31645

SEQ ID NO: 54280 - DNA, 1623 bp, Thermoplasma volcanium; identical to SEQ ID NO: 31646
  CDS (1)..(1623): transl_table=11

SEQ ID NO: 54281 - protein, 540 aa, Thermoplasma volcanium; identical to SEQ ID NO: 31647

SEQ ID NO: 54282 - DNA, 1641 bp, Thiobacillus denitrificans; identical to SEQ ID NO: 31648
  CDS (1)..(1641): transl_table=11

SEQ ID NO: 54283 - protein, 546 aa, Thiobacillus denitrificans; identical to SEQ ID NO: 31649

SEQ ID NO: 54284 - DNA, 1611 bp, Treponema denticola; identical to SEQ ID NO: 31650
  CDS (1)..(1611): transl_table=11

SEQ ID NO: 54285 - protein, 536 aa, Treponema denticola; identical to SEQ ID NO: 31651

SEQ ID NO: 54286 - DNA, 1716 bp, Trichodesmium erythraeum; identical to SEQ ID NO: 31654
  CDS (1)..(1716): transl_table=11

SEQ ID NO: 54287 - protein, 571 aa, Trichodesmium erythraeum; identical to SEQ ID NO: 31655

SEQ ID NO: 54288 - DNA, 1629 bp, Ureaplasma parvum; identical to SEQ ID NO: 31660
  CDS (1)..(1629): transl_table=4

SEQ ID NO: 54289 - protein, 542 aa, Ureaplasma parvum; identical to SEQ ID NO: 31661

SEQ ID NO: 54290 - DNA, 1638 bp, Vibrio vulnificus; identical to SEQ ID NO: 31666
  CDS (1)..(1638): transl_table=11

SEQ ID NO: 54291 - protein, 545 aa, Vibrio vulnificus; identical to SEQ ID NO: 31667

SEQ ID NO: 54292 - DNA, 1590 bp, Wolbachia pipientis wMel; identical to SEQ ID NO: 31670
  CDS (1)..(1590): transl_table=11

SEQ ID NO: 54293 - protein, 529 aa, Wolbachia pipientis wMel; identical to SEQ ID NO: 31671

SEQ ID NO: 54294 - DNA, 1659 bp, Wolinella succinogenes; identical to SEQ ID NO: 31672
  CDS (1)..(1659): transl_table=11

SEQ ID NO: 54295 - protein, 552 aa, Wolinella succinogenes; identical to SEQ ID NO: 31673

SEQ ID NO: 54296 - DNA, 1665 bp, Xanthomonas axonopodis pv; identical to SEQ ID NO: 31674
  CDS (1)..(1665): transl_table=11

SEQ ID NO: 54297 - protein, 554 aa, Xanthomonas axonopodis pv; identical to SEQ ID NO: 31675

SEQ ID NO: 54298 - DNA, 1665 bp, Xylella fastidiosa; identical to SEQ ID NO: 31676
  CDS (1)..(1665): transl_table=11

SEQ ID NO: 54299 - protein, 554 aa, Xylella fastidiosa; identical to SEQ ID NO: 31677

SEQ ID NO: 54300 - DNA, 1665 bp, Xylella fastidiosa; identical to SEQ ID NO: 31678
  CDS (1)..(1665): transl_table=11

SEQ ID NO: 54301 - protein, 554 aa, Xylella fastidiosa; identical to SEQ ID NO: 31679

SEQ ID NO: 54302 - DNA, 1635 bp, Zymomonas mobilis; identical to SEQ ID NO: 31680
  CDS (1)..(1635): transl_table=11

SEQ ID NO: 54303 - protein, 544 aa, Zymomonas mobilis; identical to SEQ ID NO: 31681

SEQ ID NO: 54304 - DNA, 1740 bp, Saccharomyces cerevisiae; identical to SEQ ID NO: 31682
  CDS (1)..(1740)

SEQ ID NO: 54305 - protein, 579 aa, Saccharomyces cerevisiae; identical to SEQ ID NO: 31683

SEQ ID NO: 54306 - DNA, 1734 bp, Saccharomyces cerevisiae; identical to SEQ ID NO: 31684
  CDS (1)..(1734)

SEQ ID NO: 54307 - protein, 577 aa, Saccharomyces cerevisiae; identical to SEQ ID NO: 31685

SEQ ID NO: 54308 - DNA, 1818 bp, Oryza sativa; identical to SEQ ID NO: 31686
  CDS (1)..(1818)

SEQ ID NO: 54309 - protein, 605 aa, Oryza sativa; identical to SEQ ID NO: 31687

SEQ ID NO: 54310 - DNA, 1662 bp, Oryza sativa; identical to SEQ ID NO: 31690
  CDS (1)..(1662)

SEQ ID NO: 54311 - protein, 553 aa, Oryza sativa; identical to SEQ ID NO: 31691

SEQ ID NO: 54312 - DNA, 1827 bp, Oryza sativa; identical to SEQ ID NO: 31692
  CDS (1)..(1827)

SEQ ID NO: 54313 - protein, 608 aa, Oryza sativa; identical to SEQ ID NO: 31693

SEQ ID NO: 54314 - DNA, 1815 bp, Oryza sativa; identical to SEQ ID NO: 31694
  CDS (1)..(1815)

SEQ ID NO: 54315 - protein, 604 aa, Oryza sativa; identical to SEQ ID NO: 31695

SEQ ID NO: 54316 - DNA, 1827 bp, Zea mays; identical to SEQ ID NO: 31698
  CDS (1)..(1827)

SEQ ID NO: 54317 - protein, 608 aa, Zea mays; identical to SEQ ID NO: 31699

SEQ ID NO: 54318 - DNA, 1827 bp, Zea mays; identical to SEQ ID NO: 31700
  CDS (1)..(1827)

SEQ ID NO: 54319 - protein, 608 aa, Zea mays; identical to SEQ ID NO: 31701

SEQ ID NO: 54320 - DNA, 1812 bp, Zea mays; identical to SEQ ID NO: 31702
  CDS (1)..(1812)

SEQ ID NO: 54321 - protein, 603 aa, Zea mays; identical to SEQ ID NO: 31703

SEQ ID NO: 54322 - DNA, 1830 bp, Zea mays; identical to SEQ ID NO: 31704
  CDS (1)..(1830)

SEQ ID NO: 54323 - protein, 609 aa, Zea mays; identical to SEQ ID NO: 31705

SEQ ID NO: 54324 - DNA, 21 bp, Artificial sequence
  primer
atgtcgaagtttgtttttgtg

SEQ ID NO: 54325 - DNA, 21 bp, Artificial sequence
  primer
ttaacttggctcatgatcttc

SEQ ID NO: 54326 - protein, 604 aa, Artificial sequence
  consensus sequence
  Variant (7)..(7): Xaa in position 7 is any amino acid
  Variant (9)..(10): Xaa in position 9 to 10 is any amino acid
  Variant (14)..(17): Xaa in position 14 to 17 is any amino acid
  Variant (19)..(22): Xaa in position 19 to 22 is any amino acid
  Variant (24)..(25): Xaa in position 24 to 25 is any amino acid
  Variant (26)..(26): Xaa in position 26 is any or no amino acid
  Variant (28)..(29): Xaa in position 28 to 29 is any amino acid
  Variant (31)..(33): Xaa in position 31 to 33 is any amino acid
  Variant (35)..(35): Xaa in position 35 is any amino acid
  Variant (39)..(39): Xaa in position 39 is any amino acid
  Variant (41)..(41): Xaa in position 41 is any amino acid
  Variant (43)..(43): Xaa in position 43 is any amino acid
  Variant (49)..(50): Xaa in position 49 to 50 is any amino acid
  Variant (58)..(58): Xaa in position 58 is any amino acid
  Variant (61)..(61): Xaa in position 61 is any amino acid
  Variant (69)..(69): Xaa in position 69 is any amino acid
  Variant (74)..(84): Xaa in position 74 to 84 is any amino acid
  Variant (86)..(86): Xaa in position 86 is any amino acid
  Variant (88)..(89): Xaa in position 88 to 89 is any amino acid
  Variant (91)..(92): Xaa in position 91 to 92 is any amino acid
  Variant (94)..(95): Xaa in position 94 to 95 is any amino acid
  Variant (99)..(99): Xaa in position 99 is any amino acid
  Variant (101)..(101): Xaa in position 101 is any amino acid
  Variant (105)..(105): Xaa in position 105 is any amino acid
  Variant (110)..(110): Xaa in position 110 is any amino acid
  Variant (113)..(113): Xaa in position 113 is any amino acid
  Variant (115)..(116): Xaa in position 115 to 116 is any amino acid
  Variant (118)..(126): Xaa in position 118 to 126 is any amino acid
  Variant (127)..(140): Xaa in position 127 to 140 is any or no amino acid
  Variant (142)..(142): Xaa in position 142 is any amino acid
  Variant (143)..(145): Xaa in position 143 to 145 is any or no amino acid
  Variant (147)..(147): Xaa in position 147 is any amino acid
  Variant (157)..(157): Xaa in position 157 is any amino acid
  Variant (160)..(160): Xaa in position 160 is any amino acid
  Variant (163)..(163): Xaa in position 163 is any amino acid
  Variant (166)..(167): Xaa in position 166 to 167 is any amino acid
  Variant (168)..(170): Xaa in position 168 to 170 is any or no amino acid
  Variant (172)..(177): Xaa in position 172 to 177 is any amino acid
  Variant (178)..(179): Xaa in position 178 to 179 is any or no amino acid
  Variant (181)..(182): Xaa in position 181 to 182 is any amino acid
  Variant (184)..(184): Xaa in position 184 is any amino acid
  Variant (186)..(188): Xaa in position 186 to 188 is any amino acid
  Variant (189)..(190): Xaa in position 189 to 190 is any or no amino acid
  Variant (193)..(193): Xaa in position 193 is any amino acid
  Variant (203)..(204): Xaa in position 203 to 204 is any amino acid
  Variant (207)..(208): Xaa in position 207 to 208 is any amino acid
  Variant (210)..(211): Xaa in position 210 to 211 is any amino acid
  Variant (214)..(217): Xaa in position 214 to 217 is any amino acid
  Variant (219)..(229): Xaa in position 219 to 229 is any amino acid
  Variant (231)..(233): Xaa in position 231 to 233 is any amino acid
  Variant (235)..(236): Xaa in position 235 to 236 is any amino acid
  Variant (238)..(241): Xaa in position 238 to 241 is any amino acid
  Variant (243)..(246): Xaa in position 243 to 246 is any amino acid
  Variant (248)..(251): Xaa in position 248 to 251 is any amino acid
  Variant (252)..(252): Xaa in position 252 is any or no amino acid
  Variant (254)..(255): Xaa in position 254 to 255 is any amino acid
  Variant (257)..(279): Xaa in position 257 to 279 is any amino acid
  Variant (280)..(293): Xaa in position 280 to 293 is any or no amino acid
  Variant (295)..(307): Xaa in position 295 to 307 is any amino acid
  Variant (308)..(326): Xaa in position 308 to 326 is any or no amino acid
  Variant (331)..(332): Xaa in position 331 to 332 is any amino acid
  Variant (334)..(334): Xaa in position 334 is any amino acid
  Variant (336)..(336): Xaa in position 336 is any amino acid
  Variant (338)..(338): Xaa in position 338 is any amino acid
  Variant (340)..(341): Xaa in position 340 to 341 is any amino acid
  Variant (345)..(345): Xaa in position 345 is any amino acid
  Variant (347)..(377): Xaa in position 347 to 377 is any amino acid
  Variant (378)..(393): Xaa in position 378 to 393 is any or no amino acid
  Variant (400)..(400): Xaa in position 400 is any amino acid
  Variant (401)..(401): Xaa in position 401 is any or no amino acid
  Variant (404)..(405): Xaa in position 404 to 405 is any amino acid
  Variant (408)..(409): Xaa in position 408 to 409 is any amino acid
  Variant (411)..(413): Xaa in position 411 to 413 is any amino acid
  Variant (417)..(419): Xaa in position 417 to 419 is any amino acid
  Variant (421)..(422): Xaa in position 421 to 422 is any amino acid
  Variant (424)..(424): Xaa in position 424 is any amino acid
  Variant (430)..(430): Xaa in position 430 is any amino acid
  Variant (432)..(433): Xaa in position 432 to 433 is any amino acid
  Variant (435)..(435): Xaa in position 435 is any amino acid
  Variant (438)..(443): Xaa in position 438 to 443 is any amino acid
  Variant (444)..(444): Xaa in position 444 is any or no amino acid
  Variant (446)..(446): Xaa in position 446 is any amino acid
  Variant (448)..(448): Xaa in position 448 is any amino acid
  Variant (450)..(458): Xaa in position 450 to 458 is any amino acid
  Variant (459)..(467): Xaa in position 459 to 467 is any or no amino acid
  Variant (469)..(473): Xaa in position 469 to 473 is any amino acid
  Variant (474)..(486): Xaa in position 474 to 486 is any or no amino acid
  Variant (494)..(504): Xaa in position 494 to 504 is any amino acid
  Variant (505)..(508): Xaa in position 505 to 508 is any or no amino acid
  Variant (510)..(514): Xaa in position 510 to 514 is any amino acid
  Variant (515)..(519): Xaa in position 515 to 519 is any or no amino acid
  Variant (528)..(528): Xaa in position 528 is any amino acid
  Variant (530)..(544): Xaa in position 530 to 544 is any amino acid
  Variant (545)..(548): Xaa in position 545 to 548 is any or no amino acid
  Variant (550)..(555): Xaa in position 550 to 555 is any amino acid
  Variant (556)..(562): Xaa in position 556 to 562 is any or no amino acid
  Variant (564)..(565): Xaa in position 564 to 565 is any amino acid
  Variant (567)..(569): Xaa in position 567 to 569 is any amino acid
  Variant (570)..(574): Xaa in position 570 to 574 is any or no amino acid
  Variant (576)..(577): Xaa in position 576 to 577 is any amino acid
  Variant (579)..(581): Xaa in position 579 to 581 is any amino acid
  Variant (583)..(583): Xaa in position 583 is any amino acid
  Variant (587)..(588): Xaa in position 587 to 588 is any amino acid
  Variant (590)..(590): Xaa in position 590 is any amino acid
  Variant (592)..(595): Xaa in position 592 to 595 is any amino acid
  Variant (599)..(599): Xaa in position 599 is any amino acid
  Variant (600)..(603): Xaa in position 600 to 603 is any or no amino acid
FVTGGVXSXXGKGXXXXSXXXXLXXXGXXVXXXKXDPYXNXDXGTMSPXXHGEVFVTXDGXETDLDLGXYERFXXXXXXXXXXXTXGXXYXXVXXKERXGXYLGXTVQVXPHXTXXIXXXXXXXXXXXXXXXXXXXXXXXDXXXXEXGGTVGDIESXPFXEAXRQXXXXXGXXXXXXXXHXXLXPXXXXXGEXKTKPTQHSVXXLRXXGXXPDXXXXRXXXXXXXXXXXKXXXFXXVXXXXVXXXXDXXXXXYXXPXXXXXXXXXXXXXXXXXXXXXXXXXXXXXXXXXXXXXWXXXXXXXXXXXXXXXXXXXXXXXXXXXXXXXXVGKYXXLXDXYXSXXEALXHXXXXXXXXXXXXXXXXXXXXXXXXXXXXXXXXXXXXXXXXXXXXXXXVPGGFGXXRGXXGKXXAXXXAREXXXPXXGXCLGMQXAXXEXARXXXXXXXAXSXEXXXXXXXXXXXXXXXXXXEXXXXXXXXXXXXXXXXXXGGTMRLGXXXXXXXXXXXXXXXYXXXXXXXXXXERHRHRYEXNXXXXXXXXXXXXXXXXXXXGXXXXXXXXXXXXXEXXEXXXXXXXXHXXFXXXQXHPEXXSXPXXXXPLFXXXXXA

SEQ ID NO: 54327 - protein, 55 aa, Artificial sequence
  protein pattern
  Variant (4)..(4): Xaa in position 4 is Ile, Leu or Met
  Variant (6)..(6): Xaa in position 6 is any amino acid
  Variant (8)..(8): Xaa in position 8 is Ala, Pro or Ser
  Variant (12)..(12): Xaa in position 12 is Asn or Ser
  Variant (14)..(14): Xaa in position 14 is any amino acid
  Variant (15)..(15): Xaa in position 15 is Glu or Gln
  Variant (20)..(20): Xaa in position 20 is Phe or Tyr
  Variant (22)..(23): Xaa in position 22 to 23 is any amino acid
  Variant (26)..(26): Xaa in position 26 is any amino acid
  Variant (28)..(28): Xaa in position 28 is Ala, Thr or Val
  Variant (34)..(34): Xaa in position 34 is any amino acid
  Variant (38)..(47): Xaa in position 38 to 47 is any amino acid
  Variant (48)..(48): Xaa in position 48 is Cys, Asn, Ser or Thr
  Variant (49)..(49): Xaa in position 49 is any amino acid
  Variant (50)..(50): Xaa in position 50 is Ser or Thr
  Variant (51)..(51): Xaa in position 51 is any amino acid
  Variant (53)..(53): Xaa in position 53 is any amino acid
  Variant (54)..(54): Xaa in position 54 is Ile or Val
  Variant (55)..(55): Xaa in position 55 is Phe or Tyr
DPYXNXDXGTMXPXXHGEVXVXXDGXEXDLDLGXYERXXXXXXXXXXXXXXGXXX

SEQ ID NO: 54328 - protein, 45 aa, Artificial sequence
  protein pattern
  Variant (2)..(3): Xaa in position 2 to 3 is any amino acid
  Variant (6)..(6): Xaa in position 6 is Ile, Leu, Met or Val
  Variant (7)..(11): Xaa in position 7 to 11 is any amino acid
  Variant (14)..(17): Xaa in position 14 to 17 is any amino acid
  Variant (19)..(19): Xaa in position 19 is any amino acid
  Variant (20)..(20): Xaa in position 20 is Phe or Leu
  Variant (22)..(22): Xaa in position 22 is Ile, Leu or Val
  Variant (24)..(24): Xaa in position 24 is any amino acid
  Variant (26)..(26): Xaa in position 26 is Phe, Leu or Met
  Variant (28)..(30): Xaa in position 28 to 30 is any amino acid
  Variant (31)..(31): Xaa in position 31 is Ile, Leu or Val
  Variant (32)..(32): Xaa in position 32 is Asp, Glu or Thr
  Variant (33)..(34): Xaa in position 33 to 34 is any amino acid
  Variant (36)..(42): Xaa in position 36 to 42 is any amino acid
  Variant (43)..(43): Xaa in position 43 is Ala, Asn, Ser, Thr or Val
  Variant (44)..(44): Xaa in position 44 is any amino acid
  Variant (45)..(45): Xaa in position 45 is Ala, Ser or Thr
GXXGKXXXXXXARXXXXPXXGXCXGXQXXXXXXXRXXXXXXXXXX

SEQ ID NO: 54329 - protein, 27 aa, Artificial sequence
  protein pattern
  Variant (2)..(2): Xaa in position 2 is any amino acid
  Variant (12)..(13): Xaa in position 12 to 13 is any amino acid
  Variant (15)..(17): Xaa in position 15 to 17 is any amino acid
  Variant (19)..(19): Xaa in position 19 is Ile, Leu or Val
  Variant (20)..(20): Xaa in position 20 is any amino acid
  Variant (22)..(23): Xaa in position 22 to 23 is any amino acid
  Variant (24)..(24): Xaa in position 24 is Ile or Leu
  Variant (25)..(26): Xaa in position 25 to 26 is any amino acid
EXKTKPTQHSVXXLXXXGXXPXXXXXR

SEQ ID NO: 54330 - protein, 29 aa, Artificial sequence
  protein pattern
  Variant (2)..(4): Xaa in position 2 to 4 is any amino acid
  Variant (7)..(7): Xaa in position 7 is any amino acid
  Variant (9)..(9): Xaa in position 9 is any amino acid
  Variant (11)..(11): Xaa in position 11 is any amino acid
  Variant (13)..(13): Xaa in position 13 is any amino acid
  Variant (15)..(15): Xaa in position 15 is Ile or Val
  Variant (17)..(18): Xaa in position 17 to 18 is Ile or Val
  Variant (21)..(21): Xaa in position 21 is Ile, Leu or Val
  Variant (23)..(24): Xaa in position 23 to 24 is any amino acid
  Variant (25)..(25): Xaa in position 25 is Ile or Leu
  Variant (26)..(28): Xaa in position 26 to 28 is any amino acid
  Variant (29)..(29): Xaa in position 29 is Ile, Leu, Met or Val
VXXXERXGXYXGXTXQXXPHXTXXXXXXX

SEQ ID NO: 54331 - protein, 27 aa, Artificial sequence
  protein pattern
  Variant (2)..(2): Xaa in position 2 is any amino acid
  Variant (3)..(3): Xaa in position 3 is Phe, Trp or Tyr
  Variant (4)..(5): Xaa in position 4 to 5 is any amino acid
  Variant (6)..(6): Xaa in position 6 is Ala or Gly
  Variant (7)..(7): Xaa in position 7 is Ala, Cys, Ser, Thr or Val
  Variant (9)..(9): Xaa in position 9 is any amino acid
  Variant (13)..(14): Xaa in position 13 to 14 is any amino acid
  Variant (16)..(16): Xaa in position 16 is any amino acid
  Variant (17)..(19): Xaa in position 17 to 19 is any or no amino acid
  Variant (21)..(25): Xaa in position 21 to 25 is any amino acid
  Variant (26)..(26): Xaa in position 26 is any or no amino acid
HXXXXXXQXHPEXXSXXXXPXXXXXXL

SEQ ID NO: 54332 - protein, 21 aa, Artificial sequence
  protein pattern
  Variant (2)..(2): Xaa in position 2 is Ile, Leu or Val
  Variant (11)..(11): Xaa in position 11 is Ala, Gly or Ser
  Variant (12)..(12): Xaa in position 12 is any amino acid
  Variant (15)..(15): Xaa in position 15 is Phe, Ile, Leu, Met or Val
  Variant (17)..(17): Xaa in position 17 is Ala, Ser or Thr
  Variant (18)..(18): Xaa in position 18 is any amino acid
  Variant (20)..(20): Xaa in position 20 is Glu or Gln
  Variant (21)..(21): Xaa in position 21 is Phe, Ile, Leu, Met or Val
EXGGTVGDIEXXPFXEXXRXX

SEQ ID NO: 54333 - protein, 24 aa, Artificial sequence
  protein pattern
  Variant (2)..(3): Xaa in position 2 to 3 is any or no amino acid
  Variant (7)..(8): Xaa in position 7 to 8 is any amino acid
  Variant (10)..(10): Xaa in position 10 is any amino acid
  Variant (11)..(11): Xaa in position 11 is Asp or Glu
  Variant (12)..(12): Xaa in position 12 is Ala or Ser
  Variant (14)..(14): Xaa in position 14 is any amino acid
  Variant (16)..(17): Xaa in position 16 to 17 is any amino acid
  Variant (18)..(18): Xaa in position 18 is Asp, Glu or Lys
  Variant (19)..(19): Xaa in position 19 is Ala or Ser
  Variant (20)..(21): Xaa in position 20 to 21 is any amino acid
  Variant (23)..(23): Xaa in position 23 is Ala, Gly, Ser or Val
  Variant (24)..(24): Xaa in position 24 is Ala, Cys, Gly, Ser or Thr
VXXGKYXXLXXXYXSXXXXXXHXX

SEQ ID NO: 54334 - protein, 10 aa, Artificial sequence
  protein pattern
  Variant (9)..(9): Xaa in position 9 is any amino acid
ERHRHRYEXN

SEQ ID NO: 54335 - protein, 13 aa, Artificial sequence
  protein pattern
  Variant (4)..(4): Xaa in position 4 is Leu or Met
  Variant (8)..(10): Xaa in position 8 to 10 is any amino acid
  Variant (11)..(11): Xaa in position 11 is Ala, Cys, Thr or Val
  Variant (12)..(12): Xaa in position 12 is any amino acid
  Variant (13)..(13): Xaa in position 13 is Phe, Ile, Leu or Val
GGTXRLGXXXXXX

SEQ ID NO: 54336 - protein, 14 aa, Artificial sequence
  protein pattern
  Variant (2)..(5): Xaa in position 2 to 5 is any amino acid
  Variant (6)..(6): Xaa in position 6 is Ala or Gly
  Variant (7)..(7): Xaa in position 7 is Ile, Leu or Val
  Variant (8)..(8): Xaa in position 8 is any amino acid
  Variant (9)..(9): Xaa in position 9 is Ile or Val
LXXXXXXXXPGGFG

SEQ ID NO: 54337 - DNA, 1341 bp, Synechocystis sp.
  CDS (1)..(1341): transl_table=11
atgagtaatttttcccgaagcacccgacgcaagttcatgtttaccgcaggggccgccgctattggaggagtggttctccatggttgtacttcccccaccaccacatccaccgggacgggtacagggtccagcacggatcaagccattagtcctttagtcgagggggagaatgccccggaagtaaccaccgccaaattgggttttattgccctaaccgatgctgccccgttgattattgccaaggaaaagggtttttacgccaaatatggcatgccggatgtggaagtgttgaagcaggcttcctggggtactaccagagataacctcgtattgggttccgccagtggcggtattgatggggcccatattcttacccccatgccttacctcattaccatgggcactgtaaccgatggaaaaccaaccccgatgtacattttggcccgcttaaatgtcaatggccaaggcattcagttgggcaataattataaagacttaaaagtgggtaccgacgctgctcccctcaaagaagcctttgccaaagtaacggatcctaaagtggccatgacttttcctggcggcacccacgacatgtggattcgctactggttagccgctggaggcatggaaccaggtaaagatttttctaccattgtggttccccccgcccaaatggtggccaacgttaaagttaacgccatggaatctttctgtgttggtgaaccatggcctttacaaactgttaaccaaggagtcggctatcaggcattaaccactggtcaactttggaaggatcatcccgaaaaagcgtttggcatgcgggccgattgggtagatcagaatcccaaagctgctaaagcgttgttaatggcggtgatggaagcccagcaatggtgtgaccaggcagagaataaggaagaaatgtgtcaaattctctctaaacgggaatggtttaaagttccctttgaagatattattgaccgctccaaaggtatttataacttcggcaatggccaagaaacctttgaagatcaagaaattatgcagaaatattgggtcgataatgcttcctatccctataaaagtcatgaccaatggtttttaactgagaatattcgctggggctatttgccagcgagtacggacaccaaagccattgtggataaagtcaatcgtgaagatctatggcgagaagcagcccaggcgttggaggtaccagcagatcaaattcccagtagtccttcccggggaattgagactttctttgacggcataaccttcgatccagaaaatccccaggcctatctggacagcttgaaaattaagtctattaaagcttaa

SEQ ID NO: 54338 - protein, 446 aa, Synechocystis sp.
MSNFSRSTRRKFMFTAGAAAIGGVVLHGCTSPTTTSTGTGTGSSTDQAISPLVEGENAPEVTTAKLGFIALTDAAPLIIAKEKGFYAKYGMPDVEVLKQASWGTTRDNLVLGSASGGIDGAHILTPMPYLITMGTVTDGKPTPMYILARLNVNGQGIQLGNNYKDLKVGTDAAPLKEAFAKVTDPKVAMTFPGGTHDMWIRYWLAAGGMEPGKDFSTIVVPPAQMVANVKVNAMESFCVGEPWPLQTVNQGVGYQALTTGQLWKDHPEKAFGMRADWVDQNPKAAKALLMAVMEAQQWCDQAENKEEMCQILSKREWFKVPFEDIIDRSKGIYNFGNGQETFEDQEIMQKYWVDNASYPYKSHDQWFLTENIRWGYLPASTDTKAIVDKVNREDLWREAAQALEVPADQIPSSPSRGIETFFDGITFDPENPQAYLDSLKIKSIKA

SEQ ID NO: 54339 - DNA, 1344 bp, Klebsiella pneumoniae subsp. pneumoniae MGH 78578
  CDS (1)..(1344): transl_table=11
atggcggttcgggtgtccgtggataaaggcgtcctgcagtgcgtatgcactgtcgggcgctttttttttgcgcatggtggagcggatatgggcgacaaattttcaatttcccggcggcgcttgctgcaggcaggggccgcgctgggcggcgcgatgctgctgccgggcgtgatgcaggccgcctgggccggcggctcggacaaaccggagcaaacccgcgtgcgggtcggatttattccgctgaccgattgcgcgccgctggccatcgccgcggcgaaggggtttgaccaaaaatatggcatcaccctggtggcgagtaaggaagccagctgggcggcggtgcgcgacaagctggtggccggcgagctcgacgcggcgcatattctctatggcctgctgtacggcctcgaactggggatcgccagcaagccgcaggcgatggccaatttgatgaccctcaaccgcaatggccaggcgattaccctctccagcgagctgcaggagaaaggggggaccgacctcggcgggctgaagcggctgatcgaccgcagcgcgccgggcagttacaccttcgcccatacctttcctaccggcacccatgccatgtggctttactactggctggcgagcgccggcatcgatcccttcaacgatgtgcgcaccgtcgtggtgccgccgccgcagatggtgatgaacatgcgcatcggcaatatgagcggcttttgtgtcggcgagccgtggaacgcccgcgctattaacgaccgtatcggcttcaccgcggccacttcccaggatatctggcccgagcatccggaaaaggtgctgggcacccgtcgcgactgggtggaacgcaacccgaacaccgcccgcgcgctggtggcggccctgatggaggcgcagcgctggatcgccgcctcgccggagaacacccgggagacggcccgcctgctcgccagacgcggctggctcaataccaaggagcaatacctcaccggccggatgctgggagagtatgacaacggccttggccgccgctggcaggatgcccatccgatgcgcttctgggccgggggcgaggtgagtttcccgtggctgtcggacgggatgtggttcctcacccagttccgccgctgggggttgctgaagcaggctccggattacctcgcggtggcgtcgcgcattaaccgcatcgatgtctggcaggctgccgcccaggcggtaggagggatcagcgcgccggcagccaggatgcgcagcagcacactaatggacgggacggtatggaacgggtccgacccggaaggctacgcccgccatttctctattcaacgtaagggggcatga

SEQ ID NO: 54340 - protein, 447 aa, Klebsiella pneumoniae subsp. pneumoniae MGH 78578
MAVRVSVDKGVLQCVCTVGRFFFAHGGADMGDKFSISRRRLLQAGAALGGAMLLPGVMQAAWAGGSDKPEQTRVRVGFIPLTDCAPLAIAAAKGFDQKYGITLVASKEASWAAVRDKLVAGELDAAHILYGLLYGLELGIASKPQAMANLMTLNRNGQAITLSSELQEKGGTDLGGLKRLIDRSAPGSYTFAHTFPTGTHAMWLYYWLASAGIDPFNDVRTVVVPPPQMVMNMRIGNMSGFCVGEPWNARAINDRIGFTAATSQDIWPEHPEKVLGTRRDWVERNPNTARALVAALMEAQRWIAASPENTRETARLLARRGWLNTKEQYLTGRMLGEYDNGLGRRWQDAHPMRFWAGGEVSFPWLSDGMWFLTQFRRWGLLKQAPDYLAVASRINRIDVWQAAAQAVGGISAPAARMRSSTLMDGTVWNGSDPEGYARHFSIQRKGA

SEQ ID NO: 54341 - DNA, 1353 bp, Xanthobacter autotrophicus Py2
  CDS (1)..(1353): transl_table=11
atgagcgacgcttcgaagaccaagtctgatgcgaagacccagtctcccgccgccgaaggcatgtcccgccgctcgctgctgaagggcacggcggccacgctgggcactgccgcgctgttcgacgccgtgcgcatggccttccccggcggcgtgccgtccgcctatgcggccgcgccggaaaccaccaaggcgatcctgggctatatcgccctgatggacgcctcgccgctggtcatcgccaaggagaagggcttcttcgccaagcacggcgtgccggacgtggaagtcaacaagcaggcttcctggggcgccacccgcgacaacctcgtgctcggcggcgagaagaacggcatcgacggcgcccacatcctctcgcccatgccctacctgatctccgccggcaaggtgacgcagaacaacgtgcccacccccatggtcatcctggcgcggctcaatctcgacgcgcagggcatctcggtctccaacgaatacaaggacctcaaggtcaccgccgatgcgagcgcgctgaagactgccttcgccaagaagagggccgacggcaaggaagtcaaaatcgccatgaccttccccggtggcacccacgacctgtggatccgctactggctggcgagcgccggcatcgacccggacaaggatgtctccaccatcgtggtgccgccgccgcagatggtggccaacatgaaggtgggcaccatggatgccttctgcgtgggcgagccgtggaacgagcagctggtgaaccagggcatcggcttcactgcctgcaccaccggcgagatctggaagaaccaccccgagaaggcgctcggcatgcgcgccgacttcgtggagaaaaaccccaacaccacccgggccatcctgatggcggtgatggaagcccagcaatggtgcgacaagatggagaacaagcaggagctggccgagatcgtcggcaagcgccagtggttcaacgttcccgtcgccgacatcatcggccgcctgaagggcgacatcaattacggcaacggccgggttgagaagggcaccgacctttacatgaagttctggaaggaacacgcgtcctatcccttcaagagccacgatgcctggttcatcaccgaggacatccgctggggcaagttcgagccctcgacggacatcaacgccctcgtgaacaaggtgaaccgcgaggacatctggcgcgatgccgccaaggcgctcggcgtcgccgccgcggatattcccgccggcacctcgcgcggcaaggaaaccttcttcgacggcaaggtcttcgatcccgccgatccgcaggcttacctgaagagcctcggcatcaagcgcgtcgaggcctga

SEQ ID NO: 54342 - protein, 450 aa, Xanthobacter autotrophicus Py2
MSDASKTKSDAKTQSPAAEGMSRRSLLKGTAATLGTAALFDAVRMAFPGGVPSAYAAAPETTKAILGYIALMDASPLVIAKEKGFFAKHGVPDVEVNKQASWGATRDNLVLGGEKNGIDGAHILSPMPYLISAGKVTQNNVPTPMVILARLNLDAQGISVSNEYKDLKVTADASALKTAFAKKRADGKEVKIAMTFPGGTHDLWIRYWLASAGIDPDKDVSTIVVPPPQMVANMKVGTMDAFCVGEPWNEQLVNQGIGFTACTTGEIWKNHPEKALGMRADFVEKNPNTTRAILMAVMEAQQWCDKMENKQELAEIVGKRQWFNVPVADIIGRLKGDINYGNGRVEKGTDLYMKFWKEHASYPFKSHDAWFITEDIRWGKFEPSTDINALVNKVNREDIWRDAAKALGVAAADIPAGTSRGKETFFDGKVFDPADPQAYLKSLGIKRVEA

SEQ ID NO: 54343 - DNA, 1278 bp, Mesorhizobium loti MAFF303099
  CDS (1)..(1278): transl_table=11
gtgacgcgtcgcgattttctggtcagcagcgccatgacggccggcctgttcatggcggcccgcaagctctttccatccggcgcctatgccgccaccgccgcgccggaagtcaccggcgccaagctcggcttcatcgcgctgaccgatgccgcacccctgatgatcgccaaggagaagggcctgttcgccaaattcggcatgcccgatgtcgaggtgctgaagcaggcttcctggggcgcgacgcgcgacaatctgatgcttggcggtgccgcaaacggcatcgacggcgcccacatactgacgccgctgccttacctcatgcacaccggcaaggtgacgcagaacaaccagccgatgccgatggcgatcgtggcgcggctcaactacgactgccagggcatttcggtcgcgcaggaatatgccggcaccggcgtcggtctcgatgcctccaagctgaaggacgccttcgccgccaagaaggcagccggcaaggaggtcaaggccgccatgaccttcccgggcggcacgcatgacctctggctgcgctactggctggccgccggcggcatcgatcccgacaaggacgtctcgaccatcgtcgtgccgccgccgcagatggtggccaacatgaaggtcggcaacatggacgtcttctgcgtcggcgagccgtggaacgagcagctcgtccaccagggcgtcggctttaccgccgccaccacgggcgaattgtggaagggtcatccggaaaaggcgctcggtctgcgcgccgaattcatcgagaagaacccgaacgccaccaaggcgatcctgatggccgtcatggaagcccagcagtggtgcgaggccaaggagaacaaggacgagatggccgccatcatcggcaagcggcaatggatgaacgtgccggtcgccgacatcatcggccgccttaagggcgacatcaactacggcaatggccgcgtcgccaacggcaccgatttctacatgaagttctggaagggcggcgtttcctaccccttcaagagccatgatgcctggttcctcgccgagaacatccgctggggcaaattcgcgccgaccacggacgtcaaggcgctggtcgaccaggtcaaccgcgaggatctgtggcgcgaggcggcgaaggatctcggggtggcggcggccgacattccggcctcctcgtcgcgaggcgtcgagaccttcttcgacggcaagaccttcgatccggccaacccgtccgcctatctcgacagcctgaagatcaaggcgtcggcttga

SEQ ID NO: 54344 - protein, 425 aa, Mesorhizobium loti MAFF303099
MTRRDFLVSSAMTAGLFMAARKLFPSGAYAATAAPEVTGAKLGFIALTDAAPLMIAKEKGLFAKFGMPDVEVLKQASWGATRDNLMLGGAANGIDGAHILTPLPYLMHTGKVTQNNQPMPMAIVARLNYDCQGISVAQEYAGTGVGLDASKLKDAFAAKKAAGKEVKAAMTFPGGTHDLWLRYWLAAGGIDPDKDVSTIVVPPPQMVANMKVGNMDVFCVGEPWNEQLVHQGVGFTAATTGELWKGHPEKALGLRAEFIEKNPNATKAILMAVMEAQQWCEAKENKDEMAAIIGKRQWMNVPVADIIGRLKGDINYGNGRVANGTDFYMKFWKGGVSYPFKSHDAWFLAENIRWGKFAPTTDVKALVDQVNREDLWREAAKDLGVAAADIPASSSRGVETFFDGKTFDPANPSAYLDSLKIKASA

SEQ ID NO: 54345 - DNA, 1296 bp, Agrobacterium tumefaciens str. C58
  CDS (1)..(1296): transl_table=11
atggcggcaccggaaaaaaccgcaggatcgaagggcgaagcaacgcaaatgcgcgacgcacccgcactggtgggcagcgaccggcagaagattctgcgtgcgggctttattccgcttgtcgatgcatccgtgctgattgccgctgccgaatttggttttgccgaccgcgaagggctgatactcgacctcgtcaaggacgtctcctgggcgaatgtgcgtgaccggctggccttccggcaattcgatatcgcccatatgctgtcgccgatgccggttgcctccatgctcggactgggttccaatccgtcaccgacgatcacacccttttcgctcgggcgcggcggcaatgcgattacgctttcgacccggctttttgcgcggatgaaggcattgacagggctttcggagacggcgggtgcactcgaaaatgccagggccctgaagcttgtgcttgacgatatgcgcgcgcgcggcgaagcgccgccgacgctcggcatgacctatccgttttcctcgcacaactacgaatttcgctattggctcgccgccggcggtattcatcccgatcatgacgtcaagctggtagtggtgccgccgcccatgacctcggatgcgctggccgccggcgccatcgatggtttctgcgtcggcgcgccgtggaacatcgtcgctgccgagcgtggtgtcggccggatcgtcgccgccaagcaggatttatggccctctgcccccgaaaaagtcatcggtatgcggcccgaatgggcggaaagccagcaggaaacggtagggcgcctgctgacggcactcgatgccgccgcaagctggtgtgatctcgcggataatcacgacgcgctgagtggcgcactggcggatccacgttatatcggcgcgccgcagagcatcatccgccgcgtgcttgcgggagaattcagcatcgacagccagggcaaccgccgggtcatcgaaaaatatttcaccttccatggcgaccacgccaattatccgcgtcagagccagtccttgtggatttacagccagatgatccgctgggggcaggcggaattgtctgagaccggcgtgaacgccgctctctctgcctatcggccggatatttatcgggcggccttaggcgacgggaaagcgcctggtgatgccgatatccgcatcgaggggcaggacgagggagaccgtttcgtggatggcttcgtgttcgaccctgccgatatcgccggttatgtgaacagctttgccgtgcgcacatctgtacccgtttccgctccttcgggtgaggcatga

SEQ ID NO: 54346 - protein, 431 aa, Agrobacterium tumefaciens str. C58
MAAPEKTAGSKGEATQMRDAPALVGSDRQKILRAGFIPLVDASVLIAAAEFGFADREGLILDLVKDVSWANVRDRLAFRQFDIAHMLSPMPVASMLGLGSNPSPTITPFSLGRGGNAITLSTRLFARMKALTGLSETAGALENARALKLVLDDMRARGEAPPTLGMTYPFSSHNYEFRYWLAAGGIHPDHDVKLVVVPPPMTSDALAAGAIDGFCVGAPWNIVAAERGVGRIVAAKQDLWPSAPEKVIGMRPEWAESQQETVGRLLTALDAAASWCDLADNHDALSGALADPRYIGAPQSIIRRVLAGEFSIDSQGNRRVIEKYFTFHGDHANYPRQSQSLWIYSQMIRWGQAELSETGVNAALSAYRPDIYRAALGDGKAPGDADIRIEGQDEGDRFVDGFVFDPADIAGYVNSFAVRTSVPVSAPSGEA

SEQ ID NO: 54347 - DNA, 1416 bp, Agrobacterium tumefaciens str. C58
  CDS (1)..(1416): transl_table=11
ttgctgcccggaacaactcctgttccgaaggcgcaaacaccgagcggcgttttttttattttcaggttttttcgcaagcgaagacgtcatccaaagcggtggctcaataaggggaacatgcgaatgaagaagatattttccggcaccgtcagccgccgcacgatactgaagacgacagctaccgcagctctcgtcaccgccgttcgcaccgcgtttccgtcaggcgctttcgcggccaccgcagaaccggaagtgaagggtgcaaaactcggtttcatcgcgctcaccgacgccgcgccgctcatcattgcggccgagaagggacttttcgccaagcatggcatgcctgaggtcgaggttctgaaacaggcctcctggggggcgacgcgcgacaatctcgtgctcggcggcgcctcgaacggcatcgatggcgcgcatatcctgacgccgatgccctatctcatgcataccggcaaggtgacgcagaacaacgtgccggtgccgatgacgatcctcgcacgccttaatctcgacagccagggcatttccgtcgccaaggaatatgcagagaccggcgtccagctcgatgcctccaagctgaaggcggctttcgagaaaaagaaggccgacggcaaggaaatcaaggccgccatgaccttccccggcggcacgcatgatctctggatccgctattggctggctgctggtggcatcgatccggacaaggacgtctccaccatcgtcgttccgccgccgcaaatggtcgcaaacatgaaggtcggcaacatggacgtcttctgtgtaggcgagccgtggaacgagcagctcgttaatcagggcatcggctttactgcctgtaccaccggggaactctggaaagggcatccggaaaaggcgctcggcatgcgcgccgactgggtggaaaagaaccccaacgccaccaaggctttgctgatggccgtgatggaggcgcagcaatggtgcgacgagatggcgaacaaggaggagatgtccaccatcctcggcaaacgccagtggttcaacgtgccgccgaaggatgttctcggccgcctcaagggcaatattaattacggcaacggccgggtgctggaaaatactggcctgcagatgaagttctggcaggaccatgcctcctatccgttccacagccatgacagctggttcatcaccgaaaacatccgctggggcaaattcgcgccggatacggacgtaaaggcgctggttgcgaaggtgaaccgcgaggatatctggcgcgcagcggcgaaggatctcggcgttgccgatcttcccgcatcgacctcgcgcggcaaggaaaccttcttcgacggcaaggtcttcgatcccgaaaacccgtccgcctatctcgaaagcctttccatcaaagcggcctcctga

SEQ ID NO: 54348 - protein, 471 aa, Agrobacterium tumefaciens str. C58
MLPGTTPVPKAQTPSGVFFIFRFFRKRRRHPKRWLNKGNMRMKKIFSGTVSRRTILKTTATAALVTAVRTAFPSGAFAATAEPEVKGAKLGFIALTDAAPLIIAAEKGLFAKHGMPEVEVLKQASWGATRDNLVLGGASNGIDGAHILTPMPYLMHTGKVTQNNVPVPMTILARLNLDSQGISVAKEYAETGVQLDASKLKAAFEKKKADGKEIKAAMTFPGGTHDLWIRYWLAAGGIDPDKDVSTIVVPPPQMVANMKVGNMDVFCVGEPWNEQLVNQGIGFTACTTGELWKGHPEKALGMRADWVEKNPNATKALLMAVMEAQQWCDEMANKEEMSTILGKRQWFNVPPKDVLGRLKGNINYGNGRVLENTGLQMKFWQDHASYPFHSHDSWFITENIRWGKFAPDTDVKALVAKVNREDIWRAAAKDLGVADLPASTSRGKETFFDGKVFDPENPSAYLESLSIKAAS

SEQ ID NO: 54349 - DNA, 1293 bp, Caulobacter crescentus CB15
  CDS (1)..(1293): transl_table=11
gtgatcatgaccaagaccgacaagccaacgtccggcctgacccgtcgcagcgccctgatgggcgcggccgccacgctcgccgccgccaaggccgccttcccgggcggcgctcacgccgccggcgcaggccccgaagtcgccaaggcgcggctgggcttcatcgccctgaccgacagctcgccgctgatcatcgccaaggagcgcggcctgttcgccaagtacggcatgcccgacatcgaggtggtcaagcaggcctcctgggccgccacccgtgacaacctggtgctgggcgccgagcgtggcggcatcgatggggcgcacatcctgacgccgatgccctatctgatgaccaccgggaccatcaccggcggcgcgccgacgcccatgtacatcctggcgcgcctgaacacgaacgggcaggggatctcggtcggcaatgacctgaagtcggtcaaggtcgggctcaacagcgccggcgccaaggccaagttcctgcagatgaaggccgccggcaacatcgccaaggtcgccatgaccttccgcggcggcacgcacgacctgtggatccgctactggctggcggcgggcggcatcaaccccgacgtcgatgtctcgaccatcgtcattccgccgccgcagatggtggccaacatgaaggcgggtacgcaggacgccttctgcgtgggcgaaccctggaacggccagctggtcaaccagaaggtcggctataccgcctgcctgacctcggagctgtggatgaaccaccccgagaaggcgctgggcatgcgggcttcctgggtcgacaggtatccgcgcgcggcccaggcgatcacggctgcggtgcaggaagcgcagatgtggtgcgacaaggccgccaacctgccgcagatgtgctcgatcgtgtcgggccgccagtacgtgaacgtgccgatgggcgacatcctgccccgcctgcagggcacggtggactatggcgacggtcgcacgctgaagaactctccgcaccggatgaagttctgggccgacaacgccagcttcccgttcaagtcccatgacctgtggttcctgaccgaagacatccgctggggcgtgctgccgcaaaagaccaacaccaaggccctggtcgacaaggttaaccgctcggacatctggcgggccgccgccaagtcgatcggccagagcgggccggccggcgacagccggggcgtcgagcgcttctttgacggcaaggtcttcgacccggccaatccgggcgcctacctggccagccagccgatcaagaagctggtctag

SEQ ID NO: 54350 - protein, 430 aa, Caulobacter crescentus CB15
MIMTKTDKPTSGLTRRSALMGAAATLAAAKAAFPGGAHAAGAGPEVAKARLGFIALTDSSPLIIAKERGLFAKYGMPDIEVVKQASWAATRDNLVLGAERGGIDGAHILTPMPYLMTTGTITGGAPTPMYILARLNTNGQGISVGNDLKSVKVGLNSAGAKAKFLQMKAAGNIAKVAMTFRGGTHDLWIRYWLAAGGINPDVDVSTIVIPPPQMVANMKAGTQDAFCVGEPWNGQLVNQKVGYTACLTSELWMNHPEKALGMRASWVDRYPRAAQAITAAVQEAQMWCDKAANLPQMCSIVSGRQYVNVPMGDILPRLQGTVDYGDGRTLKNSPHRMKFWADNASFPFKSHDLWFLTEDIRWGVLPQKTNTKALVDKVNRSDIWRAAAKSIGQSGPAGDSRGVERFFDGKVFDPANPGAYLASQPIKKLV

SEQ ID NO: 54351 - DNA, 1293 bp, Sinorhizobium meliloti 1021
  CDS (1)..(1293): transl_table=11
atgaccaagactttgttcggcggcctgacccgccgcagcgtgctgaagaccaccgcgacggccgccatggtcggcgcagcgagaacgcttttgccctccggggccttcgcccagggcgccggtcccgagaccgcgaaggccaccctcggcttcatcgcgctgaccgattcagccccgctgatcatcgccaaagagaagggtttgttcgacaagtacggcatgaccgaggtcgaggtggtgaagcaggcctcctggggcacgacccgcgacaatctggtgctcggctcggccggcgccggtatcgacggcgcccatatcctgactccgatgccctatctcatctcgactggcaaggtgacgcagaacaaccagccactgccgatggcgatcctcgcccgcctcaatctcgacgcgcaggcgatctcggtcggtgcagcctatgccgatctgaaggtcggcatcgacgcctcggtgctgaaagatgccttcgccaagaagaaggccggtggcgaggccgccaaggtcgccatgaccttcccgggcggtacacacgacctctggatccgctattggctcgccgccgccggcatcgacccggacaaggatgtcgagaccatcgtcgtcccgccgccgcagatggtcgccaacatgaaggtcggcaccatggactgtttctgcgtcggcgaaccctggaacgagcaactcgtcaaccagaagatcggctacaccgctgtcaacaccgccgagatctgggccgagcatccggagaagtccttcgccatgcgcgccgactgggtcgagaagaacccgcgcgccgtcaaggcgctggtcatggccatcgaggaagccgcgcagtggtgcgacgatatggcgaacaaggacgaactcgccaagatcgtcggcaagcgcagctggttcaacgtgccgccaaaggacatcgtcgatcggctgaaaggtgaatacgactacggcaacggcaagatcgtggagaacagcccccacttcatgaaattctggcgcgaacacgcgtcctacccgttccagagccatgacgcctggttcctcaccgagaatatccgctggggcaagcttgcatcggatacggacatcaaggggctgatcgccaaggtcaaccgtgaggacatctggcgcgaagcggcaaaggacctcggcatctccgacatccccgcctccacttcgcgcgggccggagaccttcttcgacggcaaggtcttcgatcccgcaaatcccgaaacgtacctgaagagcctggcaatcagccgcatcgcctga

SEQ ID NO: 54352 - protein, 430 aa, Sinorhizobium meliloti 1021
MTKTLFGGLTRRSVLKTTATAAMVGAARTLLPSGAFAQGAGPETAKATLGFIALTDSAPLIIAKEKGLFDKYGMTEVEVVKQASWGTTRDNLVLGSAGAGIDGAHILTPMPYLISTGKVTQNNQPLPMAILARLNLDAQAISVGAAYADLKVGIDASVLKDAFAKKKAGGEAAKVAMTFPGGTHDLWIRYWLAAAGIDPDKDVETIVVPPPQMVANMKVGTMDCFCVGEPWNEQLVNQKIGYTAVNTAEIWAEHPEKSFAMRADWVEKNPRAVKALVMAIEEAAQWCDDMANKDELAKIVGKRSWFNVPPKDIVDRLKGEYDYGNGKIVENSPHFMKFWREHASYPFQSHDAWFLTENIRWGKLASDTDIKGLIAKVNREDIWREAAKDLGISDIPASTSRGPETFFDGKVFDPANPETYLKSLAISRIA

SEQ ID NO: 54353 - DNA, 1359 bp, Synechocystis sp. PCC 6803
  CDS (1)..(1359): transl_table=11
atgggttcattcaatcgacgtaaatttttgctcacctccgccgccactgccacaggggctttatttctgaagggttgtgccggcaatccccccgatcccaacgccgccagcaccggtactaacccttctccccaagcggccggggatattagcccagaaatgatgcccgaaaccgccaatatcaaactaggctacattcccattgtggaagctgccccattgatcattgctcaagaaaaaggtttctttgccaaatatggcatgaccggtgtggaagtctccaaacaagccaactgggcctccgctagagataacgtcaccattggttcccagggaggcggcatcgatggcggccaatggcaaatgcccatgcctcacctgattacggaagggatcattaccaatggcaacaaggtgcccatgtatgtattggcccaattgattacccagggaaatggtattgccgtagcaccaatgcatgaaggcaaaggggtaaacctggatatcaccaaagcggcggactatatcaagggctttaacaaaaccaatggccgcaaatttaaggcagcccacaccttccctaacgttaaccaagatttttggattcgttactggtttgcggccggaggcgttgatcctgacaccgatattgacctactggctgtgcctcccgctgaaacagtccagggcatgcgcaacggtaccatggatgcttttagcactggagatccttggccctatcgcatcgtgacagaaaacattggctacatggccggtttaactgcccaaatttggccctatcacccggaagagtacctcgccattcgagcggattgggtagataaaaatcccaaggcaaccaaggcattactgaagggaattatggaagcccaacagtggattgatgaccccaaaaatcgtcctgaagttgtacagattgtgtccggtagaaattatttcaatgttcccaccaccattttagagtctccctttaaaggtcaatacaccatgggagatggtcagcctgccattgatgatttccaaaaaggtcccctctactggaaggacggcattggcaatgtttcctacccctataagagccatgatttatggttcctcacagaaagtattcgttggggtttccataaaaacgccatccccgatttagatacagctcaaaaaattattgacaaagttaatcgcgaagatttgtggcgagaagcagcaacggaagctggatttactgccgacattcctagcagcacttcccggggcgtagaaacgttctttgatggcattacctttgaccctgctaatccatcggcttatctgcaaagtttggcaatcaaaaaagtctaa

SEQ ID NO: 54354 - protein, 452 aa, Synechocystis sp. PCC 6803
MGSFNRRKFLLTSAATATGALFLKGCAGNPPDPNAASTGTNPSPQAAGDISPEMMPETANIKLGYIPIVEAAPLIIAQEKGFFAKYGMTGVEVSKQANWASARDNVTIGSQGGGIDGGQWQMPMPHLITEGIITNGNKVPMYVLAQLITQGNGIAVAPMHEGKGVNLDITKAADYIKGFNKTNGRKFKAAHTFPNVNQDFWIRYWFAAGGVDPDTDIDLLAVPPAETVQGMRNGTMDAFSTGDPWPYRIVTENIGYMAGLTAQIWPYHPEEYLAIRADWVDKNPKATKALLKGIMEAQQWIDDPKNRPEVVQIVSGRNYFNVPTTILESPFKGQYTMGDGQPAIDDFQKGPLYWKDGIGNVSYPYKSHDLWFLTESIRWGFHKNAIPDLDTAQKIIDKVNREDLWREAATEAGFTADIPSSTSRGVETFFDGITFDPANPSAYLQSLAIKKV

SEQ ID NO: 54355 - DNA, 1377 bp, Nostoc sp. PCC 7120
  CDS (1)..(1377): transl_table=11
atgacagagttttttaatcaattttctcgccgtaaatttatatttaccgcaggagcttcggcaagtgctgtgttcctcaaaggttgcttgggaaatccaccggaaactactggaggaacacaatctgcaccaacggcgcaacctgctgctaatgttagcgcagagcaagcaccggaagtcactacagtgaagttaggatacattcccattgtagaatctgctcctttaattattgctaaggaaaaaggtttctttgctaagtatggattgacgaatgtagagctttctaaacaagcttcttggggttctgctagagataacgtagaaattggttctgctggtggtggaattgatggtggtcaatggcaaatgcctatgccacatttaattaccgaaggtttaattaccaaaggtaatcaaaagatccccatgtatgtattatgtcaattaattacacatgggaatggaattgcgatcgccaacaaacatcaaggtagtggtataggcctaaggttagctagtgctaagtctttattttccaaactcaaagcctcccccacacccttcacagctgctcaaaccttccccgcagttaatcaagatttctggattcgttactggttagcagctggtggtattgaccctgatgcagacgtgaaactgctcacagttccatcagcgcagactgtcgccaacatgaagacaggaacaatggatgcgttcagcactggagacccctggcctttccgcatcgttaaagacaaagtcggtttcatggctgcattaacagcagaaatttggaagaatcaccccgaagaatatctcgctatgagatctgactgggttgaccaacatcccaaagcgacgaaagcactgttaaaaggtctgatggaagctcaacaatggtgtgataactttgataaccgcaaagaactggcagaaattgtcgcagcacgggcttacttcaacgtgccagttgatgttttaatcgacccatatatgggtaaatatgacatgggtgaaggtcgccaaattgatgatagatcaatggcagccttgtattggaaagatgagaaaggcagcgtttcttatccttataagagccatgatttgtggttcattaccgaaagtgtacgttggggattcttacccaaggattacattgataataatgctgctaaagcgagagcattaattgataaagttaaccgcgaagatatttggaaagaagcagcgaaagaagccggtattgcggctgctgacattcccactagcacatctcgtggtatagaagaattttttgatggtgtaaaattcgaccccgaaaatcctcaagcatatctgaagagtttgcaaattaagaaagtgagcgtttag

SEQ ID NO: 54356 - protein, 458 aa, Nostoc sp. PCC 7120
MTEFFNQFSRRKFIFTAGASASAVFLKGCLGNPPETTGGTQSAPTAQPAANVSAEQAPEVTTVKLGYIPIVESAPLIIAKEKGFFAKYGLTNVELSKQASWGSARDNVEIGSAGGGIDGGQWQMPMPHLITEGLITKGNQKIPMYVLCQLITHGNGIAIANKHQGSGIGLRLASAKSLFSKLKASPTPFTAAQTFPAVNQDFWIRYWLAAGGIDPDADVKLLTVPSAQTVANMKTGTMDAFSTGDPWPFRIVKDKVGFMAALTAEIWKNHPEEYLAMRSDWVDQHPKATKALLKGLMEAQQWCDNFDNRKELAEIVAARAYFNVPVDVLIDPYMGKYDMGEGRQIDDRSMAALYWKDEKGSVSYPYKSHDLWFITESVRWGFLPKDYIDNNAAKARALIDKVNREDIWKEAAKEAGIAAADIPTSTSRGIEEFFDGVKFDPENPQAYLKSLQIKKVSV

SEQ ID NO: 54357 - DNA, 1284 bp, Nostoc sp. PCC 7120
  CDS (1)..(1284): transl_table=11
atgccaaagttaaacaggcgacaatttatcacaactgccggtgcagccgcactgactcatgccactattgccaaaactcagttaaattctggtgtttatgctggctatagtgacaccccagaagtaaccacagccaccctgggctttttacctgttactagctgctgtcctttaattattgccaaagccaaaggattttttgctcaacatggaatgcccgatattaatgttgtcaaacaaccttcctgggcagtcatgcgcgacaaactcatcttaggtgctgccgatgaaggattagatggtgggcatttgctgtttcccatggtttacctcatggctaccggggaaattagctatgggcgaaaaatacccatgtatattttggccagaatgaatgtgaacggacaggggatatcagttgctaatagctacaaaaatttaaacctaagtatagatagttctcccttaaaatcagcttttgcccaaaaaacgaaaactggggaaactgtgcgttgtgcagtgccttatcgccgggtaacaggtgatttttttatgcgttggtggttggcttatggtggaatagatccagaccgtgatttatcggtaattgtcattgcacccccacagatggttgcaagtatgcgtagtggtagcatggaagccttctgtgtagttgacccttggcatcaccgattaattaaacaagggcttggttattcaactgtaacaactggggagttgtggcctaatcacccagagaaagctttaggagtaagggctgagtgggtggataaatatcccaaggcggcaaaagcgatgctggcggcatttttagaggcgcaaatctggtgtgacaagccagaaaataaagcagagcttttgcaaattgtttcagaacggcaatggattggcgtgaaaagtgaattgacacgcgatcgccttttaggtaaatttgattatggtaatgggcggatagtggaaaatagcccccatgctatcaagtactggcggaaaaatgcttcctatcctttcaaaagccacgatttatggtttctcattgaagatatgcgctggggttatcgttcccccgattttgacaccaaacccctaattgatgctgtcaatcgtgaagatttatggcgagaagccgctaaattaattggtcaagagtcagccattcccgccagtacatcacggggagtagagaaattctttaatggcttagaatttaacccagaaaatccccaagcttatctcaatactcccaagatcaggataatgtga

SEQ ID NO: 54358 - protein, 427 aa, Nostoc sp. PCC 7120
MPKLNRRQFITTAGAAALTHATIAKTQLNSGVYAGYSDTPEVTTATLGFLPVTSCCPLIIAKAKGFFAQHGMPDINVVKQPSWAVMRDKLILGAADEGLDGGHLLFPMVYLMATGEISYGRKIPMYILARMNVNGQGISVANSYKNLNLSIDSSPLKSAFAQKTKTGETVRCAVPYRRVTGDFFMRWWLAYGGIDPDRDLSVIVIAPPQMVASMRSGSMEAFCVVDPWHHRLIKQGLGYSTVTTGELWPNHPEKALGVRAEWVDKYPKAAKAMLAAFLEAQIWCDKPENKAELLQIVSERQWIGVKSELTRDRLLGKFDYGNGRIVENSPHAIKYWRKNASYPFKSHDLWFLIEDMRWGYRSPDFDTKPLIDAVNREDLWREAAKLIGQESAIPASTSRGVEKFFNGLEFNPENPQAYLNTPKIRIM

SEQ ID NO: 54359 - DNA, 1263 bp, Ralstonia solanacearum GMI1000
  CDS (1)..(1263): transl_table=11
atggccgcgccgagcaagaccgacaccccgatcaaccccaagcgccggcgtgtgctggcaaccgtcgctggaggcagcgcaatggcattgatagacccgctggtgcgcgccggggcctgggcggccggctccgatgcgcccgagaagaccgagctgaaggtcggcttcatcccgctcaccgactgcgcatcggtggtgatggcggccacgctgggcctggacaagaagtacggcatcaagatcgtgccgtccaaggaggcctcgtgggccggcgtgcgcgacaagctggtctcgggcgacctggatgcggcccacgtgctgtatggcctcgtctacggcgtgcagctcggcatcggcggcccgaagaaggacatggccgtgctgatgacgctcaacaacaacggccaggcgatcacgctgtcgtccaagctcaaggaggcgggcgtgcgggacggcgcttcgctcaaggccctgatgaccagggagaagcgcgactacaccttcgcccagaccttccccaccggcacgcacgcgatgtggctgtactactggctggccgcgcacggcatccacccgctgcaggacgccaaggcgatcaccgtgccgccgccgcagatggtcgccaacatgcgcgtgggcaacatggacggctactgcgtgggcgagccgtggggcgcgcgcgccatcgccgacggcatcggcttcaccgccgagaccacgcaggcgatctggaaagaccatcccgagaaggtgctcggcaccacggccgagttcgcgcagaagtatccgaacaccgcgcgcgcgctgacggccgccgtgctggaggcctccaagttcatcgatgcctcggcctcgaaccggcgcaagacggccgagacggtggccgccaagtcctacgtcaacaccgacatggacatcatcctggaccgcatgctcggccgctacaccaacggcctgggcaagacctgggacgatgcggacccgatgcgcttctaccacgacggcgcggtcaacttcccgtacctgtcggacggcatgtggttcctcacacagcacaagcgctggggcctgctgaagacgcaccccgactacctggcgatcgccaggcaggtcaaccgcgtcgacatctacaagcaggccgcggccgccaccggcacgccgctgcccaagagcgacctgcgcaccgccaggctgatcgacggcgtggtgtgggatgcaaagaaccccgccgcctacgccgacagcttcaagatcaaggcctga

SEQ ID NO: 54360 - protein, 420 aa, Ralstonia solanacearum GMI1000
MAAPSKTDTPINPKRRRVLATVAGGSAMALIDPLVRAGAWAAGSDAPEKTELKVGFIPLTDCASVVMAATLGLDKKYGIKIVPSKEASWAGVRDKLVSGDLDAAHVLYGLVYGVQLGIGGPKKDMAVLMTLNNNGQAITLSSKLKEAGVRDGASLKALMTREKRDYTFAQTFPTGTHAMWLYYWLAAHGIHPLQDAKAITVPPPQMVANMRVGNMDGYCVGEPWGARAIADGIGFTAETTQAIWKDHPEKVLGTTAEFAQKYPNTARALTAAVLEASKFIDASASNRRKTAETVAAKSYVNTDMDIILDRMLGRYTNGLGKTWDDADPMRFYHDGAVNFPYLSDGMWFLTQHKRWGLLKTHPDYLAIARQVNRVDIYKQAAAATGTPLPKSDLRTARLIDGVVWDAKNPAAYADSFKIKA

SEQ ID NO: 54361 - DNA, 1293 bp, Agrobacterium tumefaciens str. C58
  CDS (1)..(1293): transl_table=11
atgaagaagatattttccggcaccgtcagccgccgcacgatactgaagacgacagctaccgcagctctcgtcaccgccgttcgcaccgcgtttccgtcaggcgctttcgcggccaccgcagaaccggaagtgaagggtgcaaaactcggtttcatcgcgctcaccgacgccgcgccgctcatcattgcggccgagaagggacttttcgccaagcatggcatgcctgaggtcgaggttctgaaacaggcctcctggggggcgacgcgcgacaatctcgtgctcggcggcgcctcgaacggcatcgatggcgcgcatatcctgacgccgatgccctatctcatgcataccggcaaggtgacgcagaacaacgtgccggtgccgatgacgatcctcgcacgccttaatctcgacagccagggcatttccgtcgccaaggaatatgcagagaccggcgtccagctcgatgcctccaagctgaaggcggctttcgagaaaaagaaggccgacggcaaggaaatcaaggccgccatgaccttccccggcggcacgcatgatctctggatccgctattggctggctgctggtggcatcgatccggacaaggacgtctccaccatcgtcgttccgccgccgcaaatggtcgcaaacatgaaggtcggcaacatggacgtcttctgtgtaggcgagccgtggaacgagcagctcgttaatcagggcatcggctttactgcctgtaccaccggggaactctggaaagggcatccggaaaaggcgctcggcatgcgcgccgactgggtggaaaagaaccccaacgccaccaaggctttgctgatggccgtgatggaggcgcagcaatggtgcgacgagatggcgaacaaggaggagatgtccaccatcctcggcaaacgccagtggttcaacgtgccgccgaaggatgttctcggccgcctcaagggcaatattaattacggcaacggccgggtgctggaaaatactggcctgcagatgaagttctggcaggaccatgcctcctatccgttccacagccatgacagctggttcatcaccgaaaacatccgctggggcaaattcgcgccggatacggacgtaaaggcgctggttgcgaaggtgaaccgcgaggatatctggcgcgcagcggcgaaggatctcggcgttgccgatcttcccgcatcgacctcgcgcggcaaggaaaccttcttcgacggcaaggtcttcgatcccgaaaacccgtccgcctatctcgaaagcctttccatcaaagcggcctcctga

SEQ ID NO: 54362 - protein, 430 aa, Agrobacterium tumefaciens str. C58
MKKIFSGTVSRRTILKTTATAALVTAVRTAFPSGAFAATAEPEVKGAKLGFIALTDAAPLIIAAEKGLFAKHGMPEVEVLKQASWGATRDNLVLGGASNGIDGAHILTPMPYLMHTGKVTQNNVPVPMTILARLNLDSQGISVAKEYAETGVQLDASKLKAAFEKKKADGKEIKAAMTFPGGTHDLWIRYWLAAGGIDPDKDVSTIVVPPPQMVANMKVGNMDVFCVGEPWNEQLVNQGIGFTACTTGELWKGHPEKALGMRADWVEKNPNATKALLMAVMEAQQWCDEMANKEEMSTILGKRQWFNVPPKDVLGRLKGNINYGNGRVLENTGLQMKFWQDHASYPFHSHDSWFITENIRWGKFAPDTDVKALVAKVNREDIWRAAAKDLGVADLPASTSRGKETFFDGKVFDPENPSAYLESLSIKAAS

SEQ ID NO: 54363 - DNA, 1320 bp, Thermosynechococcus elongatus BP-1
  CDS (1)..(1320): transl_table=11
atggcgaatttttcccggcggcgctttctcatgaccgctgctgccacaacggctgtgacattgatctcccacggctgtggcaatagccagcaaagtactgacgttgtccaaccgaccaccgtagcagaaaccccggaagtgacgggcgcaaaactcggctttattgccctcacggatgcggcccccctgattattgccaaggaaaaagggctatttgccaagtatgggatgcctgatgtggaagtgttgaagcaggcgtcttggggcacaacccgcgacaacttggtattgggttccgctaacggtggcattgacggtgcccacatcctcacaccgatgccctatctaatgactgtgggaaaaattaccggtggcaaacctgtacccatgtatatcttggcgcggttaaacaccaatggtcaggggattctcttggcgaatgcctataaagatctgaatatcagcaccgacagtcgtccgctaaaggaggcttttgcgaaaacccgtgctgaacggcgtgcccgcaatcagaacgaggagattaaagttgcggtgacctttccagggggcacccacgacctctggatgcgctactggttggctgccggtggcattgatcccgaaaaagacgtatctatgattgtggtccccccaccgcaaatggtggccaatctcaaaacagggacaatggaggcgttctgtgtcggtgagccgtggcccttgcagacggtgaatcagaaggtgggttatggggccattactaccggtgaactctggcaagaccaccctgaaaaatcctttgccctacgggcggactgggtggatcaacatccaaaagcgaccaaagccctgctcatggcggttatagaagctcagcagtggtgcgatcaggatgcaaacaagccggagatggcgaaaatcctctcaaagcgggagtggtttaaggtgcccgtggaagacattttggatcgatcccttggcaagtttgattttggcaatggtcgcatcctagaggataagaacctgatgcaaaaatactggcgggataacgcctcctatccctaccagagtcacgatctatggttcttgacggaggatatgcgctggggatatttgccacctgatactgatgctaaggcactgattcaaaaagttaatcgtgaggatatctggcgtgaagcagccaagacgataggggtgtcagcggcagaaattccaacaacaacctcacggggggtagaaaccttttttgacggtgttgcctttgatccacaaaatccccaggcctacctcaacagtttgaacctacggaaagtttaa

SEQ ID NO: 54364 - protein, 439 aa, Thermosynechococcus elongatus BP-1
MANFSRRRFLMTAAATTAVTLISHGCGNSQQSTDVVQPTTVAETPEVTGAKLGFIALTDAAPLIIAKEKGLFAKYGMPDVEVLKQASWGTTRDNLVLGSANGGIDGAHILTPMPYLMTVGKITGGKPVPMYILARLNTNGQGILLANAYKDLNISTDSRPLKEAFAKTRAERRARNQNEEIKVAVTFPGGTHDLWMRYWLAAGGIDPEKDVSMIVVPPPQMVANLKTGTMEAFCVGEPWPLQTVNQKVGYGAITTGELWQDHPEKSFALRADWVDQHPKATKALLMAVIEAQQWCDQDANKPEMAKILSKREWFKVPVEDILDRSLGKFDFGNGRILEDKNLMQKYWRDNASYPYQSHDLWFLTEDMRWGYLPPDTDAKALIQKVNREDIWREAAKTIGVSAAEIPTTTSRGVETFFDGVAFDPQNPQAYLNSLNLRKV

SEQ ID NO: 54365 - DNA, 1335 bp, Thermosynechococcus elongatus BP-1
  CDS (1)..(1335): transl_table=11
atgtctcaattgtcgcgtcgtcgctttttaatgaccgctactgctaccgctgtgggggcgatcgccctcaagggatgtgctcccgcagaaactccccaaggacaacagcagggagggacaacaacaggtggactagaaacagacacaatcaaattagggtttattcccattgtggaatccgctcccctgattattgccaaagaaaaaggcttctttgccaagcatggcctcaccaatgctgaactgtcgaaacaggccaactgggccagtgcccgggacaatgtggtgattggttctgcaggcggtggcattgatggcggtcagtggcagatgcccatgccctacctgatcagcgaaggcatcatcaccctcaacaatcaaaaattgccaatgtacgttttggcacagttaaatacccaagggaacggcattgccatttccggtgccaacaagggcaaaggcttacacctaaaaatcgccgaccccgattacattaaaggctttgccgctaagaatggccgcaagttcaaagccgctcacacctttccccacgtcaaccaagacctatggattcgctactggtttgccgccaatggcattgatcccgatcgcgatattgaactcttagccgttccccccgctgaaaccgttgccgggatgcgcaatggcacaatggatgcctttagtaccggtgatccttggccattccgcattgtcagcgatgatattggctatatggccacattgaccgcccagatatggccctaccaccctgaagagtacctagccgtgcgagctgactgggtcgacaaacaccccaaagccactaaagcacttctgaaagcagtcatggaagctcagcagtggtgcgatgacaaagccaaccgcccggaactcattcaaatttgtagtcgccgcgagtatttcaacattcccggcaatattctcactcccccctacgaaggcacctacaccatgggggatggtcaacccaatttcaacgactttaacatcggacccctctactggcgggatcccaatggcaatagcatttcctacccctacaagagccatgacctctggttcctgaccgaaaacctgcgctggggcttcaacgctgataaactcaaggatttcgacaacatcaagcaaatgattggtcgcgtcaaccgcagcgatctctggcaagaggccgccaaggagttagggataccggcggctgaaattcccaccaccgaatcgcgaggtgttgaaaccttctttgacggcatcaagtttgatcctgataacccccaagcctatctggacagcctcaaaatcaaggtcaagtcctag

SEQ ID NO: 54366 - protein, 444 aa, Thermosynechococcus elongatus BP-1
MSQLSRRRFLMTATATAVGAIALKGCAPAETPQGQQQGGTTTGGLETDTIKLGFIPIVESAPLIIAKEKGFFAKHGLTNAELSKQANWASARDNVVIGSAGGGIDGGQWQMPMPYLISEGIITLNNQKLPMYVLAQLNTQGNGIAISGANKGKGLHLKIADPDYIKGFAAKNGRKFKAAHTFPHVNQDLWIRYWFAANGIDPDRDIELLAVPPAETVAGMRNGTMDAFSTGDPWPFRIVSDDIGYMATLTAQIWPYHPEEYLAVRADWVDKHPKATKALLKAVMEAQQWCDDKANRPELIQICSRREYFNIPGNILTPPYEGTYTMGDGQPNFNDFNIGPLYWRDPNGNSISYPYKSHDLWFLTENLRWGFNADKLKDFDNIKQMIGRVNRSDLWQEAAKELGIPAAEIPTTESRGVETFFDGIKFDPDNPQAYLDSLKIKVKS

SEQ ID NO: 54367 - DNA, 1215 bp, Pseudomonas putida KT2440
  CDS (1)..(1215): transl_table=11
gtgaacactgtaccccgagcaacgcccctggcctgggtcaacggcagcgacgcgccggaaaaaaccagcctgaacatcggctatatggccctgaccgactgcgcctcggtcgtggtcgccgccacccagggcttcgcccagcagcacggccttaccctcaacctccagcgccagggctcgtgggccgggctgcgcgacaagctggtcagcggcgaactggacgccgcacattgcctgtatggcctggtctacgccgtgcacctgggcattggcggcgtacctgccagcgacatggccgtgctcatggggctgaaccagaacgcccaggctatcaacctgtcccctgccttgcagcgcaagggcgtgaccaaccctgaggcactggcgcgcctggtgcaccagcatggcgcacgcctgacgttcgcccagaccttccccaccggcacccacgccatgtggctgtattactggctggccagccagggcattcacccgctgcgcgacgtcgacagcgtagtggtgccaccggcgcagatggctgcacacctccaggccgggcgcattgacggcttctgcgttggtgagccctgggccgccgacgcggtggccaaaggccaaggcttcaccctggccaccagccagtcgatctggccggatcacccggaaaaggtcctggcctgcgcccgcgtctttgccgagcaataccccaacagcgcccgtgcgctgatcaaggcgatcctcaccgccagccgattcatcgagcaaagcccggaaaaccgccgcagcaccgcgcaactgctcagcgcaagcgcttacctggacaccccgctggacagcatagccccccgcctgctcggccattatgaggatggcctgggcaaccagtggcaagacccacacgccctgcgcctgttcgaccaaggccgggccaacctgccctacctgtccgacggtatgtggttcatgacccagttccgccgctggggcctgctgcgcgaagaccccgactacctcggcgtggcccggcaggtccagcaactgcagttgtacagcgaggccgcacagagcctgggcatcgcttgcccaggccaaccgatgcgcagcagcctgctgatcgatggctcccgctgggacggcagcgaccccttcggctatgcccgcagtttcagcttgcatgccttgggcgagttgcccgatgcccgtgtcggcgcgtga

SEQ ID NO: 54368 - protein, 404 aa, Pseudomonas putida KT2440
MNTVPRATPLAWVNGSDAPEKTSLNIGYMALTDCASVVVAATQGFAQQHGLTLNLQRQGSWAGLRDKLVSGELDAAHCLYGLVYAVHLGIGGVPASDMAVLMGLNQNAQAINLSPALQRKGVTNPEALARLVHQHGARLTFAQTFPTGTHAMWLYYWLASQGIHPLRDVDSVVVPPAQMAAHLQAGRIDGFCVGEPWAADAVAKGQGFTLATSQSIWPDHPEKVLACARVFAEQYPNSARALIKAILTASRFIEQSPENRRSTAQLLSASAYLDTPLDSIAPRLLGHYEDGLGNQWQDPHALRLFDQGRANLPYLSDGMWFMTQFRRWGLLREDPDYLGVARQVQQLQLYSEAAQSLGIACPGQPMRSSLLIDGSRWDGSDPFGYARSFSLHALGELPDARVGA

SEQ ID NO: 54369 - DNA, 1464 bp, Vibrio vulnificus CMCP6
  CDS (1)..(1464): transl_table=11
ttgttgaatggcgaatctcaattatcaacggcggtaattgcagagaaagcaacggcgctacgactcctcggagtcgtggcgctttttttttggagaaaatcgatgaaaaagagatggacagttggcgtattaacaagttggttggcgtttgcttcaccggttgtactcgcagaagtcggcgaggctgaaaaagaggacttaaagtttggctttatcaaattgaccgacatggcaccgttggcgatcgcttatgaaaaaggattttttgaggatgaagggctgtatgtgacgctagaagcgcaggccaactggaaggtgctgctcgatcgcgtgattgatggtgaactggatggcgcgcacatgctggcaggccaaccactgggtgccaccatcggcattggcacgcaagccaaagtgatcaccgcattcagtatggatctcaatggtaacgcgatcaccgtgtcgaacgatgtttggcagcaaatgaagcccaatttggtcaaagacagtgacggtaaacccgttcaccccatcaaagccgatgcccttaaacctgtcgtaacaagttaccgcgaccaaggcaaagcgttcaatatgggcatggtgtttcccgtttcaacgcataactacgaactgcgctactggctcgcggctggggggattcatcctggcttttatgcgccgcataaaggcgacaacagtggccaaattaatgccgacgtgctgctcagcgtcacgccgccaccacaaatgccagccaccatggaagcgggcaccatcaaaggctattgcgttggtgaaccgtggaaccagcaagcggtgtttaagggcattggtgtgcccgtggtgaccgactatgagatctggaaaaacaacccagagaaggtatttggcgttgcacaagattgggcggaaaagtaccccaatacccatatccgcgtggtcaaagctctgatccgtgcggcgcattggttagatgaaaacgataaccgcaatcgcgccgaagccgtgaagctgctttcacgcagcgagtacgtgggcgccgatgcggaagtgatcgccaattccatgactggcacgtttgaatacgaaaaaggcgataagcgacaagtgcccgattttaatgtgttctttcgctacaacgccacctatccctactacagcgacgcgatttggtatctcacacaaatgcgccgttggggacaaatcgaacatcagaaaccggactcatggtacatggacatcgccaagcaggtgtatcgaccagagatttatcaacgcgcggcagaagcactaatcgaagaagggacattgagcgccagtgattttcctgactttgccaaagaaagcggttttcgcccaccgcaaacccacttcattgatcagatccgctatgacggccgtagccccaatgcgtatctgcagcagtttgccattggcctgaaaggctctgagtcactttaa

SEQ ID NO: 54370 - protein, 487 aa, Vibrio vulnificus CMCP6
MLNGESQLSTAVIAEKATALRLLGVVALFFWRKSMKKRWTVGVLTSWLAFASPVVLAEVGEAEKEDLKFGFIKLTDMAPLAIAYEKGFFEDEGLYVTLEAQANWKVLLDRVIDGELDGAHMLAGQPLGATIGIGTQAKVITAFSMDLNGNAITVSNDVWQQMKPNLVKDSDGKPVHPIKADALKPVVTSYRDQGKAFNMGMVFPVSTHNYELRYWLAAGGIHPGFYAPHKGDNSGQINADVLLSVTPPPQMPATMEAGTIKGYCVGEPWNQQAVFKGIGVPVVTDYEIWKNNPEKVFGVAQDWAEKYPNTHIRVVKALIRAAHWLDENDNRNRAEAVKLLSRSEYVGADAEVIANSMTGTFEYEKGDKRQVPDFNVFFRYNATYPYYSDAIWYLTQMRRWGQIEHQKPDSWYMDIAKQVYRPEIYQRAAEALIEEGTLSASDFPDFAKESGFRPPQTHFIDQIRYDGRSPNAYLQQFAIGLKGSESL

SEQ ID NO: 54371 - DNA, 1320 bp, Bradyrhizobium japonicum USDA 110
  CDS (1)..(1320): transl_table=11
atgaccaagcgcattcgccggccttcggatactggcctcagccgccgtcaattgttgaaggccaccggcagcaccgctgcccttcttgccgccgccaagctcaatttccccgccggcgcgttcgcgcaggacgccggccccgaggtcaagggcgccaagctcggcttcatcgcgctgagcgatgccggtccgctcttcgtcgccaaggacaagggcctgttcgccaaatacggcatgcccgatgtcgacgtgcagaagcaggcctcctggggcaccacgcgcgacaacctcgtgctcggctcggaaggcaacggcatcgacggcgcgcatatcctcaccccgatgccgtacctgatctcggccggcaaggtgacgcagaacaaccagccgacgccgatgtacatcctggcgcggctcaatctcgatgcgcagtgcatctccgtcgccaaggaatatgccgacctcaaggtcggcgccgatgcgtcagtgttgaaggcggcgttcgagaagaaaaaggccgaaggcaagtccgccaaggtcgcgatgaccttccccggcggcacgcacgatctctgggtccgctattggctcgccgccggcggtatcgatcctgacaaggacgtcgagaccatcaccgtgccgccgccgcagatggtggccaacatgaaggtcggcaccatggacgccttctgcgtcggtgagccctggcccgggcagctggtccaccagggcatcggctacacggccgtcaacaccggcgagatctggagcaagcatccggaaaagtcactcggcatgcgcgcggcctgggtcgacaagaatccgaaggcggccaaggcgatcctgatggcgataatggaagcccagcaatgggccgacaagatggagaacaaggaagagctcgccaccatcatgggcaagcggcagtggatcaactgcccggtcgaggacatcgccgatcgcgccaagggcaagttcgactacggcaacgccggcaaggtggtcgagaactcgccgcacatcatgaagtactggcgcgatcatgcctcctatccgttccagagccatgatctctggttcatgaccgaggacatccgctggggcaaatacgaagccggcttcgacagcaaggcgctgatcgccaaggtcaaccgcgaggacctctggaaggacgcggccaagacgcttggtgtcgcaagctccgacatcccggcctccacctcgcgcggcaaggagaccttcttcgacggcaaggtattcgatcccgaaaatccggcggcctatctgaagtcgctcgcgatcaagcgcgtcgaagtctga

SEQ ID NO: 54372 - protein, 439 aa, Bradyrhizobium japonicum USDA 110
MTKRIRRPSDTGLSRRQLLKATGSTAALLAAAKLNFPAGAFAQDAGPEVKGAKLGFIALSDAGPLFVAKDKGLFAKYGMPDVDVQKQASWGTTRDNLVLGSEGNGIDGAHILTPMPYLISAGKVTQNNQPTPMYILARLNLDAQCISVAKEYADLKVGADASVLKAAFEKKKAEGKSAKVAMTFPGGTHDLWVRYWLAAGGIDPDKDVETITVPPPQMVANMKVGTMDAFCVGEPWPGQLVHQGIGYTAVNTGEIWSKHPEKSLGMRAAWVDKNPKAAKAILMAIMEAQQWADKMENKEELATIMGKRQWINCPVEDIADRAKGKFDYGNAGKVVENSPHIMKYWRDHASYPFQSHDLWFMTEDIRWGKYEAGFDSKALIAKVNREDLWKDAAKTLGVASSDIPASTSRGKETFFDGKVFDPENPAAYLKSLAIKRVEV

SEQ ID NO: 54373 - DNA, 1365 bp, Vibrio parahaemolyticus RIMD 2210633
  CDS (1)..(1365): transl_table=11
atgaaatggagttcgatgctgaaagtgtcagcaatttcgttatcggtattcaccgcggttagcgcaaaggcacagttgggtgaaccagaaattgaagacctgaagtttggttttattaagttaaccgatatggcgccgttagcggttgcctacgagaaaggcttttttgaagacgaagggctatacgttacgctcgaagcgcaagcaaactggaaagtactgttggaccgcgttatcgatggtgaactcgatggcgcgcatatgctggcagggcagccattgggcgcaacgattggtgtcggcacaaaagcagaagtgattaccgcgttcagtatggatttgaacggcaacgcaatcactgtttccaatgacacgtgggaacagatgaagccacacataccaaagcagccagatggcaaacctgtacatccaatcaaagcggattcgttgaagcccgtcgttgacagttatcgcgacaagggcaagtcattcaatatgggcatggtgtttcctgtttctactcacaattacgagttgcgttattggcttgctgctggtgggattcatccaggtttttatgcaccagactcaggcgataacagtggtcaattggatgctgacgttcttttgagtgttacaccgccaccacaaatgccagccacaatggaagcgggcacaatcaaagggtactgcgtcggcgaaccatggaaccagcaagccgtattcaaaggcattggtacgccagtcgtgaccgattacgaaatctggaagaacaacccagagaaagtgtttggtgtgtccaaagcatgggcagaaaagaaccccaacacgcacattcgtgtcgtgaaagccctgattcgagcggcacattggttggatgaaaacagcaatgccaaccgccaagaagcggtgaagatgttggcgaagagcgagtatgtgggagccgatgccgatgttatcgccaactcaatgacaggcacgtttgaatacgagaaaggcgacaaacgagacgtaccagacttcaacgtgttcttccgtcataacgccacgtacccgtactacagcgatgcgatttggtatctgacccaaatgcgccgctggggacaaatctcaagcgagaaatccgatgattggtacatggatgtggcgaaagaggtttaccgtccagatatctaccaacaagcagctcaagcgttaattgaagatggtgtgttgagcaaaaaagacttcccagatttcagtgctgaagatggttttcgtccgccacaaacacactttatcgacaacatcgtttatgacggtcgcgagccaaataaatatctggagaagttctctatcgggcttaaaggaaaagacaaagtttag

SEQ ID NO: 54374 - protein, 454 aa, Vibrio parahaemolyticus RIMD 2210633
MKWSSMLKVSAISLSVFTAVSAKAQLGEPEIEDLKFGFIKLTDMAPLAVAYEKGFFEDEGLYVTLEAQANWKVLLDRVIDGELDGAHMLAGQPLGATIGVGTKAEVITAFSMDLNGNAITVSNDTWEQMKPHIPKQPDGKPVHPIKADSLKPVVDSYRDKGKSFNMGMVFPVSTHNYELRYWLAAGGIHPGFYAPDSGDNSGQLDADVLLSVTPPPQMPATMEAGTIKGYCVGEPWNQQAVFKGIGTPVVTDYEIWKNNPEKVFGVSKAWAEKNPNTHIRVVKALIRAAHWLDENSNANRQEAVKMLAKSEYVGADADVIANSMTGTFEYEKGDKRDVPDFNVFFRHNATYPYYSDAIWYLTQMRRWGQISSEKSDDWYMDVAKEVYRPDIYQQAAQALIEDGVLSKKDFPDFSAEDGFRPPQTHFIDNIVYDGREPNKYLEKFSIGLKGKDKV

SEQ ID NO: 54375 - DNA, 1284 bp, Gloeobacter violaceus PCC 7421
  CDS (1)..(1284): transl_table=11
atgcccgaagattccgcccagttcacgctcacccgccgcggcttgctccaggcagccgcggcggccacggtcggttcgctgctgacccccggttatgtgggggcggccgacgcccctgagaccaccaaggcccggcttggatttatttcgctcagcgactgcgcgccgctggtgatcgccaaagaaaaaggtctgttcgacaaatacggcatgaaggacgtcgaggtcgccaagcaggcgtcgtggggggtgacccgcgacaacctcgaactgggtgccgggggcggcggtatcgacggcgcccacatcctcacgccgatggtgtatctgattgccaacggcaacatcaccaaaggcagtaagaaagtgccgatgttcatcctggccaggctcaacgtcaacggccagggcatctcggtggccaacaaatataagctcctcaaggtgggcctcgacgccgcgccgatgaaggcagaagcgctcaaggccaaagccaacggcgatccgattaccgtcgctcagactttcccggggggcacccactgggcgtggctgcgctactggctcgccgctggcggcatcgacccggagaccgacgtcaagatgatcaccgtgccgcccccgcagatggtggccaacatgaagaccggcgtcaccgacgctttttgcgtgggcgagccgtggcaccagcagctcatcaaccagcagatcggctacacggcggtgaccaccggccaaatctggaaccgccacccggaaaaatcctttgccctgcgcgccgactacgtcgagaaatatccgaaggcgacaaaagcgctgttgatggcggtgcaggaggcccagatctgggccgacaaggccgagaacaaggacgaactggcccaggttgtcagcaagcgcagctggataggcgccccggtctccgacatcgtggcgcgctacaagggcatcatcgactacggcgacggtcggccggtggagcgcaacagcccccacatcatgcagttctggaaagattttgcttcttacccttatcagagccacgatctgtggtttttgaccgaggacatccgctggggcgtcctgcccgcgaccaccgacaccaaaaagctggtggcggcggtcaaccgcgaggatctctggcgcgaggcggccaaggccctgggccagccggctcccaaaggcacctcccggggtgtcgaaaaattcttcgacggcgtcgccttcgacccgaccaagccggaagcgtacctcaagagcgtcaagctcaagaaactggcctga

SEQ ID NO: 54376 - protein, 427 aa, Gloeobacter violaceus PCC 7421
MPEDSAQFTLTRRGLLQAAAAATVGSLLTPGYVGAADAPETTKARLGFISLSDCAPLVIAKEKGLFDKYGMKDVEVAKQASWGVTRDNLELGAGGGGIDGAHILTPMVYLIANGNITKGSKKVPMFILARLNVNGQGISVANKYKLLKVGLDAAPMKAEALKAKANGDPITVAQTFPGGTHWAWLRYWLAAGGIDPETDVKMITVPPPQMVANMKTGVTDAFCVGEPWHQQLINQQIGYTAVTTGQIWNRHPEKSFALRADYVEKYPKATKALLMAVQEAQIWADKAENKDELAQVVSKRSWIGAPVSDIVARYKGIIDYGDGRPVERNSPHIMQFWKDFASYPYQSHDLWFLTEDIRWGVLPATTDTKKLVAAVNREDLWREAAKALGQPAPKGTSRGVEKFFDGVAFDPTKPEAYLKSVKLKKLA

SEQ ID NO: 54377 - DNA, 1347 bp, Gloeobacter violaceus PCC 7421
  CDS (1)..(1347): transl_table=11
atggcaggtaaaccacttggccagaggggcgccggcgcccaggccgccgactttgagcaatctgcacggtggaaaccgaccagacgccagtttttgcaggtgagcggggccgcctcggccggtttattgctggtacccgggtacgcgggggcggcggacgcgcctgaggtgacggcggttcggatcggcttcgtaggccagacggacgcgtcgcccatcatcatcgccaaggtcaaagggtacttcgagaagcacggcctcaaggatgttgaactgatcaagcagccttcgtggggggtgacccgcgataaccttgaactcggttccaggggcggcggactcgatgtggcgatggtcctgcggccgatgccctttttgatggccctcggggtgaacaccaagggcaacaaaaaaattcccatatatgtgccgttgcaactgaacgtcgacgggcaggggatcaccgtggccaaggtgttcaacgccgagaatgtccgcctcgatgcctcggtgatgaagcccaagattgaaaaggccaaagccgagggcaaaaagctcaagttcgccagcaccttcaaaggcggcaccagcgatttgatgctgcgctattggctggctgccggcggtatcgacccggacaacgacatcgattgcctgtacgtgccggggccgcagctggtggcgagcatgaaggtgggcaatctggagggtttctgcgtgggcgacccctggcacgagcgggcgatcagcgaaaagatcggctattctgcggtgatttctggagaactctggaaggaccatcccgaaaaagccctcgccatgcgcgccgactgggccgacaagcaccccaaagccgcccgcgccatcctcaaagggattatggaagcccagcagtggtgcgacgtgatgaccaaccgcgacgagttgtgcacgattctctcctcgcgcgagtacgccaatgtgccggtggccaacatcaacaaccgcctcaaaggttccatcgagtacggcaacaaccgtccggtggtgagcaacagtccctacgtgatgcgcttctggcgcgaaaacgcctcctatccctacaagagccacgatctctggtttatgaccgagaatatccgctggaacttgctgccggctgctaccgatgtcaaggcggtggtgggggcggtcaaccgcgccgatctgtggcagcaggccgccaaagaagggggcattgccgctgcgcaggttccgaaggtggcctcgcggggtgtggaggtgttcttcgacaagacccgcttcgacccggccaacaccaccgcctatctcaaagcgctcaaaatcaagcgcgtcgcgctcgcttga

SEQ ID NO: 54378 - protein, 448 aa, Gloeobacter violaceus PCC 7421
MAGKPLGQRGAGAQAADFEQSARWKPTRRQFLQVSGAASAGLLLVPGYAGAADAPEVTAVRIGFVGQTDASPIIIAKVKGYFEKHGLKDVELIKQPSWGVTRDNLELGSRGGGLDVAMVLRPMPFLMALGVNTKGNKKIPIYVPLQLNVDGQGITVAKVFNAENVRLDASVMKPKIEKAKAEGKKLKFASTFKGGTSDLMLRYWLAAGGIDPDNDIDCLYVPGPQLVASMKVGNLEGFCVGDPWHERAISEKIGYSAVISGELWKDHPEKALAMRADWADKHPKAARAILKGIMEAQQWCDVMTNRDELCTILSSREYANVPVANINNRLKGSIEYGNNRPVVSNSPYVMRFWRENASYPYKSHDLWFMTENIRWNLLPAATDVKAVVGAVNRADLWQQAAKEGGIAAAQVPKVASRGVEVFFDKTRFDPANTTAYLKALKIKRVALA

SEQ ID NO: 54379 - DNA, 1290 bp, Gloeobacter violaceus PCC 7421
  CDS (1)..(1290): transl_table=11
gtgatgactggaactatgcatagacgaacattgatcgccggggcggcagccacaattggaccgaccctctggctaccgaaagccttagcgaagggcgcactagaaaaaccaaagctcaaagtcggttttatcgcactcatcgactgcgcaccactggtcatcgcccgcgagcggggcttttttgagcgccacggtctcgatgtcgagctctccaaagaggagagctgggcgagcgtgcgcgagggactgatcacaggacgcctggatgcctcccacgccctggcgggcacgccgctggcggtgcagttgggcgccgaaggcaaggcgcctgctccgctgataaccgctatgtccctcgacctcaacggcaacgccatcaccttttccaagcgcctctggcaggccggggtgcgcagcggcgcggatctcaaaaaaatcatcgccaccggcaaggtgggccgcaccctcaccggagcgatggtctccgcctcctcgatgtacaactacaacctctgctactggttggcccaccacgatatccacccctaccgcgatgtgcgcctgatcaccctgaccccggcccagttgattgccaatctcgaagcgggcaatatcgattttttctgcgtcaccgaaccgtggaacacccgcgcccacgccgagggcgccgggtttacggtcattgccgatcgcgacgtgtggggcggtcacccggagaaggtgctcgccgtcatggagccctgggcaaggacgcaccccaacacccacctcgcgttagtcaaagcgctccttgaagcctgccgctactgcgacgagccggcccatcgccaggaggtgctgcgcaccctgtcgctacgcacctacctggcagcgcagccttttttgctcgaacccgccctgagcggtcgtctggacttcggcggcttcgacggcgaaggcaaggcgaccgccagcctgaaggatgtaccggattttgtcgtgttcttcaaacgggatgcggactacctggtcggaaacgatcaagccaccttcccctggaagtcccacggcctgtggattttgacccagatggcgcgctgggggcagatcccggcgatcccggccggggtggataaattgcttgaccgggtctacagggtagatatttaccggcaggcggcggcggagctggggatcaaggctcctgcccaggactataaatccgaaaacaccttcatcgacaggcggcggttcgacccgtccaacccggttgcgtatcttgacagcttcgagatcgctgcgcgcgcttga

SEQ ID NO: 54380 - protein, 429 aa, Gloeobacter violaceus PCC 7421
MMTGTMHRRTLIAGAAATIGPTLWLPKALAKGALEKPKLKVGFIALIDCAPLVIARERGFFERHGLDVELSKEESWASVREGLITGRLDASHALAGTPLAVQLGAEGKAPAPLITAMSLDLNGNAITFSKRLWQAGVRSGADLKKIIATGKVGRTLTGAMVSASSMYNYNLCYWLAHHDIHPYRDVRLITLTPAQLIANLEAGNIDFFCVTEPWNTRAHAEGAGFTVIADRDVWGGHPEKVLAVMEPWARTHPNTHLALVKALLEACRYCDEPAHRQEVLRTLSLRTYLAAQPFLLEPALSGRLDFGGFDGEGKATASLKDVPDFVVFFKRDADYLVGNDQATFPWKSHGLWILTQMARWGQIPAIPAGVDKLLDRVYRVDIYRQAAAELGIKAPAQDYKSENTFIDRRRFDPSNPVAYLDSFEIAARA

SEQ ID NO: 54381 - DNA, 1317 bp, Bradyrhizobium sp. ORS278
  CDS (1)..(1317): transl_table=11
atgacgaagaccgcccatcctgcccgccgcaacggcctcagccgccgtcagctcctgaaggccggagccggcaccgcagcgctgctcgcggccgccaagctgaacctgccgggcggtgccttcgcgcaaggcgcgggcccggaagtcaccgcggccaagctgggcttcatcgcgctgagcgatgccggcccgctgtttgttgccaaggacaagggcatcttcgccaaatacggcatgccggatgtcgacgtgcagaagcaggcgtcgtggggcacgacgcgcgacaatctcgtgctcggctccgaaggaaacggcatcgacggcgcgcacatcctcacgccgatgccctacctgatctccgcgggcaaggtgacgcagaacaatcagccgacgccgatgtacatcctggcgcggctcaacctcgatgcgcagtgcatctcggtcgccaaggaatatgccgacctcaagctcggcctcgacaccgcgccgttcaaggcggcgctggagaagaagaaggcctcaggcaagtcggtgaaggcggcgatgaccttccccggcggcacgcatgatctgtggatccgctactggctcgccgccggcggcatcgatcccgacaaggacatcgagaccatcgtggtgccgccgccgcagatggtggccaacatgaaggtcggcaccatggactgcttctgcgtcggcgagccctggaatgcgcagctcgtcaaccagggcatcggctacaccgcggtgaccaccggcgagatctggaacaagcatcctgaaaaatccttcgcgatgcgctcagccttcgtcgacaaatatccgaaagctgcgaaggcgctgaccatggcggtcatggaggcgcagcagtggtgcgacaagatggagaacaagcaggagcttgcgaccatcatggcgaagcggcagtggatgaactgcccggtcgacgacgtcgccggacgcactgccggcaagttcgactacggcaccggcaaggtgatcgagaactcgccgcatatcatgaagtactggcgcgacttcgcctcctatccgttccagagccacgacctctggttcatcaccgaggacatccgctggggcaaatacgaggccggcttcgacgccaaatcgctgatcgccaaggtcaaccgcgaggacatctggcgcgaggcggccaaggagctgaacgttcccgccgcggaaatcccgacctccacgtcgcgcggcaaggagacgttcttcgacggcaaggtgttcgatcccgaagatcccgccgcctatctgaagtcgctgtcgatcaagcgcatcgacgcctga

SEQ ID NO: 54382 - protein, 438 aa, Bradyrhizobium sp. ORS278
MTKTAHPARRNGLSRRQLLKAGAGTAALLAAAKLNLPGGAFAQGAGPEVTAAKLGFIALSDAGPLFVAKDKGIFAKYGMPDVDVQKQASWGTTRDNLVLGSEGNGIDGAHILTPMPYLISAGKVTQNNQPTPMYILARLNLDAQCISVAKEYADLKLGLDTAPFKAALEKKKASGKSVKAAMTFPGGTHDLWIRYWLAAGGIDPDKDIETIVVPPPQMVANMKVGTMDCFCVGEPWNAQLVNQGIGYTAVTTGEIWNKHPEKSFAMRSAFVDKYPKAAKALTMAVMEAQQWCDKMENKQELATIMAKRQWMNCPVDDVAGRTAGKFDYGTGKVIENSPHIMKYWRDFASYPFQSHDLWFITEDIRWGKYEAGFDAKSLIAKVNREDIWREAAKELNVPAAEIPTSTSRGKETFFDGKVFDPEDPAAYLKSLSIKRIDA

SEQ ID NO: 54383 - DNA, 1263 bp, Erwinia carotovora subsp. atroseptica SCRI1043
  CDS (1)..(1263): transl_table=11
ttgatgagtgattccaaaaccaagagcataaccgtctctcgccgccaatttctgttggggagcgccgcactgggaagcagcctgatgctgccggggttgatgaatagcgcctgggctgcgggttccgacgcgccggagaaaaaggaaatccgggttgggttcatcccgttgacggactgcgcctcggtcgtgatggccgcagtgaaaggcttcgataagaaatacggcatcaccctcgttcccagcaaagaagccagttgggctgcggtgcgcgacaagctggtgtcgggagaactggatgcggcccacattctttatgggcagttgtacggtctgcaaatggggctgtccggggcgcagagtaatatggcagcgctgatgacgctcaaccagaacggacaagggatcacgttggcaaaccagctgcgtgaagccaacgtcacggatctcgccgcgctgcaaaaatatatcgccgccagtccggctggcacttataccttcgcgcaaaccttcccaactggtacgcacgccatgtggctctattactggctggcttccgccggaattcacccgctgaacgacgtgcgcaccgtggtggtgccgccgccgcagatggtgatgaacatgaagattggcaatatggtcggctactgcgtcggtgagccgtggaaccagcgtgccatcagcgaaaaaatcggttttaccgctgctacctcgcaagacatttggccggatcacccggaaaaagtgctgggtacccgcgctgactgggtaaatgccaacccgcatagcgcccgcgcgctgaccgccgcgattctcgatgcctcgcgctggattgatgcctcggacgacaaccgccgcgaaacggccggcgtcgttgcaggacgggcgtacatcaatgccaaagaagaaaccatcgtcggacgcatgctgggccagtacgaaaacggactggggaaaagctggaaagacgaacacgcaatgcgtttctaccacgacggttccgtgaactacccgtacctgtccgacggaatgtggttcctcacccaacataaacgctggggcttgctcaccgaagatccggactatctggccgtcgcgaagcaggttaaccgtattgatatctacaagcaggcagccgatgccgtagggaatgtgcccttgcccagcggcgatatgcgcagcagcgtgctcatcgacggtcgtcgctgggacggtagcgatccggcgggttatgccaacagttttagcgtgaagaaataa

SEQ ID NO: 54384 - protein, 420 aa, Erwinia carotovora subsp. atroseptica SCRI1043
MMSDSKTKSITVSRRQFLLGSAALGSSLMLPGLMNSAWAAGSDAPEKKEIRVGFIPLTDCASVVMAAVKGFDKKYGITLVPSKEASWAAVRDKLVSGELDAAHILYGQLYGLQMGLSGAQSNMAALMTLNQNGQGITLANQLREANVTDLAALQKYIAASPAGTYTFAQTFPTGTHAMWLYYWLASAGIHPLNDVRTVVVPPPQMVMNMKIGNMVGYCVGEPWNQRAISEKIGFTAATSQDIWPDHPEKVLGTRADWVNANPHSARALTAAILDASRWIDASDDNRRETAGVVAGRAYINAKEETIVGRMLGQYENGLGKSWKDEHAMRFYHDGSVNYPYLSDGMWFLTQHKRWGLLTEDPDYLAVAKQVNRIDIYKQAADAVGNVPLPSGDMRSSVLIDGRRWDGSDPAGYANSFSVKK

SEQ ID NO: 54385 - DNA, 1299 bp, Methylococcus capsulatus str. Bath
  CDS (1)..(1299): transl_table=11
atggacaacgcccaggaaaccgccgtcggcaacggtatcgagaaaccccggctgacactgggtttcattcctctcacggactgcgctccgctggtcatcgccctggaaaaaggttacttccggcgacacggcctggacgtcacactgtcgcgccagccgtcctgggcggccatccgcgacaaggtcgcgaccggcctgctggacggcgcccacatgctcgcgccgatgccgatcgccaccaccctcggcctggggggggtacggaaggctaccattgcgccgatgtcgctggatctgaatgggaacgccgtgacggtgtccaacgccctgtaccggcgcctcacggccgtggccggcgtcgagcctgcccagcggccggtttcggcccgctgcctccggcgtttgctggacagggacggcgaggtcctgcggttcgccacggtattccccttctcctcgcacaactacctgctgcgtcattggctggcgtgcgccggggtggatcccgaccgccacgtcggcatgacggtcattccgccgccgcagatgccacgttgcctggcggcgggggagatttccggctactgcgcgggtgaaccctggaatgcccgtgccgtggcccaggggatcggccgtgtactgatcaccggtcatgaaatctggaacaacagtcccgaaaaagtgctgggcgtcaaccaggactgggccgaacaccatcccaataccttgcgagccctcctcatggccctgctggaagccgcgcaatggctcgatcggcccgaaaaccggccggaagccgccgccctcctcgcgaatcccgactatgtcggcgtgccggcggagatcctccagatgtcgatgacgggttcgtttcaatatgcggcgggcgagccggccgtgtccctccccgacttcaacgtgtttcaccgctatgccgcgaccttcccctggcgttcccacgccctgtggttcttgacccagatgctgcgctgggggcagatcgccgaacccctcgacctgcacgcggttgcggcacgggtgtatcgccccgacctctaccgggaggccgcgacggccctgggtctgccctgcccgtccggagattacaagcgcgagggcatccatgccgcgccctggaccctggataccggcacctcgtccctggtcatgggaccggacctgttctgcgacggaatcgccttcgacccggccgatcccatcgcctatctcgccggcttcggacttcaccgcctgagggtgcggctcgacgatctccgcagggaagggaatccgccgtga

SEQ ID NO: 54386 - protein, 432 aa, Methylococcus capsulatus str. Bath
MDNAQETAVGNGIEKPRLTLGFIPLTDCAPLVIALEKGYFRRHGLDVTLSRQPSWAAIRDKVATGLLDGAHMLAPMPIATTLGLGGVRKATIAPMSLDLNGNAVTVSNALYRRLTAVAGVEPAQRPVSARCLRRLLDRDGEVLRFATVFPFSSHNYLLRHWLACAGVDPDRHVGMTVIPPPQMPRCLAAGEISGYCAGEPWNARAVAQGIGRVLITGHEIWNNSPEKVLGVNQDWAEHHPNTLRALLMALLEAAQWLDRPENRPEAAALLANPDYVGVPAEILQMSMTGSFQYAAGEPAVSLPDFNVFHRYAATFPWRSHALWFLTQMLRWGQIAEPLDLHAVAARVYRPDLYREAATALGLPCPSGDYKREGIHAAPWTLDTGTSSLVMGPDLFCDGIAFDPADPIAYLAGFGLHRLRVRLDDLRREGNPP

SEQ ID NO: 54387 - DNA, 1353 bp, Synechococcus elongatus PCC 6301
  CDS (1)..(1353): transl_table=11
atgaacgaatttcaaccagtcaatcgtcgtcagtttctgttcacgctcggagcaaccgctgctagcgctattttgctgaagggttgcggtaatcctccttccagtagcggcggcgggacttctagtacaactcagccaactgctgcaggggcgagtgatctggaagtcaagacaatcaaattgggctacatccccatctttgaagcggctccactgatcattggccgcgaaaaaggcttttttgccaaatatggcttggatgttgaagtctcgaaacaagccagctgggcagctgctcgcgataacgtcattctcggttctgctggtggcggcatcgatggcggtcagtggcaaatgccgatgcctgccttgctaacggaaggtgcgatcagcaacggtcaaaaagttcccatgtatgtcttggcttgcttgagcacccaaggcaatggcatcgctgtttccaatcagctcaaggcccaaaatctgggcttgaagctagcgcccaaccgcgactttatcctcaactacccgcaaactagcggccggaagttcaaagcatcctacaccttcccgaacgccaaccaagacttctggattcgctattggtttgcagctggcggtatcgatcctgataaagacattgaactcttgaccgttcccagcgcagaaactctacaaaatatgcgcaatggcacgatcgattgcttcagtaccggcgatccctggccgtcgcggattgccaaagatgacgtcggctatcaagctgcgctgacaggtcaaatgtggccttaccaccccgaggaattcttggcgctgcgagcagactgggtagacaaacatccgaaagctacgctcgccttgctgatgggcttgatggaagcgcagcaatggtgcgatcagaaagcaaatcgggcagagatggccaagatcctctccggtcgcaacttctttaacgtgccggtttcgatcctgcagccgattctggaaggtcaaatcaaagttggagcagacggaaaagatctcaacaactttgatgccggcccgctcttctggaagagtccgcgcggcagtgtctcctatccctacaaagggctcaccctctggttcttggtggagtcgatccgctggggcttcaacaagcaagtgctacctgacattgcagccgcccagaaactcaacgatcgcgtgactcgtgaagacctctggcaagaggcagccaagaaattaggggtgcccgctgcggatatcccaaccggatcgactcgcggtaccgagaccttctttgatggcatcacctacaacccagacagtccgcaagcttatctccaaagcttgaagattaaacgggcataa

SEQ ID NO: 54388 - protein, 450 aa, Synechococcus elongatus PCC 6301
MNEFQPVNRRQFLFTLGATAASAILLKGCGNPPSSSGGGTSSTTQPTAAGASDLEVKTIKLGYIPIFEAAPLIIGREKGFFAKYGLDVEVSKQASWAAARDNVILGSAGGGIDGGQWQMPMPALLTEGAISNGQKVPMYVLACLSTQGNGIAVSNQLKAQNLGLKLAPNRDFILNYPQTSGRKFKASYTFPNANQDFWIRYWFAAGGIDPDKDIELLTVPSAETLQNMRNGTIDCFSTGDPWPSRIAKDDVGYQAALTGQMWPYHPEEFLALRADWVDKHPKATLALLMGLMEAQQWCDQKANRAEMAKILSGRNFFNVPVSILQPILEGQIKVGADGKDLNNFDAGPLFWKSPRGSVSYPYKGLTLWFLVESIRWGFNKQVLPDIAAAQKLNDRVTREDLWQEAAKKLGVPAADIPTGSTRGTETFFDGITYNPDSPQAYLQSLKIKRA

SEQ ID NO: 54389 - DNA, 1386 bp, Colwellia psychrerythraea 34H
  CDS (1)..(1386): transl_table=11
atgaattggaaaaaacctataacctctagcctaaaaagtttgtcgctgagcattgcactcgtttgtgcgggcacttatatcgctcatgctgaaacggttggcgaaccagaaaaggaagagttgaagttcggttttattaaattaactgatatggcgccgattgctatcgcttatgaaaacggctacttcgaagacgaaggtttatatgtcacgattgaagcacaagctaactggaaagtactattaaatggtgtgattgatggcacgttagatggtgcgcatatgcttgcgggtcaacctattgcagccactatgggatacggtactaaagcacacataattacgcctttttcaatggatctaaatggtaatgccattaccgtttcaaacgatatctggaaaaaaatgaagccaaacattcctaaaatggcggatggcagacctgttcatccaattaaggctgattcattaaagcccgttatagaatcgttagcttcagaaggtaagccctttaagatgggcatggtctttcctgtttcgacacataactacgagttacgttattggttagctgccggcggaatacaccctggttattatgctccacacaaaggggataactcaggacagattgatgcacaagccttactttcagtcactccgccaccacaaatgccatcaacaatggaagccggtactattcatggttactgtgtcggtgaaccttggaaccaacaagccgtgtttaaaggtattggtgtacctgtggtgactgattatgaaatatggaaaaacaaccctgaaaaagtttttggtatcacagccgctttcgctgaaaagtacccgaacactactattcgtttaacacgtgcgcttattcgagccgctaaatggttagacgacaacagtaatgcgaaccgtcctgcagcggtgaaaatattgtctcaatctaattatgttggtgctgattacgatgttattgctaactcaatgacaggtacttttgaatatgaaaagggtgataaacgagcagtgcctgatttcaacgtattctttagatataacgcaacctacccatattactctgatgctatttggtacctaacgcaaatgcgtcgttgggggcagatttcggatgataaaagtgatcaatggtacaaagacttagcagcaaaagtatatcgtcctgatatatacgctaaagcggctcaatcattaattgacgataagttaattcctgcaaatgagtttccagactttactaaagaaaacggttttaaagcaccacaacaacactttatagacgatattgtttatgacggaaatcaacctaatgcttatttggaaaaatttaaactgggtcttaaaaagggtgacaagctttaa

SEQ ID NO: 54390 - protein, 461 aa, Colwellia psychrerythraea 34H
MNWKKPITSSLKSLSLSIALVCAGTYIAHAETVGEPEKEELKFGFIKLTDMAPIAIAYENGYFEDEGLYVTIEAQANWKVLLNGVIDGTLDGAHMLAGQPIAATMGYGTKAHIITPFSMDLNGNAITVSNDIWKKMKPNIPKMADGRPVHPIKADSLKPVIESLASEGKPFKMGMVFPVSTHNYELRYWLAAGGIHPGYYAPHKGDNSGQIDAQALLSVTPPPQMPSTMEAGTIHGYCVGEPWNQQAVFKGIGVPVVTDYEIWKNNPEKVFGITAAFAEKYPNTTIRLTRALIRAAKWLDDNSNANRPAAVKILSQSNYVGADYDVIANSMTGTFEYEKGDKRAVPDFNVFFRYNATYPYYSDAIWYLTQMRRWGQISDDKSDQWYKDLAAKVYRPDIYAKAAQSLIDDKLIPANEFPDFTKENGFKAPQQHFIDDIVYDGNQPNAYLEKFKLGLKKGDKL

SEQ ID NO: 54391 - DNA, 1299 bp, Pseudomonas syringae pv. phaseolicola 1448A
  CDS (1)..(1299): transl_table=11
atggacaacggcgtcgcttcgacacttgcattgcaatgggtcggacgacgccttttttctggacggacctttgatgaagcacgcgcgatgaacgaacgaaccggtaatgcgctggactgggtggccggtagtgacgccccggaaatgaacagcctggacgtgggcttcatggcattgaccgactgcgccccgctggtggttgcggccactcaaggtttcgcccagccatacggcctgagcctgaacctcgagcgtcagacctcctgggccgggctgcgcgacagactggtcagcgggcagttgcaggcggcacacagcctgtatggtctgatctatgcggtggaactgggcatcagcggtggtccggcgaccgacatggccatcctcatgggactcaaccagaacggccagtgcatcaacctgtcccgcgagttgcagcaggcgggcgtgatcactcctgaagcactggacaaacgcgcgcaccaaagcggatcaaggctgaccttcgcgcagaccttccccaccggcaaccacgccatgtggctctactactggctggccagccaaggcatccatccgctcgatgatgtgaccagtgtcgtggtgccacccacgcaaatggcgcaacacctgcaggctgggcgcatcgacggtttctgcgtcggcgaaacctggggcgccagcgccgttcagcagcaactgggcttcaccatggcgaccagccagtcgatctggccggaccacccgggcaaggtgctgggctgtacccgtgagttcgtcgagcagaaccccaacaccgccagagcgctgatcatgtccgtactggaagcgagccgcttcatcgaggaaagcgaccataatcggcgcagcaccgcacaactgctcagcggtgcggattatctggatacctcgccggactgcatcgagccgcgcctgcttggccactacagcgacggcctcggcaatcactggcaggatccgcatgcagtcagtttccatgatcaggggcaggtcaattatccgtggctgtccgacggcatgtggttcatgactcagttccggcgctggggcctgttgcgtgaagacccggattacctggctgtcgccagccgtgtccagcaactggacctgtatcgccaggcagctgatgcgctgggcatcgacgcacccactgcaaccctgcgcagcagtcagttgatcgatggcaaggtctgggacggcagcgaccccgcaggctacgcgcgtagcttcaagctccactcgctggccgccaacgcgcccgctgtggccagtcgttga

SEQ ID NO: 54392 - protein, 432 aa, Pseudomonas syringae pv. phaseolicola 1448A
MDNGVASTLALQWVGRRLFSGRTFDEARAMNERTGNALDWVAGSDAPEMNSLDVGFMALTDCAPLVVAATQGFAQPYGLSLNLERQTSWAGLRDRLVSGQLQAAHSLYGLIYAVELGISGGPATDMAILMGLNQNGQCINLSRELQQAGVITPEALDKRAHQSGSRLTFAQTFPTGNHAMWLYYWLASQGIHPLDDVTSVVVPPTQMAQHLQAGRIDGFCVGETWGASAVQQQLGFTMATSQSIWPDHPGKVLGCTREFVEQNPNTARALIMSVLEASRFIEESDHNRRSTAQLLSGADYLDTSPDCIEPRLLGHYSDGLGNHWQDPHAVSFHDQGQVNYPWLSDGMWFMTQFRRWGLLREDPDYLAVASRVQQLDLYRQAADALGIDAPTATLRSSQLIDGKVWDGSDPAGYARSFKLHSLAANAPAVASR

SEQ ID NO: 54393 - DNA, 1278 bp, Dechloromonas aromatica RCB
  CDS (1)..(1278): transl_table=11
atggaagacaagaaactggccccggaaggcacgacgacggccaaatcatccctttctcgtcgcgatttcgtttcaaccgcattgggagcctctctgatggccatggtcccccccggcgttcgcagcggtgcctgggccgctggttccgacgcccccgaaaaaaaggaagtccgtattggcttcatcccgctcaccgactgcgcctccgttgttatggcttcggtcatgaagttcgatgagaaatacggcatcaagatcattccgaccaaggaagcctcgtgggcttcggtgcgtgacaagctggtcaatggcgagctcgacgccgctcacgtgctgtatggcctgatctatggcgtgcagttgggcatcggcggcccgaagaaagacatgaacgcattgatgagcctgaaccacaacggccaggccatcacgctgtcgaatcagctcaaggacaagggggccactgacggcgctggtctggccaaactggttgccaagaaggaacgtgaatacaccttcgcccagaccttcccgaccggcacccacgccatgtggttgtactattggctggcttcgcagggcatcaatccgatgaaagatgtcaagaccatcaccgtgccgccaccgcagatggtcgccaacatgcgtgtcggcaacatggatggtttctgtgtcggcgagccttggaacaaccgcgccatcatggacaacatcggcttcacggcgacgacgacccaggacatctggaccgatcacccggaaaaggtgctcggcaccacggcagattgggtcaagcaaaacccgaacacggcccgtgccgtagtcgcggcgattcttgatgccagcaagtggatcgacgcctcgatcgccaacaagcagaagacggccgagacgattgccagcaagtcctatgtcaataccgataccgaagtcatcgtcgcccgcatgctcgggcgctatcagaatggtctgggcaagagctgggatgacaagaactgcatgaagtttttcaacgaaggtacggtcaatttcccgtacctcagcgatggcatgtggttcctgacccagcacaagcgctgggggttgctgaagagccacccggattacctggccaccgccaagcaggtcaaccgcatcgatatctacaagcagggtgcggccgctgccggtgtcgcgctgccgaagagcgaaatgcgcagccacaagctgatcgacggggtggtctgggatggcaaggacccggccaagtacgccgacagcttcaagatcaaggcctga

SEQ ID NO: 54394 - protein, 425 aa, Dechloromonas aromatica RCB
MEDKKLAPEGTTTAKSSLSRRDFVSTALGASLMAMVPPGVRSGAWAAGSDAPEKKEVRIGFIPLTDCASVVMASVMKFDEKYGIKIIPTKEASWASVRDKLVNGELDAAHVLYGLIYGVQLGIGGPKKDMNALMSLNHNGQAITLSNQLKDKGATDGAGLAKLVAKKEREYTFAQTFPTGTHAMWLYYWLASQGINPMKDVKTITVPPPQMVANMRVGNMDGFCVGEPWNNRAIMDNIGFTATTTQDIWTDHPEKVLGTTADWVKQNPNTARAVVAAILDASKWIDASIANKQKTAETIASKSYVNTDTEVIVARMLGRYQNGLGKSWDDKNCMKFFNEGTVNFPYLSDGMWFLTQHKRWGLLKSHPDYLATAKQVNRIDIYKQGAAAAGVALPKSEMRSHKLIDGVVWDGKDPAKYADSFKIKA

SEQ ID NO: 54395 - DNA, 1272 bp, Thiobacillus denitrificans ATCC 25259
  CDS (1)..(1272): transl_table=11
gtgaccgacagccaggacaaatcccgcatacaggacccgagcaaacgcgacttcatcaagcagggcgctcgactttcggccgccgccgcgctcatggcgctggtgccgccgggcgtgcgcagcggcgcgtgggccgcgggctccgacgcgcccgagaaggccgcgctcaagatcggcttcattccgttgaccgactgcgcgtcggtcgtcgtcgcggcggtcaagggcttcgacaagaagtacggcctcacgatcacgccgagcaaggaggcgtcgtgggcggcggtgcgcgacaagctcgtcaacggcgagctcgacgccgcacacgtgctctacggcctcatctacggcgtgcagctcggcatcggtgggccgaaaaaggacatggcggtgctcgcgacgatcaacaacaacggccaggcgatcacgctctcgaaccagttgagggcgaagggcgtgagcggcggcgcgagcctcgccaagctcgtcaaggccgagccgcgcgaatacaccttcgcccagacctttcccaccggcacccacgcgatgtggctctactactggctcgccgcctacggcatcgatcccttccgcgacgtcaagaacatcgtcgtgccaccgccgcagatggtcgccaacatgcgcgtcggcaacatggacggcttctgcgtcggcgaaccctggggggcgcgcgcgatccgcgaccgtatcggcttcaccgcagtcacgacgcaggaaatctggaaggaccaccccgagaaggtgctcggcacgaccgccgaattcgtagagcgctatcccaacaccgcacgggcgatggtcgcggcgatcctcgacgcgtcgaagtacatcgacgacctgaaaaaccgcgccgaagtcgcgaagctcatcgccgccaagtcctacgtcaacaccgacgtcgcttcgatcgaaggccgcatgcgcggccagtacgacaacggcatcggccgcaagtgggtcgacgcgaactccatgaagttcttcgccggcggccaggtcggcttcccctacctctccgacggcatgtggttcctgacccagcacaagcgctgggggctgctgaagacgcatcccgactatctcgcggtcgcgaggacggtcaaccgcatcgacgtctacaaggacgccgcggcactgaccaaaacgcccctgccgtcgtccgacatgcgcgcctcgaaactcatcgacggcgtggtctgggacggctcgaacccgcaggcctacgccgacggcttccgaatcaaggcctga

SEQ ID NO: 54396 - protein, 423 aa, Thiobacillus denitrificans ATCC 25259
MTDSQDKSRIQDPSKRDFIKQGARLSAAAALMALVPPGVRSGAWAAGSDAPEKAALKIGFIPLTDCASVVVAAVKGFDKKYGLTITPSKEASWAAVRDKLVNGELDAAHVLYGLIYGVQLGIGGPKKDMAVLATINNNGQAITLSNQLRAKGVSGGASLAKLVKAEPREYTFAQTFPTGTHAMWLYYWLAAYGIDPFRDVKNIVVPPPQMVANMRVGNMDGFCVGEPWGARAIRDRIGFTAVTTQEIWKDHPEKVLGTTAEFVERYPNTARAMVAAILDASKYIDDLKNRAEVAKLIAAKSYVNTDVASIEGRMRGQYDNGIGRKWVDANSMKFFAGGQVGFPYLSDGMWFLTQHKRWGLLKTHPDYLAVARTVNRIDVYKDAAALTKTPLPSSDMRASKLIDGVVWDGSNPQAYADGFRIKA

SEQ ID NO: 54397 - DNA, 1443 bp, Anabaena variabilis ATCC 29413
  CDS (1)..(1443): transl_table=11
atgagcaatcataactggactagaagagattttatcaaaggcgtaggagccaccaccgccggcattaccctatctgcctgtaacccttcaggagatagatccgccacaggcctaacccaagaagccctaaccatcaagccagtaatcaaatccagcgatttagaaaaacccgatttgattgtgggatacgttcctgtaaatgattgtgcgccatttgcgatcgcctggaaaaaaggcttttttcgcaagtatggcttaaacgtccaactcaaccgcgaagccagttgggctacctcccgcgatggcttaatttttggtcgtcttgatgctgcacctgtagtatctggtgcagtcaccaacgcccgtataggtgcagaaggcgcacgtcacgcgcccttatgtgcagccatgacaatccatcgtcacggtaacgccatgaccatgaacaaagccatgtgggattttggcttgcgtccttggtatgaatatcaagaaaaatatggcgatggtgcattagaagcctttggacgggactttcggggttactttgagaaacaaccaccagagaacaaagtttgggctgtagttttaagttcggcaatttacgaatacttcgtccgttatgtatcggctgcggctggtgttgatcccctcaaagaatttcgcgtgattattgttccaccaccccagatggtgaccaatgtacgaataggggcaatgcaagcatacatggtagcagaaccttggaataccagagcaatcacaggtaacgaaggcattggttttacttttgcccaaggtaaagaagtctggctgggacacccagatagattattgggagtaatggagtcttttattgatcaataccccaaaacctaccgttccttggtcaaagccatgattgaagcttgccaatattgcagtaaaccggaaaatcgccaagaagtcgctgaactaattacagaccgttccttcacaggtgcaagaccgaaaaataaaaatttaccaatcactaaattgaccgcaccaggaattatcggttcatacaactatggcggatttgatggcaaagaccgcaccattcccgccgcagacacgacaattttctacgacattcccgacaacctgcccaaacaaccagccgaacactctacatttttatggagatccagaagcctttggttaatgactcaagccgcccgttggggacaaatcaaagaatttcccaaaaatgctgaacaattagccgaaaaaggctggagaacagatttatatcgccagatagccgcagaaatgggaattcaatgtccccaggatgattacaaagttgagccaccggaagtatttatagataagaaaggttttgaccccagtgaccctgttggctatttgaatagttttgcaattagggctaatgcgcccactcgttttttcctgtcttga

SEQ ID NO: 54398 - protein, 480 aa, Anabaena variabilis ATCC 29413
MSNHNWTRRDFIKGVGATTAGITLSACNPSGDRSATGLTQEALTIKPVIKSSDLEKPDLIVGYVPVNDCAPFAIAWKKGFFRKYGLNVQLNREASWATSRDGLIFGRLDAAPVVSGAVTNARIGAEGARHAPLCAAMTIHRHGNAMTMNKAMWDFGLRPWYEYQEKYGDGALEAFGRDFRGYFEKQPPENKVWAVVLSSAIYEYFVRYVSAAAGVDPLKEFRVIIVPPPQMVTNVRIGAMQAYMVAEPWNTRAITGNEGIGFTFAQGKEVWLGHPDRLLGVMESFIDQYPKTYRSLVKAMIEACQYCSKPENRQEVAELITDRSFTGARPKNKNLPITKLTAPGIIGSYNYGGFDGKDRTIPAADTTIFYDIPDNLPKQPAEHSTFLWRSRSLWLMTQAARWGQIKEFPKNAEQLAEKGWRTDLYRQIAAEMGIQCPQDDYKVEPPEVFIDKKGFDPSDPVGYLNSFAIRANAPTRFFLS

SEQ ID NO: 54399 - DNA, 1377 bp, Anabaena variabilis ATCC 29413
  CDS (1)..(1377): transl_table=11
atgacagagttttttaatcaattttctcgccgcaagtttatagttacagcaggagcttcggcaggtgcagtgttcctcaaaggttgcttgggaaatccgcctgagactaccggaggaacacaatctgcaccaactgctcaacctgctgctaatgttagcgcagagcaagcaccagaagtcactactgtgaagttgggatatattcccattgtggaatcggctcctttaattattgccaaagaaaaaggtttctttgctaaatatggattaactaatgtagaactttctaaacaagcttcttggggttctgctagagataacgtagaaattggttcggctggtggtggtattgatggcggtcaatggcaaatgcctatgccacacttgattaccgaaggtttaattactaagggtaatcaaaagatacccatgtatgtgttatgtcaattaattacacatgggaatggaattgcgatcgctaacaagcaccaaggtaaaggtatcagtttaaaattagaaggcgctaagtctttatttagccaactcaagtcttctacacccttcactgccgctttcactttcccccacgtcaaccaagacttatggattcgctactggttagccgcaggcggtattgacccagatgcagatgtcaaactgctgacagtcccggcggcgcaaactgtagctaacatgaaaaccggcacaatggacgctttcagcacaggtgacccctggccattccgcttggtcaacgacaaaattggctacatggccgccttaaccgcagagatttggaaaaatcacccagaagaatacttggcaatgagagctgattgggtggataaataccccaaagcaaccaaagcgttactcaaaggcattatggaggcgcaacagtggttagataattttgacaaccgcaaagaagcagctcaaattctggctggaagaaattatttcaacctcaataatccagaaattctggcagacccatacgtcggcaaatatgatatgggtgatggtcgcaaaattgatgataaatcaatggcggcttactactggaaagatgaaaaaggtagtgtttcttatccctacaagagtcatgatttgtggttcatcacagaaaatgtacgttggggattcttacccaaagattacctagctaatggtgcagctaaagccaaagaattaatcgataaagtcaaccgcgaagatatttggaaagaagcggctaaagaggcgggaattgctgcggctgatattcccacaagtacatctcgcggtgttgaagaattctttgatggcacaaaatttgaccccgaaaagccagacgaatatctcaagagcctgaaaatcaagaaagttagtgtttag

SEQ ID NO: 54400 - protein, 458 aa, Anabaena variabilis ATCC 29413
MTEFFNQFSRRKFIVTAGASAGAVFLKGCLGNPPETTGGTQSAPTAQPAANVSAEQAPEVTTVKLGYIPIVESAPLIIAKEKGFFAKYGLTNVELSKQASWGSARDNVEIGSAGGGIDGGQWQMPMPHLITEGLITKGNQKIPMYVLCQLITHGNGIAIANKHQGKGISLKLEGAKSLFSQLKSSTPFTAAFTFPHVNQDLWIRYWLAAGGIDPDADVKLLTVPAAQTVANMKTGTMDAFSTGDPWPFRLVNDKIGYMAALTAEIWKNHPEEYLAMRADWVDKYPKATKALLKGIMEAQQWLDNFDNRKEAAQILAGRNYFNLNNPEILADPYVGKYDMGDGRKIDDKSMAAYYWKDEKGSVSYPYKSHDLWFITENVRWGFLPKDYLANGAAKAKELIDKVNREDIWKEAAKEAGIAAADIPTSTSRGVEEFFDGTKFDPEKPDEYLKSLKIKKVSV

SEQ ID NO: 54401 - DNA, 1284 bp, Anabaena variabilis ATCC 29413
  CDS (1)..(1284): transl_table=11
atgccaaagttgaacaggcgacaatttatcacaactgcgggtgcagctgcactgactcatgccactattgccaaaactcagttacattccggcgtttatgctggctatagtgatactccagaagtaaccacagccacactgggatttttacctgttactagctgctgtcctttaattattgccaaagccaaaggcttttttgctaaacatggaatgcccgatattaatgttgtcaaacaaccttcctgggcagtcatgcgcgacaaactcatgttaggtgcagccgatgaggggttagatggtgggcatttgctgtttccgatggtgtacctcatggctaccggggaaattagctatgggcgaaaaatccccatgtatatcttggccagaatgaatgtgaacggacaagggatatcagttgctaatagctacaaaaatttaaacctgagtatagatagttctcccttaaaatcagcctttgcccaaaaaacgaaagctggagaaactgtgcgttgtgcagtaccttatcgtcgggtaacgggtgatttttttatgcgttggtggttggcttatggtggaatagatccagaccgtgatttatcagtaattgtgattgcacctccacagatggttgcgagtatgcgtagtggcagcatggaagccttctgtgtagttgacccttggcatcaccgattgattaaacaagggcttggttactcaactgtgacaactggtgagttgtggcctaatcacccagagaaagcctttactgtacgtgctgagtgggtggataaatatcccaaggcggcaaaagcgatgctggcggcatttttagaggcgcaaatctggtgtgataagccagaaaataaagaggaactattccaaatagtgtcacaacggcaatggattggcgtgaaaagtgacttgatccgcgatcgcctcttaggtaaatttgattatggtaatgggcggatagtggaaaatagcccccatgccatcaaatactggcgggaaaatgcttcctatcctttcaagagtcatgatttatggtttctcattgaagatatgcgctggggttatcgttcccccgattttgataccaaacccctaattgatgccgtcaatcgtgaagatttgtggcgagaagctgctaagttcataggtcaagagtcagcgattcccgccagtacatcacggggggtagaaaaattctttaatggcttagaatttaatccagaaaatcccctagcttatctcaatgcgcccaagatcaggataatgtga

SEQ ID NO: 54402 - protein, 427 aa, Anabaena variabilis ATCC 29413
MPKLNRRQFITTAGAAALTHATIAKTQLHSGVYAGYSDTPEVTTATLGFLPVTSCCPLIIAKAKGFFAKHGMPDINVVKQPSWAVMRDKLMLGAADEGLDGGHLLFPMVYLMATGEISYGRKIPMYILARMNVNGQGISVANSYKNLNLSIDSSPLKSAFAQKTKAGETVRCAVPYRRVTGDFFMRWWLAYGGIDPDRDLSVIVIAPPQMVASMRSGSMEAFCVVDPWHHRLIKQGLGYSTVTTGELWPNHPEKAFTVRAEWVDKYPKAAKAMLAAFLEAQIWCDKPENKEELFQIVSQRQWIGVKSDLIRDRLLGKFDYGNGRIVENSPHAIKYWRENASYPFKSHDLWFLIEDMRWGYRSPDFDTKPLIDAVNREDLWREAAKFIGQESAIPASTSRGVEKFFNGLEFNPENPLAYLNAPKIRIM

SEQ ID NO: 54403 - DNA, 1323 bp, Anabaena variabilis ATCC 29413
  CDS (1)..(1323): transl_table=11
atgacacacgtttccagaagaaaatttcttttcaccacaggtgcggcggcggcggcttctattttggctcatggttgcacttccaatggttctcaatcagctaccaccggagaacaagcaccttcagcagcaccagccgctaacgtctcagccgctaacgcacccaaggtagaaacaaccaaagccaagctaggattcatcccgcttactgatgctgcacccctcatcattgctaaagagaaaggcttctttgctaaatatggcatgaccgatgttgaagtcatcaagcaaaaatcttggcctgtcacccgcgataacttaaaaattggctcatctggtggtggtattgatggcgcacatatccttagtcccatgccttacctcatgaccatcaaagataaagtgccaatgtacattttggctagattaaatactaatggccaggctatttctgtagctgaaaaatataaagacctgaacattaatttagaaagcaaaaaccttaaagacgtagccgccaaagccaaagctgataagaaagcctggaaagctggtattacctttcctggtgggacacatgatttatggatgcgctattggttagcggctggtggtattaatcctgatcaagatgttgtgttggaacctgttccaccgccacaaatggtagcaaacatgaaagttgggactgtcgattccttctgtgttggagaaccttggaatgctcagttagtcaaccaaaaattaggttattccgctttagttacaggcgaattatggaaagatcatccagaaaaagcctttaccatgcggcaagattgggttgatcaaaatcccaatgcagcccaggcaattttgatggcaattttagaagcacaacaatggtgcgacaaggcagaaaacaaagaagaaatgtgtaaaatctgcgctgaccgtaaatacttaaatgttgctgccgcagatattgtagaaagagctaaaggcaatatcgattatggtgatggtcgtaaggaagaaaactttgcttatcggatgaaattctgggcagataatgcttcctatccctataagagtcacgatatttggtttttaactgaagatattcgctggggttatttaccaaaagatactaaagttcaagacattgttaaccaagttaataaagaagacttgtggaagaaagcagcgaaagcaattggtgtggctgatgcggaaattcctgctagcagttcccgtggggtggaaactttctttgatggcgtgaaatttgacccagaaaagccagaagaatacttaaatagtttgaaaatcaaaaaagtttaa

SEQ ID NO: 54404 - protein, 440 aa, Anabaena variabilis ATCC 29413
MTHVSRRKFLFTTGAAAAASILAHGCTSNGSQSATTGEQAPSAAPAANVSAANAPKVETTKAKLGFIPLTDAAPLIIAKEKGFFAKYGMTDVEVIKQKSWPVTRDNLKIGSSGGGIDGAHILSPMPYLMTIKDKVPMYILARLNTNGQAISVAEKYKDLNINLESKNLKDVAAKAKADKKAWKAGITFPGGTHDLWMRYWLAAGGINPDQDVVLEPVPPPQMVANMKVGTVDSFCVGEPWNAQLVNQKLGYSALVTGELWKDHPEKAFTMRQDWVDQNPNAAQAILMAILEAQQWCDKAENKEEMCKICADRKYLNVAAADIVERAKGNIDYGDGRKEENFAYRMKFWADNASYPYKSHDIWFLTEDIRWGYLPKDTKVQDIVNQVNKEDLWKKAAKAIGVADAEIPASSSRGVETFFDGVKFDPEKPEEYLNSLKIKKV

SEQ ID NO: 54405 - DNA, 1212 bp, Pseudomonas fluorescens PfO-1
  CDS (1)..(1212): transl_table=11
atgactcaaacctccgccgggccgctggcctgggtcaacggcagcgatgccccggaaaaaagtgcgatcaacctgggcttcatggccctgagcgactgcgcctcgctggtggtcgccgccacccagggctttgctcagccttacgggttgaccctgaatctcaaacgccagagttcctgggccaacctgcgggacaatctggtcagcggtgaactcgatgccgcccacagcctttacggcctgatctacgcagtgcatctgggcatcggcggcgtcgcgccgaccgacatggcggtgctgatgggtctgaaccagaatggtcagagcctcaacctgtcccacggcttgcagggcctgggcgtgaccggtcctgaagcgctgcaccaccatgtgcaccaaacccgcgcaaaactgaccttcgcccagactttcccgaccggcacccatgccatgtggctgtattactggctggcgagccagggcattcatccgttgcgggatgtcgacagcgtggtggtgccgccgccgcaaatggtcgcgcacttgcaggccggacgcattgatggcttctgtgtcggcgagccgtgggcggccagcgccgtgcaacagagtctcggcttcacgctggccaccagccagaccatctggcccgatcacccggaaaaagtcctcggctgcacccgcgccttcgtcgagcagtaccccaacaccgcccgggcgctggtgatggcgatcctcgaagccagccgcttcattgaagaaagcccggaaaaccgccgcagcaccgcgcagttgctgagcgctgcggaatacctcgacgccccggtgtcctgcatcgaaccgcgctttctcggcgattacgacgatggactgggcaatcgctggcaggacccgcacgccctgcgctttcacggcgatggcgcggtgaatctgccgtatctgtcggatggcatgtggttcatgacccagttccgccgctggggcttgctgcgcgatgacccggattacctcgctgtcgcccggcaggtgcaacaactggagatctatcgcgacgcggcaactgccgtgggcgtcgcgccatggggcaaggacatgcgcagcagccagttgatcgacggcaaaatctgggacggcagcgatcctgccgcctacgcccgaagcttcaagctccacgcgctgagcgacagcgccacccttctcgcccagcgctga

SEQ ID NO: 54406 - protein, 403 aa, Pseudomonas fluorescens PfO-1
MTQTSAGPLAWVNGSDAPEKSAINLGFMALSDCASLVVAATQGFAQPYGLTLNLKRQSSWANLRDNLVSGELDAAHSLYGLIYAVHLGIGGVAPTDMAVLMGLNQNGQSLNLSHGLQGLGVTGPEALHHHVHQTRAKLTFAQTFPTGTHAMWLYYWLASQGIHPLRDVDSVVVPPPQMVAHLQAGRIDGFCVGEPWAASAVQQSLGFTLATSQTIWPDHPEKVLGCTRAFVEQYPNTARALVMAILEASRFIEESPENRRSTAQLLSAAEYLDAPVSCIEPRFLGDYDDGLGNRWQDPHALRFHGDGAVNLPYLSDGMWFMTQFRRWGLLRDDPDYLAVARQVQQLEIYRDAATAVGVAPWGKDMRSSQLIDGKIWDGSDPAAYARSFKLHALSDSATLLAQR

SEQ ID NO: 54407 - DNA, 1302 bp, Methylobacillus flagellatus KT
  CDS (1)..(1302): transl_table=11
atgagtcattccgaatacaagccgacattgcccgaacccactgctggcaatgacgatatggaccatggcaggcggcggttttttcaccaggcgattgccagcaccctcggtgccgccgccatgctggacataatcccttccaccctcagccgtcaggcctgggcggcaggttcagatgcgccggagcttaccgaagtgaagatcggcttcattccgctcaccgactgtgcgccggtcgtcgtggctgcgcaaatgggcttcgacaagaaatacggcatcaagatcaccccctccaaggaagcctcatgggctggtatccgcgacaaggtcgccaatggcgaactgcatgccgcgcacatgctctatggcatggtctacggtgtgcagatgggcataggcggacagcagaaggatatgtccatcctcatgacgctgaaccacaacggccagggcatcacactcgccaaccagctcaaggaaaagggcgtcaccacaggacaagccctcaaacgcctgatcgacaacgaaaaccgcgacttcaccttcgcccagaccttccccaccggcacccacgccatgtggctctactactggctcgccacctatggcatcaacccgttcaaggatgtgaagaccatcgtggtaccgccgccgcagatggtcgccaatatgcgcatcggcaacatggacggctattgcgtcggcgagccctggaacgcgcgggcgatccacgacaagatcggcttctctgtcgccaccagccaggatatctgggccgatcatccggaaaaggtattgggcacgacggcggatttcaccgccaggaaccccaataccgccctggccatgaccaaggccatcctcgaagcctgccgctatatcgacgccacggccaaccgcccggccgtcgccaagctgatttcaggcaaggcctacgtcaacgcgccagaaagtgtgatcgaaggccgcttcctcggccattacgacaacggtatcggcaagcgatgggaagacccgaactacatgaagttcttcaatgacggcaaggtgaccttcccctatctatcggacggcatgtggttcctcacccagcacaagcgctggggcctgctgaagacggacccggattaccttgccatcaccaagaaggtcaaccgcatcgatatctataccgaggccgccaagtcactgggcattgccgtaccgagcgacccgatgcgcagcagcaagctgatcgacggcgtgctatgggacggcaaggatcccaaggcctatgccagcgccttcaagatcaaggcctga

SEQ ID NO: 54408 - protein, 433 aa, Methylobacillus flagellatus KT
MSHSEYKPTLPEPTAGNDDMDHGRRRFFHQAIASTLGAAAMLDIIPSTLSRQAWAAGSDAPELTEVKIGFIPLTDCAPVVVAAQMGFDKKYGIKITPSKEASWAGIRDKVANGELHAAHMLYGMVYGVQMGIGGQQKDMSILMTLNHNGQGITLANQLKEKGVTTGQALKRLIDNENRDFTFAQTFPTGTHAMWLYYWLATYGINPFKDVKTIVVPPPQMVANMRIGNMDGYCVGEPWNARAIHDKIGFSVATSQDIWADHPEKVLGTTADFTARNPNTALAMTKAILEACRYIDATANRPAVAKLISGKAYVNAPESVIEGRFLGHYDNGIGKRWEDPNYMKFFNDGKVTFPYLSDGMWFLTQHKRWGLLKTDPDYLAITKKVNRIDIYTEAAKSLGIAVPSDPMRSSKLIDGVLWDGKDPKAYASAFKIKA

SEQ ID NO: 54409 - DNA, 1158 bp, Burkholderia xenovorans LB400
  CDS (1)..(1158): transl_table=11
atgaacactcctactagcaccgcactcgccgcgtcgtccgcatcgggaaagctcgagaagacccatttgcggctcggtttcgtggcgctctcggatgccgcgccgctcgttgccgccaagctgctcgaattcggccacgcgcacggcctgacgctggagttgtcccgccagccgtcatgggccgccgtgcgtgacaaactgctgtcgggcgatctggacgcggcgcacgcgctttatggactcgtgtacggcgtgcagttgggtctaggcggaccgcaaacggatatggccgtgctgatggtgctcaaccgcaacggccaggccatcacgctgtcgaaccgtctcgccgatgcgctcgccgaacacggcacgctgcccaaggcgctcgcgacgctcggccgcaaaccggtcttcgcgcagaccttcccgaccggcacgcacgccatgtggctgtactactggctggcgtcgcaaggcgtggatccgttgcgcgatatcgagagcgtggtgattcccccgccgcaaatggtcgcggcgctcgccgaagacaaactcgacggcctgtgcgtcggcgagccctggaatgcgcaggccggagcgcaaggcgtgggcagaacgatcgcatatacgagcgacgtgtggcccgatcatcccgagaaagtgctggcctgccggcgcgattttgtcagcgcgaatccgaatgccgcacgcgcactggtgcaaaccatgctcgaggcgtgccgctggctcgacggcgcgggacatcgcgaggaaatcgcgcactggcttgcacggcccgactatgtgggcatcgatgcaacgttgattgcggcgcgcctcggcaacgagatcgcggcttccgcgccgggcggcctgcccgtgcggttcttcgacaacggcgcggtgaattatccgcgagcgttcgaaggcgcgtggttcctcacgcagttcgagcgctggggcatgatcgacgcgcgcgcggattatgcggacatcgccgcgcggatcaaccagacgcagttgtatcgcgaggcagccgccgcgatgaacgtggccgtgccggaagaaagcgcttcacaggtattgatcgacggcgaaacgtgggacagcggcacgtcgcccaccggttacgcacggcgctttccgattcgccgctag

SEQ ID NO: 54410 - protein, 385 aa, Burkholderia xenovorans LB400
MNTPTSTALAASSASGKLEKTHLRLGFVALSDAAPLVAAKLLEFGHAHGLTLELSRQPSWAAVRDKLLSGDLDAAHALYGLVYGVQLGLGGPQTDMAVLMVLNRNGQAITLSNRLADALAEHGTLPKALATLGRKPVFAQTFPTGTHAMWLYYWLASQGVDPLRDIESVVIPPPQMVAALAEDKLDGLCVGEPWNAQAGAQGVGRTIAYTSDVWPDHPEKVLACRRDFVSANPNAARALVQTMLEACRWLDGAGHREEIAHWLARPDYVGIDATLIAARLGNEIAASAPGGLPVRFFDNGAVNYPRAFEGAWFLTQFERWGMIDARADYADIAARINQTQLYREAAAAMNVAVPEESASQVLIDGETWDSGTSPTGYARRFPIRR

SEQ ID NO: 54411 - DNA, 1305 bp, Ralstonia metallidurans CH34
  CDS (1)..(1305): transl_table=11
atgccctctcgcctcaaagtcctgaagccccagcgcgccaacgacaccgctgccgcggatgccgcccccgcctgccacggccgccgccgcgcgctggccactatcgccggtgccagcgtgatgacgctggtcgatccgctggtgcgcagcggtgcgtgggccgccggctccgatgcgccggaaaagccggaggtcaggatcggcttcattccgctgaccgattgcgcatcggtggtgatggcgtcgacgctgggcctggacaagaagtacggcatcaagatcacgccgagcaaggaggcttcgtgggctggcgtgcgcgacaagctggtcaatggcgagctggacgccgcgcacgtgctgtacgggctgatctacggcgtgcagctcggcatcggcgggccgaagaaagacatggccgtgcttatgaacctgaaccacaacggccaggccatcacgctgtcctcgaaactggcggaaaagggcgtcaaggatggcgcgagcctgaaggcgctgatgtccagggaaaagcgcgattacgtgttcgcgcagacctttccgaccggcacccatgcgatgtggctctactactggctggccgccaacggcatcgatccgatgcgcgatgccaaggccatcactgtgccgccgccgcagatggtggccaacatgcgcgtgggcaacatggatggcttttgcgtcggtgagccttggggcgcgcgcgcgatcgccgacaagatcggcttcaccgccgagaccacccaggcgatctggaaggatcacccggagaagacgctgggcaccacggccgagttcgtgcagaagtacccgaacacggcgcgcgcgatggtggccgccgtgctggatgcatcgaagttcatcgacgcttccgcatccaaccgccgcaagacggccgagacgatcgccgccaagtcctacgtgaacacggatatggacatcatcctggaccggatgctgggccgctacagcaacggcctgggcaagacctgggatgaccccgattcgatgaagttctaccaggacggcctggcgaactatccgttcctttctgatggcatgtggttcctgacccagcacaagcgctgggggctgctgaaagagcatccggactatctggccgtggccaagcaggtaaatcgcatcgacatctacaagcaagccgctgtggccgcgcaggtgccgttacccaagagcgacttccgcaccgccaggctgatcgacggcgtgacgtgggatgcgacgaaggacccgaaggcctacgccgacggattcaagatcaaggcctga

SEQ ID NO: 54412 - protein, 434 aa, Ralstonia metallidurans CH34
MPSRLKVLKPQRANDTAAADAAPACHGRRRALATIAGASVMTLVDPLVRSGAWAAGSDAPEKPEVRIGFIPLTDCASVVMASTLGLDKKYGIKITPSKEASWAGVRDKLVNGELDAAHVLYGLIYGVQLGIGGPKKDMAVLMNLNHNGQAITLSSKLAEKGVKDGASLKALMSREKRDYVFAQTFPTGTHAMWLYYWLAANGIDPMRDAKAITVPPPQMVANMRVGNMDGFCVGEPWGARAIADKIGFTAETTQAIWKDHPEKTLGTTAEFVQKYPNTARAMVAAVLDASKFIDASASNRRKTAETIAAKSYVNTDMDIILDRMLGRYSNGLGKTWDDPDSMKFYQDGLANYPFLSDGMWFLTQHKRWGLLKEHPDYLAVAKQVNRIDIYKQAAVAAQVPLPKSDFRTARLIDGVTWDATKDPKAYADGFKIKA

SEQ ID NO: 54413 - DNA, 1374 bp, Cytophaga hutchinsonii ATCC 33406
  CDS (1)..(1374): transl_table=11
atgaaaaaaataaactatgttataaaagccgctgcattcggattgcttgtagccgccttaaacagctgcggaggcagtgaaacggctgatcaaacaacgggcgatacatctgctgcaacagcacttgctattgaaaagccgcagttgaaaatcggctttataaaacttacagatatggctcctttagctattgcaaaagaaatgggtttctttgaagaggaaggattatttgtaacgcttgaagcacaatctaactggaaaaatgtgttagatcgggtgattgacggagaactggatggctcgcacatgctggctggtcagcctattgcagcaagctccggatttggccgccaggcggaattggtaacgccgttttcaatggatctgaatggtaatgcaattactgtatcaaacgatgtgtgggcaatgatgaaaccaaacattcccaaagatgcacacggtaaaccggtacacccgattaaagcagatgccttaaagcctgtggttgattcgtataaaaaacaaaacaaaccatttaagatggccattacgtttccggtttcaacgcataattatgaaatcagatattggctggcagccggcggtttgaatccggggatgtatacagcagaaaatgtagaaggacaggtaggcgctgaagtgatgttgtctgtaacgcctcctccgcaaatgacggctactatggaagcaggaacaatttttggatactgcgtaggcgagccctggaatcagcaggctgtattcaaacaagtgggtgtgcctgtaataacagatattgaaatctggaaaaataatcccgagaaagtatttggtatgacaaaaaagtttgtagaagaaaatcccaacactgccattgctattaccaaagcattgatcaaagcaggtaaatggctggatgatccggcaaacagagcaaaggctgttggtattctttccaaacctgcttacgtgggtgctgattctattgtgattgcaaactccatgacaggcacatttgaatttgaaaaaggtgataaaagagaagcagcagattttaatgtgttcttcaaatacaatgcaacgtatccattctattcagatgctgtttggtacttgacgcagatgagacgttggggacagatcacggaatctaagccggatgcctggtatgatgcaacagcaagaaaggtatacaggccggatgtatggatgtctgcagcaaaactattggttcaggaaggtgtattgaaagaaagtgatcttccttcaaatactggctacaagcctgccacagctgattttattgatggtacagagtatgatggtacaaaaccaaatgaatatctgaaaaaatttaaaatagggaataagtaa

SEQ ID NO: 54414 - protein, 457 aa, Cytophaga hutchinsonii ATCC 33406
MKKINYVIKAAAFGLLVAALNSCGGSETADQTTGDTSAATALAIEKPQLKIGFIKLTDMAPLAIAKEMGFFEEEGLFVTLEAQSNWKNVLDRVIDGELDGSHMLAGQPIAASSGFGRQAELVTPFSMDLNGNAITVSNDVWAMMKPNIPKDAHGKPVHPIKADALKPVVDSYKKQNKPFKMAITFPVSTHNYEIRYWLAAGGLNPGMYTAENVEGQVGAEVMLSVTPPPQMTATMEAGTIFGYCVGEPWNQQAVFKQVGVPVITDIEIWKNNPEKVFGMTKKFVEENPNTAIAITKALIKAGKWLDDPANRAKAVGILSKPAYVGADSIVIANSMTGTFEFEKGDKREAADFNVFFKYNATYPFYSDAVWYLTQMRRWGQITESKPDAWYDATARKVYRPDVWMSAAKLLVQEGVLKESDLPSNTGYKPATADFIDGTEYDGTKPNEYLKKFKIGNK

SEQ ID NO: 54415 - DNA, 1404 bp, Alkalilimnicola ehrlichei MLHE-1
  CDS (1)..(1404): transl_table=11
atggacaaggaccatgaaaagcgcctgaaccggcgcagctttctgaagaccggggggctcctcagtggcgcggcactgatgggcatggtagcgcccggcgtgcgcaccggcgcctgggccgggggaagtgacggcctggaagtgacccgggtagccctggggttcattccgctgaccgattgcgcccccctggtcattgcccgtgaaaagggcttcttccaggcgcacggcctcgacgtgcaggtgtcgaaggaagcctcctgggccaacatccgtgacaaggtctccgtcggtgcattggatggcggccacatgctggcgggcatgcccatcgcctccaccctcggcgtgggcgccacccgcacccccatggtcaccggcttcagcatggacctgaacggcaatgccattacggtctcgaacgcgctctacgaccgcatgatggaggccgatcccgaggcgatgcaggaacgccccatcactgctcgggccctcaaaaaggtcatcgaccaggacaaggcggccggtcgggcaccactgaccttcgcaatggtcttccccgtctccacacacaactacgagctgcgctactggatggccgccgcaggcatcaaccccgacgaagatgtccggctggtggtcatcccaccaccgcagatggtggccaacctgcgggcccggaacatggatggctactgtgtgggtgaaccttggaacatgcgcgccgtagacatggggatcggcaaggtgctggtcaccaactatgagatctggaacaacaacccggaaaaagtgctcggcctaacggaagaatgggttgagaaacaccccaatacccacagagccttgctgcaggcattgatccagaccaataagtggatggacgagcccgagaaccgcgaggaggtcgtggacatcatctcccgccgggcctacgtcaacgcaccaccccatgtggtgggcatgtctatgaagggcacactgcagttccagcgggacgagaagccgcgcccgttcccggatttcaacgtcttccaccgatatgccgccacctacccgtggcgctcccacgccgtctggttcctgacccagatggtgcgttggggtcagctacgcgagccggaggatctgctcaaagtcgccgagcgggtctaccggcccgacctttatcgtgaggccgcccgtgccgtgggcgagccctaccccaccatcgattacaaaagcgaaggcacgcgggataagccttggaccctccaggaggccagccaccccattgagatggggccggaccgcttcctcgatggccgcactttcgacccccgggatgtcatggcttacctggaaggctttgatgtgcactcccgggccctgagcctgccgcaactggccgaattgaacggctga

SEQ ID NO: 54416 - protein, 467 aa, Alkalilimnicola ehrlichei MLHE-1
MDKDHEKRLNRRSFLKTGGLLSGAALMGMVAPGVRTGAWAGGSDGLEVTRVALGFIPLTDCAPLVIAREKGFFQAHGLDVQVSKEASWANIRDKVSVGALDGGHMLAGMPIASTLGVGATRTPMVTGFSMDLNGNAITVSNALYDRMMEADPEAMQERPITARALKKVIDQDKAAGRAPLTFAMVFPVSTHNYELRYWMAAAGINPDEDVRLVVIPPPQMVANLRARNMDGYCVGEPWNMRAVDMGIGKVLVTNYEIWNNNPEKVLGLTEEWVEKHPNTHRALLQALIQTNKWMDEPENREEVVDIISRRAYVNAPPHVVGMSMKGTLQFQRDEKPRPFPDFNVFHRYAATYPWRSHAVWFLTQMVRWGQLREPEDLLKVAERVYRPDLYREAARAVGEPYPTIDYKSEGTRDKPWTLQEASHPIEMGPDRFLDGRTFDPRDVMAYLEGFDVHSRALSLPQLAELNG

SEQ ID NO: 54417 - DNA, 1350 bp, Rhizobium leguminosarum bv. viciae 3841
  CDS (1)..(1350): transl_table=11
ttgtgtccaaattcagccagcagagggaacctgcgcatgacaaagaatttgcagactgggatttttacaaccggcattacccgccgcagcatgctcaagacgaccgcagcggctgccctcatcagcgctgtcaagacggcctttccgtccggcgcctttgcagccggagcaggccctgaagtgacaggtgtcaagctcggctttatcgcgctcacggattcggcgccgctgatcatcgccaaggaaaagggctttttcgacaagcatggccttccggaaacggatgtggccaaacaggcctcctggggtgcgacccgcgacaatctcgtgctgggcggcgcggcaaacggcatcgacggtgcgcatatcctgtcgccgctcccctatctcatgcataccggcaaggtgacgcagaacaataaaccggtgccgatggcgatcctcgcccggctcaacctcgacagccagggtatttccgttgccaaggaatatgccgaaaccggcgtgcagctcgattcctccaagctgaaggccgcattcgagaaaaagaaggcggagggcaaggagatcaaggccgccatgaccttcccgggcggcacccatgacctctggatccgttactggctcgccgccggcggtattgatccgaacaaagacgtttcgaccatcgtcgtgccgccgccgcagatggttgccaacatgaaggtcggcaacatggacgtcttctgtgtgggcgaaccgtggaatgagcagctcgtcaaccagggtatcggctttaccgcagccaccactggcgagctctggaagggtcatcctgaaaaggcgctcggactgcgcgccgagtggatcgaaaagaatcccaatgctgccaaggccctgctgatggccgtcatggaggctcagcaatggtgcgaaagcatggacaacaaggcggagatggctgacattctcggcaagcgccaatggttcaacgttccgacgaaggacgtgctcggccgcctcaagggcgacatcaattatggcaacggccgcgatgtcaaagccaccgacctctatatgaagttctggaaagacggcgcctcctatccgttcaagagccacgatagctggttcatgacggaaaacatccgttggggaaatctgccggcgagcaccgatatcaaggcgctggtcaaccaggtaaaccgcgaagacatctggcgcgaggccgccaaggatctcggcgtcgcggcggccgatattccggcatcgtcgtctcgcggcaaggaaaccttcttcgacggcaaggtcttcgaccctgaaaatccctccgcctatctcgacagcctttcgatcaaggctgtctcctga

SEQ ID NO: 54418 - protein, 449 aa, Rhizobium leguminosarum bv. viciae 3841
MCPNSASRGNLRMTKNLQTGIFTTGITRRSMLKTTAAAALISAVKTAFPSGAFAAGAGPEVTGVKLGFIALTDSAPLIIAKEKGFFDKHGLPETDVAKQASWGATRDNLVLGGAANGIDGAHILSPLPYLMHTGKVTQNNKPVPMAILARLNLDSQGISVAKEYAETGVQLDSSKLKAAFEKKKAEGKEIKAAMTFPGGTHDLWIRYWLAAGGIDPNKDVSTIVVPPPQMVANMKVGNMDVFCVGEPWNEQLVNQGIGFTAATTGELWKGHPEKALGLRAEWIEKNPNAAKALLMAVMEAQQWCESMDNKAEMADILGKRQWFNVPTKDVLGRLKGDINYGNGRDVKATDLYMKFWKDGASYPFKSHDSWFMTENIRWGNLPASTDIKALVNQVNREDIWREAAKDLGVAAADIPASSSRGKETFFDGKVFDPENPSAYLDSLSIKAVS

SEQ ID NO: 54419 - DNA, 1245 bp, Acidovorax sp. JS42
  CDS (1)..(1245): transl_table=11
atgaccgatctgctccacacccgaatcccccgacgcaccgtgctgcaggcggccaccgtgggcgccgtgggcgtgagccccgcgctgcgtgccctggtgcacgcccagggctcggacgcccccgagaagaaagaggtgcgcatcggcttcatccccctcaccgactgcgccagcgtggtcatggcatcggtgctgggcatcgaccagaagtacggcgtgaagatcatccccaccaaggaggccagctgggccggcgtgcgcgacaagctggtcaacggcgagctggacttcgcccatgtgctctacggcctggtctacggcgtgcatctgggcgtgggcggccccaagaaggacatggccgtgctgatgacgctcaaccacaacggccaggccatcacgctgtcgcgcaagctggccgacaagggggccgtcaacggcgcaggcctggcccagctgatggccaaggaacggcgcgagtacacctttgcgcagaccttccccaccggcacgcatgcgatgtggctgtactactggctggccgcgcacggcatccaccccctgaaggacgccaaggtcatcaccgtgccgcccccgcagatggtggccaacatgcgcgtgggcaacatggacggcttctgcgtgggcgagccctggaaccaccgcgccatcatggacggcatcggcatcacggccaccaccacgcaggcgatctggaaggaccaccccgaaaaggtgctgggcaccaccgccgacttcgtgcagaagtaccccaacaccgcgcgcgccgtgacggccgccatcctggaggccagccgctggatcgacgaaagcctggcccacaagaaccagatggccgagaccatcgccggcaaggcctacgtgaacaccagcgtggacgccatcaaccagcgcatcctggggcgctaccaggacggcctgggcaagacctgggacgaccccgaccacatgaagttctatggcggcggcgcggtgaacttcccctacctgtccgacggcatgtggttcctgacccagcacaagcgctggggcctgctcaaggaccacccggactacctgggcgtggccaaggccatcaaccgtaccgacgtgtaccgccaagccgccacggccgcgaaggcccccctgcccgcgagcgacatgcgcagccacaagctggtggatggcgtggtctgggacggcaaggaccccgcgaagtacgccgacggtttcaagctcaaggcctga

SEQ ID NO: 54420 - protein, 414 aa, Acidovorax sp. JS42
MTDLLHTRIPRRTVLQAATVGAVGVSPALRALVHAQGSDAPEKKEVRIGFIPLTDCASVVMASVLGIDQKYGVKIIPTKEASWAGVRDKLVNGELDFAHVLYGLVYGVHLGVGGPKKDMAVLMTLNHNGQAITLSRKLADKGAVNGAGLAQLMAKERREYTFAQTFPTGTHAMWLYYWLAAHGIHPLKDAKVITVPPPQMVANMRVGNMDGFCVGEPWNHRAIMDGIGITATTTQAIWKDHPEKVLGTTADFVQKYPNTARAVTAAILEASRWIDESLAHKNQMAETIAGKAYVNTSVDAINQRILGRYQDGLGKTWDDPDHMKFYGGGAVNFPYLSDGMWFLTQHKRWGLLKDHPDYLGVAKAINRTDVYRQAATAAKAPLPASDMRSHKLVDGVVWDGKDPAKYADGFKLKA

SEQ ID NO: 54421 - DNA, 1296 bp, Magnetospirillum magnetotacticum MS-1
  CDS (1)..(1296): transl_table=11
atgaccagcaacagcacctcgaccaagggtatttcccgccgttccgtcctggcctccgccgccgtgctggccgccgcccgcgccgccctgccgggcggtgcctgggcggcggccggggatgctcccgaggtcaagggcgccacgttcggcttcatcgctctcaccgatgcctcgccgctgatcatcgccaaggaaaagggcttcttcaccaaatacggcatgcccgatgtgcaggtgctcaagcaggcctcctggggcacgacgcgcgacaatctggaactgggctcgggcggcggcggcatcgacggcgcccatatcctgacccccatgccctacctgatggcggcgggccgggtcaccaagaacaacaccaaagtgcccatgaacatcctggcccgcctcaacaccaacggccagtgcatctcggtctccaacgcctataaggacctgaagctcaccaccgaggccagggccttcggccccgctttggccaagggccgggcggcgggcaaggagatcaaggtggccatgaccttccccggcggcacccacgatatgtggctgcgctactggctggccgccaatggcatcgaccccgacaaggatgtttcgaccatcgtggtgccgccgccccagatggtcgccaacatgaaggtgggcaccatggaggccttctgcgtgggcgagccgtggaacgaccaactggcccatcagggcatcggcttctccgccgtgaccactggcgaattgtggaaagaccatccggaaaagagcctggccatgcgtggcgactgggtggagaagaaccccaaggcggccaaggccgtcaccatggcggtcatggaagccgcccagtggtgcgaggccaatatcgaggagatgtgcaagatcgtctcgggccgcgaatggttcaaggttccggtggaagatatcgtcgcgcgagcctcgggcttcatcaattacggcgacggccgtctggtggaaaaaagcccgcatgtcatgaagttctggaaggacttcgcctcttatcccttccagagccacgatctgtggttcctgaccgagaaccagcgctggggctaccagcccatggatctggacaccaaagcattgatcaatcaggtcaaccgcgaggacatctggcgcgccgccgccaaggatctagccatcccggccgcgcagatccccacctccacctcgcgcggcatcgagaagttcttcgacggcaagagcttcgatcccgccaaccccaccgcttatctgaagagcctcgccatcaagcgcgcggcggtctga

SEQ ID NO: 54422 - protein, 431 aa, Magnetospirillum magnetotacticum MS-1
MTSNSTSTKGISRRSVLASAAVLAAARAALPGGAWAAAGDAPEVKGATFGFIALTDASPLIIAKEKGFFTKYGMPDVQVLKQASWGTTRDNLELGSGGGGIDGAHILTPMPYLMAAGRVTKNNTKVPMNILARLNTNGQCISVSNAYKDLKLTTEARAFGPALAKGRAAGKEIKVAMTFPGGTHDMWLRYWLAANGIDPDKDVSTIVVPPPQMVANMKVGTMEAFCVGEPWNDQLAHQGIGFSAVTTGELWKDHPEKSLAMRGDWVEKNPKAAKAVTMAVMEAAQWCEANIEEMCKIVSGREWFKVPVEDIVARASGFINYGDGRLVEKSPHVMKFWKDFASYPFQSHDLWFLTENQRWGYQPMDLDTKALINQVNREDIWRAAAKDLAIPAAQIPTSTSRGIEKFFDGKSFDPANPTAYLKSLAIKRAAV

SEQ ID NO: 54423 - DNA, 1311 bp, Synechococcus sp. WH 5701
  CDS (1)..(1311): transl_table=11
atgtccaatctttcgcgccgtaggtttctgatcaccgcagccggcacggcagccggtgctgtctggttgagtgcgtgcggtggcaagaagagcgagaccagttcggctccagcagctgccggctccgctgacaccgaagtcaaaggagcgacgctcggcttcatcgccctcaccgatgcgtcccccctgatcattgccaaggagaaggggttcttcgccaagcacggcatgcccgatgtgaaggtgctgaagcagacctcctgggccgccacccgcgacaacctcgagctgggtgctgatcgcggtggcattgatggggctcacatcctcacgccgatgccgtatctgctcacggcggggaccatcaccaagacgagcaagccgctgcccatgtatatcctggcgcggcttaatgtaaatggccagggcctctccctctccaatgaattcctgaaggaaaaggtcacgctacaaagtcccaagatcaaggagattgccgatcgcaagaaggctgacggcaagttgctcaaggccgccatgaccttccccggcggtacccacgatctctggatgcgctactggctttccgccaacggtgttgacccggtttcggaagcggatctggtggtggtgcccccggcccagatggtggccaacctccagaccggcaccatggacaccttctgcgtgggtgaaccctggaaccagcgcactgtcaacaagaagatcggctacaccggtgcgatcaccggtgaactctggaaggaccaccccgagaaggccttctcgatgcgcgccgattgggtcgacaagaatcccaagtcagccaaggccatgctgatggcggtccaggaggcccagatgtggtgccaggatcctgccaatctcgatgaactctgcgagatcacctcgaaagacaaatacttcaagtgcaatgttgaagacatcaagcctcgtttggctggcactttcgatttcggtgatggccgcagcgtcaccgattcacctctgaggatgcacttctggaaggagaccgattcctactccttcccctacaagagtcacgacctctggttcctcaccgaagacatccgctggggctatctcccccagaccaccgataccaagggcctgatcgacaaggtcaaccgctccgacctctggaaggaagccgccatcgccatcggccaggagaaagccatccccgcctctgattcccggggtaaggaaaccttctttgacggtgtggtcttcgaccccgagaaccccaaggcctacctcgattcgctcaaattcaaggctctggcctga

SEQ ID NO: 54424 - protein, 436 aa, Synechococcus sp. WH 5701
MSNLSRRRFLITAAGTAAGAVWLSACGGKKSETSSAPAAAGSADTEVKGATLGFIALTDASPLIIAKEKGFFAKHGMPDVKVLKQTSWAATRDNLELGADRGGIDGAHILTPMPYLLTAGTITKTSKPLPMYILARLNVNGQGLSLSNEFLKEKVTLQSPKIKEIADRKKADGKLLKAAMTFPGGTHDLWMRYWLSANGVDPVSEADLVVVPPAQMVANLQTGTMDTFCVGEPWNQRTVNKKIGYTGAITGELWKDHPEKAFSMRADWVDKNPKSAKAMLMAVQEAQMWCQDPANLDELCEITSKDKYFKCNVEDIKPRLAGTFDFGDGRSVTDSPLRMHFWKETDSYSFPYKSHDLWFLTEDIRWGYLPQTTDTKGLIDKVNRSDLWKEAAIAIGQEKAIPASDSRGKETFFDGVVFDPENPKAYLDSLKFKALA

SEQ ID NO: 54425 - DNA, 1326 bp, Synechococcus sp. WH 5701
  CDS (1)..(1326): transl_table=11
atgctcaatcgtcgtaagtttctctccgttctcagcgccaccctggccggcaccctgatgctgaatgcctgtggtaatccacccgagaagggctcaggacccgcttccggcacggcccctgtggccgatgcgggtctcgagacgaagaccatcaccctgggctatgtccccatcctggaagctgccgcgctggtggctggcgtggagaaagggttcttcgccaagcacggccttgaggtgaagctggccaagcaggccagctggcccgccgctcgcgacaacgtggtgatcggctcaaccggtggcggtatcgacggcggccagtggcagctgcccatgcctcatctgatcactgaaggcatcatcaccaatggcaacaaggtgccgatgtatgtgctggctcagctgagcagccagggcaatgccatcgctgtttcgaacagcctgaagaaggccaatctgcgggtggacctcactcccgcggctcccacgatcctcggcttccccaagaccgaaggccgtaagttccgggccgcccacacctaccccaatgccaaccaggacctctggatccgttactggctcggggccggcggcattgatcccgacaaggacatcgagctgctgaccgtcccctccacggagaccctgcaggggatgcgcaacggcacgatggaggccttcagcacgggtgatccctggcccttccgcatcgtcaccgacaacatcggctacacagcggctctgaccgccgagatttggcctgtgcaccccgaggaattcctcggtgtccgtgccgactgggtggataagcatccgaaggccgccgtggctcttatcaagggtctgctggaggcccagcagtgggccgacaaggccgagaacaaggaagcactggcgaagatgctcagttcccgccagtacttcaacacgcccgtctcggtgctggtgcccgcgctcaaggccgactacaagctgggtgccgatctcaagccttccactgatcccaagctggggccgctctactgggccagcgatcgaggcgtgatttcctatccctacaagagcctgagtctctggttcctggtggagtcgctgcgctggaaattccaccctggcaagctcgacacgatcgatcaggccaaggcactggtcgacaaggtgaaccgggaagacctctggcgtcaggccgccactgagctgggccttcccgccgcggacatccccaccggctccagccgtggcaaggaaacgttcttcgatggtgtcgtctacgacccggagaacccgcaggcctacctcgacagcctgaagatcaagcgctga

SEQ ID NO: 54426 - protein, 441 aa, Synechococcus sp. WH 5701
MLNRRKFLSVLSATLAGTLMLNACGNPPEKGSGPASGTAPVADAGLETKTITLGYVPILEAAALVAGVEKGFFAKHGLEVKLAKQASWPAARDNVVIGSTGGGIDGGQWQLPMPHLITEGIITNGNKVPMYVLAQLSSQGNAIAVSNSLKKANLRVDLTPAAPTILGFPKTEGRKFRAAHTYPNANQDLWIRYWLGAGGIDPDKDIELLTVPSTETLQGMRNGTMEAFSTGDPWPFRIVTDNIGYTAALTAEIWPVHPEEFLGVRADWVDKHPKAAVALIKGLLEAQQWADKAENKEALAKMLSSRQYFNTPVSVLVPALKADYKLGADLKPSTDPKLGPLYWASDRGVISYPYKSLSLWFLVESLRWKFHPGKLDTIDQAKALVDKVNREDLWRQAATELGLPAADIPTGSSRGKETFFDGVVYDPENPQAYLDSLKIKR

SEQ ID NO: 54427 - DNA, 1461 bp, Photobacterium sp. SKA34
  CDS (1)..(1461): transl_table=11
atggcaccgaagccactgtttcttaaccgaagcagtggcttttattttttaagttgggtaggaaatattatggctataaaaggactcatgcagctcatcaaaaaatcgtacggcgtcagtttatctgctttgctgtttggggcgttaacggtcaatgcatcgccgttggtgttaggagagcctgagaaagaagaactaaaactaggctttattaaacttacggatatggcaccgctggctattgcttatgagaagggctatttcgaagacgaaggcttgtatgtctcactagaagcccaagctaattggaaggtgctactggatcgcgtgattgatggtgagttagatggcgcgcatatgctggccggtcaaccactcggtgcaacaatcggtattggtaccaaagcacccattattacggcatttagcatggatctaaatggtaacgcgatcacagtttcaaatgaagtatggcaacaaattaagccacaattacccgttgatgagaatgggaaagttatccatccgattaaagctgaagcgttaaagcctgtactggaacattacaaagataccggaaagccatttcaaatgggcatggttttccctgtatctacccataactacgaattacgttattggttagcggctgctgggataaatcctggattttatgcccctgaaaaaggcgataacagtgggcaacgtgaagctgaaatcttacttaatgtgacgccaccaccgcaaatgcccgcgaccatggaagctggaacaattcaaggatatagcgttggtgaaccttggaaccaacaagcggtagcgaaaaaaattggggtaccgatcattgcagataatgatatttggaagaataacccagagaaagtctttggtgtgacggaatcatgggcgaaagaaaaccctaatacgcatattcgtttagttaaagccttaattcgagcggcggcgtggcttgatcataatggtaatgagaatcgtgctgaggcttcaaagatacttgctcgtagtgagtatgtaggggcagatgaaaaggtaatagcgaatagcatgacagggagctttgaatatgaagctggtgatattagacctgcacccgatttcaatgtgttctttcgttataacgccacttacccttattacagtgatgctgtttggtcattaacccaaatgcgtcgctggggacaaataccacaagcaaaacctgatagctggtatatcgatatcgctaaacaagtttatcgtcctgatatttatcgattagcagttaatgcgctgatttcagatggcctgatgaagcaatcagatttttcagacgtcgataatgaaacgggtttccgccctccacataatcatttcattgacaatattacctatgacggacgtagcccgaatgcgtatctcgagcaattttcgattggcttaaaaggcgatcagcagatctaa

SEQ ID NO: 54428 - protein, 486 aa, Photobacterium sp. SKA34
MAPKPLFLNRSSGFYFLSWVGNIMAIKGLMQLIKKSYGVSLSALLFGALTVNASPLVLGEPEKEELKLGFIKLTDMAPLAIAYEKGYFEDEGLYVSLEAQANWKVLLDRVIDGELDGAHMLAGQPLGATIGIGTKAPIITAFSMDLNGNAITVSNEVWQQIKPQLPVDENGKVIHPIKAEALKPVLEHYKDTGKPFQMGMVFPVSTHNYELRYWLAAAGINPGFYAPEKGDNSGQREAEILLNVTPPPQMPATMEAGTIQGYSVGEPWNQQAVAKKIGVPIIADNDIWKNNPEKVFGVTESWAKENPNTHIRLVKALIRAAAWLDHNGNENRAEASKILARSEYVGADEKVIANSMTGSFEYEAGDIRPAPDFNVFFRYNATYPYYSDAVWSLTQMRRWGQIPQAKPDSWYIDIAKQVYRPDIYRLAVNALISDGLMKQSDFSDVDNETGFRPPHNHFIDNITYDGRSPNAYLEQFSIGLKGDQQI

SEQ ID NO: 54429 - DNA, 1380 bp, Oceanospirillum sp. MED92
  CDS (1)..(1380): transl_table=11
atgcttaagaagaaaaaggctctactaagcaaagttatcagcagtgccgtgcttgctgcttcattggtgacggtacccgcgtgggctgctattggtgagccagagaaggaagatctgaagttcggtttcattaagctgaccgatatggctcctttagcaattgcatacgaaaagggcttctttgaagacgaaggcctgtatgtaacccttgaagcacaggcaaactggaaagttcttctggaccgagtgattgacggtcagctagatggtgcccacatgctggcaggccagccattaggtgcgacgatcggctttggtacccaatcacatattattaccgctttctcaatggacctgaacggtaatgcgatcacggtttccaacgatatctggagccagatgaagcagcatgtacctatgggcgctgacggcaaacctgtacaccctatcaaagcagatgcgctaaagcctgttgttgagaagtatcaggacgaaggcaagccattcaacatgggtatggtattcccggtttctacgcataactatgaactgcgttactggctggcagcaggcggtatccatccaggctactatgcaccacataaaggtgatacttctggcaccatcgacgcagacgcactgttatcggttacccctccaccacagatgccagcaactatggaagcaggcactatctacggctactgcgtaggtgaaccttggaaccagcaagccgtattcaagggcattggtgttccggttgtaactgactacgagatctggaaagacaaccctgagaaagtatttggtgtatcaaaaacctgggcagacgagaatccgaatacccatttacgcgttgtgaaagcgatgattcgtgccgcgaaatggttagacgataacaacaacggtaaccgccctgaagcagtagaaattctgtctcgctcagaatacgtaggtgctgattacgatgttatcgctaactcaatgacaggtacattcgagtacgagaaaggcgacaagcgtgaagtacctgatttcaacgtattcttccgctacaacgcaacttacccatactactctgatgcgatctggtacctgactcagatgcgccgttggggccagattgcagaacctaaatctgaccggtggttcatggatattgcgaaaaaagtatatcgccctgacatctatgctgaagcagctaaagagctgattgaagaaggcaagatgacagcagacatgttccctgactttgcaactgaagacggtttcaaatcaccacagactcactttatcgatggtattacttacgacggcagcaagccaaatgaatacctgaagaagttcgaaatcggtctaaaacctgaagataagatttaa

SEQ ID NO: 54430 - protein, 459 aa, Oceanospirillum sp. MED92
MLKKKKALLSKVISSAVLAASLVTVPAWAAIGEPEKEDLKFGFIKLTDMAPLAIAYEKGFFEDEGLYVTLEAQANWKVLLDRVIDGQLDGAHMLAGQPLGATIGFGTQSHIITAFSMDLNGNAITVSNDIWSQMKQHVPMGADGKPVHPIKADALKPVVEKYQDEGKPFNMGMVFPVSTHNYELRYWLAAGGIHPGYYAPHKGDTSGTIDADALLSVTPPPQMPATMEAGTIYGYCVGEPWNQQAVFKGIGVPVVTDYEIWKDNPEKVFGVSKTWADENPNTHLRVVKAMIRAAKWLDDNNNGNRPEAVEILSRSEYVGADYDVIANSMTGTFEYEKGDKREVPDFNVFFRYNATYPYYSDAIWYLTQMRRWGQIAEPKSDRWFMDIAKKVYRPDIYAEAAKELIEEGKMTADMFPDFATEDGFKSPQTHFIDGITYDGSKPNEYLKKFEIGLKPEDKI

SEQ ID NO: 54431 - DNA, 1374 bp, Oceanobacter sp. RED65
  CDS (1)..(1374): transl_table=11
atgaaagccaaatctatattaaagcgatttatacgctataccagtttaagcgtcggccttagcgtcggcctaatgaattcagtctctgccgactatccggagaaagaagacctaaaattcggttttattaaattaacagacatggcaccactggccattgcgaaggaaaaaggattctttgaggacgaaggcctttacgtacaattagaagctcaagcgaactggaaagttttattggaccgagtcatcacaggtgaactagatggcgctcatatgctagcaggtcaaccactaggggcgaccattggttttggtacacaagctcacatcattacggcgttttccatggatctaaacggaaacggtattacggtttccaatgatgtttgggaaaaaatgaaaaaaaacattccccataagaacggtaagccagtccaccccatcaaggccgattacctaaaaccgatcattgatgattataaaaaagacggtaaagcgttcaatatgggcatggtatttcctgtctctactcacaactatgaattacgttattggctggcagctggcggtatccacccaggatattatgcaccgcataaaggcgataatagtggcaccatcaacgctgacgcaatgctatctgtgacgccgccaccgcaaatgccatcgactttagaagcaggcactattgaaggttactgtgtaggtgaaccttggaatcagcaagccgtatttaaaggtattggtgttcctgtgattactgactatgaaatttggaaaaacaatccagaaaaagtatttggtgtcagcaaaaaatgggctgatgaatacccaattactcacaagtctgttgtaaaagcgatgattcgtgcggctaagtggctagatgataataacaatgcaaaccgcccagaagcagtcaaaatcctttctcaatctaattacgtaggcgcagattacgaagtcattgcaaactcaatgaccggcacctttgaatatgagaaaggtgacaaacgtgaagttccagacttcaacgtattcttccgttacaacgcgacttacccatactactcagatgctatttggtacctaacgcaaatgcgtcgttggggacaaattgccgaacataaagatgactcttggtacatggatattgcgaaaaaagtttatcgtccagacatctatgctgaagcagctaaagaactcattgctgaaggtaaaatgaacgcggctgattttcctgactttgcgaaagaagacggctttaagccaccacaaactgagttcatagacaacgtcacatatgatggcagtaaaccaaatgcttatctcaataaattaagcattggcctaaaagaaaaagacgttctttaa

SEQ ID NO: 54432 - protein, 457 aa, Oceanobacter sp. RED65
MKAKSILKRFIRYTSLSVGLSVGLMNSVSADYPEKEDLKFGFIKLTDMAPLAIAKEKGFFEDEGLYVQLEAQANWKVLLDRVITGELDGAHMLAGQPLGATIGFGTQAHIITAFSMDLNGNGITVSNDVWEKMKKNIPHKNGKPVHPIKADYLKPIIDDYKKDGKAFNMGMVFPVSTHNYELRYWLAAGGIHPGYYAPHKGDNSGTINADAMLSVTPPPQMPSTLEAGTIEGYCVGEPWNQQAVFKGIGVPVITDYEIWKNNPEKVFGVSKKWADEYPITHKSVVKAMIRAAKWLDDNNNANRPEAVKILSQSNYVGADYEVIANSMTGTFEYEKGDKREVPDFNVFFRYNATYPYYSDAIWYLTQMRRWGQIAEHKDDSWYMDIAKKVYRPDIYAEAAKELIAEGKMNAADFPDFAKEDGFKPPQTEFIDNVTYDGSKPNAYLNKLSIGLKEKDVL

SEQ ID NO: 54433 - DNA, 1266 bp, Pseudomonas putida GB-1
  CDS (1)..(1266): transl_table=11
atgggttgcaccaatccacccacagccttatcagtactggcgaggacccttgtgaacaccgcaccccgagcaacgcccctggcctgggtcaacggcagcgacgcgccagaaaagcccagcctgaacatcggttacatggccctgaccgactgcgcgtcggtagtggtcgccgccacccagggcttcgcccagcagcacggccttactctcaatctcaagcgccagggctcgtgggccgggttacgcgacaagctggtcagcggcgaactggacgccgcgcattgcctgtatggcctggtctacgccgtacacctgggcatcggtggcgtgcccgcctacgacatggccgtgctcatggggctgaaccagaacgcccagaccatcaacctgtcgccggccctgcagcgcaagggcgtgaccaaccctgaagcgctggcgcgcctggtgcaccagcatggcgcacgcctgacattcgcccagaccttccccaccggcacccatgccatgtggctgtattactggctggccagccaaggtatccacccactgcgcgacgtcgacagcgtagtggtgccaccggcgcagatggctgcacacatccaggccgggcgcattgacggtttctgcgcgggtgaaccgtgggccgccgacgctgtggccaagggccaaggcttcaccttggccaccagccagtcgatctggccggatcacccggaaaaggtcctggcctgcgcgcgcgcctttgccgagcaataccccaacagtgcccgcgcgctgatcaaggcgatcctcgcggccagccggttcatcgagcaaagcccggaaaaccgccgcagcaccgcgcaactgctcagtggcagcgcctatctggataccccactggacaccatagaaccgcggctgctcggccactatcaggacggcctgggcaaccattggcaagacccgcacgccctgcgcctgttcgaccagggtcgggccaactggccctacctgtccgacggcatgtggttcatgacccagttccgccgctgggggctgctgcgcgaagaccccgactacttgggcgtggcccgtcaggtccaccagctgcggctgtacagtgaggccgcgcaaagcctgggcatcgcctgcctggagctaccgatgcgcagcagcctgctgatcgacggcacccgctgggacggcagcgacccctacggctatgcccgcagtttcagcctgcacgccttgggcgaccagcccaatgcccgtgtcggcctgtga

SEQ ID NO: 54434 - protein, 421 aa, Pseudomonas putida GB-1
MGCTNPPTALSVLARTLVNTAPRATPLAWVNGSDAPEKPSLNIGYMALTDCASVVVAATQGFAQQHGLTLNLKRQGSWAGLRDKLVSGELDAAHCLYGLVYAVHLGIGGVPAYDMAVLMGLNQNAQTINLSPALQRKGVTNPEALARLVHQHGARLTFAQTFPTGTHAMWLYYWLASQGIHPLRDVDSVVVPPAQMAAHIQAGRIDGFCAGEPWAADAVAKGQGFTLATSQSIWPDHPEKVLACARAFAEQYPNSARALIKAILAASRFIEQSPENRRSTAQLLSGSAYLDTPLDTIEPRLLGHYQDGLGNHWQDPHALRLFDQGRANWPYLSDGMWFMTQFRRWGLLREDPDYLGVARQVHQLRLYSEAAQSLGIACLELPMRSSLLIDGTRWDGSDPYGYARSFSLHALGDQPNARVGL

SEQ ID NO: 54435 - DNA, 1179 bp, Azotobacter vinelandii
  CDS (1)..(1179): transl_table=11
atgacagaccaccacgcaaccttccagagcggatgcccgggcctgggtcgcggcagtgatgcccccgagaagagctcgatcaacctgggcttcatgccgctcaccgactccgcctcgctgatcgtcgccgcgacccagggtttcgccgaaccctatgggctgaccctcaatctcaagcgccaggtatcctggtcgggcctgcgcgacaagttgctcagcggcgaactggatgccgcccagggactgtacggactgatctacagcatgcagctcggcatcggcggcgcaccggcgaccgacatggcggtgctgatgggcctcaaccagaacggccagagcatcaacctgtcgaccccgctccggcaagcgcgggtgtgcagtggcgagacactggtccggcatgtgcgccagagcagcgcgaacgtcaccctggcccagacctttccgaccggcacccatgccctctggctctactactggctcgccagcctgggcatccaccccctcgcggacgtgaacaccctggtggtgccgccgccgcagatggtcgagcacttgcgcgccggccgatcgacggtttctgcgccggagagccctgcgggcccacgcatcgaccagggcatgggtttcaccatcgctaccagccagtcgatctggccggaccacccggagaagtcctcggctgcaccgtgcttcgccgagcagtaccccaataccgcccgcgccctgatcatggccgtgctgaacgagccgcttatcgacgccagcgaagagaacaaggccggcaccgcgcaactgatcagcgccaacggatacgtggccgcaccgcgccaggtgatcgaaccgcgctttctcggcgactacgaggacggcaacggcatgcctggcgcggacagcatgccctgcgctttcatgggcgacggcgaggtcaacctgccctatctctccgacggtctctggttcatgacccagttccgccgttggggactgctgcgcgaagacccggattacctggccatcgccactcgggtgcagcagctcgaactgtatcgcgatgccgccggcgctctcggcatggcgcaccgccacggccatgcgcacgccaccctgctggacggcaggcgctgggacggctccgacccgcggcctatgcccgcagcttcgacctccacgccctga

SEQ ID NO: 54436 - protein, 392 aa, Azotobacter vinelandii
MTDHHATFQSGCPGLGRGSDAPEKSSINLGFMPLTDSASLIVAATQGFAEPYGLTLNLKRQVSWSGLRDKLLSGELDAAQGLYGLIYSMQLGIGGAPATDMAVLMGLNQNGQSINLSTPLRQARVCSGETLVRHVRQSSANVTLAQTFPTGTHALWLYYWLASLGIHPLADVNTLVVPPPQMVEHLRAGRSTVSAPESPAGPRIDQGMGFTIATSQSIWPDHPEKSSAAPCFAEQYPNTARALIMAVLNEPLIDASEENKAGTAQLISANGYVAAPRQVIEPRFLGDYEDGNGMPGADSMPCAFMGDGEVNLPYLSDGLWFMTQFRRWGLLREDPDYLAIATRVQQLELYRDAAGALGMAHRHGHAHATLLDGRRWDGSDPRPMPAASTSTP

SEQ ID NO: 54437 - DNA, 1257 bp, Klebsiella oxytoca
  CDS (1)..(1257): transl_table=11
atgggcgataagttttcgatttcacggcgacgtttattacagacgggggcggcgctgggcggcgcgatgctgctccccggcataatgcaggcggcgtgggcggctgggtcggataaaccggaacagaccaccgtgcgggtggggtttattccgctaaccgactgcgctcccttagccattgcctccctgaaggggttcgataaaaagtacggtatcaccctcgtgccgagcaaagaggccagctgggccgcggtgcgcgacaagctggttgccggagagctcgacgccgcgcacattttgtacggcatgctctacggcctggagctggggatcgccagtaaaccgcaggcgatggccaacctgatgacccttaaccgcaacggccaggcgattacgctctccagcgagctgcaggaacagggcgtcaccgacctgagcgggctgaaaaaacggatcggtcagcacgcgccgggcagctacaccttcgcccacacctttcccaccggtacccacgcgatgtggctttactactggctggcgagcggcggaattaacccattcgccgatattcgcaccgtcgtcgtgccgccgccgcagatggtgatgaacatgcgcatcggcaacatgagcggcttttgcgtcggcgagccgtggaacgcgcgcgccattaacgatcgtatcggcttcaccgccgccacttctcaggatatctggccggaacacccggaaaaaattctcggcacccgcagcgaatgggttacgcgtcatcccaacaccgcgcgcgcgctggtagcagcgctgatggaggcccagcgctggattgaagcctccgccgacaacacccgcgaaacggcgcgcctccttgccagacgcgcgtggctgaacaccaaagagcagtacctcaccgggcgcatgctcggcgaatacgacaacggtatcggccgccgctggcaggacgcgcatccgatgcgcttctacgaacagggggaagtgagttttccgtggctctcggacggcatgtggtttttgacccagttccgccgttggggattgctgaagtcggcgccggattatctggcggtggcccagcgcattaaccggattgacgtctggaaagaggccgcccaggcggtcggcggcatcagcgcgccgacgcaggcgatgcgcagcagtacgctgatcgatggcaaggtctggaatggggtcgatccggaaggctacgcccgcagtttcgcgattcaacgtaagggggcatga

SEQ ID NO: 54438 - protein, 418 aa, Klebsiella oxytoca
MGDKFSISRRRLLQTGAALGGAMLLPGIMQAAWAAGSDKPEQTTVRVGFIPLTDCAPLAIASLKGFDKKYGITLVPSKEASWAAVRDKLVAGELDAAHILYGMLYGLELGIASKPQAMANLMTLNRNGQAITLSSELQEQGVTDLSGLKKRIGQHAPGSYTFAHTFPTGTHAMWLYYWLASGGINPFADIRTVVVPPPQMVMNMRIGNMSGFCVGEPWNARAINDRIGFTAATSQDIWPEHPEKILGTRSEWVTRHPNTARALVAALMEAQRWIEASADNTRETARLLARRAWLNTKEQYLTGRMLGEYDNGIGRRWQDAHPMRFYEQGEVSFPWLSDGMWFLTQFRRWGLLKSAPDYLAVAQRINRIDVWKEAAQAVGGISAPTQAMRSSTLIDGKVWNGVDPEGYARSFAIQRKGA

SEQ ID NO: 54439 - DNA, 1329 bp, Phormidium laminosum
  CDS (1)..(1329): transl_table=11
atgtctagtctctctcgtcgcaaattcatcttcacggctggagtcaccgctggggcaacgatcctagcgaatggatgcagcggtggctcttcgccctcagataccagcagccccgccgccagcgctcccctggcgcccgcaccagtggccgcagccgacacgcccgaagtcacgactgccaagctgggtttcatttgccctgacggactcgctccactgattattgccaaggaaaaaggcctatttgccaagtatggaatgcccgacgtggaagtgctaaagcaggcatcctgggccgtcacccgcgacaacctagaactgggatcgggcggcggcggcatcgatggggcacacatccttacgcccatgccttatctgatgtcggcaggtacgatcaccaagggcaaccagaaagtgccgatgaatattctggcaaggctgaatgtcaacggtcaggggatttgtttggcaaacacctacaaggatctaaagattgggacagacagttcgccgctgaaggaagcgtttgccaaggcaaaagcagagaagggcgaaatcaaagcagccgtgacgtttcccggtgggacgcacgacctgtggatgcgctattggctgtcagcgggcggtattgatcccgacaaggatatttcgaccatcgtggtgccgccgccccagatggtggccaacatcaaggtcaacaacatggagactttttgtgtgggcgaaccctggcccgcccaaacggtgaaccaaggtctcggctataacgcaatgaccacgggtgaactttggaaagaccatcctgaaaaggcatttgcgatgcgggccgactgggtagagcaacatcccaaggcagcaaaggcgctgctaatggcagtgcaagaggcccaaatctggtgtgatgaccctgccaacaaggaagaaatgtgccagattgtatcgggtcgcgagtggttcaaggttccagtagaggacattctagaacgctcgaagggtaattttgacctgggtgtgcgccagcttgaaaatagcccgctgctgatgaagttttggaatgatgcggcatcttatccgttcaaaagccatgacctgtggttcctgacagaagatatccgctggggctatttgcctgccgacaccgacaccaaagcactggtggacgcggtgaaccgggaagacctctggcgcgaagcggcgaaggcgatcggtcaagaagccgccattcccgccagcacctcgcgtggtgtggaaaccttctttgatggagtcaagtttgatcccgaaaaccccagtgcttatctcagcgctctgaagctcaagaaagtctga

SEQ ID NO: 54440 - protein, 442 aa, Phormidium laminosum
MSSLSRRKFIFTAGVTAGATILANGCSGGSSPSDTSSPAASAPLAPAPVAAADTPEVTTAKLGFICPDGLAPLIIAKEKGLFAKYGMPDVEVLKQASWAVTRDNLELGSGGGGIDGAHILTPMPYLMSAGTITKGNQKVPMNILARLNVNGQGICLANTYKDLKIGTDSSPLKEAFAKAKAEKGEIKAAVTFPGGTHDLWMRYWLSAGGIDPDKDISTIVVPPPQMVANIKVNNMETFCVGEPWPAQTVNQGLGYNAMTTGELWKDHPEKAFAMRADWVEQHPKAAKALLMAVQEAQIWCDDPANKEEMCQIVSGREWFKVPVEDILERSKGNFDLGVRQLENSPLLMKFWNDAASYPFKSHDLWFLTEDIRWGYLPADTDTKALVDAVNREDLWREAAKAIGQEAAIPASTSRGVETFFDGVKFDPENPSAYLSALKLKKV

SEQ ID NO: 54441 - DNA, 1287 bp, Rhodobacter capsulatus
  CDS (1)..(1287): transl_table=11
atgacccctttcctcacccgccgacgcttccttaccaccaccggcatggccgccaccgccgccgccgcgcaaagcctgatcccgggcggcgcctgggccacgacctcgggccccgaggtgagtggcgcgacgctgggctacatcgcgctcaccgacgcggcgccgctgatcatcgcgcaggaaaaggggctgttcgccaagcacggcttgcccgagatgaagatcgtcaagcaggccagctggggcgcgacccgggacaacatggcgcttggctccgcgaatggcggtattgacggcggccatatcctgcggcccaaggtgcatctttatgcgaccggcaaggtgatgcagggcggtgtgcccctgccgatggtcaacctgatggggctcaacgagcagtgtcagggcatttccgtcagccaggcccatgccgacaagggcgtggggctgaattccgcgccgctgaaagaggtctttgccgcgaaaaaggccgcgggcgccgaagtgccggtggcgatgaccttcccgggcggcacgcatgatctgtggatgcgctactggctggcggcgggcggcattgatccgacgaaggacgtcgatctgatcgtcgtgccgccgccgcagatggtggcgaacatgaaggtcggcaacatggaggccttttgcgtcggcgagccgtggaacgagcagctggtgaaccaaggcatcgggtttaccgcctgcacgacgggcgaaatctgggccaagcaccccgagaaggtcttgggcatgcgcgccgactgggtcgatgcgaacccgaaagccacgaaagccatcctgatggcagtgatcgaggcgcagatctggtgcgacgccgccgagaacaaggcggagatggcgcagatcatttccgcccggcaatggatgaaagtgccggtgcccgatatccttggtcggctgaacggcgagatcaattacggcaacggccgcaaggaggtgcgccccgatctggcgatgcggttctggggcgagaacggatcggcctccttcccgtggaaatcgctcgatacatggttcatcaccgaaaaccagcgctggggctatctgccgggcgatctggacgctgcggcgctggtggcgcagaccaaccgctccgatctgtggctcgccgccgccgccgacctgggcctgcccaccgcgggctttggggacagccggggcttcgagaccttctttgacggcaaagtcttcgatccggccaatcctgcggcctatctcgacagcctctcgatcaaggcgatggtgtaa

SEQ ID NO: 54442 - protein, 428 aa, Rhodobacter capsulatus
MTPFLTRRRFLTTTGMAATAAAAQSLIPGGAWATTSGPEVSGATLGYIALTDAAPLIIAQEKGLFAKHGLPEMKIVKQASWGATRDNMALGSANGGIDGGHILRPKVHLYATGKVMQGGVPLPMVNLMGLNEQCQGISVSQAHADKGVGLNSAPLKEVFAAKKAAGAEVPVAMTFPGGTHDLWMRYWLAAGGIDPTKDVDLIVVPPPQMVANMKVGNMEAFCVGEPWNEQLVNQGIGFTACTTGEIWAKHPEKVLGMRADWVDANPKATKAILMAVIEAQIWCDAAENKAEMAQIISARQWMKVPVPDILGRLNGEINYGNGRKEVRPDLAMRFWGENGSASFPWKSLDTWFITENQRWGYLPGDLDAAALVAQTNRSDLWLAAAADLGLPTAGFGDSRGFETFFDGKVFDPANPAAYLDSLSIKAMV

SEQ ID NO: 54443 - DNA, 1389 bp, Azospirillum brasilense
  CDS (1)..(1389): transl_table=11
gtgatccgacttcccgcctccccccgcaccgccctgctgtccgccgccgccacgctggcgttgatgctcgggtccgcccaggccgctccgctcgacgtggagaaggaccagctcaagctgggcttcatcaagctgaccgatatggccccgctcgccatcgccgcggagaagggcttcttcgaggacgagggcctgtcggtgacgctggagccgcaggccaactggaaggtgctgctcgaccgtgtgatctccggggagctggacggcgcccacatgctggccggccagccgctgggggccaccatcggcttcggcacccaggccaacgtggtgaccgccttctcgatggacctgaacggcaacggcatcaccctgtccaacgaggtgtgggagcggatgaagcccaacctgcccaaggggccggacggcaagccgctgcacccgatcaaggccgacgcgctgaagccggtcatcgcccagtaccgggcagagggcaagcccttcaccatgggcatggtcttccccgtctccacccacaattacgagctgcgctactggttggccgccggcggcatcaaccccggctactacgcgcccaacgacgtgtcgggccagatccaggccgacgcgctgctctccgtcaccccgccgccgcagatgccggcgacgctggaggccgggaccatcttcggctacagcgtcggcgagccgtggaaccagcaggcggtgatgaagggcatcggcgtgccggtcatcaccgacaccgagatctggaagaacaacccggagaaggtcttcggcgtcaccgagggctgggccgccaagaaccccaagacccatctggcgctggtcaaggcgctgatccgcgccgccatgtggctggacgagaacggcaacgccaaccgcgccgaggcggtgaagatcctggccaagtcggagtatgtgggggccgacgccaaggtcatcgccaactcgatgaccgggaccttcgagtatgagaagggcgacaagcgggcggttcccgacttcaacgtcttcttccgctacaacgccacctatcccttctactccgacgccgtctggtacctgacgcagatgcgccgctggggccagatcgccgaggccaagccggacgcctggtatgacgagaccgcccgcaaggtctacaagccggagatctacctgaaggccgcgcggctgctggtggaggagggcaaggccaaggaggccgacttcccctggaccagcgacggctacaagccgctggataacggattcatcgacggcatcgcctacgacggccgcaagcccaacgagtacctgacgaagctgcccatcggcctgaagggcgggcaggcggtgcagggtgggcaactggtcggcggttga

SEQ ID NO: 54444 - protein, 462 aa, Azospirillum brasilense
MIRLPASPRTALLSAAATLALMLGSAQAAPLDVEKDQLKLGFIKLTDMAPLAIAAEKGFFEDEGLSVTLEPQANWKVLLDRVISGELDGAHMLAGQPLGATIGFGTQANVVTAFSMDLNGNGITLSNEVWERMKPNLPKGPDGKPLHPIKADALKPVIAQYRAEGKPFTMGMVFPVSTHNYELRYWLAAGGINPGYYAPNDVSGQIQADALLSVTPPPQMPATLEAGTIFGYSVGEPWNQQAVMKGIGVPVITDTEIWKNNPEKVFGVTEGWAAKNPKTHLALVKALIRAAMWLDENGNANRAEAVKILAKSEYVGADAKVIANSMTGTFEYEKGDKRAVPDFNVFFRYNATYPFYSDAVWYLTQMRRWGQIAEAKPDAWYDETARKVYKPEIYLKAARLLVEEGKAKEADFPWTSDGYKPLDNGFIDGIAYDGRKPNEYLTKLPIGLKGGQAVQGGQLVGG

SEQ ID NO: 54445 - DNA, 1332 bp, Synechococcus sp
  CDS (1)..(1332): transl_table=11
atgagtcaattttctcggcgcaaattcctgttgacggcgggcggaactgcagcagcagccctctggctcaatgcctgcggtagcaacaacagctccactgatacgactggttcgacttcaaccccggctcccagcggtacgagtggcggcgatgcgccagaagtcaaaggtgtgaccttgggcttcattgccctgaccgatgcagcgccggtgatcatcgccctcgaaaaaggtttgttcgccaagtacggcctacccgacaccaaggtcgtcaagcaaacctcttgggctgtcacccgcgacaaccttgagttgggcagcgatcgcggcggcatcgacggtgcccacatccttagcccaatgccctacttgctgacggcgggcacgatcaccaagtcgcagaagccgctgccgatgtacatcttggcgcgactcaatacccaaggtcagggcatttcgctttccaacgagtttctggctgaaaaggttcagattaaggatccaaaactgaaggcgatcgccgaccagaagaaagcctcaggcaaactgctgaaagcagcagtcactttccctggcggtacccacgacctctggatgcgctactggctggcagccaatggcattgatcccaacaatgacgccgacctggtggtgattccgccgccacagatggtcgccaacatgcagaccggtaccatggacaccttctgtgtgggtgagccgtggaatgcacgcttggtcaacaaaaaactcggttacaccgctgctgtgactggcgaactctggaagttccaccccgaaaaagcgctgacgattcgcgcagattgggcagacaaaaatcccaaagcaacaatggcactgctcaaggctgtgcaagaagcccaaatctggtgcgaagatcccgccaacttggatgagctctgccaaatcactgctcaagacaaatacttcaaaaccagcgtcgaagacatcaaaccccgcctccaaggcgacatcgactatggcgatggccggtcggtcaaaaactctgacctgcggatgcgcttctggagtgaaaacgcctccttcccctacaagagccatgatctctggttcctgactgaggacattcgctggggttatctgcccgcttcgaccgatacaaaagccttgatcgagaaggtcaaccgtagcgatctctggcgcgaagctgctaaggcgattggtcgcgagcaagatattccggctagcgattcccggggggtagagaccttctttgacggtgtcaccttcgaccctgaaaatccccaggcctatctcgacggtctcaagttcaaagccatcaaagcctaa

SEQ ID NO: 54446 - protein, 443 aa, Synechococcus sp
MSQFSRRKFLLTAGGTAAAALWLNACGSNNSSTDTTGSTSTPAPSGTSGGDAPEVKGVTLGFIALTDAAPVIIALEKGLFAKYGLPDTKVVKQTSWAVTRDNLELGSDRGGIDGAHILSPMPYLLTAGTITKSQKPLPMYILARLNTQGQGISLSNEFLAEKVQIKDPKLKAIADQKKASGKLLKAAVTFPGGTHDLWMRYWLAANGIDPNNDADLVVIPPPQMVANMQTGTMDTFCVGEPWNARLVNKKLGYTAAVTGELWKFHPEKALTIRADWADKNPKATMALLKAVQEAQIWCEDPANLDELCQITAQDKYFKTSVEDIKPRLQGDIDYGDGRSVKNSDLRMRFWSENASFPYKSHDLWFLTEDIRWGYLPASTDTKALIEKVNRSDLWREAAKAIGREQDIPASDSRGVETFFDGVTFDPENPQAYLDGLKFKAIKA

SEQ ID NO: 54447 - DNA, 20 bp, Artificial sequence
  primer
atgagtaatttttcccgaag

SEQ ID NO: 54448 - DNA, 25 bp, Artificial sequence
  primer
ttaagctttaatagacttaattttc

SEQ ID NO: 54449 - protein, 457 aa, Artificial sequence
  consensus sequence
  Variant (2)..(7): Xaa in position 2 to 7 is any amino acid
  Variant (11)..(11): Xaa in position 11 is any amino acid
  Variant (13)..(13): Xaa in position 13 is any amino acid
  Variant (15)..(15): Xaa in position 15 is any amino acid
  Variant (17)..(20): Xaa in position 17 to 20 is any amino acid
  Variant (22)..(24): Xaa in position 22 to 24 is any amino acid
  Variant (26)..(30): Xaa in position 26 to 30 is any amino acid
  Variant (32)..(40): Xaa in position 32 to 40 is any amino acid
  Variant (41)..(41): Xaa in position 41 is any or no amino acid
  Variant (44)..(46): Xaa in position 44 to 46 is any amino acid
  Variant (49)..(52): Xaa in position 49 to 52 is any amino acid
  Variant (54)..(55): Xaa in position 54 to 55 is any amino acid
  Variant (56)..(59): Xaa in position 56 to 59 is any or no amino acid
  Variant (61)..(62): Xaa in position 61 to 62 is any amino acid
  Variant (64)..(64): Xaa in position 64 is any amino acid
  Variant (66)..(74): Xaa in position 66 to 74 is any amino acid
  Variant (76)..(89): Xaa in position 76 to 89 is any amino acid
  Variant (90)..(95): Xaa in position 90 to 95 is any or no amino acid
  Variant (97)..(98): Xaa in position 97 to 98 is any amino acid
  Variant (100)..(128): Xaa in position 100 to 128 is any amino acid
  Variant (129)..(146): Xaa in position 129 to 146 is any or no amino acid
  Variant (148)..(149): Xaa in position 148 to 149 is any amino acid
  Variant (152)..(153): Xaa in position 152 to 153 is any amino acid
  Variant (156)..(160): Xaa in position 156 to 160 is any amino acid
  Variant (165)..(166): Xaa in position 165 to 166 is any amino acid
  Variant (169)..(169): Xaa in position 169 is any amino acid
  Variant (171)..(172): Xaa in position 171 to 172 is any amino acid
  Variant (173)..(186): Xaa in position 173 to 186 is any or no amino acid
  Variant (188)..(193): Xaa in position 188 to 193 is any amino acid
  Variant (196)..(196): Xaa in position 196 is any amino acid
  Variant (199)..(204): Xaa in position 199 to 204 is any amino acid
  Variant (206)..(209): Xaa in position 206 to 209 is any amino acid
  Variant (210)..(210): Xaa in position 210 is any or no amino acid
  Variant (217)..(225): Xaa in position 217 to 225 is any amino acid
  Variant (226)..(227): Xaa in position 226 to 227 is any or no amino acid
  Variant (229)..(237): Xaa in position 229 to 237 is any amino acid
  Variant (239)..(240): Xaa in position 239 to 240 is any amino acid
  Variant (245)..(255): Xaa in position 245 to 255 is any amino acid
  Variant (256)..(256): Xaa in position 256 is any or no amino acid
  Variant (258)..(261): Xaa in position 258 to 261 is any amino acid
  Variant (263)..(265): Xaa in position 263 to 265 is any amino acid
  Variant (267)..(269): Xaa in position 267 to 269 is any amino acid
  Variant (271)..(271): Xaa in position 271 is any amino acid
  Variant (272)..(272): Xaa in position 272 is any or no amino acid
  Variant (274)..(303): Xaa in position 274 to 303 is any amino acid
  Variant (304)..(313): Xaa in position 304 to 313 is any or no amino acid
  Variant (315)..(337): Xaa in position 315 to 337 is any amino acid
  Variant (338)..(356): Xaa in position 338 to 356 is any or no amino acid
  Variant (358)..(359): Xaa in position 358 to 359 is any amino acid
  Variant (361)..(363): Xaa in position 361 to 363 is any amino acid
  Variant (366)..(366): Xaa in position 366 is any amino acid
  Variant (368)..(370): Xaa in position 368 to 370 is any amino acid
  Variant (374)..(387): Xaa in position 374 to 387 is any amino acid
  Variant (388)..(393): Xaa in position 388 to 393 is any or no amino acid
  Variant (395)..(395): Xaa in position 395 is any amino acid
  Variant (397)..(397): Xaa in position 397 is any amino acid
  Variant (399)..(402): Xaa in position 399 to 402 is any amino acid
  Variant (405)..(421): Xaa in position 405 to 421 is any amino acid
  Variant (422)..(443): Xaa in position 422 to 443 is any or no amino acid
  Variant (446)..(448): Xaa in position 446 to 448 is any amino acid
  Variant (450)..(452): Xaa in position 450 to 452 is any amino acid
  Variant (453)..(453): Xaa in position 453 is any or no amino acid
  Variant (455)..(456): Xaa in position 455 to 456 is any amino acid
EXXXXXXGFIXLXDXAXXXXAXXXGXXXXXGXXXXXXXXXXSWXXXRDXXXXGXXXXXXDXXHXLXXXXXXXXXGXXXXXXXXXXXXXXXXXXXXGXXIXXXXXXXXXXXXXXXXXXXXXXXXXXXXXXXXXXXXXXXXXXXXXXXAXXFPXXTHXXXXXYWLAXXGIXPXXXXXXXXXXXXXXXXDXXXXXXPPXQMXXXXXXGXXXXXCVGEPWXXXXXXXXXXXGXXXXXXXXXWXXHPEKXXXXXXXXXXXXPXXXXAXXXAXXXAXXWXXXXXXXXXXXXXXXXXXXXXXXXXXXXXXXXXXXXXXXXGXXXXXXXXXXXXXXXXXXXXXXXXXXXXXXXXXXXXXXXXXXPXXSXXXWFXTXXXRWGXXXXXXXXXXXXXXXXXXXXVXRXDXXXXAAXXXXXXXXXXXXXXXXXXXXXXXXXXXXXXXXXXXXXXXDGXXXDXXXXPXXY

SEQ ID NO: 54450 - protein, 22 aa, Artificial sequence
  protein pattern
  Variant (2)..(3): Xaa in position 2 to 3 is any amino acid
  Variant (4)..(4): Xaa in position 4 is Gly, Ser or Val
  Variant (5)..(5): Xaa in position 5 is Asn or Thr
  Variant (6)..(9): Xaa in position 6 to 9 is any amino acid
  Variant (10)..(10): Xaa in position 10 is Ile, Leu, Met or Val
  Variant (11)..(11): Xaa in position 11 is any amino acid
  Variant (15)..(15): Xaa in position 15 is any or no amino acid
  Variant (17)..(17): Xaa in position 17 is any amino acid
  Variant (18)..(18): Xaa in position 18 is any or no amino acid
  Variant (20)..(20): Xaa in position 20 is Ile, Leu, Met or Val
  Variant (21)..(21): Xaa in position 21 is any amino acid
FXXXXXXXXXXYWLXAXXGXXP

SEQ ID NO: 54451 - protein, 18 aa, Artificial sequence
  protein pattern
  Variant (2)..(2): Xaa in position 2 is Phe, Trp or Tyr
  Variant (3)..(3): Xaa in position 3 is any amino acid
  Variant (5)..(5): Xaa in position 5 is any or no amino acid
  Variant (7)..(7): Xaa in position 7 is any amino acid
  Variant (8)..(8): Xaa in position 8 is any or no amino acid
  Variant (10)..(10): Xaa in position 10 is any amino acid
  Variant (11)..(11): Xaa in position 11 is Ile, Leu or Met
  Variant (13)..(13): Xaa in position 13 is Glu or Gln
  Variant (14)..(15): Xaa in position 14 to 15 is any amino acid
  Variant (18)..(18): Xaa in position 18 is Gly or Asn
PXXSXDXXWXXTXXXRWX

SEQ ID NO: 54452 - DNA, 540 bp, Synechocystis sp.
  CDS (1)..(540): transl_table=11
atgaatatacccaactgggtaactgtttcccgtttattggctttacccctgctatttctttggctaccgactccagaagccgaaacccgttggtggggagtggggatttttttgctggccgccagcactgactggttggatggttacctagcccgccggttaaatcaggtgacggagttgggcaaattccttgatccgttggtggataaattactggtattagccccgttattaattttgttaacttggcaggtagttcccccctgggcagtgggtttaattttggccagagagttagtcatcgccggttggcgggttaatccccagcttgccagtcaaacagaaattgccggggccaatctctggggcaaagtaaaaaccgttacccaaatcacggcgatcgccttgttgttagcaccgttgccagaaatttatggccaaattggcacggtcatcttctggatagcagtggttttaacgctcatttccggggcaatctacctgtttcctccgggaaacaacaaagtcgaggctggctaa

SEQ ID NO: 54453 - protein, 179 aa, Synechocystis sp.
MNIPNWVTVSRLLALPLLFLWLPTPEAETRWWGVGIFLLAASTDWLDGYLARRLNQVTELGKFLDPLVDKLLVLAPLLILLTWQVVPPWAVGLILARELVIAGWRVNPQLASQTEIAGANLWGKVKTVTQITAIALLLAPLPEIYGQIGTVIFWIAVVLTLISGAIYLFPPGNNKVEAG

SEQ ID NO: 54454 - DNA, 633 bp, Zea mays subsp. mays
  CDS (1)..(633)
atgatgatgcccaaggaggagccggcgaccgcgccgcccaggttgctcacgctgcccaccgtgctcaccattggccgcgtcgctgctgtgccgcttctgatcagcactttctacatggagggtccatgggcagctacggccacaacaggcatctttcttgctgctgcagtcactgattggctagatggttatatcgctagaaagatgcagctaggaacaccttttggtgcatttcttgatcctgtggctgacaagcttatggtagccgcaacattagttttactatgcaccaaacctttggaaacatcactgctcaatgatgggccatggcttctaacagtcccttccattgctatcattgggagagagattacaatgtcagctgtgagagaatgggccgcatctcagaatagtgaagctcttgaggctgttgcagttaacaacttagggaagtggaagacagcaacgcagatgacagcattgactctgcttctcgccagcagagacccaagtgtacctgcgcaaggtgctctagttgcccccggtgttgctctactttacatttccgctggactcgccatatggtccctagtggtgtacatgagaaagatatggcggatacttctaaaatag

SEQ ID NO: 54455 - protein, 210 aa, Zea mays subsp. mays
MMMPKEEPATAPPRLLTLPTVLTIGRVAAVPLLISTFYMEGPWAATATTGIFLAAAVTDWLDGYIARKMQLGTPFGAFLDPVADKLMVAATLVLLCTKPLETSLLNDGPWLLTVPSIAIIGREITMSAVREWAASQNSEALEAVAVNNLGKWKTATQMTALTLLLASRDPSVPAQGALVAPGVALLYISAGLAIWSLVVYMRKIWRILLK

SEQ ID NO: 54456 - DNA, 1109 bp, Zea mays
  CDS (73)..(699)
  misc_feature (20)..(20): n is a, g, c or t
ggcacgaggggcaggaagangcgggtgccagcggtgaacgggctcgccaaggacgcgcctgcggtgaacgggatgcgcaaggaggagcccgtggccgcgcctcccaggttgctcaggctgcccactgtgctcaccattgggcgcgtcgctgctgtgcctcttctgatcagcactttctacatggagggtccatgggcagctatgggcacaacaggcatcttccttgctgccgcagtcactgattggctagatggttatattgctagaaagatgcagctaggaacaccttttggtgcatttcttgatcctgtggccgacaagcttatggtagcggcaacattagttttgctatgcaccaaacctttgggatcatcactgctcaatgatgggccatgggttctaacagtcccttccattgccatcattgggagagagattacaatgtcagctgtgagagagtgggctgcatctcagaataacaaagttcttgaggctgttgcagttaacaatttaaggaagtggaagacagcgacgcagatgacagcattgactctgcttctcgcaagcagagacccaagtctacctgcgcaaggcgctctagttgcccccggtgttgctctactttacgtccccacgggactcgccgtatggtccctagtggtgtacatgagaaagatatggcggatactgctcaaatagtattagcacaatatatatatagtgtaatagaagaaacaagcaaggcgagcatccgttcgtgatcgtacaacttttggaaggctgttgggtggcctgagccctagagctggttgggatcctcattcatctgtaacttgtgcgtcagtttttggtggatttgccgctaaatttgctgaggcatgccaggatcctattagatttttagaaacaagacatggtgtgaccctccgtgcgtaatgagaattcttagaaacaagaagacatggtgtggccctgcgtgcgtaatgagatactagtctgcgatgcagaagattgtaaccttatacaaatacaatctggaggtttctgcgtgtggagttctaccgttgtactctacacataatatcataataaaaaaaaaaaaaaaaaaa

SEQ ID NO: 54457 - protein, 208 aa, Zea mays
MRKEEPVAAPPRLLRLPTVLTIGRVAAVPLLISTFYMEGPWAAMGTTGIFLAAAVTDWLDGYIARKMQLGTPFGAFLDPVADKLMVAATLVLLCTKPLGSSLLNDGPWVLTVPSIAIIGREITMSAVREWAASQNNKVLEAVAVNNLRKWKTATQMTALTLLLASRDPSLPAQGALVAPGVALLYVPTGLAVWSLVVYMRKIWRILLK

SEQ ID NO: 54458 - DNA, 543 bp, Clostridium difficile 630
  CDS (1)..(543): transl_table=11
atgaacttgcctaacaagttaactttgtttagaatatttttaataccagtatttgttttaattatgttgctcaatgtaccaaataaatttttaatagcttgtattatttttataatagcttcaattactgatgctttagatggaaaaatagctagaaaatacaatctagtcactgactttggaaaatttatggacccattagcagataagctattggttatttcagcacttacatgtatgatagaagaccatcttgtaagtagttggatggtaattataatagtggctagagagcttacagttagcatattaagagctatagctgctgctgatggaaaagtaattgctgctggaaacagtggaaaacttaaaacgataactcaaatggtatctatagtgtttttattgttaggtgctcagtttgaaaatgtattgatattaaatattggtgaaattctcattcttatagctacactacttacattatattctggatgggaatatctatataaaaataaagagctttttatgtcttctaagtaa

SEQ ID NO: 54459 - protein, 180 aa, Clostridium difficile 630
MNLPNKLTLFRIFLIPVFVLIMLLNVPNKFLIACIIFIIASITDALDGKIARKYNLVTDFGKFMDPLADKLLVISALTCMIEDHLVSSWMVIIIVARELTVSILRAIAAADGKVIAAGNSGKLKTITQMVSIVFLLLGAQFENVLILNIGEILILIATLLTLYSGWEYLYKNKELFMSSK

SEQ ID NO: 54460 - DNA, 990 bp, Oryza sativa (japonica cultivar-group)
  CDS (1)..(990)
atggcgttcctcaaaaccctgaaccctctcctccgcagaagccccaccccgatcccgaacccccgctccctcctttccctcgacgccttcctcgccgcctcctcccccaccgccgcctcccacgccaccgcgcccgcgcccttcgccgccgcggcgcaccaccacgtccccatccgctcggggggcccgctgttcctctcctcgccgccatggatgctctcccagtccgccacgccgctcaccgccgcggccgccgctctccgcgccaggctccggagggcccgcgcgctcgccggcggcggcgcccaggctgtcgcggacgccgtagggtgggagcccaggcggatctccagagatgagagcgaggtggcggaggcggtgacgggtggaagggagaggttcctgaatctgcccaatctggtgtcgattggacgcatggcgtcggggccggttattggatggatgattgtgaatgaatggtatcttcctgcttttggcacattggctttgtctggtgcaagtgattggttagatggctttttagcgagaaagatgggcatcaattctgtgtttggatcttatctggacccattagctgataaggtgttgattggctgtgttgccatagcaatggttgaaaaagacctcttacatcctgggcttgttggcttggttgttgtaagagacttgctccttgtgggtggtgctgtctacaaacgagcttccagtctgggatggaagtggaacagttggtcagactttgttaacttagatgcaattcaccgtgagaaggtcaaacctctttttatcagcaaggtgaacacagttttccaattgatgttggttgctgctgctctcctccagccagaatttggcacagaggagactcagaattatattacagtgttgagctggcttgtagcttctacaacaattgcatccacagtaggttatggtatcaaatatcgtcagattagaccaagaagatga

SEQ ID NO: 54461 - protein, 329 aa, Oryza sativa (japonica cultivar-group)
MAFLKTLNPLLRRSPTPIPNPRSLLSLDAFLAASSPTAASHATAPAPFAAAAHHHVPIRSGGPLFLSSPPWMLSQSATPLTAAAAALRARLRRARALAGGGAQAVADAVGWEPRRISRDESEVAEAVTGGRERFLNLPNLVSIGRMASGPVIGWMIVNEWYLPAFGTLALSGASDWLDGFLARKMGINSVFGSYLDPLADKVLIGCVAIAMVEKDLLHPGLVGLVVVRDLLLVGGAVYKRASSLGWKWNSWSDFVNLDAIHREKVKPLFISKVNTVFQLMLVAAALLQPEFGTEETQNYITVLSWLVASTTIASTVGYGIKYRQIRPRR

SEQ ID NO: 54462 - DNA, 990 bp, Oryza sativa (japonica cultivar-group)
  CDS (1)..(990)
atgcccccatccgtcgccacccacgcatccctcctcctcaaagccgccgccgcagccgcgcacctccaccccaagcccttcttctccccacgcgcggcgccgccgcggatcccgtctgcccccgcgccgccggccgcaggaggcagccgctaccgtccgacgacgacgacgacggcggcggcgacggcgaccagcgccaccgccgcgtgccgctggttccggtggcccccgcccgcgcaggcgcccgtgaggggtctgtgctccttgccgcattctggcggtggcggtggtggtggtgagggtatgggatctgaaggggtcgggaggaggaggcgggtggtggcgcctgcggtgaacggggtggcgaaggacggggcgccacagccgcctccgcccaagctgctcacgctgcccaccgtgctcaccattggccgcgtcgccgccgtgccgctcctgataagcactttctacatggaggggccttgggcagcaactgcgacaactggcatcttccttgctgctgcagtcactgattggctagatggttatattgcgagaaagatgcagttaggaacaccttttggtgcatttcttgatcctgtggctgacaagcttatggtagctgcaacattagtgttgctgtgcaccaaacctttggaaatttcactgctcagagatgggccatggcttctaacggttcctgccattgctattattgggagagagatcacaatgtcagctgtgagagaatgggctgcgtctcagaataccaaagttcttgaggctgtggcagttaacaatttggggaagtggaagaccgcaacgcagatgacagcattgactatcctccttgcgagcagagacaaaagtcttcctgcacaagatgctctggttacttccggcatcgcattgctttatgtatcagctggacttgccatatggtccctagtggtgtacatgagaaagatatggcggatacttctaaaatag

SEQ ID NO: 54463 - protein, 329 aa, Oryza sativa (japonica cultivar-group)
MPPSVATHASLLLKAAAAAAHLHPKPFFSPRAAPPRIPSAPAPPAAGGSRYRPTTTTTAAATATSATAACRWFRWPPPAQAPVRGLCSLPHSGGGGGGGEGMGSEGVGRRRRVVAPAVNGVAKDGAPQPPPPKLLTLPTVLTIGRVAAVPLLISTFYMEGPWAATATTGIFLAAAVTDWLDGYIARKMQLGTPFGAFLDPVADKLMVAATLVLLCTKPLEISLLRDGPWLLTVPAIAIIGREITMSAVREWAASQNTKVLEAVAVNNLGKWKTATQMTALTILLASRDKSLPAQDALVTSGIALLYVSAGLAIWSLVVYMRKIWRILLK

SEQ ID NO: 54464 - DNA, 597 bp, Mesorhizobium loti MAFF303099
  CDS (1)..(597): transl_table=11
atggcccagcgcgcgttcaacctgcccaacatgctgacctacgcccgcatcatcgcggtgccgctggtggtgctgtgcttttttctcgaaggtcatctgaaatcgagcgacttcgcccgctggtcggcgctggtcattttcctgctggcgtccgtcaccgattatttcgacggctattttgcgcgcgcctggcagcaaacctccaacatcggcaagatgctcgacccgatcgccgacaagctactggtcgcgacctgccttttgctgctggcggccgacaccgatcgccatgccggcattgccggctggtcgctgtgggcggccatcatcatcctgtgccgcgagatcctggtttctggcctgcgcgaatatctggcggcgctcaaggtctcggtgccggtgacgcagcttgccaagtggaagaccactatccagatggtcgccatcgccttcctgctggcgggaccggccggcgacaagatcttcccgctgacgacgcagaccggcctcgttttgctgtggatagccgcactcgtcacgctctacaccggctacgactatttccgcgccggcctcaagcacatcatggacgagtga

SEQ ID NO: 54465 - protein, 198 aa, Mesorhizobium loti MAFF303099
MAQRAFNLPNMLTYARIIAVPLVVLCFFLEGHLKSSDFARWSALVIFLLASVTDYFDGYFARAWQQTSNIGKMLDPIADKLLVATCLLLLAADTDRHAGIAGWSLWAAIIILCREILVSGLREYLAALKVSVPVTQLAKWKTTIQMVAIAFLLAGPAGDKIFPLTTQTGLVLLWIAALVTLYTGYDYFRAGLKHIMDE

SEQ ID NO: 54466 - DNA, 891 bp, Arabidopsis thaliana
  CDS (1)..(891)
atgctcagatccggtctggcttcgttaatcgtcgatgtcaatttgcggcgcacgttacgtccatccccaaccttttcttttccggcgcatcttagccgttgcattatcacttcccgttactcctcccgtacatctctaaggtttccgattcaaatatctcgccaccaacaccgtctatcctacttttcttcatcctcttcgtcggagcaaagcagaccaacttcctcttcccgaaacagtttcagtggtcacggtcagcttgatagtgatgataattcttcaccgcctccgtcgcaatcatcttccaaagttcttacattgcctaccgtattaacacttggtcgtgtcgccgccgtcccgcttctcgtcgcaaccttttacgttgatagttggtggggaacaactgctacaacaagcattttcattgcagcagccattacagactggcttgacggctatcttgcccgcaagatgaggttaggttctgcgtttggtgcctttttggatccagttgctgataagcttatggttgcagctacattgattttactgtgtacaaaacctatccaagttgctgaattaggaccacttccatggttattgaccgtaccttctattgcaatcattggtagggagattactatgtccgcagtaagagaatgggctgcatctcaaaatggaaagcttttagaggcagttgctgtaaataacttgggcaagtggaaaaccgccacgcagatgacagcactaaccatacttcttgcaagccgagatagcaatgttggatggctcgtagcttcaggtgctggcttgctttatgtatcagcaggactatctgtttggtctttagccgtttatatgaggaagatatggaaagtactaatgaagtag

SEQ ID NO: 54467 - protein, 296 aa, Arabidopsis thaliana
MLRSGLASLIVDVNLRRTLRPSPTFSFPAHLSRCIITSRYSSRTSLRFPIQISRHQHRLSYFSSSSSSEQSRPTSSSRNSFSGHGQLDSDDNSSPPPSQSSSKVLTLPTVLTLGRVAAVPLLVATFYVDSWWGTTATTSIFIAAAITDWLDGYLARKMRLGSAFGAFLDPVADKLMVAATLILLCTKPIQVAELGPLPWLLTVPSIAIIGREITMSAVREWAASQNGKLLEAVAVNNLGKWKTATQMTALTILLASRDSNVGWLVASGAGLLYVSAGLSVWSLAVYMRKIWKVLMK

SEQ ID NO: 54468 - DNA, 702 bp, Arabidopsis thaliana
  CDS (1)..(702)
atgggtgaagaagacaccgcgacggtggatcagaacagtttcggtggtggcaaagattcattgcttcgtaatcgtcattcgtcgccattgccttcaccgacacagctttcttctaaagtgattacattgcctaccgtattaacccttggccgtgtagctgccgttccgattctcgtcgccaccttttacgttgattgctggtggggaagaactgctacgacaagtattttcattgcagcagccattacagattggcttgatggatatattgcacggaagatgagattgggttctgaatttggtgcatttttggatccagtggcagataagcttatggtagcagctacattgatattgttgtgcactaaaccaatggtcgccgttgtcttaggaccagttccatggttagtgacagtaccttcaatcgccatcattggtagagagattactatgtctgcagtaagagaatgggctgcatctcaaaacggcaagctttcagaggctgttgctgtaaatagcttgggaaagtggaaaactgcaacgcagatgatagcgctaaccatacttcttgcaagccgggatagcagttttgagagactattaccgtcgggtattgggttgctctatgtatctgcagggctctctatatggtctttagttgtttatatgaggaagatatggagagtactgctaaagaagtag

SEQ ID NO: 54469 - protein, 233 aa, Arabidopsis thaliana
MGEEDTATVDQNSFGGGKDSLLRNRHSSPLPSPTQLSSKVITLPTVLTLGRVAAVPILVATFYVDCWWGRTATTSIFIAAAITDWLDGYIARKMRLGSEFGAFLDPVADKLMVAATLILLCTKPMVAVVLGPVPWLVTVPSIAIIGREITMSAVREWAASQNGKLSEAVAVNSLGKWKTATQMIALTILLASRDSSFERLLPSGIGLLYVSAGLSIWSLVVYMRKIWRVLLKK

SEQ ID NO: 54470 - DNA, 603 bp, Helicobacter pylori 26695
  CDS (1)..(603): transl_table=11
gtgtgtggcgcttggttttttggcgcgcgcgtttttgaatttttcacaagtctttttgaaagcatgaaagttttaaaactcctgcctaattttttaacaattttacgcattgtcttatccttatttttattatttttattgttaaacacgcgcacttattttagttttttaaccccctttcaaaccaatatgatctcttcattggtttttttgtttgccgcgctcacggatttattggacggctacatcgctagaagctataaagccaaatcgcgctttggggaaatctttgatcctttagcggataaaatccttattttgagcgcgtttttagggttagtttatttggatcgtgtgaatgcgtggatcccgtttgtgattttagggcgtgaattttttatttcagggcttagagtcttagccgctaatgagaaaaaggatattcctgtcaatgcgttaggcaagtataaaaccgtttctcaagtcgtggcgattggtgctttattggctgatgtaacttactcttatgcgcttgtggctatagcggtttttttaaccctttattcggggatagattacaccattaaatattataaatcttaa

SEQ ID NO: 54471 - protein, 200 aa, Helicobacter pylori 26695
MCGAWFFGARVFEFFTSLFESMKVLKLLPNFLTILRIVLSLFLLFLLLNTRTYFSFLTPFQTNMISSLVFLFAALTDLLDGYIARSYKAKSRFGEIFDPLADKILILSAFLGLVYLDRVNAWIPFVILGREFFISGLRVLAANEKKDIPVNALGKYKTVSQVVAIGALLADVTYSYALVAIAVFLTLYSGIDYTIKYYKS

SEQ ID NO: 54472 - DNA, 603 bp, Helicobacter pylori J99
  CDS (1)..(603): transl_table=11
gtgtgtggcgctcagttttttagggcgcgcgttcttgaatttttcacaagtctttttgaaagcatgaaagttttaaaactcctgcctaattttttaacgattttacgcattgtcttatccttatttttattgtttttattgttaaacacgcacacttattttagttttttaaccccctttcacatcaacatgatttcttcattggtttttttgtttgccgcgctcacggatttattggacggctatatcgccagaagctataaagccaaatcgcgctttggggaaatctttgaccctttagcggataaaatccttattttgagcgcgtttttagggttagtttatttggatcgtgtgaatgcgtgggtcccgtttgtgattttagggcgtgaattttttatttcagggcttagggttttagccgctaatgaaaaaaaggatattcctgtcaatgcgttaggcaagtataaaaccgtgtctcaagtcgtggcgattggcgctttattagccaatttaacttactcctatgtgcttgtggctatagcggtttttttaaccctttattcggggatagattacacgattaaatattataaatcttaa

SEQ ID NO: 54473 - protein, 200 aa, Helicobacter pylori J99
MCGAQFFRARVLEFFTSLFESMKVLKLLPNFLTILRIVLSLFLLFLLLNTHTYFSFLTPFHINMISSLVFLFAALTDLLDGYIARSYKAKSRFGEIFDPLADKILILSAFLGLVYLDRVNAWVPFVILGREFFISGLRVLAANEKKDIPVNALGKYKTVSQVVAIGALLANLTYSYVLVAIAVFLTLYSGIDYTIKYYKS

SEQ ID NO: 54474 - DNA, 579 bp, Bacillus halodurans C-125
  CDS (1)..(579): transl_table=11
gtgaacgtaccaaataagatcacgttatcacgaataggcttaatcccgttatttatgctgtttttgctcgcccccattccgttaggtacagcggtgctgttcggtgtggaaatccctgtttcgcatttagtcgccctgtttctgtttgtattagcggctgctactgattggcttgacggttattatgcgaggaaatggaagcttgtaactaattttgggaagttccttgatccgctggctgacaaactgctcgtgacggcggcattagtggggcttgtagaaattggaacaattccagcatggatggccatcatcatcattagccgtgagtttgctgtcacagggattcgtcttgtggccgcctctgacggagcagtgatcgcagcaagtaagctcggaaaatggaaaacggtctcgcaaatcgtggcgattattgcctgcttgctttataacgttccttttgctgcagtaggttttccttttatgataatcgcgttatgggttgctaccattttaacgattgtttcaggcgtcgattatttcctgaaaaacaaagagtttttgttgaaatctaagtag

SEQ ID NO: 54475 - protein, 192 aa, Bacillus halodurans C-125
MNVPNKITLSRIGLIPLFMLFLLAPIPLGTAVLFGVEIPVSHLVALFLFVLAAATDWLDGYYARKWKLVTNFGKFLDPLADKLLVTAALVGLVEIGTIPAWMAIIIISREFAVTGIRLVAASDGAVIAASKLGKWKTVSQIVAIIACLLYNVPFAAVGFPFMIIALWVATILTIVSGVDYFLKNKEFLLKSK

SEQ ID NO: 54476 - DNA, 573 bp, Lactococcus lactis subsp. lactis Il1403
  CDS (1)..(573): transl_table=11
atgaaagagaaaatacccaatcaattgacaatggcaaggatttttatgattccaatctttgtgattttattttatttaccagaaggtgcacattttaacggttttgtttcacaagaccatagttcagtgatgtgggttatcgcagcaattgtatttgccgtagcctcatttactgactggcttgatggatatctcgcccgtaaatggcacgttgtcagcaattttggtaaatttgctgacccattggccgataaaatgctcaatatggttgcctttgttgttctagttggacttcatgttgttccaatgtgggctgttgccattattatttgccgtgagcttgcggttacaggattgcgcctcttattggttgaacaaggtggagttgttatggcggctgcaatgcctggtaaaatcaaaactgccacacaaatgttgagtgttattttccttttcattggaaatcccttgtatataggaacaatcctcttttatgtttgtgtcctctttaccatttatagtggctatgactattttgctaaaaatatgcaagtttttagaaatgctgattaa

SEQ ID NO: 54477 - protein, 190 aa, Lactococcus lactis subsp. lactis Il1403
MKEKIPNQLTMARIFMIPIFVILFYLPEGAHFNGFVSQDHSSVMWVIAAIVFAVASFTDWLDGYLARKWHVVSNFGKFADPLADKMLNMVAFVVLVGLHVVPMWAVAIIICRELAVTGLRLLLVEQGGVVMAAAMPGKIKTATQMLSVIFLFIGNPLYIGTILFYVCVLFTIYSGYDYFAKNMQVFRNAD

SEQ ID NO: 54478 - DNA, 564 bp, Neisseria meningitidis MC58
  CDS (1)..(564): transl_table=11
atgccttggaatctccccatcttcctcacatggttgagggtcttgctcattcctgtcctgacagcccttttttacctgccttttccgtggttcgcggaggaaacgattaatctcaccgccgccgtcatttttgccgttgccgccttgaccgactggtttgacggatttttggcaaggttgtggaaacagacctcggatttcggcgccttcctcgatcccgttgccgacaagctgatggtcgccgtctctttgcttttactggtcaaactcgaccggacctatgttttgtttgccatgatcatcatcggcagggaaattaccatttccgcattgcgcgaatggatggcgcaaatgggcaaaaggaacagcgttgccgtcgccaccgtcggtaagtttaaaaccgccgcgcaaatgctggcaatcttcctgctgctgctgaattttcccgatttttatggatttaacctcgcattcatcggcaatgtattgatgtttatcgcatctttgctgacagtctggtcgatgctgtattatctgaaaatggcgtggaaagaaatcgcctga

SEQ ID NO: 54479 - protein, 187 aa, Neisseria meningitidis MC58
MPWNLPIFLTWLRVLLIPVLTALFYLPFPWFAEETINLTAAVIFAVAALTDWFDGFLARLWKQTSDFGAFLDPVADKLMVAVSLLLLVKLDRTYVLFAMIIIGREITISALREWMAQMGKRNSVAVATVGKFKTAAQMLAIFLLLLNFPDFYGFNLAFIGNVLMFIASLLTVWSMLYYLKMAWKEIA

SEQ ID NO: 54480 - DNA, 537 bp, Campylobacter jejuni subsp. jejuni NCTC 11168
  CDS (1)..(537): transl_table=11
atgaatttacccaatatcttggcgatttttagaatggttttagcgcctttgctattttttttgttaattcataaatttgaaaatattcatcaaagttggattaactattttgctgctttaactttttcattagcagctttaagtgattttttcgatggatacatcgcaagaacttggaaacaaactacaaaactaggcggaatcttagatccattagccgataaaatgcttgttttagcagcttttttagggcttttacttacaggaaaagctaatgaatgggtaatttatattatactagtaagggaattttttatcacaggttttagagttgtaatgatcagtgaaaatttaaatgtcaatgcttcttttgcaggcaaacttaaaaccgcttttcaaatgactgcgataggatttctaatcatggagtggataggcggagaaattctactttacatagctttgattttaactctttattctggatttgaatacatctatacttatataaaagctcagaaaaaaggagaaaaatga

SEQ ID NO: 54481 - protein, 178 aa, Campylobacter jejuni subsp. jejuni NCTC 11168
MNLPNILAIFRMVLAPLLFFLLIHKFENIHQSWINYFAALTFSLAALSDFFDGYIARTWKQTTKLGGILDPLADKMLVLAAFLGLLLTGKANEWVIYIILVREFFITGFRVVMISENLNVNASFAGKLKTAFQMTAIGFLIMEWIGGEILLYIALILTLYSGFEYIYTYIKAQKKGEK

SEQ ID NO: 54482 - DNA, 564 bp, Neisseria meningitidis Z2491
  CDS (1)..(564): transl_table=11
atgccttggaatctccctatcttcctcacatggttgagggtcttgctcattcctgtcatgacagcccttttttacctgccttttccgtggttcgcggaggaaacgattaatctcaccgccgccgtcatttttgccgttgccgccttaaccgactggtttgacggatttttggcaagactgtggaaacagacttccgatttcggcgccttcctcgatcccgtcgccgacaagctgatggttgccgtatcgctacttttactggtcaaactcgaccggacctatgttttgtttgccatgatcattatcggcagggaaattaccatttccgcattgcgcgaatggatggcgcaaatgggcaaaaggaacagcgttgccgtcgccaccgtcggtaagttcaaaaccgccgcgcaaatgctggcaattttcctgctgctgctgaatattcccgatttttacggatttaatcttgttgttatcggcaatgtattgatgtttatcgcatctttgctgacagtctggtcgatgctgtattatctgaaaatggcgtggaaagaaatcgcctga

SEQ ID NO: 54483 - protein, 187 aa, Neisseria meningitidis Z2491
MPWNLPIFLTWLRVLLIPVMTALFYLPFPWFAEETINLTAAVIFAVAALTDWFDGFLARLWKQTSDFGAFLDPVADKLMVAVSLLLLVKLDRTYVLFAMIIIGREITISALREWMAQMGKRNSVAVATVGKFKTAAQMLAIFLLLLNIPDFYGFNLVVIGNVLMFIASLLTVWSMLYYLKMAWKEIA

SEQ ID NO: 54484 - DNA, 636 bp, Xylella fastidiosa 9a5c
  CDS (1)..(636): transl_table=11
atgaaattgaccgtccccacttggttaacgctgctacggatcgtgatgatccctgtgctcattgtggtgttctatctaccttatcaatggagcaatattgtcgccacgggagtgtttgcgatcgctgcgattaccgactggcttgatggatggatcgcacgtcgttacgcgcaacattcgttattgggtgcgtttttagacccagttgcggacaaattgatggtggccatcgcattatttctcattgtgcaaggtcacccgacaccgtcgatggcattttgggcggcagtgatcgtcagtcgtgaaattgcagtgtcagcattgcgtgagtggatggccgaaattggtcatcgtgccaaggtgcgtgtagctgtccttggcaaagtgaagactacggctcaaatgattgcggtactgtgtctgctctattcggtgacacccgagaagaaggcgatccatcaaatatggtttggccacttgatcttccaagtcggttattggacattgttgatttccgcgttactgacactgtggtctggtttccagtatttgcatgctgcctggcctagtctacgtaccggaaaacctgtggtgattaaaacgcacatcagcaagaaccgaaaaattaatagttga

SEQ ID NO: 54485 - protein, 211 aa, Xylella fastidiosa 9a5c
MKLTVPTWLTLLRIVMIPVLIVVFYLPYQWSNIVATGVFAIAAITDWLDGWIARRYAQHSLLGAFLDPVADKLMVAIALFLIVQGHPTPSMAFWAAVIVSREIAVSALREWMAEIGHRAKVRVAVLGKVKTTAQMIAVLCLLYSVTPEKKAIHQIWFGHLIFQVGYWTLLISALLTLWSGFQYLHAAWPSLRTGKPVVIKTHISKNRKINS

SEQ ID NO: 54486 - DNA, 612 bp, Clostridium acetobutylicum ATCC 824
  CDS (1)..(612): transl_table=11
atgaatttagcaaataaattaactttaatgaggatttttttagttcctgtttttctaatattcattgtagtacgtcagattccatatggaagaagtatagctacagctattttcataattgctgcaataacggataaactggacggctatatagcaagaagtagaaatcaggtaactaaatttggtaagataatggatccacttgcagataagcttttggtatcttctgcactgatagctttagtagaatttcatgtaataccagcatggattgctattgtaataatagctagagaatttgcagtaacaggacttaggagtgttgcagcaggtgaaggaattgtaattgctgcaagttggtggggaaaaatcaaaacctttattcaaatagtgacaataatatttgcacttttattcataaatttaaggaaaaattacgattttagaaaatttgtagatcaatttgctttacttagcaaccattctgctcaggtagagaaatttttaagatatggtacggatataacactggctatagcctttattgtaactcttatttcaggaatagattacttttacaagaataggcatgtatttataaatgataaataa

SEQ ID NO: 54487 - protein, 203 aa, Clostridium acetobutylicum ATCC 824
MNLANKLTLMRIFLVPVFLIFIVVRQIPYGRSIATAIFIIAAITDKLDGYIARSRNQVTKFGKIMDPLADKLLVSSALIALVEFHVIPAWIAIVIIAREFAVTGLRSVAAGEGIVIAASWWGKIKTFIQIVTIIFALLFINLRKNYDFRKFVDQFALLSNHSAQVEKFLRYGTDITLAIAFIVTLISGIDYFYKNRHVFINDK

SEQ ID NO: 54488 - DNA, 618 bp, Caulobacter crescentus CB15
  CDS (1)..(618): transl_table=11
atgaaagcgttgcccaacatcctgaccagctcgcgcctcgtcatggcgctgttcatgttcatcgccctggcggcggcggccggggccgtgccctatgtcagcgagcagctgacggccgagacccagtttcgcctggagcgctgggccttctacgccttcgtggtggcggcggtgaccgacttcgtcgacggctggctggcgcgcaagctggacgcggtcagcgtctggggggcgatcctcgacccgatcggcgacaagatcctggtctgcggcgcgctcctgggtctgatggccctgggccccaaccccatggtcgtgctgccggccggcctgatcctgttccgggagttcaccgtcagcgccctgcgcgaggtcggggcgggcaagggcgtcaagctgccggtgaccctgctggccaagtggaagaccaccctgcagctggtggcgatcggcgccgagatgatcctggcctcgtggagcgcctttggccttccgcccgagccggctctggtcggcgggttcacgctcatcgcccacggcctgctgtggctggccacggtggtcaccctggtcaccggcgcgcagtactgggaagcggcccgcaaggcgctggtctag

SEQ ID NO: 54489 - protein, 205 aa, Caulobacter crescentus CB15
MKALPNILTSSRLVMALFMFIALAAAAGAVPYVSEQLTAETQFRLERWAFYAFVVAAVTDFVDGWLARKLDAVSVWGAILDPIGDKILVCGALLGLMALGPNPMVVLPAGLILFREFTVSALREVGAGKGVKLPVTLLAKWKTTLQLVAIGAEMILASWSAFGLPPEPALVGGFTLIAHGLLWLATVVTLVTGAQYWEAARKALV

SEQ ID NO: 54490 - DNA, 621 bp, Chlamydophila pneumoniae AR39
  CDS (1)..(621): transl_table=11
gtggggctacctaattacatcactttttccagactctttattacaccgattttcatgatcctgtatttaaaaggaaaatggtttggaatcactccagtagtgttgccttacgtgctgttagctctcctggcaatctctgagttaacagacgctatcgatggttatgtcgcaagaaaattttcacaggttaccgatttaggaaaactcctggatcctatggcagatagtatctacagaatttctatctacctaacttttacacagcctccagtcaatttacctttgcttctggtattcatcttcctagcacgggattctgtaattagtactttgcgtactgtatgtgctttccgtgggcgtgttgtcgctgcaagggctagtgggaaactaaaagctatactacaaggagtcagcttcttcttaattcttttggttatgattcctcactccctaggacttctttctcagaatggattggaaatctttgcctcagttacggtttcaatcatagctgtgtattctatagcctcaggaatcgaatacttctggatgaacaaaaactttttatcccaaagagctaaaacaaaagattcagaaaagaatcatgagagtaaagattga

SEQ ID NO: 54491 - protein, 206 aa, Chlamydophila pneumoniae AR39
MGLPNYITFSRLFITPIFMILYLKGKWFGITPVVLPYVLLALLAISELTDAIDGYVARKFSQVTDLGKLLDPMADSIYRISIYLTFTQPPVNLPLLLVFIFLARDSVISTLRTVCAFRGRVVAARASGKLKAILQGVSFFLILLVMIPHSLGLLSQNGLEIFASVTVSIIAVYSIASGIEYFWMNKNFLSQRAKTKDSEKNHESKD

SEQ ID NO: 54492 - DNA, 579 bp, Listeria innocua Clip11262
  CDS (1)..(579): transl_table=11
atgaatttaccaaataaattaacggttatccgtatttttatgataccaatttttgtcgttctatgtgttgtaccatttgactggggaagtgtctcttggcttgattcgaccattccagttacaagtttagtagcaactattattttcatcgtagctgcccttacagactggtttgatgggcatcttgcacgtaaatataatttaattacaaacttcggtaaatttgcggatccaatggcagataaattacttgtagctgcagcatttatcattctagttgaaatgcatattgctccttcttgggtagttattttaatcatcagtcgcgaacttgctgtaacaggtctacgtttacttcttgtagaaggcggcgaagttttagcagctggccaacttgggaaaattaaaacattcacacaaatgattgcaattccacttatgttattaaacaatttcccatttgcttggacaggtatccgtgttgacttaattttcttatatgtatgtgcattctttgcagtatggtctggaatagactatttctacaaaaatcgcggagtatttaaaggttctatgtaa

SEQ ID NO: 54493 - protein, 192 aa, Listeria innocua Clip11262
MNLPNKLTVIRIFMIPIFVVLCVVPFDWGSVSWLDSTIPVTSLVATIIFIVAALTDWFDGHLARKYNLITNFGKFADPMADKLLVAAAFIILVEMHIAPSWVVILIISRELAVTGLRLLLVEGGEVLAAGQLGKIKTFTQMIAIPLMLLNNFPFAWTGIRVDLIFLYVCAFFAVWSGIDYFYKNRGVFKGSM

SEQ ID NO: 54494 - DNA, 519 bp, Nostoc sp. PCC 7120
  CDS (1)..(519): transl_table=11
atgactttacccaactggattaccttctctcgtcttcttggtgtgccatttttgttgtatggtttgtacgactctacatcaaaagctaggtgggtatgtttggcaatttttttagttgctgctttgactgattggttagatggttatctagcgcgaaaacttaaccaagttagtgatttgggtaaatttcttgatccattggtggataaatttttagtattagcgccgttattggttttggtggagttggggaaaattcccgcttggggagtgtttttgattttagcgcgggaattggcgatcgctggttggcgcgttaatcaaacgacgattacaggggcgaatatttggggtaagttgaaaactgtgagtcagatattagcgatcgctcttttaattgcacctctatcatcagattggcaacaagtatccttaattgccttttggctttctgtggctttgacactaatctctggcggaatttatctctggccgcaaaaactcagtcaggcttcatag

SEQ ID NO: 54495 - protein, 172 aa, Nostoc sp. PCC 7120
MTLPNWITFSRLLGVPFLLYGLYDSTSKARWVCLAIFLVAALTDWLDGYLARKLNQVSDLGKFLDPLVDKFLVLAPLLVLVELGKIPAWGVFLILARELAIAGWRVNQTTITGANIWGKLKTVSQILAIALLIAPLSSDWQQVSLIAFWLSVALTLISGGIYLWPQKLSQAS

SEQ ID NO: 54496 - DNA, 588 bp, Agrobacterium tumefaciens str. C58
  CDS (1)..(588): transl_table=11
atggcttcgcgcgcatacaacattcccaacctcctcacctatgcccgcatccttgcggttcctgtcatcgttttgtgtttctttatcgaaggaaagctggaaagctcggacttcgcgcgctggacggcactctggctgttcatcgtcgcttcgctgaccgattttctcgacggttatctcgcccgcatctggaaccagacgtcgaatatcggccgcatgctggacccgatagccgacaagctgctggtcgcctccgtgctgctgttgatggcggcggatggcaccattgccggctggtcgctctgggctgcgattaccattctctgccgtgaaattctggtttccggcctgcgcgaatatctagctgcgctgaaggtcagcgttcccgtcacccagatcgccaaatggaagacaaccatccagatggttgccatcgcctttcttctcgcaggtcctgcgggcgacaaggtgctgccctatacgaccgagatggggattacgcttctgtggctcgccgcggcgctgaccatgtataccggttatgattacttcaaggcgggtctcaagcacattgtggacgaagaatga

SEQ ID NO: 54497 - protein, 195 aa, Agrobacterium tumefaciens str. C58
MASRAYNIPNLLTYARILAVPVIVLCFFIEGKLESSDFARWTALWLFIVASLTDFLDGYLARIWNQTSNIGRMLDPIADKLLVASVLLLMAADGTIAGWSLWAAITILCREILVSGLREYLAALKVSVPVTQIAKWKTTIQMVAIAFLLAGPAGDKVLPYTTEMGITLLWLAAALTMYTGYDYFKAGLKHIVDEE

SEQ ID NO: 54498 - DNA, 591 bp, Clostridium perfringens str. 13
  CDS (1)..(591): transl_table=11
atgaatcttgcaaataaattaactttaattagaataattttagtgcccatattcttagtatttatagcttaccaagacttaccttatgggagtgtaatagcaacacttatattcataatagcatctgttacagatcaattagatggatatattgcaagatcaagaaatcaagtaactaactttggtaagtttatggaccctttggcagataagctactagttacagcagcacttatatctttggttgaattacaattagttcctgcatgggcagctattgtaataatagctagagagtttgctgtttcaggtttaagaaccatagctgcatcagaggggttagttatagctgctagctggtggggaaaaattaaaactgtaatacaaataattgccatagtgcttttattattacaagtaaatataattaattcaccagggattaaggaattagttgcaggcagcagctttttaagaaatttctttatatatgttccagatatattcttatatttagctgttgcaataacaataatttctggagtagattactttagaaaaaataaaaatgttataaatacttataaataa

SEQ ID NO: 54499 - protein, 196 aa, Clostridium perfringens str. 13
MNLANKLTLIRIILVPIFLVFIAYQDLPYGSVIATLIFIIASVTDQLDGYIARSRNQVTNFGKFMDPLADKLLVTAALISLVELQLVPAWAAIVIIAREFAVSGLRTIAASEGLVIAASWWGKIKTVIQIIAIVLLLLQVNIINSPGIKELVAGSSFLRNFFIYVPDIFLYLAVAITIISGVDYFRKNKNVINTYK

SEQ ID NO: 54500 - DNA, 1026 bp, Arabidopsis thaliana
  CDS (1)..(1026)
atggcgatttacagatctctaagaaagctagttgaaatcaatcaccggaaaacaagaccattcttcaccgccgctacagcttccggcggaaccgtttctctgactccaccgcagttttcgccgttgttcccacatttctcacaccgtttatctccgctttcgaaatggttcgttcctcttaatggacctctcttcttatcttctcctccttggaaacttctccagtctgcgacacctttgcactggcgcggaaacggctctgttttgaaaaaagtcgaagctctgaatcttagattggatcgaattagaagcagaactaggtttccgagacagttagggttacagtctgtggtaccaaacatattgacggtggatcgcaacgattccaaggaagaagatggtggaaaattagtcaagagttttgttaatgtgccgaatatgatatcaatggcgagattagtatctggtcctgtgctttggtggatgatctcgaatgagatgtattcttctgctttcttagggttggctgtttctggagctagtgattggttagatggttacgtggctcggaggatgaagattaactctgtggttggctcgtaccttgatcctcttgcagacaaggttcttatcgggtgtgtagcagtagcaatggtgcagaaggatctcttacatcctggactggttggaattgtgttgttacgggatgttgcactcgttggtggtgcagtttacctaagggcactaaacttggactggaagtggaaaacttggagtgacttcttcaatctagatggttcaagtcctcagaaagtagaaccattgtttataagcaaggtgaatacagttttccagttgactctagtcgctggtgcaatacttcaaccagagtttgggaatccagacacccagacatggatcacttatctaagctggttagttgcttcgacgactatggcttcaactgcagcttatggtgtacaatactggaagaagagacctatatctatgattaagagatcatag

SEQ ID NO: 54501 - protein, 341 aa, Arabidopsis thaliana
MAIYRSLRKLVEINHRKTRPFFTAATASGGTVSLTPPQFSPLFPHFSHRLSPLSKWFVPLNGPLFLSSPPWKLLQSATPLHWRGNGSVLKKVEALNLRLDRIRSRTRFPRQLGLQSVVPNILTVDRNDSKEEDGGKLVKSFVNVPNMISMARLVSGPVLWWMISNEMYSSAFLGLAVSGASDWLDGYVARRMKINSVVGSYLDPLADKVLIGCVAVAMVQKDLLHPGLVGIVLLRDVALVGGAVYLRALNLDWKWKTWSDFFNLDGSSPQKVEPLFISKVNTVFQLTLVAGAILQPEFGNPDTQTWITYLSWLVASTTMASTAAYGVQYWKKRPISMIKRS

SEQ ID NO: 54502 - DNA, 564 bp, Fusobacterium nucleatum subsp. nucleatum ATCC 25586
  CDS (1)..(564): transl_table=11
atgaatttacctaatagacttactatgattagatttatattggcaattccttttataatatttttacaatattcagattcaagtaaatatggtttgatttttagattaatttctcttgtgatatttgtaattgcttcactcacagatttctttgatggctatattgcaagaaaatataatttaataactgattttggaaaaattatggaccctcttgctgataaaatacttgttatttcagctcttgttatatttgtacaattagagtatatcccaggttggatgtctattattgtcttagctcgtgaatttttaatcagtggaataagaatacttgcagcagcaaaaggtgaaatcattgcagctggaaatttgggaaaatacaaaacaacaagccaaatgcttgttgttatagttgctttggcaataggacctattggtttttatatatctgattatttctttactgtagcagaagttttgatgttgatacctgttattttgacaatatggtcaggttgggaatatacttttaaagcaaaacactattttactgaacaatga

SEQ ID NO: 54503 - protein, 187 aa, Fusobacterium nucleatum subsp. nucleatum ATCC 25586
MNLPNRLTMIRFILAIPFIIFLQYSDSSKYGLIFRLISLVIFVIASLTDFFDGYIARKYNLITDFGKIMDPLADKILVISALVIFVQLEYIPGWMSIIVLAREFLISGIRILAAAKGEIIAAGNLGKYKTTSQMLVVIVALAIGPIGFYISDYFFTVAEVLMLIPVILTIWSGWEYTFKAKHYFTEQ

SEQ ID NO: 54504 - DNA, 543 bp, Streptococcus pyogenes MGAS8232
  CDS (1)..(543): transl_table=11
atgataaaaaaagaaaatattcctaatctattaactcttgttcgaatcgcaatgattcctttctttctttttattacttcctcatctaataaggtggggtggcatatttttgcagctgtgatttttgcaattgccagttttaccgattatctagatgggtatcttgcgcgtaagtggcatgtagtcagtaattttggaaagtttgccgatcctctagcagataagatgcttgtcatgagtgcctttatcatgttagttggacttggcttagttcctgcgtgggtatcagctgttattatttgccgagaattggcagtaactggtcttcgattactacttgttgaaaccggaggaaaggtccttgcagctgctatgctgggaaaaatcaaaacagcgacacaaatgttgtctattattttattactttgccattggatattcctaggaaacgtcttactctgtattgctctttttttcactatttattctggatatgattattttaaaggagcaagctttctttttaaggatacgtttaaataa

SEQ ID NO: 54505 - protein, 180 aa, Streptococcus pyogenes MGAS8232
MIKKENIPNLLTLVRIAMIPFFLFITSSSNKVGWHIFAAVIFAIASFTDYLDGYLARKWHVVSNFGKFADPLADKMLVMSAFIMLVGLGLVPAWVSAVIICRELAVTGLRLLLVETGGKVLAAAMLGKIKTATQMLSIILLLCHWIFLGNVLLCIALFFTIYSGYDYFKGASFLFKDTFK

SEQ ID NO: 54506 - DNA, 648 bp, Streptomyces coelicolor A3(2)
  CDS (1)..(648): transl_table=11
gtgagcatcattggctcgtttcccccaggaggcccccgcgtggaggtccaggagacccgcgtgcagaccgaccgggtcctcaccatcccgaacatcctcagcatggcgcgcctggccggcgtgcctctgttcctgtggctcatcctgcggcccgagttcggcggcccgcagagcgacggctgggcgctgttggtgctggccctgagcggggtcagcgactacctggacggaaagctcgcacggcgctggaatcagatcagcagccttggccggctcctggacccggcggccgaccgcctctatatcctctccacgctggtgggtctcacctggcgcgagattctcccgctctggttgacccttgtactgcttgccagggaagcgatgctgctggtgatggtgggcatcctccggcggcacggctatcctccgccgcaggtgaacttcctgggcaaggccgccaccttcaacctcatgtacgccttccccctgcttctgctgagcgacggcagcggatggatcgcgtcactggccgcagttttcggatgggcgttcgccggatggggtacaaccctgtattggtgggcaggtgttctctacgtggtgcaggtccgccgcctggttcgtgcggacgtcgcagccgattga

SEQ ID NO: 54507 - protein, 215 aa, Streptomyces coelicolor A3(2)
MSIIGSFPPGGPRVEVQETRVQTDRVLTIPNILSMARLAGVPLFLWLILRPEFGGPQSDGWALLVLALSGVSDYLDGKLARRWNQISSLGRLLDPAADRLYILSTLVGLTWREILPLWLTLVLLAREAMLLVMVGILRRHGYPPPQVNFLGKAATFNLMYAFPLLLLSDGSGWIASLAAVFGWAFAGWGTTLYWWAGVLYVVQVRRLVRADVAAD

SEQ ID NO: 54508 - DNA, 633 bp, Xanthomonas campestris pv. campestris str. ATCC 33913
  CDS (1)..(633): transl_table=11
atgaagttgaccatccccacgtggctgacactgctgaggatcgtgatgatcccggtgttggtcgtggtgttctacctgccgtacaagtggaccaatttcgcctcggccggtgtgtttgccctggccgcgatcaccgactggctggatggctgggtcgcgcggcgttatcaccagtattcggcgtttggcgcatttctggacccggtggccgacaagctgatggtcgccgtggcgttgttcctcatcgtgcaagggcatcccacgccgtggatggcgttctgggcggcggtcatcgtgggtcgcgaaatcgcggtgtctgcattgcgcgagtggatggccgagatcggccagcgtgccaaggtgcgcgtggcaatgatcggcaaggtcaagaccaccgcacagatggttgcgttgctctgtttgctgtattcggtcacgccggggcagatgcccacgcatgaaatctggctgggcaacctgatcttccaggcggggtactggaccctggcaatcgccgcattgctgacgttgtggtcgggtttccagtatctgcaggccgcatggccaagtttgcgtgccgatgaaaaggccgcgattaccaacaaaccgaaaaaagtcgaaagcaacagttga

SEQ ID NO: 54509 - protein, 210 aa, Xanthomonas campestris pv. campestris str. ATCC 33913
MKLTIPTWLTLLRIVMIPVLVVVFYLPYKWTNFASAGVFALAAITDWLDGWVARRYHQYSAFGAFLDPVADKLMVAVALFLIVQGHPTPWMAFWAAVIVGREIAVSALREWMAEIGQRAKVRVAMIGKVKTTAQMVALLCLLYSVTPGQMPTHEIWLGNLIFQAGYWTLAIAALLTLWSGFQYLQAAWPSLRADEKAAITNKPKKVESNS

SEQ ID NO: 54510 - DNA, 507 bp, Thermosynechococcus elongatus BP-1
  CDS (1)..(507): transl_table=11
atgcctttgaacctcgccaccacgattaccctggctcggctgttgatcgtgcctgtgatcctaggtttgctttccttcaataatgggccggtctaccgttggtggggggtgggtctgtttctggtggcggccctcacggattggctggatggctacattgcccgccgttttaaccaggtgacggatttgggcaaagtgctggatcccctggtggataagctgctggttcttgtgccgcttttgctctgtattgagtggggagaggtgcctgcatggtcagtggcgttgatcctctttcgggaactaggaattgccagttggcgggttcagcaatctcacattcagggggcgaatctttgggggaaagccaaaaccgttagccagattgtggccgtggcgttgctgctagctcccttacctccgacttggcaggggggaatactcattgtttatgggggagcgatcgccctcacgctgatttctggagcactttatcttcgcggttga

SEQ ID NO: 54511 - protein, 168 aa, Thermosynechococcus elongatus BP-1
MPLNLATTITLARLLIVPVILGLLSFNNGPVYRWWGVGLFLVAALTDWLDGYIARRFNQVTDLGKVLDPLVDKLLVLVPLLLCIEWGEVPAWSVALILFRELGIASWRVQQSHIQGANLWGKAKTVSQIVAVALLLAPLPPTWQGGILIVYGGAIALTLISGALYLRG

SEQ ID NO: 54512 - DNA, 543 bp, Streptococcus agalactiae 2603V/R
  CDS (1)..(543): transl_table=11
atgatgaagaaagaaaatattccgaatctattaactgtagtcagaattttaatgattccgttatttatagtattaacttcagtaacaacaagtacaacttggcatattgttgcagctattgtatttgctattgcaagtttgaccgattacctagatggttatctagcacgtaaatggcaagtagtaacaaattttgggaaatttgcagacccattagctgataaaatgctagttatgagtgcttttatcatgttagttggactagacttagcaccagcttgggtttcagctattatcatttgtagagagttagcagttacaggtttgcgtttacttttagttgaaacaggtggaacagtacttgctgcagctatgccagggaaaataaagacggctactcaaatgtttgcagttatttttttgttagtacattggatgacacttggtaacatcatgttatacattgctctattctttaccttgtattcaggctacgactattttaaaggtgcaggcttcttatttaaggatacttttaaataa

SEQ ID NO: 54513 - protein, 180 aa, Streptococcus agalactiae 2603V/R
MMKKENIPNLLTVVRILMIPLFIVLTSVTTSTTWHIVAAIVFAIASLTDYLDGYLARKWQVVTNFGKFADPLADKMLVMSAFIMLVGLDLAPAWVSAIIICRELAVTGLRLLLVETGGTVLAAAMPGKIKTATQMFAVIFLLVHWMTLGNIMLYIALFFTLYSGYDYFKGAGFLFKDTFK

SEQ ID NO: 54514 - DNA, 579 bp, Oceanobacillus iheyensis HTE831
  CDS (1)..(579): transl_table=11
atgaatttaccaaataagttaacattttccagaatattaatgatcccgatttttattttattattatccattccttttccttggggagcttgggatatcggtaatagtgaattaccagtcgctcattttctagccgcattgatctttattattgcagctgctactgattgggttgatggttattatgctagaaagtatcaattagttacaaatttaggaaagtttatggacccgcttgcagataagttactagtatctgctgcattaatactattagtggaaatggaaattgccccagcttggatagtcatcattattataagcagagaattagctgttacaggtttaagactagtagctgcaggagaaggaatcgtacttgcagcaggaagtatgggcaaattaaaaactgcaactcaaatgatttctattgcggtattattactacataattttccgttttcctatattgattttccattcggtataatcatgctatatatagcattaattttcacaattatttctggagtggattattttattaaaaactggcatgtgatgagggattcaaaataa

SEQ ID NO: 54515 - protein, 192 aa, Oceanobacillus iheyensis HTE831
MNLPNKLTFSRILMIPIFILLLSIPFPWGAWDIGNSELPVAHFLAALIFIIAAATDWVDGYYARKYQLVTNLGKFMDPLADKLLVSAALILLVEMEIAPAWIVIIIISRELAVTGLRLVAAGEGIVLAAGSMGKLKTATQMISIAVLLLHNFPFSYIDFPFGIIMLYIALIFTIISGVDYFIKNWHVMRDSK

SEQ ID NO: 54516 - DNA, 660 bp, Bifidobacterium longum NCC2705
  CDS (1)..(660): transl_table=11
gtgaacactatggatgagaacacaatggacaagcagtcatcgcccaaatcatcgctgttcgacggatggaacgcgccgccgaacctggtcacctactcgcgcatcgtactcgtggtgtttttcctgacactcgacattctcgccggtgcctggggtgagaacaacctgaccatgcgctgggtcgccgcggtgctgttcatcatcgccgcgtccaccgataaaatcgacggttggatggcccgcaaatacaatcaggtcaccgaaatgggcaagctcatggatccgatcgcggacaagctgctcacttgcggcgcaatgattgtatgctccgcgttcggcgagctcggctggtgggtaaccatcctgttcctgattcgcgaaattggtatcaccgttatgcgtttcttcgtcatggagcgtccgggcggcaaagtcatcgccgccgcatggcccggcaagctcaagaccgtattccagtgcgtgggtctgtccatgctgctgctgccgttctggtctctgggtaacggacaagccacgccgttctggatgaccgcttactacttcctgacctacgccatcatctacgtggcattggtcctgtgcctctactcgggtgccgtgtacctgtacaacacgttcgtcgccccgaagcggaagtga

SEQ ID NO: 54517 - protein, 219 aa, Bifidobacterium longum NCC2705
MNTMDENTMDKQSSPKSSLFDGWNAPPNLVTYSRIVLVVFFLTLDILAGAWGENNLTMRWVAAVLFIIAASTDKIDGWMARKYNQVTEMGKLMDPIADKLLTCGAMIVCSAFGELGWWVTILFLIREIGITVMRFFVMERPGGKVIAAAWPGKLKTVFQCVGLSMLLLPFWSLGNGQATPFWMTAYYFLTYAIIYVALVLCLYSGAVYLYNTFVAPKRK

SEQ ID NO: 54518 - DNA, 549 bp, Shewanella oneidensis MR-1
  CDS (1)..(549): transl_table=11
atgccgtttaacttacccatagcattaactctttttaggctttttttactgcccattttcgtggtgttgttttatttaccttatagctggacgccttttgttgccgcatttgtgttttggctagcggcgttaacggatgcattagacggttatgcggcgcgtaaactcaagcaactgacccgttttggcgccttcctcgatcccgtcgccgataaactgatggtgatcaccgcgctcgtattattagttgaccaatacgctgatatttggctcacactgccagcactgtttatgattggccgtgaaattgtgatttcagctctgcgggagtggatggccgaattaggtaaacgcggaacggttgctgtctcttggattggtaaatataaaaccgctgctcaaatggtggcgattattggcctgatttggcaatacaacccattaatgatccaagcggcatttgtgctgttatatatcgctgccgtattaacgttctggtcaaagatgagctacattttagccgcctggaaagatttaacggctgaatag

SEQ ID NO: 54519 - protein, 182 aa, Shewanella oneidensis MR-1
MPFNLPIALTLFRLFLLPIFVVLFYLPYSWTPFVAAFVFWLAALTDALDGYAARKLKQLTRFGAFLDPVADKLMVITALVLLVDQYADIWLTLPALFMIGREIVISALREWMAELGKRGTVAVSWIGKYKTAAQMVAIIGLIWQYNPLMIQAAFVLLYIAAVLTFWSKMSYILAAWKDLTAE

SEQ ID NO: 54520 - DNA, 543 bp, Streptococcus mutans UA159
  CDS (1)..(543): transl_table=11
atggctaagaaggaaaatatccctaatttattaacgttaatcagaattttattaattccagtcttcttgcttttaacttctgtgactagtagtgtcacttggcatattattgcagccattatttttgctgtggcaagtttaactgactatttggatggttacttagcacgtaagtggaaagttgttactaattttggtaaattcgcagatccgcttgctgataaaatgttagtcatgagtgcttttatcatacttgttggtcttaacttagcgccagcttggatttctgctatcattatttgtcgtgaattagctgtaacaggattacgtttacttttagttgaaacaggtggtgaagttttggctgctgctatgccaggaaaaattaaaacagctactcaaatgttttcaattatcttattgctttgccattttgaatttgtaggaactattctgctttacatagctctcttctttacgctttattcaggttatgattacttcaaaggagctggctttctttttaaggatacttttaaataa

SEQ ID NO: 54521 - protein, 180 aa, Streptococcus mutans UA159
MAKKENIPNLLTLIRILLIPVFLLLTSVTSSVTWHIIAAIIFAVASLTDYLDGYLARKWKVVTNFGKFADPLADKMLVMSAFIILVGLNLAPAWISAIIICRELAVTGLRLLLVETGGEVLAAAMPGKIKTATQMFSIILLLCHFEFVGTILLYIALFFTLYSGYDYFKGAGFLFKDTFK

SEQ ID NO: 54522 - DNA, 540 bp, Streptococcus agalactiae NEM316
  CDS (1)..(540): transl_table=11
atgaagaaagaaaatattccgaatctattaactgtagtcagaattttaatgattccgttatttatagtattaacttcagtaacaacaagtacaacttggcatattgttgcagctattgtatttgctattgcaagtttgaccgattacctagatggttatctagcacgtaaatggcaagtagtaacaaattttgggaaatttgcagacccattagctgataaaatgctagttatgagtgcttttatcatgttagttggactagacttagcaccagcttgggtttcagctattatcatttgtagagagttagcagttacaggtttgcgtttacttttagttgaaacaggtggaacagtacttgctgcagctatgccagggaaaataaagacggctactcaaatgtttgcagttatttttttgttagtacattggatgacacttggtaacatcatgttatacattgctctattctttaccttgtattcaggctacgactattttaaaggtgcaggcttcttatttaaggatacttttaaataa

SEQ ID NO: 54523 - protein, 179 aa, Streptococcus agalactiae NEM316
MKKENIPNLLTVVRILMIPLFIVLTSVTTSTTWHIVAAIVFAIASLTDYLDGYLARKWQVVTNFGKFADPLADKMLVMSAFIMLVGLDLAPAWVSAIIICRELAVTGLRLLLVETGGTVLAAAMPGKIKTATQMFAVIFLLVHWMTLGNIMLYIALFFTLYSGYDYFKGAGFLFKDTFK

SEQ ID NO: 54524 - DNA, 624 bp, Corynebacterium efficiens YS-314
  CDS (1)..(624): transl_table=11
gtgagtgatgtttcagcaggcgcaatgggcgcaccagaaggtcggccgggcgccgcggtttccgatggggtgtccccgaaaccatcgaattggaatctgcccaatttcctgaccagtctgcgcatcatcgtgattccgttgttcgcctggctgacactggaggggcaggcagagaacaacgcccatgcctggtgggctctggtggtcttcgtgttgttgatgatcaccgacaagctggacggtgatatcgcgcgtgcccggggcctggtcaccgacttcggtaagatcgcggacccaatcgcggacaaggccctgatgaccacggccttcgtctgtttcaacatcattggcatcctcccgtggtgggccaccgccctcatcgtcatcagggaattcgggatcaccatctggcgtttcttccagctgcgtcggggcaccgtggtgccggcgagcaagggtggcaagatgaagactgccctgcagaccctggctgtcgcgctctacctcgcgcctctacccgggtggatggatatcccgagccaggtcgtcatgtacgccgcggtggcggtcacggtgttcaccggaatccagtacattgtggattcccggaagtcctcaagctag

SEQ ID NO: 54525 - protein, 207 aa, Corynebacterium efficiens YS-314
MSDVSAGAMGAPEGRPGAAVSDGVSPKPSNWNLPNFLTSLRIIVIPLFAWLTLEGQAENNAHAWWALVVFVLLMITDKLDGDIARARGLVTDFGKIADPIADKALMTTAFVCFNIIGILPWWATALIVIREFGITIWRFFQLRRGTVVPASKGGKMKTALQTLAVALYLAPLPGWMDIPSQVVMYAAVAVTVFTGIQYIVDSRKSSS

SEQ ID NO: 54526 - DNA, 561 bp, Pseudomonas putida KT2440
  CDS (1)..(561): transl_table=11
atgaatattccaaacctgctcaccgttctacgcgtcctgctcattccgtgcttcattctgctgttctacatgccctatcagtggagttacatggccgccagcagcgtattcgccgtagccgccgccaccgattggctggacggctacctggcccgtcgactgcagcagagcacgccgttcggcgccttcctcgacccggtggccgacaagctgatggtggcagtggccctggtgctgctggtgcagacccacgccaacttctggctgaccctgccggcggcggtcatcatcggccgcgagatcgtggtgtctgcgctgcgcgagtggatggccgagctaggcgcgcgggcgcatgtggcggtgtccaacctcggtaagtggaagactgcggcgcagatgctggcgctggtgatcctgctgggcaacccgccggtggtgaccttctgggtgatcctgggctacgggctgctgctggtggcagcggggctgacgctgtggtcgatggtgcactacctgctggccgcctggccgcacctgcgcgaaggctcggaaaaaaaataa

SEQ ID NO: 54527 - protein, 186 aa, Pseudomonas putida KT2440
MNIPNLLTVLRVLLIPCFILLFYMPYQWSYMAASSVFAVAAATDWLDGYLARRLQQSTPFGAFLDPVADKLMVAVALVLLVQTHANFWLTLPAAVIIGREIVVSALREWMAELGARAHVAVSNLGKWKTAAQMLALVILLGNPPVVTFWVILGYGLLLVAAGLTLWSMVHYLLAAWPHLREGSEKK

SEQ ID NO: 54528 - DNA, 618 bp, Bradyrhizobium japonicum USDA 110
  CDS (1)..(618): transl_table=11
atgaacatcgccacgacacgagggacgaccagccgcgcgatgtccctcccgaacatcctgacctatggccggatcgccgcgatcccggtcgtggtcgggtgcatctacgcgcagtcgattctggatcagccgttgtggctgcgctgggtcgcggtcgccattttcatcgcggcggcagtcaccgattacctcgacggctattacgcgcggatctggaatcaacaatcggcgttcggccggatgctcgatccgatcgccgacaagctgctggtcgcctcctgcctactgatgctggccgccgacggtatcatccatggctggtcgctgtgggccgccatcgtgatcctgtgccgcgagatcctggtctcgggcctgcgcgaatatctcgccgcgctgcgcgtcagcgtgcccgtcaccaagcttgccaagtggaagaccacggtccagctcgtcgccatcggcttcctgctcgcgggcgaggccggcgaccaggtcgtgcccgtcgtaacccagatcggcctcttgctgctgtgggcctcggcgatcctcaccatgtacaccggctacgattatttccgctccggcatccatcacctcatcaaggaggatgaggtatga

SEQ ID NO: 54529 - protein, 205 aa, Bradyrhizobium japonicum USDA 110
MNIATTRGTTSRAMSLPNILTYGRIAAIPVVVGCIYAQSILDQPLWLRWVAVAIFIAAAVTDYLDGYYARIWNQQSAFGRMLDPIADKLLVASCLLMLAADGIIHGWSLWAAIVILCREILVSGLREYLAALRVSVPVTKLAKWKTTVQLVAIGFLLAGEAGDQVVPVVTQIGLLLLWASAILTMYTGYDYFRSGIHHLIKEDEV

SEQ ID NO: 54530 - DNA, 573 bp, Clostridium tetani E88
  CDS (1)..(573): transl_table=11
ttgtatgtgatgaatcttgcaaataaattaactataatcagaatatttttagtacctgtttttttgatttttatagccattaatgacattccatatggaaaaactatagctacagccatatttataatagcagctcttacagataagttagatggctatatagcaagaagtagaaatcaaataacacgatttggtaaatttatggatcctttggcagacaaactgttggttacagcagctttaatatcattagtagaattacaggttatttctacatgggttgcaatgattattatagcaagggaatttgccgtaacaggtcttagagcagtagcagcttctgagggtatagtaattgctgcaagtcctttgggaaaagcaaaaactgttacacaaattatagctattataatagcacttataaatttaaataatattaacatattatctattccaagtaactatatttctagtcttactaatataaccatgggtgctgcagttattataactatcatttctggaatagattattttgtgaaaaataaagaagctataaaaatagataaataa

SEQ ID NO: 54531 - protein, 190 aa, Clostridium tetani E88
MYVMNLANKLTIIRIFLVPVFLIFIAINDIPYGKTIATAIFIIAALTDKLDGYIARSRNQITRFGKFMDPLADKLLVTAALISLVELQVISTWVAMIIIAREFAVTGLRAVAASEGIVIAASPLGKAKTVTQIIAIIIALINLNNINILSIPSNYISSLTNITMGAAVIITIISGIDYFVKNKEAIKIDK

SEQ ID NO: 54532 - DNA, 567 bp, Pseudomonas syringae pv. tomato str. DC3000
  CDS (1)..(567): transl_table=11
gtgccgatgaatatccctaatctgatcaccgtactacgcgttttactgattccgatcttcattttgctgttctatatgccttatcactggagctacatggcagccagtgcagtctttgcgttcgctgcggcgaccgactggctcgacgggtatttggctcgccgtcttgagcaaagcacgccattcggtgcgtttcttgatccggtagcagacaaactgatggtggccgtggccctggtgctgctggttcaggcgcacgccaacctgtggctgaccctgccggcagcggtgatcatcggccgtgaaatcgtgatttccgcgctccgcgaatggatggcggaaataggcgcgcgtgcacaagtcgccgtttccaacatgggcaaatggaaaaccgccgcgcaaatgctggcgctggtcattctgctcggcaacccgccggcagtcaccttctgggtgattttcggttacgcattgctgctcgtcgcagcggggctgaccctgtggtcgatggtgcaatacctcagagccgcatggccgcatctcaagaccacagcagaaaaaaaataa

SEQ ID NO: 54533 - protein, 188 aa, Pseudomonas syringae pv. tomato str. DC3000
MPMNIPNLITVLRVLLIPIFILLFYMPYHWSYMAASAVFAFAAATDWLDGYLARRLEQSTPFGAFLDPVADKLMVAVALVLLVQAHANLWLTLPAAVIIGREIVISALREWMAEIGARAQVAVSNMGKWKTAAQMLALVILLGNPPAVTFWVIFGYALLLVAAGLTLWSMVQYLRAAWPHLKTTAEKK

SEQ ID NO: 54534 - DNA, 558 bp, Vibrio parahaemolyticus RIMD 2210633
  CDS (1)..(558): transl_table=11
atgcgtttgaatatcccgaacattctgtcccttcttagactgttcttaatccctgtattcgtggttgtcttctatctgccttattcttgggctccctttgcggcagcaatggtgttctgggttgcaggttttaccgactggttagatggcatgctagcacgtaaacttggccaaacttcaaggtttggtgcgtttatcgatccagtcgctgataaagtactggttgcgacagcgttgattttgattacagagcactaccacaccatttgggtaactatccctgctgtaaccatgattgcgcgagagattatcatctctgcattgcgtgaatggatggctgaaatcggtaaacgcgcaagtgtcgctgtatcctgggttggtaaagtaaaaacagtttctcagatgtttgcattatgggttctgatttggcgctatgacgaatggatggtttggctaggctttgccgctctgtacgtcgctacattcctaacatattggtcgatggttcagtatcttgcagcagcaaaagatgatttgctgaacgaagaacatcactaa

SEQ ID NO: 54535 - protein, 185 aa, Vibrio parahaemolyticus RIMD 2210633
MRLNIPNILSLLRLFLIPVFVVVFYLPYSWAPFAAAMVFWVAGFTDWLDGMLARKLGQTSRFGAFIDPVADKVLVATALILITEHYHTIWVTIPAVTMIAREIIISALREWMAEIGKRASVAVSWVGKVKTVSQMFALWVLIWRYDEWMVWLGFAALYVATFLTYWSMVQYLAAAKDDLLNEEHH

SEQ ID NO: 54536 - DNA, 543 bp, Streptococcus pyogenes SSI-1
  CDS (1)..(543): transl_table=11
atgataaaaaaagaaaatattcctaatctattaactcttgttcgaatcgcaatggttcctttctttctttttattacttcctcatctaataaggtggggtggcatatttttgcagctgtgatttttgcaattgccagttttaccgattatctagatgggtatcttgcgcgtaagtggcatgtagtcagtaattttggaaagtttgccgatcctctagcagataagatgcttgtcatgagtgcctttatcatgttagttggacttggcttagttcctgcgtgggtatcagctgttattatttgccgagaattggcagtaactggtcttcgattactacttgttgaaaccggaggaaaggtccttgcagctgctatgccgggaaaaatcaaaacagcgacacaaatgttgtctattattttattactttgccattggatattcctaggaaacgtcttactctatattgctctttttttcactatttattctggatatgattattttaaaggagcaagctttctttttaaggatacgtttaaataa

SEQ ID NO: 54537 - protein, 180 aa, Streptococcus pyogenes SSI-1
MIKKENIPNLLTLVRIAMVPFFLFITSSSNKVGWHIFAAVIFAIASFTDYLDGYLARKWHVVSNFGKFADPLADKMLVMSAFIMLVGLGLVPAWVSAVIICRELAVTGLRLLLVETGGKVLAAAMPGKIKTATQMLSIILLLCHWIFLGNVLLYIALFFTIYSGYDYFKGASFLFKDTFK

SEQ ID NO: 54538 - DNA, 579 bp, Enterococcus faecalis V583
  CDS (1)..(579): transl_table=11
gtgaatttaccaaataaattaacagttttaagaatatttatgattccgatttttattattattgtgtcggtgccaatggactggggaacgattagttttggcgacacaacgttagccgttacccaattagtgggcgcgattatttttgcagttgctagttttacagactggttggatggcaaaattgcccgtgcacaaggcttggtgacgaacttcggaaaatttgcggacccattagcggacaaaatgctagtgatgaccgcttttatcgtcttagttggtcaaggcaaagtacctgcttggattgtagcaattattgtttgtcgtgaattggcagtaactggtttacggttgttattagtcgaacatggcgaagtaatggcagcagcttggccaggaaaagtaaaaacagctacccaaatggttgcaattattttactgttcattaacaacattccattttcagcacttcatctaccactagatcaaatcatgctatatgcctgcttgattttcaccatttactctggtgttgattattttgctaagaataaagatgtttttaaaggttcgatgtaa

SEQ ID NO: 54539 - protein, 192 aa, Enterococcus faecalis V583
MNLPNKLTVLRIFMIPIFIIIVSVPMDWGTISFGDTTLAVTQLVGAIIFAVASFTDWLDGKIARAQGLVTNFGKFADPLADKMLVMTAFIVLVGQGKVPAWIVAIIVCRELAVTGLRLLLVEHGEVMAAAWPGKVKTATQMVAIILLFINNIPFSALHLPLDQIMLYACLIFTIYSGVDYFAKNKDVFKGSM

SEQ ID NO: 54540 - DNA, 561 bp, Coxiella burnetii RSA 493
  CDS (1)..(561): transl_table=11
atgaatatcgcgacttttctgacatttgtgcgtttatcggctatcccgatttttggaattttttattttttaccttttcggtgggcgcatccggtagccgctcttatttttatcgttgcaggaattacggattggttagacggttatttggcgcgcagtctttcgcagacgaccgattttggcgctttcctcgaccccgtggccgataaactattggtgagtgctgccttggttttggtggttggtgagaattatgtggcttatttagccgttcccgccgcagttatcatctgccgggagatccttatttcagctttacgcgaatggatggctgaattgggtaaacgcacaagtttagcagtcactctcttatcaaaagtcaaaacgctgttgcaaatgctagctttaatattattgatagggtatgcgccgggctttccagcggaactgctgtggggcggcgttattttactttggatagccgccgtcttaaccgtctggaccatgatcatctatctaaagattgcctggccagacttgacaatgccccgtgaacagtaa

SEQ ID NO: 54541 - protein, 186 aa, Coxiella burnetii RSA 493
MNIATFLTFVRLSAIPIFGIFYFLPFRWAHPVAALIFIVAGITDWLDGYLARSLSQTTDFGAFLDPVADKLLVSAALVLVVGENYVAYLAVPAAVIICREILISALREWMAELGKRTSLAVTLLSKVKTLLQMLALILLIGYAPGFPAELLWGGVILLWIAAVLTVWTMIIYLKIAWPDLTMPREQ

SEQ ID NO: 54542 - DNA, 579 bp, Bacillus cereus ATCC 14579
  CDS (1)..(579): transl_table=11
gtgaatttaccaaataaaattacaatatctagaatcttcttaattccaatttttatggtaattatgttagcaccctttgattggggttcatacaaaattggtgatgttgatttaccgattcaacatttagtgggggcacttatctttatcattgcttcagctacagattggattgatggacattacgcaagaaaatataatcttgtaacgaatttagggaagtttcttgacccgttagctgataaattacttgtttcggcagcacttattacattggtagagatgcaatatgtaccggcttggattgttattgtaattatcagtcgtgagtttgcggtaactggtttacgtcttgtacttgctggaacaggggaagtagttgcagcaaaccagctaggaaaaattaagacatggacacaaattattgcgattgcagcatatttattacacgatgtacctttaaatttaatccatattccagttgcggatatcttcatatggattgcattaatctttactgttatttcaggatgggattatttctggaaaaatagagctgcttttgtaaactcaaaatag

SEQ ID NO: 54543 - protein, 192 aa, Bacillus cereus ATCC 14579
MNLPNKITISRIFLIPIFMVIMLAPFDWGSYKIGDVDLPIQHLVGALIFIIASATDWIDGHYARKYNLVTNLGKFLDPLADKLLVSAALITLVEMQYVPAWIVIVIISREFAVTGLRLVLAGTGEVVAANQLGKIKTWTQIIAIAAYLLHDVPLNLIHIPVADIFIWIALIFTVISGWDYFWKNRAAFVNSK

SEQ ID NO: 54544 - DNA, 579 bp, Nitrosomonas europaea ATCC 19718
  CDS (1)..(579): transl_table=11
atgctgatgaatcttcccaattttctgacgtggctgcgtatcatggcaattcccctgtttgtcggtattttttatctgccgacggactggatgtctccggccacgcagaatctggttgccaccatcgtatttgccggcgccgcgttgaccgactggctggatggctacctggcgcgggtgctcaaccagacttccgcatttggtgcctttcttgatccggtagcagacaaactgatggtagccgccgccctgatcgtactggtgtatctggaccggttggatgccccggttgctttgatcatcattggtcgtgaaattacaatttccgcactgcgtgaatggatggcgcaaattggcaaatccaagagtgtggcagtgtcttttctggggaagatcaaaacggctgcacaaatggtggcaattcccctgctgctctaccacgacagaatcaatgatgcgttcgattcacagacggctggcacctggctgatttacattgcagccattctgacattgtggtcgatgatctactacctgagagcagccattccacatgtgattcatcacagccagcattga

SEQ ID NO: 54545 - protein, 192 aa, Nitrosomonas europaea ATCC 19718
MLMNLPNFLTWLRIMAIPLFVGIFYLPTDWMSPATQNLVATIVFAGAALTDWLDGYLARVLNQTSAFGAFLDPVADKLMVAAALIVLVYLDRLDAPVALIIIGREITISALREWMAQIGKSKSVAVSFLGKIKTAAQMVAIPLLLYHDRINDAFDSQTAGTWLIYIAAILTLWSMIYYLRAAIPHVIHHSQH

SEQ ID NO: 54546 - DNA, 705 bp, Mycoplasma gallisepticum R
  CDS (1)..(705): transl_table=4
ctggttgtgacaacatccgcgatgcgattccgttcccgcgttttcatggccaacttgatttttagaaatatccccaatattctcaccacaattcggattattatcttaatcccaattttggtattgttttattttagtttatctgatcaaaagacgatttatcagatccacttttttaatttagcaaccctgaagattaatctttatttcttaattattgggatcttatttgtggttgcttctttctcagattttttagatggctatttggctagaaaataccaactaatctcaaactacggaaaagtttttgacccaattgctgataagttattaattaatgctgtcttaatttattttgcttatctaggggtcgtgaacttttatctagtgatcttactaatcttaagagatatttatgttgatggtttaagggtgtttgtctcaactaaaaagatcgttgtgcctgctaatatctttggtaagttaaaaacggttgctcagatggtagccatcatcattaccttttttgttgctggacagtttgttttaactaacacgatagctaatcagatctttaatctagcttattatctagccaccttcttttctttatcatctgggggaatctattcttatcagatttatcaaaaataccaaatgatggttaaacaaacaaacacagaacaaacaccaactagttaa

SEQ ID NO: 54547 - protein, 234 aa, Mycoplasma gallisepticum R
MVVTTSAMRFRSRVFMANLIFRNIPNILTTIRIIILIPILVLFYFSLSDQKTIYQIHFFNLATLKINLYFLIIGILFVVASFSDFLDGYLARKYQLISNYGKVFDPIADKLLINAVLIYFAYLGVVNFYLVILLILRDIYVDGLRVFVSTKKIVVPANIFGKLKTVAQMVAIIITFFVAGQFVLTNTIANQIFNLAYYLATFFSLSSGGIYSYQIYQKYQMMVKQTNTEQTPTS

SEQ ID NO: 54548 - DNA, 546 bp, Helicobacter hepaticus ATCC 51449
  CDS (1)..(546): transl_table=11
gtgaagcatttacctaattttttaagtatttcacggatatttttagcagttttattgctttttgtggcattacattatgatgcagtatttcctgattatattgataagagttgggtaaattacctcacttgctttattttttgtatagcttcgatcacagatttttttgatggttatattgcgcgtgaatattgtgtgcattcacgattcggggaagtatttgacccattagcagataaaatgttgattctatctgcttttatcgcacttttgattttagatagggcatctccttgggcggtatttttgattttatcgcgagaattttttattactggattgcgcgtaatggtggcaggaagtggggcaagtgtggcagcaagtagaagtggcaaatataaaacaggtgcacaaattactgcaatcgcatttttattggcagattttttccccggcggtgagatattactatggattgcagtagcgcttactctttattctggggcggactatactctaaaatatgttaaaagtttgagcgtatga

SEQ ID NO: 54549 - protein, 181 aa, Helicobacter hepaticus ATCC 51449
MKHLPNFLSISRIFLAVLLLFVALHYDAVFPDYIDKSWVNYLTCFIFCIASITDFFDGYIAREYCVHSRFGEVFDPLADKMLILSAFIALLILDRASPWAVFLILSREFFITGLRVMVAGSGASVAASRSGKYKTGAQITAIAFLLADFFPGGEILLWIAVALTLYSGADYTLKYVKSLSV

SEQ ID NO: 54550 - DNA, 735 bp, Rhodopirellula baltica SH 1
  CDS (1)..(735): transl_table=11
atggctggtccttcgatctacaacgttcccaacgcactgacgtcggcacgttttgtgttggcgatcgcggtgatggcgttgatcccgttgggaatgccattggctgccatgatcgttttcttgatcgcggcgtcgacggattggatggacggctactgggctcgcaaatacgggcaagtcacgaagcttggacgaatcttcgacccgttcgtcgacaagatcatcatttgcggttcgttcattgctttggttgcggtcccagacagccccgttgcttcttggatggccaccatcgtggtggctcgtgaattgttggtcaccagcctgcgtgggatcatcgaaggtgctggtggcgatttctcggccagttggctgggcaagtggaagatggtgctgcaatgtgcggccgtggttgccgtgttgctaacttacattgtcactcctgttccgatgtggttggcatgggcgtcatggggattgctgtgggcagccatcgcactgacggtctactccggtgttgactacaccttgattgccgcccgtgtcatgcagtccgacgcggggttggaagttcccgcggaatctcctgttgccaccgccaatccagatcccacacacgccatgcccactgacaacaactcacacgccaatcgcgtcgcaacgactaagagcaatgcttcgtcacgagatgacgccaagcgtcgcgccgtatccagtgagctcccgacccaatga

SEQ ID NO: 54551 - protein, 244 aa, Rhodopirellula baltica SH 1
MAGPSIYNVPNALTSARFVLAIAVMALIPLGMPLAAMIVFLIAASTDWMDGYWARKYGQVTKLGRIFDPFVDKIIICGSFIALVAVPDSPVASWMATIVVARELLVTSLRGIIEGAGGDFSASWLGKWKMVLQCAAVVAVLLTYIVTPVPMWLAWASWGLLWAAIALTVYSGVDYTLIAARVMQSDAGLEVPAESPVATANPDPTHAMPTDNNSHANRVATTKSNASSRDDAKRRAVSSELPTQ

SEQ ID NO: 54552 - DNA, 573 bp, Bordetella bronchiseptica RB50
  CDS (1)..(573): transl_table=11
atgccgataaacgtacccattttcctgacctggctgcggatcgccatgattccgctggtggtcggcctgttctacctgcccgagagctggatgtccgtgcccatgcgcgacaccttcgcggcctgggcgttcattatcgcggccttgaccgactggttcgacggatggctggcgcggcgctggaaccagacctcggccttcggcgcgttcctggacccggtggccgacaagctgatggtctgcgcggcgctgatcgtgctgctggacctgagccgcgtcgatgccttcatttcgctgatcatcatcggccgggaaatcaccatttcggcgttgcgcgaatggatggccaagatcggcgccagcgcgagcgtggcggtgcaccggctgggcaagttcaagacggcggcgcagatggtggcgataccgtgcctgctgtacgaccagccgctgttcggcctgagcagccgcctgatcggcgacgtgctgatcgtggtggcggcggtgctgaccgtctggtcgatgctgtattacctgcagcgggcctggcccgccatccgcgaaaagtcgcagtga

SEQ ID NO: 54553 - protein, 190 aa, Bordetella bronchiseptica RB50
MPINVPIFLTWLRIAMIPLVVGLFYLPESWMSVPMRDTFAAWAFIIAALTDWFDGWLARRWNQTSAFGAFLDPVADKLMVCAALIVLLDLSRVDAFISLIIIGREITISALREWMAKIGASASVAVHRLGKFKTAAQMVAIPCLLYDQPLFGLSSRLIGDVLIVVAAVLTVWSMLYYLQRAWPAIREKSQ

SEQ ID NO: 54554 - DNA, 570 bp, Prochlorococcus marinus str. MIT 9313
  CDS (1)..(570): transl_table=11
gtgagtgcaccatcccgcctcggttcaccatcaacactgagaagatcggcaaatgctctaaccgtggggaggtctgtcgcaggtctccccctggtgttgttgcttcaattgggtcagcctgctctggcatgggtgttgttgttgctggcagggcttagcgacgccgccgatggctggctggcccgcagagctggtggtggtagcagctggggcgctcgcctggacccgcttgctgacaagcttcttctagcagcaccaatgatctggctggccagcaacgaagccttgcctgtttggtcgatctggttactgctggccagggaactactgatttccggttggcgtgctcaagcctcatctggtgctcctgcttcttggggaggtaaagcaaagacgatccttcaattcctaagcatgctgctgttgttgtggccgcctagttggggaagccacaacttttgcctaaatatgcagcacctgggctggtggttgttctggccatctctgatcctggcgtttagctctgcggtggcatacatcaaaccccgatcaaggattgatcggcactga

SEQ ID NO: 54555 - protein, 189 aa, Prochlorococcus marinus str. MIT 9313
MSAPSRLGSPSTLRRSANALTVGRSVAGLPLVLLLQLGQPALAWVLLLLAGLSDAADGWLARRAGGGSSWGARLDPLADKLLLAAPMIWLASNEALPVWSIWLLLARELLISGWRAQASSGAPASWGGKAKTILQFLSMLLLLWPPSWGSHNFCLNMQHLGWWLFWPSLILAFSSAVAYIKPRSRIDRH

SEQ ID NO: 54556 - DNA, 537 bp, Synechococcus sp. WH 8102
  CDS (1)..(537): transl_table=11
ttgtcgttacccctgcgctccctggccaatggcctcacgatcgcccgcgcggtcgctggcttgccgttgatcctggcgctgcaggcagacgcggctgccctggcctggtggttgctgctgatggctggcctcagcgatgccgccgatggttggctggcccgtctggccggcggcggcagcagctggggggcacggctggatcccctcacggacaaggtgctgattgcagcccctcttctctggctggcctccgccggaaccctgccgctctgggctgtctggctgttgctggcccgggaactgctgatttccggctggcgctcccaggcgggagatggggggccggcatcgctggcggggaaaggcaagaccgtgctgcagttcctggcgctgctgctgatgctctggcccccatcctggagcgggcatcagcagctggtggttgccggttggtggttgttctggccgtcactgctgctggcgatcagttcagccgtcgcctacatcaggccccgatcagggctgcatcagcgctga

SEQ ID NO: 54557 - protein, 178 aa, Synechococcus sp. WH 8102
MSLPLRSLANGLTIARAVAGLPLILALQADAAALAWWLLLMAGLSDAADGWLARLAGGGSSWGARLDPLTDKVLIAAPLLWLASAGTLPLWAVWLLLARELLISGWRSQAGDGGPASLAGKGKTVLQFLALLLMLWPPSWSGHQQLVVAGWWLFWPSLLLAISSAVAYIRPRSGLHQR

SEQ ID NO: 54558 - DNA, 582 bp, Chromobacterium violaceum ATCC 12472
  CDS (1)..(582): transl_table=11
atgcccttcaatttgccgatattactgacctggctcagggtcgccctgatcccgatctgcgtggcggtattcttcctgccggactccattctgctgctgcatagccgcaacgctgtgggggccggcattttcgcattggcggccgccaccgactggctggacggctacctggcgcgcaagctggggcagacctcggccttcggcgcctttctcgacccggtggcggacaagctgatcgtggccgcggcgctgatcctgctggtgcaattgggccgcaccgagggttggatggcgatgatcatcatcggccgcgagatcaccatttcggcgctgcgcgaatggatggcgggcatgggcagccgcagcagcgtcgccgtcgcctatatcggcaagttgaagaccgctgcccagatgttggcgatcacgctgctgctgtacgacggcgcgcttgtcccgggcctggatgcgcgcgggttgggaaatttttcgatgtacgttgctgtcatattgactttgtggtcaatgatttattacctgcaaatggcggccaaggagttcgcgggtaaaaaaatagacgtttga

SEQ ID NO: 54559 - protein, 193 aa, Chromobacterium violaceum ATCC 12472
MPFNLPILLTWLRVALIPICVAVFFLPDSILLLHSRNAVGAGIFALAAATDWLDGYLARKLGQTSAFGAFLDPVADKLIVAAALILLVQLGRTEGWMAMIIIGREITISALREWMAGMGSRSSVAVAYIGKLKTAAQMLAITLLLYDGALVPGLDARGLGNFSMYVAVILTLWSMIYYLQMAAKEFAGKKIDV

SEQ ID NO: 54560 - DNA, 543 bp, Wolinella succinogenes DSM 1740
  CDS (1)..(543): transl_table=11
gtgagactggctccaaacctcctcaccctctctcgaatcgtcttctcctttttgctccttgtcgtgattctttatggcgggattctcttccctccccctattcatccgacatggatcaactacaccgcttgcgtgctttttctcatcgccagcatcaccgatttttttgatggattcatcgctagagagcatcaaatcacctccacctttggagaagtttttgaccctttggcggacaaaatgttgatgctagcgggatttgtcggtcttttagtatgggagcgcgccaacccttgggcggtcttcctcatcctctctagagagtttttcatcacagggcttcgcgtggtggccgcaagccaagggatgaatgttgcagcgagctcccttggcaaatggaagacagggcttcaaatcaccgcggtcgctttcttgctgatggattacttccccggagagattctgctttggcttgccactctcatcaccctctattcgggatatgactacaccaaagcctacatggaatcttccaaggcctaa

SEQ ID NO: 54561 - protein, 180 aa, Wolinella succinogenes DSM 1740
MRLAPNLLTLSRIVFSFLLLVVILYGGILFPPPIHPTWINYTACVLFLIASITDFFDGFIAREHQITSTFGEVFDPLADKMLMLAGFVGLLVWERANPWAVFLILSREFFITGLRVVAASQGMNVAASSLGKWKTGLQITAVAFLLMDYFPGEILLWLATLITLYSGYDYTKAYMESSKA

SEQ ID NO: 54562 - DNA, 492 bp, Gloeobacter violaceus PCC 7421
  CDS (1)..(492): transl_table=11
gtgaatctgcccaactggatcaccttcagccgccttttggccgttccggctttgttggtgattttggcacccgtgccggggccggggcaacgcatcgccgcggcagtgatctttgccttggcggctgccaccgactggctcgacggctatctggcccgccggttgggtcaggtgactgagctgggcaaatttctcgacccgctggtggacaagctgctggtgctggctccgatgctgatgctggtggaattgggccaactgcccggttggggggtgtttttgatcctggcgcgggagttggcggtggcgggctggcgggtgggccagagcaaaatcagcggtgccaacaactggggcaaggccaagaccgtcgtgcagatcctggcggtgatctttttgatcatgctgtggccggggggcgaggtgctcttttgggcagcggtggctctgacccttatctccggcgggatctacctctggccgcgccgatag

SEQ ID NO: 54563 - protein, 163 aa, Gloeobacter violaceus PCC 7421
MNLPNWITFSRLLAVPALLVILAPVPGPGQRIAAAVIFALAAATDWLDGYLARRLGQVTELGKFLDPLVDKLLVLAPMLMLVELGQLPGWGVFLILARELAVAGWRVGQSKISGANNWGKAKTVVQILAVIFLIMLWPGGEVLFWAAVALTLISGGIYLWPRR

SEQ ID NO: 54564 - DNA, 591 bp, Corynebacterium diphtheriae NCTC 13129
  CDS (1)..(591): transl_table=11
gtgagtgtgaaacaggagcgcgaaaatacgtcagagcacagcacaccatctaattggaacgttcctaatgtgctaacgagtttgagaatcattgtgattccgttgtttgcatggtttgttcttcaaagtgatggtcacatcacgcgatggttatggtgggcttttggaacctttgtggcgttgatgatcactgacaagcttgatggtgatattgcacgcgccaaaaatctggtcacaaattttgggaaaattgcggatccgattgccgataaagccctgatgattaccgctttagtcactctcaatatcattggtttagtaccgtggtggataacgattgtcatcgtcgtacgtgagctcggtattactttgtggcgtttctttgagctcaagaaaggcaacgtggtgccggcaagtaaggggggtaaaattaagaccactttgcaggcttttgccgtggcactctatctcttgccgttgcctgatgcggtgcagccgattcagttctttgtaatgctgtgtgcggttgtggtgactgtcgtaacgggagttcaatatctaatcgatgctaagaagctaaaaaatgcttga

SEQ ID NO: 54565 - protein, 196 aa, Corynebacterium diphtheriae NCTC 13129
MSVKQERENTSEHSTPSNWNVPNVLTSLRIIVIPLFAWFVLQSDGHITRWLWWAFGTFVALMITDKLDGDIARAKNLVTNFGKIADPIADKALMITALVTLNIIGLVPWWITIVIVVRELGITLWRFFELKKGNVVPASKGGKIKTTLQAFAVALYLLPLPDAVQPIQFFVMLCAVVVTVVTGVQYLIDAKKLKNA

SEQ ID NO: 54566 - DNA, 660 bp, Onion yellows phytoplasma OY-M
  CDS (1)..(660): transl_table=11
atgtttcctttgttggctaatttaattactgtttttaggattgttttagtgtttgttcttttgcctttgatgtgtgtaagtgaaagtgagcctgaatttgctaatgttttgacttttcaaattatctttatagtggctgctattactgattatttggatggttatatagctaaaaaatatcaacaacaaactgtttttggtaagttttttgatcctattgccgataaattattagttattatcacacttttttatatttgtcaatgtcgtttgtctgctacgcaaggaacttttttatttgcagatactcaaatgcctaaaaaattttttactgctgttattatgattatagtgattagagaatttttagtaacaggaataagattggtagcttctaataaagaaggagttgttattagtgcatctttttggggcaaagccaaaaccgtttttacattcgttgccatcatttgccttttttttgggttgtatacttcttctacttttgcttgtgatgcaaatttaaaaaaatggtttggatatctaagtaatataggtgatatttgcctgcttgtttcagttgttttaactattgtttctggttttgattatttttttaaaaattataaaattattcgtaaaaattttgctcctgagtaa

SEQ ID NO: 54567 - protein, 219 aa, Onion yellows phytoplasma OY-M
MFPLLANLITVFRIVLVFVLLPLMCVSESEPEFANVLTFQIIFIVAAITDYLDGYIAKKYQQQTVFGKFFDPIADKLLVIITLFYICQCRLSATQGTFLFADTQMPKKFFTAVIMIIVIREFLVTGIRLVASNKEGVVISASFWGKAKTVFTFVAIICLFFGLYTSSTFACDANLKKWFGYLSNIGDICLLVSVVLTIVSGFDYFFKNYKIIRKNFAPE

SEQ ID NO: 54568 - DNA, 594 bp, Geobacter sulfurreducens PCA
  CDS (1)..(594): transl_table=11
atggcccccgaatccgccagcaccatctggaacgtgcccaatatcctgacccttgtccgaattgccctgattccggtcatggcggtactgttgctttcgccctcgaaagaagcgggcttctgggcagcagcggttttcgcaatagcctcggtcaccgactggctggacggctacctggcgcgcaagatggagatcgtcacggtgttcggcaagtttctcgatcccattgccgacaagctgatggtgatggcggcactgatcatggttcttcccttcaacagaatacccgcctggatggtgctggtcatccttggcagagaaatcatcattacgggcctgcgcggcatcgcctccaccgaagggatcgtcatcccggccagtgatctgggtaaattcaagaccatctttcagatcgtggccatcctcggcatcctgctccacttcgattaccactggttcttcggcatcgatcatccctatctttacgtaaatatgcataacgtggggatgttctacctctggatcgccaccatcattaccatctggtccggtgtcgactacctcgtcaagttcaccaaggttattgcccgctag

SEQ ID NO: 54569 - protein, 197 aa, Geobacter sulfurreducens PCA
MAPESASTIWNVPNILTLVRIALIPVMAVLLLSPSKEAGFWAAAVFAIASVTDWLDGYLARKMEIVTVFGKFLDPIADKLMVMAALIMVLPFNRIPAWMVLVILGREIIITGLRGIASTEGIVIPASDLGKFKTIFQIVAILGILLHFDYHWFFGIDHPYLYVNMHNVGMFYLWIATIITIWSGVDYLVKFTKVIAR

SEQ ID NO: 54570 - DNA, 564 bp, Lactobacillus johnsonii NCC 533
  CDS (1)..(564): transl_table=11
atgaatttaccaaataaattaactatgtttagaattttcatgattccagtttttatgctagtcttaatctttaattggccagcaggtagtgcaactttcttaggagcacatatttattggtctcatgtgttagcagctgtaatttttgcagtggcatcaataactgattttttggatggacatattgctcgttcaagaaacttagttaccaacttcggaaaatttgctgatccattagcagataaaatgctaacgatgacagcttttgtatttttaatttcattaaatttagcgcctgcatgggtagtagctattattgtttgtcgtgaattagccgtcactggtttacgtttgattttggctgaaaataaaggccaagttttagcagcaaaaatgccaggtaaaattaaaactacgactcagatgctctcgattattttcttattgcttggtgatgtgtactatattggtacaatcttattgtacatttgcttaatctttactatttactctggttacgattactttaagcaaagcggcgacgtatttaaaggtgaaatttaa

SEQ ID NO: 54571 - protein, 187 aa, Lactobacillus johnsonii NCC 533
MNLPNKLTMFRIFMIPVFMLVLIFNWPAGSATFLGAHIYWSHVLAAVIFAVASITDFLDGHIARSRNLVTNFGKFADPLADKMLTMTAFVFLISLNLAPAWVVAIIVCRELAVTGLRLILAENKGQVLAAKMPGKIKTTTQMLSIIFLLLGDVYYIGTILLYICLIFTIYSGYDYFKQSGDVFKGEI

SEQ ID NO: 54572 - DNA, 882 bp, Gibberella zeae PH-1
  CDS (1)..(882)
atgcgcagaatggcggggttctgggatctttatcgggtcttatcgctttcgacaaaccttagcacgactgcatcatcgaatatccagggcgaattcgagcaattgagggtctgggcagctcccggtttcgaaaacaaaacacgcacaagccaagtcaagcgaagatatgagcatctccgcaaggttggcttgccgggcggcgacgagaataaaaagcagcaggacgagaaacctgttggaacgcaacctccgacaccacaagatgttacgccctcgcgacccgccgaagtgctgcacgaagacatatacaccgtacccaacatcctgacctttacgcgtctcgccgccgcccctgtcattggatacctcgttctatacgaccagcatgcgtgggcggttggcctctttgcatatgcaggcatcaccgacttgctcgacggatggatcgcgcgacgttgggacagcaagactgtcgtgggcacagtgatcgaccccatggcagacaagatgctcatgaccatcttgaccatctgtcttgctgccaagggtgctttgcccagtcgcgatgtcggtcttgccatctctgccatctactaccgctggatctccctaccgcctccaaaaacattttctcgatactgggatttttcacttccttcggctgaagtacgccccacgaccatcagcaagtacaacactttcctgcagcttgcccttgtcggagtcaccactgccgcacctatcctgaccgcagacttgaccaccgccttgaccgtcatgcaatacgttgtctctgctactaccatctggagcggagcgagctacatatacacaaaggacgcggttaaaattctcaataaggaaacgcctaaaaggccatag

SEQ ID NO: 54573 - protein, 293 aa, Gibberella zeae PH-1
MRRMAGFWDLYRVLSLSTNLSTTASSNIQGEFEQLRVWAAPGFENKTRTSQVKRRYEHLRKVGLPGGDENKKQQDEKPVGTQPPTPQDVTPSRPAEVLHEDIYTVPNILTFTRLAAAPVIGYLVLYDQHAWAVGLFAYAGITDLLDGWIARRWDSKTVVGTVIDPMADKMLMTILTICLAAKGALPSRDVGLAISAIYYRWISLPPPKTFSRYWDFSLPSAEVRPTTISKYNTFLQLALVGVTTAAPILTADLTTALTVMQYVVSATTIWSGASYIYTKDAVKILNKETPKRP

SEQ ID NO: 54574 - DNA, 672 bp, Apis mellifera
  CDS (1)..(672)
atgcttcaaggtattaaacagactaaacgaaaagtagaaataattattgagaaagaaaatatttggacagtgccaaattttctttgtatgggtcgaatcttaacatcaccatacttaagttatttaattttatcacaagattatcagatagcattgtggttattagtatttgcaggatttagtgacctagctgatggatggattgcacgtacatggtcatcacaagcttctaagcttggtacttttctagatccagttgcagataaattacttgtaggtacactattcctatctttggcttgggtaggattggttcctattcctttaacatgtcttgttattacacgagatattgtcttgatatctgctgcttcatacataagatataaatctttaccttctccaaaaacttttgcaagatattttaatcctacatatgcaacagcacaattagctccaacatccataagtaaaatcaatactgctattcaattatcttttattgctggaacattggctgcacctgtatttcattttgtaaatcatccaattttaatagcttcctgttacataacagcattaacgacattagcaggaggtttaagttatttaatatcaaaaaatacatataaattcttaagaaaaaaaacttcatcaaaaacatctttttaa

SEQ ID NO: 54575 - protein, 223 aa, Apis mellifera
MLQGIKQTKRKVEIIIEKENIWTVPNFLCMGRILTSPYLSYLILSQDYQIALWLLVFAGFSDLADGWIARTWSSQASKLGTFLDPVADKLLVGTLFLSLAWVGLVPIPLTCLVITRDIVLISAASYIRYKSLPSPKTFARYFNPTYATAQLAPTSISKINTAIQLSFIAGTLAAPVFHFVNHPILIASCYITALTTLAGGLSYLISKNTYKFLRKKTSSKTSF

SEQ ID NO: 54576 - DNA, 729 bp, Candida albicans SC5314
  CDS (1)..(729): transl_table=12
atgaaaaagaaaaaaaaattttttgcgtgtaattttttttttctttgttgttccacactcatgattagactttatccaggcataagacctttgcgtacaggggttgttcacttttccaccaaacaggctatacggtcatcgttgtggactataccgaatgtgttgacatatacacgtattattactacaccgtttattggatactatataactactggccagtctactgccgcgttgctgttgttcacgtactcgtgtgtcaccgactttgttgacgggtacattgctagaaagtacaacatgaagtcgattgtggggtcgattgttgatccgttggccgataagttgcttatgacggtgtgtacggtgtcgttggggtatgttcatgcgattcctccggtgatagcaagcataataattggccgcgatgtgatgttgagttttatgtcgttctactataggtacaagagcttgccggcgcccaagacgtttgataagtttattagcattggccagattccgactataagtgtgcaccccaatatgttgggcaagatcaatacggcgttgcagatggtgtacattgggagtttggtgtaccgcccgttggttgagtcggttgtttctggggccgtttatgatgggttggggttggttgtgggggcgaccacattggcgagtggggccaactacttgtttagcaaaagttcatggagatatgtaaaatga

SEQ ID NO: 54577 - protein, 242 aa, Candida albicans SC5314
MKKKKKFFACNFFFLCCSTLMIRLYPGIRPLRTGVVHFSTKQAIRSSLWTIPNVLTYTRIITTPFIGYYITTGQSTAALSLFTYSCVTDFVDGYIARKYNMKSIVGSIVDPLADKLLMTVCTVSLGYVHAIPPVIASIIIGRDVMLSFMSFYYRYKSLPAPKTFDKFISIGQIPTISVHPNMLGKINTALQMVYIGSLVYRPLVESVVSGAVYDGLGLVVGATTLASGANYLFSKSSWRYVK

SEQ ID NO: 54578 - DNA, 942 bp, Tribolium castaneum
  CDS (1)..(942)
atgaatagttttaaaattagcagtatttttgtgaacaaattgctccgacggtgccacttccgcacttgcataaacctagactggaacatttccgttaattacattcagggcacgtcgcactcgaaattcttttgcacaacttcaaacaaggaaaatgaggagtatactcgtcacaagaccttggtcaaagacgagttcaaagcctacattcggcaaaacaccgagaagttacgagacactgaacaaaaactcaaacagaagggaacggtgatattacaggacattaaagagaccactgataaagtcaagggaaaagtggaggaagtgattgagcgggagaacatttacacaatccccaatttcctctgtgtttcacgaatcctcatttcgccgtacttgggcgtgttgatagtccaggccaactttgattttgcattggccgtccttggcatagctgcagttactgaccttcttgacgggtggatcgcccgcacgtgggaaagccagtcgtctaaagtcgggagtttcctggaccccatggctgacaaggtcctgatagccaccttgtttctgaccctgacttatgccgacttaatccccatagctctgaccagtctaattgtactacgtgacgtctgcctggtcactgcaggttttgtcatacggtacaggtcactaccaccacccaggactttgagtcggtattttgacgccacgcacgccactgctcagttagcgccgacttttatcagcaaagttaacacaggggtccagttgttactggtggggtcaacactggcggcacctgtgtttcattatgttggccatcctgcgttagagtgcctatggtacattactggtgctacgacactggcagctgggtttagttacatcttttcgaaaaatacgtatcgaattttgaaaaaagtacccaaaaagtag

SEQ ID NO: 54579 - protein, 313 aa, Tribolium castaneum
MNSFKISSIFVNKLLRRCHFRTCINLDWNISVNYIQGTSHSKFFCTTSNKENEEYTRHKTLVKDEFKAYIRQNTEKLRDTEQKLKQKGTVILQDIKETTDKVKGKVEEVIERENIYTIPNFLCVSRILISPYLGVLIVQANFDFALAVLGIAAVTDLLDGWIARTWESQSSKVGSFLDPMADKVLIATLFLTLTYADLIPIALTSLIVLRDVCLVTAGFVIRYRSLPPPRTLSRYFDATHATAQLAPTFISKVNTGVQLLLVGSTLAAPVFHYVGHPALECLWYITGATTLAAGFSYIFSKNTYRILKKVPKK

SEQ ID NO: 54580 - DNA, 573 bp, Prochlorococcus marinus str. NATL1A
  CDS (1)..(573): transl_table=11
atgaacaaaagaattatgaacgcaaaaagatttatgacttggccgagaattataaatggacttacagtttcaaggatattacttggattaccaataattatttcactgaaaaatgataataatgaagtttttatttttctaatcctgatagctggtcttactgattatctagacgggtattttgcacgtaaatatgatcataaatctgcttttggcgcaaagcttgatcctctagcagacaaaatccttcttattggtccaatgatttggttggttcatgagaatctagtgccgttatgggctatatggttaataatatcgagagaattgttaataactagttggcgatcaggtaaaacctcaggtggtccagcttcaattcagggtaaatataaaactacatttcagtttgcaagtataattctattattatggccaaaaaactggggtacaatttatacaatcaatattattaataaaataggctatttctcattctggatagcattgtttcttactttaagttctgctatcaagtatatactcaatcaaaaagaagctcatcagaactaa

SEQ ID NO: 54581 - protein, 190 aa, Prochlorococcus marinus str. NATL1A
MNKRIMNAKRFMTWPRIINGLTVSRILLGLPIIISLKNDNNEVFIFLILIAGLTDYLDGYFARKYDHKSAFGAKLDPLADKILLIGPMIWLVHENLVPLWAIWLIISRELLITSWRSGKTSGGPASIQGKYKTTFQFASIILLLWPKNWGTIYTINIINKIGYFSFWIALFLTLSSAIKYILNQKEAHQN

SEQ ID NO: 54582 - DNA, 570 bp, Prochlorococcus marinus str. MIT 9303
  CDS (1)..(570): transl_table=11
gtgagtgcaccatcccgcctcggttcaccatcaacactgagaagatcggcaaatgctctaaccgtggggcgttctgccgcaggcctccccctggtgttgttgcttcaattgggtcagcctgctctggcatgggtgttgttgctgcttgcagggcttagcgacgccgctgatggctggctggcccgaagagcaggtggtggtagtagctggggcgctcgcctggacccgcttgctgacaagcttcttctagcagcaccgatgatctggctggccagcaacgaggtcttgcctgtttggtcgatctggttactgctggccagggaactactgatttccggttggcgtgctcaagtctcatctggtgcgcctgcttcttggggaggtaaagcaaagacgatccttcaattcctaagcatgctgctgttgttgtggccgcctagttggggaagccacaacttttgcctaaatatgcagcacctgggctggtggttgttctggccatctctgttcctggcgcttagctctgcggtggcatacatcaaaccccgatcaaggattgatcggcactga

SEQ ID NO: 54583 - protein, 189 aa, Prochlorococcus marinus str. MIT 9303
MSAPSRLGSPSTLRRSANALTVGRSAAGLPLVLLLQLGQPALAWVLLLLAGLSDAADGWLARRAGGGSSWGARLDPLADKLLLAAPMIWLASNEVLPVWSIWLLLARELLISGWRAQVSSGAPASWGGKAKTILQFLSMLLLLWPPSWGSHNFCLNMQHLGWWLFWPSLFLALSSAVAYIKPRSRIDRH

SEQ ID NO: 54584 - DNA, 558 bp, Desulfovibrio vulgaris subsp. vulgaris str. Hildenborough
  CDS (1)..(558): transl_table=11
atgttcaatctagccaatcgcatcacgatggcccgggtgcttcttgtcccgctcatcatcgtccttctgtattttccgggacgtatcacctgtcttctggccgtggtgttcttcatcatcgcctcgctcactgacctcctcgacgggcatatagcccgcaaggagaacatggtgacgagcttcgggaagtttctcgacccgctggcagacaagcttctcatctgctcgattctcgtcatgctggtggagttgaactggatacctgcgtgggtctccatcatcatcatctgccgtgaactgatggtcaccggattgcgcgccatggcggcagacgagggtatcgtcatcgcagcagacaagtacggaaagatcaagacggtgcttcagatggtggcgctcgtccccctcatgctgcactacccgtggttcggcttcgaccctcaacccctgggccagtttgtgctttacatggctttggttttgactgtattttcagggttcaactaccttaatggtttctacaggaactggctcgacaaggacgcggcagcaggctag

SEQ ID NO: 54585 - protein, 185 aa, Desulfovibrio vulgaris subsp. vulgaris str. Hildenborough
MFNLANRITMARVLLVPLIIVLLYFPGRITCLLAVVFFIIASLTDLLDGHIARKENMVTSFGKFLDPLADKLLICSILVMLVELNWIPAWVSIIIICRELMVTGLRAMAADEGIVIAADKYGKIKTVLQMVALVPLMLHYPWFGFDPQPLGQFVLYMALVLTVFSGFNYLNGFYRNWLDKDAAAG

SEQ ID NO: 54586 - DNA, 579 bp, Listeria monocytogenes str. 4b F2365
  CDS (1)..(579): transl_table=11
atgaatttacctaataaattgacggttatccgaatttttatgataccaatttttgtcattctttgtgtagtgccattcgactggggaagcgttacttggcttgattccactattccggtaactagtttagtagcaactattattttcattgtagcggctcttacagactggtttgatggacatttagctcgcaagtataatttgattactaacttcggtaaatttgctgatccgatggctgataaactacttgtagcagctgcatttattattcttgtagaaatgcatatcgctccatcttgggtagttattcttattattagtcgtgaactagctgttactggtcttcgcttacttttagttgaaggcggagaagtacttgcagctggtcaacttggtaaaattaaaacattcacacaaatgattgctattccgcttatgttattaaataattttccatttgcttggacaggtattcgtgtggatttagtgttcttgtatgtatgtgcattctttgcagtatggtcaggtatcgattatttctacaaaaatcgtggtgttttcaaagggtctatgtaa

SEQ ID NO: 54587 - protein, 192 aa, Listeria monocytogenes str. 4b F2365
MNLPNKLTVIRIFMIPIFVILCVVPFDWGSVTWLDSTIPVTSLVATIIFIVAALTDWFDGHLARKYNLITNFGKFADPMADKLLVAAAFIILVEMHIAPSWVVILIISRELAVTGLRLLLVEGGEVLAAGQLGKIKTFTQMIAIPLMLLNNFPFAWTGIRVDLVFLYVCAFFAVWSGIDYFYKNRGVFKGSM

SEQ ID NO: 54588 - DNA, 561 bp, Mycoplasma mobile 163K
  CDS (1)..(561): transl_table=4
atgaatttagcaaacagaattacagtttttagattgattatttttttcccttttgttattcttttgagtcttttttactttttcagatctcaaaatgaatacttatatagtgctgcagcaatttttgttttagcaatgtttagtgattttctagatggttatattgcaagaaagcaaaatacaattacaacattcggaaaactttttgaccctttagctgataaaattattacaaatacagccttaattgctcttagtgtttttggatatttaccaatttttgtaacagctttatttattgctagagatattattgtagatggttcaagaaatatagctgcagccaataaaattgaaattgcagcttcaatttgagggaaatacaaaacaattattgtttcaataggagtttcaattgttttatttcttgctcctatttttaatacaaataatattattatgcaaataattaatattccaatttatattggtttgatactttcacttgtatctggaatccaatatttatctaaaataaaagaatatataaacgctaaataa

SEQ ID NO: 54589 - protein, 186 aa, Mycoplasma mobile 163K
MNLANRITVFRLIIFFPFVILLSLFYFFRSQNEYLYSAAAIFVLAMFSDFLDGYIARKQNTITTFGKLFDPLADKIITNTALIALSVFGYLPIFVTALFIARDIIVDGSRNIAAANKIEIAASIWGKYKTIIVSIGVSIVLFLAPIFNTNNIIMQIINIPIYIGLILSLVSGIQYLSKIKEYINAK

SEQ ID NO: 54590 - DNA, 582 bp, Bartonella quintana str. Toulouse
  CDS (1)..(582): transl_table=11
atgaaaaatcatactttttcttttccaaatattctgacttatgcacggattgttgcagtaccaatggttgttgcgtgtttttttttagaaggacggctacaatcaagtgatatcacacgttggattgccgtttccatttttgtggttgcatccattactgactttcttgatggctaccttgcccgtatttgggaacaaacatccaatattggtcgcatgttagatccaattgcagataaacttctcgtatctgcatgtttgctattgcttgccgcagacagtactattgcgggatggacactatgggcagccatcattattctttgtcgggaaattctcgtatcaggattacgtgaatatttggctgaactgaaagtcagtgttcctgtttctcgtcttgcaaaatggaaaacttttgtacaaatgatagccattatctttcttttagcgggaccggctggtagtaaagttgtcccttacacaatggaatttggcatcactatgctgtggattgctgctctcctcacattgtggacagggtgggattattttcgggcaggcctaaaacatgtaattccataa

SEQ ID NO: 54591 - protein, 193 aa, Bartonella quintana str. Toulouse
MKNHTFSFPNILTYARIVAVPMVVACFFLEGRLQSSDITRWIAVSIFVVASITDFLDGYLARIWEQTSNIGRMLDPIADKLLVSACLLLLAADSTIAGWTLWAAIIILCREILVSGLREYLAELKVSVPVSRLAKWKTFVQMIAIIFLLAGPAGSKVVPYTMEFGITMLWIAALLTLWTGWDYFRAGLKHVIP

SEQ ID NO: 54592 - DNA, 582 bp, Bartonella henselae str. Houston-1
  CDS (1)..(582): transl_table=11
atgaaaaatcatactttttcttttccaaatattttaacttatgcacgaattgttgctgtgccaatggttgttgcatgcttttttttagaaggacgactgcaatcaagtgatattgcacgttgggctgctgtttctatttttgtagttgcatctattactgactttcttgatggttaccttgcccgtatttgggaacaaacatctaatattgggcgcatgttagatccaattgcagataaacttctcgtctcggcctgtttactcttgctcgcagcagacagtactattgcggggtggacattatgggcagctattattattctttgtcgggaaattcttgtatccggattgcgtgaatatttagctgaattgaaagttagtgtccctgtctctcgcctcgcaaaatggaaaacttttgtacaaatgatagctattatctttcttttagcgggaccagctggcaataaaattatcccttatacattggaatttggcatcactatgctgtggatttctgcccttcttacattgtggacaggatgggattattttcgtgcaggtttaaaacatgttatcatataa

SEQ ID NO: 54593 - protein, 193 aa, Bartonella henselae str. Houston-1
MKNHTFSFPNILTYARIVAVPMVVACFFLEGRLQSSDIARWAAVSIFVVASITDFLDGYLARIWEQTSNIGRMLDPIADKLLVSACLLLLAADSTIAGWTLWAAIIILCREILVSGLREYLAELKVSVPVSRLAKWKTFVQMIAIIFLLAGPAGNKIIPYTLEFGITMLWISALLTLWTGWDYFRAGLKHVII

SEQ ID NO: 54594 - DNA, 579 bp, Bacillus thuringiensis serovar konkukian str. 97-27
  CDS (1)..(579): transl_table=11
gtgaatttaccaaataaaattacgatatctagaatctgcttaattccaatttttatggtaattatgttagcaccctttgattggggttcatacacaattggtgatgttgatttaccaattcaacatttagtaggagcgcttatctttattgttgcttcggctacagattggattgatggacattacgcaagaaagtataatcttgtaacgaatttaggaaagttccttgacccgttagctgataaattacttgtttcagcagcacttatcacgttagttgagatgcaatacgtacctgcttggatcgttattgtcattataagccgtgagtttgcggtaactggtttacgtcttgtactcgctggaacaggagaagtagttgcggcaaatcagctaggaaaaattaagacatggacacaaattatcgcgattgcagcatatttattacacgatgtacctttaaacttaatccatattccggtagctgacatctttatatggattgcattaatttttactgttatttcaggatgggattatttctggaaaaatagagctgcttttgtaaactcaaaatag

SEQ ID NO: 54595 - protein, 192 aa, Bacillus thuringiensis serovar konkukian str. 97-27
MNLPNKITISRICLIPIFMVIMLAPFDWGSYTIGDVDLPIQHLVGALIFIVASATDWIDGHYARKYNLVTNLGKFLDPLADKLLVSAALITLVEMQYVPAWIVIVIISREFAVTGLRLVLAGTGEVVAANQLGKIKTWTQIIAIAAYLLHDVPLNLIHIPVADIFIWIALIFTVISGWDYFWKNRAAFVNSK

SEQ ID NO: 54596 - DNA, 594 bp, Acinetobacter sp. ADP1
  CDS (1)..(594): transl_table=11
gtgtctatgacaacaggtcgaatcctgaatatcccaaatattttaacacttgcacgaatcgcccttattcctgtttttcttatagtggcatattggccacctgcaatcggggtaaacttccatgaaggaagctttctgcggcatctcgtgctgacagccatttttattttggctgcggttacagactggtttgatggttatttggcgcgagctttaaaccagacatcggcttttggccgttttttagatcctgtggcagataaattaatggtggcttcggcactgattgtattggtgcagtggcaaccgacgatctccatggcatttgctgcaattgtgattatctcacgagagattacagtttctgcattacgcgagtggatggcagaactgggtgcaagaaccaatgttgcagtttcgaccgtaggtaaatataaaacagctttccagatgattgcgattagcgtcttcttattaaactggcagcccctggatctgctggcgtatgccttgctttacacggctgtgattttgactttatggtcgatgtttatttatctgaaagcagcttggccttatctcaaacagccttaa

SEQ ID NO: 54597 - protein, 197 aa, Acinetobacter sp. ADP1
MSMTTGRILNIPNILTLARIALIPVFLIVAYWPPAIGVNFHEGSFLRHLVLTAIFILAAVTDWFDGYLARALNQTSAFGRFLDPVADKLMVASALIVLVQWQPTISMAFAAIVIISREITVSALREWMAELGARTNVAVSTVGKYKTAFQMIAISVFLLNWQPLDLLAYALLYTAVILTLWSMFIYLKAAWPYLKQP

SEQ ID NO: 54598 - DNA, 615 bp, Propionibacterium acnes KPA171202
  CDS (1)..(615): transl_table=11
atggccacgaagaaggaccgtcccagcagcatcaacgttcccaatgcgctgaccctgctgagggtcgttgcggttcccatcttcggatggatgctattagcccatgctcatgaaggtggctggcggacgacaacgacgatcgttttcatggtggcgatcctcaccgacttcgtcgatggcaaggttgctcgtaaatacaacctcgtcaccaacttcggcaagatcggtgattcgattgctgacaaagcactgaccggcatggcctttatcggcctctcgattatcggcgaactcccgtggtggatgacgattatcatcctgttgcgtgaatggggcatcaccgtcatgcgaatgaagatgctcaagtacaaggtgatggcggctaacaagggcggcaaactgaaaacggccatgcagtcgctggcgattacgctgttctgcctgggcttgtggcgcatgcctacttttgtctacgtcatcgcctgggcggtcatgatcattgccttcgtcctcacagtgattaccggcctggtgtacatccgcgacgccattctcattcgtaaccgcgcaaagatgaccgagtccaggccggcccggaagcgcacgctcaaatga

SEQ ID NO: 54599 - protein, 204 aa, Propionibacterium acnes KPA171202
MATKKDRPSSINVPNALTLLRVVAVPIFGWMLLAHAHEGGWRTTTTIVFMVAILTDFVDGKVARKYNLVTNFGKIGDSIADKALTGMAFIGLSIIGELPWWMTIIILLREWGITVMRMKMLKYKVMAANKGGKLKTAMQSLAITLFCLGLWRMPTFVYVIAWAVMIIAFVLTVITGLVYIRDAILIRNRAKMTESRPARKRTLK

SEQ ID NO: 54600 - DNA, 543 bp, Streptococcus pyogenes MGAS10394
  CDS (1)..(543): transl_table=11
atgataaaaaaagaaaatattcctaatctattaactcttgttcgaatcgcaatgattcctttctttctttttattacttcctcatctaataaggtggggtggcatatttttgcagctgtgatttttgcaattgccagttttaccgattatctagatgggtatcttgcgcgtaagtggcatgtagtcagtaattttggaaagtttgccgatcctctagcagataagatgcttgtcatgagtgcctttatcatgttagttggacttggcttagttcctgcgtgggtatcagctgttattatttgccgagaattggcagtaactggtcttcgattactacttgttgaaaccggaggaaaggtccttgcagctgctatgctgggaaaaatcaaaacagcgacacaaatgttgtctattattttattactttgccattggatattcctaggaaacgtcttactctatattgctctttttttcactatttattctggatatgattattttaaaggagcaagctttctttttaaggatacgtttaaataa

SEQ ID NO: 54601 - protein, 180 aa, Streptococcus pyogenes MGAS10394
MIKKENIPNLLTLVRIAMIPFFLFITSSSNKVGWHIFAAVIFAIASFTDYLDGYLARKWHVVSNFGKFADPLADKMLVMSAFIMLVGLGLVPAWVSAVIICRELAVTGLRLLLVETGGKVLAAAMLGKIKTATQMLSIILLLCHWIFLGNVLLYIALFFTIYSGYDYFKGASFLFKDTFK

SEQ ID NO: 54602 - DNA, 570 bp, Leifsonia xyli subsp. xyli str. CTCB07
  CDS (1)..(570): transl_table=11
gtgagcaattggaacctgcccaatgtcctcacgatcgtccgcatcctgctcgcgccccttttcgtgtggatgctgctcgcggacgccggtcgcgacggccccctccgctgggccgctgccgctctgtttgtgatcgcgatcgcgacggatggcgtcgacggagcgatcgcgcgccgcaacaacctggtcaccgatctcggaaaactgctcgacccgatcgcggacaaagtgctcaccggtggcgcactcatcgcgctgtctgtcctgggggagctgccgtggtgggtcgccatcgtgatcctccttcgggagatcggcatcacggtctaccggttcgtcgtgatccggcagggggtgatcgctgcctcgcgcggcggcaagatcaagaccatcgtgcagtccgtcgcgatctcatccgccctcttcccgctctggaccgtgttcggggaggggatgttctgggtcaacggcatcctgatgaccgctgcggtcgtcctgaccgtcgtcacgggattcgattatctctggcaggcctatcgcgggcgggcggagaagcgtgccgcagcctga

SEQ ID NO: 54603 - protein, 189 aa, Leifsonia xyli subsp. xyli str. CTCB07
MSNWNLPNVLTIVRILLAPLFVWMLLADAGRDGPLRWAAAALFVIAIATDGVDGAIARRNNLVTDLGKLLDPIADKVLTGGALIALSVLGELPWWVAIVILLREIGITVYRFVVIRQGVIAASRGGKIKTIVQSVAISSALFPLWTVFGEGMFWVNGILMTAAVVLTVVTGFDYLWQAYRGRAEKRAAA

SEQ ID NO: 54604 - DNA, 537 bp, Rickettsia typhi str. Wilmington
  CDS (1)..(537): transl_table=11
atgaaaaatttacctaattatttaactatcgctcgaataatggtgattcctgttattatattactattttatataaataattcacttgcacgtaagttaggggcattattatttgttttagctagtattacagattttttcgatggttatattgcaagaaaatataatttagttactagttttggtaagatgtttgatcctatagcagataagctattagtaggttgtgttactataatgctattaaagaaagataatgtagatgagataccttgcttattaattttagcaagagaatttttagttagcggtcttcgggaatttttagctctagtaaaggtgagtgtacctgtatcaagacttgctaagctaaaaacatttttacaaatgtttgctttatccatattgatattaggttcaaaaggttcaggcattatttatttagatatagtaggggaaataattttatggattgctgcttttttaacaattattacagggtattcttattttaaagcatgtaagacatatttttag

SEQ ID NO: 54605 - protein, 178 aa, Rickettsia typhi str. Wilmington
MKNLPNYLTIARIMVIPVIILLFYINNSLARKLGALLFVLASITDFFDGYIARKYNLVTSFGKMFDPIADKLLVGCVTIMLLKKDNVDEIPCLLILAREFLVSGLREFLALVKVSVPVSRLAKLKTFLQMFALSILILGSKGSGIIYLDIVGEIILWIAAFLTIITGYSYFKACKTYF

SEQ ID NO: 54606 - DNA, 582 bp, Bacillus licheniformis ATCC 14580
  CDS (1)..(582): transl_table=11
atgtttaatttaccgaataaaatcacgctttctagaatcgcattaattcctgtttttatggtcatcatgcttgtgccgtttcagtggggggctgtctccttcggcagcgagtcgattccggtcacccatttgatcggcgcactgctgtttattttcgcttcggtcaccgattgggttgacggctattatgcaagaaagctgaaccttgtaacaaactttgggaaattccttgacccgcttgcagacaagctgctcgtgtcttccgctttgattattctggtgcattaccatcttgctccggcctggatggccattgtcattatcagccgggaatttgccgtaacgggactgcggctcgtccttgcgggaacgggggaagtcgtcgcagccaacatgcttggaaaagtgaaaacatgggcccagatcatcgcgatctctgcccttttgcttcacaatctcccatttgagcttgtatccttcccgttcggctctcttgctttatgggtggctgtctttttcacagtcgtatccggctgggattatttcgctaaaaactgggatgctttaaaaacatcgaactaa

SEQ ID NO: 54607 - protein, 193 aa, Bacillus licheniformis ATCC 14580
MFNLPNKITLSRIALIPVFMVIMLVPFQWGAVSFGSESIPVTHLIGALLFIFASVTDWVDGYYARKLNLVTNFGKFLDPLADKLLVSSALIILVHYHLAPAWMAIVIISREFAVTGLRLVLAGTGEVVAANMLGKVKTWAQIIAISALLLHNLPFELVSFPFGSLALWVAVFFTVVSGWDYFAKNWDALKTSN

SEQ ID NO: 54608 - DNA, 579 bp, Bacillus cereus E33L
  CDS (1)..(579): transl_table=11
gtgaatttaccaaataaaattacaatatctagaatctgcttaattccaatttttatggtaattatgttagcgccctttgattggggttcatacacaattggtgatgttgatttaccaattcaacatttagtaggagcgattatctttattgttgcttcggctacagattggattgatggacattacgcaagaaagtataatcttgtaacgaatttaggaaagttccttgacccgttagctgataaattacttgtttcagcagcacttatcacgttagttgagatgcaatacgtacctgcttggatcgttattgtcattataagccgtgagtttgcggtaactggtttacgtcttgtactcgctggaacaggagaagtagttgcggcaaatcagctagggaaaattaagacatggacacaaattatcgcgattgcggcatacttattacacgatgtacctttaaatttaatccatattccagttgctgatatctttatatggattgcattaatttttactgttatttcaggatgggattatttctggaaaaatagagctgcttttgtaaactcaaaatag

SEQ ID NO: 54609 - protein, 192 aa, Bacillus cereus E33L
MNLPNKITISRICLIPIFMVIMLAPFDWGSYTIGDVDLPIQHLVGAIIFIVASATDWIDGHYARKYNLVTNLGKFLDPLADKLLVSAALITLVEMQYVPAWIVIVIISREFAVTGLRLVLAGTGEVVAANQLGKIKTWTQIIAIAAYLLHDVPLNLIHIPVADIFIWIALIFTVISGWDYFWKNRAAFVNSK

SEQ ID NO: 54610 - DNA, 564 bp, Legionella pneumophila subsp. pneumophila str. Philadelphia 1
  CDS (1)..(564): transl_table=11
gtgagtacgttaaccagtttgcctaatatattaaccttaatgcggatttcgatcattccagtatttattatggtattttattttcctttcaaatgggctcatcctaccgctgcggttctttttgctattgcaagcattactgattggttagacggttatttggcgcgcaaacttgaaatgatgtctcattttggagcttttcttgatcccgtcgccgataaattattggtatcgacaagcttgttattgttagttggagcgaaagatatagattatatcactatacctgcaatcgtaatcgttggacgagaaatcgtgatttcagctttgcgcgagtggatggctgaagttggacgtcgtgctagtgttgccgttgggtatatagggaaagttaaaacttctttgcaaatgatcgctttggtattattgctggcatttaatccccttgtttcttggtgggggagcttagggtttgttcttctttatgtgtctgctattttgacgatttggtccatggtgatttatttggctattgcttggccagagttaatgaaaaaaagttaa

SEQ ID NO: 54611 - protein, 187 aa, Legionella pneumophila subsp. pneumophila str. Philadelphia 1
MSTLTSLPNILTLMRISIIPVFIMVFYFPFKWAHPTAAVLFAIASITDWLDGYLARKLEMMSHFGAFLDPVADKLLVSTSLLLLVGAKDIDYITIPAIVIVGREIVISALREWMAEVGRRASVAVGYIGKVKTSLQMIALVLLLAFNPLVSWWGSLGFVLLYVSAILTIWSMVIYLAIAWPELMKKS

SEQ ID NO: 54612 - DNA, 594 bp, Burkholderia pseudomallei K96243
  CDS (1)..(594): transl_table=11
atgccgttcaatttcccgattttcctgacgtgggtgcgaatcgtgctgattccgctcgtcgtcggtgtgttttatctgccggacacgatgctgagcgccgaccatcgcaatctggcggcggccgtgattttcattctcgccgcgctgaccgactggttcgacggttatctcgcgcggaagtggaaccagacgtcggcgttcggcgcgtttctcgacccggtcgccgacaagctgatggtgacggccgcgctgctgatgctcgtgcagctcgcgcgcatcgacgcggcgatcgcgctcgtgatcgtcggccgcgaaatcgcgatctcggcgctgcgcgaatggatggcgcagatcggcgcatcgaagagcgtcgcggtgaattcgctgggcaagttcaagaccgcgtgccagatggtcgcgattccgatgctgctcttctacggccggctgccgttcggcggcggcgtcgcgatcgacacgcgcggatggggcgaatggctgatctatctcgcggccgtgttgaccatctggtcgatgctttactacatgaagctcgcgtggccgcagattcgcgagcgcggcggcgcggcctga

SEQ ID NO: 54613 - protein, 197 aa, Burkholderia pseudomallei K96243
MPFNFPIFLTWVRIVLIPLVVGVFYLPDTMLSADHRNLAAAVIFILAALTDWFDGYLARKWNQTSAFGAFLDPVADKLMVTAALLMLVQLARIDAAIALVIVGREIAISALREWMAQIGASKSVAVNSLGKFKTACQMVAIPMLLFYGRLPFGGGVAIDTRGWGEWLIYLAAVLTIWSMLYYMKLAWPQIRERGGAA

SEQ ID NO: 54614 - DNA, 570 bp, Methylococcus capsulatus str. Bath
  CDS (1)..(570): transl_table=11
atgcacttcaacctgcccacttatctgacgctgctgaggatcgtcctcatcccggtcctcacggtggcgttctatctgccctggagcggcgcccacgtcgtcagcggcgtcattttcgcaatcgccgcgatcaccgactggttggatggttacctcgcgcggcgaatgggtctggccacccgcttcggagcattcctcgaccccgtggccgacaagctgatggtcgcggtcgcgctggtcctcatcgtacaggccgaaccccggccgctgatcgcactagcctccgccatcatcatcggcagggaaatcaccatcgcgtcgctgcgcgaatggatggcagaaatcgggcagcggaaacgggtcgaggtatcggccctgggcaaatggaaaaccaccttccagatgctggcgatcaccctcctgctgctcggtctggacataccgcacggcggggtcaagacgacgggcgaattgttgctagtggtttccgcgaccctcacgctgtggtcaatgatcgtgtacctccaggccgccatgcccgtgttcaaggcaggtgccgaggccgaatga

SEQ ID NO: 54615 - protein, 189 aa, Methylococcus capsulatus str. Bath
MHFNLPTYLTLLRIVLIPVLTVAFYLPWSGAHVVSGVIFAIAAITDWLDGYLARRMGLATRFGAFLDPVADKLMVAVALVLIVQAEPRPLIALASAIIIGREITIASLREWMAEIGQRKRVEVSALGKWKTTFQMLAITLLLLGLDIPHGGVKTTGELLLVVSATLTLWSMIVYLQAAMPVFKAGAEAE

SEQ ID NO: 54616 - DNA, 594 bp, Azoarcus sp. EbN1
  CDS (1)..(594): transl_table=11
atgttattcaacgttccaaattcgctgacctgggcgcgcattgcgctgatcccgctgttcgtcggcgtgttttatcttcccgacagctggctcgacgccgaagagaaaaatttcgccgcaacgatcattttcatcatcgcagccgccaccgactggttcgacggttatcttgcccgcgcactcaaccagacttcggctttcggcgcgtttctcgacccggtcgcggacaagctgatggttgcagcagcgctgatcctgctcgtgcagctcgcgcgcgtcgattccatcatcgctgtcgtcatcatcggccgggagatcacgatttcggcactccgcgaatggatggcgcgggtcggccagtcggccggtgttgcggtcgcttttgtcgggaagttgaaaaccgcggcgcagatgacggccattcccctgctgctctataatgccccgctactgtcgctggacctgcgcgtgatcggcaacgtcctgatttacatcgccgcagccctgacgttgtggtcgatgggctattaccttcaccgggcgatgccacagcttgcccgctacgaccgggatattcgaaacaaaagcggttga

SEQ ID NO: 54617 - protein, 197 aa, Azoarcus sp. EbN1
MLFNVPNSLTWARIALIPLFVGVFYLPDSWLDAEEKNFAATIIFIIAAATDWFDGYLARALNQTSAFGAFLDPVADKLMVAAALILLVQLARVDSIIAVVIIGREITISALREWMARVGQSAGVAVAFVGKLKTAAQMTAIPLLLYNAPLLSLDLRVIGNVLIYIAAALTLWSMGYYLHRAMPQLARYDRDIRNKSG

SEQ ID NO: 54618 - DNA, 672 bp, Silicibacter pomeroyi DSS-3
  CDS (1)..(672): transl_table=11
atgaagtggaacctgcccaatatcctgactctgctgcgcctgcttgccgcgcccggcctggccgtcatgtttctctattttacccggccctatgccgattggttcgcgctgatcctgttcgtttcggcggcgatcaccgactggttcgacggctatctggcaagggcctggaaacaggaaaccaagatgggcgcgatgctggatccgatcgcggacaaggcgatggtggtgatcgcgctgatgattctggtgggctactcgaccgagcactggacgccctggctggtgctgcccgccacggtgatcctgttccgcgaggtctttgtctcgggcctgcgcgagtttctgggcgatgttgccggaacgctcaaggtcaccaagctggccaagtggaagaccaccgcccagatgatcgccatcgcggtgctgttcagccaggggattttcgaacactatctggtgatgtcctcgtttggcatggatcagggcatcgtcgatcagatcatggcgggcgaggtggcggatctgcagggtctgcgctggaagctggacggcatgatctggtccgggcgggtgggcttgtggctcttgtggatcgcggctggtctgaccctgatcacgggctatgattatctgcgcaagtcgatgccgcatctgaaggagacgcgctga

SEQ ID NO: 54619 - protein, 223 aa, Silicibacter pomeroyi DSS-3
MKWNLPNILTLLRLLAAPGLAVMFLYFTRPYADWFALILFVSAAITDWFDGYLARAWKQETKMGAMLDPIADKAMVVIALMILVGYSTEHWTPWLVLPATVILFREVFVSGLREFLGDVAGTLKVTKLAKWKTTAQMIAIAVLFSQGIFEHYLVMSSFGMDQGIVDQIMAGEVADLQGLRWKLDGMIWSGRVGLWLLWIAAGLTLITGYDYLRKSMPHLKETR

SEQ ID NO: 54620 - DNA, 579 bp, Bacillus clausii KSM-K16
  CDS (1)..(579): transl_table=11
ttgaatttagcaaataaaatcaccgtagcgcggatttgtttaatcccggcatttatgctgtttttgcttgtcgattggccgcttggcgaaacggagtggtttcaacagccaattacatacagcatgcttgtggccacagcgatttttgtcgttgcctctgccacagattggctcgacggctactatgcacggaagcttgatcttgtcactagcttcggcaaatttctcgatcctttggccgataagctccttgtgactgctgccttaattgggttagtggaagcacagctcgtgccagcttggattgccattgtcattattagtcgtgagtttgcggtaacgggcattcgcttagttgctgcggcagaaggcgatgttatagcggcgagcaaactgggcaaatggaaaacgctcacccagattatcgctattattgctagtcttttacataatatccctttttcagctctttcatttccatttgcttccataatgctatggatcgcggctctgttaacgatctggtctggaatcgaatattttgtgaaaaacaaacacgtcattctaaaatcgatgtaa

SEQ ID NO: 54621 - protein, 192 aa, Bacillus clausii KSM-K16
MNLANKITVARICLIPAFMLFLLVDWPLGETEWFQQPITYSMLVATAIFVVASATDWLDGYYARKLDLVTSFGKFLDPLADKLLVTAALIGLVEAQLVPAWIAIVIISREFAVTGIRLVAAAEGDVIAASKLGKWKTLTQIIAIIASLLHNIPFSALSFPFASIMLWIAALLTIWSGIEYFVKNKHVILKSM

SEQ ID NO: 54622 - DNA, 537 bp, Campylobacter jejuni RM1221
  CDS (1)..(537): transl_table=11
atgaatttacccaatatcttggcgatttttagaatggttttagcgcctttgctattttttttattaattcatcattttgaaaatattcatcaaagttggattaactattttgctgctttaactttttcattagcagctttaagtgatttttttgatggatacatcgcaagaacttggaaacaaactacaaaactgggtggaatcttagatccattagccgataaaatgcttgttttagcagcttttttagggcttttacttacaggaaaagctaatgaatgggtaatttatattatattagtaagggaattttttatcacaggttttagagttgtaatgattagcgaaaatttaaatgtcaatgcttcttttgcaggcaaacttaaaaccgcttttcaaatgactgcgataggatttttaatcatggagtggataggcggtgaaattctactttacatagctttgattttaactctttattctggatttgaatacatctatacttatataaaagctcaaaaaaaaggagaaaaatga

SEQ ID NO: 54623 - protein, 178 aa, Campylobacter jejuni RM1221
MNLPNILAIFRMVLAPLLFFLLIHHFENIHQSWINYFAALTFSLAALSDFFDGYIARTWKQTTKLGGILDPLADKMLVLAAFLGLLLTGKANEWVIYIILVREFFITGFRVVMISENLNVNASFAGKLKTAFQMTAIGFLIMEWIGGEILLYIALILTLYSGFEYIYTYIKAQKKGEK

SEQ ID NO: 54624 - DNA, 564 bp, Neisseria gonorrhoeae FA 1090
  CDS (1)..(564): transl_table=11
atgccttggaacatccccatcttcctcacatggttgagggtcttgctcattcccgtactgattgtccttttctacctgccgttctcatggttttcagaagaagcagtcaatgttgccgccgccgtcatttttgccgttgccgccttgaccgactggtttgacggatttttggcaaggttgtggaaacagacttccgatttcggcgcattcctcgaccccgtcgccgacaagctgatggttgccgtatcgctgctgctgctggtcaaactcgaccggacctatgttttgttcgcgatgattatcatcggcagggaaattaccatttccgcattgcgcgaatggatggcgcaaatgggaaaaaggagcagcgttgccgtcgccaccgtcggcaagttcaaaaccgccgcgcaaatgctggcgattttctttttgctgctgaattttcccgatttttacggatttaatcttgttgttatcggcaacatattgatgtttatcgcatctttgctgacagtctggtcgatgctgtattatctgaaaatggcgtggaaagaaattgcctga

SEQ ID NO: 54625 - protein, 187 aa, Neisseria gonorrhoeae FA 1090
MPWNIPIFLTWLRVLLIPVLIVLFYLPFSWFSEEAVNVAAAVIFAVAALTDWFDGFLARLWKQTSDFGAFLDPVADKLMVAVSLLLLVKLDRTYVLFAMIIIGREITISALREWMAQMGKRSSVAVATVGKFKTAAQMLAIFFLLLNFPDFYGFNLVVIGNILMFIASLLTVWSMLYYLKMAWKEIA

SEQ ID NO: 54626 - DNA, 561 bp, Pseudomonas syringae pv. syringae B728a
  CDS (1)..(561): transl_table=11
atgaatatccctaatctgatcaccgtactacgcgttttactgattccgatcttcattttgttgttctacatgccttatcactggagctacatggcggccagtgcagtctttgcgttcgctgcggcgaccgactggctcgacgggtatctggcccgccgtcttgaacaaagcacgccctttggcgcctttctcgatccggtagccgacaagctgatggtggccgtggcattggtgctgctggttcaggcgcatgccaatctatggctgacgctgcccgcagcggtgatcatcggccgtgaaatcgtaatctctgcactccgcgaatggatggcggaaatcggcgcgcgtgcgcaggttgccgtttccaacatgggtaaatggaagacggcggcgcagatgctcgcgctggtcattctgctcggcaacccgccggccatcaccctgtgggtgattctcggctatgcgctgctgctcattgctgcggggctgaccctgtggtccatggtgcaatacctgagagccgcgtggccgcacctcaggaccacttcagaaaaaaaataa

SEQ ID NO: 54627 - protein, 186 aa, Pseudomonas syringae pv. syringae B728a
MNIPNLITVLRVLLIPIFILLFYMPYHWSYMAASAVFAFAAATDWLDGYLARRLEQSTPFGAFLDPVADKLMVAVALVLLVQAHANLWLTLPAAVIIGREIVISALREWMAEIGARAQVAVSNMGKWKTAAQMLALVILLGNPPAITLWVILGYALLLIAAGLTLWSMVQYLRAAWPHLRTTSEKK

SEQ ID NO: 54628 - DNA, 567 bp, Pseudomonas fluorescens Pf-5
  CDS (1)..(567): transl_table=11
gtgccgatgaatatccctaatctgatcaccgttctacgcgtcctgctcatcccgattttcattttgctgttctatttgccctatagctggagctacatggccgccagttcagtgtttgccttcgcggccgccaccgactggctggacggctacctggcgcggcgcctgcagcagagcacgccgttcggtgcgttcctcgacccggtggccgacaagctgatggtggcggtggccctggtgctgctggtgcaggagcatcacaacctgtggctgaccttgcccgccgcggtgatcatcggtcgtgaaatcgtcatctcggcgctgcgcgagtggatggccgagctcggcgcgcgcgcgcaggtggcggtgtcgaacatgggcaagtggaaaacggcggcgcaaatgctggcgctggtgattttgctggccaatccctcggacttcagtttctgggtgctggtaggttacgccttgctgttggcggcagcgggcctgaccctgtggtccatgctgcagtatctgcgagccgcctggccgcacctgaaaactgataacgagaaaaaataa

SEQ ID NO: 54629 - protein, 188 aa, Pseudomonas fluorescens Pf-5
MPMNIPNLITVLRVLLIPIFILLFYLPYSWSYMAASSVFAFAAATDWLDGYLARRLQQSTPFGAFLDPVADKLMVAVALVLLVQEHHNLWLTLPAAVIIGREIVISALREWMAELGARAQVAVSNMGKWKTAAQMLALVILLANPSDFSFWVLVGYALLLAAAGLTLWSMLQYLRAAWPHLKTDNEKK

SEQ ID NO: 54630 - DNA, 681 bp, Psychrobacter arcticus 273-4
  CDS (1)..(681): transl_table=11
atgactgagagcacgcatttgcctccgcaggagacgtcaagtacgcagagtaacaagagtatttttaatttgcccaacaacctgacgattgcgcgtattttgatgattccgctattcgtggcaattgcctattggccgcctgccatggggattggcatgcccgcaatctcagataacgtgattgctaaggttggtatgagtgagtttagcgatagcttattacgtcacttattattaacgggtgtttttatcctagcggcgattaccgattggcttgatggctattttgcgcgtaagctcaatgtggtatctgcgtttggacgctttttggaccctgttgctgataagctcatggtcgcagccgcgctgattatcttagtacaatggcatcccaatattatcatggcgatagccgcaattgtgattatctcgcgtgaaatcgccgtatcggcattgcgtgaatggatggcagagctgggtaaaagcaccagtgtggcggtgtcttatgtaggtaaactgaaaactacttttcagatgatagcgattacggtgcttttgttaaattgggaatcgcttgaaaccatcggctatgttttgatggtagcagcagtgattttaacattatggtcgatgatgatttatctcaaagcagcttggccatatcttaagcaaagcggttaa

SEQ ID NO: 54631 - protein, 226 aa, Psychrobacter arcticus 273-4
MTESTHLPPQETSSTQSNKSIFNLPNNLTIARILMIPLFVAIAYWPPAMGIGMPAISDNVIAKVGMSEFSDSLLRHLLLTGVFILAAITDWLDGYFARKLNVVSAFGRFLDPVADKLMVAAALIILVQWHPNIIMAIAAIVIISREIAVSALREWMAELGKSTSVAVSYVGKLKTTFQMIAITVLLLNWESLETIGYVLMVAAVILTLWSMMIYLKAAWPYLKQSG

SEQ ID NO: 54632 - DNA, 582 bp, Colwellia psychrerythraea 34H
  CDS (1)..(582): transl_table=11
atgtggacaatacctaatcaaataaccttatttcggatcgtcttgatccctattttcttgataattttctatttacccctttcgtggagtaattttggtgcatttgcagttttctggttagcggctgttagtgacatcttagatggttaccttgctagaaaactcaatcagtcatcagcttttggcgcgtttatagacccagtagccgataaactcatggttgttgttgcgctggtaatgattgcacaagactatagttcttggttggtctccattgccgctatcatcatgatagcgcgagaagtgtttatcagtgctttacgtgaatttatgtcttctataggaaagcgtgacattattgcggtttctaatatggggaaatataaaaccgctgcacaaatgctcggtattatgggactgatttggcagcctagttatgatattccattaattctgttttacttgccacatgaagtgattaattatctttcttatgccttttattctattgcgacggtcttaaccgtgactacttgggttagttatttcaaagcggcatggccagagctgaaagggcagtaa

SEQ ID NO: 54633 - protein, 193 aa, Colwellia psychrerythraea 34H
MWTIPNQITLFRIVLIPIFLIIFYLPLSWSNFGAFAVFWLAAVSDILDGYLARKLNQSSAFGAFIDPVADKLMVVVALVMIAQDYSSWLVSIAAIIMIAREVFISALREFMSSIGKRDIIAVSNMGKYKTAAQMLGIMGLIWQPSYDIPLILFYLPHEVINYLSYAFYSIATVLTVTTWVSYFKAAWPELKGQ

SEQ ID NO: 54634 - DNA, 561 bp, Pseudomonas syringae pv. phaseolicola 1448A
  CDS (1)..(561): transl_table=11
atgaatatccctaatctgatcaccgtactacgcgttttattgattccgatcttcattttgctgttctacatgccttatcactggagctacatggccgccagtgcagtctttgcgttcgctgcggcgaccgactggctcgacgggtatctggcccgccgtcttgaacaaagtacgccttttggcgcctttctcgacccggtagcagacaaactgatggtggccgtggcattggtgctgctggttcaggcgcatgccaatctgtggctgacgctgcccgcagcggtgatcatcggtcgcgaaatcgtgatttctgcactccgcgagtggatggcggaaatcggcgcgcgtgcgcaggttgccgtttccaatatgggcaaatggaaaacggcggcgcaaatgctcgcgctggttattctgctgggcaacccgcctgcgatcacgatctgggtgattctcggctacgcattgctgctcgttgcagcggggttgaccctgtggtcgatggtgcaatacctcagagccgcgtggccgcacctcaagactacggcagaaaaaaaataa

SEQ ID NO: 54635 - protein, 186 aa, Pseudomonas syringae pv. phaseolicola 1448A
MNIPNLITVLRVLLIPIFILLFYMPYHWSYMAASAVFAFAAATDWLDGYLARRLEQSTPFGAFLDPVADKLMVAVALVLLVQAHANLWLTLPAAVIIGREIVISALREWMAEIGARAQVAVSNMGKWKTAAQMLALVILLGNPPAITIWVILGYALLLVAAGLTLWSMVQYLRAAWPHLKTTAEKK

SEQ ID NO: 54636 - DNA, 579 bp, Dechloromonas aromatica RCB
  CDS (1)..(579): transl_table=11
atgcctttcaaccttcccatcctcctgacgtggctccgcatcgtagcgattccgctgctgatcgccatttattacctgccaacaggctgggcgactctgcatgaacgtgatgtcgccgcgacactgatcttcatggctgccgcactgactgactgggccgacggctatttggcgcgcaagctgaaccagacttcggcctttggcgcttttctcgaccccgtcgccgacaaactgatggttgccgcagccttgatcgttcttgtccagctgggaagaaccgacgcgatcattgccaccatcatcattggtcgggaaatcaccatttcagcgctgcgcgaatggatggcaaagattggcgccgcaaaaagcgtcgctgtgtcgatgctgggcaaagtcaagacagccgcccagatgctcgccctgcccatgcttctctactatgccccattgtcaggtatcgacatgaaatcgctgggcaactggcttatctggatcgcagccttgttgaccttgtggtcaatgggctactacctgcgtatggcatggccggaaatcctcaaacggagtgcagaaaagtag

SEQ ID NO: 54637 - protein, 192 aa, Dechloromonas aromatica RCB
MPFNLPILLTWLRIVAIPLLIAIYYLPTGWATLHERDVAATLIFMAAALTDWADGYLARKLNQTSAFGAFLDPVADKLMVAAALIVLVQLGRTDAIIATIIIGREITISALREWMAKIGAAKSVAVSMLGKVKTAAQMLALPMLLYYAPLSGIDMKSLGNWLIWIAALLTLWSMGYYLRMAWPEILKRSAEK

SEQ ID NO: 54638 - DNA, 615 bp, Thermobifida fusca YX
  CDS (1)..(615): transl_table=11
gtgagcaccccggatcctgccgcacccaccggttccgttccggtgctgaacatcgccaacatcctgacggtcagccggatcgtcatggtgcccctcttcatcgtcctgctcctccaggacggcttctggtggcgcctggcggccttcgcggtctttgtcggcgccgcaatcaccgaccgggtcgacggggagctggcccgccgccacaacctcgtcaccgacttcggtaagatcgcggaccctatcgccgacaaggccctgaccggtgctgccctcatcctgctgtcgtggatcggggaactgtggtggtgggtcaccgcagtcatcctcatccgcgaatggggggtcaccgcgctgcggttcgccgtcatcaagtacggcgtgatccccgccagcccgggcggcaaactcaaaaccgcgttgcagatcgtggccatctgcgtctacctgttcccgctgccgagcgagtggtatctgcaactgcccgcgcacaccatcatggcggccgcggtcgccgtcaccctgtggaccggggtcgactacgtgttcaaagcgttccggctctaccagcgggcccggcacaagcagcccagccgcgaaggggggagggactag

SEQ ID NO: 54639 - protein, 204 aa, Thermobifida fusca YX
MSTPDPAAPTGSVPVLNIANILTVSRIVMVPLFIVLLLQDGFWWRLAAFAVFVGAAITDRVDGELARRHNLVTDFGKIADPIADKALTGAALILLSWIGELWWWVTAVILIREWGVTALRFAVIKYGVIPASPGGKLKTALQIVAICVYLFPLPSEWYLQLPAHTIMAAAVAVTLWTGVDYVFKAFRLYQRARHKQPSREGGRD

SEQ ID NO: 54640 - DNA, 573 bp, Prochlorococcus marinus str. NATL2A
  CDS (1)..(573): transl_table=11
atgaacaaaagaattatgaacgcaaaaagatttatgacttggccgaggattataaatggacttacaatttcaaggatattacttggattgccaataattattacactgaaaaattataacaatgaagtttttatttttctaatcctgatagctggtcttactgattatctagacggatattttgcacgtaaatatgatcataaatctgcttttggcgctaagcttgatcctctagcagacaaaatccttcttattggtccaatgatttggttggttcatgagaatctagtgccgctatgggctatatggttaataatatcgagagaactgttaataacttgttggcgatcaggtaaaacctcaggtggtccagcgtcaattcaggctaaatataaaactacatttcagtttgcaagtataattctattattatggccaaaaaagtggggtacaatttatacaatcaatattattaataaaataggctatttctcattctggatagcattgtttcttactttaagttctgctatcaattatatattcaatcaaaaagaagctcatcagaactaa

SEQ ID NO: 54641 - protein, 190 aa, Prochlorococcus marinus str. NATL2A
MNKRIMNAKRFMTWPRIINGLTISRILLGLPIIITLKNYNNEVFIFLILIAGLTDYLDGYFARKYDHKSAFGAKLDPLADKILLIGPMIWLVHENLVPLWAIWLIISRELLITCWRSGKTSGGPASIQAKYKTTFQFASIILLLWPKKWGTIYTINIINKIGYFSFWIALFLTLSSAINYIFNQKEAHQN

SEQ ID NO: 54642 - DNA, 600 bp, Ralstonia eutropha JMP134
  CDS (1)..(600): transl_table=11
atgcccttcaatatcccgatcctgctgacctggttgcgcgttgccatgattcccctcgtggtgggcgtgtactacctgccggaagcatggctgccgatgcacacgaagaacatcactgcggcgtcgtttttcatcatcgcagcggtcaccgactggctggacggattcctcgcgcggcgctggaaccagacctcggcgttcggtgcgttcctggatccggttgcggacaagctgatggtcacggctgcgctgctatcgctgctggccctgggccgcgtggcggatctggtggcgctggtcatcattggccgcgagatcacgatctcggcgttgcgcgagtggatggcgcagatcggcgcttccaagagcgtcgcggtcaacttcctcggcaagctgaagacgacggtgcagatgatcgcgatccccttgttgctctacacggaccgcctgttcggcgtcgacgcgcaggtgctgggtacgtggatgatctacctggcggcagtgctgacgctgtggtcgatgttctattacatgaagctggcgtggccgcagatccgcgagcgcagcggcgtgctcaacgaagcgcgcgcgccaaaatga

SEQ ID NO: 54643 - protein, 199 aa, Ralstonia eutropha JMP134
MPFNIPILLTWLRVAMIPLVVGVYYLPEAWLPMHTKNITAASFFIIAAVTDWLDGFLARRWNQTSAFGAFLDPVADKLMVTAALLSLLALGRVADLVALVIIGREITISALREWMAQIGASKSVAVNFLGKLKTTVQMIAIPLLLYTDRLFGVDAQVLGTWMIYLAAVLTLWSMFYYMKLAWPQIRERSGVLNEARAPK

SEQ ID NO: 54644 - DNA, 567 bp, Thiobacillus denitrificans ATCC 25259
  CDS (1)..(567): transl_table=11
atgccgctcaatctcccgaacctgctgacctggctgcgcatcctgttcattccgctcatggcgggggtgttctatcttcccgacggctgggtcacgccgccccaggcgaacctgctcgccgcgctctttttcggcgtcgccgcgctgaccgactggctcgacgggtaccttgcgcgcgcgctcggccagacctccgcgttcggcgcgtttctcgatccggtcgccgacaagctcatggtcgccgcggcgctgatcgtgctgatcgatctcgaccgcgtcgcgccgctgatcggcctcatcatcatcggccgtgagatcacgatctcggcgttgcgcgaatggatggccaaggcgggcaagtcggcgagcgtcgcggtctccttcgtcggcaagctgaagaccgcagggcagatggtcgccatcgtcctgctgctctacttcgcgccgctggccggcctgcccacggcccggatcgggaccctgctgatctggctggccgccgtcctcacgttgatttcgatggcctactacctaatgatggcggcgcgggcgctgcaaaaaacttga

SEQ ID NO: 54645 - protein, 188 aa, Thiobacillus denitrificans ATCC 25259
MPLNLPNLLTWLRILFIPLMAGVFYLPDGWVTPPQANLLAALFFGVAALTDWLDGYLARALGQTSAFGAFLDPVADKLMVAAALIVLIDLDRVAPLIGLIIIGREITISALREWMAKAGKSASVAVSFVGKLKTAGQMVAIVLLLYFAPLAGLPTARIGTLLIWLAAVLTLISMAYYLMMAARALQKT

SEQ ID NO: 54646 - DNA, 519 bp, Anabaena variabilis ATCC 29413
  CDS (1)..(519): transl_table=11
atgactttacccaactggattaccttctctcgtcttcttggtgtgccatttctgctgtatggtttgtacgactctacaccacaggctaggtgggtatgtgtggcaatttttttagttgctgctttgactgattggttagatggttatctagcgcggaaacttaaccaagttagtgatttgggtaaatttcttgatccattggtagataagtttttagtgttagcgccgttattggtgttggtggagttagggaaaattccggcttggggagtgtttttgattttagcgcgggaattggcgatcgctggttggcgcgttaatcaaacgacaattacaggggcgaatatttggggtaagttgaaaactgtgagtcagatagtagcgatcgctcttttaattgcaccgctatcatcagattggcaacaagtatccttaattgccttttggctttctgtggctttgacattaatctctggcggaatttatctctggccgcaaaaagtcagtcaggcttcctag

SEQ ID NO: 54647 - protein, 172 aa, Anabaena variabilis ATCC 29413
MTLPNWITFSRLLGVPFLLYGLYDSTPQARWVCVAIFLVAALTDWLDGYLARKLNQVSDLGKFLDPLVDKFLVLAPLLVLVELGKIPAWGVFLILARELAIAGWRVNQTTITGANIWGKLKTVSQIVAIALLIAPLSSDWQQVSLIAFWLSVALTLISGGIYLWPQKVSQAS

SEQ ID NO: 54648 - DNA, 543 bp, Streptococcus agalactiae A909
  CDS (1)..(543): transl_table=11
atggtgaagaaagaaaatattccgaatctattaactgtagtcagaattttaatgattccgttatttatagtattaacttcagtaacaacaagtacaacttggcatattgttgcagctattgtatttgctattgcaagcttgaccgattacctagacggttatctagcacgtaaatggcaagtagtaacaaattttgggaaatttgcagatccattagctgataaaatgctagttatgagtgcttttatcatgttagttggactagacttagcaccggcttgggtttcagctattatcatttgtagagagctagcagttacaggtttgcgtttacttttagttgaaacaggtggaacagtacttgctgcagctatgccagggaaaataaagacggctactcaaatgtttgcagttatttttttgttagtacattggatgacacttggtaacatcatgttatacattgctttattctttaccttgtattcaggctacgactattttaaaggtgcaggcttcttatttaaggatacttttaaataa

SEQ ID NO: 54649 - protein, 180 aa, Streptococcus agalactiae A909
MVKKENIPNLLTVVRILMIPLFIVLTSVTTSTTWHIVAAIVFAIASLTDYLDGYLARKWQVVTNFGKFADPLADKMLVMSAFIMLVGLDLAPAWVSAIIICRELAVTGLRLLLVETGGTVLAAAMPGKIKTATQMFAVIFLLVHWMTLGNIMLYIALFFTLYSGYDYFKGAGFLFKDTFK

SEQ ID NO: 54650 - DNA, 561 bp, Pseudomonas fluorescens PfO-1
  CDS (1)..(561): transl_table=11
atgaatatccctaatctgattaccgttctccgcgtcctgctcatcccgatcttcattctgttgttctatctgccttaccaatggagctatctggcctcaagttcggtattcgcctttgcggcggcaacggactggcttgacggctatcttgcgcgacgtctggagcaaagcacgccgtttggtgcgtttctggatcccgtcgctgacaaactgatggtggctgttgccctggtgttgctggtgcaagaacatggcaacctttggctcacactgccggccgctgtcatcatcggtcgcgagattgttgtctcggcgctgcgtgagtggatggccgaactcggtgcacgggcccatgtggccgtgtcgaatctgggcaagtggaaaactgctgcgcaaatgcttgcactggtgatcctcctggccaatcccaaggttttcagtttctgggttgtcatcggttacgcgttactgatggtgtctgcaggcctgaccttgtggtcgatggttcaataccttcgggctgcctggccacatctgaagactgatgttgaaaagaaataa

SEQ ID NO: 54651 - protein, 186 aa, Pseudomonas fluorescens PfO-1
MNIPNLITVLRVLLIPIFILLFYLPYQWSYLASSSVFAFAAATDWLDGYLARRLEQSTPFGAFLDPVADKLMVAVALVLLVQEHGNLWLTLPAAVIIGREIVVSALREWMAELGARAHVAVSNLGKWKTAAQMLALVILLANPKVFSFWVVIGYALLMVSAGLTLWSMVQYLRAAWPHLKTDVEKK

SEQ ID NO: 54652 - DNA, 588 bp, Burkholderia sp. 383
  CDS (1)..(588): transl_table=11
atgccgttcaatttcccgattttcctgacgtgggtacggatcgtgctgattccgctcgtcgtcggcgtgttctatctgccggacacggtgatgggcggcgcgcaccgcaatctcgcggcggcggcgatcttcatactcgcggcgctgaccgactggttcgacggctatctggcacgcaagtggaaccagacgtcgtcattcggcgcatttctcgacccggtggcggacaagctgatggtgacggccgcgctgctgatcctcgtgcagatttcgcgggtcgatgcggcgatcgcgctcgtgatcgtcggccgcgagatcgcgatttcggcgctgcgtgagtggatggcgcagatcggcgcgtcgaagagcgtcgcggtgaaccagctcggcaagttcaagaccgcatgccagatggttgcgattccgatgctgctgttctacgggccgctgccgctcggtgtcgcgacgatcgacacgcgcgtgtggggcgaatggctgatgtatctcgcggcggtgctgacgatctggtcgatgctgtactacatgaagctcgcatggccgcagattcgcgagcgcggcggcgcgtga

SEQ ID NO: 54653 - protein, 195 aa, Burkholderia sp. 383
MPFNFPIFLTWVRIVLIPLVVGVFYLPDTVMGGAHRNLAAAAIFILAALTDWFDGYLARKWNQTSSFGAFLDPVADKLMVTAALLILVQISRVDAAIALVIVGREIAISALREWMAQIGASKSVAVNQLGKFKTACQMVAIPMLLFYGPLPLGVATIDTRVWGEWLMYLAAVLTIWSMLYYMKLAWPQIRERGGA

SEQ ID NO: 54654 - DNA, 537 bp, Synechococcus sp. CC9605
  CDS (1)..(537): transl_table=11
ttgtttctgtctttgcgttcgattgccaacggactcaccgtggcgcgagccgttgccggtttcccgctgatccttgccctgcagttcggctggcagggctgggcctggtggttgctgctgttggccgggctcagtgatgcggccgatggctggctggctcggcgcgccgggggtggcagcagctggggcgcccgcctcgaccccctcaccgacaaggtgctgatcgcggcaccgttgctctggttggcgtcgtccgctgtgctgccgctctgggcggtctggttgttgctggcccgtgaattgctgatctcgggctggcgctcccaggccagtgatggtgggccggcctcgctgtcgggcaaagccaagacgatccttcagttcctcagcctgttgctgatgctgtggccttccgcctggattgctgctgccgggcttcagagcctgggctggtggctgttctggccctccctcggcctggctctgagctcagccctgggctacatcacgccccgatcagcgcctcatcagaactga

SEQ ID NO: 54655 - protein, 178 aa, Synechococcus sp. CC9605
MFLSLRSIANGLTVARAVAGFPLILALQFGWQGWAWWLLLLAGLSDAADGWLARRAGGGSSWGARLDPLTDKVLIAAPLLWLASSAVLPLWAVWLLLARELLISGWRSQASDGGPASLSGKAKTILQFLSLLLMLWPSAWIAAAGLQSLGWWLFWPSLGLALSSALGYITPRSAPHQN

SEQ ID NO: 54656 - DNA, 594 bp, Geobacter metallireducens GS-15
  CDS (1)..(594): transl_table=11
atgcctgacactaacgccaagaccatctggaatatcccgaacattctcactctcctgcgaatcgctctgatacccgttttggcggtgcttcttctgtcaccgtcccgggaagcgggattctgggccgctgccgtgttcgccgtcgcctcaaccaccgactggcttgacggctatctagcccgcaggatgggtatcgttactgtcttcggcaagttccttgaccccattgcagacaagctcatggtgatggcggcactcatcatgatcctcccctacaatcgggttcctgcctggatggttcttgtaatcctcggccgcgagatcatcattacggggctgcgggggatcgcctccagcgaggggattgtcatatccgccagcgatctgggaaagttcaagaccatcttccagatggtggctatcatcgggctgcttctccactatgactaccactggtttttcggggtcgacaacccctatctcatcgtcaacatgcacaatgcagggatgttctatctctggatcgccacaattatgactgtctggtccggagccgactaccttgccaagttcatgagggtaatagcccgctga

SEQ ID NO: 54657 - protein, 197 aa, Geobacter metallireducens GS-15
MPDTNAKTIWNIPNILTLLRIALIPVLAVLLLSPSREAGFWAAAVFAVASTTDWLDGYLARRMGIVTVFGKFLDPIADKLMVMAALIMILPYNRVPAWMVLVILGREIIITGLRGIASSEGIVISASDLGKFKTIFQMVAIIGLLLHYDYHWFFGVDNPYLIVNMHNAGMFYLWIATIMTVWSGADYLAKFMRVIAR

SEQ ID NO: 54658 - DNA, 552 bp, Desulfovibrio desulfuricans G20
  CDS (1)..(552): transl_table=11
atgcttaccttggcaaataaaatcacgctgttccgtattgtcattgtgcccctgattgttgtttttctgtattttcccggtcggataacctgtctgctggccatgctgggtttcatacttgccgcgctttcagacatggtggacgggcacattgcaagacgctccaacacggtgaccagctttggtaaatttcttgatccgctggcggacaagctgcttatcagttcggtacttgtcatgctgtccgcgctgggctgggtgcctgcatgggttgttattgtcattatctgccgcgagcttatggttacagggctgcgcgccattgccgcagacgaaggcgtggtcattgccgccgataaattcggcaagatgaaaaccgtgcttcagatgctggctttgaccccgctgcttctgcattacccgtggttcggattcgaccctaaccccgcgggacagtttctgctttacatggcgttgattctcacggtattttctggtggaaactacctgtatgcgttttataaaaactggcgcacggcggatgccggttaa

SEQ ID NO: 54659 - protein, 183 aa, Desulfovibrio desulfuricans G20
MLTLANKITLFRIVIVPLIVVFLYFPGRITCLLAMLGFILAALSDMVDGHIARRSNTVTSFGKFLDPLADKLLISSVLVMLSALGWVPAWVVIVIICRELMVTGLRAIAADEGVVIAADKFGKMKTVLQMLALTPLLLHYPWFGFDPNPAGQFLLYMALILTVFSGGNYLYAFYKNWRTADAG

SEQ ID NO: 54660 - DNA, 519 bp, Synechococcus elongatus PCC 7942
  CDS (1)..(519): transl_table=11
atggccacgatcacgctgcccacatgggtgaccctcactcgcctcttcgcagtgccgattttgctggtggggatggagcaaccgggtcttttacccacttgggttccccttgtggtcttcttgctagccgctgcaaccgattggctggatggctggctcgcgcggcgcctcaatcaggtcagcgatctcgggaaagtcctcgaccctttggtcgacaagctgctggtgctagcacccttgctggtgctggtggcccaacaggtggttcctacctgggcagtgtttttgattttggcgcgggaactaacgatcgccggttggcgggtcaaccagccgaaaattagcggcgcgaatctctggggcaagctcaaaaccgttgtccaaatcgctgcgatcgcgctgttattgccacccctcagtccgcgttttttacccctcgggctgggctgcttttggattgccgttgctctgaccttgatctcaggctggacttacctgcgaccaagcaagactacctag

SEQ ID NO: 54661 - protein, 172 aa, Synechococcus elongatus PCC 7942
MATITLPTWVTLTRLFAVPILLVGMEQPGLLPTWVPLVVFLLAAATDWLDGWLARRLNQVSDLGKVLDPLVDKLLVLAPLLVLVAQQVVPTWAVFLILARELTIAGWRVNQPKISGANLWGKLKTVVQIAAIALLLPPLSPRFLPLGLGCFWIAVALTLISGWTYLRPSKTT

SEQ ID NO: 54662 - DNA, 594 bp, Rhodospirillum rubrum ATCC 11170
  CDS (1)..(594): transl_table=11
ttgctcactctgcccaacatcctgaccctgctgcgcattctgatcattcccctggtcgtcgtgctgttttatgtcgatggcgagggctatcgctgggccaattgcgccctgttcgccgtcgccgccatcaccgatttctttgatggctggctggcccggcgcagcaatcaggtctcgcggcttggccgtttcctcgatccgatcgccgataagctgctggtcgcggcggtgctgatgctgctggtcggctttggccggatgagcccgtggagctacccggccgccgtcgtcatcctgatgcgcgagatcctggtctcgggcctgcgcgaattcctggccgagatccgggtcggcatgccggtgaccaagctggccaaatggaagaccaccgttcagctgatcgccctgccggtgctgatcgttggcgataccccgctgattccgctgccgatcaccctgatcggcgagggattgctgtgggtggcggccgtcatgaccatcatcaccggctatgattacctgcgcgtcggcctgcgccacatgggccccgaacacgacgcgcccccgtcccaggcccataataccccccgctaa

SEQ ID NO: 54663 - protein, 197 aa, Rhodospirillum rubrum ATCC 11170
MLTLPNILTLLRILIIPLVVVLFYVDGEGYRWANCALFAVAAITDFFDGWLARRSNQVSRLGRFLDPIADKLLVAAVLMLLVGFGRMSPWSYPAAVVILMREILVSGLREFLAEIRVGMPVTKLAKWKTTVQLIALPVLIVGDTPLIPLPITLIGEGLLWVAAVMTIITGYDYLRVGLRHMGPEHDAPPSQAHNTPR

SEQ ID NO: 54664 - DNA, 519 bp, Moorella thermoacetica ATCC 39073
  CDS (1)..(519): transl_table=11
atgacccttgccaaccgggtgaccatgttgcgcctgatgctggtgccattatttgtattttttatccttcgcccctgggggcccgggtattatctggccgccgggttgtttctcctggcggcggctaccgatggcctggacggttacctggcccgcaggcgcgctgaggtaagcgggctgggcaagttgctggatcccctggtagataaactcctggtcactacggctttagttttactggtacagatgcacctggtccccgggtgggctgtagtgctcattataggccgggaattcttaatcagtggcctgcgtcaggtagctgccggcgaagggttaatcctggccgccagctactggggtaaaatcaagacttttgcccaggtgatagctgtggtcgccctcctggtaggtataccctgggcattactaatcctctatggcgccctggccctgaccctgatctcggggttccattactttttcttaaatcgggaactcctttatcggctgggataa

SEQ ID NO: 54665 - protein, 172 aa, Moorella thermoacetica ATCC 39073
MTLANRVTMLRLMLVPLFVFFILRPWGPGYYLAAGLFLLAAATDGLDGYLARRRAEVSGLGKLLDPLVDKLLVTTALVLLVQMHLVPGWAVVLIIGREFLISGLRQVAAGEGLILAASYWGKIKTFAQVIAVVALLVGIPWALLILYGALALTLISGFHYFFLNRELLYRLG

SEQ ID NO: 54666 - DNA, 624 bp, Burkholderia thailandensis E264
  CDS (1)..(624): transl_table=11
atggcaaatccttcaaccgtgtcgcgtgccatgccgttcaatttcccgattttcctgacgtgggtgcgaatcgtgctgattccgctcgtcgtcggcgtgttttacctgccggacacgatgctgagcgccgaccatcgcaatttggcggcggccgtgatcttcattcttgccgcgctgaccgattggttcgacggctatctcgcgcggaaatggaaccagacgtcggcgttcggcgcgtttctcgatccggtcgccgacaagctgatggtgacggcggcgctgctgatgctcgtgcagctcgcgcgtatcgacgcggcgatcgcgctcgtgatcgtcggccgcgaaatcgcgatctcggcgctgcgcgaatggatggcgcagatcggcgcgtcgaagagcgtcgcggtgaattcgctgggcaagttcaagaccgcgtgccagatggtcgcgattccgatgctgctcttctatggtcgtctgccgttcggcggcggcgtcgcgatcgacacgcgcgtgtggggcgagtggctgatctatctcgcggccgtgctgacgatctggtcgatgctttactacatgaagctcgcgtggccgcagattcgcgagcgtggcggcgcggcgtga

SEQ ID NO: 54667 - protein, 207 aa, Burkholderia thailandensis E264
MANPSTVSRAMPFNFPIFLTWVRIVLIPLVVGVFYLPDTMLSADHRNLAAAVIFILAALTDWFDGYLARKWNQTSAFGAFLDPVADKLMVTAALLMLVQLARIDAAIALVIVGREIAISALREWMAQIGASKSVAVNSLGKFKTACQMVAIPMLLFYGRLPFGGGVAIDTRVWGEWLIYLAAVLTIWSMLYYMKLAWPQIRERGGAA

SEQ ID NO: 54668 - DNA, 540 bp, Syntrophus aciditrophicus SB
  CDS (1)..(540): transl_table=11
atgaatattcctaatattttaacccttctgcgtattgtcctcacgcctgccgttgtcatttttctgatggagggttcctatttcaaggcccttatagttttcagcatttccggtctgaccgacggtctggacggctttctggcccgcgtcctgaagcagcagaccaaactgggagcttatctcgatcccattgcagacaaagcccttttaaccagcagttttctgacactggctattatggggattatccccgggtggctgacggtcattgttatcagccgggactgtattattctgcttggcatagcgattttatccatcatgtccatatcttttgaaatccgccccgccttcatcagtaaggtgaccaccatgcttcaacttatgacggtactgaccgtgctggtattgcaaggactgggaaacgcaatggattacaactggatgcatctgctgtattgggtaacggctttgtttaccattctatccggattgggatatctggtcagaggtatccgcttgattaatactcaggggtaa

SEQ ID NO: 54669 - protein, 179 aa, Syntrophus aciditrophicus SB
MNIPNILTLLRIVLTPAVVIFLMEGSYFKALIVFSISGLTDGLDGFLARVLKQQTKLGAYLDPIADKALLTSSFLTLAIMGIIPGWLTVIVISRDCIILLGIAILSIMSISFEIRPAFISKVTTMLQLMTVLTVLVLQGLGNAMDYNWMHLLYWVTALFTILSGLGYLVRGIRLINTQG

SEQ ID NO: 54670 - DNA, 585 bp, Syntrophus aciditrophicus SB
  CDS (1)..(585): transl_table=11
atgaaacgacatccactggtatccgccggcgaaaaaatctataacctgcctaacatcatcaccatgttgagaatcggggtgattcctgctctcttttttctgctgacttcaccaggcgctacatggagcctggtgattgcttttctgtttattaccgcagcgctgaccgatcttctggatggctacattgcaagaaaatacgggattgttacgacgatgggaaagtttctggatcccatcgccgacaagctgatcgtcaataccgccatgattctcatgattccgatcggccgcattcctgcctggattgtggcaattacgattatccgcgatatcgccgtggacggcatgagaagcatcgcatcgggagaaggaatggttattgatgcaagcagtctgggaaagagaaaaaccctctgccagaccattgccgtctcggcattgattattcactatcaatttctgggactcaacgctcatgcggtgggtatcgtgattctttatattgcccttttgctgacggtgtattccggattggattacttcatgcaattttatcagtgcgccatccgcaataaagaatag

SEQ ID NO: 54671 - protein, 194 aa, Syntrophus aciditrophicus SB
MKRHPLVSAGEKIYNLPNIITMLRIGVIPALFFLLTSPGATWSLVIAFLFITAALTDLLDGYIARKYGIVTTMGKFLDPIADKLIVNTAMILMIPIGRIPAWIVAITIIRDIAVDGMRSIASGEGMVIDASSLGKRKTLCQTIAVSALIIHYQFLGLNAHAVGIVILYIALLLTVYSGLDYFMQFYQCAIRNKE

SEQ ID NO: 54672 - DNA, 594 bp, Novosphingobium aromaticivorans DSM 12444
  CDS (1)..(594): transl_table=11
atgctgacgctgccgaaccttctcaccctgtcgcggatcgtgaccgttcccttgttggcagcactgctgtggtggcccgaatggcgactgggctatggcatggccttcgcggtctactgcctgatgggggttaccgattacttcgacggctaccttgcccgcgccaagggagcggtgagcaagctgggcatctttcttgacccgattgccgacaagatcatggtcgcggcggtgattctggtgctgaccgcgcagggtgtcctgcgcgggccctacgttggggacatgcacgtgatcgcggggctggtgatcctgctgcgcgaaatcgcggtgtcgggactgcgcgagtttctcggcggcatccaggtctctgtcccggtaagccggctcgccaagtggaagacgacgttccagatggtgtgccttggtgcgctgatcctcgggcaggcgctgccggaatggctcatgacaatcggcggcttcacggtgaacgtgccgcatacggttggcctttcgacgctgtggggcgcggcggtgctgaccgtgattaccggatgggattacctgagggtcggcctgaagcacatggattga

SEQ ID NO: 54673 - protein, 197 aa, Novosphingobium aromaticivorans DSM 12444
MLTLPNLLTLSRIVTVPLLAALLWWPEWRLGYGMAFAVYCLMGVTDYFDGYLARAKGAVSKLGIFLDPIADKIMVAAVILVLTAQGVLRGPYVGDMHVIAGLVILLREIAVSGLREFLGGIQVSVPVSRLAKWKTTFQMVCLGALILGQALPEWLMTIGGFTVNVPHTVGLSTLWGAAVLTVITGWDYLRVGLKHMD

SEQ ID NO: 54674 - DNA, 549 bp, Neorickettsia sennetsu str. Miyayama
  CDS (1)..(549): transl_table=11
atgaaggaccttcctaacttacttaccgctttaaggatagccattatcccagtattctgcttaagtttttatattcaatccagattttcttgggtgataaccgtaggaattttctcaatcgcaagtctgacagacttttttgacgggtacctcgctaggacgctaaaggctcaatcaaagcttggaaaacttcttgacccgatagccgataaaatgattgtctctacagctattgttatgttggtacatatgcagtacataacgggagtccaactgattcccgcaatcatgatcatttgtagagagctgtttattgctggactaagggaatatcttgctcgtgacagtgtggcatttcctgtaaatagatttggtaaactaaagacaatatcccagatggttgctatacttctttatctcctaaacaaggaatggatcccagatattcttccgacatttttcatctggatagctggtctaacgagcatggcatcggcatatttatatcttcatgaaaacaaggaagaactactaaaatcccttagctaa

SEQ ID NO: 54675 - protein, 182 aa, Neorickettsia sennetsu str. Miyayama
MKDLPNLLTALRIAIIPVFCLSFYIQSRFSWVITVGIFSIASLTDFFDGYLARTLKAQSKLGKLLDPIADKMIVSTAIVMLVHMQYITGVQLIPAIMIICRELFIAGLREYLARDSVAFPVNRFGKLKTISQMVAILLYLLNKEWIPDILPTFFIWIAGLTSMASAYLYLHENKEELLKSLS

SEQ ID NO: 54676 - DNA, 558 bp, Desulfitobacterium hafniense Y51
  CDS (1)..(558): transl_table=11
gtgaatttacccaatcaactcacaatggcgcggataatactaatacccatctttatggccttgttgctcatccaatttcctaaaggtcagccgatttttccttatcaggattttgtggctgccatgatcttcatcctggcagctgcgacggatggcttggatggctatatcgcccgtaaaagaggccaggttacagttctgggaaaatttatggatccgctggcagataaacttttggtttcggcagctttaattgcgttggtggacttggggcatgtgccggcgtggatttgctggattatactggcccgggagttcgcagtgacagggttgagagccatagcctctgctgacggaactgtgattgcagccagcaaactgggcaagattaaaaccgtatcccaggttgtggctatttctctgattctgcttcatgattggcctttatctctttttaacctatatctggggcagcctcttctctatgtggcccttttctttacgattatttcaggtgcggattatttagtaaaatcaaagaagcttttaaaaaaatag

SEQ ID NO: 54677 - protein, 185 aa, Desulfitobacterium hafniense Y51
MNLPNQLTMARIILIPIFMALLLIQFPKGQPIFPYQDFVAAMIFILAAATDGLDGYIARKRGQVTVLGKFMDPLADKLLVSAALIALVDLGHVPAWICWIILAREFAVTGLRAIASADGTVIAASKLGKIKTVSQVVAISLILLHDWPLSLFNLYLGQPLLYVALFFTIISGADYLVKSKKLLKK

SEQ ID NO: 54678 - DNA, 558 bp, Saccharophagus degradans 2-40
  CDS (1)..(558): transl_table=11
atgttcaacatagctaaccaacttaccctaggccgaatactgtttatccctctcttagtggttgtgtattactcaccgctagaatggaaatactggtatagcgcagccttatttgggcttgccggcataacagactggctagatggctacatagcacgtaaatacggtatggataccccctttggcgccttcttagacccagtagccgacaagctaatggttgccgttgcgctggccgtgctaatagaggcgcacgccgatgtttggtttacattgcctgccacagttattattggtcgtgagatagttatatctgcactaagagagtggatggccgaattgggcgctagagctaaagttggtgtgtctatgataggaaaggtaaaaacaacgctacaaattattgctattgtgctgcttttagcgtttaatcccgcctcctatccgttgttcaataaagttggttatataacgctctatgtggcggcaatacttactctttggtcaatgatagtgtacctgcgggcggcatggccgagcctaaagggtgcaaaataa

SEQ ID NO: 54679 - protein, 185 aa, Saccharophagus degradans 2-40
MFNIANQLTLGRILFIPLLVVVYYSPLEWKYWYSAALFGLAGITDWLDGYIARKYGMDTPFGAFLDPVADKLMVAVALAVLIEAHADVWFTLPATVIIGREIVISALREWMAELGARAKVGVSMIGKVKTTLQIIAIVLLLAFNPASYPLFNKVGYITLYVAAILTLWSMIVYLRAAWPSLKGAK

SEQ ID NO: 54680 - DNA, 567 bp, Methylobacillus flagellatus KT
  CDS (1)..(567): transl_table=11
atggtctggaatgtccccaatagcctgacggtgatgcgtatcctgagcatcccggttttcatcgggatattctatctcccggaaacgaccttgcccatgcatgataaaaacgtgctggcgacgtttatttttgcctttgccgccattaccgactggttcgatggctaccttgcacgcgcactcaaccagacttccgcgttcggcgcctttcttgatccggtcgcggacaagctgatggtcgcggcagctttgatactgctgatagagctcgatcgcgtgggggcggtggtggcattgatcatcattgggcgtgaaatcgcgatcagcgccctgcgggaatggatggccggcctgggcgagcgcggcagtgttgctgtggcgttcatcggcaaggtcaagaccgcggtgcagatggccgccatcctgttgctgctgtattacgatcccctgggaccattgcatgtcagtttttatggtgaggtactgatttacattgctgcatttttgacattggtgtcaatggcttattatctgaaggccgcgtggccgcgcatgaaggccggctga

SEQ ID NO: 54681 - protein, 188 aa, Methylobacillus flagellatus KT
MVWNVPNSLTVMRILSIPVFIGIFYLPETTLPMHDKNVLATFIFAFAAITDWFDGYLARALNQTSAFGAFLDPVADKLMVAAALILLIELDRVGAVVALIIIGREIAISALREWMAGLGERGSVAVAFIGKVKTAVQMAAILLLLYYDPLGPLHVSFYGEVLIYIAAFLTLVSMAYYLKAAWPRMKAG

SEQ ID NO: 54682 - DNA, 600 bp, Ralstonia metallidurans CH34
  CDS (1)..(600): transl_table=11
atgccacttaacattcccattctgctgacctggcttcgcgtggccatgatcccgctggtcgtcggggtttattacctgcccgaggcctggctgccgatgcacaccaagaacgtcaccgcggcatcgttcttcgtcatcgcggcagtgacggattggctcgatggctttctggcgcggcgctggaatcagacctcggccttcggtgccttcctcgatccggtggccgacaagcttatggtgacagccgcattgctgtcgttgctggcgctggggcgggtggccgacctgatcgcgctgatcatcatcgggcgtgagatcacgatttcggcactgcgcgaatggatggcccagatcggcgcttcgaagagcgtagcggtaaatttccttggtaagctgaagaccaccgtgcagatgatcgcgatcccgttgctgctgttcaacgacgcgctgttcggtgtggacgcatcgctgcttggtggctggatgatctacctggcggccgtgctcacgttgtggtcgatgttctattacatgaagctcgcctggccgcagattcgcgagcgcagcgaggtcatcagcggggctcggacacaaaagtga

SEQ ID NO: 54683 - protein, 199 aa, Ralstonia metallidurans CH34
MPLNIPILLTWLRVAMIPLVVGVYYLPEAWLPMHTKNVTAASFFVIAAVTDWLDGFLARRWNQTSAFGAFLDPVADKLMVTAALLSLLALGRVADLIALIIIGREITISALREWMAQIGASKSVAVNFLGKLKTTVQMIAIPLLLFNDALFGVDASLLGGWMIYLAAVLTLWSMFYYMKLAWPQIRERSEVISGARTQK

SEQ ID NO: 54684 - DNA, 669 bp, Acidobacteria bacterium Ellin345
  CDS (1)..(669): transl_table=11
gtgaacttaccgaattccatcacgctgtctcggatcttcagcatcccgctgttgatctggatccttctcaccccgcgcattggcagtctccacggagagagggagctcctcgcttccgcggtgttcatcctggcttccattaccgatgggctggatggttatctcgcgcgcaagcggcagcaggtcaccaccatgggcatgctgctcgatccgttggccgacaagctcatggtgacggcggcattcatcacgctggtgcaggtgaatccgcacatcgtcagcgcttgggttgccgtgatcgtgatcgggcgcgagttcctcgtcagcggcttgcgatcgattgcggcgtcggaaggtttcacgatccaggctagcgatctgggcaagatgaagatggtggtccagatcgtgtgcgtagtggcggcgatcctggatgtgcgctggtgggacgcggagtgggactttggctcattccattttgtgctcgcaatcgacttgatcgcgaagatggcaatctggttcatggtggcactgtcgttgatctccgcagtggattattttgtgggcttctggcggaagattgatcgcagctcggaacgccggcgccggcgttcgttcgtactatcgcggcggcgcaaatcacccgatgtcgcagctacccagcagtag

SEQ ID NO: 54685 - protein, 222 aa, Acidobacteria bacterium Ellin345
MNLPNSITLSRIFSIPLLIWILLTPRIGSLHGERELLASAVFILASITDGLDGYLARKRQQVTTMGMLLDPLADKLMVTAAFITLVQVNPHIVSAWVAVIVIGREFLVSGLRSIAASEGFTIQASDLGKMKMVVQIVCVVAAILDVRWWDAEWDFGSFHFVLAIDLIAKMAIWFMVALSLISAVDYFVGFWRKIDRSSERRRRRSFVLSRRRKSPDVAATQQ

SEQ ID NO: 54686 - DNA, 672 bp, Silicibacter sp. TM1040
  CDS (1)..(672): transl_table=11
atgatctggaatttgcccaatatcctcacggtcctgcggctgctggcagcgccagcgctggcggtgatgtttctgtttttcagtcgccctcatgcggattggtttgcgctggttttatttgtgggggcggcgatcaccgattggttcgacggttatctggcccgcagctggaagcaggaaaccaagatgggcgctatgctcgacccaatcgcggacaaggcgatggtggtgatcgcgctcatgatcctcgtgggatactcgacctcgcattggacggcctggctggttctacccgccaccgtgatcctgtttcgagaggtatttgtgtccggcctcagggagtatctgggcgacacggcaggctctctcaaagtcaccaaactcgccaagtggaaaacgacggcgcagatgatcgcgattgcaacattattttcacagggcatatttgagcaccacctcggcatgggtgggtttggcatggatgcgcagatggtcaatgatgtgctcagcggggtcatcgaggacacgcaggggctcaggttctacttcgagggcatgatttggtcgggccgtatcggcctgtggctgctctggatcgcggcggccctgacgctcatcaccgggtttgattatctgaaaaaggctctgccatatctgaaggagacgcgctga

SEQ ID NO: 54687 - protein, 223 aa, Silicibacter sp. TM1040
MIWNLPNILTVLRLLAAPALAVMFLFFSRPHADWFALVLFVGAAITDWFDGYLARSWKQETKMGAMLDPIADKAMVVIALMILVGYSTSHWTAWLVLPATVILFREVFVSGLREYLGDTAGSLKVTKLAKWKTTAQMIAIATLFSQGIFEHHLGMGGFGMDAQMVNDVLSGVIEDTQGLRFYFEGMIWSGRIGLWLLWIAAALTLITGFDYLKKALPYLKETR

SEQ ID NO: 54688 - DNA, 561 bp, Mycobacterium sp. MCS
  CDS (1)..(561): transl_table=11
gtggccaatatcgccaatgtgctgaccggtgtgcgcttccttctggtaccggtgttcctcgccgcgctcttcgtcggcgacgggcatgaaacgtattggcgcgtcgtggctttcgtggtgttcgcggtggcggtgatcaccgaccggttcgacggtgcactggcgcgcagctatggcatggtcaccgaattcggcacgctcgcggacccgatcgccgacaaggcgctcatcggcgccgcgctgatcggcctgtcgatgctgggggatctgccgtggtgggtgaccggggtcatcctcgcccgcgaactcggtgtgaccgtgctgcgcttcgcggtgctgcgccacggggtgatcccggccagccgcggcggcaaggtcaagacgctcgtgcaggcggtggccatcgggctgttcgtgctgcccctggcggcctggcccggaccgtggctcgcggtggcgtgggtgatcatggtggccgccgtcgtgctgaccgtcctgaccgggctggactacgtgctgtcggcgattcgggactcccgtgaacgacccgctggtcactga

SEQ ID NO: 54689 - protein, 186 aa, Mycobacterium sp. MCS
MANIANVLTGVRFLLVPVFLAALFVGDGHETYWRVVAFVVFAVAVITDRFDGALARSYGMVTEFGTLADPIADKALIGAALIGLSMLGDLPWWVTGVILARELGVTVLRFAVLRHGVIPASRGGKVKTLVQAVAIGLFVLPLAAWPGPWLAVAWVIMVAAVVLTVLTGLDYVLSAIRDSRERPAGH

SEQ ID NO: 54690 - DNA, 609 bp, Mesorhizobium sp. BNC1
  CDS (1)..(609): transl_table=11
atgagccagcaatccatgtcgcaacaacgcgccttcaaccttccaaacctgctcacttatgcgcgcatcatggcggtgccgctgattgtgctttgcttctttcttgaagggcggctgcaatccagcgactttgcccgctggtcggcgcttggactgtttctcgccgcaagcgtcaccgattacctggatggctatctcgcgcgaagctggaagcaaacctccaatatcggcagaatgctggacccgattgccgacaagctgctcgtggcaacctgccttctccttcttgccgctgatacggatcgcacgatcgcaggctggacgctctgggccgcgatcgtcatcctgtgccgggagatcctggtatcgggcttgagagaatatcttgccgggctgaaggtgagcgtgccggtaacacagcttgccaaatggaagacagccatccagatggtggcgatcggcttcctcctcgccggccctgccggtgacaagatcgtcccctatataaccgagaccggcatcgcgcttttgtggttttccgcgctcgtgacgctctataccggctacgattatttccgcgccggcttgaagcatatcatcgaggaatag

SEQ ID NO: 54691 - protein, 202 aa, Mesorhizobium sp. BNC1
MSQQSMSQQRAFNLPNLLTYARIMAVPLIVLCFFLEGRLQSSDFARWSALGLFLAASVTDYLDGYLARSWKQTSNIGRMLDPIADKLLVATCLLLLAADTDRTIAGWTLWAAIVILCREILVSGLREYLAGLKVSVPVTQLAKWKTAIQMVAIGFLLAGPAGDKIVPYITETGIALLWFSALVTLYTGYDYFRAGLKHIIEE

SEQ ID NO: 54692 - DNA, 603 bp, Rhodococcus sp. RHA1
  CDS (1)..(603): transl_table=11
gtggaacccgcgagtgagacggccgtaccacttctgaacatcgcgaacatcctgacgattctccggatcctgctggtcccggtcttcctggtcgtgctgttcgtcggcgacggacactcgacgatgtggcgcctgatcgccaccggtgtgttcgcggtcgcggctatcaccgaccggatcgacgggcaactcgcccgcaagtacggcctcgtcaccgatttcggcaagctcgccgatcccatcgcggacaaggcgctgatcggagcggccctcgtgggcctgtcgattctcggagacctgccctggtgggtgacggcggtgatcgcggtccgggaactgggcatcacgctgctccggttcgcggtcctgcgccacgccgtcatcccggcaggcaggggcggcaagctcaagactctcgtgcagacgatcgcgatcggctattatctgctgccgctgcccgacgggttcgaggtcgccggctggattctcatgggtgccgccgtgctgctgacggtggtgaccgggctggactacgtcgtgcaggccgtccgtctacgggccggggtgcacaaggtcgaggcgaacgcgagcaccggggcgtga

SEQ ID NO: 54693 - protein, 200 aa, Rhodococcus sp. RHA1
MEPASETAVPLLNIANILTILRILLVPVFLVVLFVGDGHSTMWRLIATGVFAVAAITDRIDGQLARKYGLVTDFGKLADPIADKALIGAALVGLSILGDLPWWVTAVIAVRELGITLLRFAVLRHAVIPAGRGGKLKTLVQTIAIGYYLLPLPDGFEVAGWILMGAAVLLTVVTGLDYVVQAVRLRAGVHKVEANASTGA

SEQ ID NO: 54694 - DNA, 519 bp, Trichodesmium erythraeum IMS101
  CDS (1)..(519): transl_table=11
atgaatatacctaactcaattactttttctcgtcttttgggaatacctattattctttacactctcaaaactccaactaatcaaaatctttggatatctttagtgatatttttaatggcttcagctacagattttttagacggttatttagcacgaaaactcaaccaagtgactgacttaggtaaatttttagatcctttagtagataaattattaattttagcacctctattagcattaattgaattaggcaaagttccggcctggggagtatttttaattttaagtcgggagttaactatagctggttggcgtgttaatcaaagcaaagtttcaggagctaatatttggggaaaattaaaaactgtaagtcaaattatcgctgttgctctattaattgctcctttgcctaaaacttgggcaacttcaacaataattatattttgggtttctgttgctttaacgatcatttcagggatagtttacttattacctactcaagaaactagcaatacataa

SEQ ID NO: 54695 - protein, 172 aa, Trichodesmium erythraeum IMS101
MNIPNSITFSRLLGIPIILYTLKTPTNQNLWISLVIFLMASATDFLDGYLARKLNQVTDLGKFLDPLVDKLLILAPLLALIELGKVPAWGVFLILSRELTIAGWRVNQSKVSGANIWGKLKTVSQIIAVALLIAPLPKTWATSTIIIFWVSVALTIISGIVYLLPTQETSNT

SEQ ID NO: 54696 - DNA, 549 bp, Synechococcus sp. CC9311
  CDS (1)..(549): transl_table=11
ttgatctctccctggcgcctctgggctgatcgactcaccctggctcgagccctgatgggactcccgcttcttctcgctttggcgttgcaatacgacgcgttggcctggtggttattgctgcttggaggctggagcgatgcagcggatgggtggttggcgagacgtgccgacggtggcagtacctggggtgcccggcttgaccctctcgctgacaagttgttgatcagcgcacctctggtctggttggcgtcagacggaatccttccggtatgggctgtttggcttttgctggcccgtgaattgctgatctctggctggcgtggtgacagcagtgatggggcgccagcatccgctgcaggtaaagccaaaacaatcctccaattcctcagccttgccctcatgctttggcctcctctctggggagatccagcactggttcaggctttgaaaggggttggtgtggggttgttttggccctcgttgcttttggctttgtggtcagcttgggggtatctcaagccttgccgatcaaagcctggtcagcgctga

SEQ ID NO: 54697 - protein, 182 aa, Synechococcus sp. CC9311
MISPWRLWADRLTLARALMGLPLLLALALQYDALAWWLLLLGGWSDAADGWLARRADGGSTWGARLDPLADKLLISAPLVWLASDGILPVWAVWLLLARELLISGWRGDSSDGAPASAAGKAKTILQFLSLALMLWPPLWGDPALVQALKGVGVGLFWPSLLLALWSAWGYLKPCRSKPGQR

SEQ ID NO: 54698 - DNA, 552 bp, Alkalilimnicola ehrlichei MLHE-1
  CDS (1)..(552): transl_table=11
atgcagttgaactggcccaacgccctgaccctgttccggattgcgctgatcccggtgctggggctgtgcttcttgctcccggcaccctggatgaacgtgctggcggtgatcgtgttcagcgcggcggccgtcaccgactggctggacggctacctggcgcgccggctgcagcagacctccgccttcggggcgttcctggacccagtggccgacaagctaatggtcgcggtcgccctggtggcgctggtcgcggtgcatccggggccctggctcgccgtgccggccagcatcatcatcggccgtgagattgccgtgtccgccctgcgtgagtggatggcgaacctcggggcccgggccagcgtggcggtgagcatggccggcaaggtcaagacgaccgcccagatggcggccatcatcatgctgttatacggtcaatcgctgggcccgatcccgctctttgagctgggcgtggtgctcctttacgtggcggcggtgctgaccgtatactccatggcgctgtatctgagggcggcctgggagcagctcgcgtag

SEQ ID NO: 54699 - protein, 183 aa, Alkalilimnicola ehrlichei MLHE-1
MQLNWPNALTLFRIALIPVLGLCFLLPAPWMNVLAVIVFSAAAVTDWLDGYLARRLQQTSAFGAFLDPVADKLMVAVALVALVAVHPGPWLAVPASIIIGREIAVSALREWMANLGARASVAVSMAGKVKTTAQMAAIIMLLYGQSLGPIPLFELGVVLLYVAAVLTVYSMALYLRAAWEQLA

SEQ ID NO: 54700 - DNA, 591 bp, Rhizobium leguminosarum bv. viciae 3841
  CDS (1)..(591): transl_table=11
atggcatcgcgtgcgtacagcattcccaatctcctgacctacggccgcatcctcgccgtaccgctgatcgttctctgcttcttcatcgagggcaggctgtcgatcagcaatacggcgcgttgggtggcgctgtggatcttcgtcatcgcctcgctcaccgatttcctcgacggttatctcgcgcgcatctggaaccagacgtcgaatatcggccgcatgctcgatccgatcgccgacaagctgctggtcgcctcgatccttctcctggtcgcggccgaccagaccatcgccggctggtcgatctgggcggcgatcaccattctctgccgcgagatcctggtgtcgggactgcgcgaatatctggcagcgctgaaggtcagcgtaccggtgacgcggatcgccaagtggaagacgacgctgcagctcgtcgccatcgccttcctgctcgccggtccggccggcgacgagattttcccctatacgacgcagaccggcatcgcgttgctgtggatcgccgcgctgctgacgatctataccggctacgactatttccgcgccggggtgaaacatatcgtggatgacgaggaatga

SEQ ID NO: 54701 - protein, 196 aa, Rhizobium leguminosarum bv. viciae 3841
MASRAYSIPNLLTYGRILAVPLIVLCFFIEGRLSISNTARWVALWIFVIASLTDFLDGYLARIWNQTSNIGRMLDPIADKLLVASILLLVAADQTIAGWSIWAAITILCREILVSGLREYLAALKVSVPVTRIAKWKTTLQLVAIAFLLAGPAGDEIFPYTTQTGIALLWIAALLTIYTGYDYFRAGVKHIVDDEE

SEQ ID NO: 54702 - DNA, 561 bp, Pseudomonas aeruginosa UCBPP-PA14
  CDS (1)..(561): transl_table=11
atgaatatccccaatctgctcacgttactgcgcgtcctgctcattccgatcttcattctgctgttctatctgccgacgtcctggagctacctgaccgccagtgccgtgttcgccctggccgccgccaccgactggctggacggctacctcgcccggcgcctcggccagagcacgccgttcggcgccttcctcgacccggtcgcggacaagctgatggtggcggttgcgctggtcctgctggtggaagagcacgccaacctgtggctgaccctgccggcggtgatcatcatcggccgcgagatcgtggtttccgccttgcgcgagtggatggccgaactgggggcgagggctcaggtggcggtgtccaacctgggcaagtggaagaccgcggcgcagatgctggcgctggtcattctcctggcgaatccgccgctgatgaccttctgggtgattctcggctacgtgctgctgatcatctctgcggcgctgaccctgtggtccatggtgcactacctgctggccgcgtggccgcatctgtcgaccaccccgaaagagaaataa

SEQ ID NO: 54703 - protein, 186 aa, Pseudomonas aeruginosa UCBPP-PA14
MNIPNLLTLLRVLLIPIFILLFYLPTSWSYLTASAVFALAAATDWLDGYLARRLGQSTPFGAFLDPVADKLMVAVALVLLVEEHANLWLTLPAVIIIGREIVVSALREWMAELGARAQVAVSNLGKWKTAAQMLALVILLANPPLMTFWVILGYVLLIISAALTLWSMVHYLLAAWPHLSTTPKEK

SEQ ID NO: 54704 - DNA, 582 bp, Pediococcus pentosaceus ATCC 25745
  CDS (1)..(582): transl_table=11
atgaatttacctaataaattaaccatttttagaataattttaattccaatttttatcatactcacagtcatgccagaagttggtggaagtgtagtttggttggggacaagtattgcagttaccaagatttggggggcacttgtttttgcaattgcatctattaccgattttttagatggacagattgctagacgtcaacatttggttaccaattttggtaaatttgctgatccaattgcagataaaatgttagtaatgactgcttttattgtcttagtagaaatgaagatggttccagcttggattgctgctatcatcgtttgtcgtgagttagctattagtggattgcgcttaatcattgtggaaaatgatggtgaggtactagcagctgaaatgcctggaaaaatcaaaacattctcgcaaatgttcgcgattattttcttgcttttgaataacattttctcaagtttcttacatttcggtctaggtacagtattattatatgtctgcttattctttactgtttattcaggaatcgattatttttataagaatcgggccattttttctgattcattctag

SEQ ID NO: 54705 - protein, 193 aa, Pediococcus pentosaceus ATCC 25745
MNLPNKLTIFRIILIPIFIILTVMPEVGGSVVWLGTSIAVTKIWGALVFAIASITDFLDGQIARRQHLVTNFGKFADPIADKMLVMTAFIVLVEMKMVPAWIAAIIVCRELAISGLRLIIVENDGEVLAAEMPGKIKTFSQMFAIIFLLLNNIFSSFLHFGLGTVLLYVCLFFTVYSGIDYFYKNRAIFSDSF

SEQ ID NO: 54706 - DNA, 561 bp, Oenococcus oeni PSU-1
  CDS (1)..(561): transl_table=11
atgaatttacctaataagttaactacttttcggatctttttgattccgatttttattttgattttgagtctgccgcttaagtggtcttcgactttcggacattcaactggatggattgttgccgcgattattttcgcgattgcttcaatcactgacttgctcgacggacgaattgcccgcagtcgccatcttgttactaattttggtaagttcgccgatcctttggcagataagctgcttgttatgacagcactgatatttctaactcgttatggcgttgttgcagcttggattacttcaatcatcgtgatacgcgaattggcgattactggtcttcgaactttgattgttgaaaacagtggaacagtttttgcagctcagatgcctggtaagatcaagacttttactcaaatgtttgcaattatttttttgtactgcagcaattttggaattagttttccgattggacagattctgatttatttggccgttattttcacgatatattctggaatcgattatttcgttaaaaatcgttctgttttttccgatggtatgtaa

SEQ ID NO: 54707 - protein, 186 aa, Oenococcus oeni PSU-1
MNLPNKLTTFRIFLIPIFILILSLPLKWSSTFGHSTGWIVAAIIFAIASITDLLDGRIARSRHLVTNFGKFADPLADKLLVMTALIFLTRYGVVAAWITSIIVIRELAITGLRTLIVENSGTVFAAQMPGKIKTFTQMFAIIFLYCSNFGISFPIGQILIYLAVIFTIYSGIDYFVKNRSVFSDGM

SEQ ID NO: 54708 - DNA, 582 bp, Leuconostoc mesenteroides subsp. mesenteroides ATCC 8293
  CDS (1)..(582): transl_table=11
atgaatttacccaataaactaactgttttcagaattattttaattccagtatttattttattgctgacagtaccatatgcttggtctaatatcagctttttaggagcaaccatgcccgttaattggttgattgccgctgttgtatttgcaatagcctctgcaactgacttcttggacggtcagatagctcgtagccagcatttagttaccaattttggaaagtttgcggatcctttggctgacaaacttttggttatgacagcgttgattttcttaacgagcttcaatgttgtcccagcttggatgactgcggttatcgttattcgagagttagccgttacaggtttacgtacactaattgttgaaaacaatggcaaggttttggcagcacagatgccaggaaagataaaaacattttcacaaatgtttgctattttcttcttatatattcacaacgcgccattttccattattaattttcctattggggatgtcttattgtgggttgctgttatctttacaatttattctggtatcgattatttttggcaaaatagaaatgtcttttctgatggtatgtaa

SEQ ID NO: 54709 - protein, 193 aa, Leuconostoc mesenteroides subsp. mesenteroides ATCC 8293
MNLPNKLTVFRIILIPVFILLLTVPYAWSNISFLGATMPVNWLIAAVVFAIASATDFLDGQIARSQHLVTNFGKFADPLADKLLVMTALIFLTSFNVVPAWMTAVIVIRELAVTGLRTLIVENNGKVLAAQMPGKIKTFSQMFAIFFLYIHNAPFSIINFPIGDVLLWVAVIFTIYSGIDYFWQNRNVFSDGM

SEQ ID NO: 54710 - DNA, 702 bp, Solibacter usitatus Ellin6076
  CDS (1)..(702): transl_table=11
atgaaccttccgaatgcgctgaccattctccggatcttcttcgtaccgctgctggtggcggcgctggtccaggagaacgtcggcttccaggtcggggcagtaaaggttaccaacgaatggctctcattagccatcttcctggtcgccgccgctaccgatctgctcgatggctatttggcacgtcgatggaagcaggtcaccaccatcggcaccctgctggaccccatcgccgataagctgctggtctcggccgcgctgatttcgctggtgcaggtgcgctcgctgccgggctggatggcggtgctgatcatcggccgtgaattcgcggtatccggcttgcgcagcatcgcggcgacggaaggctacacgatcaaggccagcgacctgggcaagacgaagatgttttgccaggtggtggcgatttcggtcatgatgctggcggtgcggcatcccgggctgcggactacggggctggcgctcatgtggggcgtagttttcttcgcaatggcctcggcgatcagctacttctcgaagttctggcacaaagtggacgagggcatcaagaatcgccgccggcgcgagttgctggtactggatcgaaaacggcgtcgcgcactgcgccgtcagaggcgatcgagcggatcgatgggcgccgcgggcggcttggcggggacgatctggaaaccgccggaagtcaattga

SEQ ID NO: 54711 - protein, 233 aa, Solibacter usitatus Ellin6076
MNLPNALTILRIFFVPLLVAALVQENVGFQVGAVKVTNEWLSLAIFLVAAATDLLDGYLARRWKQVTTIGTLLDPIADKLLVSAALISLVQVRSLPGWMAVLIIGREFAVSGLRSIAATEGYTIKASDLGKTKMFCQVVAISVMMLAVRHPGLRTTGLALMWGVVFFAMASAISYFSKFWHKVDEGIKNRRRRELLVLDRKRRRALRRQRRSSGSMGAAGGLAGTIWKPPEVN

SEQ ID NO: 54712 - DNA, 546 bp, Magnetococcus sp. MC-1
  CDS (1)..(546): transl_table=11
atgaatctacctaataaactgacggtctcgcggatcgttttcattccattttttattgtcacggtctacctatctgggcgcatgggtcatctgctttctgcgggtatctttgtattggcggcggtgacggattggctggatggctacttggcccgcagtcggggccaaatgaccccctttggcaaatttcttgatcctgttgccgataagctgctggtgattgccgccctgatggttttgttagccgaacagcgcattgatattgtcgtggtgttggtcttggttgcccgtgaaattgtggttatggcgctgcgtgagtttatggcgggcaagggaggcggtgtgccggtttcacaggtgggtaaatggaaaacaggcgtgcagatggtggcaatcaccatgctgctgttgggggatgccctgtttgggctgcctctacagccagtggggttgttgttgctttatatctctgctttgttggcggtgtggtcggcttttctttatgtacgtagtgtctggtctcatattatagaaggggctgtatag

SEQ ID NO: 54713 - protein, 181 aa, Magnetococcus sp. MC-1
MNLPNKLTVSRIVFIPFFIVTVYLSGRMGHLLSAGIFVLAAVTDWLDGYLARSRGQMTPFGKFLDPVADKLLVIAALMVLLAEQRIDIVVVLVLVAREIVVMALREFMAGKGGGVPVSQVGKWKTGVQMVAITMLLLGDALFGLPLQPVGLLLLYISALLAVWSAFLYVRSVWSHIIEGAV

SEQ ID NO: 54714 - DNA, 603 bp, Nocardioides sp. JS614
  CDS (1)..(603): transl_table=11
gtggcggacgactcgacgcgcaaccgcgtgtggacgcttcccaacctgctcagcatgatccggctggcgggcgtcccggtcttcctctggctggtgctgggcccggaggcggacggctgggcactggcgctgctggcggtctccggcatcaccgacttcctcgacggctacctcgcgcgccggctggggcagacctcgacgctgggccaggtgctggacccggtcgccgaccggctctacatcctggccgtcgtcgtgggcctcgcgctgcgcgacgtgatcccctggtgggcggcgctctcgctgccgctgcgcgacctcctgctctgggggctggtgccgctgctgcggacccgtggctacagcgcgctgccggtgcacttcctgggcaaggccgcgaccttcaacctgctctacgccttcccgctgctgctgctcggtgacggcgacgggacggtcgcgaccctcgcgaacgtgttcggctgggcgttcgccctgtgggggatcgggctctactggtgggccggcatcctctacgcctggcaggtgcgcaccctgctggccaccaccgagaggcggacggcggcggtccccgatgcctga

SEQ ID NO: 54715 - protein, 200 aa, Nocardioides sp. JS614
MADDSTRNRVWTLPNLLSMIRLAGVPVFLWLVLGPEADGWALALLAVSGITDFLDGYLARRLGQTSTLGQVLDPVADRLYILAVVVGLALRDVIPWWAALSLPLRDLLLWGLVPLLRTRGYSALPVHFLGKAATFNLLYAFPLLLLGDGDGTVATLANVFGWAFALWGIGLYWWAGILYAWQVRTLLATTERRTAAVPDA

SEQ ID NO: 54716 - DNA, 573 bp, Azoarcus sp. BH72
  CDS (1)..(573): transl_table=11
atgtcattcaacatacccaattcgctcacctgggcacgcatcgcgctgattcccatcttcgtcggcatcttctacgcgccggacggctggatcggacccgcacagaagaacctcgtcgccaccgcgatcttcatcgtcgcagcgatcaccgactggttcgacggctacctcgcacgggcgctgcgccagacgtccgcgttcggcgccttcctcgatcccgtcgccgacaagctgatggtggcggcggcgctgatcctgctggtccagttggcgcgggtggatgccatcatcgcggtggtgatcatcggcagggagatcaccatctctgcattgcgcgagtggatggcgcgcgtcggcgaatcctccagcgtggcggtagcctacgtcggcaagctgaagaccgcggcccagatgacagccattccgctgctgctatacaatggccaactcttgtcgatcgacctgcgcttcattggcagtgtgctgatctacgtcgctgccgcgctgaccctgtggtccatgggctactacctgcatcgcgcggcaccccggctggcacggcacaaggattga

SEQ ID NO: 54717 - protein, 190 aa, Azoarcus sp. BH72
MSFNIPNSLTWARIALIPIFVGIFYAPDGWIGPAQKNLVATAIFIVAAITDWFDGYLARALRQTSAFGAFLDPVADKLMVAAALILLVQLARVDAIIAVVIIGREITISALREWMARVGESSSVAVAYVGKLKTAAQMTAIPLLLYNGQLLSIDLRFIGSVLIYVAAALTLWSMGYYLHRAAPRLARHKD

SEQ ID NO: 54718 - DNA, 606 bp, Mycobacterium sp. KMS
  CDS (1)..(606): transl_table=11
gtgtcgggcccgtctcctactgatccggtggtgccgcgcgcccgagtggccaatatcgccaatgtgctgaccggtgtgcgcttccttctggtaccggtgttcctcgccgcgctcttcgtcggcgacgggcatgaaacgtattggcgcgtcgtggctttcgtggtgttcgcggtggcggtgatcaccgaccggttcgacggtgcactggcgcgcagctatggcatggtcaccgaattcggcacgctcgcggacccgatcgccgacaaggcgctcatcggcgccgcgctgatcggcctgtcgatgctgggggatctgccgtggtgggtgaccggggtcatcctcgcccgcgaactcggtgtgaccgtgctgcgcttcgcggtgctgcgccacggggtgatcccggccagccgcggcggcaaggtcaagacgctcgtgcaggcggtggccatcgggctgttcgtgctgcccctggcggcctggcccggaccgtggctcgcggtggcgtgggtgatcatggtggccgccgtcgtgctgaccgtcctgaccgggctggactacgtgctgtcggcgattcgggactcccgtgaacgacccgctggtcactga

SEQ ID NO: 54719 - protein, 201 aa, Mycobacterium sp. KMS
MSGPSPTDPVVPRARVANIANVLTGVRFLLVPVFLAALFVGDGHETYWRVVAFVVFAVAVITDRFDGALARSYGMVTEFGTLADPIADKALIGAALIGLSMLGDLPWWVTGVILARELGVTVLRFAVLRHGVIPASRGGKVKTLVQAVAIGLFVLPLAAWPGPWLAVAWVIMVAAVVLTVLTGLDYVLSAIRDSRERPAGH

SEQ ID NO: 54720 - DNA, 561 bp, Magnetospirillum magnetotacticum MS-1
  CDS (1)..(561): transl_table=11
atgctgaccagcctgcccaacctgctgactctttcgcggatcgtcgtgattccgctggtggtcgggctgttctatgtggacggcgccgccgcccgctgggccgcctgcaccctgttcgtggccgccgccatcaccgactggttcgacggctatctggcccggtcgtggaatcaggtgtccaagttcgggcgtttcctcgaccccatcgccgataagctgctggtggcttcggtgctgttcatgctggcggccttcgaccgcctcagcacggtgtccttcctgcccgccctggtcatcgtgctgcgcgagatcctggtctcgggcctgcgcgaattcctggccgaggtgcgtgtcggcatgccggtgtccaaactggccaagtggaagaccgccatccagatgaccgcaatccccgtcctgctggtgggcgacgccgccaccttcatgcccacccggctggtgggcgaggtggggctgtggttggccgccattctgaccatcatcaccggctgggactatctgcggtcgggcatgcgccacatgggggaaacgccggaatga

SEQ ID NO: 54721 - protein, 186 aa, Magnetospirillum magnetotacticum MS-1
MLTSLPNLLTLSRIVVIPLVVGLFYVDGAAARWAACTLFVAAAITDWFDGYLARSWNQVSKFGRFLDPIADKLLVASVLFMLAAFDRLSTVSFLPALVIVLREILVSGLREFLAEVRVGMPVSKLAKWKTAIQMTAIPVLLVGDAATFMPTRLVGEVGLWLAAILTIITGWDYLRSGMRHMGETPE

SEQ ID NO: 54722 - DNA, 543 bp, Nostoc punctiforme PCC 73102
  CDS (1)..(543): transl_table=11
atgaccatacccaactggattaccttctctcgcctattggggataccatttctgctttatggtttatataatcccacacctgaagctcagtggatatgtttggcgatttttctcgttgctgcattgactgattggttagatggctatttggcacggaagctcaaccaaattagtgagttgggtaagtttctcgatcccttagtggataaacttctagtacttgcgccgttgctggtttttattgaactaggaaaagtgcctgcttggggagtgtttttgattttagcgcgagaattagcgatcgctggctggcgggtaaatcaaacgacgattaccggagcgaatatttggggtaaactcaaaactgttagtcaaatagtagcgatcgcacttttgattgcgcctttgggtgaagtgtggcgaactccctctttgcttgccttttggatttctgtcgccctgactttaatctctggaggtatttatcttgtaccgcaaaatccagctaaggaaaatccacggttagatacaaagcgaacctaa

SEQ ID NO: 54723 - protein, 180 aa, Nostoc punctiforme PCC 73102
MTIPNWITFSRLLGIPFLLYGLYNPTPEAQWICLAIFLVAALTDWLDGYLARKLNQISELGKFLDPLVDKLLVLAPLLVFIELGKVPAWGVFLILARELAIAGWRVNQTTITGANIWGKLKTVSQIVAIALLIAPLGEVWRTPSLLAFWISVALTLISGGIYLVPQNPAKENPRLDTKRT

SEQ ID NO: 54724 - DNA, 567 bp, Haemophilus somnus 2336
  CDS (1)..(567): transl_table=11
atgaaattcaatattcctacaatcttaactttatttcgagtcggattaatcccgttctttatcgtaacattttatttgccttttcattgggcaccttttctcacaactattatttttttcattgcctcaataacagactggctggacggttaccttgctcgccgatggaatcaaagtacgccttttggtgcgtttttagatcctgtcgccgataaagtcatggtcattgcggcacttacgctcgttgttgaatatcaacatgttttttgggtaacgatacctgcaattattatgatctttcgtgaaattgtgatttcagcattacgagaatggatggcagaaatcggtagccgtggcatcgttgcggtttcttggctggggaaaattaaaacagcctcacaaatgcttgcacttggcggtcttttatggcactacaatacattaatggaaattacagcaattgtctttttgtatatcgccgccatgttgacagtttggtcaatgtttcaatatttagccgccgccaaaaaatatcttttagctgataacaaacaaaaaagtgaataa

SEQ ID NO: 54725 - protein, 188 aa, Haemophilus somnus 2336
MKFNIPTILTLFRVGLIPFFIVTFYLPFHWAPFLTTIIFFIASITDWLDGYLARRWNQSTPFGAFLDPVADKVMVIAALTLVVEYQHVFWVTIPAIIMIFREIVISALREWMAEIGSRGIVAVSWLGKIKTASQMLALGGLLWHYNTLMEITAIVFLYIAAMLTVWSMFQYLAAAKKYLLADNKQKSE

SEQ ID NO: 54726 - DNA, 546 bp, Rickettsia sibirica 246
  CDS (1)..(546): transl_table=11
atgagaatagataaaaatttacctaattatttaactattgctcgaataatggtaattccagttattatactggtattttatataaataattcacttgcacgtacacttggggcattattatttgttttagctagtattacggatttttttgacggttatattgcaagaaaatataatttagttacaagtttcggtaagatgtttgaccctatagcagataagctacttgtaggttgcgttattatcatgctactaaaaaaagataatgtagatgagataccttgcttattaattttagcacgagaatttttagttagcggtcttcgggaatttttaactctagtaaaggttagtgtgcctgtatcgagacttgctaaggtaaaaacgtttttacaaatgtttgctttatcgatattgatactaggctcaaaaggttcaggaattatttatttagatatagtaggggaaataattttatggattgccgcttttttaacaatcattacaggttattcttattttaaagcctataagaaatatttttaa

SEQ ID NO: 54727 - protein, 181 aa, Rickettsia sibirica 246
MRIDKNLPNYLTIARIMVIPVIILVFYINNSLARTLGALLFVLASITDFFDGYIARKYNLVTSFGKMFDPIADKLLVGCVIIMLLKKDNVDEIPCLLILAREFLVSGLREFLTLVKVSVPVSRLAKVKTFLQMFALSILILGSKGSGIIYLDIVGEIILWIAAFLTIITGYSYFKAYKKYF

SEQ ID NO: 54728 - DNA, 564 bp, Fusobacterium nucleatum subsp. vincentii ATCC 49256
  CDS (1)..(564): transl_table=11
atgaatttacctaatagactaactatgattagatttatattagcaattccttttataatatttttacaatattcagattccagtaaatatggcttgatttttagattaatttcccttgtgatatttgtaatagcatcacttacagatttttttgatggctatattgcaagaaaatataatttaataactgattttggaaaaattatggatcctcttgctgataagatacttgttatttcagctcttgtaatatttgtacaattagaatatatcccaggttggatgtctattgttgttttagctcgtgaatttttaatcagtggaataagaatacttgcagcagcaaagggtgaaattattgcagctggtaatttaggaaaatataagacaacaagccaaatgatagttgttataattgccttagcaataggtcctgttggtttttatatatctgattatttcttcactattgcagaagtattgatgttaatacctgttattttaacaatatggtcaggttgggaatatactttcaaagcaaaacactattttactgaacaatga

SEQ ID NO: 54729 - protein, 187 aa, Fusobacterium nucleatum subsp. vincentii ATCC 49256
MNLPNRLTMIRFILAIPFIIFLQYSDSSKYGLIFRLISLVIFVIASLTDFFDGYIARKYNLITDFGKIMDPLADKILVISALVIFVQLEYIPGWMSIVVLAREFLISGIRILAAAKGEIIAAGNLGKYKTTSQMIVVIIALAIGPVGFYISDYFFTIAEVLMLIPVILTIWSGWEYTFKAKHYFTEQ

SEQ ID NO: 54730 - DNA, 636 bp, Bifidobacterium longum DJO10A
  CDS (1)..(636): transl_table=11
atggacaagcagtcatcgcccaaatcatcgctgttcgacggatggaacgcgccgccgaacctggtcacctactcgcgcatcgtactcgtggtgtttttcctgacactcgacattctcgccggtgcctggggtgagaacaacctgaccatgcgctgggtcgccgcggtgctgttcatcatcgccgcgtccaccgataaaatcgacggttggatggcccgcaaatacaatcaggtcaccgaaatgggcaagctcatggatccgatcgcggataagctgctcacttgcggcgcaatgattgtatgctccgcgttcggcgagctcggctggtgggtaaccatcctgttcctgattcgcgaaattggtatcaccgttatgcgtttcttcgtcatggagcgtccgggcggcaaagtcatcgccgccgcatggcccggcaagctcaagaccgtattccagtgcgtgggtctgtccatgctgctgctgccgttctggtctctgggtaacggacaagccacgccgttctggatgaccgcttactacttcctgacctacgccatcatctacgtggcattggtcctgtgcctctactcgggtgccgtgtacctgtacaacacgttcgtcgccccgaagcggaagtga

SEQ ID NO: 54731 - protein, 211 aa, Bifidobacterium longum DJO10A
MDKQSSPKSSLFDGWNAPPNLVTYSRIVLVVFFLTLDILAGAWGENNLTMRWVAAVLFIIAASTDKIDGWMARKYNQVTEMGKLMDPIADKLLTCGAMIVCSAFGELGWWVTILFLIREIGITVMRFFVMERPGGKVIAAAWPGKLKTVFQCVGLSMLLLPFWSLGNGQATPFWMTAYYFLTYAIIYVALVLCLYSGAVYLYNTFVAPKRK

SEQ ID NO: 54732 - DNA, 588 bp, Burkholderia vietnamiensis G4
  CDS (1)..(588): transl_table=11
atgccgttcaacttcccgattttcctgacgtgggtccggatcgtgctgattccgctcgtcgtcggcgtgttctatctgccggacacggtgatgggcggcgcgcaccgcaacctcgcggcggcggcgatattcatcctggcggcgctgaccgactggttcgacggctttctcgcgcgcaagtggaaccagacgtcgtcgttcggcgcgttcctcgacccggtcgcggacaagctgatggtcaccgccgcgctgctgatcctcgtgcagatcgcgcgggtcgacgcggcgatcgcgctggtgatcgtcggccgcgagatcgcgatctcggcgctgcgcgagtggatggcgcagatcggcgcgtcgaagagcgtcgcggtgaaccagctcggcaagttcaagaccgcatgccagatggtcgcgatcccgatgctgctgtactacgggccgctgccgctcggcgtcgcgacgatcgacacgcgcgtgtggggcgaatggctgatgtatctggcggcggtgctgacgatctggtcgatgctgtactacatgaagctcgcgtggccgcagattcgcgagcgcggcggcgcgtaa

SEQ ID NO: 54733 - protein, 195 aa, Burkholderia vietnamiensis G4
MPFNFPIFLTWVRIVLIPLVVGVFYLPDTVMGGAHRNLAAAAIFILAALTDWFDGFLARKWNQTSSFGAFLDPVADKLMVTAALLILVQIARVDAAIALVIVGREIAISALREWMAQIGASKSVAVNQLGKFKTACQMVAIPMLLYYGPLPLGVATIDTRVWGEWLMYLAAVLTIWSMLYYMKLAWPQIRERGGA

SEQ ID NO: 54734 - DNA, 555 bp, Crocosphaera watsonii WH 8501
  CDS (1)..(555): transl_table=11
atgacaattagccattatcaattatccatgaatttacctaattcgatcacaatttcccgtttaataggacttccttttcttttctatttcctcactactcctaccccttctcatcgttggctcagcctcgttattttcctccttgctgcctcaacagactgggtagatggttatttagctagaaagttaaatcaagtgactgaattaggcaaatttctcgaccctttagttgataaattattggtacttgcacccctcttaagtttgatttctctgcaacaagttccggcctggggagtgttcttaatattaggccgagaaatagcgatcgccggatggcgtattaacccaaacttaaccggaaacaccaccattcaaggagcaaatatttggggaaaattaaaaacagtcagccaaatcacggcgatcgcactactgatcgcccctttgcctcaaccttgggaaactatctctataacagttttttggctatcagtcttcttaactatactttctggagtgatctacctactgcctaattttagtagtaactga

SEQ ID NO: 54735 - protein, 184 aa, Crocosphaera watsonii WH 8501
MTISHYQLSMNLPNSITISRLIGLPFLFYFLTTPTPSHRWLSLVIFLLAASTDWVDGYLARKLNQVTELGKFLDPLVDKLLVLAPLLSLISLQQVPAWGVFLILGREIAIAGWRINPNLTGNTTIQGANIWGKLKTVSQITAIALLIAPLPQPWETISITVFWLSVFLTILSGVIYLLPNFSSN

SEQ ID NO: 54736 - DNA, 579 bp, Exiguobacterium sibiricum 255-15
  CDS (1)..(579): transl_table=11
atgaacttgcccaatcaattgacggtcttacgcgtgttactaattcccgtgttcgttgccgtcttagccatcaatccagactggggacagtgggatgtcttaggagcggtactgccggtttcccacttcgtcgccgcgatgatcttttccgtcgccgccatcaccgattggctcgacgggtatattgcccggaaaaacaaactggtcacgaacttcggtaaattcatggatccactcgccgacaagatgcttgtcgctgcagcactcgtctatttagtcgaacttgacttcgtcgccgcttgggtcgtcgtcatcatcttatgccgtgaattcgccgtgacaggtctccgtctcgtcgcttcagacgaggggattgtcctggccgccggaaattccggcaaagcgaagacctgggtccagttgacatccatcatcgcctttttactgcatgatatcggatttgccttactgaacattccttttgcggaaatcacgatgtggttggcgttggtcttaacaatttattcaggagtcgagtatttctcaaaaaatatcaagttaattacgaaatccatgtaa

SEQ ID NO: 54737 - protein, 192 aa, Exiguobacterium sibiricum 255-15
MNLPNQLTVLRVLLIPVFVAVLAINPDWGQWDVLGAVLPVSHFVAAMIFSVAAITDWLDGYIARKNKLVTNFGKFMDPLADKMLVAAALVYLVELDFVAAWVVVIILCREFAVTGLRLVASDEGIVLAAGNSGKAKTWVQLTSIIAFLLHDIGFALLNIPFAEITMWLALVLTIYSGVEYFSKNIKLITKSM

SEQ ID NO: 54738 - DNA, 666 bp, Sulfitobacter sp. EE-36
  CDS (1)..(666): transl_table=11
atgaagtggaatatccccaatatcctgacgctcttgcgtcttgtcgcggccccgggtgtggctgtgatgttcttgtattttacgcgtccctatgcggacgctttggcgatgttcctgttcatcgccgccgcggtcaccgattggtttgacggctatcttgcgcgcgcatgggggcaggaaaccaagctgggaaccatgctggacccgattgctgacaaggccatggtggtgattgcgctgatggtgatcgtcgcgttttcaagctggtcgccgtggctggtgctccctgccaccgtgatcctgtttcgcgaagtctttgtttcgggcctgcgggagtttctgggggatgtgtctggcactttgaaggtcacggcgctggccaagtggaagacaaccgcgcagatggtcgcgattgctgtgctgttcgggcaggggctgtttgaacactactttggcatgtcgattttcggcatggataacgccctggtcggtgccatactctcgggtgaggaagaggacgttctagggctcacctggaagttccacgggatgatctgggccggccggatcgggttggtgctgctttggattgcggcggcgctgacggcgatcaccggctatgattatctgcgcaaatccatgccccatctggtggagccacgctaa

SEQ ID NO: 54739 - protein, 221 aa, Sulfitobacter sp. EE-36
MKWNIPNILTLLRLVAAPGVAVMFLYFTRPYADALAMFLFIAAAVTDWFDGYLARAWGQETKLGTMLDPIADKAMVVIALMVIVAFSSWSPWLVLPATVILFREVFVSGLREFLGDVSGTLKVTALAKWKTTAQMVAIAVLFGQGLFEHYFGMSIFGMDNALVGAILSGEEEDVLGLTWKFHGMIWAGRIGLVLLWIAAALTAITGYDYLRKSMPHLVEPR

SEQ ID NO: 54740 - DNA, 666 bp, Roseovarius nubinhibens ISM
  CDS (1)..(666): transl_table=11
atgagcatgacgatccccaacatcctgacgatcctgcgtcttttggcggcccccgcgattgcggtgatgtttctctatttccatcggccctgggcggattggtttgccctcatcctctttgtgggggcggcgatcaccgattggttcgatggctacctggcgcggagctgggcgcaggagagcaagcttggcgcgatgctcgacccgattgccgacaaggcgatggtgttgatcgcgctgatggtgatcgtcggctattcctcgatgtcaccctggctggtgctgccggcgacctttatcgtgttccgcgaagtgttcgtctcgggcctgcgcgagtatctcggcgatgtggccgggacgctcaaggtcacgaagctcgcgaaatggaagaccacggcgcagatggtggcgattgcctgtctctttgcgcagggcgtcttcgagcattatcttggcatgtcggtctttggcatggatgaggcgatggtcgcggaaatcctcgcggggcgtgaagaggatcttcttggcctgtggtggaaatatgaggggatgatctgggccgggcggctggggctgtggctcttgtggctggcggcggcgctgacgctgatcacgggctatgattacttccgcaagtctgtgccctatctgaaggaggacgcatga

SEQ ID NO: 54741 - protein, 221 aa, Roseovarius nubinhibens ISM
MSMTIPNILTILRLLAAPAIAVMFLYFHRPWADWFALILFVGAAITDWFDGYLARSWAQESKLGAMLDPIADKAMVLIALMVIVGYSSMSPWLVLPATFIVFREVFVSGLREYLGDVAGTLKVTKLAKWKTTAQMVAIACLFAQGVFEHYLGMSVFGMDEAMVAEILAGREEDLLGLWWKYEGMIWAGRLGLWLLWLAAALTLITGYDYFRKSVPYLKEDA

SEQ ID NO: 54742 - DNA, 663 bp, Oceanicola batsensis HTCC2597
  CDS (1)..(663): transl_table=11
atgaagatgaccctgccgaacctgctcacccttttccgcctgctggccgcccccggcgtcgtgctggtgttcctgctggtgccgcgtcccgtcgcggactggctggcctgcgcgctcttcgtgggggcggcggcgacggattatgtcgacggctacctggcgcggcgcatggggcaggtcagccgcatcggcacgatgctcgatccgatcgcggacaaggccatggtggcgctggcgctgctggcgctggccgtctggtcgccgctgtcgcatgcgatcgtcctgccgggcgcggtgatcctgttccgcgaggtcttcgtttcgggactgcgcgagtttctgggtgacgtggccgggcggctgcaggtcacgaagctggccaagtggaagacggcggtgcagatggtggcgatcgcgctgctgctggcacagggcggggtgaacgcgcgtctgggcatggcggtcttcgggatggacgggacgatggtgtcggccatcctggcgggcgaggaggcggacccgctggggatacgcgggatgctgatccgtgcggaatggggcggatatatcgggatcgcgctgatctggctggcggcgctgctgacggccatcaccggctgggactatttccgcaaggcgcgggcgcatctgggagaggactga

SEQ ID NO: 54743 - protein, 220 aa, Oceanicola batsensis HTCC2597
MKMTLPNLLTLFRLLAAPGVVLVFLLVPRPVADWLACALFVGAAATDYVDGYLARRMGQVSRIGTMLDPIADKAMVALALLALAVWSPLSHAIVLPGAVILFREVFVSGLREFLGDVAGRLQVTKLAKWKTAVQMVAIALLLAQGGVNARLGMAVFGMDGTMVSAILAGEEADPLGIRGMLIRAEWGGYIGIALIWLAALLTAITGWDYFRKARAHLGED

SEQ ID NO: 54744 - DNA, 609 bp, Erythrobacter sp. NAP1
  CDS (1)..(609): transl_table=11
atgctgacgctgcccaacatcctgaccctttcgcgaattttcgcagtgccgctgctcggtttcctgttgtggtggccggactggcagctcggctacctgatcggttttgcgctttattgcgtgattgcgatcaccgactttttcgacggctatctggcgcgagcacaggggaccgtgtcgaaactcggcatcttccttgatccgattgcggacaagatcatggtcgccgccgtgatcctgattctgaccgcgcaaggtttcctgagaggtccgtatgtcggcgatatgcacgtcatcgcggggcttgtgattcttatccgcgagatcacggtgagcggtttgcgcgagtttttgggcggcatccaggtgtcagtcccggttacgaaactcgcaaagtggaagacgacgtttcaactggtcgctcttggcgcgctgatcctgggcggagctgttcacgggcagccatgccagtcgcccggggccgcctgcgctagcgttgaagaaacatggatccatgtcgtcggcctcgccagcctctgggctgccgccgtgctgacctgcatcacaggttgggactatctgcgggtcggcctcaagcacatggaatga

SEQ ID NO: 54745 - protein, 202 aa, Erythrobacter sp. NAP1
MLTLPNILTLSRIFAVPLLGFLLWWPDWQLGYLIGFALYCVIAITDFFDGYLARAQGTVSKLGIFLDPIADKIMVAAVILILTAQGFLRGPYVGDMHVIAGLVILIREITVSGLREFLGGIQVSVPVTKLAKWKTTFQLVALGALILGGAVHGQPCQSPGAACASVEETWIHVVGLASLWAAAVLTCITGWDYLRVGLKHME

SEQ ID NO: 54746 - DNA, 588 bp, Synechococcus sp. WH 5701
  CDS (1)..(588): transl_table=11
atgaccccttcaacacctgaatccgctggcgggcggcccgccgttcccctggctcgccgcctggccgacgcactcactgtggccagggctttcctgggactgccgctgttgctggccctcggtgccggtcaggcggggctgggctgggcattgctgctgctgggcggcttcagcgactgggccgacggctggctggcccggcgctcgggcggcggctcggtctggggggcacggctcgacccgctcaccgacaagatcctgatcagtgcccccctgctctggctggccagggaggggaccctgcccctctgggcggtgtggctgctgctggcgcgggagctgctgatctccggctggcgggccggccaggccagcggcgctccggcctcagccgccggcaaggcgaagaccgtgctccagttcgccgccctgctgctgctgctctggccgctcacctggcccctggccaacggtctgcgcagcctgggctggtggctgttctggccctcgctgctgctggcgctcagttcaggcgccagctacctgcgggcgggcctcagccggccagcagagcctgatcggagctga

SEQ ID NO: 54747 - protein, 195 aa, Synechococcus sp. WH 5701
MTPSTPESAGGRPAVPLARRLADALTVARAFLGLPLLLALGAGQAGLGWALLLLGGFSDWADGWLARRSGGGSVWGARLDPLTDKILISAPLLWLAREGTLPLWAVWLLLARELLISGWRAGQASGAPASAAGKAKTVLQFAALLLLLWPLTWPLANGLRSLGWWLFWPSLLLALSSGASYLRAGLSRPAEPDRS

SEQ ID NO: 54748 - DNA, 549 bp, Synechococcus sp. WH 7805
  CDS (1)..(549): transl_table=11
ttggtctctccctggcgatcctgggcggatcgactcaccctgttccgtgctgttctgggcgcccccgtgctgctggctcttgccgccgagcagctctcaacggcttgggtcctactgctcctgggtgccctcagtgactgggctgatggctggatggcccgcaaggccgatggcggcagcagctggggggccagactcgatcccctggcggacaagcttctgatcagcgctccattgatctggctcgccagcgaacaggtcctccccctctggtcggtctggcttctgttggcaagggaactgttgatttcgggctggcgatcagcaagccagagcggagctccggcctcctggctcggcaaaacaaaaaccaccctgcagttcctaagcctgtttttgctgatctggcctccgagctggggggccggtccagtcgtcctgggattgcgtcagctgggctggagcctctattggccagccctggggctggctctctggtctgggctggcctacatcacgccgccgaaagcagggcatcgtcaccactga

SEQ ID NO: 54749 - protein, 182 aa, Synechococcus sp. WH 7805
MVSPWRSWADRLTLFRAVLGAPVLLALAAEQLSTAWVLLLLGALSDWADGWMARKADGGSSWGARLDPLADKLLISAPLIWLASEQVLPLWSVWLLLARELLISGWRSASQSGAPASWLGKTKTTLQFLSLFLLIWPPSWGAGPVVLGLRQLGWSLYWPALGLALWSGLAYITPPKAGHRHH

SEQ ID NO: 54750 - DNA, 558 bp, Photobacterium sp. SKA34
  CDS (1)..(558): transl_table=11
atgcgtttatcaatacctaacatcttaagtttcgtccggctcattcttatcccattttttgttattgccttttatgtgccgtacgagtggtctgcttttgcaacagcgttcattttttgggtcgcgggtgtcaccgattggttcgatggctaccttgctcgtaaattaaatcaaacaactcggtttggtgcttttatcgatcctgttgctgataaactcatggtagcaacggccttagtactcgtggttgagcattatcattcagtatgggttacgatccctgctgtcactatgattggtcgtgaaattattatttcagcactacgtgaatggatggctgaaattggtaaacgtgcaagcgtagctgtttcttgggtagggaaagtgaagactgcctctcagatgtttgctctattattgttgttatggcatccgcatgaatacgttgtatggttaggttatgtatctttgtatgttgcaatggtattaacgtactggtcaatggtgcaatatttaaaggcagccaaaggtgatttgcttaacgcagaaaatcactag

SEQ ID NO: 54751 - protein, 185 aa, Photobacterium sp. SKA34
MRLSIPNILSFVRLILIPFFVIAFYVPYEWSAFATAFIFWVAGVTDWFDGYLARKLNQTTRFGAFIDPVADKLMVATALVLVVEHYHSVWVTIPAVTMIGREIIISALREWMAEIGKRASVAVSWVGKVKTASQMFALLLLLWHPHEYVVWLGYVSLYVAMVLTYWSMVQYLKAAKGDLLNAENH

SEQ ID NO: 54752 - DNA, 549 bp, Oceanospirillum sp. MED92
  CDS (1)..(549): transl_table=11
atgaagctacctaatatactaaccagtctgcgtatcctgctgatacctgtatttgttcttgttttttacctgccttatgactgggctccattggccacaggctgtgtctttgctattgcaggcttcaccgattggctggatggattcgtcgctcgtaagttaaaccagacatcgccgtttggcgcttttcttgatcccgtcgcagataaattgatggtagctatttcacttgcgctactggttgagtcctataacaatatctggattactattcctgctatcgtcatcatcggcagagagatcgttatctctgcactacgtgagtggatggcagagatagggcagagggcaagtgttgccgtatcctatattggtaagcttaaaactgctctgcagatgttggcgatcatgttgatggttgtaactgagccctataccaatatctcctgggcaggaattgttgcgctctatcttgcagccattcttactttatggtctatgtatcagtaccttagagctgcttggccagtcttatctgaagagatgtaa

SEQ ID NO: 54753 - protein, 182 aa, Oceanospirillum sp. MED92
MKLPNILTSLRILLIPVFVLVFYLPYDWAPLATGCVFAIAGFTDWLDGFVARKLNQTSPFGAFLDPVADKLMVAISLALLVESYNNIWITIPAIVIIGREIVISALREWMAEIGQRASVAVSYIGKLKTALQMLAIMLMVVTEPYTNISWAGIVALYLAAILTLWSMYQYLRAAWPVLSEEM

SEQ ID NO: 54754 - DNA, 642 bp, Xanthobacter autotrophicus Py2
  CDS (1)..(642): transl_table=11
atggcagaggcagcgacccgttcccccacctcatccgcgcccgaacggggcgggcggggccatgcgctttcgctgccgaatatccttacctattcgcgctgcgtggcggtgccgctggtggcggcctgcctgttctggtcggacatcctggaaggcggcgcggtgctgcgctgggtggcgctggcgctctacatcgccgccgccattaccgacttcttcgacggctatcttgcccgcgcgtggtcgcagcaatcggccatcgggcggatgctggaccccatcgccgacaagctgctggtctccacctgcctgctcatgctggcgtccgacggcaccatccgcggctggtccctgtgggcggccatcgtcatcctgtgccgggagatcctggtgtccggcctgcgcgagttcctggccgagctgagggtttcggtgccggtgtcgcgcctcgccaagtggaagaccacgctccaactcgtcgccgtgggcgtgctcatcaccgggccggcgggggagagcgtgctgccgggggtgaacctcatcgggctcacgctgctgtgggtgtcggcggtgctcacgctgtacacgggctatgattatttccgggccggcgcccgccacctggtggaggacgagcggtga

SEQ ID NO: 54755 - protein, 213 aa, Xanthobacter autotrophicus Py2
MAEAATRSPTSSAPERGGRGHALSLPNILTYSRCVAVPLVAACLFWSDILEGGAVLRWVALALYIAAAITDFFDGYLARAWSQQSAIGRMLDPIADKLLVSTCLLMLASDGTIRGWSLWAAIVILCREILVSGLREFLAELRVSVPVSRLAKWKTTLQLVAVGVLITGPAGESVLPGVNLIGLTLLWVSAVLTLYTGYDYFRAGARHLVEDER

SEQ ID NO: 54756 - DNA, 564 bp, marine gamma proteobacterium HTCC2207
  CDS (1)..(564): transl_table=11
atgtggaatttgcccaatatcctaaccctgctgcgcattggcttaataccggtgttcatcgccatatactacacctcatgggagtggcataacctgattgccgccgccgtgtttggtctggccgcagcgactgattgggtagacggttatatggctcgtaagtacgaccaggtaacgccctttggtgctttcttggatcccgttgccgacaaactgattgtggttgcggctatggtgatgctgctcgaagtgcattccagccccttattttcaattgcatcgattatcattatcggccgtgaaatcgttatttccgcactgcgggagtggatggccgagatgggctacagcggtactgttgccgtcgctatgattggcaaagtgaagacctgggtgcagatggttgccatcgcggtattgctcgccgccaaaccagaaaatgaactgctcaccaacctcgggtttatcgcaatttatatcgctgccgcgctaactctctggtcaatggtccactatctgcgcgctgcctggccgcaattgagtggctcaactccaagtaagtga

SEQ ID NO: 54757 - protein, 187 aa, marine gamma proteobacterium HTCC2207
MWNLPNILTLLRIGLIPVFIAIYYTSWEWHNLIAAAVFGLAAATDWVDGYMARKYDQVTPFGAFLDPVADKLIVVAAMVMLLEVHSSPLFSIASIIIIGREIVISALREWMAEMGYSGTVAVAMIGKVKTWVQMVAIAVLLAAKPENELLTNLGFIAIYIAAALTLWSMVHYLRAAWPQLSGSTPSK

SEQ ID NO: 54758 - DNA, 549 bp, Rickettsiella grylli
  CDS (1)..(549): transl_table=11
atgagtattcccaatatattaacttttttgcgcattcttttaattcccttttttattttattattttacttaccttttcgaggaagtcatatcgttgctgcacttatttttatttttgcagccatgaccgattggctcgatgggtatttagcgcggagttgggatcaagtttctaaattaggcagttttcttgatccggtggcggataaattaatggtgattacggcactaatattattagtgagcgatcgggccttaccttacttagcgattcctgcgattgttattagttgtcgtgaaattatggtttcagcgttgcgtgaatggatggctgaaattggtaaacgtaaacagatggctgtcacgatgttagggaaaataaaaacaacgttgcagatgttagccatcattttattattactttacaaacccggcgcttggatgggatttgcttttgcaggttacctattactttatcttgctgtttttttaacattgtggagtatgtgtttatatttaaaagcagcctggcatgatttatcttcttga

SEQ ID NO: 54759 - protein, 182 aa, Rickettsiella grylli
MSIPNILTFLRILLIPFFILLFYLPFRGSHIVAALIFIFAAMTDWLDGYLARSWDQVSKLGSFLDPVADKLMVITALILLVSDRALPYLAIPAIVISCREIMVSALREWMAEIGKRKQMAVTMLGKIKTTLQMLAIILLLLYKPGAWMGFAFAGYLLLYLAVFLTLWSMCLYLKAAWHDLSS

SEQ ID NO: 54760 - DNA, 543 bp, Oceanobacter sp. RED65
  CDS (1)..(543): transl_table=11
atgatggcaaggtatattccaaatataatcacagcgctgcgcttaattgcagtgccgcctgctatctattttctctctattcagtcctatgcaaatgctctctggatttttgcgtttgcaggtgtgagcgatggtgttgacgggtacttggcgcgacggttttcctggcaaagtcattggggaaggattatggatcctcttgccgataaagtacttgtggttagtactgctgccatgctggcttggcaagctctcgtgccgctctggttgtttgtattgcttctttttcgtgatgttatgctattggccggatcggctttatatcattggtttaaagggccgtttagggtgacgcctacaatctggggcaagctcagtactttttttcaaatactcttgttagtcgccattatggctcacgaggcatatggtttactcagcgacttaaaagttatgttactcatgctattgtgcggcctatttacgttaatcagcggggcgcactattttactacttggataaggaaagccgcgaatgactga

SEQ ID NO: 54761 - protein, 180 aa, Oceanobacter sp. RED65
MMARYIPNIITALRLIAVPPAIYFLSIQSYANALWIFAFAGVSDGVDGYLARRFSWQSHWGRIMDPLADKVLVVSTAAMLAWQALVPLWLFVLLLFRDVMLLAGSALYHWFKGPFRVTPTIWGKLSTFFQILLLVAIMAHEAYGLLSDLKVMLLMLLCGLFTLISGAHYFTTWIRKAAND

SEQ ID NO: 54762 - DNA, 558 bp, Desulfitobacterium hafniense DCB-2
  CDS (1)..(558): transl_table=11
gtgaatttacccaatcaactcacaatggcgcggataatattaatacccatctttatggccttgttgctcatccaatttcctaaaggtcagccgatttttccttatcaggattttgtggcggccatgatcttcatcctggcagctgcgacggatggcttggatggttatatcgcccgtaaaagaggccaggttacagttctgggaaaatttatggatccgctggcagataaacttttggtttcggcagctttaattgcgttggtggacttggggcatgtgccggcgtggatttgctggattatactggcccgggagttcgcagtgacagggttgagagccatagcctctgctgacggaactgtgattgcagccagcaaactgggcaagattaaaaccgtatcccaggttgtggctatttctctgattctgctccatgattggcctttatccctcttcaacctctatctgggacagccgcttctctatgtagcccttttctttacgattgtttcaggtgtggattatttagtaaaatcgaagaagcttttgaaaaaataa

SEQ ID NO: 54763 - protein, 185 aa, Desulfitobacterium hafniense DCB-2
MNLPNQLTMARIILIPIFMALLLIQFPKGQPIFPYQDFVAAMIFILAAATDGLDGYIARKRGQVTVLGKFMDPLADKLLVSAALIALVDLGHVPAWICWIILAREFAVTGLRAIASADGTVIAASKLGKIKTVSQVVAISLILLHDWPLSLFNLYLGQPLLYVALFFTIVSGVDYLVKSKKLLKK

SEQ ID NO: 54764 - DNA, 549 bp, Synechococcus sp. RS9916
  CDS (1)..(549): transl_table=11
ttgaactcccgttggcgcacctgggctgatcgcctcaccctgatccgggccgtcgcaggcctccccctggtgcttgcgttgatccaccagcagcaagcattggcctggttcctgcttgtagggggaggtctgaccgatgccctcgatgggtggatggcccgccgggcaggaggcggcagcagctggggcgcgcgtctcgatcccctcgccgacaaattgctcttggtggcgcccctgctctggctggccactaatgggacattgcccatctgggctgtctggttgttgctggctcgcgaacttctgatttcaggctggaggaggaatgcccaagacggagcacccgcctcccagtgggggaaggcaaaaacaatcctccaatttatgagtctgctgctgttgctctggcccgaccaatggggacatgctgatgcagtgaagtccctgcagcagctgggttggtggctgttctggccatcccttgtgctggcccttcagtcggccgttggctatctcaaaccgacccgatcaacgccgcatcaccactga

SEQ ID NO: 54765 - protein, 182 aa, Synechococcus sp. RS9916
MNSRWRTWADRLTLIRAVAGLPLVLALIHQQQALAWFLLVGGGLTDALDGWMARRAGGGSSWGARLDPLADKLLLVAPLLWLATNGTLPIWAVWLLLARELLISGWRRNAQDGAPASQWGKAKTILQFMSLLLLLWPDQWGHADAVKSLQQLGWWLFWPSLVLALQSAVGYLKPTRSTPHHH

SEQ ID NO: 54766 - DNA, 564 bp, marine gamma proteobacterium HTCC2143
  CDS (1)..(564): transl_table=11
atgaacatacctaatacattaacgctgctacgtattctgttgataccggtgattatcgctgtgttttatctgccctatgattggagctacttggcctctgccggcatttttatgcttgccagtattacggactggctagacggatatcttgctcgcaaactcaatcaaagcacgccttttggcgcctttctcgacccggttgcggataagttaatggtttccattgccttggtattactggtcgagcgattcggcgcctggtggttcacggttccagcgatgatcatcattggccgagaaattgtgatatcggctttgagggaatggatggcagagctgggacgacgaaccagtgttgcagtgtcctatatcggcaaggtcaaaacaggatttcagatggtggcaatactggtgttactagccgcagcgcctgagcgcagcggtatactgctaaatattggtattgtattgttgtatctgtcggcgatactaacactgtggtctatgctggtatacattcgagcggcatggccaacatttgatctaggctctggcactaagtaa

SEQ ID NO: 54767 - protein, 187 aa, marine gamma proteobacterium HTCC2143
MNIPNTLTLLRILLIPVIIAVFYLPYDWSYLASAGIFMLASITDWLDGYLARKLNQSTPFGAFLDPVADKLMVSIALVLLVERFGAWWFTVPAMIIIGREIVISALREWMAELGRRTSVAVSYIGKVKTGFQMVAILVLLAAAPERSGILLNIGIVLLYLSAILTLWSMLVYIRAAWPTFDLGSGTK

SEQ ID NO: 54768 - DNA, 570 bp, marine gamma proteobacterium HTCC2080
  CDS (1)..(570): transl_table=11
ttgccccttaacttaccgaatatactgacgctgctgcgtatcgctgccatccctattttggtgcttttcgcgcatttgggatcaccctggggtaattggggtgcagcggctctgtttggtgccgccgcgctcactgatttgctcgacggttggttagcacggcgctccggtcagaccacggtatttggtgcttttttagatcccgttgccgataaactcattgtcgctactgcattggtgttactgaccgcgcggtttgacgacgtgttaattaccctgtgcgcatgcgtagtaataggacgcgaagttgtggttagcgcccttcgggaatggatggcgaggctaggaaaagaagcctcggtagctgtaaatcagattgctaaggtgaagacgaccttgcaaatgatagcgatctcatttctgttgttgctactacctgaatataccaacaccggctggttcattttgggaaagacggtgctgatcgtcgcggtgcttttgacgttgtggtctatggtggtgtacctccgttcatttttctcggtgattcgagaaagtgaagggctgtaa

SEQ ID NO: 54769 - protein, 189 aa, marine gamma proteobacterium HTCC2080
MPLNLPNILTLLRIAAIPILVLFAHLGSPWGNWGAAALFGAAALTDLLDGWLARRSGQTTVFGAFLDPVADKLIVATALVLLTARFDDVLITLCACVVIGREVVVSALREWMARLGKEASVAVNQIAKVKTTLQMIAISFLLLLLPEYTNTGWFILGKTVLIVAVLLTLWSMVVYLRSFFSVIRESEGL

SEQ ID NO: 54770 - DNA, 561 bp, Pseudomonas putida GB-1
  CDS (1)..(561): transl_table=11
atgaatattccaaacctgctcaccgttctacgcgtcctgctcatcccgatcttcatcctgctgttctatgtgccctatcagtggagctacatggccgccagcagtgtgttcgccgtcgccgccgccaccgactggctggacggctacctggcgcgtcgcctgcagcagagcacgccgttcggtgccttcctggaccctgtggccgacaagctgatggtggcggtggccttggtgctgctggtgcaaacccacgccaacttctggctgaccctgcctgcggcagtgatcatcggtcgcgaaatcgtggtgtcggcactgcgcgagtggatggccgagctgggcgcacgggcacatgtggcggtgtccaaccttggcaagtggaagacggcggcgcagatgctcgccctggtgattctgttggccaacccgccggcagtgaccttctgggtgatcctgggctacggcctgctgctggtggcggcggggctgacgctgtggtctatggtgcattacctgctggctgcctggccgcacctgcgcgaaggctcggaacaaaaataa

SEQ ID NO: 54771 - protein, 186 aa, Pseudomonas putida GB-1
MNIPNLLTVLRVLLIPIFILLFYVPYQWSYMAASSVFAVAAATDWLDGYLARRLQQSTPFGAFLDPVADKLMVAVALVLLVQTHANFWLTLPAAVIIGREIVVSALREWMAELGARAHVAVSNLGKWKTAAQMLALVILLANPPAVTFWVILGYGLLLVAAGLTLWSMVHYLLAAWPHLREGSEQK

SEQ ID NO: 54772 - DNA, 1334 bp, Vigna unguiculata
  CDS (48)..(950)
  misc_feature (1082)..(1082): y is t or c
cacgcgtccgaaagtttcctgagaaagaacaaagtgattggtgatcgatgatgtcgggcttcaaactcagcaccagtggtttcatctacattcgcacagccaccaaaaccaaacccctctcatggacccctaacacaagaacaaccccaacccaacaccgccgcaggtacatcccttccctttccccttccaaaaaccaaattctagggttttcacgttcacacaaattgccatgtttgggaagagctggtcttgtcacggatttaggttcgccagtgccatcaccacagcctcaacctcaacctcaacctcaacttcaagctcagtctaagccagagcctgaaccagaatcttccaaattgctcactctgccaacaattctgactctgggtcgtgtcgccgcagtgccacttcttgttgctactttctacatggatggttggcctggaactgcggctactacgagtattttcgtcgctgcatcaatcacagattggcttgatggctatcttgctcgtaagatgaagttgaaatcttcattcggtgcattcttagatcctgtagctgacaagcttatggtttctgccacattggtcttattatgtactagacctttggaagttgctgtgtttggacaattaccatggctattgatcataccttcaatcaccataattggtagagagataaccatgtcggcactgagggaatgggctgcatcccagggtagcaagcttctagaggttgcagttaataatctggggaaatggaaaacagcctcacagatgacagcattaacaatccttcttgccacccgggacttgagccatggaggaggagctgccattttagttggctctggtgttgctctgctttatacttcagcagggcttgcattatggtctttggttgtatatatgaagaaaatttggagggtgctgttgaggtagcatacctgatgctccatgtattcaagtacatccacgtacttctcttttggctctgataccagcaaaacatttcacattttcactgaagggggttttgcatttttagtcgcatgtaaatgtaatttttttttytctaagcaatttctatccccatacagtgccatttctcctactcccttatatttttctgcatatttttttggtcctccttcaccctaggaaagataaaaataagggtcactagccatgcttaaacgttacagcaggattttgttttaggtgctaaatacaatttagagcaattgtaagtttactaattacgagcagagaaaattcagctggaattattattgtatgatacttgacctattaaaaaaaaaaaaa

SEQ ID NO: 54773 - protein, 300 aa, Vigna unguiculata
MMSGFKLSTSGFIYIRTATKTKPLSWTPNTRTTPTQHRRRYIPSLSPSKNQILGFSRSHKLPCLGRAGLVTDLGSPVPSPQPQPQPQPQLQAQSKPEPEPESSKLLTLPTILTLGRVAAVPLLVATFYMDGWPGTAATTSIFVAASITDWLDGYLARKMKLKSSFGAFLDPVADKLMVSATLVLLCTRPLEVAVFGQLPWLLIIPSITIIGREITMSALREWAASQGSKLLEVAVNNLGKWKTASQMTALTILLATRDLSHGGGAAILVGSGVALLYTSAGLALWSLVVYMKKIWRVLLR

SEQ ID NO: 54774 - DNA, 1066 bp, Arabidopsis thaliana
  CDS (36)..(926)
agaaatcgaagcgatccaaattagtaagctcgcccatgctcagatccggtctggcttcgttaatcgtcgatgtcaatttgcggcgcacgttacgtccatccccaaccttttcttttccggcgcatcttagccgttgcattatcacttcccgttactcctcccgtacatctctaaggtttccgattcaaatatctcgccaccaacaccgtctatcctacttttcttcatcctcttcgtcggagcaaagcagaccaacttcctcttcccgaaacagtttcagtggtcacggtcagcttgatagtgatgataattcttcaccgcctccgtcgcaatcatcttccaaagttcttacattgcctaccgtattaacacttggtcgtgtcgccgccgtcccgcttctcgtcgcaaccttttacgttgatagttggtggggaacaactgctacaacaagcattttcattgcagcagccattacagactggcttgacggctatcttgcccgcaagatgaggttaggttctgcgtttggtgcctttttggatccagttgctgataagcttatggttgcagctacattgattttactgtgtacaaaacctatccaagttgctgaattaggaccacttccatggttattgaccgtaccttctattgcaatcattggtagggagattactatgtccgcagtaagagaatgggctgcatctcaaaatggaaagcttttagaggcagttgctgtaaataacttgggcaagtggaaaaccgccacgcagatgacagcactaaccatacttcttgcaagccgagatagcaatgttggatggctcgtagcttcaggtgctggcttgctttatgtatcagtaggactatctgtttggtctttagccgtttatatgaggaagatatggaaagtactaatgaagtagtattagtagtagtaattcatctattggttttgttttgctttgacctgcatttggatttatgtattgatggaaagggtctcagtcatcgcctgtacaagagcacaaaacttgaatgctgcaacatttaagtaaaaaaaaaa

SEQ ID NO: 54775 - protein, 296 aa, Arabidopsis thaliana
MLRSGLASLIVDVNLRRTLRPSPTFSFPAHLSRCIITSRYSSRTSLRFPIQISRHQHRLSYFSSSSSSEQSRPTSSSRNSFSGHGQLDSDDNSSPPPSQSSSKVLTLPTVLTLGRVAAVPLLVATFYVDSWWGTTATTSIFIAAAITDWLDGYLARKMRLGSAFGAFLDPVADKLMVAATLILLCTKPIQVAELGPLPWLLTVPSIAIIGREITMSAVREWAASQNGKLLEAVAVNNLGKWKTATQMTALTILLASRDSNVGWLVASGAGLLYVSVGLSVWSLAVYMRKIWKVLMK

SEQ ID NO: 54776 - DNA, 555 bp, Pseudomonas stutzeri
  CDS (1)..(555): transl_table=11
atgaatattccaaacctgctcacccgtgtgcgcgtgctgctgatccctatcttcattctgctgttctacctgccatttcactggagctatctggccgccagcgcggtgttcaccattgctgcggtgaccgattggctcgacggctacctggctcggcgtctggagcagagcactccgttcggtgccttcctcgatccggtggcggacaagctgatggtggcggttgcgctggtgctgctggtcggcgagcacgccaacctgtggctgacgctgccggcagccatcatcatcgggcgtgaaatcgtcgtctcggcgctgcgtgagtggatggccgaactgggagcgcgagcccaggtggccgtctccaatctgggtaaatggaaaactgcagcacagatggtggcgctggtgatcctgctggccaatccgccggctctgacgatctgggtcggcctgggctacacgttgctcatcatcgccgccggattgacgctgtggtcgatgatcaactacctgaacgcggcctggcctcatctgagcgctgaaaagaaataa

SEQ ID NO: 54777 - protein, 184 aa, Pseudomonas stutzeri
MNIPNLLTRVRVLLIPIFILLFYLPFHWSYLAASAVFTIAAVTDWLDGYLARRLEQSTPFGAFLDPVADKLMVAVALVLLVGEHANLWLTLPAAIIIGREIVVSALREWMAELGARAQVAVSNLGKWKTAAQMVALVILLANPPALTIWVGLGYTLLIIAAGLTLWSMINYLNAAWPHLSAEKK

SEQ ID NO: 54778 - DNA, 1268 bp, Arabidopsis thaliana
  CDS (46)..(1071)
  misc_feature (1040)..(1040): m is a or c
aaattaaaattaatgaggaagacgaagctgctttgttgatgatcaatggcgatttacagatctctaagaaagctagttgaaatcaatcaccggaaaacaagaccattcttcaccgccgctacagcttccggcggaaccgtttctctgactccaccgcagttttcgccgttgttcccacatttctcacaccgtttatctccgctttcgaaatggttcgttcctcttaatggacctctcttcttatcttctcctccttggaaacttctccagtctgcgacacctttgcactggcgcggaaacggctctgttttgaaaaaagtcgaagctctgaatcttagattggatcgaattagaagcagaactaggtttccgagacagttagggttacagtctgtggtaccaaacatattgacggtggatcgcaacgattccaaggaagaagatggtggaaaattagtcaagagttttgttaatgtgccgaatatgatatcaatggcgagattagtatctggtcctgtgctttggtggatgatctcgaatgagatgtattcttctgctttcttagggttggctgtttctggagctagtgattggttagatggttacgtggctcggaggatgaagattaactctgtggttggctcgtaccttgatcctcttgcagacaaggttcttatcgggtgtgtagcagtagcaatggtgcagaaggatctcttacatcctggactggttggaattgtgttgttacgggatgttgcactcgttggtggtgcagtttacctaagggcactaaacttggactggaagtggaaaacttggagtgacttcttcaatctagatggttcaagtcctcagaaagtagaaccattgtttataagcaaggtgaatacagttttccagttgactctagtcgctggtgcaatacttcaaccagagtttgggaatccagacacccagacatggatcacttatctaagctggttagttgcttcgacgactatggcttcaactgcagcttatggtgtacaatactggaagamgagacctatatctatgattaagagatcatagtttctagtttccaacatttataaacttcacacacgaggcacatgcttaattaaagaagcttgaacatgtcttgttgttttccggaatacgcagctctcactgttttctactgctaactgaaatagaaaaggaaaaaaaatgtactaaaagcaatgaaacatttgttctgatatctgaacaaaagtacatttcttctg

SEQ ID NO: 54779 - protein, 341 aa, Arabidopsis thaliana
  misc_feature (332)..(332): The Xaa at location 332 stands for Lys, or Thr.
MAIYRSLRKLVEINHRKTRPFFTAATASGGTVSLTPPQFSPLFPHFSHRLSPLSKWFVPLNGPLFLSSPPWKLLQSATPLHWRGNGSVLKKVEALNLRLDRIRSRTRFPRQLGLQSVVPNILTVDRNDSKEEDGGKLVKSFVNVPNMISMARLVSGPVLWWMISNEMYSSAFLGLAVSGASDWLDGYVARRMKINSVVGSYLDPLADKVLIGCVAVAMVQKDLLHPGLVGIVLLRDVALVGGAVYLRALNLDWKWKTWSDFFNLDGSSPQKVEPLFISKVNTVFQLTLVAGAILQPEFGNPDTQTWITYLSWLVASTTMASTAAYGVQYWKXRPISMIKRS

SEQ ID NO: 54780 - DNA, 582 bp, Bacillus subtilis
  CDS (1)..(582): transl_table=11
atgtctaacttaccaaataaaatcacactagctagaatcgcattaatcccaatcttcatgattatcatgctggcgccgtttgactggggcaggctcgaagttggagacgaatccatcccggtcgcacatttggaggggggcattctatttattattgcatctacaacagactgggtggacgggttttatgcccgaaagttaaatctcgtaacaaacttcgggaaatttcttgatccgcttgcggacaaactgctcgtatccgcagcgttaattatccttgttcaatttgatctcgctccagcttggatggtcattgtgattatcagcagggagtttgccgtgacaggtttaaggcttgtcttagccggaacaggagaagtcgtagctgctaacatgcttggtaaaatcaaaacctgggcacagattattgcggtatctgcattgcttcttcataatcttccatttgaacttgtgtcattcccgtttgcagacttggcgctgtgggtagccgtcttctttactgtcgtctcaggctgggaatatttctctaaaaattgggaagcgttaaaaacatctaactaa

SEQ ID NO: 54781 - protein, 193 aa, Bacillus subtilis
MSNLPNKITLARIALIPIFMIIMLAPFDWGRLEVGDESIPVAHLEGGILFIIASTTDWVDGFYARKLNLVTNFGKFLDPLADKLLVSAALIILVQFDLAPAWMVIVIISREFAVTGLRLVLAGTGEVVAANMLGKIKTWAQIIAVSALLLHNLPFELVSFPFADLALWVAVFFTVVSGWEYFSKNWEALKTSN

SEQ ID NO: 54782 - DNA, 588 bp, Pseudomonas fluorescens
  CDS (1)..(588): transl_table=11
atgaatatccctaatctgatcaccgttctacgcgttctgctcatcccgatcttcattttgctgttttacctgccttacaactggagctacatggccgccagttccgtctttgcgttcgccgcggccaccgactggcttgatggctacctggcgcggcgtctggagcagagcacgccgttcggggccttcctcgatccggtggccgacaagttgatggtggcggtggccctggtgctgctggtgcaagagcacggcaacctgtggctgaccctgccggcagcggtgatcatcgggcgtgaaatcgtggtgtccgcccttcgcgagtggatggccgagctcgggcgcacgcgcccaggtggccggtgtccaacatgggcaaatcggaaaactgccgcgcagatgctggcgctggtgatcctgctggccaatccgccggccttcaccttctgggtgctgctgggttatgccttcctgctgatcgccggagggctgaccctgtggtcgatgttgcagtacctgcgcgctgcctggccgcacctgaagaccgatggtagaaaagaaataaaactttttgaatcaaggggttga

SEQ ID NO: 54783 - protein, 195 aa, Pseudomonas fluorescens
MNIPNLITVLRVLLIPIFILLFYLPYNWSYMAASSVFAFAAATDWLDGYLARRLEQSTPFGAFLDPVADKLMVAVALVLLVQEHGNLWLTLPAAVIIGREIVVSALREWMAELGRTRPGGRCPTWANRKTAAQMLALVILLANPPAFTFWVLLGYAFLLIAGGLTLWSMLQYLRAAWPHLKTDGRKEIKLFESRG

SEQ ID NO: 54784 - DNA, 546 bp, Rickettsia conorii
  CDS (1)..(546): transl_table=11
atgagaatagataaaaatttacctaattatctaactattgctcgaataatggtaattccagttattatactggtattttatataaataattcacttgcacgtacacttggggcattattatttgttttagctagtattacggatttttttgacggttatattgcaagaaaatataatttagttacaagtttcggcaagatgtttgaccctatagcagataagctacttgtaggttgcgttattatcatgctactaaaaaaagataatgtagatgagataccttgcttattaattttagcacgagaatttttagttagcggtcttcgggaatttttagctctagtaaaggttagtgtgcctgtatcgagacttgctaaggtaaaaacgtttttacaaatgtttgctttatcgatattgatactaggctcaaaaggttcaggaattatttatttagatatagtaggggaaataattttatggattgccgcttttttaacaatcattacaggttattcttattttaaagcctgtaagaaatatttttaa

SEQ ID NO: 54785 - protein, 181 aa, Rickettsia conorii
MRIDKNLPNYLTIARIMVIPVIILVFYINNSLARTLGALLFVLASITDFFDGYIARKYNLVTSFGKMFDPIADKLLVGCVIIMLLKKDNVDEIPCLLILAREFLVSGLREFLALVKVSVPVSRLAKVKTFLQMFALSILILGSKGSGIIYLDIVGEIILWIAAFLTIITGYSYFKACKKYF

SEQ ID NO: 54786 - DNA, 546 bp, Rickettsia prowazekii
  CDS (1)..(546): transl_table=11
atgagaatagataaaaatttacctaattatttaactattgctcgaataatggtgattcctgttattatattactattttatataaataattcacttgcacgtaagttaggggcattattatttgttttagctagtattacagatttttttgatggttatattgcaagaaaatataatttagttactagttttggtaagatgtttgatcctatagcagataagctattagtaggttgtgttactataatgttattaaagaaggataatgtagatgagataccttgcttattaattttagcacgagaatttttagttagtggtcttcgggaatttttagctctagtaaaggttagtgtacctgtatcaagacttgctaagctaaaaacatttttacaaatgtttgctttatctatattgatattaggttcaaaaggttcaggcattatttatttagatatagtaggggaaataattttatggattgctgcttttttaacaattattacaggttattcttattttaaagcatgtaagacatatttttag

SEQ ID NO: 54787 - protein, 181 aa, Rickettsia prowazekii
MRIDKNLPNYLTIARIMVIPVIILLFYINNSLARKLGALLFVLASITDFFDGYIARKYNLVTSFGKMFDPIADKLLVGCVTIMLLKKDNVDEIPCLLILAREFLVSGLREFLALVKVSVPVSRLAKLKTFLQMFALSILILGSKGSGIIYLDIVGEIILWIAAFLTIITGYSYFKACKTYF

SEQ ID NO: 54788 - DNA, 549 bp, Salmonella paratyphi
  CDS (1)..(549): transl_table=11
atgcaatttaatatccctacgttgctcacgctgtttcgcgtcatcctgattccattctttgtcgtggtgttttatttgccgttcgcctgggcgccgatggtcagcgcgctgattttctgtattgccgcgattaccgactggtttgacggctttctggcgcgacgctggaaccagagtacgcgtttcggcgctttcctcgaccccgtcgccgacaaggtgctggtagcgatcgccatggtgctggtcaccgagcattatcatagctggtgggtgacgttacctgcggcgacgatgatagcccgcgaaattattatctctgctctgcgtgaatggatggcggagctgggcaaacgcagtagtgtagcggtctcctggatcggtaaagtcaaaactaccgcgcagatggtggcgctggcgtggctcttgtggcgtccgaatatctgggtagagtatgccgggatcgcgcttttctttgtcgcagcggtgctaacgttgtggtccatgttgcaatatttgagcgctgcacgcggagatttgcttgatcagtga

SEQ ID NO: 54789 - protein, 182 aa, Salmonella paratyphi
MQFNIPTLLTLFRVILIPFFVVVFYLPFAWAPMVSALIFCIAAITDWFDGFLARRWNQSTRFGAFLDPVADKVLVAIAMVLVTEHYHSWWVTLPAATMIAREIIISALREWMAELGKRSSVAVSWIGKVKTTAQMVALAWLLWRPNIWVEYAGIALFFVAAVLTLWSMLQYLSAARGDLLDQ

SEQ ID NO: 54790 - DNA, 549 bp, Yersinia pestis
  CDS (1)..(549): transl_table=11
atgcaattgaatataccgacttggcttaccttgttccgtgttgtgctcatcccattcttcgttctggcgttttatttgccgttcgtctgggctccgatggtttgcgccatcatatttgtgtttgccgcggcaaccgattggtttgatggctttttagctcgacgttggaaacagacaacccgttttggtgctttccttgatcctgtagcggataaagttatggtagccgttgcattagtattggttgctgaacattaccactcttggtggattacattaccggctgcaacgatgatcgcccgagaaattatcatttcgtctcttagagaatggatggcagaaattggtaaacgcagcagcgttgcggtgtcatgggtaggtaaggtaaagacgatggcacaaatggggtcacttgttgggttgctttggcgccctgaccacaatgttgaacttgccagtttcgttttactttatattgctgctgtactgacattctggtcaatgttccaatatttgaacgctgcctggagtgatttgctcgaaccttga

SEQ ID NO: 54791 - protein, 182 aa, Yersinia pestis
MQLNIPTWLTLFRVVLIPFFVLAFYLPFVWAPMVCAIIFVFAAATDWFDGFLARRWKQTTRFGAFLDPVADKVMVAVALVLVAEHYHSWWITLPAATMIAREIIISSLREWMAEIGKRSSVAVSWVGKVKTMAQMGSLVGLLWRPDHNVELASFVLLYIAAVLTFWSMFQYLNAAWSDLLEP

SEQ ID NO: 54792 - DNA, 654 bp, Brassica napus
  CDS (1)..(654)
atgggcgaagaagacgccgcggaattggatcagaacagttataatggtggcgaagattcttccaaagtgcttacattgcccaccgtattaaccctcggccgtgtcgccgccgttccgatcctcgtcgcgaccttctacgttgattgctggtgggggagaactgccacaacgagtatcttcattgcagctgccattacggattggcttgacgggtacattgcgagaaagatgagattaggctctgcgtttggtgcttttttggatccagttgcagataagcttatggtagcagcaacgttgatactgctgtgcactaaacctatggacgctgttgtttttggaccagttccttggttagtgactgtaccttcaattgctatcattggtagagagattactatgtcggcagtaagagagtgggctgcatctcagaacggcaagctttcgaaggctgttgctgtaaatagcttgggaaagtggaaaactgcaacgcagatgatagcgctgaccatactgcttgcaagccgggatagcagttttgagaggctattaccgccgggtattgggttgctctatgtatctgcaggtctctctatatggtctttagttgtttatatgagacagattgtgagagtactgctaaagaagaagtag

SEQ ID NO: 54793 - protein, 217 aa, Brassica napus
MGEEDAAELDQNSYNGGEDSSKVLTLPTVLTLGRVAAVPILVATFYVDCWWGRTATTSIFIAAAITDWLDGYIARKMRLGSAFGAFLDPVADKLMVAATLILLCTKPMDAVVFGPVPWLVTVPSIAIIGREITMSAVREWAASQNGKLSKAVAVNSLGKWKTATQMIALTILLASRDSSFERLLPPGIGLLYVSAGLSIWSLVVYMRQIVRVLLKKK

SEQ ID NO: 54794 - DNA, 912 bp, Brassica napus
  CDS (1)..(912)
atgctcagatccagcctcgcttcgttaatcgtcgatgtcaactcacggcgcacgttacctccacgcgcatccttctctcaccctgcgcatattagccgttcctcacgccgcgttcttccttccctgtactcctcccacacacctctaaggtttcggattcagacatgtaaccaccgccacctctcctcctactcgtctccctctgagaaacacggaccatcttcgtctacccgatcaagcctcgcgggtcaagatgacgcattcacggcggctcaaaacagctccaacggtcataactcttctccgccgcaaccctcttccaaagttcttacattgcccaccgtattaaccattgctcgtgtagctgccgtaccacttctcgtcgcaaccttttacgctgatagttcgtggggaacgacggcgactacaagcatcttcattgcagcagccattacagattgccttgacggctatcttgcacaaaagatgaagttaggttctgcgttgggtgcctttctggatccagttgctgataagcttatggtcgcagctacattgatcttactctgtacaaaacctgtcgaagttgctgtgttaggaccagtcccagtcccatggttactaacggtaccgtctattgcaatcattggtagagagattacaatgtccgcagtgagagaatgggctgcatctcaaaatggaaagcttctagaggccgttgcggttaacaacttgggaaagtggaaaaccgccacgcagatgacagcactaaccatacttctcgcaagccgggacctcagcgttggatggctcgtagcttccggtgctgggttgctttatgtatcagcaggactatcggtttggtctttactcgtttatatgaggatgatatggaaagtactactcaagtaa

SEQ ID NO: 54795 - protein, 303 aa, Brassica napus
MLRSSLASLIVDVNSRRTLPPRASFSHPAHISRSSRRVLPSLYSSHTPLRFRIQTCNHRHLSSYSSPSEKHGPSSSTRSSLAGQDDAFTAAQNSSNGHNSSPPQPSSKVLTLPTVLTIARVAAVPLLVATFYADSSWGTTATTSIFIAAAITDCLDGYLAQKMKLGSALGAFLDPVADKLMVAATLILLCTKPVEVAVLGPVPVPWLLTVPSIAIIGREITMSAVREWAASQNGKLLEAVAVNNLGKWKTATQMTALTILLASRDLSVGWLVASGAGLLYVSAGLSVWSLLVYMRMIWKVLLK

SEQ ID NO: 54796 - DNA, 882 bp, Glycine max
  CDS (1)..(882)
atgtcgggcttgaagcttggcacgactgcttccatctacgttcgaacagcgaaaaccaaaagcaaacccctcttatcatggagaagcccaccccaacacccccgcagccgcaggtacatgctttccccttccaaaaatcaaatcctagggttcacacctagaaacaaattcccatgctattctttgggaagggctggtcttgtcacagattttggttcgtcagtgccccaacctcaacctcaacctcagccaaagccagagccagaaccagaacctgaaccttccaaattgcttacgttgccaacaattttgactctaggccgtgtcgccgctgtcccacttcttgttgctactttctacatggacggttggcgtggaactgctgctactaccagcattttcgtcgctgcatcaatcactgattggcttgatggctatcttgctcgcaagatgaagttaaaatcttcattcggtgcattcttagatccagttgctgacaagcttatggttgctgctacactggtcttattatgtactagacctttggatggtggtgtgtttggacaagcgccgtggctactcactatacctgcaattgccataattggtagagagataaccatgtctgcagtcagggagtgggctgcttcccaggatagcaagcttttagaggctgttgctgtaaataacttggggaagtggaaaacagccacacagatgacagcattaaccatccttcttgcgacccgggactggagccatggaggaggagctgccattgtagtaggctctggtgttgctttgctttatacttcagcagggcttgccttatggtcgttggttgtatatatgaagaaaatatggagggtgttgttgaggtag

SEQ ID NO: 54797 - protein, 293 aa, Glycine max
MSGLKLGTTASIYVRTAKTKSKPLLSWRSPPQHPRSRRYMLSPSKNQILGFTPRNKFPCYSLGRAGLVTDFGSSVPQPQPQPQPKPEPEPEPEPSKLLTLPTILTLGRVAAVPLLVATFYMDGWRGTAATTSIFVAASITDWLDGYLARKMKLKSSFGAFLDPVADKLMVAATLVLLCTRPLDGGVFGQAPWLLTIPAIAIIGREITMSAVREWAASQDSKLLEAVAVNNLGKWKTATQMTALTILLATRDWSHGGGAAIVVGSGVALLYTSAGLALWSLVVYMKKIWRVLLR

SEQ ID NO: 54798 - DNA, 876 bp, Hordeum vulgare
  CDS (1)..(876)
atgccctcccccatcgccacccacctcctcaaagccgccgccgcaaagcccctcttctccccccgcgcggcccagatccccccgctccctcgcccgaccagcgccgcctgccgctggttccggtggccgtcgcccgcgagggggctctgctcctcgccgcattccggccctgccgccgaggggatgggatctgacgggacggggacagggaccaggaggcgggtgccggcagccaacggtgtgtccaaggaaggggcgccgcagccgctgcccgttccgcccaagctgctcacgctgcccaccgtgctcaccattggccgcgtcgccgccgtgcccttcctcatcagcactttctacatggaagggccttgggcagcaaccgccacaaccggcatcttcctggctgcagcaatcactgattggctagatggttatattgcgaggaagatgcatttgggaacaccttttggtgcatttcttgatcctgtggctgacaagcttatggtagctgcgacactagtgttgctgtgcaccaaacctttggaaacttcactgctcactaatggaccatggctgctgacagttccttccattgccatcattgggagagagatcacaatgtcagctgttagagagtgggctgcttctcagaatacccaagttcttgaggctgtggcagttaacaatttagggaagtggaagacagcgacacagatgacggcattgactatgctccttgccagcagagacccaagtctacctgtacaaggggctctagttccccctggtgttgcgttgctctatgcatctgctggacttgccatatggtccctagtggtgtacatcagaaatatatggcggatacttctaaaatag

SEQ ID NO: 54799 - protein, 291 aa, Hordeum vulgare
MPSPIATHLLKAAAAKPLFSPRAAQIPPLPRPTSAACRWFRWPSPARGLCSSPHSGPAAEGMGSDGTGTGTRRRVPAANGVSKEGAPQPLPVPPKLLTLPTVLTIGRVAAVPFLISTFYMEGPWAATATTGIFLAAAITDWLDGYIARKMHLGTPFGAFLDPVADKLMVAATLVLLCTKPLETSLLTNGPWLLTVPSIAIIGREITMSAVREWAASQNTQVLEAVAVNNLGKWKTATQMTALTMLLASRDPSLPVQGALVPPGVALLYASAGLAIWSLVVYIRNIWRILLK

SEQ ID NO: 54800 - DNA, 23 bp, Artificial sequence
  primer
atgaatatacccaactgggtaac

SEQ ID NO: 54801 - DNA, 22 bp, Artificial sequence
  primer
ttagccagcctcgactttgttg

SEQ ID NO: 54802 - protein, 270 aa, Artificial sequence
  consensus sequence
  Variant (2)..(4): Xaa in position 2 to 4 is any amino acid
  Variant (6)..(7): Xaa in position 6 to 7 is any amino acid
  Variant (9)..(11): Xaa in position 9 to 11 is any amino acid
  Variant (12)..(12): Xaa in position 12 is any or no amino acid
  Variant (14)..(30): Xaa in position 14 to 30 is any amino acid
  Variant (31)..(58): Xaa in position 31 to 58 is any or no amino acid
  Variant (60)..(61): Xaa in position 60 to 61 is any amino acid
  Variant (63)..(64): Xaa in position 63 to 64 is any amino acid
  Variant (67)..(68): Xaa in position 67 to 68 is any amino acid
  Variant (71)..(72): Xaa in position 71 to 72 is any amino acid
  Variant (75)..(82): Xaa in position 75 to 82 is any amino acid
  Variant (83)..(83): Xaa in position 83 is any or no amino acid
  Variant (85)..(87): Xaa in position 85 to 87 is any amino acid
  Variant (90)..(90): Xaa in position 90 is any amino acid
  Variant (94)..(102): Xaa in position 94 to 102 is any amino acid
  Variant (104)..(111): Xaa in position 104 to 111 is any amino acid
  Variant (112)..(136): Xaa in position 112 to 136 is any or no amino acid
  Variant (139)..(144): Xaa in position 139 to 144 is any amino acid
  Variant (146)..(157): Xaa in position 146 to 157 is any amino acid
  Variant (158)..(179): Xaa in position 158 to 179 is any or no amino acid
  Variant (182)..(182): Xaa in position 182 is any amino acid
  Variant (185)..(186): Xaa in position 185 to 186 is any amino acid
  Variant (188)..(211): Xaa in position 188 to 211 is any amino acid
  Variant (212)..(254): Xaa in position 212 to 254 is any or no amino acid
  Variant (256)..(261): Xaa in position 256 to 261 is any amino acid
  Variant (262)..(269): Xaa in position 262 to 269 is any or no amino acid
PXXXTXXRXXXXPXXXXXXXXXXXXXXXXXXXXXXXXXXXXXXXXXXXXXXXXXXXXXFXXAXXTDXXDGXXARXXXXXXXXXGXXXDPXADKXXXXXXXXXLXXXXXXXXXXXXXXXXXXXXXXXXXXXXXXXXXREXXXXXXRXXXXXXXXXXXXXXXXXXXXXXXXXXXXXXXXXXGKXKTXXQXXXXXXXXXXXXXXXXXXXXXXXXXXXXXXXXXXXXXXXXXXXXXXXXXXXXXXXXXXXXXXXXXXXTXXXXXXXXXXXXXXY

SEQ ID NO: 54803 - protein, 12 aa, Artificial sequence
  protein pattern
  Variant (2)..(3): Xaa in position 2 to 3 is any amino acid
  Variant (5)..(5): Xaa in position 5 is Ala, Gly, Ser or Val
  Variant (6)..(6): Xaa in position 6 is any amino acid
  Variant (9)..(10): Xaa in position 9 to 10 is any amino acid
FXXAXXTDXXDG

SEQ ID NO: 54804 - DNA, 1623 bp, Synechocystis sp.
  CDS (1)..(1623): transl_table=11
atggctccttcctctgcccagattgttgacccctgtatgttggcggccatcgacattggaaccaattccgttcacatggtcattgtccgcattgatccagttctggccacctttactattgtggctcgggaaaaagatactgtccgcctaggcgatcgggacccccaatctaataacctcactccagcggccatgaatcgggcgatcgccgctttgaaacgttgtgtggaattggccaagggtttggaagtggaaaacattatcgctgtggccaccagtgccactagggaagccaaaaatggccaagattttcttacccgggtgcaaacggaagtggggctaacggtggatttaatttctggcccagaggaagcccgacgaatttacctgggggtattttcctgcatggatttccatgaagtaccccatgtgatgatcgacattggtggcggttctacggagctaattttggccgatcgccgggacgtgcggtttttaagcagtaccaaagtaggggcggtgcggctcacccaagactttgtccacagcgatcccattgatgccaccgaattggccgtgttgcgggcctatgtgcggggcatgctggagcgcccagtggatgagattaaacaacggctcaagggaggggaaaaagctcaaatggtggggacttccggcaccattgaaaccctagccaccatgaccgctttacaaaaacaaaaagaggttcccaatcccattcagggttacagcattagccaaaaagatgtggaggaatgggtcaaaaaattggctggtctcaactgccaagaacggtttgaagtggcgggcctgtccgatcgccgggcggaaattattttgccgggggcagtgattctactcgaagccatgaccatgctggaattggatagcatcaccatctgtgagcgggcgttgcgggaaggcatgatcgtcgattggatgctcacccatgggctaatccaagaccggatgcgtttccagggagaaattcgtcaacggggagtgctaaaaatcgcccgcaaataccaagtggatctcggttttggggaaagggtcgcccaatttgccaccagctttttcgatcaactgcggggagttttacacgactggggggaaacggaacgggaatggctctgggccgccgcaattttgcataattgtggtacttatgtcagccactccgcccaccataaacattcctattatttaattcgtaatgcggaactgctaggttacacagaaattgagctagaactaattgccaatattgcccgttaccatcgccgtagtaagccgaaaaaacgccacgatgattacattaaattatctgaaccccaccgtttagcggtgcggcaattaagttctttgctacgcttagcggtggccttggaccgtcgccaagtgggagccattgaaagctttgattgtcgttatgatcaagataaacggcagttacatttgcacattacccccaaagatcccgacgatgactgtgccttggaactatggaatttagattataaaaaagttgtttttgaagaagaatttaatactaaagtagtagcaactctagcaattttgctcaaatctcgtcagggttaa

SEQ ID NO: 54805 - protein, 540 aa, Synechocystis sp.
MAPSSAQIVDPCMLAAIDIGTNSVHMVIVRIDPVLATFTIVAREKDTVRLGDRDPQSNNLTPAAMNRAIAALKRCVELAKGLEVENIIAVATSATREAKNGQDFLTRVQTEVGLTVDLISGPEEARRIYLGVFSCMDFHEVPHVMIDIGGGSTELILADRRDVRFLSSTKVGAVRLTQDFVHSDPIDATELAVLRAYVRGMLERPVDEIKQRLKGGEKAQMVGTSGTIETLATMTALQKQKEVPNPIQGYSISQKDVEEWVKKLAGLNCQERFEVAGLSDRRAEIILPGAVILLEAMTMLELDSITICERALREGMIVDWMLTHGLIQDRMRFQGEIRQRGVLKIARKYQVDLGFGERVAQFATSFFDQLRGVLHDWGETEREWLWAAAILHNCGTYVSHSAHHKHSYYLIRNAELLGYTEIELELIANIARYHRRSKPKKRHDDYIKLSEPHRLAVRQLSSLLRLAVALDRRQVGAIESFDCRYDQDKRQLHLHITPKDPDDDCALELWNLDYKKVVFEEEFNTKVVATLAILLKSRQG

SEQ ID NO: 54806 - DNA, 1596 bp, Prochlorococcus marinus str. MIT 9301
  CDS (1)..(1596): transl_table=11
atgatactaaaacaagatttaagatattttcaagaaaaacaaatattagtagcttctattgacattggaactaactctacacatctcttagtagcagaaattaatctagaattaaaatcattttcaataaaatttaccgataaatcaaccactcgtcttggagaaagagatgaggatggtaatcttactgaagaatcaatccaaagggcattagttactcttaagcgatttaaggaatattgtaaaagtaatggagtaaaacaaatagtaacagctgcaacaagtgcagttagggaagctccaaacggtcaagattttattagaagagttcttgatgaaactgatattcaaatagaaatgataagtggttccgaggaagccagattaatttaccttggtgttctttctggtatgtcttttgaagatcagtcttttgtaatcatagatattggaggaggatctacagaattaatacttgcagataaaaaagatgctatagctcttaccagttcgagaattggtgctgtaagacttaaaaataattttttaaataaagggtctataacttcagaaagatcgagttttttaacaacttttattaaaggatctttagaaccatctgttcgaaaaataaagagtagatctaagggagataagcctttatctatgattgcaaccagtggcactgcaacctcattgggaaatttgatttcagatgatttgggagaatctaaacaaaagttgcatggttataaatttaaaagggaaaatttacaaaatgtattggaaaaactaattaaattgccagtttcggaaatcaaaaaaataccttcattaagtgagagaagagcagaaataattgttccaggagcattgatattaaacacggcaatggagatgttgaactttaatgaattaaccataagtgagagggcgcttagagagggtttggttgttgattggatgcttcgtaaagggataataaaaaacgagttaaatattcaaagcaatattagaaaaacaacaatagttcatcaggccagaaagtttggcgtagataatacaagagctgataaagttatcgatattgcctttcaaatctacgatcagactaaaaatatctttcatagcgataatgaccctaaagctaaagaacttctttgggcagcttctaatctctataattgtgggaaatacgtgaatgttggttcatatcacaaacactcttggtacttaataaaaaattgtgagttgttgggatattctgaagcagaaacaaatattattgcttcaattgctagataccatagaaagaccctaccaaagaaaagacatgagtcttggcaaaatttaatatccaaagaagataaaacattagttctcgaaatgtcattgattttgagactagcagcatctcttgatcaaagacctgacaaggcgatctcctcagttcaaataaaattgcagggaaatattcttacatttgaacttttacctttaaatagagaccatgatcttcttcttgaaaaatggaacttaggattatgccgtaatgtagtaaaagaactaaagaatttggatttaaaagttatttag

SEQ ID NO: 54807 - protein, 531 aa, Prochlorococcus marinus str. MIT 9301
MILKQDLRYFQEKQILVASIDIGTNSTHLLVAEINLELKSFSIKFTDKSTTRLGERDEDGNLTEESIQRALVTLKRFKEYCKSNGVKQIVTAATSAVREAPNGQDFIRRVLDETDIQIEMISGSEEARLIYLGVLSGMSFEDQSFVIIDIGGGSTELILADKKDAIALTSSRIGAVRLKNNFLNKGSITSERSSFLTTFIKGSLEPSVRKIKSRSKGDKPLSMIATSGTATSLGNLISDDLGESKQKLHGYKFKRENLQNVLEKLIKLPVSEIKKIPSLSERRAEIIVPGALILNTAMEMLNFNELTISERALREGLVVDWMLRKGIIKNELNIQSNIRKTTIVHQARKFGVDNTRADKVIDIAFQIYDQTKNIFHSDNDPKAKELLWAASNLYNCGKYVNVGSYHKHSWYLIKNCELLGYSEAETNIIASIARYHRKTLPKKRHESWQNLISKEDKTLVLEMSLILRLAASLDQRPDKAISSVQIKLQGNILTFELLPLNRDHDLLLEKWNLGLCRNVVKELKNLDLKVI

SEQ ID NO: 54808 - DNA, 3000 bp, Arabidopsis thaliana
  CDS (1)..(3000)
atgaactccaatctgctatcgaatcctatatcatcggaggtcttcacctccattgatttgggaacaaattctttcaagcttctaatagtccaagctgagccttccggtagatctttcgttccaatcgagagactcaaagagccagtggtgttgtctcgtgaatctccaacctcaatttcgtctcaatctcaggctcgcgcgcttcaatctctacggaaattcaaaagtttaattctctcgcaccacgtctctggtgataggatccgatgcgttgcaacggaagccttacggcgagccgagaatcaggaagagttcgtggatgcggtttttgaggatgttgggcttaaggtcgatgtgctttctggtgaagaggaagccaggttagtttatttaggcgtgcttcagtttttacctgtgtttgagaaatcagtgttgtgtgttgatattggaggtggttctactgaatttgtggttggtaagtgtggtgatgtcaagcttgctgtttctttaaagctaggtcacgtgaatttgacgcagatgtttatgaaaaatggtattggattgaaggaaatgagagactatattcgtcatgcgattgatgagtctaggttagcagaaaaattgaatgaatcagatggttttgaggttgttgtgggatcttctggaactatacgagctattgagaatgcagttttcagtggctatggagctgatttgtgtgatttcaatttggaagggtataagagggactggagatttggtacaagagagctgagcagcgttgtagcaaagctatgcagtgaaggagacgaagagctgattcgaagggagggatttttcaagagaagatcagagttcattgttgctggggctgtattgttggaggaaatattcaaggctcttggcatagaggacatggaggtctcagagtatgcattggcagagggtgtgattgctgattctctggccaaagcttttgatggatcatatgatttaaatgctaatgcaagatggcgatcggtcatgaggcttgccacgcgtttcagtggtaaaaagcgaatgactcatgcgatacactgtgccaagattgcaaaggttatcttagacgataaagatcttgagtatctcgaagctgcttgtttcttgcacaatatcggaatcatcacagggaaaaagggttatcataagcaatcttatcatatcatcaagaatggggatcatctccacagctacactgctgaggaaatcgagcttatagctatgcttgtgagataccaaagaaaaaagtttcccaagcttgatcgtgcacctcttaagggcttcactggggaggcaaagcgaaaattcataattttgtgtttgattacacgattatcagttacacttcaacggaatgagaatatggatctccaagaagttgaatttattgaatcttccgagatcttcaaactcgtgctgaaaagacaacaccaggaaccggtagaggttggttgtcaagatcaagtaaacaaaaactctgatgaatcacaactggagaaagaagttgagcattttaaaaggagagttgttggtttctttcctggagttttccgttgtccaatttgtgaagtcgaaaatgtcagttttaaaccagaaactgatggtaaaactatgattgtacgcagattgaattggtgtaatgaaaagagatttgactccatgttaacttttcccactggatgtgtgcatttgggttataagcagatgttgaaacggttgccttcgaatcaaggtcatctacacatgactgcaggaccaaaatctttatctttcttctcttccatgaaaagccggggaatttgggctgacgagtatacttacgcgcctttgctcaaatcctgttcgtctctttctgatttgcgatttgggaaatgcgttcatggtgagcttataagaactgggttccaccgtcttgggaaaattaggattggggtggtggagctttatacttccggtgggagaatgggtgatgcacagaaagtgttcgacgaaatgtctgagagaaacgttgtcgtctggaatcttatgattcgcgggttctgtgactccggggacgttgaaagaggtcttcatttgttcaaacagatgagcgaaagaagcattgtgtcgtggaattcgatgatatctagcttgtctaaatgtggtagagatcgtgaggctttggagcttttctgcgaaatgattgatcaaggttttgaccctgatgaggcgactgtggttacagtcttgccaatttctgcatctctaggagtgttggataccggaaaatggattcattctaccgcagaatccagtggtttgtttaaagatttcatcaccgtgggaaacgctttggtagatttctactgcaaaagcggcgacttggaggcagcaacggctatatttagaaaaatgcagcgtagaaacgttgtttcatggaacacattgatatcgggatcagccgtaaacggaaagggagaatttgggatagacttgtttgatgctatgatagaggaagggaaagtagctccaaatgaagcgacatttttgggggttttggcatgttgctcatacacaggtcaggtggagagaggagaggaattgtttggtttgatgatggaaagattcaaacttgaggcgagaaccgagcattacggtgccatggtagatctaatgagtagaagtgggagaatcacagaggcgtttaagtttctaaaaaatatgcccgtaaacgcaaatgcggcaatgtgggggtcgctgctcagtgcttgtcgtagccacggagatgtaaagctagcagaagttgcagcaatggagttagtgaagattgagccagggaattcggggaattatgtgttgttatctaatttgtatgcagaggaagggagatggcaagatgtggagaaggtacgaacgttgatgaaaaagaaccgccttagaaagtctactggccaaagcaccatttgcgatgtttcagtctga

SEQ ID NO: 54809 - protein, 999 aa, Arabidopsis thaliana
MNSNLLSNPISSEVFTSIDLGTNSFKLLIVQAEPSGRSFVPIERLKEPVVLSRESPTSISSQSQARALQSLRKFKSLILSHHVSGDRIRCVATEALRRAENQEEFVDAVFEDVGLKVDVLSGEEEARLVYLGVLQFLPVFEKSVLCVDIGGGSTEFVVGKCGDVKLAVSLKLGHVNLTQMFMKNGIGLKEMRDYIRHAIDESRLAEKLNESDGFEVVVGSSGTIRAIENAVFSGYGADLCDFNLEGYKRDWRFGTRELSSVVAKLCSEGDEELIRREGFFKRRSEFIVAGAVLLEEIFKALGIEDMEVSEYALAEGVIADSLAKAFDGSYDLNANARWRSVMRLATRFSGKKRMTHAIHCAKIAKVILDDKDLEYLEAACFLHNIGIITGKKGYHKQSYHIIKNGDHLHSYTAEEIELIAMLVRYQRKKFPKLDRAPLKGFTGEAKRKFIILCLITRLSVTLQRNENMDLQEVEFIESSEIFKLVLKRQHQEPVEVGCQDQVNKNSDESQLEKEVEHFKRRVVGFFPGVFRCPICEVENVSFKPETDGKTMIVRRLNWCNEKRFDSMLTFPTGCVHLGYKQMLKRLPSNQGHLHMTAGPKSLSFFSSMKSRGIWADEYTYAPLLKSCSSLSDLRFGKCVHGELIRTGFHRLGKIRIGVVELYTSGGRMGDAQKVFDEMSERNVVVWNLMIRGFCDSGDVERGLHLFKQMSERSIVSWNSMISSLSKCGRDREALELFCEMIDQGFDPDEATVVTVLPISASLGVLDTGKWIHSTAESSGLFKDFITVGNALVDFYCKSGDLEAATAIFRKMQRRNVVSWNTLISGSAVNGKGEFGIDLFDAMIEEGKVAPNEATFLGVLACCSYTGQVERGEELFGLMMERFKLEARTEHYGAMVDLMSRSGRITEAFKFLKNMPVNANAAMWGSLLSACRSHGDVKLAEVAAMELVKIEPGNSGNYVLLSNLYAEEGRWQDVEKVRTLMKKNRLRKSTGQSTICDVSV

SEQ ID NO: 54810 - DNA, 1548 bp, Deinococcus radiodurans R1
  CDS (1)..(1548): transl_table=11
atgcgggtcgccgtcgccgatgtgggaaccaactccagtcacctcctgattgccgaggctctgccgggcgacgccgggggcttccgggtcatagacaccctcaaggaccgcacccgcctgggcgagtgcctggacacgcgcggcgagctgactcccgaaggtgaggagcggctcgcgtccgccctgacccgcttccgcgagctggcggcgtcggcgggcgcgggagacgtgcgcgtctacgcgacctccgcgctgcgcgaggcgcccaacggcgcggaagtcgccgagcgcgtccggcagcgcaccggcctgtacccggcggtcatcagcggcgtacgcgagggcgaactcacctacctcggcgtgcgcgaggcggtcgaactcggccccgacaacgtgctgctcgacctcggcggcggcagtttggaattcgtgcgcggcgccgaggagcgggcggcggacgtcctgagcctgcccctcggcgccattcgcatgacccgcgcctttcccgagggagacggcaaaaacgccgggcgcgacgtggccgacgcggtggcccggcaggtgcgcgagctgctgcggccccacgctgggcgcttcgccgcgcggcccggcacccagtttttcctgtcgagcggcaccgccgaagccgccgccgacgccatcgcgcagcgccgcggcgggcgcccggctgaggcggcaggtggggtcaacggcgagcgctttaccctcaccgaactcgccgacctgcttgcccacgtcgcccggctgcggcctgcccagcgtgcgcgggtgccggggctggagcgccggggcgacaccatcctcgccgccctgagcgtgctgcacgccgcgctcgacgccctcggcgcccgtgaggtgacggtcagcgaaggtgccctgcgcgaagggatgctgatcgaggaactcgctcaggtccagactttcagcttggcgctcagcacccgccagcgcagcgtgctcgcgaccgccgggcgcttcggcgtcaacctctcgcacgccgggcaggtggccgagctgtcacgcgaactctttgaccggctgctcgcggcgggcgagacctttcccccgcccgcccgcagcctgctcaccgccgccgccgtgctgcacgaggcggggcagatcgtcagccagagcagtcaccacaagcacggcgcctacctcattcgccacgcggggctgcgcgggttcgggccgcaggacatcgaactcattgcccagatcgcccgttaccaccgcaagagcctgcccaagccctcgcaccccgactacgtggccctcgcgcccgccgaccgcgccctggttgcccggctcgcgggcatcctgcgggtggccgacggcttggaccgcgcgcacaccggcctggcgcgggtggacgacttgcggcgccagggccagggctggcagctgcgggtgagcggtgtcacccccctcgacctcgccggggtgggggagaagggcgacctctgggcccgcgagttcggcccgctgagtgtgcaaaatgcggcagaggccaaagccacctga

SEQ ID NO: 54811 - protein, 515 aa, Deinococcus radiodurans R1
MRVAVADVGTNSSHLLIAEALPGDAGGFRVIDTLKDRTRLGECLDTRGELTPEGEERLASALTRFRELAASAGAGDVRVYATSALREAPNGAEVAERVRQRTGLYPAVISGVREGELTYLGVREAVELGPDNVLLDLGGGSLEFVRGAEERAADVLSLPLGAIRMTRAFPEGDGKNAGRDVADAVARQVRELLRPHAGRFAARPGTQFFLSSGTAEAAADAIAQRRGGRPAEAAGGVNGERFTLTELADLLAHVARLRPAQRARVPGLERRGDTILAALSVLHAALDALGAREVTVSEGALREGMLIEELAQVQTFSLALSTRQRSVLATAGRFGVNLSHAGQVAELSRELFDRLLAAGETFPPPARSLLTAAAVLHEAGQIVSQSSHHKHGAYLIRHAGLRGFGPQDIELIAQIARYHRKSLPKPSHPDYVALAPADRALVARLAGILRVADGLDRAHTGLARVDDLRRQGQGWQLRVSGVTPLDLAGVGEKGDLWAREFGPLSVQNAAEAKAT

SEQ ID NO: 54812 - DNA, 1653 bp, Nostoc sp. PCC 7120
  CDS (1)..(1653): transl_table=11
atggtgaatttagtttcatctagctgggagagtgtcagcactcaaccagttcagcaacaccggattattgctgccattgacatgggaaccaattctctgcacatggtagtggtaaagattgacccgacactaccagcttttagcattgtttccagagaaaaagaaaccgtgcgactgggcgatcgcaatattgccactggggagttaaaaccagaggtcatggcaaaagcgatcgctacgttgaagcgctttcaagaagttgccaaaactgccaacgcggaaacattaattgctgtggcgactagtgcggtgcgggaagcgcccaatggtaaagattttttacaccagatagaaacggaattgggtttaagcgttgacttgatttctggtcaagaagaagcacgacgcatttaccttggtgttttgtcggggatggaatttcataaccaaccgcacctgattattgatattggtggtggttctacggagttgattttaggtgatactcaagaacctcgcaccctcaccagcaccaaagttggtgcggtacgactcacgagcgagttaatcaccacagatcccatcagcaatattgagtttcaatacctgcaagcctatgccaggggaatgttagaacgttctgtagaggaagtgctagctaacctgaattttggcgaatctccccgtttaattggcacttctggcactattgaaaccatcgctatgattcatgcgcgggaaaaatctggtacagtcccttctaccctcaacggctatcaattcactctcaaagacttgcgagagtgggtaaatcgcctgcggagaatgacaaatgccgaaagagccgctatccccggaatgcccgaaaaacgctctgaagtcatactcgccggcgctgtcatcttacaagaagccatgaccctgttgggtgtggagtcattaaccgcttgtggtcgcgcactacgggaaggggtaattgttgactggatgttaagccacggcttaattgaagacagattgcggtttcaaagttcgattcgccagcgtagtgtccttaaacaagcaagtaagtatcaagttaacttagagtatagcgatcgcgtagctacatttgccctgagtttatttgaccaaacccaaggactactacaccactggggcagcaacgaacggcgattactttgggcggcggcaattttacacaactgcggtcatcatgtcagccattcatcccaccacaaacattcctactatctcattcgcaatagtgaactactcggttacaacgaaaccgagatcgaaatcattgccaatttagcccggtatcaccgcaaatcaccacccaagaaaaagcatgaaaatttccggaacctgttgagtaaagagcatcggcaagccgtgagccaattaagtgcgctgttaagattggcagtagcattagatcggcgacaaattggagcgatcgctcaaatcaaatgtgattattatcaccacttccagcagtttaatttgctcatctatccatctcgacccgatgataattgcgccttagaactctggagtttagactacaaaaaagcagtctttgaagcagaatttggtgtgaaattactcacccatttggaaaaaaacttacttcctaatttctcctaa

SEQ ID NO: 54813 - protein, 550 aa, Nostoc sp. PCC 7120
MVNLVSSSWESVSTQPVQQHRIIAAIDMGTNSLHMVVVKIDPTLPAFSIVSREKETVRLGDRNIATGELKPEVMAKAIATLKRFQEVAKTANAETLIAVATSAVREAPNGKDFLHQIETELGLSVDLISGQEEARRIYLGVLSGMEFHNQPHLIIDIGGGSTELILGDTQEPRTLTSTKVGAVRLTSELITTDPISNIEFQYLQAYARGMLERSVEEVLANLNFGESPRLIGTSGTIETIAMIHAREKSGTVPSTLNGYQFTLKDLREWVNRLRRMTNAERAAIPGMPEKRSEVILAGAVILQEAMTLLGVESLTACGRALREGVIVDWMLSHGLIEDRLRFQSSIRQRSVLKQASKYQVNLEYSDRVATFALSLFDQTQGLLHHWGSNERRLLWAAAILHNCGHHVSHSSHHKHSYYLIRNSELLGYNETEIEIIANLARYHRKSPPKKKHENFRNLLSKEHRQAVSQLSALLRLAVALDRRQIGAIAQIKCDYYHHFQQFNLLIYPSRPDDNCALELWSLDYKKAVFEAEFGVKLLTHLEKNLLPNFS

SEQ ID NO: 54814 - DNA, 1632 bp, Methanosarcina acetivorans C2A
  CDS (1)..(1632): transl_table=11
atggaacccgagaaaatttccgaaggcagggttgttgcatttattgatataggaactaactcggtccggcttcttctggtccggatcaatcctaacgggtcttatcagcctctgaccaaacagaaggaaacggttaggctcggggaaaaagagttcattgacaggattctgcagccgcaagcaatggaaagagctgctgttgtttgcaaaaaattcgtggaacttgctagggcctacggtgcagaagaggttatagctgtggctacctcggctacccgggatgcaagcaacaaagtccagttcctcgaaatgttgaaaaaagaagcatacctcgaagtctgccctatttccggaatcgaagaagcacggctgatttacttgggggtctcaagcgggctccggctcggatattcaaaagctcttttcattgatatcgggggtgggagcactgaagtgtcgataggagatcagaatcagcattattttcttcattcttttaatctcggggcaatccgcctgacaaacatgttccttccggacgaaacaggtccggtgtccgaggagcgttatgagcagatcaaggcatacatcaggcgcaagagtgcgaatataataaaggagttatccagatacaggatagggtgtgcggttggaagctcaggcactatcgaaaatcttgcaaaaatagcttttgtttacctgcgtaaggcaggccatgaaagttttgagaaacttgagtacgaagacctgaagaaaattgtcagggcaatgtgcgctttgccgcttgaagaaaggcgtaaattccctgggataaacgcccagagggcagacataattcttgcaggctccgcaatcatcgaaactcttatggaagagcttgaacttccagagataacggtcagcaagcgagggctcagggaaggactgcttgtggactatatctcaaagagcgagttctcttacatggtcacgcagatgtcggtaagaaaacgcagtatcatgcagctcggacttgcctgcaactttgacgaggaacacgcccatatcgttaccaggcttgccctcgaactctttgacagtatccaggcccttggggtccatgagtttaaggagagtgagagggagcttctcgaatacggtgcaaccctgcatgacatagggacgtttctctcatacgatacccaccaggcacatgcctatcacctcataagggaaagcagcctccccggtttccagcctgaggaaatagaaattatcgcaaatcttgcgtattttcacaggaaaaacacccctaaaaagaagcatccaaatcttgaagggctcagcaaagaagccgtaaaaagcgtcagactgctcagtgccctgctccgtatagctgaagggcttgaccgttcccatacaggaattatctcccacgtccgtttctatatcgcctcaaccgacagccttgtgcttgagatgcatgcccgggaggagtgccagctcgaaatctgggaggtcgagaaacagaagaagtattttaaaaagatgtttgggtataaccttcagtccaaagttcttatagaacaggccgcaggcgcccctttaatttttgagggcagcgctgaggtcgagaaagtccctcgggaatga

SEQ ID NO: 54815 - protein, 543 aa, Methanosarcina acetivorans C2A
MEPEKISEGRVVAFIDIGTNSVRLLLVRINPNGSYQPLTKQKETVRLGEKEFIDRILQPQAMERAAVVCKKFVELARAYGAEEVIAVATSATRDASNKVQFLEMLKKEAYLEVCPISGIEEARLIYLGVSSGLRLGYSKALFIDIGGGSTEVSIGDQNQHYFLHSFNLGAIRLTNMFLPDETGPVSEERYEQIKAYIRRKSANIIKELSRYRIGCAVGSSGTIENLAKIAFVYLRKAGHESFEKLEYEDLKKIVRAMCALPLEERRKFPGINAQRADIILAGSAIIETLMEELELPEITVSKRGLREGLLVDYISKSEFSYMVTQMSVRKRSIMQLGLACNFDEEHAHIVTRLALELFDSIQALGVHEFKESERELLEYGATLHDIGTFLSYDTHQAHAYHLIRESSLPGFQPEEIEIIANLAYFHRKNTPKKKHPNLEGLSKEAVKSVRLLSALLRIAEGLDRSHTGIISHVRFYIASTDSLVLEMHAREECQLEIWEVEKQKKYFKKMFGYNLQSKVLIEQAAGAPLIFEGSAEVEKVPRE

SEQ ID NO: 54816 - DNA, 1632 bp, Methanosarcina mazei Go1
  CDS (1)..(1632): transl_table=11
atggaacccgagaaaatttcagaaggcagggttgttgcgtttattgatatagggaccaactcggtccggcttcttctggtccggatcaatcctaatgggtcttaccagcccctgaccaaacagaaggaaacggtgaggcttggagaaaaggagtttatagacaggatcctccagccagaagctatggagcgggcagcctttgtctgtaagaagtttatggagctttcaagggcttacagggtagaagagattatagccgtggctacctctgcgacccgggacgcaagcaataaagtccagctccttgaaatgattaaaaaggaagcaaacctcgaggtctgcacgatttcaggttcggaagaagcccgtctgatttatctgggggtttcgagcgggctcagactcggaaactcaaaagccatttttatcgacatcgggggcggaagcactgaagtgtctgtaggtgaccagaaccagtattattttcttcactcccttaaccttgggtcaattcgcctgacaaatatgttccttccggatgaaaccggccctgtctctgaggaacgttatgaacagatcaaggcgtacatccggcgcaagagtgcggacataattaaagagctttccagatatacggtaaattttgtaattggaagttcgggaactattgaaaaccttgccaaaatcgcctttgtttacctgcataagacagctcatgaaagctttgagaaacttgagtatgaagacctgaagaagattgtcagggcaatgtgtgccctttcgcttgaagaaagacgtaaattccccggaataaactcacagagagcagacataatccttgcaggggctgcaattatagagacttttatggaagaactcggactttccgagattacggtcagtaagcgcgggttaagggaaggccttctcgtagactatatctcgaagagtgagttctcgtatttggtcactcagatgtcggtaaggaagcgcagcattatgcagctcggccttgcctgcaattttgatgaggaacatgcccatacagtttcaaggctcgctcttgaactctttgacagtattcaggctctcggcatctatgagtttgaggagagtgagagagagcttctcgaatacggtgcaaccctgcacgacataggaacattcctctcatacgatactcatcaggcacatgcctatcaccttataagagagagcaacctgcctggtttccagcctgaagaaatcgaaatcattgcaaatcttgcctatttccacagaaaaaacactcctaaaaagaaacaccccaaccttgaagggttgagcaaagaatctgtaaaaagtataagggcgctcagtgccctgctccgtattgccgaagggcttgaccgctcccataccggcatagtgtcccatgtccgtttctatatagcctccacagagagccttgtgcttgagatgcatgctcagaaggaatgtcagctcgaaatctgggaagtcgagaaacataaaaagtactttaagaaaattttcggatattctctccagtccaaggcaattatagaacagactgcgggaaccccattaattttcaaaggaaatgttgaaattgaggaaatgccaagggactga

SEQ ID NO: 54817 - protein, 543 aa, Methanosarcina mazei Go1
MEPEKISEGRVVAFIDIGTNSVRLLLVRINPNGSYQPLTKQKETVRLGEKEFIDRILQPEAMERAAFVCKKFMELSRAYRVEEIIAVATSATRDASNKVQLLEMIKKEANLEVCTISGSEEARLIYLGVSSGLRLGNSKAIFIDIGGGSTEVSVGDQNQYYFLHSLNLGSIRLTNMFLPDETGPVSEERYEQIKAYIRRKSADIIKELSRYTVNFVIGSSGTIENLAKIAFVYLHKTAHESFEKLEYEDLKKIVRAMCALSLEERRKFPGINSQRADIILAGAAIIETFMEELGLSEITVSKRGLREGLLVDYISKSEFSYLVTQMSVRKRSIMQLGLACNFDEEHAHTVSRLALELFDSIQALGIYEFEESERELLEYGATLHDIGTFLSYDTHQAHAYHLIRESNLPGFQPEEIEIIANLAYFHRKNTPKKKHPNLEGLSKESVKSIRALSALLRIAEGLDRSHTGIVSHVRFYIASTESLVLEMHAQKECQLEIWEVEKHKKYFKKIFGYSLQSKAIIEQTAGTPLIFKGNVEIEEMPRD

SEQ ID NO: 54818 - DNA, 1557 bp, Chlorobium tepidum TLS
  CDS (1)..(1557): transl_table=11
atgtcatcagagaaactcagggtggccgccatcgatcttggcaccaactcctttcacatggtcatcgtcgaggagagcgaagagaagggcattgtggaaatcgatcgtgtcaaggacatgatctgtatcgggcgtggcagcatttccaccaaacggctcgatgacggggcgatggaggctggcgtggctacgctccggaacttcattgtactggccacccagcggggtgtcgcgctgcacaacattctcgcctttgccaccagcgccattcgcgaggccgataaccgcgacgagtttatcgacatggtgcggcgcgaaaccggcctgaagattcgggtgattaccggcaaggaggaggcgcagttcatctactacggtgtgcgcaatgccgtgacgctgcgtgacaaaccggatcttttgtttgacatcggcggcgggtcggtggagttcatcatcgccgacaagtcgaaggtgcacctgctcgaaagccgcaagatcggcgtggccagaatgctggagcgtttcgtgactaccgatccggtttcggcacacgagctgcatttgttgcagcagtttttcgccgccgagatgtatggcggcgcggcggagatggcgcacgaacttggcgtgagccgagccatcgcctcgtcaggtacggcgcagaacatcgcccgcatgattcgcttgggcaagcatgccgatggggcggacgtgctgaaccagagcagctttacccgtcaggagttcgagagcttctaccggcaggtgatcgcgatggacgcttcggcgcggcgcaagctgaccggcctcgacgagaagcgcgtcgatctgattgtgccggggctgatcctctttgacacgatcttccgggtgtttggcatcaaggatgtggtgatctccgattcagcgctgcgcgaaggaatggtgctgcaccagatcgccttgatccgggggcgtgacggcagtagccagctcgacatccggcggcagagcgtgatggaactcggctaccgctgcaactggcacaagccgcactcggagcaggttgcccgtcttgcgctgatgctcttcgacgaactccatccgctgcacgggctcaaggagcgctaccgcgagctgctcgaatacgcggcgatgctgcacaatatcggggagttcatctcgatttcggcgcaccacaagcacagccagtacattatcatgaacgccgatctgcgcggcttttcaccgaccgaaatcgacatcatcggcaacgtcgcccgctatcaccgcaagcagccgcccaccgaaaggcatccactctacagccagctcaagccctcgcaccgccgtgtggtcgatgtgctctccggcatcctgcgcatcgccaatggtctcgaacggggccaccgccagaatgtgcagtcgatcacggcccgcatcgaccaggagcgcatcgtgctcgaagcgctcacgcagttcgagcctgacatcgaactctgggcggcttgcgggctaaaggagtggctcgaagaggtgctcgggaaacccattctgatcgaagcccgcgtccggtaa

SEQ ID NO: 54819 - protein, 518 aa, Chlorobium tepidum TLS
MSSEKLRVAAIDLGTNSFHMVIVEESEEKGIVEIDRVKDMICIGRGSISTKRLDDGAMEAGVATLRNFIVLATQRGVALHNILAFATSAIREADNRDEFIDMVRRETGLKIRVITGKEEAQFIYYGVRNAVTLRDKPDLLFDIGGGSVEFIIADKSKVHLLESRKIGVARMLERFVTTDPVSAHELHLLQQFFAAEMYGGAAEMAHELGVSRAIASSGTAQNIARMIRLGKHADGADVLNQSSFTRQEFESFYRQVIAMDASARRKLTGLDEKRVDLIVPGLILFDTIFRVFGIKDVVISDSALREGMVLHQIALIRGRDGSSQLDIRRQSVMELGYRCNWHKPHSEQVARLALMLFDELHPLHGLKERYRELLEYAAMLHNIGEFISISAHHKHSQYIIMNADLRGFSPTEIDIIGNVARYHRKQPPTERHPLYSQLKPSHRRVVDVLSGILRIANGLERGHRQNVQSITARIDQERIVLEALTQFEPDIELWAACGLKEWLEEVLGKPILIEARVR

SEQ ID NO: 54820 - DNA, 1689 bp, Thermosynechococcus elongatus BP-1
  CDS (1)..(1689): transl_table=11
atgacaagtccaatgacggctgaacaacatctccacctgtggcgaccggtgaacctcagcgatcgcattctggcggcaattgatgtcgggacaaactcaattcacatggtggtggtgcaaattcagcccagcttacccagctttaaaatcattgctgccgaaaaggaaatggtgcggctgggggaacgctgccaaattaccgggcaactgacggaagaggccatggagcgggcgatcgccaccctgcgccgctgtcgcgaattggccacgggcctcaaggcggaagaaataattggcgtcgccacaagtgccgtgcgcgaagcccccaatggtcgccagtttttagagcgggtcaaaaaagagaccggcttgaccattgatctcatttccggcgaagaggaagcgcggcgcatctacctgggggtgctctcgggcctagaattcaacggcaagccccacatcatcatagacattgggggtggctccacggagttaattctgggcgatggccatgaaccccgctccctcagcagtaccaaagtaggggcagtgcgcctgacggatttatttgttaaaagcgatcccattagcgatcaagattacgcagtcctacgagcctatgtgcggggaatgttagatcgtgccgttgaagacctgcggcaacacctcggtccccatgaaaaaccgcaattggtgggtacctcaggcaccattgaaagcctgatgatgattcacatctgcgatcgccttgggagttgccccccctctctacggggctatgaactcacccttgaggacttgaaagctctcctggccaaattgcggcggctaaactttaaccaacgctgtcaactgttggggatgtcggagcggcgagcagaaattattgttgcgggggcagtcattcttgttgaggccatggagatgcttggccaaagcagcctgatcacctgcgatcgcgccctgcgggaaggcatcattgtggactggatgctgacgcacggactgattgaagaccgtcttcgctatcaaagctccgtccgccagcgcagtacctacagtttggcgcaaaaattccacgtcaatctggccagcagtgaacgggtagccaattttgccctaacgctgtttgatcgcacccaagggattctccacaactggacagaagcggaacgggaactcctctgggcagcggcaattctccacaatgccggccactacgtcagccattccgcccaccacaaacattcctattaccttgtgcgccacggcggcttactcggctataccgatacggaaattgaaatcattgctaacctctgtcgctatcaccgcaaaagcccccccaagaaaaagcatgaaaacttccgccaattgatgggacggcgagaacggcaaatggtcgagcaactcagtgctattctgcggctggcttcggccttggatcggcggcaaattggggccgtggatcacattacctgtgagtggcgccctccgcagcggcagttttgtctgcagatccatccggcagaccctagcgatcgctgtgagttggaaatttggagtgtcaactacaaaaaagaaccctttgaaagccaatttagtgtcagtttgaaggtggaattagtggccaccagtggcacggttctagctacagcagtgaatctagctacagcagtgaatgagtga

SEQ ID NO: 54821 - protein, 562 aa, Thermosynechococcus elongatus BP-1
MTSPMTAEQHLHLWRPVNLSDRILAAIDVGTNSIHMVVVQIQPSLPSFKIIAAEKEMVRLGERCQITGQLTEEAMERAIATLRRCRELATGLKAEEIIGVATSAVREAPNGRQFLERVKKETGLTIDLISGEEEARRIYLGVLSGLEFNGKPHIIIDIGGGSTELILGDGHEPRSLSSTKVGAVRLTDLFVKSDPISDQDYAVLRAYVRGMLDRAVEDLRQHLGPHEKPQLVGTSGTIESLMMIHICDRLGSCPPSLRGYELTLEDLKALLAKLRRLNFNQRCQLLGMSERRAEIIVAGAVILVEAMEMLGQSSLITCDRALREGIIVDWMLTHGLIEDRLRYQSSVRQRSTYSLAQKFHVNLASSERVANFALTLFDRTQGILHNWTEAERELLWAAAILHNAGHYVSHSAHHKHSYYLVRHGGLLGYTDTEIEIIANLCRYHRKSPPKKKHENFRQLMGRRERQMVEQLSAILRLASALDRRQIGAVDHITCEWRPPQRQFCLQIHPADPSDRCELEIWSVNYKKEPFESQFSVSLKVELVATSGTVLATAVNLATAVNE

SEQ ID NO: 54822 - DNA, 1563 bp, Leptospira interrogans serovar Lai str. 56601
  CDS (1)..(1563): transl_table=11
atggttcaagaaaaacctctcgctgccatcgaccttggcaccaactcatttcacatgatcatcgttcgagttcgaacaaacggaactttcgaagccatcgctagagaaaaagaatcagttcgcttaggtaataggttgcaagaaaacggtccgatcgatccggaatcgtttcgtagaggaatcgattgtctcaaaagatttaagatcttagcagaaaacgcaggagcagaaatcagagccgttgctacaagcgcactacgagaagcttctaaccaagaagactttttagaaaacgcatatcaagaagcgggtatatccatcgatgtagtaagtggttatgaagaagcccgactcatttactttggaattctccaaggaattccagtttttgatcgaaaaatcatgatgatcgatataggcggaggaagtactgaaattttagtaggtcatagaggaaatattttattctctaaaagttttaaactgggggccatccgactttcagaaaaattctttaaagaagaaactctttctaactcggatgttcgtaaatgtagactttacatcgaagaaatgcttcttccttttcgaaagattctcagagatttaaaaccggacttggtagtaggttcatctggaacgatacaatcgatcgcgggtatgattttagcatccagaggggaaacggaagaaatctctttaaacaacttttcatttacttcttccgaatttaaaaaaatccgtaatctaattttagaagcggatacttctaaaaaaagatccaagatcccaggtttagatagcaaacgagctgatatcatcgttggaggaactttgattttagaagaaatttttgatcttgcaaacgtttctgctttaaccgtttccgaattcgctcttcgagaaggaattgtatacgatacaattcgcaaatgggaacacttcgaaaacacagaacattctaaacacttagatgacatccgtcaaacagcagttcataattttatgaaatccttttctagagacgaagaattttcaaaacacgtcgctgaattaagtcttcagatttttgatcaattaaaaagtttgcataaactggggcaggaacaaagagaacttttagaagcggcttctcttttacacgaaatcggtcagtcgatttcacattccgcctatcataagcacagttattatatgatccgaaattcggaaatgcttttaggttttacttttttagaaattgaaatcatcgctttgaccgctcgttatcatagaaagaatactcctaaagttaaacacagggaatttaataagctcgctgaaaaaaatcaaaccttagtatgtcaactttctgcgatcctaagaatcagctccgcgttaaaccgaaatcgaggtggactcgtttcttcagtaatttgtaaaatcgaaaaaaatcagattcgttttattttagaatccagtaagggttacgatccttctttagaaatttgggccgcggaagaacaaaaggtggcgttcgaagaaaccttcggttattcagtggaatttgtaactggaacttaa

SEQ ID NO: 54823 - protein, 520 aa, Leptospira interrogans serovar Lai str. 56601
MVQEKPLAAIDLGTNSFHMIIVRVRTNGTFEAIAREKESVRLGNRLQENGPIDPESFRRGIDCLKRFKILAENAGAEIRAVATSALREASNQEDFLENAYQEAGISIDVVSGYEEARLIYFGILQGIPVFDRKIMMIDIGGGSTEILVGHRGNILFSKSFKLGAIRLSEKFFKEETLSNSDVRKCRLYIEEMLLPFRKILRDLKPDLVVGSSGTIQSIAGMILASRGETEEISLNNFSFTSSEFKKIRNLILEADTSKKRSKIPGLDSKRADIIVGGTLILEEIFDLANVSALTVSEFALREGIVYDTIRKWEHFENTEHSKHLDDIRQTAVHNFMKSFSRDEEFSKHVAELSLQIFDQLKSLHKLGQEQRELLEAASLLHEIGQSISHSAYHKHSYYMIRNSEMLLGFTFLEIEIIALTARYHRKNTPKVKHREFNKLAEKNQTLVCQLSAILRISSALNRNRGGLVSSVICKIEKNQIRFILESSKGYDPSLEIWAAEEQKVAFEETFGYSVEFVTGT

SEQ ID NO: 54824 - DNA, 1503 bp, Pseudomonas putida KT2440
  CDS (1)..(1503): transl_table=11
atgccgcataccatcgcgaagaacctgtccctgatcgccgccatcgaccttggctccaacagttttcacatggtcgtggccaaggcccaccataccgaaatccgtatccttgagcggctcggcgagaaggttcaactggccgccggcatcgacgaagagcgcatgctcagtgaagaggcaatggaaaggggcctggattgcctcaagcgcttttcccagctgatcaacggcatgccggcaggcgccgtgcgtatcgtcggtaccaacgccttgcgcgaagcgcgcaaccgtaacgaattcatccagcgcgccgaagccatcctcggccacccggtggaggtcatctctggccgtgaagaggcgcgcctgatctacctgggcgtgtcgcacaccctggccgacacacccggcaagcgcctggtggccgacatcggcggcggcagtaccgaattcatcattggccagcgcttcgagccgctgctgcgcgaaagcctgcagatgggttgcgtgagctttacccagcgctatttccgcgacggcaagatcaccccggcccgctatgcccaggcctacactgccgcacgcctggaactgatgagcatcgaaaatgccctgcaccgcctgacctgggatgaggctatcggctcatccggcaccattcgcgccatcggcgcggccatcaaggccggcggcctgggcaatggcgaggtcaacgccgaaggcctggcctgggtcaaacgcaagctgttcaagctgggcgaagtcgacaagatcgacttcgacggcgtcaaaccagaccgccgcgctatcttcccggcgggcttggcgattctcgaagcgatcttcgatgcccttgaactgaaccgcatggaccactgcgacggcgccctgcgcgaaggtgtgctgttcgatctgcttggccgccaccaccacgaagacgtgcgcgaacgcaccctgaactcgctgatggagcgctatcacgtggaccagggccaggctgcgcgcgtcgagcgcaaggcgttgcacgcattcgaccaggtggccgacgcttggaacctgaaagacggaaactggcgcgatctactgggctgggccgcgaaagtgcacgaaatcgggctggacattgcccattatcactaccacaagcacggcgcctatctgatcgagcactcggacctggcaggcttttcccgggaagatcagcagatgatggccctgctggtacgcggccaccgccgcaacatccccaaggaccgttacgccgaactgggtgatgaaggggtcaagctgctgcgcctgtgcgtattgctgcgctttgccatcctgttccaccacatccgcggcacccagcagatgccaacggtagaactgcacggcggggacaacagcctggatgtagccttccctgaaggttggctgcagcagaaccagctgacccaggccgacttcgccaacgaggcggagtggctggcccgggtcggcttcgtcctcagcgtacgttga

SEQ ID NO: 54825 - protein, 500 aa, Pseudomonas putida KT2440
MPHTIAKNLSLIAAIDLGSNSFHMVVAKAHHTEIRILERLGEKVQLAAGIDEERMLSEEAMERGLDCLKRFSQLINGMPAGAVRIVGTNALREARNRNEFIQRAEAILGHPVEVISGREEARLIYLGVSHTLADTPGKRLVADIGGGSTEFIIGQRFEPLLRESLQMGCVSFTQRYFRDGKITPARYAQAYTAARLELMSIENALHRLTWDEAIGSSGTIRAIGAAIKAGGLGNGEVNAEGLAWVKRKLFKLGEVDKIDFDGVKPDRRAIFPAGLAILEAIFDALELNRMDHCDGALREGVLFDLLGRHHHEDVRERTLNSLMERYHVDQGQAARVERKALHAFDQVADAWNLKDGNWRDLLGWAAKVHEIGLDIAHYHYHKHGAYLIEHSDLAGFSREDQQMMALLVRGHRRNIPKDRYAELGDEGVKLLRLCVLLRFAILFHHIRGTQQMPTVELHGGDNSLDVAFPEGWLQQNQLTQADFANEAEWLARVGFVLSVR

SEQ ID NO: 54826 - DNA, 1677 bp, Prochlorococcus marinus subsp. marinus str. CCMP1375
  CDS (1)..(1677): transl_table=11
ttgggacttgttgtgtcaaagagccctgttgaaattacaggtgaggagtcaatatcaactagtcatgccgaaatttatcaaagtaaagattccaggtttagaaataatgaaaaaatccgtcgagtagctgctgttgatataggaacaaattccattcatttggttattgcatcagtagaccctagtttgaatacctttagcattgatcttgcagagaaatcttctactagattaggtaatagagatccagagaatggtgatctgactgaatctgcaaaagagagaactattgaaactttgaaacggtttaaagatcttgctttcagtcataaggtagatgagattcttttagcagcaacaagtgcagttagagaggctccaaatggagcaggttttttgcagcaaattaatgccaatcttggcctagaagtagagctggtgagtggacctgaagaggctaggctcatttatctgggcgttctttcaggaatgccttttggtgaaactcctcatatcttgcttgacattggtggtggatcaacagaattagtgcttgctgatggccaagatgcgagagctttaactagtacaagacttggtgcagtaagcctgcaaagagatttcgtaaaggaggagccaatatcatctcagcgacttgagttcttgaaaacttttatacagggatctttggaaccagctattaataaagtttgttctcgtattaatgaaggagaaaaaactgctttagttgccactagtgggactgcacttgcaataggaactttggccgcatcagaacagcaaaactttgaatttagaaaacatggttacaaattcactaaagaacaattagacaaattaattgaaaaattattaattatgactcctgatcaaaggagaaagctcccttcaataagtgatcgacgagctgagattattgttccaggtgcattgataatgcaagttgcaatgcagatgcttgatatagaagaggttattctcagtgaaagggccttgcgagaaggcttggttgtagattggatgtttaggaaagggctattaaaggatcgctttagttttcaaggaagcattcgtgaaagaaccgtaattcatcaactagaaaggttttcagttaatagacaacgtgccgagcgtgtagcagcaaatgcattggatatttatgacaatacacacggagcattgcatcacgatgaaggggatgggagagatttgctttgggctgctgctttgttgcattcatgcggccaacatatcaatttagcctcttttcacaaacattcttggtatttaattcggcatggtgaattattaggttattcacaggcagagcatttaatggttgctgctattgctagatatcacaggaaaagtctgcctaaaaaaagacatgaggcttggcaatctttgtttaataaagagcatcgacgaattgtttctgaaatgtctttaattcttagattgtcagctgcattagatagacgccctgaaccagcaattgcttctctaagagttgcatgcagttcttctgaaattatcttttaccttgtcccagagggtacaaagcaaaatttagctctagagatttggagcttaagtaattgcatcccaatagtaaaaagtttaactggatttgatttaaaagttttagttgattga

SEQ ID NO: 54827 - protein, 558 aa, Prochlorococcus marinus subsp. marinus str. CCMP1375
MGLVVSKSPVEITGEESISTSHAEIYQSKDSRFRNNEKIRRVAAVDIGTNSIHLVIASVDPSLNTFSIDLAEKSSTRLGNRDPENGDLTESAKERTIETLKRFKDLAFSHKVDEILLAATSAVREAPNGAGFLQQINANLGLEVELVSGPEEARLIYLGVLSGMPFGETPHILLDIGGGSTELVLADGQDARALTSTRLGAVSLQRDFVKEEPISSQRLEFLKTFIQGSLEPAINKVCSRINEGEKTALVATSGTALAIGTLAASEQQNFEFRKHGYKFTKEQLDKLIEKLLIMTPDQRRKLPSISDRRAEIIVPGALIMQVAMQMLDIEEVILSERALREGLVVDWMFRKGLLKDRFSFQGSIRERTVIHQLERFSVNRQRAERVAANALDIYDNTHGALHHDEGDGRDLLWAAALLHSCGQHINLASFHKHSWYLIRHGELLGYSQAEHLMVAAIARYHRKSLPKKRHEAWQSLFNKEHRRIVSEMSLILRLSAALDRRPEPAIASLRVACSSSEIIFYLVPEGTKQNLALEIWSLSNCIPIVKSLTGFDLKVLVD

SEQ ID NO: 54828 - DNA, 1599 bp, Prochlorococcus marinus subsp. pastoris str. CCMP1986
  CDS (1)..(1599): transl_table=11
atgatacagaaaaaaaaattaagtaatctgcaagaaaaagatatttccgtagcctcaattgatattggaaccaactccactcatctcttaatcgctgaaattaattcagatctcaaatccttttcaataaaatttactgataaatctacaacacgtctaggagagagagatgaagagggaaatcttactgaggaatcaattcaaagagttttaaagaccctaaagcgttttcaagagtactgcaaaagtaatggtgttaatcaaatagtaactgctgcaacgagtgctgttagggaggctccaaatggtcgagactttttaaatagggttcaaagtgatttagatattcaaatagaacttataagcggatctgaagaggctagattaatttatcttggtgttttgtctgggatggttttggaagataagtcttacgtaattattgatataggtggaggttccacagaattaatacttgcagatcaaaaagacgcaatagctcttacaagttctagagttggagctgttaggctcaaaaatgatttttttcttgatagtgaacccatcaatagagaaagatctaattttttgagaacttttattcaaggctccttagaaccatctattgaaaaaattaaaaggagattacaaagaggaaagacggtctcaatgattgctacaagtggaactgcaatttcactaggaaatttaattttatctgaccttgggcagccaaaacaaaagatgcatggttataaatttaaaaaagaaaatttagagattgtcttggaaaaattaattaaaatgccaatttctgaaataaagaaaattccttcactcagtgaaagaagatcggaaataataattccaggtgcattaattttaaaaacctcaatggagatgttgaattttgatcagttgacaattagtgagagggccctaagggaaggattagtagttgattggatgcttcgccaaggaataataaaaaatgaatttaatattcaaagtaatattaggaaaactaccatagttcatcaggctagaaagtttggtgttgataaagaaagatctgagaaagttactaatatcgcatttcaaatctatgatcaaactaaaaatatttttcatggagatactgattcaaaagcaaaagatctcctttgggcagcctgtaacctttatgattgtgggaaatatgtaaatataagttcttatcataaacattcttggtatttaattaaaaactgcgaattattgggatattctcaatccgagacaaatattattgcttcaatagttagatatcacagaaagactttaccaaaaaaaagacatgaatcttggcaaagtttaatctcaaaagaagataaaacattagtacttgaaatgtctttaattttaagattagcggcctctctggatcaaagacctgaaaatgtcttgtcttctataaaaattaaattactaaataatatttttgcaattgaactgatacctttaaaatcaaataaagatcttcttctcgaaaaatggagcttagagttatgtagtaaggtggttaaagaattaaaaaatttagagttgaaagttgtttaa

SEQ ID NO: 54829 - protein, 532 aa, Prochlorococcus marinus subsp. pastoris str. CCMP1986
MIQKKKLSNLQEKDISVASIDIGTNSTHLLIAEINSDLKSFSIKFTDKSTTRLGERDEEGNLTEESIQRVLKTLKRFQEYCKSNGVNQIVTAATSAVREAPNGRDFLNRVQSDLDIQIELISGSEEARLIYLGVLSGMVLEDKSYVIIDIGGGSTELILADQKDAIALTSSRVGAVRLKNDFFLDSEPINRERSNFLRTFIQGSLEPSIEKIKRRLQRGKTVSMIATSGTAISLGNLILSDLGQPKQKMHGYKFKKENLEIVLEKLIKMPISEIKKIPSLSERRSEIIIPGALILKTSMEMLNFDQLTISERALREGLVVDWMLRQGIIKNEFNIQSNIRKTTIVHQARKFGVDKERSEKVTNIAFQIYDQTKNIFHGDTDSKAKDLLWAACNLYDCGKYVNISSYHKHSWYLIKNCELLGYSQSETNIIASIVRYHRKTLPKKRHESWQSLISKEDKTLVLEMSLILRLAASLDQRPENVLSSIKIKLLNNIFAIELIPLKSNKDLLLEKWSLELCSKVVKELKNLELKVV

SEQ ID NO: 54830 - DNA, 1701 bp, Prochlorococcus marinus str. MIT 9313
  CDS (1)..(1701): transl_table=11
atggcaaagtggtctcgttccaggctcctgtacttcatgccaggtgtcgagccattgcctttcggtgtggttgatgtcgagcaggaggaggccaggtacgtcagtgctggtcagctccgttctgagcgagagctccgcaacgttgccgcgattgatattggaaccaattccacccatctcttggtggcgtcggttgatccttctctgcataccttcagcgttgatcttgcagagaaatcaaccaccaggcttggtgagcgagaccctgactctggagagctcacgggtcctgctatggagcgggtatttgagacactcaaacgttttaaggagctagccgccagccatcaggtggagcaggtggttgcgtcggcgactagcgcagtacgtgaagcttcaaatgggcgggattttttgcaacggattcaggatcagcttggccttgaggtggatctgttgagcggtgctgaggaagcacgactgatctatttgggtgttttgtctggcatgccttttggggagtgtccccatcttttgctcgatatcggtggcggttccacagaactcatcctcgcggatggtcgcgatgctcgggctctgacaagcacgcgggttggtgcggttcggctacagagggattttgtcaagcatgaaccaatcccccctcaacggcgttcctttttgcagacatttattcagggttctttagagccagctgttgataaggtctgccgtcgcatcaagcctggggagagccctgtgatggttgccaccagtggaaccgccatggccatcggtgctttgttggctagcgaagacgatcgccctccgttgagattgcatggctatcgaatcacacggcagcagcttgatggcctggttgagaagctgatagcgatgacgcctgagcagcgtcgcatccagacgccgattaatgatcgccgtgccgaaatcatcgttccgggtgcgctgattcttcaaactgccatgcagatgctctctgctgatgagctggtgctgagtgaaagggctctgagggaggggttgatcgttgattggatgctgcgacatggcctactggaggatcgctttagttttcagagcagtattcgtcagcgcaccgtgattcatcaggtgcagcgttttgcagtgaatcaccgccgtgcagagcgtgtagccagccatgcactcagcctttacgaccacacacatggtgttcttcatcaagatgatggaggtggtcgggatctgctttgggcatcggccatgttgcatgcctgtggtcagcacatcaatctcagtgcttatcacaagcattcctggtatctcattcgtcatggcgagttgctcggctattcggaagcggagcatttgatggttgcggctattgcgcgctatcaccgccgcagtcttcccaagaagcgtcatctggaatggcaggctttagccacccgggagcatcgtcgcctcgttgccgagatggctttgttgctgcgattagcagcagccattgatcgccgtcctgagccagtggtggctgcaataagagtgaagtccgctgatgatgatcagattgtctttgaactagtgccggaaggattgaatcagaatctcagccttgaacaatggagcttgaagagctgtgcttcggttgtgaaagaagcaagcggcgtaaccatgaaagttgtcgttaaggagtga

SEQ ID NO: 54831 - protein, 566 aa, Prochlorococcus marinus str. MIT 9313
MAKWSRSRLLYFMPGVEPLPFGVVDVEQEEARYVSAGQLRSERELRNVAAIDIGTNSTHLLVASVDPSLHTFSVDLAEKSTTRLGERDPDSGELTGPAMERVFETLKRFKELAASHQVEQVVASATSAVREASNGRDFLQRIQDQLGLEVDLLSGAEEARLIYLGVLSGMPFGECPHLLLDIGGGSTELILADGRDARALTSTRVGAVRLQRDFVKHEPIPPQRRSFLQTFIQGSLEPAVDKVCRRIKPGESPVMVATSGTAMAIGALLASEDDRPPLRLHGYRITRQQLDGLVEKLIAMTPEQRRIQTPINDRRAEIIVPGALILQTAMQMLSADELVLSERALREGLIVDWMLRHGLLEDRFSFQSSIRQRTVIHQVQRFAVNHRRAERVASHALSLYDHTHGVLHQDDGGGRDLLWASAMLHACGQHINLSAYHKHSWYLIRHGELLGYSEAEHLMVAAIARYHRRSLPKKRHLEWQALATREHRRLVAEMALLLRLAAAIDRRPEPVVAAIRVKSADDDQIVFELVPEGLNQNLSLEQWSLKSCASVVKEASGVTMKVVVKE

SEQ ID NO: 54832 - DNA, 1632 bp, Synechococcus sp. WH 8102
  CDS (1)..(1632): transl_table=11
atgctggacgctgtgtctgaatcaaaggctccggcagggtcgcaaccgacgagatcgtcggcccagacccgccgggtggccgccatcgacatcggcaccaactccactcatctgctggtggcctccgttgacaccaccctgggcaccttcagcatcgaacaggcggagaagtcgaccacacgactcggggagcgggatccggatagcggcgaactcacgccggcgggtatgcagcgcggctacgaaacgctgcgacgtttccgggacctagcgatcagtcacgacgttgagcagatcgtgaccgcagccaccagcgccgtgcgggaggctcccaatggtcgggagtttctccagagcatccaggacggtctcggcatggatgtggacctggtcagtggcccggaggaggcccgtctgatttatctcggggtgctgtccggtatgtccttcggagatcgcccccacctgcttctggacatcggtggcggatcgacggaactgatcctggccgatggacgcgatgcccgagccctcaccagcacccgggtgggtgcggtgcggttgcaacgggatttcgtcaaggacgatccaatccccccccagcgtcgttcgttcctgcaggccttcatccagggctccctggagccggccgtcgacaaggtgcaccggcggatcaaacccggggaaattcctgttctggtggccacaagcggcacggccatggccattggggcactggcggctagtgaggacgatcgccctccgttgaaactgcacggctatcgggtgtcgcggcagcggcttgatcgggtggtcgagaagctggtgacgatgactccggagcagcgacgggatctatcgccgatcaatgaccgaagggccgaaatcatcgtgcccggggccctgattctgcagaccaccatgcagatgctcggcgtggatgaactcgttctcagtgaacgggcgctgcgggagggactgatcgttgattggatgctgcgccatggcctgcttgaggaccgcttcagttttcagagcagcattcggcagcgcacggtgattcatcaggtgcagcgctttgccgtgaaccagcggcgagccgaacgggtggccacccatgccctgagtttgtatgacgccacggagggcctgatgcaccaggacgatggccagggacgtgagttgctctgggctgccgcgatgcttcatgcctgcggacagcacatcaacctcagtgcgtatcacaagcactcctggtacttgatccgtcatggcgagcttcttggctattccgaggcggagcatctgatggtggcggcgattgcccgctatcaccgccgcagtcttcccaagaaacggcatgagtcctggcaggcgctggtgacgcgtgacaaccgtcgtcgcgtcagcgaaatggctctgctgttgcgtttggccgcagcccttgaccgtcgaccagagcctgtggtggcgtcgttgcgggtgaacaccacaccggatgtgctcgatctggtgcttgtgccggagcgactcaaccagaacctgagcctggagcagtggagtctggagagctgcgcggaagtggttcgtgaggcttccggagtgaaacttcgggtcagcgttcagggttga

SEQ ID NO: 54833 - protein, 543 aa, Synechococcus sp. WH 8102
MLDAVSESKAPAGSQPTRSSAQTRRVAAIDIGTNSTHLLVASVDTTLGTFSIEQAEKSTTRLGERDPDSGELTPAGMQRGYETLRRFRDLAISHDVEQIVTAATSAVREAPNGREFLQSIQDGLGMDVDLVSGPEEARLIYLGVLSGMSFGDRPHLLLDIGGGSTELILADGRDARALTSTRVGAVRLQRDFVKDDPIPPQRRSFLQAFIQGSLEPAVDKVHRRIKPGEIPVLVATSGTAMAIGALAASEDDRPPLKLHGYRVSRQRLDRVVEKLVTMTPEQRRDLSPINDRRAEIIVPGALILQTTMQMLGVDELVLSERALREGLIVDWMLRHGLLEDRFSFQSSIRQRTVIHQVQRFAVNQRRAERVATHALSLYDATEGLMHQDDGQGRELLWAAAMLHACGQHINLSAYHKHSWYLIRHGELLGYSEAEHLMVAAIARYHRRSLPKKRHESWQALVTRDNRRRVSEMALLLRLAAALDRRPEPVVASLRVNTTPDVLDLVLVPERLNQNLSLEQWSLESCAEVVREASGVKLRVSVQG

SEQ ID NO: 54834 - DNA, 1665 bp, Gloeobacter violaceus PCC 7421
  CDS (1)..(1665): transl_table=11
atgcccgaacccgcggctgacgcagagaagaccctggctgccatcgacatcggcaccaactccatccacatggtggtggttcatatccagccccggctggccagctacacgatcgtcgcccgcgagaagcagatggtgcgcctgggtgagtactgccagaagaccggctggctgacgccggaggcgatggtgcgcgccctcgacgcgctgcgtcactgcaaagcctttgctgagggcctgggagcgcaggaaatgatcgccgtcgccaccagtgccgtgcgcgaggcaccgaacgggccggaattcttgctgcagatccagcgggtggtcgggctcaaagtcgacttgatttcgggggaggaggaggcgcggcgcatctacctcggggtgctctccgccatcgagttcgacaaccgtacccacgccgtcatcgacatcggcggcggttcgacggagctaattctgggcgacggccgcgagccgcgctatctggcgagcgtcaaggcgggggcggtgcgcctcagcgaacagttcgtgcagagcgacccgatctcgggccgcgactacggccgcctgcgcaaccaggtgcgcaatttgatcgagcctgccgtggacaaactgctggccctagggccgttcgagcgcttggtcggcacctccgggacgatcatgaccttagctgagatcgatgcgcgccgggggggcagctttcctacctcgctgcagggctacgagttgacgcttgccagtcttgagcagatcgcagcgcagttgcgcgaactcgatctcgaagcgcgccgccgtctacccggagtctccgagcgccgcgccgacatcatcgtcgccggggcgaccattctgctcgaagcgatgcagatgctgggggtgggctcgatcaccgtctgtgaggcggcgttgcgcgaggggctcatcgtcgactggatgatcggccggggactgattgccgatcggttgcgctaccagggttcggtgcgcgagcgcagtgtgctgcagctggccgacaaattcaacctcgacaccacccacgccgagcaggtgacgcgtctgtccttaagcctttttgatcagtcccggggccggttgcaccgctggagcgacgccgatcgcgagctactgtgggcggcggcgatgttgcacaactgcggccacttcatcaaccattccagtcaccacaagcattcgtactacctgatccgccacggcggcatgctcggttttaccgaagaagagatcgaggtgatcgccaacgtcgcccgctaccaccgcaagagcacccccaaaagcaagcaccgcgaattccagcaccttgtcaaagaacacaagcgcctggtgcgccagatgagcgtgtttttgcggctcgcctccgccctcgatcgccgccacaaaggggccgtacggggcgtccggctcgcctttgctcctggagaagtcgagctttttgtccaaccgcacgacccggccgacccgtgcgagatggagctgtggaacgccgaattcaaaaaagccgagttcgaacaggagttcggccgcaccctggccattgccctggagtcggctgtggccgaaccgctcgcggtcctgggcgccaaggccgaaacgcaacccgacgcggtgagagtgccgcagggtagttgggtatcctaa

SEQ ID NO: 54835 - protein, 554 aa, Gloeobacter violaceus PCC 7421
MPEPAADAEKTLAAIDIGTNSIHMVVVHIQPRLASYTIVAREKQMVRLGEYCQKTGWLTPEAMVRALDALRHCKAFAEGLGAQEMIAVATSAVREAPNGPEFLLQIQRVVGLKVDLISGEEEARRIYLGVLSAIEFDNRTHAVIDIGGGSTELILGDGREPRYLASVKAGAVRLSEQFVQSDPISGRDYGRLRNQVRNLIEPAVDKLLALGPFERLVGTSGTIMTLAEIDARRGGSFPTSLQGYELTLASLEQIAAQLRELDLEARRRLPGVSERRADIIVAGATILLEAMQMLGVGSITVCEAALREGLIVDWMIGRGLIADRLRYQGSVRERSVLQLADKFNLDTTHAEQVTRLSLSLFDQSRGRLHRWSDADRELLWAAAMLHNCGHFINHSSHHKHSYYLIRHGGMLGFTEEEIEVIANVARYHRKSTPKSKHREFQHLVKEHKRLVRQMSVFLRLASALDRRHKGAVRGVRLAFAPGEVELFVQPHDPADPCEMELWNAEFKKAEFEQEFGRTLAIALESAVAEPLAVLGAKAETQPDAVRVPQGSWVS

SEQ ID NO: 54836 - DNA, 1542 bp, Geobacter sulfurreducens PCA
  CDS (1)..(1542): transl_table=11
gtgacccacaaccggctggccgccatcgatatcgggaccaactccatccgctgcatcgtggtggaggtgaccaggaacggcaaatttcgcgttctggacgacgagaaggccaccgtgcgcctgggcgaagggatggccgccagcggcaccatctcgccggcggcctgggagcgtgccgttacggcgcttggccggatgaagaagatcgtggacggctacggggtcaaggtggtggaggcggttgccaccagcgccgtgcgccgtgccgcaaacggcgaggagttcatccggaccgtggaggagacggtcggggtcagggtggcggtgatcagcggcgaggaggaggcggaactggccgccctctcggtgcggaaccatttcgacatggagggggtccgctacgccatggtggacatcggcggcggcagccttgaaatcgtcacggcgctcgggacccatatcgaggatatccactccctggagctcggggccgtggtcctgaccgaacgcttcgtccggagcgatcccccgcgccaggctgacctggacaggctgcgcaaacacgtgcgcgcgtcgctgaaggagtcactgggcgccgagtggggacacctccagagcctggtgggctccggcggcaccatcacgtctatcgccgccatggtcatggccatgcggggggaggggtacggatcggtccaccgttacgaggtgctccggtcggaggtggtgcatctgctggccatgctctcccgcaaggacctcaaggcccgccgggaggtgccggggctcaacccggaccgggccgacatcatcactgccggtgtcactgtggtggacgagctcatgaggttcttcgacgtgaacctcttgcgggtcaatgagcggggaatccgggaagggctcatcatcaaggccctgcggacccacggcctgattcccggcatggaaactcccctcacctggcgcgagtcggtgctggagttcgcccgttcatgccatgcggacgaagagcatgccctccaggtggcgcggctttccctggagatattcgattccctggagccggtctatggcatgggcgagggagcccgccggatactggaggcggcggccatcctccacgacgtgggctacttcatcaactattcaagccaccacaagcattcataccatttgatccgccacgcggacctcttcggcttcaccccccgggagcgggagctgatcgcctcagcggcccgctaccaccgcaaggcccttcccaagaagaagcacgagtcgtacatgcgtctggcggagccggaccggctcctggtggcgcgcctgggcggcatcctgcggctcgccgacggcctcgaccgtcgccgcaacagcctggtctccggccttacctgttccctttccgacggcaccttcatccttacccttgccagtcgcggagaaatctccgtggagctcttcggcggcaagatcaagggagatctcttcgaggaggccttcagtaagcgcctcctgctggtggccgaaagcgccctcgcctga

SEQ ID NO: 54837 - protein, 513 aa, Geobacter sulfurreducens PCA
MTHNRLAAIDIGTNSIRCIVVEVTRNGKFRVLDDEKATVRLGEGMAASGTISPAAWERAVTALGRMKKIVDGYGVKVVEAVATSAVRRAANGEEFIRTVEETVGVRVAVISGEEEAELAALSVRNHFDMEGVRYAMVDIGGGSLEIVTALGTHIEDIHSLELGAVVLTERFVRSDPPRQADLDRLRKHVRASLKESLGAEWGHLQSLVGSGGTITSIAAMVMAMRGEGYGSVHRYEVLRSEVVHLLAMLSRKDLKARREVPGLNPDRADIITAGVTVVDELMRFFDVNLLRVNERGIREGLIIKALRTHGLIPGMETPLTWRESVLEFARSCHADEEHALQVARLSLEIFDSLEPVYGMGEGARRILEAAAILHDVGYFINYSSHHKHSYHLIRHADLFGFTPRERELIASAARYHRKALPKKKHESYMRLAEPDRLLVARLGGILRLADGLDRRRNSLVSGLTCSLSDGTFILTLASRGEISVELFGGKIKGDLFEEAFSKRLLLVAESALA

SEQ ID NO: 54838 - DNA, 1596 bp, Prochlorococcus marinus str. AS9601
  CDS (1)..(1596): transl_table=11
atgatacagaaacaagatttaagatattttcaagaaaagcaaattttagtagcttctatagatattggaactaactctacacatctcttggtagcagaaattaatctagaattaaaatcattttcaataaaattcactgataaatcaaccactcgtcttggagaaagagatgaggagggaaatcttactgaagaatcaatccaaagagcattagttactcttaagcgatttaaagaatattgtaaaagtaatggagtaaaacaaatagtaacaggagcaacaagtgcagttagggaagctccaaatggtcaagattttattagaagagttcttgatgaaactgatattcaaatagaaatgataagtggttctgaggaagctaggttaatttaccttggtgttctctctggtatggcttttaaagatcagtcttttgtcataatagatattggaggtggatctacagaattaatacttgcagataaaaaagatgctatagctctaaccagttctagaattggtgctgtaagacttaaaaatgattttttaaataaagagtctataaattcagaaagatcgagttttctaacaacttttattaaaggatctttagaaccctctgttcgaaaaataaagagtagatctaagggagataagcctttatctttgattgcaaccagtggcactgcaacctcactaggaaatttgatttcagatgatttgggagaatctaaacaaaagttgcatggttataaatttaaaagggaaaatttacaaaatgtattggaaaaactacttaaattgccggtttctgaaatcaagaaaataccgtcattaagtgagagaagagcagaaataattattccaggagcattgatattaaacacagcaatggagatgttgaactttgatgaattaataataagtgagagggcgcttcgagaaggtttggttgtagattggatgcttcgtaaagggataattaaaaatgagttaaatattcaaggcaatattagaagaacaactatagttcatcaggcgagaaagtttggagtagatgatacaagagctgagaaagttattgatattgcctttcaaatctatgatcagactaaaaatatcttttatagcgataatgaccccaaagctaaagaacttctttgggcagcttctaatctttatagttgtgggaaatatgtgaatgttggttcatatcacaaacactcttggtacctaataaaaaattgtgagttgttgggatattctgaagcagaaaccaatattattgcttcaattgctaggtaccatagaaagactctacccaagaaaagacatgagtcttggcaaaatttaatttccaaagaagataaaacattagttcttgaaatgtcattaatcctgagactagcggcagctcttgatcaaagacctgacaaggtgatctcctcagttcaaataaaattgcaggaaaataatcttacatttcaacttttacctttagatagaaaccatgatcttcttcttgaaaaatggaacttaggattatgccgtaatgtaataaaagaactaaagaatttggaattaaaagttatttag

SEQ ID NO: 54839 - protein, 531 aa, Prochlorococcus marinus str. AS9601
MIQKQDLRYFQEKQILVASIDIGTNSTHLLVAEINLELKSFSIKFTDKSTTRLGERDEEGNLTEESIQRALVTLKRFKEYCKSNGVKQIVTGATSAVREAPNGQDFIRRVLDETDIQIEMISGSEEARLIYLGVLSGMAFKDQSFVIIDIGGGSTELILADKKDAIALTSSRIGAVRLKNDFLNKESINSERSSFLTTFIKGSLEPSVRKIKSRSKGDKPLSLIATSGTATSLGNLISDDLGESKQKLHGYKFKRENLQNVLEKLLKLPVSEIKKIPSLSERRAEIIIPGALILNTAMEMLNFDELIISERALREGLVVDWMLRKGIIKNELNIQGNIRRTTIVHQARKFGVDDTRAEKVIDIAFQIYDQTKNIFYSDNDPKAKELLWAASNLYSCGKYVNVGSYHKHSWYLIKNCELLGYSEAETNIIASIARYHRKTLPKKRHESWQNLISKEDKTLVLEMSLILRLAAALDQRPDKVISSVQIKLQENNLTFQLLPLDRNHDLLLEKWNLGLCRNVIKELKNLELKVI

SEQ ID NO: 54840 - DNA, 1635 bp, Prochlorococcus marinus str. NATL1A
  CDS (1)..(1635): transl_table=11
atgttaggtgactcaataaataattcctctgaaaggaattctattgaattagatcttggcgaaaagcaagatgctgaattatgccgtgtggcaacaattgatattggcaccaactcaacgcatttattaattgcaaagattgaacgaaaattaaatacttttagtattgaacttgcagagaaatcgacaacacgactaggagaaagagatcctcagacaggagaacttacatcccttgctatgaatagggctttttcaacattaaagaggtttaaggatttatcagaaagttataaagttgagagtcttattattgccgctacaagtgcagttagagaagcaccaaatgggaaaatctttattgctgaaattaaaaagaagataggcttagatgttgaattgataagcggagcagaagaagcaagattgatttatctaggtgtactttcagggatgcaatttggaaataaacctcatctcgtcctagacattggaggaggttcgacagaattaatccttgctgatagctctgaggctcgagcattaacaagtacaaagattggagcagtaagattacaaagagaatttattaaaaaagatccaatatcctctcaaaatgaattgtttttaaggtcatttatcagaggctctatggagtctgcaattgataaagtatctaagagaattgaagcgggagaaataccagttttagtagcaactagtggaactgctatggctattgggtcgttactatctaataaagaaaatcatatgcaatcaaaattacaaggatataaaatcacaaaaaataatttagatataattgttagtcagttaattaaaatgacaccttctgaacggagtcaattatcctcattaagtgaaagaagatctgagattattgttccaggcgctttgattttgcaaaccataatgaatatggtcgatgttaatgaaattattttaagtgaaagagctcttcgggaaggattggttgttgattggatgtgtcgaaataattatttaaaagatcagctgagctttcaaggatcaattagagaaagaacagttattcatcaagcgaaaagatttggtgttaattcaaaacgatcaaaaagtgtatcagaatttgcacttactttttatgatcagactaagggggttttgcacaatgataatggtggaggtagagatcttttgtgggcagcagctaagcttcacgcatgtggtaaacaaattaacataagtgcctatcacaagcattcgtggtatttaatcaaaaatggagagctcttaggttattcccaaagtgagcatttaatggttgctgctattgcaaggtatcacaggaaaagttttccaaaaaaaagacatgaatcttggcaattattggttgatgaaagtcaaagaagtttggtagctgatatgtctttacttcttcgactttcatgctctttggatagaaggccagaacctttggtatccaaaatagttattgaagctaataacaagaaagttaatatagagctgattcctaataacttaggccaaaatttagatcttgagaaatggagcttaactaaggcaattttacttgttaaaaagattatggatgttgatataaatatactttaa

SEQ ID NO: 54841 - protein, 544 aa, Prochlorococcus marinus str. NATL1A
MLGDSINNSSERNSIELDLGEKQDAELCRVATIDIGTNSTHLLIAKIERKLNTFSIELAEKSTTRLGERDPQTGELTSLAMNRAFSTLKRFKDLSESYKVESLIIAATSAVREAPNGKIFIAEIKKKIGLDVELISGAEEARLIYLGVLSGMQFGNKPHLVLDIGGGSTELILADSSEARALTSTKIGAVRLQREFIKKDPISSQNELFLRSFIRGSMESAIDKVSKRIEAGEIPVLVATSGTAMAIGSLLSNKENHMQSKLQGYKITKNNLDIIVSQLIKMTPSERSQLSSLSERRSEIIVPGALILQTIMNMVDVNEIILSERALREGLVVDWMCRNNYLKDQLSFQGSIRERTVIHQAKRFGVNSKRSKSVSEFALTFYDQTKGVLHNDNGGGRDLLWAAAKLHACGKQINISAYHKHSWYLIKNGELLGYSQSEHLMVAAIARYHRKSFPKKRHESWQLLVDESQRSLVADMSLLLRLSCSLDRRPEPLVSKIVIEANNKKVNIELIPNNLGQNLDLEKWSLTKAILLVKKIMDVDINIL

SEQ ID NO: 54842 - DNA, 1647 bp, Prochlorococcus marinus str. MIT 9303
  CDS (1)..(1647): transl_table=11
ttgcctttcggtgtggttgatgtcgagcaggaggaggccaggtacgccagtgctggtcagctccgttctgagcgagagctccgcaatgttgctgcgattgatattggaaccaattccacccatctcctggtggcgtcggttgatccttctctgcacaccttcagcgttgatcttgcagagaaatcaaccacaagactgggtgagcgagaccctgactctggagagctcacgggtcctgctatggagcgggtatttgaaacactcaaacgttttaaggagctagccgccagccaccaggtggagcaggtggttgcgtcggcgactagcgcagtacgtgaagcttcaaatgggcgagattttttgcaacggattcaggatcagctcggccttgaggtggatctgttgagcggtgctgaggaagcacgactgatctatttgggtgttttgtctggcatgccttttggggagtgtccccatcttttgctcgatatcggtggcgggtccacagagctcatcctcgcggatggtcgcgatgctcgggctctgacaagcacgcgggttggtgcggttcggctacagagggattttgtcaagcatgaaccaatcccccctcaacggcgttcctttttgcagacatttatccagggttctttagagccagctgttgataaggtctgccgtcgcatcaatcctggggagagccctgtgatggttgccaccagtggaaccgccatggccatcggtgctttgttggctagcgaagatgatcgccctccgttgagattgcatggctatcgattctcacggcagcggcttgatggcctggttgagaagctgatagcgatgacgcctgagcagcgtcgcatccagacgccgattaatgatcgccgttccgaaatcatcgttccgggtgcgctgattcttcaaaccgccatgcagatgctcgctgctgatgagctggtgctgagtgaaagggctctgagggagggtttgatcgttgactggatgctgcgacacggcctactggaggatcgctttagttttcagagcagtattcgtcagcgcaccgtgattcatcaggtgcagcgttttgcagtgaatcaccgccgtgcagagcgtgtagccagccatgcactcagcctttacgaccacacacatggtgttcttcatcacgatgatggaggtggtcgggatctgctttgggcatcggcaatgttgcatgcctgtggtcagcacatcaatctcagtgcttatcacaagcattcctggtatctgattcgtcatggcgagttgctcggctattcggaagcggagcatttgatggttgcggctattgcgcgctatcaccgccgcagtcttcccaagaagcgccatctggaatggcaggctttggccacccgggagcatcgtcgtctcgttgccgagatggctttgttgctgcgattagcagcagccattgatcgtcgtcctgagccagtggtggctgcaatcagagtggagtccgctgatgatgatcaggttgtctttgaactcgtgccggaaggattgaatcagaacctcagccttgaacaatggagcttgaagagctgtgcttcggttgtgaaagaagcaagcggcgtaaccatgaaagttgtcgttgaggaatga

SEQ ID NO: 54843 - protein, 548 aa, Prochlorococcus marinus str. MIT 9303
MPFGVVDVEQEEARYASAGQLRSERELRNVAAIDIGTNSTHLLVASVDPSLHTFSVDLAEKSTTRLGERDPDSGELTGPAMERVFETLKRFKELAASHQVEQVVASATSAVREASNGRDFLQRIQDQLGLEVDLLSGAEEARLIYLGVLSGMPFGECPHLLLDIGGGSTELILADGRDARALTSTRVGAVRLQRDFVKHEPIPPQRRSFLQTFIQGSLEPAVDKVCRRINPGESPVMVATSGTAMAIGALLASEDDRPPLRLHGYRFSRQRLDGLVEKLIAMTPEQRRIQTPINDRRSEIIVPGALILQTAMQMLAADELVLSERALREGLIVDWMLRHGLLEDRFSFQSSIRQRTVIHQVQRFAVNHRRAERVASHALSLYDHTHGVLHHDDGGGRDLLWASAMLHACGQHINLSAYHKHSWYLIRHGELLGYSEAEHLMVAAIARYHRRSLPKKRHLEWQALATREHRRLVAEMALLLRLAAAIDRRPEPVVAAIRVESADDDQVVFELVPEGLNQNLSLEQWSLKSCASVVKEASGVTMKVVVEE

SEQ ID NO: 54844 - DNA, 1563 bp, Leptospira interrogans serovar Copenhageni str. Fiocruz L1-130
  CDS (1)..(1563): transl_table=11
atggttcaagaaaaacctctcgctgccatcgaccttggcaccaactcatttcacatgatcatcgttcgagttcgaacaaacggaactttcgaagccatcgctagagaaaaagaatcagttcgcttaggtaataggttgcaagaaaacggtccgatcgatccggaatcgtttcgtagaggaatcgattgtctcaaaagatttaagatcttagcagaaaacgcaggagcagaaatcagagccgttgctacaagcgcactacgagaagcttctaaccaagaagactttttagaaaacgcatatcaagaagcgggtatatccatcgatgtagtaagtggttatgaagaagcccgactcatttactttggaattctccaaggaattccagtttttgatcgaaaaatcatgatgatcgatataggcggaggaagtactgaaattttagtaggtcatagaggaaatattttattctctaaaagttttaaactgggggccatccgactttcagaaaaattctttaaagaagaaactctttctaactcggatgttcgtaaatgtagactttacatcgaagaaatgcttcttccttttcgaaaaattctcagagatttaaaaccggacttggtagtaggttcatctggaacgatacaatcgatcgcgggtatgattttagcatccagaggggaaacggaagaaatctctttaaacaatttctcatttacttcttccgaatttaaaaaaatccgtaatctaattttagaagcggatacttctaaaaaaagatccaagatcccaggtttagatagcaaacgagcagacatcatcgttggaggaactttgattttagaagaaatttttgatcttgcaaacgtttctgctttaaccgtttccgaattcgctcttcgagaaggaattgtatacgatacaattcgcaaatgggaacacttcgaaaacacagaacattctaaacacttagatgacatccgtcaaacagcagttcataattttatgaaatccttttctagagacgaagaattttcaaaacacgtcgctgaattaagtcttcagatttttgatcaattaaaaagtttgcataaactggggcaggaacaaagagaacttttagaagcggcttctcttttacacgaaatcggtcagtcgatttcacattccgcctatcataagcacagttattatatgatccgaaattcggaaatgcttttaggttttacttttttagaaattgaaatcatcgctttgaccgctcgttatcatagaaagaatactcctaaaattaaacacagggaatttaataagctcgctgaaaaaaatcaaaccttagtatgtcaactttctgcgatcctaagaattagctccgcgttaaaccgaaatcgaggtggactagtttcttcagtaatttgtaaaatcgaaaaaaatcagattcgttttattttagaatccagtaagggttacgatccttctttagaaatttgggccgcggaagaacaaaaggtggcgttcgaagaaaccttcggttattcagtggaatttgtaactggaacttaa

SEQ ID NO: 54845 - protein, 520 aa, Leptospira interrogans serovar Copenhageni str. Fiocruz L1-130
MVQEKPLAAIDLGTNSFHMIIVRVRTNGTFEAIAREKESVRLGNRLQENGPIDPESFRRGIDCLKRFKILAENAGAEIRAVATSALREASNQEDFLENAYQEAGISIDVVSGYEEARLIYFGILQGIPVFDRKIMMIDIGGGSTEILVGHRGNILFSKSFKLGAIRLSEKFFKEETLSNSDVRKCRLYIEEMLLPFRKILRDLKPDLVVGSSGTIQSIAGMILASRGETEEISLNNFSFTSSEFKKIRNLILEADTSKKRSKIPGLDSKRADIIVGGTLILEEIFDLANVSALTVSEFALREGIVYDTIRKWEHFENTEHSKHLDDIRQTAVHNFMKSFSRDEEFSKHVAELSLQIFDQLKSLHKLGQEQRELLEAASLLHEIGQSISHSAYHKHSYYMIRNSEMLLGFTFLEIEIIALTARYHRKNTPKIKHREFNKLAEKNQTLVCQLSAILRISSALNRNRGGLVSSVICKIEKNQIRFILESSKGYDPSLEIWAAEEQKVAFEETFGYSVEFVTGT

SEQ ID NO: 54846 - DNA, 1701 bp, Synechococcus elongatus PCC 6301
  CDS (1)..(1701): transl_table=11
gtgaggcccccgctgcatggcagactaggcctagcttggaaccctgcgcccatgagcaccgagattgcgccccacgcccgtccagcactccccagtgagctcgggccagaaccgattttggcagcaatcgatgtgggcacaaactccattcacatggtggtggtccagattcgtcccgacctgccggccttcgatatcgtcggcaccgagaaagccaccgtccgactgggcgatcgcgatcctgccacgggtgagttgaccgaggcggcgatggaacgggcactccaagcgctgcaacgctgtcgagcgatcgcggcggctcggggggccacgcaaattgtggctgtcgccaccagtgctgtgcgagaggctcccaatggtcgccaatttctcgagcgggtcatccatgaagtcggtttagaagtcgatctgatctcggggccagaggaagcacgacgcatctaccttggggtgctgtccggcatggattttcagcagcgacaccacgccatcattgatattggcggtggatcgaccgagctgattctgggagcggggcaagagccgctctgcctgaccagcacgaaggttggcgccgtccgtctcacccaagaattcattcacaccgacccaattagccccagcgagtacaccgtgctgcaagcctacgtgcgcggcatggtcgaacgggcggtcgatgaagtcaaagccgctctaccacccaacacgcccctacgactgatcggcacttccggcaccattcaagccctcgccgccctccatgcccaccaaagccaaggcagcttgccgaccaccttcaatggctacagcttagctcttggcgatctgcagcagttggtgcagcagttgcggcgtatgccctttgccgaacgtcagactttgcccgagctgtcggaacgacgagctgagattatcgttgcaggggcgatcgtgctgcaggaaaccatgcagctgttgggttgcgatcgcgtcaccatctgcgaacgggccttgcgcgaggggctgatcgtcgactggatgctcagccacggactgatcgaagacaagctgcgctatcagggatcggtgcggcagcgcagtgtctacaaccaagcgcgcaaatttcgggtagatgtcagtcacggcgagcaagtggcgcaattagccctcagcctgtttgaccaactgcgcggacaactacaccaatggggcgagagcgaacgggaactcctttgggcagccgccatcctgcacaattgcggccatcacatcgaccactcctcccatcacaagcattcctattacctgatccgccacgggggtctgctgggctacaacgagacggagattgaactgattgctaatctggctcgctatcaccgcaagagcctgcccaagaaaaagcacgaaaacttccgcaccctgcccaccaaggagcaacggcgcttggtagaacaactcagcgcgattctgcgggcggcagttgccctcgatcgccggcaggtaggagcgatcgcgagtcttcattgccgctaccttgctccgcaacggcagcttcttcttcaactgcatccggctcgaaccagtgaggactgcgccctcgaactctggagttttgactacaaccgccatgctttagaagccgcgtttgcaatcaatgtcgccgcagaactggtgccgcagccgctcagcgcagtctag

SEQ ID NO: 54847 - protein, 566 aa, Synechococcus elongatus PCC 6301
MRPPLHGRLGLAWNPAPMSTEIAPHARPALPSELGPEPILAAIDVGTNSIHMVVVQIRPDLPAFDIVGTEKATVRLGDRDPATGELTEAAMERALQALQRCRAIAAARGATQIVAVATSAVREAPNGRQFLERVIHEVGLEVDLISGPEEARRIYLGVLSGMDFQQRHHAIIDIGGGSTELILGAGQEPLCLTSTKVGAVRLTQEFIHTDPISPSEYTVLQAYVRGMVERAVDEVKAALPPNTPLRLIGTSGTIQALAALHAHQSQGSLPTTFNGYSLALGDLQQLVQQLRRMPFAERQTLPELSERRAEIIVAGAIVLQETMQLLGCDRVTICERALREGLIVDWMLSHGLIEDKLRYQGSVRQRSVYNQARKFRVDVSHGEQVAQLALSLFDQLRGQLHQWGESERELLWAAAILHNCGHHIDHSSHHKHSYYLIRHGGLLGYNETEIELIANLARYHRKSLPKKKHENFRTLPTKEQRRLVEQLSAILRAAVALDRRQVGAIASLHCRYLAPQRQLLLQLHPARTSEDCALELWSFDYNRHALEAAFAINVAAELVPQPLSAV

SEQ ID NO: 54848 - DNA, 1635 bp, Prochlorococcus marinus str. NATL2A
  CDS (1)..(1635): transl_table=11
atgttaggtgactcaataaataattcctctgaaaggaattctattgaattagatcttggcgaaaaggaagatgctgaattatgccgtgtggcaacaattgatattggcaccaactcaacgcatttattaattgcaaagattgagcgaaaattaaatacttttagtattgaacttgcagagaaatcgacaacacgactaggagaaagagatcctcagacaggagaacttacatcccttgctatgaatagggctttttcaacattaaagaggtttaaggatttatcagaaagttataaagttgagagtcttattattgccgctacaagtgcagttagagaagcaccaaatgggaaaatctttattgctgaaattaaaaagaagataggcttagatgttgaattgataagcggagcagaagaagcaagattgatttatctaggtgtactttcagggatgcaatttgggaataaacctcatctcgtcctagacattggaggaggttcgacagaattaatccttgctgatagctctgaggctcgagcattaacaagtacaaagattggagcagtaagattacaaagagaatttattaaaaaagatccaatatcctctcaaaatgaattgtttttaaggtcatttatcagaggctctatggagtctgcaattgataaagtatctaagagaattgaagcgggagaaataccagttttagtagcaactagtggaactgctatggctattgggtcgttaatatctaataaagaaaatcatatgcaatcaaaattacaaggatataaaatcacaaaaaataatttagatataattgttagtcagttaattaaaatgacaccttctgaacggagtcaattatcctcattaagtgaaagaagatctgagattattgttccaggcgctttgattttgcaaaccataatgaatatggtcgatgttaatgaaattattttaagtgaaagagctcttcgggaaggattggttgttgattggatgtgtcgaaataattatttaaaagatcagctgagttttcaaggatcaattagagaaagaacagttattcatcaagcgaaaagatttggtgttaattcaaaacgatcaaaaagtgtatcagaatttgcacttactttttatgatcagactaaggggattttgcacaatgataatggtggaggtagagatcttttgtgggcagcagctaagcttcacgcatgtggtaaacaaattaacataagtgcctatcacaagcattcgtggtatttaatcaaaaatggagagctcttaggttattcccaaagtgagcatttaatggttgctgctattgcaaggtatcacaggaaaagttttccaaaaaaaagacatgaatcttggcaattattggttaatgaaagtcaaagaagtttggtagctgatatgtctttacttcttcgactttcatgctctttggatagaaggccagaacctttggtatccaaaatagttattgaagctaataacaaggtagttaatatagagctgattcctaataacttaggtcaaaatttagatcttgagaaatggagcttaaataaggcaattttacttgttaaaaagattatggatgttgatataaatatactttaa

SEQ ID NO: 54849 - protein, 544 aa, Prochlorococcus marinus str. NATL2A
MLGDSINNSSERNSIELDLGEKEDAELCRVATIDIGTNSTHLLIAKIERKLNTFSIELAEKSTTRLGERDPQTGELTSLAMNRAFSTLKRFKDLSESYKVESLIIAATSAVREAPNGKIFIAEIKKKIGLDVELISGAEEARLIYLGVLSGMQFGNKPHLVLDIGGGSTELILADSSEARALTSTKIGAVRLQREFIKKDPISSQNELFLRSFIRGSMESAIDKVSKRIEAGEIPVLVATSGTAMAIGSLISNKENHMQSKLQGYKITKNNLDIIVSQLIKMTPSERSQLSSLSERRSEIIVPGALILQTIMNMVDVNEIILSERALREGLVVDWMCRNNYLKDQLSFQGSIRERTVIHQAKRFGVNSKRSKSVSEFALTFYDQTKGILHNDNGGGRDLLWAAAKLHACGKQINISAYHKHSWYLIKNGELLGYSQSEHLMVAAIARYHRKSFPKKRHESWQLLVNESQRSLVADMSLLLRLSCSLDRRPEPLVSKIVIEANNKVVNIELIPNNLGQNLDLEKWSLNKAILLVKKIMDVDINIL

SEQ ID NO: 54850 - DNA, 1650 bp, Methanosarcina barkeri str. Fusaro
  CDS (1)..(1650): transl_table=11
atggaacccgagaaaatctccgaaggcagagttgttgcgtttatcgatataggcactaactcgatccggcttcttctggtccggatcaatcccaatgggtcttacctgcccctgaccaagcagaaggaaacggtcagactcggggatggggaattcatagacaggattctgcagcctaaggcgatagaacgcgcagttgttgtctgtaaaaagttcatggaacttgccagagcctacagggcagaagaggtcatagctgtggctacctcagcaacgcgagatgcaagcaataaggttcagcttctcgaaatgttgaaaaaagaagcaaacctggaagtttgtacgatttccggaactgaagaagctcgcctcatttaccttggggtttcaagcgggcttcggctcgggaactcaaaagctctgttcatagatatcggaggcgggagcactgaagtatcagtaggggaccagatccaatgttattacctttattcctttaaccttggagctgtcaggctgacaaatatgtttttgccggacgaaaccgggcctgtttccgaggaacagtatgagcagattaaagcttatattcggcgcaagattacagatataataaaagacctttccgagtacgatataagctgttcaattggaagttcgggaacaattgaaaaccttgccaggatcgcttttgtctacctgcgcaaaacagcccgtgagagttttgagaaactggagtatgaagacctgaagaaaatagtcagggcaatgtgcgccatacccctcgaagagcggcgcaaattcccgggaatcaatgcgcaaagagcagatattattatcgcaggggctgcaattattgagacctttatggaagagatggagctttccgaaatcaggataagtaaacgcgggcttcgagaggggctgcttgtagactatatctcaaagagtgaattctcctacatgattacgcagatgtcggtaagaaaacgcagcattatgcagcttgggcttacctgcaatttcgatgaagaacatgctcataccgttaccagacttgctcttgagctctttgacagtattcaggctcttggaatttataaattcagagaaggagaaagggaacttcttgaatacggttccacattgcacgacatagggacattcctatcatatgatacccatcaggcccatgcctatcaccttataagggagagcaatcttccgggcttccagcctgaagaaatcgaaataatagcaaatcttgcctatttccacaggaaaaatacgcctaaaaagaaacatcccaatcttgtcgggcttaataaagatgtagtcaaaagtataaaagttctcagtgccctgctccgtattgccgaagggctggatcgttctcacaatggaattatttctcatgtccggttttacattgcttctaccgatagtctggtgcttgaaatgcacgcccagcgggagtgccagcttgaaatctgggaagtagagaagcagaaaaaatacttcaagaaaatattcggatacaatcttcagtctaaagttcttataaagcaagatgctggagttcccttagttcttgaaggagatgctgagcttgaggaacttccagatgtcaaaatgtcctcgaaaagttaa

SEQ ID NO: 54851 - protein, 549 aa, Methanosarcina barkeri str. Fusaro
MEPEKISEGRVVAFIDIGTNSIRLLLVRINPNGSYLPLTKQKETVRLGDGEFIDRILQPKAIERAVVVCKKFMELARAYRAEEVIAVATSATRDASNKVQLLEMLKKEANLEVCTISGTEEARLIYLGVSSGLRLGNSKALFIDIGGGSTEVSVGDQIQCYYLYSFNLGAVRLTNMFLPDETGPVSEEQYEQIKAYIRRKITDIIKDLSEYDISCSIGSSGTIENLARIAFVYLRKTARESFEKLEYEDLKKIVRAMCAIPLEERRKFPGINAQRADIIIAGAAIIETFMEEMELSEIRISKRGLREGLLVDYISKSEFSYMITQMSVRKRSIMQLGLTCNFDEEHAHTVTRLALELFDSIQALGIYKFREGERELLEYGSTLHDIGTFLSYDTHQAHAYHLIRESNLPGFQPEEIEIIANLAYFHRKNTPKKKHPNLVGLNKDVVKSIKVLSALLRIAEGLDRSHNGIISHVRFYIASTDSLVLEMHAQRECQLEIWEVEKQKKYFKKIFGYNLQSKVLIKQDAGVPLVLEGDAELEELPDVKMSSKS

SEQ ID NO: 54852 - DNA, 1653 bp, Anabaena variabilis ATCC 29413
  CDS (1)..(1653): transl_table=11
atggtgaatttagtttcatctagctgggagagtgtcaacactcaaccagttcagcaacaccggattattgctgccattgacatgggaaccaattctctgcacatggtagtggtaaagattgacccgacactaccagcttttagtattgtttccagagaaaaagaaacagtgcgactgggcgatcgcaatattaccactggggagttaaaaccacaggttatggcaaaagcgattgctacgttgaagcgctttcaagaagcagctaaaactgctaacgcggaagcattaattgctgtagcgactagtgcagtgcgagaagctcccaatggtaaagattttttacaccagatcgaaacagaattgggtttaagcgttgacttgatttctgggcaagaagaagcacgacgcatttacctgggtgttttgtcggggatggaatttcataaccaaccgcacctgattattgatattggtggtggttctacagaattgattttaggcgacactcaagaacctcgcaccctcaccagcacaaaagttggtgctgtacgactcacgagcgagttaatcaccacagaccccatcagcaatatcgagtttcaatacctgcaagcctacgccagggggatgttagaacgttctgtggaagaagtgctagctaacctgaatcctggcgaatctccccgtttaattggcacttccggcacaattgaaaccattgccatgattcatgcgcgggaaaaaacgggtacagtcccttctaccctcaatggctatcaattcaccctcaaagacttgcgagagtgggtaaatcgcctgcggagaatgacaaatgccgaaagagccgctatccctggaatgcctgaaaagcgttctgaagtcatactcgccggcgctgtcatcttgcaagaagctatgaccctgttgggtgtggagtcattaaccgcttgtggtcgcgcattacgggaaggggtaattgttgactggatgttaagccacggcttaattgaagacagattgcggtttcaaagttcgattcgccagcgtagtgtcctcaaacaggccagcaagtatcaagttaacttagagtatagcgatcgcgtagccacatttgccctgagtttatttgaccaaacccaaggactactacaccactggggcagcaacgaacggcgattactttgggcggcagcaattttacacaactgcggccatcatgtcagccattcatcccaccacaaacattcctactatctcattcgcaatagtgaactactcggttacaacgaaaccgagatcgaaatcattgccaatttagcccgttatcaccgcaaatcaccgcccaagaaaaagcatgaaaattaccgaaacctattgagtaaagagcatcggcaaatcgtgagccaattaagtgcgctgttaagattggcagtagcattagataggcgacaaattggggcgatcgctcaaatcaaatgtgattattatcaccacttccagcagtttaacttactcatctatccatctcgacccgatgacgattgcgctttagaactatggagtttagactacaaaaaagcagtctttgaagcagaatttggcgtgaaattactcacccatttagaaaaaaatctacttcctaatttctcctaa

SEQ ID NO: 54853 - protein, 550 aa, Anabaena variabilis ATCC 29413
MVNLVSSSWESVNTQPVQQHRIIAAIDMGTNSLHMVVVKIDPTLPAFSIVSREKETVRLGDRNITTGELKPQVMAKAIATLKRFQEAAKTANAEALIAVATSAVREAPNGKDFLHQIETELGLSVDLISGQEEARRIYLGVLSGMEFHNQPHLIIDIGGGSTELILGDTQEPRTLTSTKVGAVRLTSELITTDPISNIEFQYLQAYARGMLERSVEEVLANLNPGESPRLIGTSGTIETIAMIHAREKTGTVPSTLNGYQFTLKDLREWVNRLRRMTNAERAAIPGMPEKRSEVILAGAVILQEAMTLLGVESLTACGRALREGVIVDWMLSHGLIEDRLRFQSSIRQRSVLKQASKYQVNLEYSDRVATFALSLFDQTQGLLHHWGSNERRLLWAAAILHNCGHHVSHSSHHKHSYYLIRNSELLGYNETEIEIIANLARYHRKSPPKKKHENYRNLLSKEHRQIVSQLSALLRLAVALDRRQIGAIAQIKCDYYHHFQQFNLLIYPSRPDDDCALELWSLDYKKAVFEAEFGVKLLTHLEKNLLPNFS

SEQ ID NO: 54854 - DNA, 1638 bp, Synechococcus sp. CC9605
  CDS (1)..(1638): transl_table=11
atgctggatgccaaggccccagcccagccaacggaacagaccaacggtgtgcctcaggcagtgaacgccgatctgcgtcggatcgccgccatcgatatcgggaccaattcctttcaccttctagtggcagccgttgatccgaaactgcgcacgtttcggatcatccaggccgaaaaggccaccacgcgtctgggggagcgtgatcctgagaccggtgagctgaccgaggcggcgatgcaacgggggctggaaacccttcgccagttccgagatctcgccgccagtcaccgggttgagcagatcgtcacagcggcaacgagtgccgttcgggaagcacccaatggtcgcgatttcctccagaccatccttgacgatctggggatggaggtggatttggtcagtggccctgaggaggcccggctgatctacctgggcgtcctctcaggaatgccgtttggagatcgtccgcatcttctgctcgacatcggcggtggctccacggaactgatcctggccgatggtcgtgatgcccgcgccctgaccagcacccgtgtgggggctgtgcgacttcagcgggactttgttcgggatgatccgatgcccccccaacggcgatcgttcctgcgggccttcattcaggggtctcttgaacctgcggtcgacaaagtccgtcgcaggattaaacccggtgaaatcccagttttggtggccaccagtggcacagcgatggccattggctcccttgccgcgagtgaggaggagcgcccaccccgcaaattgcatggctaccgcgtcacacggcagtgcctggacaaggtggttgatcggttgatcacgatgacccctgctcagcgacgggagttggcgtccatcaatgatcgtcgggccgaaatcattgttcccggcgcgctgatcctgcaaaccaccatgaagatgctgggggtggaggatttcgtgctcagtgagcgggcgctcagggagggtctgatcgttgattggatgcttcgtcagggtcttctggaagaccgcttcagctttcaaagcagcatcaggcaacgcaccgtgatccatcaggtgcagcgctttgcggtgaaccagagcagggctgaacgggtcgccagccatgccctcagcctctacgacgccacgcgaggcgtgatgcatgacgacagtggcgaagggcgcgaactgctttgggctgcagccatgctccattcctgtggccagcacatcaacatcagcgcttaccacaagcacacctggtacttgattcgtcatggtgagctgctgggttattccgaggcggagcatctgatggtggcggcgattgctcgctatcaccgccgcagcctgccgaagaaacgccatgagtcctggcagcttgtggccacccgagacaaccgccgttgtgttcagcagatggccctgctgctgcgcttggccgcggcattggatcgcaggcctgagcctgtgatctcagcactgcgcattcacgcggtgaatggaactctggatctggagatcgtccctgagcggatcaatcagaacgtcagccttgaacagtggagcttggagagctgcgctgaggtggtgaaagaggcggtcggggtggagctgcgcgtcagcgttcagggttga

SEQ ID NO: 54855 - protein, 545 aa, Synechococcus sp. CC9605
MLDAKAPAQPTEQTNGVPQAVNADLRRIAAIDIGTNSFHLLVAAVDPKLRTFRIIQAEKATTRLGERDPETGELTEAAMQRGLETLRQFRDLAASHRVEQIVTAATSAVREAPNGRDFLQTILDDLGMEVDLVSGPEEARLIYLGVLSGMPFGDRPHLLLDIGGGSTELILADGRDARALTSTRVGAVRLQRDFVRDDPMPPQRRSFLRAFIQGSLEPAVDKVRRRIKPGEIPVLVATSGTAMAIGSLAASEEERPPRKLHGYRVTRQCLDKVVDRLITMTPAQRRELASINDRRAEIIVPGALILQTTMKMLGVEDFVLSERALREGLIVDWMLRQGLLEDRFSFQSSIRQRTVIHQVQRFAVNQSRAERVASHALSLYDATRGVMHDDSGEGRELLWAAAMLHSCGQHINISAYHKHTWYLIRHGELLGYSEAEHLMVAAIARYHRRSLPKKRHESWQLVATRDNRRCVQQMALLLRLAAALDRRPEPVISALRIHAVNGTLDLEIVPERINQNVSLEQWSLESCAEVVKEAVGVELRVSVQG

SEQ ID NO: 54856 - DNA, 1542 bp, Geobacter metallireducens GS-15
  CDS (1)..(1542): transl_table=11
gtgaagaagaaccggcttgcagccatcgatatcgggaccaactccatccgctgcatcgtggtggaggtgacgaagaccggctccttccgcgtcctggacgacgagaaggccacggtgcgcctgggggaggggctggccgccagcggttccctctcgcaggccgcctgggagcgagccgtgacggctctcacgcggatgaagaagatcgtggacggctacggcgtgaaggccatcgaggcggtggccacgagcgcggttcggaaggccgccaacggcgcggcgttcatcgctgccatcgccgagcaggtgggggttgcggtggtagtcatcagcggcgaggaggaggcggagctggcggccctctcggtgcggaaccacttcgacatggaaggcgcccgttacgccatggtcgacatcggcggcgggagcctggaggtggtgtcggcccttggcacccacatcgaggagatctattccctggagctgggggcggtctttctcaccgagaagttcatggcgggggattccgcgcggcagcccggtcaggataagctccgcaaatacgtccgctcaagcctcaaggaggtctttgccggggagcggtcccagttccagtgcctcgtgggctccggcggcaccatcaccgcgatcgcagccatggtcatggccatgcggggggaggggtacggctcggtccaccgctacgaggtgctccgttccgaggtggtgcacctcctcgccatgctggcgcgcaaaacggtaaaggagcggcgggaggtgccggggctcaacccggaccgggccgacatcatcgtggccggggtcacggtggtggacgagctcatgcgctttttcgacgccaacgttctgcgggtcaacgagcggggaatacgggaagggctcatcgtcaaggcgcttcgcacccacggcctcatccccggcgcggcggagccccggacctggcgcgacgcggtgctggagttcggccgctcctgtcacatggacgaggatcatgccctccacgtgaccaagctggcgctcaaactcttcgacgcgctggagccggcctacgggctgggggccggggcgcgtcggatgctggaggcggccgccatcctccacgacgtggggtacttcatcaactattccagccaccacaagcattcctaccatctcatccgtcacgccgacctcttcggcttcacccctcgggagcgggagatcattgccaacgcggcccgctatcaccgcaaggctctccccaagaagaagcacgacgcctacgtgcgcctcgccgagcccgaccggcagctggtgagccgcctggggggggttcttcggctggccgacggcctcgaccggcgccgcagcggtgtcgtctccggcgtcacctgctccgtttccaacggcacggtcatcgtcaccatcgccagcagcgaggatatctcggtggagctcttcggcgggaagattaagggtgatctcttcgaggaggcgttcaggaagcggcttctcctcgtggcagagcacacccagagttaa

SEQ ID NO: 54857 - protein, 513 aa, Geobacter metallireducens GS-15
MKKNRLAAIDIGTNSIRCIVVEVTKTGSFRVLDDEKATVRLGEGLAASGSLSQAAWERAVTALTRMKKIVDGYGVKAIEAVATSAVRKAANGAAFIAAIAEQVGVAVVVISGEEEAELAALSVRNHFDMEGARYAMVDIGGGSLEVVSALGTHIEEIYSLELGAVFLTEKFMAGDSARQPGQDKLRKYVRSSLKEVFAGERSQFQCLVGSGGTITAIAAMVMAMRGEGYGSVHRYEVLRSEVVHLLAMLARKTVKERREVPGLNPDRADIIVAGVTVVDELMRFFDANVLRVNERGIREGLIVKALRTHGLIPGAAEPRTWRDAVLEFGRSCHMDEDHALHVTKLALKLFDALEPAYGLGAGARRMLEAAAILHDVGYFINYSSHHKHSYHLIRHADLFGFTPREREIIANAARYHRKALPKKKHDAYVRLAEPDRQLVSRLGGVLRLADGLDRRRSGVVSGVTCSVSNGTVIVTIASSEDISVELFGGKIKGDLFEEAFRKRLLLVAEHTQS

SEQ ID NO: 54858 - DNA, 1650 bp, Synechococcus elongatus PCC 7942
  CDS (1)..(1650): transl_table=11
atgagcaccgagattgcgccccacgcccgtccagcactccccagtgagctcgggccagaaccgattttggcagcaatcgatgtgggcacaaactccattcacatggtggtggtccagattcgtcccgacctgccggccttcgatatcgtcggcaccgagaaagccaccgtccgactgggcgatcgcgatcctgccacgggtgagttgaccgaggcggcgatggaacgggcactccaagcgctgcaacgctgtcgagcgatcgcggcggctcggggggccacgcaaattgtggctgtcgccaccagtgctgtgcgagaggctcccaatggtcgccaatttctcgagcgggtcatccatgaagtcggtttagaagtcgatctgatctcggggccagaggaagcacgacgcatctaccttggggtgctgtccggcatggattttcagcagcgacaccacgccatcattgatattggcggtggatcgaccgagctgattctgggagcggggcaagagccgctctgcctgaccagcacgaaggttggcgccgtccgtctcacccaagaattcattcacaccgacccaattagccccagcgagtacaccgtgctgcaagcctacgtgcgcggcatggtcgaacgggcggtcgatgaagtcaaagccgctctaccacccaacacgcccctacgactgatcggcacttccggcaccattcaagccctcgccgccctccatgcccaccaaagccaaggcagcttgccgaccaccttcaatggctacagcttagctcttggcgatctgcagcagttggtgcagcagttgcggcgtatgccctttgccgaacgtcagactttgcccgagctgtcggaacgacgagctgagattatcgttgcaggggcgatcgtgctgcaggaaaccatgcagctgttgggttgcgatcgcgtcaccatctgcgaacgggccttgcgcgaggggctgatcgtcgactggatgctcagccacggactgatcgaagacaagctgcgctatcagggatcggtgcggcagcgcagtgtctacaaccaagcgcgcaaatttcgggtagatgtcagtcacggcgagcaagtggcgcaattagccctcagcctgtttgaccaactgcgcggacaactacaccaatggggcgagagcgaacgggaactcctttgggcagccgccatcctgcacaattgcggccatcacatcgaccactcctcccatcacaagcattcctattacctgatccgccacgggggtctgctgggctacaacgagacggagattgaactgattgctaatctggctcgctatcaccgcaagagcctgcccaagaaaaagcacgaaaacttccgcaccctgcccaccaaggagcaacggcgcttggtagaacaactcagcgcgattctgcgggcggcagttgccctcgatcgccggcaggtaggagcgatcgcgagtcttcattgccgctaccttgctccgcaacggcagcttcttcttcaactgcatccggctcgaaccagtgaggactgcgccctcgaactctggagttttgactacaaccgccatgctttagaagccgcgtttgcaatcaatgtcgccgcagaactggtgccgcagccgctcagcgcagtctag

SEQ ID NO: 54859 - protein, 549 aa, Synechococcus elongatus PCC 7942
MSTEIAPHARPALPSELGPEPILAAIDVGTNSIHMVVVQIRPDLPAFDIVGTEKATVRLGDRDPATGELTEAAMERALQALQRCRAIAAARGATQIVAVATSAVREAPNGRQFLERVIHEVGLEVDLISGPEEARRIYLGVLSGMDFQQRHHAIIDIGGGSTELILGAGQEPLCLTSTKVGAVRLTQEFIHTDPISPSEYTVLQAYVRGMVERAVDEVKAALPPNTPLRLIGTSGTIQALAALHAHQSQGSLPTTFNGYSLALGDLQQLVQQLRRMPFAERQTLPELSERRAEIIVAGAIVLQETMQLLGCDRVTICERALREGLIVDWMLSHGLIEDKLRYQGSVRQRSVYNQARKFRVDVSHGEQVAQLALSLFDQLRGQLHQWGESERELLWAAAILHNCGHHIDHSSHHKHSYYLIRHGGLLGYNETEIELIANLARYHRKSLPKKKHENFRTLPTKEQRRLVEQLSAILRAAVALDRRQVGAIASLHCRYLAPQRQLLLQLHPARTSEDCALELWSFDYNRHALEAAFAINVAAELVPQPLSAV

SEQ ID NO: 54860 - DNA, 1518 bp, Acidobacteria bacterium Ellin345
  CDS (1)..(1518): transl_table=11
atgccaaccttcgccgctgtcgatattggatcgaactccgtccggctcaagatagctgctctcaaccgtcggcgactggaaaccctttttgaagatcgggaagtgacgcgcctgggcgagtctgtgttccgcgccggattgctggatccgcgcgcgatggaacagaccgtaaaggtgctgcggcgctttcatcgcgcggtgcagcagcacggggcagatcgcgtccgagtggtggcaacgagcgcgctacgcgatgcgcgcaacggcaacgcgttcctgcagtgggtgcgggcatcgactggctggcagtgtgaggtgatctcggggctggaagaaggccgcctgattcaccttggcgtgatggccggaagtcggattaagagctcgccgatgctgctgattgaccttggcggcggcagttgcgaattgaccatctcggtgaaggagcagatcgagaaaatcgtcagcttgcccctgggtgcggtgcggctcacaaagcagtttctcgagcacgatccgccgaagaagaaagagctaaaggaactgcgggcgttcatcgcagaggagatcgggcgcgtcgcgaagcaaatgttgcaggcgaaggtaaaaatgacggtagcaacatcgggcacgcccgcggcgctctccgacatgtgggcagcgcgcgaacgcaagcatacgaccaccgttccgcgggctggactgctggagttgacgcacgagttgagtcgcatgacgctggcgcagcgccggacggtccagggagttggcactcgacgagcggagatcatcattgccggcgcggttgtcttctcggagttgctgacgcacttgaagctgggaagctttcgatatctgcccctgggattgcgcgatgggatgctggcgcagatggcggcggagcacgaccagcgcgccgatctccggacgcggttggtggcagagcgagagaagtcggtgtatgaccttggcacgcattttggagttgatcatcggcatgccgaacgcgtgcgcgatcatgcggtgcggttgttccaggcgttgaaaccggtgcatggattgccctcgcagtacgagcagtgggtggcggcagcgtccatgctggccgaggtgggatcgttcatcaatcgctcaggacgacatcggcatacttactacgtgatctcgaattcggaaattttcggttacacggtgcagcagcgcagggtcatcgcggcgatcgcgcggttcgtgggcggttcgaagccgacactgcagagccggcaactccgggtgctgtcgccacaagaccggcctttgattccgcgggcggtgctgctgttgagaatggcccgcgcgctggaacagggacgtcgtggggcagtgaagggaatcaaggcgcgagtggaagcggatcgcgtgctgctggcagtggatgagcggtccacgggcgcggaactggagatctgggcgctgcgcaaagagcgcgcttacttccgcgaagtttttggcagggatttgctgtgcgcggaaccgtag

SEQ ID NO: 54861 - protein, 505 aa, Acidobacteria bacterium Ellin345
MPTFAAVDIGSNSVRLKIAALNRRRLETLFEDREVTRLGESVFRAGLLDPRAMEQTVKVLRRFHRAVQQHGADRVRVVATSALRDARNGNAFLQWVRASTGWQCEVISGLEEGRLIHLGVMAGSRIKSSPMLLIDLGGGSCELTISVKEQIEKIVSLPLGAVRLTKQFLEHDPPKKKELKELRAFIAEEIGRVAKQMLQAKVKMTVATSGTPAALSDMWAARERKHTTTVPRAGLLELTHELSRMTLAQRRTVQGVGTRRAEIIIAGAVVFSELLTHLKLGSFRYLPLGLRDGMLAQMAAEHDQRADLRTRLVAEREKSVYDLGTHFGVDHRHAERVRDHAVRLFQALKPVHGLPSQYEQWVAAASMLAEVGSFINRSGRHRHTYYVISNSEIFGYTVQQRRVIAAIARFVGGSKPTLQSRQLRVLSPQDRPLIPRAVLLLRMARALEQGRRGAVKGIKARVEADRVLLAVDERSTGAELEIWALRKERAYFREVFGRDLLCAEP

SEQ ID NO: 54862 - DNA, 1518 bp, Myxococcus xanthus DK 1622
  CDS (1)..(1518): transl_table=11
atgccttctcgcccccctccgcccgtactcgccgccattgacgtgggcaccaacgccgtccgtctggagctggcacggccagacgccgacggcgcgctcgaaaccatgcaccaggagcgcgacgccatccgcccgggagagggcgtcttcgccaccggctccatgccggaggagacggccgagcgcctgctggccaccctgcgccgctacgccgccctctgccgccgccacaaggcccaggtgcgcgccgtggccaccagtgccatgcgcgaggccaagaacagcgccgacatcgtccgccgcgtgcgcgaggaggccggcctcaacctggaggtcgtcagcggaaaggaagaggcccgcctcatctgcctgggcgtgctccaccgcaagccgtcccagacgcgctcgctcctcatcgacatcggcggcggcagcaccgaaatcgtcaccgccatgggcgagaagcccgacaacctttggagcctcgcgctgggctccgtgcgcctcaccgaggtcttcgacgcctcgcgcaccgtgccgcccaagcaactgcgcctcatgcgcagcttcgtctcggacgtgctgcaaaagacgctgccccccacggtgcccaacgtcccccgtgtggcgctgggctcgtccggaaccatcaacgccgtggtgtccttcgccgccgcggagaacagcggcaacgccaccgtccgacagctcacgcagacggtggacaccctggcgcagatgcctcccgagcgccgccgcaagcgcttcgacccgcgccgcgctgacatcatcgtctccggcgctgtcatcctggaaggcgtggccaggcacctgggcgtcgagtccgtcagcgtcgtcaaccgcggccttcgcgacggcatcctcgtggacctgctctaccggcaggatgagcaccgcgaggaccacagcctcgcggacgccgccctggccctgggcaagcgcttctacttcgacgagaagcacgcccgccaggtcgcccggctgtcactcaccctgttcgacaacctggccgccctgcaccagttgccgctgtcggtgcgctcccacctggaggtcgccgccctcctccacgacgtgggccacgccgtcagctacgagcggcaccacaagcacacgtactacctcatccgccacgccgacctgccgggcctcgccgaccgcgagcgcgagctggtggcccgcgtcgcccgctaccaccggcgcagcccgccggagctgacccacgccggcatggcgggcctcaatccggccgaggcacggacggtgcgcaagctggccaccttgctgcgcgtggccaactcgctggacgtcagccaccaccagcccatcaaggacttcaaggccaccaacggccgcgatggcgtggcgctgcacctgcacacccggcaccccgtggacctggagctgtggaacgcggaccgcgaggtcctgaacttccgccgcgtcttcggcaagcggctcaccttccacgtccaccacgcatccagcggccgctag

SEQ ID NO: 54863 - protein, 505 aa, Myxococcus xanthus DK 1622
MPSRPPPPVLAAIDVGTNAVRLELARPDADGALETMHQERDAIRPGEGVFATGSMPEETAERLLATLRRYAALCRRHKAQVRAVATSAMREAKNSADIVRRVREEAGLNLEVVSGKEEARLICLGVLHRKPSQTRSLLIDIGGGSTEIVTAMGEKPDNLWSLALGSVRLTEVFDASRTVPPKQLRLMRSFVSDVLQKTLPPTVPNVPRVALGSSGTINAVVSFAAAENSGNATVRQLTQTVDTLAQMPPERRRKRFDPRRADIIVSGAVILEGVARHLGVESVSVVNRGLRDGILVDLLYRQDEHREDHSLADAALALGKRFYFDEKHARQVARLSLTLFDNLAALHQLPLSVRSHLEVAALLHDVGHAVSYERHHKHTYYLIRHADLPGLADRERELVARVARYHRRSPPELTHAGMAGLNPAEARTVRKLATLLRVANSLDVSHHQPIKDFKATNGRDGVALHLHTRHPVDLELWNADREVLNFRRVFGKRLTFHVHHASSGR

SEQ ID NO: 54864 - DNA, 1635 bp, Trichodesmium erythraeum IMS101
  CDS (1)..(1635): transl_table=11
atgattacatcagttcctttagttagatttcctgctccactagcaggccaaaacccgatattagcagcaatagatattggtacaaattcgttgcacttggttgtagtaaaaattgatcctaatttgccgacttttactattattgaccaagataaagaaacagtaagactaggagagtgcggcacgaaaggtaacttaaaaccagaagtgatggatagagcgatcgctactttagagcgtttccaacaaattgctaaaagtgctaatgctaaacaaatcattacagttgctactagtgctgtaagagaagcacctaacggtaaagaatttctcaatagaatagctgatgagttaaacctatatgttgacttgatatctggtcaagaagaagcacgacgaatttatctaggggtactttcagcaatggaatttaataaccaaccccatgttattattgatattggtggaggttccacagagttgatcttaggtgatagtgatacactgagaactctaagtagtacaaaagtaggtgcagtacgtctgactaaagaatttgttaccacaaatcccgttagtaagagtgagtttgcctatctgcaagcttacattagaggcttattagaacgcccgaccaaaaacatattagctaatatcaagaaaggtgaaaaacctcagttagtcggaactgctggtactattgaagctttagcgactattaatgcttatgaaaaattgggtaatgtaccagctcccctgggtggttatcagtttagtttgacagaattagaggagttggttaataagttgaggaagttacctatttctaaaagacgagaaattctgggaatgtccgaaaagcgagcagaaattattttggcgggtgctttagtgttacacgaagcaatgagtttattagagatggagtcggtgactgtgtgtgaaagcagtttgcgagagggggtaatagttgattggatgttgaatcatggtttgattgaggatcaccttcgtttccaaagttcaattcgccaacgaaatactctaaaaattgcgcaaaaataccaggttaatttggagtatagcgaacgggttgctttttgggcgttatatttatttgaccaaactatgggagttctgcataactggggaagtgaggaacgagaattgttatggtcagcagcaattttgcataattgtggtatatatgtaaatcattcagaacatcataaacattcctactatttgatcagaaatggggagttattggggtatactcaaattgaaattgaagttattgctaatttagctcgttatcaccgcaagagtttatgcaagaaaaaacacgaccattatcaaattttacccaaaagatatcaagaaatggtgtctcagttgagttcattgttacgtttagcggtagctttagataggcgacaaaaaggggcgatagctaatttgacctgttggttaaacacaaagcaacaggaatttcatctctggttacggcctgctaaccctaaagatgattgtgctttagaattgtggagtttggaaaataagaaggaggcctttgaaaaagagtttggtttaaaattaatagtaaatttagaatctgcctcgttagtaacttga

SEQ ID NO: 54865 - protein, 544 aa, Trichodesmium erythraeum IMS101
MITSVPLVRFPAPLAGQNPILAAIDIGTNSLHLVVVKIDPNLPTFTIIDQDKETVRLGECGTKGNLKPEVMDRAIATLERFQQIAKSANAKQIITVATSAVREAPNGKEFLNRIADELNLYVDLISGQEEARRIYLGVLSAMEFNNQPHVIIDIGGGSTELILGDSDTLRTLSSTKVGAVRLTKEFVTTNPVSKSEFAYLQAYIRGLLERPTKNILANIKKGEKPQLVGTAGTIEALATINAYEKLGNVPAPLGGYQFSLTELEELVNKLRKLPISKRREILGMSEKRAEIILAGALVLHEAMSLLEMESVTVCESSLREGVIVDWMLNHGLIEDHLRFQSSIRQRNTLKIAQKYQVNLEYSERVAFWALYLFDQTMGVLHNWGSEERELLWSAAILHNCGIYVNHSEHHKHSYYLIRNGELLGYTQIEIEVIANLARYHRKSLCKKKHDHYQILPKRYQEMVSQLSSLLRLAVALDRRQKGAIANLTCWLNTKQQEFHLWLRPANPKDDCALELWSLENKKEAFEKEFGLKLIVNLESASLVT

SEQ ID NO: 54866 - DNA, 1611 bp, Synechococcus sp. CC9311
  CDS (1)..(1611): transl_table=11
gtgcttcaagtgacagcagggccgagctttcaaaacggtcggaccttgcggaagattgccgcgatcgatatcggcaccaattccacccacctcttggtggcctctgttgatcctgagctacgaacgttcagcatcgagttagcggagaagtccaccactcgattaggggaaagagatccagagacaggcaatctctcagaggcggcaatcgagcgaggcctcaaagcgctgcgtcgttttcgcgatctcgctctgagtcaccaggtcgaacagatcgtgaccgctgccaccagcgcggtgcgtgaagcccctaatggtcgggactttttgcaagagattcaggatcagctcgatcttgaagtggatctcgtcagtggcccagaagaagcccgcttgatctacttaggcgtgctctcaggcatgccttttggagactgtccgcatcttgtgctggacatcggaggcggatccacagagctgattcttgcggatggtcgcgatgcgcgagcactcaccagtacaagggttggcgcggtgcgacttcagcgagactttgtcacagatgacccaatgcctccgcaacgtcgaacctttcttcaagcgtttatccaagggtccctagagcccgcggtcaacaaagtgctgcggcggattactcctgaagaaacgcccgtgatggtggccaccagtggcaccgcgatggccataggagcgatagccgcgagtgaggaggatcgtccaccgctgaagcttcacggctatcgggtgagcaaacaacgtctcgacagggtggttgatcgcttggtgatgatgacaccagaccaacgcaaaggattggcacccatcaacgatcgacgcgcggagatcattgttccaggtgccttaattctgcaaaccagcatgcagatgttgagagttaaagaattggttctgagtgaacgcgctctccgcgaaggcctcatcgttgattggatgttgcgtcacggccttctagaagaccgtttcagctttcaaagcagcattcgacagcgcaccgtgatccatcaggtgcagcgttttgccgtcaatcagcaacgagccgagcgtgtggcttcccatgcactcactctgtatgacaacaccaaagaccatctacaccgtgacgatggctcaggccgcgacttgctatgggctgcagcgatgcttcacgcctgcggccaacacatcaatctcagcgcctatcacaagcactcctggtatctgatccgccatggcgaactgctgggctattccgaagcagagcatctgatggtggctgcgatcgcgcgttatcaccgccgcagtcttcccaaaaagaggcatgagtcttggcaggcgcttcaaacccgtgacaatcgacgcacagtctcagatatggccttactgctcagactggcagttgccctcgatcgacgtccagagccggtggtcaaaagcttgctggtcaaagtcaaaaatgaagatcttgtgctcgagttggtcggggaaaaggcagatcaagatttcagtctcgagcagtggagcctggagagttgtgcaccaattctgagggaggtcgctggtttgaacctcacgctcaaggttcaggagtga

SEQ ID NO: 54867 - protein, 536 aa, Synechococcus sp. CC9311
MLQVTAGPSFQNGRTLRKIAAIDIGTNSTHLLVASVDPELRTFSIELAEKSTTRLGERDPETGNLSEAAIERGLKALRRFRDLALSHQVEQIVTAATSAVREAPNGRDFLQEIQDQLDLEVDLVSGPEEARLIYLGVLSGMPFGDCPHLVLDIGGGSTELILADGRDARALTSTRVGAVRLQRDFVTDDPMPPQRRTFLQAFIQGSLEPAVNKVLRRITPEETPVMVATSGTAMAIGAIAASEEDRPPLKLHGYRVSKQRLDRVVDRLVMMTPDQRKGLAPINDRRAEIIVPGALILQTSMQMLRVKELVLSERALREGLIVDWMLRHGLLEDRFSFQSSIRQRTVIHQVQRFAVNQQRAERVASHALTLYDNTKDHLHRDDGSGRDLLWAAAMLHACGQHINLSAYHKHSWYLIRHGELLGYSEAEHLMVAAIARYHRRSLPKKRHESWQALQTRDNRRTVSDMALLLRLAVALDRRPEPVVKSLLVKVKNEDLVLELVGEKADQDFSLEQWSLESCAPILREVAGLNLTLKVQE

SEQ ID NO: 54868 - DNA, 1536 bp, Solibacter usitatus Ellin6076
  CDS (1)..(1536): transl_table=11
gtgccccgctacgcagctatcgatatcggcagtaactccatccgaatggaggccgcggaggttgtgcccgggctgccgacgcggattctggcgtccgaccgcgaggtcacgcggctgggggagagcgtcttccgtacgggtgcggtcagtgaagagtacatcaaggcaacttgcaccgtactgtcgcggatggcggaactctaccgcaagctggatgtggtgggagtgcgggcggtggccacgagcgcgatccgcgacacgcgcaatcagcgcgagtttctggcgcgcgcggcggaggccgcgggcacctcggtcgaaatcatctcgggccgggaagaggcgcggctgattcacctgggggtggagagcgtctggccgcaagccgataagcgcgtgttgatcatcgacatcggcggcggcagcgcggagatcatcgcggccgatcgggggcggctcatcgaggcgtactccaagccgctgggcgcggtacggctgcgcgagagttttctgaaggacgacccaccaggcggccggcaactgcaccagatgcgggaatacattcaggccaagctggataccgcggtacggcggctgggccacaccggatgggatcgcgtgatcgcgacctcggcgacggcatcggcggtggcgagcgcggtggcgcgtgccccccgttccaagcgcgacgaggtagaccgcctgcgggtcaccacctcgcaagtgcgcaagctctacgcgcggatttctgagttgggcctcacggcgcggcgcaaggtcaccggcattgggccgcggcgcgcggagatcatcgtgcccggtgtcgcggtactgctcgagtttttgcaggagttccacctgccggctttttcctattcgcgcgctggggtgcgagacggcatcatcgccgacctggccgctcgcaatgtgggggccgagctctcgcggctgaatcgcgaccagcgccgcgaggtcgaggagttgggacgccggtatggcgtgtcgctggagcatgcgcgcaaagtcgccgatctggccaaccttttgttctgtgcgttacaaccgctgcaccacttaccgaccggttgcggcaaactgttggaagcggctgcgtatctgctggacgtgggccattacgtgagttccgtgagccatcacaagcactcttactacgttgtctcgaattcggacatggcagggttcacggatcgcgagcgattcctgatcgcagcgctgtgccgctaccatcgcaagtccctgcccagccaggtgcacggaatttatcaggcgctctcggccgacgagcggcgcatgctgatgttactcatcccgattctgcggctggcatataatctcaatcgcagtcgcgaacaccggattcgcggggtcgattgccggttgcgcgatggcgaagttgtcctgcaagtgcgctccaatggcgatatcgatctggagcagtgggccgccgaacgggcgggcgaggtatttcagcagatttacaaccgcccgatgacggtggtgaagtccaaggagtcatga

SEQ ID NO: 54869 - protein, 511 aa, Solibacter usitatus Ellin6076
MPRYAAIDIGSNSIRMEAAEVVPGLPTRILASDREVTRLGESVFRTGAVSEEYIKATCTVLSRMAELYRKLDVVGVRAVATSAIRDTRNQREFLARAAEAAGTSVEIISGREEARLIHLGVESVWPQADKRVLIIDIGGGSAEIIAADRGRLIEAYSKPLGAVRLRESFLKDDPPGGRQLHQMREYIQAKLDTAVRRLGHTGWDRVIATSATASAVASAVARAPRSKRDEVDRLRVTTSQVRKLYARISELGLTARRKVTGIGPRRAEIIVPGVAVLLEFLQEFHLPAFSYSRAGVRDGIIADLAARNVGAELSRLNRDQRREVEELGRRYGVSLEHARKVADLANLLFCALQPLHHLPTGCGKLLEAAAYLLDVGHYVSSVSHHKHSYYVVSNSDMAGFTDRERFLIAALCRYHRKSLPSQVHGIYQALSADERRMLMLLIPILRLAYNLNRSREHRIRGVDCRLRDGEVVLQVRSNGDIDLEQWAAERAGEVFQQIYNRPMTVVKSKES

SEQ ID NO: 54870 - DNA, 1653 bp, Nostoc punctiforme PCC 73102
  CDS (1)..(1653): transl_table=11
atgcaaaatttagtttcggctagctgggagagttctgcaactcaaccacctaagcaacatcggattattgctgccattgacctgggaacaaattctctacacatggtagtagtcaaaattgacccgacgctaccagcctttagcattatcgccagagaaaaagaaactgtgagacttggcgatcgcaatcttaccactggagaactcaaaccagagatcgttaaaaaggcgatcgctgctttaggacgctttcaagaagttgccaaaaccatcaatgctgaaacaatcattgctgtggcgactagtgccgtgcgcgaagcccccaatggtaaagattttttgcacagagtagaaaaggaattgggtttaagcgttgacttgatttctggtcaagaagaagcccgacgaatctaccttggcgtgctttcggggatggaatttcacaaccaaccccataccattattgatattggcggtggttccacagaattaattttgggcgatagtcacgaaccgcgcactctcaccagtaccaaagttggtgcagtgcgactcactagcgagttaattactaccgatcccatcagcaacacagagtttgtgtatttgcaatcctatacacgcggtatgttagaacgttccgtggatgaggtattagcaaatttccagtttggggaatctccgcgtttggtgggtacatctggcacgattgaaaccctagcgatgattcatgcacgagaaaagtcaggtgttattccttccactctcaatggctatcagtttagtcttaaagacttgcgagagttggtaaatcgcttgcggaaactgagtaattccgaaaagtctgcgattccaggaatgccagataagcggtctgaagttatactggctggtgcagtaatattgcaggaggcgatgatccttttgggcagtgaatcgatcgcaatttgtgagcgttctctgcgagaaggcgtaatcgtagactggatgttaacccacggcttaattgaagataaactgcgttaccaaggttcagttcgggaaaggaatgttttaaaactcgctaataaataccacgttaacttagagtatagcgatcgcgtcgccaaatttgccgagagtttatttgaccaaactcaaggtacgttacatcactggggatctgacgagcgacaactgctgtgggcagctgcaatattacataattgcggtcattatgtcagtcattcgtctcaccacaagcactcttattatctaattcgcaatggtgaattacttggttatacagaaaccgagattgaaatcatagccaacttagcacgttatcatcgcaaatcgccgccgaagaaaaaacatgaaatttaccagagtatgctgactaaagagcagtgccaaatggttagtcaattgagtgcaattctaagattggcggtggcattagatagacggcaaattggcgctatatctcaagtacaatgtgagtattatcaacaacttcgacaggtaaacctgctgatttttccatctcaacctgatgatgactgtgctttagaactttggagtttagattataaaaaaggagtctttgaggaagaatttggagttaaattagtagcaactttagaaaaatcgaacgttgctaaattgttttag

SEQ ID NO: 54871 - protein, 550 aa, Nostoc punctiforme PCC 73102
MQNLVSASWESSATQPPKQHRIIAAIDLGTNSLHMVVVKIDPTLPAFSIIAREKETVRLGDRNLTTGELKPEIVKKAIAALGRFQEVAKTINAETIIAVATSAVREAPNGKDFLHRVEKELGLSVDLISGQEEARRIYLGVLSGMEFHNQPHTIIDIGGGSTELILGDSHEPRTLTSTKVGAVRLTSELITTDPISNTEFVYLQSYTRGMLERSVDEVLANFQFGESPRLVGTSGTIETLAMIHAREKSGVIPSTLNGYQFSLKDLRELVNRLRKLSNSEKSAIPGMPDKRSEVILAGAVILQEAMILLGSESIAICERSLREGVIVDWMLTHGLIEDKLRYQGSVRERNVLKLANKYHVNLEYSDRVAKFAESLFDQTQGTLHHWGSDERQLLWAAAILHNCGHYVSHSSHHKHSYYLIRNGELLGYTETEIEIIANLARYHRKSPPKKKHEIYQSMLTKEQCQMVSQLSAILRLAVALDRRQIGAISQVQCEYYQQLRQVNLLIFPSQPDDDCALELWSLDYKKGVFEEEFGVKLVATLEKSNVAKLF

SEQ ID NO: 54872 - DNA, 1704 bp, Crocosphaera watsonii WH 8501
  CDS (1)..(1704): transl_table=11
atggttgtcatagccaaaccttttttgatcaataataacaacagacaaacacttattattttagagtctttgagttcaatgcttaacagcaactttccatcaaaaaagagaatgtctgaagaaacttgtaccatagcagccattgatattggtaccaactctattcacatggtaattgtggaagttgataaaaccctccctgcttttaccattatttcacgggaaaaggataccgtccgtttaggagagcgagaacccaaaacagggaacttgagcgaagcagccatcaagcgttccctagcttctttacgacgatgtaaagacttagcggagagtttcaatgtagaacatatcatcgctgccgccaccagtgccactagagaagcccccaatgggttggactttatttggcaggtacaagcagaagttggcatcactatcaatttaatttctgggtatgaagaagcccgtcgcatctatttgggggtgttatcggggatggattttcaggaaaaaccccacgttatcattgatattggcggcggttccacggaaattgttctggctgattcccaagaaccccgatttttgagcagtacgaaagtaggggctgtccgtctcactaatgagttgatcagcactgatcccatcgacgagaaagaattaacctatttacaggcttatgtacgaggaatgttagagcggcctattgatgaagttaaacggaaactgaaaccaggggaaatacctcaagcagtcggcacatcaggaaccattgaaactttggttgcccttcatgctatgcaaactttgggagaattgcccagtcccttacaagggtatcaaatgagtcgtcaagacctcaaagatatggtcaagcaatttgtttctttgacctacgaagaacgggttaatctctcaggaatgtccgaaaaaagagcagaaattattgttgctggtgcggttattattttagaagctatgactatgttaaatctagagacaattactatttgtgaaagggcattaagagaaggaatgattgttgattggatgttaaataatggtttaatcgaaaatagattaagttttcaaacggaagtccgtcaaagaagtgtttataaaattgctcgaaaatataaagttgatcttggttatggcgagcaagttgcaggttttgccgttagtttatttgaccaattattagggacgcttcataactggggaaaacccgaacgagaattattgtggtcagcagctattttacataattgtggagtttatattagtcattcatctcatcataaacactcttattatttgattcgtcatgcagaactattaggctttacagaaatggaaattgaaaccattgctaatatcgcccgttatcaccgaaaaagtacacccaagaaaaaacatactgcttatagcaaactacccgataattaccgtaaacagattaaacatttaagcgcaattttacgccttgctgttgctttagatcgtcgtaacattggagcaataaaagatgttcattgtaagtatgaccaagaatatcaaaaactacatttacatcttattccctccaacactaaagatgattgttccttagaactatggaatttagattataaaaaagttgtttttgaagacttatatgatttaaaaattatggcaactctggaatctaataatgtatag

SEQ ID NO: 54873 - protein, 567 aa, Crocosphaera watsonii WH 8501
MVVIAKPFLINNNNRQTLIILESLSSMLNSNFPSKKRMSEETCTIAAIDIGTNSIHMVIVEVDKTLPAFTIISREKDTVRLGEREPKTGNLSEAAIKRSLASLRRCKDLAESFNVEHIIAAATSATREAPNGLDFIWQVQAEVGITINLISGYEEARRIYLGVLSGMDFQEKPHVIIDIGGGSTEIVLADSQEPRFLSSTKVGAVRLTNELISTDPIDEKELTYLQAYVRGMLERPIDEVKRKLKPGEIPQAVGTSGTIETLVALHAMQTLGELPSPLQGYQMSRQDLKDMVKQFVSLTYEERVNLSGMSEKRAEIIVAGAVIILEAMTMLNLETITICERALREGMIVDWMLNNGLIENRLSFQTEVRQRSVYKIARKYKVDLGYGEQVAGFAVSLFDQLLGTLHNWGKPERELLWSAAILHNCGVYISHSSHHKHSYYLIRHAELLGFTEMEIETIANIARYHRKSTPKKKHTAYSKLPDNYRKQIKHLSAILRLAVALDRRNIGAIKDVHCKYDQEYQKLHLHLIPSNTKDDCSLELWNLDYKKVVFEDLYDLKIMATLESNNV

SEQ ID NO: 54874 - DNA, 1566 bp, Prosthecochloris aestuarii DSM 271
  CDS (1)..(1566): transl_table=11
atgatcagagaacatatgagaattgctgcaattgacctcgggaccaattcctttcatatggtcattgtcgaggagagcagtgggaaggggattgtcgagattgaccgggtcaaggatatgatctgtatcggacgcggcagtatatcgacgaaaatgctcaatgaggatgctatggatgcgggggttgcgaccctgaagcgctttgttctgctggcttcccgtcacggtgtttcgattgataatattattgcttttgccaccagtgccatcagggaagctcgtaataaagatatttttctgcagaaggtgcttgacgaaaccggtcttcatgtcaaggttatttcaggacctgaagaggcggagtttatatattatggcgtgcgcaatgccgtgacattcactgagaaaccggatcttctgttcgacataggcggtggatccgttgagttcattattgccgataactgtcatgttcatctgctcgaaagccggaaaatcggtgtcgcaaggatgctcgagcgctttatcaccactgatccgatctcgaagcatgagctcaatcttctcgaccagtttttctgtgccgagctgcattcttcggttgaaaaagcccgtgaactgaaggttcatagagctattgcctcatcaggaacggctcagaatatagcgcggatgatccgttttctgaccggtcgtgacagtgaggtggtgctcaataacagctccttttcacgcaaggagttccagaaactctaccgccaggttatcggactttcagcttcagagcgaagcaagcttacaggtcttgatgaaaaaagggttgatctgattattccgggtctgatccttatcgatgtgattttcaggctgttcaagcttcgcgagattgtcatttccgattacgcgctcagggaaggaatggtcattcatcatctcgcgcagcatggtcccggttcatcatcgacgacaagctgccaggtcgatattcgtcgtgaaagcatcatggaactggcctatcgttgccattgggataaggctcattcaagtcatatcgcgatgctttgcctgcagctgtttgatgagctccagcctctgcatgattttgatgccactgatcgggaactgctcgaatatgcggctcttctgcacaacatcggtaccttcatttcgatatcggcgcatcataaacacagccagtatatcatcatcaacggagagcttcgcggttttacaccgctcgaaatcactatcatcgccaatatagcgcgctatcacagaaaatcgtctccgtccgaaaagcatgagctttacgcacagttgaaaccaaggcaccgcaagacggttgatatgcttgccgctattctcaggatcgccaatggtcttgatcgagggcatcgctgtgcgatcagctcaatccatgcggaaattgatcgtgaacagatcaatttttgtctggagtcgcgcgatgaacccgatattgaaatctgggcggcttgccggatgaaatcattgcttgagtcggttacaggaagaactattgcattcaggtttctcggagggcaatga

SEQ ID NO: 54875 - protein, 521 aa, Prosthecochloris aestuarii DSM 271
MIREHMRIAAIDLGTNSFHMVIVEESSGKGIVEIDRVKDMICIGRGSISTKMLNEDAMDAGVATLKRFVLLASRHGVSIDNIIAFATSAIREARNKDIFLQKVLDETGLHVKVISGPEEAEFIYYGVRNAVTFTEKPDLLFDIGGGSVEFIIADNCHVHLLESRKIGVARMLERFITTDPISKHELNLLDQFFCAELHSSVEKARELKVHRAIASSGTAQNIARMIRFLTGRDSEVVLNNSSFSRKEFQKLYRQVIGLSASERSKLTGLDEKRVDLIIPGLILIDVIFRLFKLREIVISDYALREGMVIHHLAQHGPGSSSTTSCQVDIRRESIMELAYRCHWDKAHSSHIAMLCLQLFDELQPLHDFDATDRELLEYAALLHNIGTFISISAHHKHSQYIIINGELRGFTPLEITIIANIARYHRKSSPSEKHELYAQLKPRHRKTVDMLAAILRIANGLDRGHRCAISSIHAEIDREQINFCLESRDEPDIEIWAACRMKSLLESVTGRTIAFRFLGGQ

SEQ ID NO: 54876 - DNA, 1620 bp, Prochlorococcus marinus str. MIT 9211
  CDS (1)..(1620): transl_table=11
atgccaggagacaagactctctatgagtcggtaaaaactaatcttggcaatgaaaaaacgcgttgcattggggcaattgatatcgggacaaattcaacgcatttgttagtggcatcagtggcaactgatttgcatacttttagcattgaccttgcggaaaaatcatccacaaggctgggagagagggaccctgattctggcaatttgacggctgttgctatggaaagggtttttgatgctttgaagagatttaaggatcttgcctttagccatcaagtcgaagatttaattattgttgccactagtgctgtgagagaggctcctaatggaagagaatttgtaaatcgacttcaaaatgagcttgacctaaatgttgagttggttagtggtgcagaagaagcaaggttaatttatttaggtgttctctctggaatgccatttggagaccgccctcatctcttggttgatattggaggtgggtcaacagaaatggttctcgcagatggacgagatgccaaggcacttactagcactcgtgttggagcagttcgtcttcaaagagactttattaataatgaacccataccacctgaaagaaaagagtttttgcagacttttattcagggttctttggagccagctgcaaccaaaatcgcaagaagaatgaagtatggggagactcctgtaatggttgcgacaagtggtactgcaatggctattggagcaatagcttctgaagatgccaatccttctgtattgaaattacatggatttaaattgaccaaggattctttggataaaatcatttcaagactcttagtactaaatcctgaggaaaggaaaaagttaccttcaataagtgatcggcgtgctgaaataattgttccaggggctttgattcttcagacaataatggagatgatgaaagtggaggaggttgttctcagcgaaagggcattgcgagaaggtttggtagttgattggatgtttaggaaaggattgttagaagatcgttttagtttgcaaggaagcattcggcagcgtactgtgctccatcaagctcagagatttgcggttaatagttcgcgggctcagagagtttccagccatgctctagctctatatgacgattctcgtggtgttttgcatcgggacaaaggtgaaggtagagatttgctttgggctgcagcaatgcttcatgcttgtggtcaacatataaatctaagtgcttatcacaaacactcttggtacctaatacgtcatggagaattactgggctattcacattctgagcatttaatgatcgcagctatagctcgatatcatcgaaagagtctccctaaaaaacgtcatgatgcttggcaagccttgggtagcaaagaacaacggaagattgtttctgaaatggcacttttacttcgtttgtcagttgctgtagatagacgccctcaaccagtagttgcttctatagatgttgcttccgaagagaataaagttactattaaacttattccagaacaatcaactcaaagcttaagtttagaacagtggagcttaagcaattgcatcccattagtaaagagtttaacgggagtagaattaaagattttattggattaa

SEQ ID NO: 54877 - protein, 539 aa, Prochlorococcus marinus str. MIT 9211
MPGDKTLYESVKTNLGNEKTRCIGAIDIGTNSTHLLVASVATDLHTFSIDLAEKSSTRLGERDPDSGNLTAVAMERVFDALKRFKDLAFSHQVEDLIIVATSAVREAPNGREFVNRLQNELDLNVELVSGAEEARLIYLGVLSGMPFGDRPHLLVDIGGGSTEMVLADGRDAKALTSTRVGAVRLQRDFINNEPIPPERKEFLQTFIQGSLEPAATKIARRMKYGETPVMVATSGTAMAIGAIASEDANPSVLKLHGFKLTKDSLDKIISRLLVLNPEERKKLPSISDRRAEIIVPGALILQTIMEMMKVEEVVLSERALREGLVVDWMFRKGLLEDRFSLQGSIRQRTVLHQAQRFAVNSSRAQRVSSHALALYDDSRGVLHRDKGEGRDLLWAAAMLHACGQHINLSAYHKHSWYLIRHGELLGYSHSEHLMIAAIARYHRKSLPKKRHDAWQALGSKEQRKIVSEMALLLRLSVAVDRRPQPVVASIDVASEENKVTIKLIPEQSTQSLSLEQWSLSNCIPLVKSLTGVELKILLD

SEQ ID NO: 54878 - DNA, 1662 bp, Synechococcus sp. RS9917
  CDS (1)..(1662): transl_table=11
atggcgggtgccgacccctccgcgctgcgcgagccagtgacggccgagatggaggcggccccttccccccagggagtgctgcgcaatggccgccggcttcgccaggtggcggcgatcgatatcggcaccaattccacccaccttctggtggctgccgttgatcccagcctgcacactttcagcatcgaactggcggagaaatccactacccggctgggtgagcgtgatcccgacagcggtaagctcaccgatgcggcgatggccagggccctggaaacgctgcggcgcttccgcgacctcgccgccagccatcaggtggagcaggtggtgacagccgccaccagtgccgtgcgggaagcacccaacggccgggagtttcttcagatggtgaaggaggagctggatctggaggtggatctggtcagtggcccggaggaggcgcggctgatttacctgggtgtgttgtcggggatgccattcggggaccgtccccacctgctcctggatatcggcggtggctccacggagttgatccttgctgatggccgtgatgcccgggcgctcaccagcacccgggtgggtgctgtgcgcctgcagcgggatttcgtgaagcacgatccgatgccggcccagaggcgggccttcctgcaggcgttcattcagggatcgctggagccggcggtcgacaaggtgcggcggcggatcaagcccggtgagacccccgtgatggtggccaccagtggcaccgccatggccatcggggcgctcgctgccagtgaggaggagcgacccccgctgaagctgcatgggtatcgcatctccaggcagaggctggatcgcgtcgtcgacaaactggtcgacatgtcaccggagcagcgccgcgccctggctccaatcaacgaccgccgcgccgaaatcatcgtgccgggtgcgctgatcctgcagaccaccatgcagatgctcgccgtccaggagctggtgctcagcgagcgggcgctccgggaggggttgatcgtcgactggatgctccggcatggcttgctcgaggatcgcttcagttttcagagcagcatccgccagcgcaccgtcatccatcaggtgcagcggttcgccgtcaatcagctgcgggccgaacgggtcgcttcccatgctctcagcctctatgacgccacccgtggccgcctgcatcgtgatgaggggcctggccgtgatctgctctgggcggccgccatgctccacacctgcggccaacacatcaatctcagtgcctaccacaagcattcctggtatctgattcgccacggcgaattgctgggttactcagaggcggagcacttgatggtggctgccattgcccgttatcaccgccgcagcctgccgaagaaacggcatgaagcctggcaggcgctgcagtctcgtgccaatcgcaccacggtgtcggagatggccctgttgctgcgcctggcggcagcgctcgaccgtcgcccggagcctgtggtggcctcgattcaggccgaggttacgggccaagagctccagctcggcctgattcccgagcgcgtgaatcagaacatcagcctggagcaatggagtctggagagctgtgccccggtgctccgtgagatcacagggctgaatctgacggtgatggttcagcagtga

SEQ ID NO: 54879 - protein, 553 aa, Synechococcus sp. RS9917
MAGADPSALREPVTAEMEAAPSPQGVLRNGRRLRQVAAIDIGTNSTHLLVAAVDPSLHTFSIELAEKSTTRLGERDPDSGKLTDAAMARALETLRRFRDLAASHQVEQVVTAATSAVREAPNGREFLQMVKEELDLEVDLVSGPEEARLIYLGVLSGMPFGDRPHLLLDIGGGSTELILADGRDARALTSTRVGAVRLQRDFVKHDPMPAQRRAFLQAFIQGSLEPAVDKVRRRIKPGETPVMVATSGTAMAIGALAASEEERPPLKLHGYRISRQRLDRVVDKLVDMSPEQRRALAPINDRRAEIIVPGALILQTTMQMLAVQELVLSERALREGLIVDWMLRHGLLEDRFSFQSSIRQRTVIHQVQRFAVNQLRAERVASHALSLYDATRGRLHRDEGPGRDLLWAAAMLHTCGQHINLSAYHKHSWYLIRHGELLGYSEAEHLMVAAIARYHRRSLPKKRHEAWQALQSRANRTTVSEMALLLRLAAALDRRPEPVVASIQAEVTGQELQLGLIPERVNQNISLEQWSLESCAPVLREITGLNLTVMVQQ

SEQ ID NO: 54880 - DNA, 1629 bp, Synechococcus sp. WH 5701
  CDS (1)..(1629): transl_table=11
atggtccctcccgaccccgccgccacggtggccgctcccgccagccagggccccggcgctggactccggcatgtggcggccatcgacatcggcaccaactccattcacctgctgatcgcggcggtggacccggaattgcgcagcttccgcctggtgctggcggagaagtcgaccaccaggctgggggagcgggatcccgagacgggtgatctcacccccgaggcgatcgagcgcgccttcatcgccctgcgccactgccgtcagctggctgaaagccacggggtggagcagatcctcacggccgccaccagcgcggtgcgggaggcacccaatggccgcctgttcgtgcaggcggtgcaggagcaactgggtctggaggtggatctggtcagcggccaggaagaggcccgccttatctatctcggggtgctctcgggcatggccttcggggataccccccacctgatcctcgacatcggtggcggctccaccgagctgatcctggccgacgggtccgatgcccgtgaactcaccagcacccgcatcggcgcggttcgtctgcagagggatttcatccgcgaggacccaatgccgccggctcggctcaccttcctgcgggcgttcatccaggggtcactggagccggccgtggagcgggtgaaacgtcagctgcggccaggggaagtgccggtgatggtgggcaccagcggcaccgccacggccctggctgccctggtggccgccgagcaggaacgcacccccctgcgcctgcagggattccgcatgagccgggagcagatcgatcagcaggtgaaccggctgacgaccctgacgccggagcagcgccgctccctgcctgcgatcaatgagcgccgcgccgagatcatcgtgccgggggcgctggtgctgcagcaggcgatggcgatgctgcaggccggggagatggtgatcagcgagcgggccctgcgcgaaggcctgatcgtcgactggatgcttcgccacgacctgatcgtcgatcgcttcgcctaccagagcggcatccgccggcgcacggtgctgcagctggcccagcgctatggcgtcgatcagacgcgtgcggatcgggtggcccagcatgccctcagcctctacgaccgttgccgcggggtgctgcatcacgacgagggcgaggggcggcaactgctctgggccgcggcgatgctgcatggctcgggccagcacatcaacatcggcgcctaccacaaacacagctggtatctgatccgccatggcgacctgctcggctactccgaaaccgagcagctgatggtggcggccattgcccgctaccaccgccgcagcctccccaagaagcgccacgaggcctggctgctgctgccggggcgtgagcagaggcgcaccgtcaacgcgatggcgatgctcctgcggctggccgcttccctcgatcgccgtcccacaccggcggtggcaggcctgcgcatctcctgcagcaccagtgagctgagcatcgggctcgagccggcctcagctcttgacctgagcctggagcgctggagcctgcaggggtgcgccgagcccctggcggaggccacaggggtgaggttgctggtggaatccgacggccggtag

SEQ ID NO: 54881 - protein, 542 aa, Synechococcus sp. WH 5701
MVPPDPAATVAAPASQGPGAGLRHVAAIDIGTNSIHLLIAAVDPELRSFRLVLAEKSTTRLGERDPETGDLTPEAIERAFIALRHCRQLAESHGVEQILTAATSAVREAPNGRLFVQAVQEQLGLEVDLVSGQEEARLIYLGVLSGMAFGDTPHLILDIGGGSTELILADGSDARELTSTRIGAVRLQRDFIREDPMPPARLTFLRAFIQGSLEPAVERVKRQLRPGEVPVMVGTSGTATALAALVAAEQERTPLRLQGFRMSREQIDQQVNRLTTLTPEQRRSLPAINERRAEIIVPGALVLQQAMAMLQAGEMVISERALREGLIVDWMLRHDLIVDRFAYQSGIRRRTVLQLAQRYGVDQTRADRVAQHALSLYDRCRGVLHHDEGEGRQLLWAAAMLHGSGQHINIGAYHKHSWYLIRHGDLLGYSETEQLMVAAIARYHRRSLPKKRHEAWLLLPGREQRRTVNAMAMLLRLAASLDRRPTPAVAGLRISCSTSELSIGLEPASALDLSLERWSLQGCAEPLAEATGVRLLVESDGR

SEQ ID NO: 54882 - DNA, 1662 bp, Synechococcus sp. WH 7805
  CDS (1)..(1662): transl_table=11
atgccaggtgccgagccttttcttgagactgcgatggaccagaacagccggcagctcaatcatgagatgtccgaaagctctccatcggctcaacgcctgcggaagattgcagccatcgatgtcggcacgaattccacccacatgctggtggcatcagtggatgcctcactgaggacgttcagcattgaactggcggagaaatcaaccacccggttgggtgagaaggatccggacacaggccagctgacgcctgaagcgatggatcgaggacttgaaagtcttcgtcgcttcaaggaactggcgatcagccaccaggtggaacagatcgtgatcgctgccaccagtgctgttcgtgaagctcccaatggtcgggatttcctgcagacggtgcaggatcagctcgggcttgatgtggatctggtgagcggtcccgaggaggctcgcctgatctatctcggggttctgtccgggatgccctttggcgatcgtccccatctcgtgctggacatcggcggtggatccactgagttgatcctggcggatggtcgtgatgcgcgtgctctgaccagcacccgggtgggtgcggtgcgtttgcagagagatttcgtgaaagatgatccgattccgccgaaccggcgatcgttccttcaggcatttattcagggatcactcgagcctgccgtcgataaggttcacaggcggatcaaaccgggtgagaagcccgttctggttgctaccagcggtacagccatggccattggtgctctggcagccactgaggacgatcggccgccgctgaagctgcatggatacaaggtctccaagcagcgcttggatcgcgttgtggagcggttagtggtgatgactcctgcgcaacgccgagacctggcgccgatcaacgacagacgggcggagatcattgttcctggtgctttgattcttcaaaccaccatgcagatgctgggtgttggagagctggttctcagtgaaagggcactgagagaaggcttgattgtggactggatgctgcgccacgggctactggaggatcgcttcagcttccagagcagcatccgtcagcgcacggtgttgcatcaggcccagcgattcgcagtgaaccgtgtccgtgctgaacgggttgccactcatgctctcagtctttacgacagcaccagggggcgactgcatcaagacgatggctcaggtcgtgatctgctgtgggctgcctccttgcttcatgcctgtggccagcacatcaatctcagcgcgtatcacaagcattcttggtatctgattcggcatggagaactgctcggctactcagaatccgagcatttaatgattgctgcgatcgctcgctaccaccgccgcagcttgccgaagaaacggcatgaggcctggcaggcgctgcagacacggcacaaccgccgcactgtttcagagatggctctgttgcttcgattggccgcagcccttgatcgacgtcctgaccctgtcgtggagactcttgaggtggaaattacagctagctcaatcatcctgaagctggttcctgaacgtctcaatcagaatctcagccttgaacaatggagcttggaaagttgtgaggacattgtcagggaggtcaccggactcaacctgaaggtcagggttcaagagtga

SEQ ID NO: 54883 - protein, 553 aa, Synechococcus sp. WH 7805
MPGAEPFLETAMDQNSRQLNHEMSESSPSAQRLRKIAAIDVGTNSTHMLVASVDASLRTFSIELAEKSTTRLGEKDPDTGQLTPEAMDRGLESLRRFKELAISHQVEQIVIAATSAVREAPNGRDFLQTVQDQLGLDVDLVSGPEEARLIYLGVLSGMPFGDRPHLVLDIGGGSTELILADGRDARALTSTRVGAVRLQRDFVKDDPIPPNRRSFLQAFIQGSLEPAVDKVHRRIKPGEKPVLVATSGTAMAIGALAATEDDRPPLKLHGYKVSKQRLDRVVERLVVMTPAQRRDLAPINDRRAEIIVPGALILQTTMQMLGVGELVLSERALREGLIVDWMLRHGLLEDRFSFQSSIRQRTVLHQAQRFAVNRVRAERVATHALSLYDSTRGRLHQDDGSGRDLLWAASLLHACGQHINLSAYHKHSWYLIRHGELLGYSESEHLMIAAIARYHRRSLPKKRHEAWQALQTRHNRRTVSEMALLLRLAAALDRRPDPVVETLEVEITASSIILKLVPERLNQNLSLEQWSLESCEDIVREVTGLNLKVRVQE

SEQ ID NO: 54884 - DNA, 1680 bp, Synechococcus sp. RS9916
  CDS (1)..(1680): transl_table=11
ttggccttcctgacggcagccagtggcagagtggctctggttagccgttcagcgctgatgacaggtgccgatgccgcgacatccgacaccatcccgggcgcagcaggatccagcttgaggcgggtcgctgcaatcgacatcggcaccaactccacccacctgctggtggcggcagtcgaccccaatctgcgcaccttcagcatcgtgctggcggagaaatccaccaccaggcttggggagcgggatccagtcacaggccatctctgcgaggcggcgatcacccgggggatggatgccctgcgtcagttcactgaactagcggcgagccaccaggtggagcaaatcgtcacggccgccaccagcgctgtgcgtgaagctcccaacgggcgtgactttcttcaacagatcaaggatgagcttgatctggacgttgatctggtcagtggtcctgaagaagcacggctgatctatctgggcgtgttatccggcatgtcgttcggcgaccgtccccaccttttgctggatatcggtggcggatcgactgaattgatcctggcggatggccgtgatgccagggcgctcaccagcacccggatcggagcggtgcgattgcagcgggatttcgtcacggaggatccgttgccagcgcaaagccaggcgttccttcgcgcttacatccagggctcattggagcctgctgtcgataaggtgcgccgccggcttcatgctggtgagcagccggtgttggtggccaccagcggaacggccatggccatcggtgccctggcggcaagtcacgacgatcgcgcgccgcgcaagttgcacggttatcgcattgcccgtgagaggcttgagcaggtggtggacaagttggtggttctcacccctgaggagcgcaaagcgctttcacctatcaatgaccgccgggcagaaattatcgtcccgggcgctctgattctgcaaaccaccatgcagatgctcggtgtagaggagatggtgctgagtgagagggctctgcgggaggggttgatcgttgattggatgctgcgtcagggccttctggaagatcgcttcagttttcaaagcagcattcgtcaacgcacggtgattcaccaggtgcagcgtttcgctgtggatcgcccccgggccgagcgggtcgctagccatgcccttgccttgtacgacaacaccgttggggtgttgcatcgtgaccctggtcccggaagggagttgctctgggctgcggcgatgcttcattcctgcggtcagcacatcaatctcagtgcgtaccacaagcattcttggtatctcatccgtcatggagagctgctcgggtactcagaaaccgagcatgtgatggtcgcggcgattgctcgttatcaccgccgcagtcttcccaagaagcgtcatgaagcctggcaggctctgcagacccgcgaagaacggcgaactgtttcagaaatggctctgctgctccgcctggcagctgccctggatcgtcgtccagaacccgtgatcgcttcgatccgcaccttcacgtcaaaaggtgccttggatgtggccctgatcccggaacgcttaaaccagaacctcagtttggagcagtggagtttggaaagttgtgcgccggtggtgaaggacgttacagggttggatttatcggttcgggtgcagcgctga

SEQ ID NO: 54885 - protein, 559 aa, Synechococcus sp. RS9916
MAFLTAASGRVALVSRSALMTGADAATSDTIPGAAGSSLRRVAAIDIGTNSTHLLVAAVDPNLRTFSIVLAEKSTTRLGERDPVTGHLCEAAITRGMDALRQFTELAASHQVEQIVTAATSAVREAPNGRDFLQQIKDELDLDVDLVSGPEEARLIYLGVLSGMSFGDRPHLLLDIGGGSTELILADGRDARALTSTRIGAVRLQRDFVTEDPLPAQSQAFLRAYIQGSLEPAVDKVRRRLHAGEQPVLVATSGTAMAIGALAASHDDRAPRKLHGYRIARERLEQVVDKLVVLTPEERKALSPINDRRAEIIVPGALILQTTMQMLGVEEMVLSERALREGLIVDWMLRQGLLEDRFSFQSSIRQRTVIHQVQRFAVDRPRAERVASHALALYDNTVGVLHRDPGPGRELLWAAAMLHSCGQHINLSAYHKHSWYLIRHGELLGYSETEHVMVAAIARYHRRSLPKKRHEAWQALQTREERRTVSEMALLLRLAAALDRRPEPVIASIRTFTSKGALDVALIPERLNQNLSLEQWSLESCAPVVKDVTGLDLSVRVQR

SEQ ID NO: 54886 - DNA, 21 bp, Artificial sequence
  primer
atggctccttcctctgcccag

SEQ ID NO: 54887 - DNA, 21 bp, Artificial sequence
  primer
ttaaccctgacgagatttgag

SEQ ID NO: 54888 - protein, 512 aa, Artificial sequence
  consensus sequence
  Variant (2)..(2): Xaa in position 2 is any amino acid
  Variant (5)..(5): Xaa in position 5 is any amino acid
  Variant (10)..(28): Xaa in position 10 to 28 is any amino acid
  Variant (29)..(31): Xaa in position 29 to 31 is any or no amino acid
  Variant (33)..(35): Xaa in position 33 to 35 is any amino acid
  Variant (39)..(43): Xaa in position 39 to 43 is any amino acid
  Variant (44)..(44): Xaa in position 44 is any or no amino acid
  Variant (46)..(46): Xaa in position 46 is any amino acid
  Variant (48)..(53): Xaa in position 48 to 53 is any amino acid
  Variant (55)..(58): Xaa in position 55 to 58 is any amino acid
  Variant (60)..(76): Xaa in position 60 to 76 is any amino acid
  Variant (77)..(79): Xaa in position 77 to 79 is any or no amino acid
  Variant (84)..(84): Xaa in position 84 is any amino acid
  Variant (88)..(88): Xaa in position 88 is any amino acid
  Variant (90)..(92): Xaa in position 90 to 92 is any amino acid
  Variant (94)..(108): Xaa in position 94 to 108 is any amino acid
  Variant (111)..(111): Xaa in position 111 is any amino acid
  Variant (116)..(116): Xaa in position 116 is any amino acid
  Variant (122)..(134): Xaa in position 122 to 134 is any amino acid
  Variant (135)..(135): Xaa in position 135 is any or no amino acid
  Variant (144)..(156): Xaa in position 144 to 156 is any amino acid
  Variant (158)..(160): Xaa in position 158 to 160 is any amino acid
  Variant (166)..(168): Xaa in position 166 to 168 is any amino acid
  Variant (169)..(169): Xaa in position 169 is any or no amino acid
  Variant (171)..(208): Xaa in position 171 to 208 is any amino acid
  Variant (209)..(214): Xaa in position 209 to 214 is any or no amino acid
  Variant (218)..(260): Xaa in position 218 to 260 is any amino acid
  Variant (261)..(276): Xaa in position 261 to 276 is any or no amino acid
  Variant (278)..(279): Xaa in position 278 to 279 is any amino acid
  Variant (282)..(283): Xaa in position 282 to 283 is any amino acid
  Variant (285)..(306): Xaa in position 285 to 306 is any amino acid
  Variant (311)..(313): Xaa in position 311 to 313 is any amino acid
  Variant (315)..(324): Xaa in position 315 to 324 is any amino acid
  Variant (325)..(334): Xaa in position 325 to 334 is any or no amino acid
  Variant (336)..(355): Xaa in position 336 to 355 is any amino acid
  Variant (356)..(357): Xaa in position 356 to 357 is any or no amino acid
  Variant (359)..(361): Xaa in position 359 to 361 is any amino acid
  Variant (363)..(366): Xaa in position 363 to 366 is any amino acid
  Variant (368)..(370): Xaa in position 368 to 370 is any amino acid
  Variant (371)..(381): Xaa in position 371 to 381 is any or no amino acid
  Variant (383)..(383): Xaa in position 383 is any amino acid
  Variant (386)..(387): Xaa in position 386 to 387 is any amino acid
  Variant (389)..(390): Xaa in position 389 to 390 is any amino acid
  Variant (393)..(394): Xaa in position 393 to 394 is any amino acid
  Variant (396)..(403): Xaa in position 396 to 403 is any amino acid
  Variant (408)..(408): Xaa in position 408 is any amino acid
  Variant (412)..(415): Xaa in position 412 to 415 is any amino acid
  Variant (417)..(417): Xaa in position 417 is any amino acid
  Variant (418)..(418): Xaa in position 418 is any or no amino acid
  Variant (420)..(423): Xaa in position 420 to 423 is any amino acid
  Variant (425)..(428): Xaa in position 425 to 428 is any amino acid
  Variant (430)..(431): Xaa in position 430 to 431 is any amino acid
  Variant (437)..(439): Xaa in position 437 to 439 is any amino acid
  Variant (442)..(443): Xaa in position 442 to 443 is any amino acid
  Variant (445)..(448): Xaa in position 445 to 448 is any amino acid
  Variant (449)..(449): Xaa in position 449 is any or no amino acid
  Variant (451)..(455): Xaa in position 451 to 455 is any amino acid
  Variant (456)..(458): Xaa in position 456 to 458 is any or no amino acid
  Variant (460)..(464): Xaa in position 460 to 464 is any amino acid
  Variant (465)..(465): Xaa in position 465 is any or no amino acid
  Variant (468)..(468): Xaa in position 468 is any amino acid
  Variant (470)..(471): Xaa in position 470 to 471 is any amino acid
  Variant (475)..(501): Xaa in position 475 to 501 is any amino acid
  Variant (502)..(508): Xaa in position 502 to 508 is any or no amino acid
  Variant (511)..(511): Xaa in position 511 is any amino acid
AXIDXGTNSXXXXXXXXXXXXXXXXXXXXXXKXXXRLGXXXXXXGXLXXXXXXRXXXXLXXXXXXXXXXXXXXXXXXXXATSAXREAXNXXXFXXXXXXXXXXXXXXXSGXEEARXIYLGVXXXXXXXXXXXXXXDIGGGSTEXXXXXXXXXXXXXSXXXGAVRLXXXXFXXXXXXXXXXXXXXXXXXXXXXXXXXXXXXXXXXXXXXXXXXXXSGTXXXXXXXXXXXXXXXXXXXXXXXXXXXXXXXXXXXXXXXXXXXXXXXXXXXXXXXXXXXRXXIIXXGXXXXXXXXXXXXXXXXXXXXXXLREGXXXDXXXXXXXXXXXXXXXXXXXXRXXXXXXXXXXXXXXXXXXXXXXVXXXAXXXXDXXXXXXXXXXXXXXRXLLXXAXXLHXXGXXXXXXXXHKHSXYLIXXXXLXXGXXXXEXXXXAXXARYHRXXXPKXXHXXXXXLXXXXXXXXVXXXXXXLRXAXXLDRXXXXXXXXXXXXXXXXXXXXXXXXXXXXXXXXXXLEXW

SEQ ID NO: 54889 - protein, 26 aa, Artificial sequence
  protein pattern
  Variant (2)..(2): Xaa in position 2 is His or Tyr
  Variant (3)..(3): Xaa in position 3 is Ala, Asp, Glu, Gly, Asn, Ser or Thr
  Variant (4)..(4): Xaa in position 4 is any amino acid
  Variant (6)..(7): Xaa in position 6 to 7 is any amino acid
  Variant (8)..(8): Xaa in position 8 is Ile or Val
  Variant (9)..(9): Xaa in position 9 is Asp, Asn or Ser
  Variant (10)..(10): Xaa in position 10 is any amino acid
  Variant (11)..(11): Xaa in position 11 is Ala, Glu, Gly or Ser
  Variant (12)..(12): Xaa in position 12 is any amino acid
  Variant (13)..(13): Xaa in position 13 is Phe, His or Tyr
  Variant (17)..(17): Xaa in position 17 is any amino acid
  Variant (18)..(18): Xaa in position 18 is any or no amino acid
  Variant (20)..(20): Xaa in position 20 is any amino acid
  Variant (21)..(21): Xaa in position 21 is any or no amino acid
  Variant (23)..(24): Xaa in position 23 to 24 is any amino acid
  Variant (25)..(25): Xaa in position 25 is Ala, Cys, Gly or Ser
  Variant (26)..(26): Xaa in position 26 is Asp, Glu or Gly
LXXXGXXXXXXXXHKHXXYXXIXXXX

SEQ ID NO: 54890 - protein, 45 aa, Artificial sequence
  protein pattern
  Variant (4)..(4): Xaa in position 4 is any amino acid
  Variant (6)..(6): Xaa in position 6 is Asp or Glu
  Variant (7)..(7): Xaa in position 7 is Ala or Thr
  Variant (8)..(8): Xaa in position 8 is any amino acid
  Variant (10)..(12): Xaa in position 10 to 12 is any amino acid
  Variant (13)..(13): Xaa in position 13 is Phe, Ile or Leu
  Variant (14)..(14): Xaa in position 14 is Ile, Leu or Val
  Variant (15)..(16): Xaa in position 15 to 16 is any amino acid
  Variant (17)..(17): Xaa in position 17 is Ala, Ile, Leu or Val
  Variant (18)..(24): Xaa in position 18 to 24 is any amino acid
  Variant (25)..(25): Xaa in position 25 is Ile, Leu or Val
  Variant (26)..(27): Xaa in position 26 to 27 is any amino acid
  Variant (28)..(28): Xaa in position 28 is Ile, Leu or Val
  Variant (31)..(31): Xaa in position 31 is any amino acid
  Variant (36)..(36): Xaa in position 36 is any amino acid
  Variant (38)..(38): Xaa in position 38 is any amino acid
  Variant (39)..(41): Xaa in position 39 to 41 is any or no amino acid
  Variant (43)..(43): Xaa in position 43 is any or no amino acid
  Variant (45)..(45): Xaa in position 45 is Ile, Met or Val
TSAXRXXXNXXXXXXXXXXXXXXXXXXXSGXEEARXIXXXXLXGX

SEQ ID NO: 54891 - protein, 21 aa, Artificial sequence
  protein pattern
  Variant (2)..(4): Xaa in position 2 to 4 is any amino acid
  Variant (5)..(5): Xaa in position 5 is Ile or Val
  Variant (7)..(8): Xaa in position 7 to 8 is any amino acid
  Variant (9)..(9): Xaa in position 9 is Ala, Cys or Val
  Variant (14)..(14): Xaa in position 14 is Lys or Arg
  Variant (15)..(15): Xaa in position 15 is Ala, Asn, Ser or Thr
  Variant (16)..(16): Xaa in position 16 is any amino acid
  Variant (17)..(17): Xaa in position 17 is Cys or Pro
  Variant (18)..(20): Xaa in position 18 to 20 is any amino acid
EXXXXAXXXRYHRXXXXXXXH

SEQ ID NO: 54892 - protein, 15 aa, Artificial sequence
  protein pattern
  Variant (2)..(2): Xaa in position 2 is any amino acid
  Variant (5)..(5): Xaa in position 5 is Ile, Leu, Met or Val
  Variant (10)..(10): Xaa in position 10 is any amino acid
  Variant (11)..(11): Xaa in position 11 is His or Arg
  Variant (12)..(12): Xaa in position 12 is any amino acid
  Variant (13)..(14): Xaa in position 13 to 14 is Ile, Leu or Val
  Variant (15)..(15): Xaa in position 15 is Ala or Val
AXIDXGTNSXXXXXX

SEQ ID NO: 54893 - protein, 12 aa, Artificial sequence
  protein pattern
  Variant (9)..(9): Xaa in position 9 is Phe, Ile, Leu or Val
  Variant (10)..(11): Xaa in position 10 to 11 is any amino acid
  Variant (12)..(12): Xaa in position 12 is Ala or Gly
DIGGGSTEXXXX

SEQ ID NO: 54894 - protein, 37 aa, Artificial sequence
  protein pattern
  Variant (2)..(2): Xaa in position 2 is Ala, Ser or Val
  Variant (3)..(3): Xaa in position 3 is Asp or Glu
  Variant (4)..(4): Xaa in position 4 is Ile, Leu or Val
  Variant (6)..(6): Xaa in position 6 is Ile, Leu or Val
  Variant (7)..(7): Xaa in position 7 is Ala, Gly or Pro
  Variant (9)..(10): Xaa in position 9 to 10 is any amino acid
  Variant (11)..(11): Xaa in position 11 is Ile, Leu or Val
  Variant (12)..(12): Xaa in position 12 is Phe, Ile, Leu or Met
  Variant (13)..(15): Xaa in position 13 to 15 is any amino acid
  Variant (16)..(16): Xaa in position 16 is Phe or Met
  Variant (17)..(23): Xaa in position 17 to 23 is any amino acid
  Variant (24)..(24): Xaa in position 24 is Phe, Ile, Leu, Met or Val
  Variant (25)..(26): Xaa in position 25 to 26 is any amino acid
  Variant (27)..(27): Xaa in position 27 is Cys or Ser
  Variant (28)..(29): Xaa in position 28 to 29 is any amino acid
  Variant (30)..(30): Xaa in position 30 is Ala, Gly or Ser
  Variant (35)..(35): Xaa in position 35 is any amino acid
  Variant (36)..(36): Xaa in position 36 is any or no amino acid
RXXXIXXGXXXXXXXXXXXXXXXXXXXXXXLREGXXV

SEQ ID NO: 54895 - protein, 18 aa, Artificial sequence
  protein pattern
  Variant (2)..(2): Xaa in position 2 is any amino acid
  Variant (3)..(4): Xaa in position 3 to 4 is any or no amino acid
  Variant (6)..(7): Xaa in position 6 to 7 is any amino acid
  Variant (8)..(8): Xaa in position 8 is Ala, Ile, Leu or Val
  Variant (10)..(10): Xaa in position 10 is Ala, Ser or Val
  Variant (11)..(11): Xaa in position 11 is Ala, Ile or Val
  Variant (13)..(13): Xaa in position 13 is any or no amino acid
  Variant (15)..(17): Xaa in position 15 to 17 is any amino acid
  Variant (18)..(18): Xaa in position 18 is Phe, Ile, Leu or Val
LXXXSXXXGXXRXLXXXX

SEQ ID NO: 54896 - protein, 15 aa, Artificial sequence
  protein pattern
  Variant (3)..(3): Xaa in position 3 is Ala, Ile, Leu or Val
  Variant (4)..(4): Xaa in position 4 is Ala or Ser
  Variant (5)..(5): Xaa in position 5 is any amino acid
  Variant (6)..(6): Xaa in position 6 is Ala, Gly or Ser
  Variant (7)..(7): Xaa in position 7 is Ile, Leu or Val
  Variant (9)..(9): Xaa in position 9 is any or no amino acid
  Variant (11)..(14): Xaa in position 11 to 14 is any amino acid
  Variant (15)..(15): Xaa in position 15 is Ala, Ile, Leu or Val
LRXXXXXDXRXXXXX

SEQ ID NO: 54897 - DNA, 1518 bp, Synechocystis sp.
  CDS (1)..(1518): transl_table=11
atgttagataaacgctgtagcggtattctgctccatcccacctccttgcccagtcgtttcggcattggggacttgggggacggtgcttttcagttcatcgattttttggcggacgcagaccagagtgtatggcaaatattgccgttgggccccaccggattcggcaattccccttacctttgctattctgccctagcaattaatccttggttgattagccttgatcgcctagctgaagaaggatttttgccaccgagtttattagaccaagcccccccatttactaaccccagggtggattatgaccaggcgatcgcctacaaatcccaagttttaaaacaggcctttgcccagttccgtaccaacatagagctagcaattgagcaggaatttgcagaattttgccaagcccaaagtgattggctagcagattacgccctgttcatggccatcaaagaagcccacaatggagccggttggcatcaatgggacaaggacattgcctggcgggaaccggaagccctgaaaatctggggcgatcgcctgaaaacggaagttttataccatcaatttttgcaatttcttggttttcgccaatggcaggaagtcaaagcctacgctaaccaacggcacatagccatttttggggacctacccatctacgttgcccacgatagcgctgacgtttgggccaatccagagaacttttgccttgatccggaaaccggagaagcggccatgatggccggggtaccaccggactatttcagtgccacagggcaactctggggtaatcctgtgtacgactgggaaaccctcaaagctacgggctttgcctggtggattaagcgttttaaagccaatctgcaatatctagacattgtccgcattgaccatttccggggcttcgagtcctattggggagtgccccaaggggaaaaaactgctgaaaatggcgaatggtatccagcccccggcaaggaatttttccaagccctagggaaagccctgggtgataatttacccattgtggccgaagatttgggggtaattactccggaagtggaagcgctacgggatgaatttaactttcccggcatgaaagtgctccatttcgcctttgactccgaccggggtaatccctttctgcccttcaactacagcaatggcaacgcggtggtttataccggcacccacgacaacgacaccaccgtgggctggtttcaggaacggtcagaggatgatcagcaaaaggtgatcaattacctcggctgtgtgtgcaacgaaggtatccattggagcttaattcgcctagcgtccagttcggtggcggccctagcaatttttcccctccaggacatcctcggtttgggtagtgactgtcgcatgaacttaccgggcactgcggcgggcaactggggttggcgttaccatcccgaccaactcaacgattggctatcggggcatttgagtttcattacggagctttacggacggcgcatttaccacacagactaa

SEQ ID NO: 54898 - protein, 505 aa, Synechocystis sp.
MLDKRCSGILLHPTSLPSRFGIGDLGDGAFQFIDFLADADQSVWQILPLGPTGFGNSPYLCYSALAINPWLISLDRLAEEGFLPPSLLDQAPPFTNPRVDYDQAIAYKSQVLKQAFAQFRTNIELAIEQEFAEFCQAQSDWLADYALFMAIKEAHNGAGWHQWDKDIAWREPEALKIWGDRLKTEVLYHQFLQFLGFRQWQEVKAYANQRHIAIFGDLPIYVAHDSADVWANPENFCLDPETGEAAMMAGVPPDYFSATGQLWGNPVYDWETLKATGFAWWIKRFKANLQYLDIVRIDHFRGFESYWGVPQGEKTAENGEWYPAPGKEFFQALGKALGDNLPIVAEDLGVITPEVEALRDEFNFPGMKVLHFAFDSDRGNPFLPFNYSNGNAVVYTGTHDNDTTVGWFQERSEDDQQKVINYLGCVCNEGIHWSLIRLASSSVAALAIFPLQDILGLGSDCRMNLPGTAAGNWGWRYHPDQLNDWLSGHLSFITELYGRRIYHTD

SEQ ID NO: 54899 - DNA, 1990 bp, Arabidopsis thaliana
  CDS (195)..(1790)
gattttgtcatctggtggattagagtggagtggagctttgaattggatgatcattatccatgtcgattctacttaggccgtcgtcctctccttcactctgttcttctctcaagcttttccgattatcctctccggattctttaatcgacgcagctgtcctcaggaacaggacaaagccgtcgcagtcgtttcgaatggaggtcgtttcgagtaattccacgtgtctttctagtattagcgtcggtgaagattttccagcagaatatgagcagtggctaccggttccggatccagagagcgggagaagagctggcgttttgctacacccgacgtcgtttcgtggtcctcatggcattggtgatctcggagaagaagccttccggttcatcgattggcttcattctactggttgctccgtttggcaggttcttcctcttgttcctccagacgaaggaggatctccttatgcaggacaggatgcaaattgtgggaacacattgttgatttctctagatgagcttgtgaaagacggcttgttaatcaaggatgagctcccacaaccaattgatgctgactctgtgaactatcagactgccaacaagttaaagagtcccttgattacgaaggcagcaaagaggcttattgatggcaatggtgaactgaagagcaaactgctagatttccgtaacgacccctctatatcatgttggcttgaagatgctgcttattttgcagctattgacaatactttaaatgcatacagttggtttgagtggcctgaaccacttaaaaaccgtcatctttctgccttggaagctatatatgaaagccaaaaggagtttatagacttgttcattgctaagcaatttttgttccaaaggcagtggcagaaagttcgtgagtatgcacggcggcaaggagttgatataatgggagatatgcccatttatgtaggatatcacagtgcagacgtttgggcaaataagaaacatttcttactgaacaagaaaggctttcctcttcttgttagcggtgttcctcctgacttgttcagtgaaactggtcaactgtggggcagccctctttatgactggaaagcaatggagagtgaccaatattcttggtgggttaatcgaataagacgcgcacaggacttgtatgacgaatgcaggattgatcacttcagaggatttgcagggttttgggcggtcccttctgaagcgaaagttgccatggttggacgatggaaggtaggacctggaaagtcattatttgatgccatttccaaaggcgttgggaagatcaaaatcatagctgaagatttgggagttattactaaagatgtagttgagctgaggaaatctatcggagcacctggaatggccgtcctccaatttgcttttggaggaggcgccgataacccacatttacctcacaatcatgaagtaaaccaagttgtatactctggaactcatgacaacgacactattcgaggctggtgggacactctggaccaagaagaaaagtctaaggcaatgaaatacctgtcgatagctggagaagacgatatatcatggtcagtcatccaagctgcattctcttcaaccgctcaaaccgcaatcataccgatgcaagacattctaggacttggaagttctgccaggatgaacactccagccactgaggtggggaattggggttggaggattccaagttcaacgagctttgataatcttgaaactgaatctgacagactcagagatcttttgtcattgtacggacggctttgaggaaaacatttgacgtggaaaagaagaagaatctttggttttcttatcttttttgtaactttgctaatggtaaaagcaataaagtaagcagaagacgaacgaagcatgttgttgaaatagtggatcgatgttgatatgggccatatatgatgatggcatgttcaatctcactgttacttaataaattttcttcattgatg

SEQ ID NO: 54900 - protein, 531 aa, Arabidopsis thaliana
MEVVSSNSTCLSSISVGEDFPAEYEQWLPVPDPESGRRAGVLLHPTSFRGPHGIGDLGEEAFRFIDWLHSTGCSVWQVLPLVPPDEGGSPYAGQDANCGNTLLISLDELVKDGLLIKDELPQPIDADSVNYQTANKLKSPLITKAAKRLIDGNGELKSKLLDFRNDPSISCWLEDAAYFAAIDNTLNAYSWFEWPEPLKNRHLSALEAIYESQKEFIDLFIAKQFLFQRQWQKVREYARRQGVDIMGDMPIYVGYHSADVWANKKHFLLNKKGFPLLVSGVPPDLFSETGQLWGSPLYDWKAMESDQYSWWVNRIRRAQDLYDECRIDHFRGFAGFWAVPSEAKVAMVGRWKVGPGKSLFDAISKGVGKIKIIAEDLGVITKDVVELRKSIGAPGMAVLQFAFGGGADNPHLPHNHEVNQVVYSGTHDNDTIRGWWDTLDQEEKSKAMKYLSIAGEDDISWSVIQAAFSSTAQTAIIPMQDILGLGSSARMNTPATEVGNWGWRIPSSTSFDNLETESDRLRDLLSLYGRL

SEQ ID NO: 54901 - DNA, 1524 bp, Prochlorococcus marinus str. MIT 9301
  CDS (1)..(1524): transl_table=11
atgcctaaagaatcagttcttgcaaaaaaatcattaggcatacttatgcatccttcatgtattccaggagggggaggagtatgcggaacttttggcagaggagctaaagattggataaaaaaactacataggcatgggattgaatattggcaatttttacctcttacacccactgactgtatgggatctccctatagttctccatctagttttgctctaaacccatggttcttagacatagacgaattaatcaacaacgggtttatctttatttcaaataaagaagaattaggaccaacaaatcagaataaagattattttgactttaatgttgcggatgctttaacaaaaaaattaggttacctcctcttgcaaggttggagctcacaacctgaagaaacaaaactagatttttataaatggataagtagaaattcttgggttgaagattatgcattatttgttgtaatcaaagaggagtttaatatgttgccttggtgggaatggcctcaagaatttaaattaaaaaataacaagttcttaaaatcgtggatcaagaaaaaaagtgaagagatacttattaaaaaattaatacaatggcatcttgatgagcaatggagtgctattaaaaactttgcaaaatcaagagatattaagctaataggagatttacctttttatgtctcaagggacagctctgacgtatggagtaatagatcattattttcaatttttaaaaatggagatttaatttttcaaagtggtgttccacctgattatttttcatcaacaggacaattatggggcaccccaacatacttttggtcaaaacataagaggactaatttcaattggtggagaaaaagatttcaaaggcaatttgaactcgtggatatattgaggttcgatcatttcagggggttagccggttactggagagttaatggcagttctaaatcagcaattaatggaaaatggataaattctccaggtaaaacactattaaataaagtaaaaaaggatctggggtctaactatctaccaattattgctgaggatctgggagtaattaccccagatgtaatcaaactaaggaatttttttgaactacctggcatgaaaatattacaatttgcttttgatggtaatgaagataatccttatttacctaagaatattaaaggagaaaattgggttgtttatactggtactcatgataattctacttctgtttcatggtgggaatatttagattatgaatcaaaaaaaagaataaaagatgaatataaattttcagaaaatccttcttgggatttaatagaaattggcatgaatacaaatgcctatctctttatcgctcctatgcaagatctactatctctagacgattcaagtagattaaataaacccggcaccacaaaaaataactggaaatggaagttaaatcgatctttagaagaaatagaagataatataaaaatctttagtgagctaggaagtaattttgggagaactcgaaagtag

SEQ ID NO: 54902 - protein, 507 aa, Prochlorococcus marinus str. MIT 9301
MPKESVLAKKSLGILMHPSCIPGGGGVCGTFGRGAKDWIKKLHRHGIEYWQFLPLTPTDCMGSPYSSPSSFALNPWFLDIDELINNGFIFISNKEELGPTNQNKDYFDFNVADALTKKLGYLLLQGWSSQPEETKLDFYKWISRNSWVEDYALFVVIKEEFNMLPWWEWPQEFKLKNNKFLKSWIKKKSEEILIKKLIQWHLDEQWSAIKNFAKSRDIKLIGDLPFYVSRDSSDVWSNRSLFSIFKNGDLIFQSGVPPDYFSSTGQLWGTPTYFWSKHKRTNFNWWRKRFQRQFELVDILRFDHFRGLAGYWRVNGSSKSAINGKWINSPGKTLLNKVKKDLGSNYLPIIAEDLGVITPDVIKLRNFFELPGMKILQFAFDGNEDNPYLPKNIKGENWVVYTGTHDNSTSVSWWEYLDYESKKRIKDEYKFSENPSWDLIEIGMNTNAYLFIAPMQDLLSLDDSSRLNKPGTTKNNWKWKLNRSLEEIEDNIKIFSELGSNFGRTRK

SEQ ID NO: 54903 - DNA, 1731 bp, Arabidopsis thaliana
  CDS (1)..(1731)
atgtcgattctacttaggccgtcgtcctctccttcactctgttcttctctcaagcttttccgattatcctctccggattctttaatcgacgcagctgtcctcaggaacaggacaaagccgtcgcagtcgtttcgaatggaggtcgtttcgagtaattccacgtgtctttctagtattagcgtcggtgaagattttccatcagaatatgagcagtggctaccggttccggatccagagagcaggagaagagctggcgttttgctacacccgacgtcgtttcgtggtcctcatggcattggtgatctcggagaagaagccttccggttcatcgattggcttcattctactggttgctccgtttggcaggttcttcctcttgttcctccagacgaaggaggatctccttatgcaggacaggatgcaaattgtgggaacacattgttgatttctctagatgagcttgtgaaagacggcttgttaatcaaggatgagctcccacaaccaattgatgctgactctgtgaactatcagactgccaacaagttaaagagtcccttgattacgaaggcagcaaagaggcttattgatggcaatggtgaactgaagagcaaactgctagatttccgtaacgacccctctatatcatgttggcttgaagatgctgcttattttgcagctattgacaatactttaaatgcatacagttggtttgagtggcctgaaccacttaaaaaccgtcatctttctgccttggaagctatatatgaaagccaaaaggagtttatagacttgttcattgctaagcaatttttgttccaaaggcagtggcagaaagttcgtgagtatgcacggcggcaaggagttgatataatgggagatatgcccatttatgtaggatatcacagtgcagacgtttgggcaaataagaaacatttcttactgaacaagaaaggctttcctcttcttgttagcggtgttcctcctgacttgttcagtgaaactggtcaactgtggggcagccctctttatgactggaaagcaatggagagtgaccaatattcttggtgggttaatcgaataagacgcgcacaggacttgtatgacgaatgcaggattgatcacttcagaggatttgcagggttttgggcggtcccttctgaagcgaaagttgccatggttggacgatggaaggtaggacctggaaagtcattatttgatgccatttccaaaggcgttgggaagatcaaaatcatagctgaagatttgggagttattactaaagatgtagttgagctgaggaaatctatcggagcacctggaatggccgtcctccaatttgcttttggaggaggcgccgataacccacatttacctcacaatcatgaagtaaaccaagttgtatactctggaactcatgacaacgacactattcgaggctggtgggacactctggaccaagaagaaaagtctaaggcaatgaaatacctgtcgatagctggagaagacgatatatcatggtcagtcatccaagctgcattctcttcaaccgctcaaaccgcaatcataccgatgcaagacattctaggacttggaagttctgccaggatgaacactccagccactgaggtggggaattggggttggaggattccaagttcaacgagctttgataatcttgaaactgaatctgacagactcagagatcttttgtcattgtacggacggctttga

SEQ ID NO: 54904 - protein, 576 aa, Arabidopsis thaliana
MSILLRPSSSPSLCSSLKLFRLSSPDSLIDAAVLRNRTKPSQSFRMEVVSSNSTCLSSISVGEDFPSEYEQWLPVPDPESRRRAGVLLHPTSFRGPHGIGDLGEEAFRFIDWLHSTGCSVWQVLPLVPPDEGGSPYAGQDANCGNTLLISLDELVKDGLLIKDELPQPIDADSVNYQTANKLKSPLITKAAKRLIDGNGELKSKLLDFRNDPSISCWLEDAAYFAAIDNTLNAYSWFEWPEPLKNRHLSALEAIYESQKEFIDLFIAKQFLFQRQWQKVREYARRQGVDIMGDMPIYVGYHSADVWANKKHFLLNKKGFPLLVSGVPPDLFSETGQLWGSPLYDWKAMESDQYSWWVNRIRRAQDLYDECRIDHFRGFAGFWAVPSEAKVAMVGRWKVGPGKSLFDAISKGVGKIKIIAEDLGVITKDVVELRKSIGAPGMAVLQFAFGGGADNPHLPHNHEVNQVVYSGTHDNDTIRGWWDTLDQEEKSKAMKYLSIAGEDDISWSVIQAAFSSTAQTAIIPMQDILGLGSSARMNTPATEVGNWGWRIPSSTSFDNLETESDRLRDLLSLYGRL

SEQ ID NO: 54905 - DNA, 1521 bp, Borrelia burgdorferi B31
  CDS (1)..(1521): transl_table=11
atgaaatataaaaaaacaaggattaatttaaacttaaaaagaaaaagtggtattttgcttaacataagctctttaccatctaaatatggcattggagatttagggaaaggagcttataaatttatagattttttgtttgcatcttctcaaagttattggcaaatgtttgcttattcccctattgattttacaagatctcccccttattcaattttttcggcttttgctggcaatgtttattatattgatttagaagcccttgacaaatttatagattcagatttaagtcttttaaaagaaaatgaaaccaggtattctgatttaaaaaaaataagttttaaagataaatttcttaaagaagccgctttaaattttattaatagagcttcggctgatgaggttagaagctttgaaaaatttaaaaaaaagtcttcttattggcttttagattttgcaagttttgttgcgtttaaagaatatttttttaaagagtcaaagaatgcttttaatgttctttttgatagaggaattcttaaaagaaatgaaaaagatttatttaaattgagaaatatcctttcaaaagagattaaagtgcaagaggtattgcagtatttctttttttcacagtttcaagctttaaagcgctatgcaaatgataaggggattgagctaattatgaacgtgcctttttttatagcatatgactctgctgatgtttgggcataccaaaaatattttaagctaagatttgatgcaagcaaagataagattgcaggaatttctccagattattttttagaacaagagcaagcttgggatagtgcagcttatagctggaatgttttaaagaaatttaagtatgaatggtgggcaaaaaggattggggttttaagaaagtatgcagatataattaaaattgatcatttcagaggttttgtttctacttgggaagttagtgcgggcgagtcttatgcttttaatgggttgtgggtaaagtcgccaggacgagattttttcaattttattttaaatgaaattaaagatttaaaaatttgggttgaagattttcaaaatgatcttgaagatgtttcaagactaagagatttttttaattttccaggaatgaaaataatgaatcttgcctttgattttgattcaagcaatcaaaatcttcctcataattatattaaaaattgcatagtttacacaggaagtggtgataatgatacaatacgagagtttattaattctttagatgatttgcataaaaagtacatttttgattatttaaatacaaatgaaaattttgttgtttgggacatgataagaagtgctatgggtagtgtttctgataatgtgatagtgtcaatgcaagattatattaatttaggagataaatttagtgcaaatatcccaaaaagcactttagataattgtatttttagattattagaaagtgatttagatgctactttgagtcaaaatataagttttattacaaggctttatggcagggcttaa

SEQ ID NO: 54906 - protein, 506 aa, Borrelia burgdorferi B31
MKYKKTRINLNLKRKSGILLNISSLPSKYGIGDLGKGAYKFIDFLFASSQSYWQMFAYSPIDFTRSPPYSIFSAFAGNVYYIDLEALDKFIDSDLSLLKENETRYSDLKKISFKDKFLKEAALNFINRASADEVRSFEKFKKKSSYWLLDFASFVAFKEYFFKESKNAFNVLFDRGILKRNEKDLFKLRNILSKEIKVQEVLQYFFFSQFQALKRYANDKGIELIMNVPFFIAYDSADVWAYQKYFKLRFDASKDKIAGISPDYFLEQEQAWDSAAYSWNVLKKFKYEWWAKRIGVLRKYADIIKIDHFRGFVSTWEVSAGESYAFNGLWVKSPGRDFFNFILNEIKDLKIWVEDFQNDLEDVSRLRDFFNFPGMKIMNLAFDFDSSNQNLPHNYIKNCIVYTGSGDNDTIREFINSLDDLHKKYIFDYLNTNENFVVWDMIRSAMGSVSDNVIVSMQDYINLGDKFSANIPKSTLDNCIFRLLESDLDATLSQNISFITRLYGRA

SEQ ID NO: 54907 - DNA, 1509 bp, Nostoc sp. PCC 7120
  CDS (1)..(1509): transl_table=11
atgccttttattagatcaagcggtgttctactgcatcctacctcgtgtcctagtcgatttggcattggggatttaggtttggaagcttacaaatttattgatttcctggaaaagagctatcaacaatattggcaagtcttacccttaggcccgactggatatggtaattctccttatatgtcttactcagctttggcaggaaatcatctgctgattagcccagaaaaattactagatgaaggtttgctatctgacgaagattttgcccatctcccaaattttcccaatgaaaaagtagattttgatcaggttgcaccaatcaaaattcaactcctcaaaaaagcttgtgagaattttaagactaaagcatcacccttacaacagaaagggtttgcggggttttgtgaaactaaaagctattggctagatgactatgccttattcatggcgctgaaggatactaaagatagctccagttggcacacttgggaaccagcactagcaaagcgagaaccagacgcattggagaaggttcagcgtcaactgacggatgagattttttattacaagttcattcaatatgaatttttccgccagtggtcagagttgaagagttacgccaatatgcgggggatcgaaattatcggtgatatcccgatttatgtagcccatgatagtgctgatgtctgggcgaatcctgatatattttgccttgatgaagaaacgggggaagttgcacttatggcgggtgtcccaccagattattttagtgctactggtcaattgtggggcaacccggtttacaactgggaggagttgcaaaaacaagactttaagtggtgggtacaacgttttgaggcgatgctcgattacgttgatgtgattcgtatcgaccacttccgaggctttgaagctttctggactgtaccccaaggtgaggaaacagctatgaatggtgagtgggtaacagcaccaggggaagaactttttgatgcgattaagcaaaaactaggtaaattacctgttttggcggaagatttgggagtaattacaccagaagtagaagcgctacgagacaagtacgaattcccagggatgaaggttttgcagtttgcttttggttctgaccctggaaatccttttttacctttcaactacagccgtaattttgtagtttatacagggactcacgataatgacacaactgtaggttggtttaacacagccaatgattatgagaaaaacaatctgttactttatttaggttgtattagtcctgagggtatccactgggatttaattcgcttggctttgagttctgtagcgaatcaagccattgttcctttacaagatattttaggcttgggtaatgaggcgcgaatgaattttcctagtattgctgagggaaattgggcgtggcgctatgattttgccgtgttaacagatgaattaagcgatcgcttaaaaatcctcactaaactctatggtcgcgcacctcaaggtaaatag

SEQ ID NO: 54908 - protein, 502 aa, Nostoc sp. PCC 7120
MPFIRSSGVLLHPTSCPSRFGIGDLGLEAYKFIDFLEKSYQQYWQVLPLGPTGYGNSPYMSYSALAGNHLLISPEKLLDEGLLSDEDFAHLPNFPNEKVDFDQVAPIKIQLLKKACENFKTKASPLQQKGFAGFCETKSYWLDDYALFMALKDTKDSSSWHTWEPALAKREPDALEKVQRQLTDEIFYYKFIQYEFFRQWSELKSYANMRGIEIIGDIPIYVAHDSADVWANPDIFCLDEETGEVALMAGVPPDYFSATGQLWGNPVYNWEELQKQDFKWWVQRFEAMLDYVDVIRIDHFRGFEAFWTVPQGEETAMNGEWVTAPGEELFDAIKQKLGKLPVLAEDLGVITPEVEALRDKYEFPGMKVLQFAFGSDPGNPFLPFNYSRNFVVYTGTHDNDTTVGWFNTANDYEKNNLLLYLGCISPEGIHWDLIRLALSSVANQAIVPLQDILGLGNEARMNFPSIAEGNWAWRYDFAVLTDELSDRLKILTKLYGRAPQGK

SEQ ID NO: 54909 - DNA, 1407 bp, Pyrobaculum aerophilum str. IM2
  CDS (1)..(1407): transl_table=11
atgttaagaggcgccggcgtattattgcacataacctcgctgccagggggctgttttgtcggcgacttggggccggaggcgtataaattcgcagacagcttggcatacgcagagcagacctactggcagacactgcccataaaccacacagtccccgagtacgagaactccccctacagcgccgtgtctagctacgccggagaccccgttttaataagccttgagttaatgaagcgcgacggcttaatagacagcgttccccagtgcccgcccgcggagagagccgattacataaaggcctgggaggtaaagagaaaggcgctggaaaaggctctgaagagggccgggaggctgagcgactaccgccattttaaagacgtcacgccttggcttgacgactacgcctattacatggccatgagggagaggttcgggccgtggcctgtatggcctaaggaggagccgcctcccgcgtcactggaattatataaattcgcccagttcgtcttctggacgcagtgggagaggtttaaagaatatgtaaacagcctgggcattttcctcatcggcgacctccccttttacccaagtctcgatagcgtagatgtgtggaggaacaaaaagtattttaaagtgggagaagacgggaggccgctgtacgtggctggggtacccccagattatttctcggccactggacagctgtggggaaaccccgtttacaactgggaggcgctggaaagagacggctttaagtggtgggttaataggcttaaacacgcagtgacagtttttgactacgtcaggctggaccacttcaggggatacgtggcgtattgggaagtgccggggggcgagacgacggcagttagggggaggtgggcgccgtcccccgggaggaggctgtttgaagcagccgccgcggctgtagacctcggcagattaatcgccgaggacttaggctatataaccccggaggtggaggcgttgcgagaagaattggggctgccgggaatgcgggttttacaattcgcctgggacggaaacccagccaatccccacaagccgcacaaccacgtgaaaaacgccgtggtgtacacgggcactcacgacaataatacagcagtcggctggtataaagaagaggccactgcccgggccaggcgggagtttaaaaagtactcaaattgcgccggagaagtacactggtgttttataaaactggcacacatgtccgtggcaaacgtggcaatagtccccgtgcaagacctactgggactgggttcagaggccaggatgaataggccaggcactgtggggggcaactggaagtggaggcttggggcccagccggagccgcgcgtttggaagaggcttagagacgtcacgaggacttatggcagataa

SEQ ID NO: 54910 - protein, 468 aa, Pyrobaculum aerophilum str. IM2
MLRGAGVLLHITSLPGGCFVGDLGPEAYKFADSLAYAEQTYWQTLPINHTVPEYENSPYSAVSSYAGDPVLISLELMKRDGLIDSVPQCPPAERADYIKAWEVKRKALEKALKRAGRLSDYRHFKDVTPWLDDYAYYMAMRERFGPWPVWPKEEPPPASLELYKFAQFVFWTQWERFKEYVNSLGIFLIGDLPFYPSLDSVDVWRNKKYFKVGEDGRPLYVAGVPPDYFSATGQLWGNPVYNWEALERDGFKWWVNRLKHAVTVFDYVRLDHFRGYVAYWEVPGGETTAVRGRWAPSPGRRLFEAAAAAVDLGRLIAEDLGYITPEVEALREELGLPGMRVLQFAWDGNPANPHKPHNHVKNAVVYTGTHDNNTAVGWYKEEATARARREFKKYSNCAGEVHWCFIKLAHMSVANVAIVPVQDLLGLGSEARMNRPGTVGGNWKWRLGAQPEPRVWKRLRDVTRTYGR

SEQ ID NO: 54911 - DNA, 1494 bp, Clostridium perfringens str. 13
  CDS (1)..(1494): transl_table=11
atgagaagagcaagtggaataataatgcatattgcttccttacctggaaagtatggaataggtacttttggtaaggaagcatttgagtttgtagattttttaaagaaagctggacaaggatattggcaaatattgcccttaggtcctacgagttatggtgattcaccatatcaatcattttcagcctttgcaggaaatccatattttatagattttgatattttaaataaagaaggattacttgataaaaaagattaccaaggaattaattttggaaatgacccagaaaaaatagattatgctttattatttgacaagaagatgagagtattaagaatagcatatgaaaaatctttagataaaaacaaagaagaaattgaaaagtttagagaagaaaataaactttggcttgaagattatgctttatatatggcaatcaaaaatgaaaatgaattagtaagttggcaagaatgggatgaaaaattaagattaagagataaaaagaccttagaagaatataaagttaaattagaaaaagaaataaactactgggtattcttacaatatcatttctttaagcaatggaataaattaaaagagtatgcaaatagttttggaattaagataattggagatatgcctatatatgttgcagaggatagtgcagatgtttgggcaaatccaaaagcatttttattagatgaaaataatattcctaaaaaggttgctggatgtccacctgatgctttttcagaaacaggtcaattatggggaaatcctatatatgattggaattacatggatgatacaggatattcttggtggattgatagagtaagagaaagctttaagctttatgacatattaagaatagaccattttagagggtttgaagcttactggcaaataccatatggagatgaaactgctgtaaatggtgagtgggttaaaggccctggaataaaattatttaatgcaattaaagaagagttaggagaggtcaatgtaatagcagaagaccttggttatttaactcaagaggttatagattttagaaatgaaactggattcccaggaatgaaggttttacaatttgcctttgattctagggaagaaagtgattatcttccacataattatccagttaactcaatatcttatacaggtactcatgataatgatacatttagaggttggtttgaagttacaggaaatagagaagatgtggaatattctaaaaaatatttaaaacttactgaagaggaagggtataactggggatttatcagaggagtttggagcagtgtatcacatacagcgatagctctaatgcaagatttcttaaacttaggaaatgaggcaagaataaactatccatctactcttggtggcaattggcaatggagagttaaagatgatgctctaactgatgaattagcagagaaaatatatgatataacaaaattatatggaagggtgaatattaatgaataa

SEQ ID NO: 54912 - protein, 497 aa, Clostridium perfringens str. 13
MRRASGIIMHIASLPGKYGIGTFGKEAFEFVDFLKKAGQGYWQILPLGPTSYGDSPYQSFSAFAGNPYFIDFDILNKEGLLDKKDYQGINFGNDPEKIDYALLFDKKMRVLRIAYEKSLDKNKEEIEKFREENKLWLEDYALYMAIKNENELVSWQEWDEKLRLRDKKTLEEYKVKLEKEINYWVFLQYHFFKQWNKLKEYANSFGIKIIGDMPIYVAEDSADVWANPKAFLLDENNIPKKVAGCPPDAFSETGQLWGNPIYDWNYMDDTGYSWWIDRVRESFKLYDILRIDHFRGFEAYWQIPYGDETAVNGEWVKGPGIKLFNAIKEELGEVNVIAEDLGYLTQEVIDFRNETGFPGMKVLQFAFDSREESDYLPHNYPVNSISYTGTHDNDTFRGWFEVTGNREDVEYSKKYLKLTEEEGYNWGFIRGVWSSVSHTAIALMQDFLNLGNEARINYPSTLGGNWQWRVKDDALTDELAEKIYDITKLYGRVNINE

SEQ ID NO: 54913 - DNA, 1521 bp, Fusobacterium nucleatum subsp. nucleatum ATCC 25586
  CDS (1)..(1521): transl_table=11
ttgaaaagagaatgtggagttttattagcaattagttctctaccaagttcttatggcattggagattttgggaaagaagcatatcgttttattgatttcttagtgtcctctggacaaagtctgtggcaaatattaccactgtgtcctgtggaatatggaaactctccctatcaatcaccttctacttttgctggaaattttttatatttagatttagaaaatttagttaataatgaatatttaacacaaaaggatattgatgtattaaaacaagaagtatcctatatagattatgaatatattaaaagccagaaagagtctttattaagaaaggcttctcaggcttttttttacaaaaagaaagaagaaaaagattttaaaaaatttcaaaaagaaaataaattttggttagaagattatgcactttttcttactttaaataagaaatttaaaggtaaaatgtggaatacttggcaaaaagaatataaatttagagagaagaaatttatagaagaagctaagaagacctatcaagaagaatatctatatgaaagttttatacaatattattttcaaaaacaatggaaacaattaaaaaattatgcaaataaaaaaggaataaaaattataggtgatttacctatatatgttgcaacacatagtgctgatacttggcaaaatccaaaattattctgttttgataaacatttaaaaataaaattggtggcaggttgcccaccagattatttttctaaaactggacaattatggggaaatgttctttataattggaaagagatgaaaaaaaatgactattcttggtggataaatagaataaaacatagttttttactttatgatattttaagactagatcattttagaggttttgcatcttattgggctattcgttatggagaaaaaactgcaatcaatggaaaatgggaaaaaggacctagatatcaattttttaaaaaattagaaagcaaaataactaatatggatgtagtggcagaagatttaggaacacttacagcagatgtttttaaacttttagaacagacaaagtatccaaatatgaaagtattggaatttggtttagctgaatgggataatatgtaccatcctagaaattatcttgaaaattcagttgcctatacgggcacacatgataatatgccaatagttgagtggtatgaaaatttaaatcaagaagaaaaaaatatctgtgatgagaatttaaaaaactttttaaaagactatgatacaaatatttgggaaccaattcaatggagagcaatagaagcactttatgcttcaaaatctaatagggttatagtccctctacaagatatactaggtttaggtagggattcaagaatgaatactccttcaacagttgggaacaattgggcttggagaatttattggaattatagatacaaggatttagaaaataaattatataatttagcaaagaaatatagaagaattagtaagggagaggataatgaaaattga

SEQ ID NO: 54914 - protein, 506 aa, Fusobacterium nucleatum subsp. nucleatum ATCC 25586
MKRECGVLLAISSLPSSYGIGDFGKEAYRFIDFLVSSGQSLWQILPLCPVEYGNSPYQSPSTFAGNFLYLDLENLVNNEYLTQKDIDVLKQEVSYIDYEYIKSQKESLLRKASQAFFYKKKEEKDFKKFQKENKFWLEDYALFLTLNKKFKGKMWNTWQKEYKFREKKFIEEAKKTYQEEYLYESFIQYYFQKQWKQLKNYANKKGIKIIGDLPIYVATHSADTWQNPKLFCFDKHLKIKLVAGCPPDYFSKTGQLWGNVLYNWKEMKKNDYSWWINRIKHSFLLYDILRLDHFRGFASYWAIRYGEKTAINGKWEKGPRYQFFKKLESKITNMDVVAEDLGTLTADVFKLLEQTKYPNMKVLEFGLAEWDNMYHPRNYLENSVAYTGTHDNMPIVEWYENLNQEEKNICDENLKNFLKDYDTNIWEPIQWRAIEALYASKSNRVIVPLQDILGLGRDSRMNTPSTVGNNWAWRIYWNYRYKDLENKLYNLAKKYRRISKGEDNEN

SEQ ID NO: 54915 - DNA, 1557 bp, Thermosynechococcus elongatus BP-1
  CDS (1)..(1557): transl_table=11
atgcactttccccgctcctgtggtttactgctccatcccacctcccttcccggcggtcacggcattggtgagttgggtaccgctgcccgtgagttcttggaatttttagtggccagtgatcagcagtactggcaggtgctgcccctaggccccaccggctttggcaattccccctatatgtgctattcggctatggcgggtaacccactgctgattagcttggaggaagtcgcaaaagcgggttggttaacggaggcggatctagggcagattacccttgagaatcgcgatcgcgtggatttcgacgctgtgattagccagaagctgccgctcctacgcctggcggcgcaacgtttccagagtcaggctaccccaggagactggcaggccttccgggacttccaagcccttgcccactactggctgcccaactatgccctctttatggcaattaaggaccaccaccagggacagccgtggtatgaatggcccgctcctttgcgcgatcgcgagcccaccgcccttgccgctatccaagtggttctcaaagaccgcatttttgagtacgaatttcagcaatttctcttttaccagcagtggcacgccctcaaggaggccgccaaccaacaggggattcaaattatcggtgatattcccatttacgttgcccacgacagtgtagatgtttgggcctttccccaattttttgagctgaatccagaaaccggtgccgctgccctgatggccggtgtgcccccggattacttcagtgctacaggacaactctggggcaatcccatttacaactggaaagcccttgcggccgatggctactcttggtggattgagcgcttccgtgccctcctcgcctatgtggacattatccgtgtcgatcactttcgtggctttcaggcctactggcaagtgccggaaggggagaaaacagctgtcaacggccaatggcaaccaggtcctggtgctgccttcttcgaagctttgcaagcggccttgggacgactgcctattctagcggaggatttgggggatattacccccgatgtcattgccctgcgggatcagtttcagtttccggggatgaaaattctccagtttgcctttggcggtggttcggataatccgtttttgccctttaatcaagagcgcaactgtgtggtgtataccggcacccacgacaacgacacaactgtgggctggtatcgtaacctcagtaactgggaacggcagcgttttattgactatttgggctatacccccagcgagccccactgggccttgattcgcatggccttgggaaccgttgccaaccaagccattattcccgttcaagacctgctcggcctcgatagccatgcccgcatgaattttcccggtactgaccaaggcaactgggcgtggcggctgactcctgggcaactcacccctgaacttgccgctcatttgaggcacctggtgcacctctttggccgtcaagcgccccccagacctcagcctggtgaagccgaggcaggaaccctcggaatggagaagcagccctaa

SEQ ID NO: 54916 - protein, 518 aa, Thermosynechococcus elongatus BP-1
MHFPRSCGLLLHPTSLPGGHGIGELGTAAREFLEFLVASDQQYWQVLPLGPTGFGNSPYMCYSAMAGNPLLISLEEVAKAGWLTEADLGQITLENRDRVDFDAVISQKLPLLRLAAQRFQSQATPGDWQAFRDFQALAHYWLPNYALFMAIKDHHQGQPWYEWPAPLRDREPTALAAIQVVLKDRIFEYEFQQFLFYQQWHALKEAANQQGIQIIGDIPIYVAHDSVDVWAFPQFFELNPETGAAALMAGVPPDYFSATGQLWGNPIYNWKALAADGYSWWIERFRALLAYVDIIRVDHFRGFQAYWQVPEGEKTAVNGQWQPGPGAAFFEALQAALGRLPILAEDLGDITPDVIALRDQFQFPGMKILQFAFGGGSDNPFLPFNQERNCVVYTGTHDNDTTVGWYRNLSNWERQRFIDYLGYTPSEPHWALIRMALGTVANQAIIPVQDLLGLDSHARMNFPGTDQGNWAWRLTPGQLTPELAAHLRHLVHLFGRQAPPRPQPGEAEAGTLGMEKQP

SEQ ID NO: 54917 - DNA, 1497 bp, Streptococcus agalactiae 2603V/R
  CDS (1)..(1497): transl_table=11
atgaaaaaacgtgcaagtggtgtcttaatgcacatcacttctctaccaggtgatttaggtattggaacatttggacgagaagcctacgcttttgttgattttttggtcgaaactgatcaaaaattttggcaaattcttcccttaacaacaacaagcttcggggactctccttaccagtctttttctgcagtagctggtaatacacatttaattgattttgatttgctaacgcttgaaggtttcatttcgaaagatgactaccaaaatattagttttggacaggatccagaagttgttgattatgctggtctgtttgaaaaacgccgtccagttttagaaaaagcagttaaaaatttcttgcaagaagagagagctacgagaatgctatctgatttcttgcaagaagaaaaatgggtaactgattttgctgaatttatggcgatcaaagaacattttggtaataaggcgcttcaagaatgggatgacaaggctattatacgccgcgaagaagaagccttagcaggatatcgtcaaaagcttagtgaagtgataaaatatcatgaagtaacgcaatatttcttttacaaacaatggtttgagttaaaagaatatgctaatgataaagggattcaaattatcggtgatatgccaatctacgtttctgccgatagtgtagaagtttggacaatgcctgaactgtttaaattagatcgcgacaaacaaccacttgctattgctggtgtaccagcggatgatttttctgacgatggtcagctttggggcaatcctatttacaattgggattaccacaaagagtcagattttgactggtggatttatcgtattcaatctggtgttaagatgtatgactatttgcgtattgatcattttaaaggtttttcagattattgggaaattcgaggagattatcaaacagctaatgatggctcatggcaaccagctcccggtccagaattatttgcaactatcaaagaaaaattaggtgatttacctattattgctgagaatttaggctatattgatgagagagcagagagattactggctggaacagggttcccaggtatgaaaatcatggaattcggtttttatgatacaacaggaaatagtattgatattcctcataactacacagaaaatacaattgcatatgctggaactcatgataacgaagttattaatggctggtttgaaaatcttacagtcgaacagaaagcttatgcagaaaattacatgcgtcgtttgccaaatgagcccattactgagactgtactgcgtaccttgtatgcaaccgttagtcaaacaacgattacatgtatgcaagatctactagataaacctgcagatagccgtatgaacatgccaaataccgttggaggtaactggcaatggcgtatgagaaaagaagacttaacagaaaatcgcaaagcattcttaaaagagattacaactatttataatagagggaataaataa

SEQ ID NO: 54918 - protein, 498 aa, Streptococcus agalactiae 2603V/R
MKKRASGVLMHITSLPGDLGIGTFGREAYAFVDFLVETDQKFWQILPLTTTSFGDSPYQSFSAVAGNTHLIDFDLLTLEGFISKDDYQNISFGQDPEVVDYAGLFEKRRPVLEKAVKNFLQEERATRMLSDFLQEEKWVTDFAEFMAIKEHFGNKALQEWDDKAIIRREEEALAGYRQKLSEVIKYHEVTQYFFYKQWFELKEYANDKGIQIIGDMPIYVSADSVEVWTMPELFKLDRDKQPLAIAGVPADDFSDDGQLWGNPIYNWDYHKESDFDWWIYRIQSGVKMYDYLRIDHFKGFSDYWEIRGDYQTANDGSWQPAPGPELFATIKEKLGDLPIIAENLGYIDERAERLLAGTGFPGMKIMEFGFYDTTGNSIDIPHNYTENTIAYAGTHDNEVINGWFENLTVEQKAYAENYMRRLPNEPITETVLRTLYATVSQTTITCMQDLLDKPADSRMNMPNTVGGNWQWRMRKEDLTENRKAFLKEITTIYNRGNK

SEQ ID NO: 54919 - DNA, 1530 bp, Streptococcus mutans UA159
  CDS (1)..(1530): transl_table=11
atggaaaaacgcgcaagtggtatcctgatgcatatcagttctctaccgggaaaatttggaattggtacttttgggcaggaagcttatgattttgttgatttcctaaaaaaaacaggtcaaacatattggcagctcttacccttaacgacaacgagttatggtgattctccttaccaatctttttctgccgttgctggtaatgtgaattttattgattttaagaaattacaagaagctggcttattggacgaggatgactataattctgtttcttttggagaagacgaagaaattgttgattatgctctattatttaaagtacgtcggccaattttggaaaaggctgttatcaattttctggcagacaagactaatctgaaaaaattagctttgtttgaagaaaaaaatgaaacttggcttgatgactatgctgaatttatggccatcaaggagcattttggcaataagtctttgcaagagtggggcgataaaaaggctattcgccgtgatgaggagcgtttggtacgttatcgtcatttgttggccgatgaaattagctaccataaggttacacagtacttcttcttcgaacaatggctggcgctgaaagcttatgctaataaaaataagatcaaaattattggcgatatgcctatctatgtagctaaagacagtgttgaagtctggactatgcctgaactctttaagatggatgatgacttgcagcctttgtcggttgctggctgtccgcccgatgaatttagtgatgagggtcagttgtggggaaatcctatttatgattggaaaaagcatcgagaaacaggctttgcttggtggatttatcgtattcaagaaagttttaagatctatgatatcttacggatagatcactttaaaggtttctcagattattgggaaattaaaggtaattccaaaactgcaaaaaatggcagctggcatccaggacctggtattgctctctttagggctgttcaaaatgttttgggcgatatgccaattattgcagaggatttgggttacgtagatgatagagccagacagcttctaaaagaaacaggctttccaggcatgaaaattttagaatttggtttctatgatttaagcggccgcagtgttgatattccccaccattatgttcaaaatagtgttgcttatattgggacgcatgataatgatgttgtcaatggttggtatgatcgtcttactgttgagcaagaagaatttgtggatgcttatactaatcgtaagccaattgagccggttaatcaggctatgcttagactgctcttttcaactgtcagcaatacagctattttaaccatgcaggatttgctcaataagccagccagctctagaatgaataccccatcaacaatcggcggtaactggcaatggcggatgagagcaaaagatttaacacaagataaaataaactttttaagtaaattaacgaaactttatcaaagaggaaatgaagaaaatgacacaaaaaacaaaacaattcagtaa

SEQ ID NO: 54920 - protein, 509 aa, Streptococcus mutans UA159
MEKRASGILMHISSLPGKFGIGTFGQEAYDFVDFLKKTGQTYWQLLPLTTTSYGDSPYQSFSAVAGNVNFIDFKKLQEAGLLDEDDYNSVSFGEDEEIVDYALLFKVRRPILEKAVINFLADKTNLKKLALFEEKNETWLDDYAEFMAIKEHFGNKSLQEWGDKKAIRRDEERLVRYRHLLADEISYHKVTQYFFFEQWLALKAYANKNKIKIIGDMPIYVAKDSVEVWTMPELFKMDDDLQPLSVAGCPPDEFSDEGQLWGNPIYDWKKHRETGFAWWIYRIQESFKIYDILRIDHFKGFSDYWEIKGNSKTAKNGSWHPGPGIALFRAVQNVLGDMPIIAEDLGYVDDRARQLLKETGFPGMKILEFGFYDLSGRSVDIPHHYVQNSVAYIGTHDNDVVNGWYDRLTVEQEEFVDAYTNRKPIEPVNQAMLRLLFSTVSNTAILTMQDLLNKPASSRMNTPSTIGGNWQWRMRAKDLTQDKINFLSKLTKLYQRGNEENDTKNKTIQ

SEQ ID NO: 54921 - DNA, 1494 bp, Streptococcus pyogenes SSI-1
  CDS (1)..(1494): transl_table=11
atgaacaaacgtgcaagcggtatcttaatgcatattagttccctgcctgggaaatttgggataggcacttttggaaaatcagcttttgaatttgttgattttctagcagagacgaaacaaacctattggcaaattctgcctttaacaacgacgagttttggagattctccttatcagtcattttcagctattgctgggaacacacatttcattgattttgaattgctagtagatgatgaacttttagaagcagcagatttgtgtgatattacattcggcacaaatcctgaagtagtagactatgctcagctttttcaagttagacgtccacttttagaaaaagcagtgagagcttttgttgctgaacaagaaaatgtgtgtaaattagaagcttttgaaacagcttctagctggttaactgattttgctgaatttatggctttaaaagaatattttaacaataaagccttacaagattgggacgacgaaactgtcattaaacgccaagaagactcacttaataattaccgtgagttgcttgcaaaaaagattacctatcataaagtctgtcaatacttcttttaccaacaatggtcagccttgaaaacttacgctaaccataaagggatagaaattattggtgatatgcctatttatgtttctgcggacagtgtagaagtttggacgatgcctgagctatttaaagtagatagtgataaaaagccattgtttattgcaggtgtaccagcagatggctttagtgaagatggtcagctgtggggaaatccaacctacaattggtctgctcatgaaaagtctaattttgcatggtggatttatcgtattcaagaaagtttcaaactatatgatcagctaagaatcgatcattttaaaggcttctcagatttttgggaaattcctgctggtgataaaactgctagaaatggccattgggcctcagccccaggtatagcattattttctgcggttcgtgaggccttaggagagctccctatcatcgcagaaaacttgggttatattgatgaaaaagcagagcagctattagcatcaacaggctttcctggcatgaagatattagaatttggtttatttgatataacgagtcaaagtatagatttaccacattactatgaccgtaattgtgtcgcttacacagggactcatgataacgaggtggttaacggatggtatgacaatcttagtgaagaacaagtacactttgtaaataactatcttcacaaacatgcagatgaaagtattacaaaagccatgctaagaacaatctttgcttctgtttgtgatacagccattctttgcatccaagatttattagataaagatggtaagagtcgtatgaatatgccaaatacaattggaggtaattggcaatggcgtatgcttgacggtgaattgaaccaagatcacaaagactaccttatttatttaacagatctttatggtcgcgcaagataa

SEQ ID NO: 54922 - protein, 497 aa, Streptococcus pyogenes SSI-1
MNKRASGILMHISSLPGKFGIGTFGKSAFEFVDFLAETKQTYWQILPLTTTSFGDSPYQSFSAIAGNTHFIDFELLVDDELLEAADLCDITFGTNPEVVDYAQLFQVRRPLLEKAVRAFVAEQENVCKLEAFETASSWLTDFAEFMALKEYFNNKALQDWDDETVIKRQEDSLNNYRELLAKKITYHKVCQYFFYQQWSALKTYANHKGIEIIGDMPIYVSADSVEVWTMPELFKVDSDKKPLFIAGVPADGFSEDGQLWGNPTYNWSAHEKSNFAWWIYRIQESFKLYDQLRIDHFKGFSDFWEIPAGDKTARNGHWASAPGIALFSAVREALGELPIIAENLGYIDEKAEQLLASTGFPGMKILEFGLFDITSQSIDLPHYYDRNCVAYTGTHDNEVVNGWYDNLSEEQVHFVNNYLHKHADESITKAMLRTIFASVCDTAILCIQDLLDKDGKSRMNMPNTIGGNWQWRMLDGELNQDHKDYLIYLTDLYGRAR

SEQ ID NO: 54923 - DNA, 1518 bp, Rhodopirellula baltica SH 1
  CDS (1)..(1518): transl_table=11
atgcgtttcccgcgatcctccggcattctttgtcacatcaccagtttgccttcggagttgggcatcggtgatctaggttcagcggcgtacgagatggtcgacttcctccatgcggccggccaatcgatttggcaaattctaccgctcagtcctcccgcctatggcaactcaccctacagcgcctactcggcgtttgggggcaacgcgttgttaatcagcttggaggctcttgtcgacgaaggtttgctcgaaacatccgacctcgacggattcacgcagaccgacccggcacgcgttgacttcggtacggtcagcgaattcaaacacgccagactcaaactcgcctacgaacgttacctaaccaagccaccacgtgaactgaagatcgccttcgagttgttcctggatgcgaacgattggtggctcgatgagttttccttgtttgaagttttcttgaacaagttcgaacaatcgaactggtcgaagtggcccgatccgatccgtcgtcgcgaacccgatgcacttggacaagctcgccaagagatgtcacgcgagatcgactattctcgcttccaacaattcttgttcgaccgccagtggaatcgactgaaggcgtatgccaatgagcggcaagtccaactgtgtggcgacatgccgatcttcgtcgcttacgaaagtgcagatgtctggggcaaccaagacatgtttgcattgaatgacgatggcacgcccaagttggtcgccggcgtgccaccagactacttcagcgaaaccggtcaactttggggcaaccctcaatacgattgggatgcacttgagaaggctgactacgcttggtggaccgcgcgtttccgtcgttcgttggaacagtttgatctgctgcgagttgatcacttccgcggcttcgaagcttattgggaagttccctacggcgccgaaactgcgatcggcggtcagtggcgaactggtcccggcgctaaaccgttccgtgccgccgaaaaagaactcggcgaactccctttcatcgccgaagacctagggatgatcaccgatgcggtgcacgaactgcgtgaagagctcgggttccccgggatgcgtgtactccagttcggattcgcgacgatggaagacgatttccatcgcccgtcgacctaccccgaatcctgtgtcgcctacacaggcacccacgacaacgacacggtgatgggttggtaccatctgcgaacgccacccgaggaaggcgacgatcctctcgatgaagtcgtgaccagcgaacatgaagtgcattggcaattgatcgatgccgtcatgtcatcagccgctgaaatcgcaattgtccccattcaagatgtgctggggctgggtaacgaggctcgaatgaatttgcctgggatcgccgacggcaattgggcgtggcgattgtcacctcaagcgttgacgcaagaacacgccgaccgtctcgcgttgttgtgtcaacaacgaggccgtctcacgcacgaagtccccagcgtcggctga

SEQ ID NO: 54924 - protein, 505 aa, Rhodopirellula baltica SH 1
MRFPRSSGILCHITSLPSELGIGDLGSAAYEMVDFLHAAGQSIWQILPLSPPAYGNSPYSAYSAFGGNALLISLEALVDEGLLETSDLDGFTQTDPARVDFGTVSEFKHARLKLAYERYLTKPPRELKIAFELFLDANDWWLDEFSLFEVFLNKFEQSNWSKWPDPIRRREPDALGQARQEMSREIDYSRFQQFLFDRQWNRLKAYANERQVQLCGDMPIFVAYESADVWGNQDMFALNDDGTPKLVAGVPPDYFSETGQLWGNPQYDWDALEKADYAWWTARFRRSLEQFDLLRVDHFRGFEAYWEVPYGAETAIGGQWRTGPGAKPFRAAEKELGELPFIAEDLGMITDAVHELREELGFPGMRVLQFGFATMEDDFHRPSTYPESCVAYTGTHDNDTVMGWYHLRTPPEEGDDPLDEVVTSEHEVHWQLIDAVMSSAAEIAIVPIQDVLGLGNEARMNLPGIADGNWAWRLSPQALTQEHADRLALLCQQRGRLTHEVPSVG

SEQ ID NO: 54925 - DNA, 1551 bp, Prochlorococcus marinus subsp. marinus str. CCMP1375
  CDS (1)..(1551): transl_table=11
atgggatttaattcttctgctcaccctcgtttcagtggagttttacttcatccctcatcattgccttccggaggcgtttgtggaacttttggtcagccatcaagagattggatcaaactgctttctgagaatcaaattgctgtttggcaaatattgccattagcaccacccgattcatttggttctccttatagttctccttctggatttgcatttaacccttggttcttagatgctaatgaccttgctaaagaagggttcattaattcagatgatataaatgaattttctgagaccttgccttctgattcttcaaagatagatttcactcttgcaactcgtcggtctaacgaaattggcaaggcattaataaaaaattggaagaatcaagattcaggaaaacagattgaatttctcgattggtcttccaatcagcactggcttgatgaccatgtgtgctttatggaacttcgtaggcaattttcttacctcccatggtgggaatggcctagcgctttttcttctcgtaaccaaaatgaattaggcctctggaagattaaacacaaagatgatttattagaacatgccctggttcaatggcatttaaaccgtcaatggaatcttttaagaaaaatagccaagaaattcaatgttgctatttttggagatcttcctttttatgtttcacgagatagtgcagatgtatggggaaatcgatctcttttttcaattttcagcaaaggtgaccttcatagtcaaagtggtgtccctcccgattatttttctgaaactggacaactctggggtactcctgtatatcgctggcaaaaacataaaaggacaagatttagatggtggagaaatagaattagaagacaatggttacaagttgatttattgcgcttagatcatttcagagctcttaattcatattggtcagttccagggggacaaaagacggcacaacatggttgctggttgccttctcctggattggaattgcttactattttgcagcaagattatggtaaaagtttgcctttagtagcagaagatcttggagtaattacaaagcaagttaatagtttgcgtgaacactttggttttcctggtatgaaaattcttcaatttgcatttaatggtgaccctagtaatccttatttacctgaaaactttatagggcataaatggattgtttatactggaactcatgataattctactacagttggatggtgggatgaatgtgaccctgagattaaaaatagagtttcagaaggatatgatggagcctataattgtccttcatggaagttaatagatgtgggaatgaaatcaaactcaatattatttatatcgccaatacaagatatactctctttaggtaatgaagccaggctaaataaacctggtacaattgaaaataactggtcttggaaattggaacattttgacaatgattttaataaatcaattagtaaatacggagaggtatctagatctaatggacgctcatcagatagtagaaatagcataattgattatttttaa

SEQ ID NO: 54926 - protein, 516 aa, Prochlorococcus marinus subsp. marinus str. CCMP1375
MGFNSSAHPRFSGVLLHPSSLPSGGVCGTFGQPSRDWIKLLSENQIAVWQILPLAPPDSFGSPYSSPSGFAFNPWFLDANDLAKEGFINSDDINEFSETLPSDSSKIDFTLATRRSNEIGKALIKNWKNQDSGKQIEFLDWSSNQHWLDDHVCFMELRRQFSYLPWWEWPSAFSSRNQNELGLWKIKHKDDLLEHALVQWHLNRQWNLLRKIAKKFNVAIFGDLPFYVSRDSADVWGNRSLFSIFSKGDLHSQSGVPPDYFSETGQLWGTPVYRWQKHKRTRFRWWRNRIRRQWLQVDLLRLDHFRALNSYWSVPGGQKTAQHGCWLPSPGLELLTILQQDYGKSLPLVAEDLGVITKQVNSLREHFGFPGMKILQFAFNGDPSNPYLPENFIGHKWIVYTGTHDNSTTVGWWDECDPEIKNRVSEGYDGAYNCPSWKLIDVGMKSNSILFISPIQDILSLGNEARLNKPGTIENNWSWKLEHFDNDFNKSISKYGEVSRSNGRSSDSRNSIIDYF

SEQ ID NO: 54927 - DNA, 1521 bp, Prochlorococcus marinus subsp. pastoris str. CCMP1986
  CDS (1)..(1521): transl_table=11
atgagtttaaaatcagttctaaaaaataaatcgttaggtatacttgttcatccttcaagtcttcccggaggtagttactgcgggacctttggagaaggcgctaaagattggattaagaagctttgtaagtataagattaatcactggcaattcttacctcttactccaacagattcaactggatctccttatagttcgccatccagttttgcgttaaatccttggtttcttgatatcaataaattgattgaagaaaactttatcatttcattaaataaaaaggatttacaatcaattaatcagaacgaagatcattttgattttgattatgcaaataatttatcgaaaaaattaggagaatatcttttatttgattgggaatctcaatctgaaatgagaaaaactgatttttatttatggaataaaaaaaatacttgggttgaagattattcaatctttatggtcttaagagagaaattcaatatgttgccatggtgggagtggccattggagtttaagcaaaaggaaaatgaatttataaaaacatggataaaagacaaaaaaaatgaaatacttaaaacaaaattaatacaatggcatcttgataaacagtggaaggaaatcaaagtctttgccaaaactaatggaattacactaataggtgatttgcctttttatgtttcaagagacagtgtggatgtatggagtaataaatcactattttctatctctcaaaatggagatttactttttcaaagtggagtgcctcctgattatttctcatctacgggacaactatggggtactcccacttactattgggctaagcacaaaagtacagcatttagatggtggagaaaaagatttaagagacaatttgaacttgttgacatattaagacttgatcattttagagcgttggctggatattggagagttgatgggaatgcccaaaatgctattaatgggtcatggattaattcccctgggaaagagctattaaatcttttaaaaaaagatttaaaatctgattatctacctatcattgctgaggatttaggagtaataactaaagatgtagagatattaagggataattatgaattacctggtatgaagattttacaattcgcattcgatgggaatgacaataacccttatctacctaaaaatatcgaaaaagagaactgggttgtttatacaggaacccatgataacgctacctccacatcgtggtgggactgtttagatattacaattaaaacccatattaaagataaatataaatactcaattgatccctcttggaatttaatggaaattggcatgagtacaaaagcaaacctttttatctctccaattcaagatatcttatctttggacgattcaagtagattaaatacacctggtacaattactaacaattggagatggaaattaaatcaaactcttgacgagatagatatgaatttaaaaaaatatagtgaccttggaaataattatgggagattaagcaattag

SEQ ID NO: 54928 - protein, 506 aa, Prochlorococcus marinus subsp. pastoris str. CCMP1986
MSLKSVLKNKSLGILVHPSSLPGGSYCGTFGEGAKDWIKKLCKYKINHWQFLPLTPTDSTGSPYSSPSSFALNPWFLDINKLIEENFIISLNKKDLQSINQNEDHFDFDYANNLSKKLGEYLLFDWESQSEMRKTDFYLWNKKNTWVEDYSIFMVLREKFNMLPWWEWPLEFKQKENEFIKTWIKDKKNEILKTKLIQWHLDKQWKEIKVFAKTNGITLIGDLPFYVSRDSVDVWSNKSLFSISQNGDLLFQSGVPPDYFSSTGQLWGTPTYYWAKHKSTAFRWWRKRFKRQFELVDILRLDHFRALAGYWRVDGNAQNAINGSWINSPGKELLNLLKKDLKSDYLPIIAEDLGVITKDVEILRDNYELPGMKILQFAFDGNDNNPYLPKNIEKENWVVYTGTHDNATSTSWWDCLDITIKTHIKDKYKYSIDPSWNLMEIGMSTKANLFISPIQDILSLDDSSRLNTPGTITNNWRWKLNQTLDEIDMNLKKYSDLGNNYGRLSN

SEQ ID NO: 54929 - DNA, 1566 bp, Prochlorococcus marinus str. MIT 9313
  CDS (1)..(1566): transl_table=11
atggttgagggcagttcagcgttagtccgcacgaccggggtgttacttcatcccacagcactgcctgtcagtccagtttgcggcagtttcggtgccccttcaagggcttggttgcaatcacttgctcgccatgacattggtgtgtggcagttgttgcctttggctcctcctgatgcgacagggtctccctacagctccccttcaagctttgctctaaacccttggttgcttgatgccgatgatcttgttgatgaggatttcctgtctgcatccgttctgcgtgagttgccaggaacagttcctatccaggagccttgcgcctcggttgattttgctttggctgaccttcgcagtcagcgacttggcattgccttaagggaggcttggcttgagcaggctagagatcagcatcttgcctttgagagttggtgtggcaagcagttctggcttgaggaccatgttttatttatggagctccgtcgtcagcatcaaggccttccttggtgggaatggccggaaggcttggcagctcatcaacgtagtgccctcaatgcctggaaaggtcatcatcaggaggctctgcttgaacatcgtttgctgcaatggcagcttgatcggcagtggcaagcactgagacatctagcaggcgagcttggcgttttgttgtttggtgatctgcctttctatgttgcgcgcgatagcgctgacgtctggagtcatcagggcctgttttcgattcttcaaggcggggagcttgagatccaaagtggtgttccccctgattatttctccagtacaggacaactctggggcacgcctgtttatcgctggtggcggcatcgcttgagtggattccattggtggcgtagccgctttgtgcgtcaatggcaacaggtggatcttttacgcctcgaccatttcagggcgcttgcgtcttattgggcagttcctggatccgattcgacagcggagcacggggagtggcggtcttctccaggggcagctttattgaagaggctaaggcgtgatgctggtggcagcttgccactgattgcagaagatctgggagtgattactcctgatgtggaagagctacgagaccaatttggtttgcctggaatgaaaattctccagtttgcttttgatggcaatcccagtaatccttatctacctgaaaatattcagggtcatcactgggtggtttatacaggcactcacgacaatccaacgacgctgggttggtggcagcagcttgatctcgacgcccgtgagcgggtcgcagatcgattgaagggtgcagttcatgcccctggttggcagttgttggagctaggcctagcgacagaggcgtgtttagtgatgaccccagtgcaggatttgcttcatttagatgatgcagctcgtttcaacacccctggcactgtcgaggggaattggtgttggcggttgtcttgctttgattcagctcttgatggggctctgagcggctatggtgagagaggagctgtctggggacgttcgcttgaatcggcagccggtttgctgacggcatctgcgagtcggtaa

SEQ ID NO: 54930 - protein, 521 aa, Prochlorococcus marinus str. MIT 9313
MVEGSSALVRTTGVLLHPTALPVSPVCGSFGAPSRAWLQSLARHDIGVWQLLPLAPPDATGSPYSSPSSFALNPWLLDADDLVDEDFLSASVLRELPGTVPIQEPCASVDFALADLRSQRLGIALREAWLEQARDQHLAFESWCGKQFWLEDHVLFMELRRQHQGLPWWEWPEGLAAHQRSALNAWKGHHQEALLEHRLLQWQLDRQWQALRHLAGELGVLLFGDLPFYVARDSADVWSHQGLFSILQGGELEIQSGVPPDYFSSTGQLWGTPVYRWWRHRLSGFHWWRSRFVRQWQQVDLLRLDHFRALASYWAVPGSDSTAEHGEWRSSPGAALLKRLRRDAGGSLPLIAEDLGVITPDVEELRDQFGLPGMKILQFAFDGNPSNPYLPENIQGHHWVVYTGTHDNPTTLGWWQQLDLDARERVADRLKGAVHAPGWQLLELGLATEACLVMTPVQDLLHLDDAARFNTPGTVEGNWCWRLSCFDSALDGALSGYGERGAVWGRSLESAAGLLTASASR

SEQ ID NO: 54931 - DNA, 1539 bp, Synechococcus sp. WH 8102
  CDS (1)..(1539): transl_table=11
atgacgactccatcccgaagcacaggggtgcttctacatcccacagcacttcctgggagtgcagtctgcggaagcttcggagaaccatgccgccgttggatcaatctgctggcggacaacaacatcggcgtgtggcaacttctgccacttgcacctcctgacggaaccggctcgccttacaactcaccctccagcttcgcgctgaatccctggtttcttgatgccgaggaacttcgccgggatggcttcatcagtgagcaggattgccaagacttacctggagcgagtgaaccaagcagtggcgtcgagagattggactttggcctggcccaacagcgaagcggcgcccttgcccaaacactgctcaaaggatggccgaagcagccgaccaatcatcaccagacgtttgaacgttggtgcaaaaaacagccgtggctggaagctcacgcctgcttcagcgttctgcatgaacagcagggtgaagcctggtggacctggcctgatgggcttgcaagtaacaaccgcaaggcgctgcgtgaatggaaacgtgatcatgccgatgcactgctggccatcaagctgcagcaatggcacttggatcaacagtggaatgcaatcagggagctagcacgagagaaaggcgtcatactgttcggagatctgccgttctatgtcagtgcagacagcgctgatgtctggagcaatcgtcacttattcaccatcaaggagaacggtgaactcacaacccaaagtggcgtacctcctgactacttctccgaaagcggacagctctggggttcaccggtttatcgctggggacgacatcgcttaacgcgctatagatggtggagacagcgattcacacgacaacgccagctagcggacctgttgcgactcgatcactttcgagcactagctgcctactgggcagtccccggagcagacaagacagctaaaaacggacagtggcagccgtctccgggaaacgagctgctgaagaagcttcgtcaagatggcaatggagaattacctttaattgctgaagacctaggggtcatcacacccgatgtagaggagctacgcgataactttaaattgcgagggatgaaagtgcttcaatttgccttcgatggacaggccgacaacccatacctgcctgaaaatatcgagggacgacgttgggtggtctacaccggcacccacgacaacccgactacactgggctggtggaacacacttgatcaggacagccgcaaccgaatcacatgtcgaatcaatggagcagtgaacgcaccggcttggcagttgctcgacatggcatttgcaacatcggcagaactggtcgtcgccccactgcaggatctgcttcacttagatgattcagctcgtttcaacacaccagggacatccacaggaaattggaactggcgtcaaccgaactttgataaaaacgtggaaggtgcacttcagggttttggagaaagaggatcgatctggggacgctccaaaaatggagccaagcacatgacaaaaaattag

SEQ ID NO: 54932 - protein, 512 aa, Synechococcus sp. WH 8102
MTTPSRSTGVLLHPTALPGSAVCGSFGEPCRRWINLLADNNIGVWQLLPLAPPDGTGSPYNSPSSFALNPWFLDAEELRRDGFISEQDCQDLPGASEPSSGVERLDFGLAQQRSGALAQTLLKGWPKQPTNHHQTFERWCKKQPWLEAHACFSVLHEQQGEAWWTWPDGLASNNRKALREWKRDHADALLAIKLQQWHLDQQWNAIRELAREKGVILFGDLPFYVSADSADVWSNRHLFTIKENGELTTQSGVPPDYFSESGQLWGSPVYRWGRHRLTRYRWWRQRFTRQRQLADLLRLDHFRALAAYWAVPGADKTAKNGQWQPSPGNELLKKLRQDGNGELPLIAEDLGVITPDVEELRDNFKLRGMKVLQFAFDGQADNPYLPENIEGRRWVVYTGTHDNPTTLGWWNTLDQDSRNRITCRINGAVNAPAWQLLDMAFATSAELVVAPLQDLLHLDDSARFNTPGTSTGNWNWRQPNFDKNVEGALQGFGERGSIWGRSKNGAKHMTKN

SEQ ID NO: 54933 - DNA, 1515 bp, Gloeobacter violaceus PCC 7421
  CDS (1)..(1515): transl_table=11
ttgctgcttcctagagcgagtggaatcctcctgcacccgaccagcctgccgggtccctacgggatcggcagtttgggcagcgaggcccgtgaatttatcgacctgatggcgatcaccggccagcgcttctggcagatcttgccgctggcaccgaccggctacggcaactgcccctatatgtcctgctcggcttttgcaggaaacccactgctggtggacccggaggatctggtggcgcaggcactcatcgacaaagacgacctggcaccggacgagctgaagacgaccgccggctggcaccacccgaagatcaacttcgaggaggccgtcgcctacaagacgcgcttactcgagaccgcctgcgaaaattttgccgccaaaggcgacagcgacaaaaaactcttttgggcctactgcgagcgcgagggctggtggctcgacgattacgccctgttcatggcgctcaaagaagccaacgacactctgccctggcaggagtgggaccagggattggcgttgcgcgagggggcggtcctcaagcagcagtcgcgcgagttgcgcgaccgggtgttctatcaccagttcagccagtatctattttcccggcagtggagtgccctcaaacagtacgccaacggccgcggcgtgagcatcctgggggatctgcccatttatgtcgccgccgacagcgccgatgtctgggcgcacccgcatctgtttcagctcgacgagagcggcaatccgacggtggtggccggggtgccgcccgattacttcagcgccaccggccagttgtggggcaaccccatctacgactgggaggcgatggagcgcaacggctacgcctggtggatcaaccgcatcaagcgcatgctcgacatggtggacctggtgcgcatcgaccactttcgcggtttcgcatcgtactgggaagtggaggcgggccggacgacggccatcgacggccgctggatcaaaggccccggcccacaactgttcgatgcgatcgaaaaggccctgggcagcctaccggtggtggcggaggatctgggggtgctcaccgacgaggtcgaaacactgcgggatcgctatgggctgttcggcatgaaggtgctgcagtttgccttcgacggcatggccaacaacatccacctgccccacaaccacgtgcgcagttccatcgtctacaccggcacccacgacaacgatacgaccgtgggctggtacaaccactcgccgcgctgggtgcacgaggcgaccgagcgctatctctacctcaataccggctgggaaatccactgggcgttggtgcgctgcgcccttgcctcggtgtgcaatctgtcgatcttaccgatgcaggatgtcctgggtctgggcagcgaggcgcgcatgaacactcccggggtagcggagggcaactgggactggcgggtcggcaccttcgaggcggtcgaaccctggatgcgcgagcgtctggcggatttgacggctctttacggtcgttggtcgggctga

SEQ ID NO: 54934 - protein, 504 aa, Gloeobacter violaceus PCC 7421
MLLPRASGILLHPTSLPGPYGIGSLGSEAREFIDLMAITGQRFWQILPLAPTGYGNCPYMSCSAFAGNPLLVDPEDLVAQALIDKDDLAPDELKTTAGWHHPKINFEEAVAYKTRLLETACENFAAKGDSDKKLFWAYCEREGWWLDDYALFMALKEANDTLPWQEWDQGLALREGAVLKQQSRELRDRVFYHQFSQYLFSRQWSALKQYANGRGVSILGDLPIYVAADSADVWAHPHLFQLDESGNPTVVAGVPPDYFSATGQLWGNPIYDWEAMERNGYAWWINRIKRMLDMVDLVRIDHFRGFASYWEVEAGRTTAIDGRWIKGPGPQLFDAIEKALGSLPVVAEDLGVLTDEVETLRDRYGLFGMKVLQFAFDGMANNIHLPHNHVRSSIVYTGTHDNDTTVGWYNHSPRWVHEATERYLYLNTGWEIHWALVRCALASVCNLSILPMQDVLGLGSEARMNTPGVAEGNWDWRVGTFEAVEPWMRERLADLTALYGRWSG

SEQ ID NO: 54935 - DNA, 1482 bp, Geobacter sulfurreducens PCA
  CDS (1)..(1482): transl_table=11
atgagacagaaacgtcgcagcggcatcctgctccatccgacttccctgccgggtccgggggggatcggatcgctcgggaaagagtgccgccatttcatcgatttcctcgaagaggcggggcagagcctctggcaggttcttccgctggggcccgcagcctacggcaattccccctattcctgctattcggcttttgctggcaaccccctgctgatcgacctggcgaccctcgtggatgagggggacctggagcccgaggaggctgtggcggaggtgtctgccgatcatgtggactttccggctgtggatgcgttcaagtcacgcgcgctccggaccgctgcggcccggttccacgcccacggtgacacggatcgtaaacaggagttctggcacttttgcgatactaccccctggcttcacgacgctgcgctgttcatggctctcaaggagcatttcggcggcaaaagctggaatacctggcccaaggagattgcccgccgggagtcggccgcgctcgaaaagtattcggttcggctgggcgtggccattggcgaacacaagtatatccagtggcagttttcccgtcagtggcgacatgtcagggaatatgccaacagcaaggggattgcggttgtcggcgatatccccatctttgtggctttcgattcaaccgatgtctggacgaatccgggccttttcaagctcgacgacaagggcaagcccaccgtggtagccggggtcccgccggactatttcagcaagacaggccagcgatgggggaaccctctctatgactgggatgccatggccgccgatggatttcgctggtggatcgagcggttccgcggttcgttcgcgctccatgatgtggtcagggtcgatcacttccgagggttcgaggcgtgctgggaggttccggccaaagaaaagacggcggtgaacggccaatgggtccccgctccggggacggcactctttgatgccgttatcggggcggtggggtcactgccgatcattgccgaggacctgggagtcattaccccggccgtggaggaactgcgcgaccggtaccgtttccccggcatgaagatcctccagttcgcctttgattccggcccgggcaatccctacctgccccacaacttcacccgtgactgcgtggtctacaccggcacccacgacaatgataccacccagggctggtttcaaagcctttccccccgggagcgacgagaagttctggcctataccgacaccacgggtaaggaggtccattgggagctgatccgtctcggcatggcctcggtggccgatatggcgattttcccgcttcaggatgtcatgggacttgatgggtcaagccggatgaatctccccggaacaccgcgcgggaactggtcgtggcgttatagtgagggtatgcttactgctaagcacgcaaaaaagcttctcgaattaaccgtgctttttgggagaaaatag

SEQ ID NO: 54936 - protein, 493 aa, Geobacter sulfurreducens PCA
MRQKRRSGILLHPTSLPGPGGIGSLGKECRHFIDFLEEAGQSLWQVLPLGPAAYGNSPYSCYSAFAGNPLLIDLATLVDEGDLEPEEAVAEVSADHVDFPAVDAFKSRALRTAAARFHAHGDTDRKQEFWHFCDTTPWLHDAALFMALKEHFGGKSWNTWPKEIARRESAALEKYSVRLGVAIGEHKYIQWQFSRQWRHVREYANSKGIAVVGDIPIFVAFDSTDVWTNPGLFKLDDKGKPTVVAGVPPDYFSKTGQRWGNPLYDWDAMAADGFRWWIERFRGSFALHDVVRVDHFRGFEACWEVPAKEKTAVNGQWVPAPGTALFDAVIGAVGSLPIIAEDLGVITPAVEELRDRYRFPGMKILQFAFDSGPGNPYLPHNFTRDCVVYTGTHDNDTTQGWFQSLSPRERREVLAYTDTTGKEVHWELIRLGMASVADMAIFPLQDVMGLDGSSRMNLPGTPRGNWSWRYSEGMLTAKHAKKLLELTVLFGRK

SEQ ID NO: 54937 - DNA, 1623 bp, Treponema denticola ATCC 35405
  CDS (1)..(1623): transl_table=11
atgaaaagaagttcaggtattattttacatcccacctcgttacctaatgatgaaggcatagggacaatcggtaaagaggcttttgcctttatcgattggttaaaaaaaacaagaacgggagtttggcagatgcttccgattggccccaccggttatggagactcaccctacgcttctttttcggcctttgcaggaaacccttatcttataagtcttcaagatctttatgaaaaaggctttttagaaaaaagagattttaccgaatacaaaaaaatcgtacaagaaaatactgatcctaaaagagcggatttcggtttaatccattaccataaaacaaaaatgttaaaaaaagcggcagcatctttattgcacaaaatggaaagagactcatcttcaaaagaagaacttgaaaatttctaccaagaagaaagtttttggctggacggatatgcagcctttatgacaattaaagaagactatgaagaaagactagataaagaaaatttagtgcaaggaatctggaatgaagtttggcccaaggagcttgccttaaataaaaaagataagataaaagaatttctaggcaaacactccgaagaatatgaaacccaaaagattatacagtttttctttttttcgcaatggaaaaaattaaaagaatacgctgaaaaaaacggtatacaacttataggagatattccgatatttgcggcaatggattcagccgatgtttggcaaaatcaaagcttatttttactggacaaagaagctacacctaaagccgtcgccggtgtacctcccgacttttttagccctacgggacagctttggggcaaccctctttatgactgggctaagatgaaaaaggacagctacctatggtggaaggcccgcataagacataccctaaaactattcgacataatacgcctcgaccattttagaggctttgaagccttttgggctatcccccaaggtgcaaaaactgctcaagaaggaaaatgggtgaaaggccctgaccatcatttttttgaagaaatacaaaaggatctgatttcattggatgaaaaatacaggggcgagcttcctatactaactgaagacttgggagttataacccctgaagttgcccgcctacgagatgattttaatttcccgacgatgaagatattgcaatttgcctttgacttaaacgaattaaaatcggaaaatctgactaatccttatctgcctcataaccacaaaaaaaactgtgccgtatataccggttcccacgataacgacacaatcatgggttggcttgaaggttcttccgatgagatgctgaaatttatttatacctatctttatggaaaaaaagcggataaaagaatttgctccattttaaacacttatgaatttaaaaaagaattagcctccgaaataatccgaaaagcgttttcttccgtggcggattttgcagccgtgcagatgcaggaccttttgtttttaaattctgaagcaagaatgaatgcaccttcaacagtcggaaaaaactggcaatggagagtaaccgggtcttatgaaaactgcgagatgaccgaaaaattggagctttggaatgttttgtacaatagggtttaa

SEQ ID NO: 54938 - protein, 540 aa, Treponema denticola ATCC 35405
MKRSSGIILHPTSLPNDEGIGTIGKEAFAFIDWLKKTRTGVWQMLPIGPTGYGDSPYASFSAFAGNPYLISLQDLYEKGFLEKRDFTEYKKIVQENTDPKRADFGLIHYHKTKMLKKAAASLLHKMERDSSSKEELENFYQEESFWLDGYAAFMTIKEDYEERLDKENLVQGIWNEVWPKELALNKKDKIKEFLGKHSEEYETQKIIQFFFFSQWKKLKEYAEKNGIQLIGDIPIFAAMDSADVWQNQSLFLLDKEATPKAVAGVPPDFFSPTGQLWGNPLYDWAKMKKDSYLWWKARIRHTLKLFDIIRLDHFRGFEAFWAIPQGAKTAQEGKWVKGPDHHFFEEIQKDLISLDEKYRGELPILTEDLGVITPEVARLRDDFNFPTMKILQFAFDLNELKSENLTNPYLPHNHKKNCAVYTGSHDNDTIMGWLEGSSDEMLKFIYTYLYGKKADKRICSILNTYEFKKELASEIIRKAFSSVADFAAVQMQDLLFLNSEARMNAPSTVGKNWQWRVTGSYENCEMTEKLELWNVLYNRV

SEQ ID NO: 54939 - DNA, 1521 bp, Prochlorococcus marinus str. AS9601
  CDS (1)..(1521): transl_table=11
atgcctatagagtcaattattgcaaaaaaatcattaggcgtacttatgcatccaacatgtattccgggaggaaatgtctgtggaacttttgggagaggagctaaagagtggataagaaaacttcataagcatggaattgaatactggcaatttttaccccttacacctactgactctacaggttcgccatatagttccccatctagctttgcactaaacccatggtttttggatatagatgatttaatcgaaaaaggttttatttacatctcaaataaagaaaatctgggtccaacaaatcaaaataaagatcattttgattttgatattgcggatgacctaacaaaaaaattaggtctcctccttttgcaaggttggagttcacaatctgaaaaaagaaaaattaattttaacaaatgggtcagtaggcattcttgggttgaagattatgcaacatttgttgttattagagaggaatttaatatgttgccttggtgggaatggcctcaagattttaaaataaaaaataacaagttcttaaaatcgtggattaagaaaaaaagtgaagagatacttattaaaaaattaatacagtggcatcttgatgaacaatggagcgtcattaaaaactttgcaaaatcaaaaaatattaagctcataggagatttgcctttttatgtctctagagacagcgccgacgtatggagtaataaatcattattttcaatttttaaaaatggggatttaatctttcaaagtggtgttccgcctgattatttttcatcaacaggacaattatggggtaccccaacttacttttggtcaaagcataaaaggactaatttcaattggtggagaaaaagatttcaaagacaatttgaacttgtggacatattaagatttgatcatttcaggggtttagcaggttactggagagttaatggcaattctaaaacggcaattattggaaaatggataaattctccaggtaaaacactattaaataaagtaaaaaaggatctagggggtaactatctacctattattgcggaggatttgggagtaataactccagatgtagagaaattaaggaaacgcttcgaactacctggcatgaaaatattacaatttgcttttgatggcaataaagataatccttatttaccaaagaatattgaaggagaaaattgggttgtttatacaggtactcacgacaactctacttctgtttcatggtgggaaaatttagattatgaatcccaaaaaagaataaaagatgagtataaattttcagaaaatccttcttgggatttaatagaaattggcatggagacaaatgctaatctttttatcgctccattacaagatctattatctctaaacgattcaagtagattaaacaaacctgggaccacaaaaaataactggaaatggaagttaaattgtcctttagaagaaatagaaaataatataaaaatgtttagtgagctaggaaataattttgggagaactctaatgtag

SEQ ID NO: 54940 - protein, 506 aa, Prochlorococcus marinus str. AS9601
MPIESIIAKKSLGVLMHPTCIPGGNVCGTFGRGAKEWIRKLHKHGIEYWQFLPLTPTDSTGSPYSSPSSFALNPWFLDIDDLIEKGFIYISNKENLGPTNQNKDHFDFDIADDLTKKLGLLLLQGWSSQSEKRKINFNKWVSRHSWVEDYATFVVIREEFNMLPWWEWPQDFKIKNNKFLKSWIKKKSEEILIKKLIQWHLDEQWSVIKNFAKSKNIKLIGDLPFYVSRDSADVWSNKSLFSIFKNGDLIFQSGVPPDYFSSTGQLWGTPTYFWSKHKRTNFNWWRKRFQRQFELVDILRFDHFRGLAGYWRVNGNSKTAIIGKWINSPGKTLLNKVKKDLGGNYLPIIAEDLGVITPDVEKLRKRFELPGMKILQFAFDGNKDNPYLPKNIEGENWVVYTGTHDNSTSVSWWENLDYESQKRIKDEYKFSENPSWDLIEIGMETNANLFIAPLQDLLSLNDSSRLNKPGTTKNNWKWKLNCPLEEIENNIKMFSELGNNFGRTLM

SEQ ID NO: 54941 - DNA, 1521 bp, Prochlorococcus marinus str. MIT 9515
  CDS (1)..(1521): transl_table=11
atgactttaaaatctgttttaaaaaaaaaatctttaggaatactattccatccttctagcatcccaggaggaagctatagtggcacttttggaaagggtgcaaaagaatggattgaaaagctttccaagcataagattgatttttggcaatttttacctcttacaccaacagattcaactggatctccttatagttctccatctagctttgctttgaatccttggtttcttgatattaatgagttaattgaaaaacattttatatttttatccaacaagcaggaattgcaatcagataatcagagtgaatctcattttgattttgatttcgcaaataaattatctaaatcattaggcgaatatcttttaattggatgggaatctcaatctgaagagaggaaaactgatttctacaaatggaataaaaaaaataattgggtagacgattattcactatttatgactattagagaggaatttaatatgttgccttggtgggagtggccatttgagtttaaacaaagaaaaattgaacttttaaagccatggctaaaggacaaaagtaatgaaattctaaaaacaaaattaatacagtggcatcttaataaacagtggctaaatatcaaagagtttgcaaaaaataaaggaattacacttgtaggtgatttacctttttatgtttcaagagacagtgcagatgtttggagtaataaatcactattctcaatatctcaaaatggaaaattacttttccaaagtggagttcctcctgattacttttcatctaatggacaactatggggtactcctacctactattggtctaaacataaaagaacaaatttcaaatggtggagagaaagatttaaaagacaatttgaacttgttgacattctaaggcttgatcattttagagctttggctggatattggaggattgatggtgatgctaaaaatgctattaatggaacttggattaattctcctggtaaagacttactaaatattctaaaaaaagactttaattctaattatttacctatcattgccgaggatcttggcgtaataaccaaagatgtggaattactaaggaacaattatgaattgccgggtatgaagattttgcaattcgcattcgatgggaacgaaaacaatccttatcttcctaaaaacatcacaggtgagaattgggttgtttatacaggaacacacgataatgccacttcttcttcgtggtgggactatttagatgagcatgttaaaaatgatattaaattcaactacaatttttctgatgatccctcttggaatttaatagaggttggaatgaaaacaaaagctaaactttttatctccccaatacaagatatcttatctttagatgactcttgtagattaaatactcccggcacaattaaaaataattggaaatggaaattaaataaaaaactagacgagattgatttaaatttacaaaaatatagtgaacttggaaatacttatggaaggataagtgattag

SEQ ID NO: 54942 - protein, 506 aa, Prochlorococcus marinus str. MIT 9515
MTLKSVLKKKSLGILFHPSSIPGGSYSGTFGKGAKEWIEKLSKHKIDFWQFLPLTPTDSTGSPYSSPSSFALNPWFLDINELIEKHFIFLSNKQELQSDNQSESHFDFDFANKLSKSLGEYLLIGWESQSEERKTDFYKWNKKNNWVDDYSLFMTIREEFNMLPWWEWPFEFKQRKIELLKPWLKDKSNEILKTKLIQWHLNKQWLNIKEFAKNKGITLVGDLPFYVSRDSADVWSNKSLFSISQNGKLLFQSGVPPDYFSSNGQLWGTPTYYWSKHKRTNFKWWRERFKRQFELVDILRLDHFRALAGYWRIDGDAKNAINGTWINSPGKDLLNILKKDFNSNYLPIIAEDLGVITKDVELLRNNYELPGMKILQFAFDGNENNPYLPKNITGENWVVYTGTHDNATSSSWWDYLDEHVKNDIKFNYNFSDDPSWNLIEVGMKTKAKLFISPIQDILSLDDSCRLNTPGTIKNNWKWKLNKKLDEIDLNLQKYSELGNTYGRISD

SEQ ID NO: 54943 - DNA, 1497 bp, Prochlorococcus marinus str. NATL1A
  CDS (1)..(1497): transl_table=11
gtgaaattggaaagaaattcaggaatcctgcttcatccaacctcattacctgatagtcctgtttgcggtagttttggtaaacctgctcgagaatggcttaatgaacttgctgcctttggaataggtgtgtggcaatttttacctcttgctcctactgatttatttggatctccatatagctctccatcaagttttgctttgaacccatggttccttgaccaaaatgatttagtgagggacggattcttagctaataacctggaagatttttcttctgcaaatgattgttttaataatagagttgattttcatttagcaaattcaaaagttaagttcttacgtttttctttggttgatgattggtataaacagaacagaactattcaagaagaatttgaaatatggtgctcaaaacaattttggttagatgatcattccatatttatggaactcaagattcaaaacaatgaccttccatggtgggaatggccagttgaatatgcaggtagggataagaaagaattagaaaattggaaaaaaaataaccaaaaagaattattaggccataaacttctccagtggcatttagacaggcagtggcaatcaatcagagcgcttgcgaaaaatctaggaatttatttatttggagatgtccctttttatgtatcaaaagatagtgctgatgtatggggtaatcggtcattattttctattttgactaattcagatacattccttcaaagtggagtcccacctgattatttttctgaaaccggtcagctctggggtaacccagtttatcgctggagtaggcacaaatcaagtagatatagatggtggagaaaaagaatttcaagacatctagaacaggtagattttttacgccttgatcattttcgtgccctcgaagctttttgggcaattcccggcaaagataaaacagcagagaatggattttggttgccctctccaggaaaacagatactaagtttaatcaaaaaagattgctgcggctctcttccattaattgctgaagacttaggtctcgtaacctcaaaagtagagaagttacgcgatgattatgaattagcaggaatgaagatacttcaattcgcttttgatgggaatttagataatccgtatttgccagagaatattaaagaagaaaattggattgtttatacaggaacgcacgacaattcaacttctcttggctggtggagagaaatggatcaaggtagaaaagaacaacttagagaaaggatttttgattatgagaatttcacttcttgggaattgattcgaataggcatggaaactaaagccaaattatttgtagcacctatgcaagatttgttaaatcttgatgatagctgtcgtttaaacaaacctggcacaacagaaaataattggtcatggagattaacgagaaatgatttaaatattagagatgctttgaaaaaatatggtgatttagctaaagcaaataaaagataa

SEQ ID NO: 54944 - protein, 498 aa, Prochlorococcus marinus str. NATL1A
MKLERNSGILLHPTSLPDSPVCGSFGKPAREWLNELAAFGIGVWQFLPLAPTDLFGSPYSSPSSFALNPWFLDQNDLVRDGFLANNLEDFSSANDCFNNRVDFHLANSKVKFLRFSLVDDWYKQNRTIQEEFEIWCSKQFWLDDHSIFMELKIQNNDLPWWEWPVEYAGRDKKELENWKKNNQKELLGHKLLQWHLDRQWQSIRALAKNLGIYLFGDVPFYVSKDSADVWGNRSLFSILTNSDTFLQSGVPPDYFSETGQLWGNPVYRWSRHKSSRYRWWRKRISRHLEQVDFLRLDHFRALEAFWAIPGKDKTAENGFWLPSPGKQILSLIKKDCCGSLPLIAEDLGLVTSKVEKLRDDYELAGMKILQFAFDGNLDNPYLPENIKEENWIVYTGTHDNSTSLGWWREMDQGRKEQLRERIFDYENFTSWELIRIGMETKAKLFVAPMQDLLNLDDSCRLNKPGTTENNWSWRLTRNDLNIRDALKKYGDLAKANKR

SEQ ID NO: 54945 - DNA, 1566 bp, Prochlorococcus marinus str. MIT 9303
  CDS (1)..(1566): transl_table=11
atggttgagggcagctcagcattagtccgcacgaccggggtgttacttcatcccacagcactgcctgcaagtccagtttgcggcagtttcggtgctccttccagggcttggttgcaatcacttgctcgccatgacatcggcgtgtggcagttgttgcctttggctcctcctgatgcgacagggtctccctacagctccccttcaagctttgctcttaacccttggttgcttgatgccgatgatcttgttgatgaggatttcctgtccgcatccgttcttcgtgagttgccaggaacagtccctatccaggagccttgcgcatcggttgattttgctctggctgaccttcgcagtcagcgacttggcatagccttaagggaggcttggtcagagcaggctagagaccatcatcttgcctttgagagttggtgtggcaagcagttctggcttgaggaccatgttttatttatggagctccgtcgtcagcatcaaggcctcccttggtgggaatggccggaaggcttggcagctcatcaacgtagggctctcaatgcctggaaaggtcatcatcaggaggcactgcttgaacatcgtttgctgcaatggcagcttgatcggcagtggcaagcactgagacatctagcaggcgagcttggcgttttgttgtttggtgatctgcctttctatgttgcgcgcgatagcgctgacgtctggagtcatcagggcctgttttcgatccttcaaggaggggagcttgagatccaaagtggtgttccccctgattatttctccagtacaggacaactctggggcacgcctgtttatcgctggtggcggcatcgctggagtggattccattggtggcgtagccgctttgtgcgtcaatggcaacaggtggatctcttacgtctcgaccatttcagggcgcttgcgtcttattgggcagtgcctggatccgatacgacagcggagcacggggagtggcggccttctccaggtgcagctctattgaagcggctaaggcgtgatgctggtggcatcttgccactggttgcagaagatctgggagtgattacccctgatgtggaagagctacgagaccaatttgggttgcctggaatgaaaattctccagtttgcttttgatggcaatcccagtaatccctatctacctgaaaatattaagggtcatcactgggtggtttatacaggcactcacgacaatccaacgactctgggttggtggcagcagcttgatctcgacatccgtgagcgggtcgtagatcgattgaagggtgtagttcatgcccctggttggcagttgctggagctgggcctagcgacagaggcgtgtttagtgataacccctgtgcaggatttgcttcatttagatgatgtagctcgtttcaacacccctggcactgtcgagggaaattggtgttggcggttgtcttgctttgattcagctcttgatggagccctgagcggctatggcgagagaggagctgtctggggacgttcgcttgaatcggcagccgctttgctgacggcatcttcgagtcggtaa

SEQ ID NO: 54946 - protein, 521 aa, Prochlorococcus marinus str. MIT 9303
MVEGSSALVRTTGVLLHPTALPASPVCGSFGAPSRAWLQSLARHDIGVWQLLPLAPPDATGSPYSSPSSFALNPWLLDADDLVDEDFLSASVLRELPGTVPIQEPCASVDFALADLRSQRLGIALREAWSEQARDHHLAFESWCGKQFWLEDHVLFMELRRQHQGLPWWEWPEGLAAHQRRALNAWKGHHQEALLEHRLLQWQLDRQWQALRHLAGELGVLLFGDLPFYVARDSADVWSHQGLFSILQGGELEIQSGVPPDYFSSTGQLWGTPVYRWWRHRWSGFHWWRSRFVRQWQQVDLLRLDHFRALASYWAVPGSDTTAEHGEWRPSPGAALLKRLRRDAGGILPLVAEDLGVITPDVEELRDQFGLPGMKILQFAFDGNPSNPYLPENIKGHHWVVYTGTHDNPTTLGWWQQLDLDIRERVVDRLKGVVHAPGWQLLELGLATEACLVITPVQDLLHLDDVARFNTPGTVEGNWCWRLSCFDSALDGALSGYGERGAVWGRSLESAAALLTASSSR

SEQ ID NO: 54947 - DNA, 1671 bp, Candidatus Protochlamydia amoebophila UWE25
  CDS (1)..(1671): transl_table=11
ttggtccgatgctctcaatcaaggaaatgttccgtatattacagaaattaccaatactcctcctgcacctccatttggttatcaaagatgatagatcctactttcttacttcattctcttgcggctaaacagtgggagcgaatcggtatcaagcaccatcatggaatcaatgttcctttatttagtgttcattcctctcaatcatgcggaattggggaatttacagacctttttcttttaatcgattggtgtaagtcgatcaattttgatttaattcagctcctccctttgaatgatagcggtcttggaaccagtccctacagtgccctatcagcctttgctttaagtcccctctatttagggttacatgctttaccacatttagaagaatttccctctttgcatgatgaattaaaagctattcctaaattatctaaccatcaacgcgttgactataagcttgtgcgtgaaaataaagaacgttttttacaccattattatgaacaagccggttctttgattttaaatagccaagcttaccaagcatttgttcaaaacaatgcctggttaaagggatatgctgtttttaaaactttaaagtctcaatatcaatggtcgaattgggaaagttggcccattgttgatcaatctcccacgccagaattgttagaaaaagtatatgccaagcatcaatccgaagtcgattttcactgcctcattcaatatctttgtgatcaacagcttaaatctgtgaaggaatatgccgatcgacatggcgtttatctcatgggtgatattcctattttgattgatcgagatagcgctgatgtttggttacatagatctctatttgatttagaattttcggccggagctcctcctgatatgtacagtagtgaagggcaaaattggggcttcccaatttacaattgggaagccctcgctcaggaaaattaccgttggtggatagatcgtttaaattggtcttgtcgctattatcatatttatcgtatcgaccatattattggttttttccgcatttggtctattcgtcgcagtttaacgagtcgacaaggagaatttattccttctgatgaagcaacttgggtcgatcatggacaacgcattatgtgtgttatgcttagagaatgtgaaatgcttcctatcggagaagaccttggtgcagtccctgatcgggtcagagaatgtttaagcgcacttggcatttgtggaacccgtgtaatgcgttgggaacggctttggaaagataatggccgttttcttctcccacaagaatatccagaacatagcatgacaactgtttcaactcatgacagcgaaaccttacaacagtggtggcaatcttttcctttagaagctcaagtcttcgctcaacttaagggctggtcttaccacccttatttaaatcgtgaataccaaaaagaaattttatgggacagccatcacacaagcagtttatttcatattaatcttttacaagaatatttggctcttattcctggtttgacttggcctcacctagaagatgagcggattaatatcccaggaattatctctgaaagaaattggagctatcgattcaaaccaagtttagaagaactcacctctcatccagcattaacctaccttatgcaacaacttattatttaa

SEQ ID NO: 54948 - protein, 556 aa, Candidatus Protochlamydia amoebophila UWE25
MVRCSQSRKCSVYYRNYQYSSCTSIWLSKMIDPTFLLHSLAAKQWERIGIKHHHGINVPLFSVHSSQSCGIGEFTDLFLLIDWCKSINFDLIQLLPLNDSGLGTSPYSALSAFALSPLYLGLHALPHLEEFPSLHDELKAIPKLSNHQRVDYKLVRENKERFLHHYYEQAGSLILNSQAYQAFVQNNAWLKGYAVFKTLKSQYQWSNWESWPIVDQSPTPELLEKVYAKHQSEVDFHCLIQYLCDQQLKSVKEYADRHGVYLMGDIPILIDRDSADVWLHRSLFDLEFSAGAPPDMYSSEGQNWGFPIYNWEALAQENYRWWIDRLNWSCRYYHIYRIDHIIGFFRIWSIRRSLTSRQGEFIPSDEATWVDHGQRIMCVMLRECEMLPIGEDLGAVPDRVRECLSALGICGTRVMRWERLWKDNGRFLLPQEYPEHSMTTVSTHDSETLQQWWQSFPLEAQVFAQLKGWSYHPYLNREYQKEILWDSHHTSSLFHINLLQEYLALIPGLTWPHLEDERINIPGIISERNWSYRFKPSLEELTSHPALTYLMQQLII

SEQ ID NO: 54949 - DNA, 1512 bp, Desulfovibrio vulgaris subsp. vulgaris str. Hildenborough
  CDS (1)..(1512): transl_table=11
atgagcgtgcgcgcaagtggcatcctgctgcatttctcctcgttaccatccgtcgggggcatcggcgacatcggccctgcggcccatgccttcgtgcgcctcttggcgtcggcgggccagtcgtgctggcaattcctccccctcaatccgacatcgacgttcataggcaactcaccctattcgagtccctcggcctttgcgtgcaatccgctgttcatcagccttgaacgtctcgccgacgaagggctggtctcatgggccgatatcggcgacctgccggggggtgtgagcgaaggcggcgcactttcgcgtgtcgactatgaggcggtggacagccaccggcgccgggtcttgcgcgccgcctacgaacgcaaccgtggtgcccttgccgttgatggcggtttccgtgacttctgccgtgccgaggcccactggcttgacgactatgcggccttcgtatccatcaagtccgcccattccggcgcaagctgggacgagtggcccgagaagctgtgcaggcgcgaccctgcggcactggggcactgggccgccagcgagtcggtggagatggactatgtgcgcttcgagcaatatctcttccatcgccaatggcgtgaacttcgcgccgtcgccgccaatgcgggggtgcgcctcatcggtgacgtgcccatctatgtcacctatgacagtgccgacgtgtgggctgcgccgcacttcttcaagctgggtgaagacctgcgaccagtcaccgtggcgggggtgccgcccgactatttcagcgagaccgggcagcgctggggaaacccggtgtacgactgggatgcgttgagggccgacggataccgctggtgggtgcgccggctgcgccgcaaccttgccttggcagacatggtgcgcatcgaccattttcgaggcttcgcgggtttctgggagattcctgcggaggaggcgacagccatcaacggtcgctgggtcagcgcgccgggtatggaactgttctccgtgctgtcacgggcgttgccgggcttgccgttcattgcggaggacctcggcgtcatcacgccggatgtgcgcgaattgcgcgacaccttcgccctgccgggcatgaaggtgctgcaattcgccttcggcggcgacccggcatccaaccctgacatccccttccggcatgtggaacgttcggtggtctatacggggacgcacgacaacccgcccacgcgggcgtggttcgacgccttgccggacggcgaccggtggcgtttcgagacctatgtcggacacgaggtcggctctgaccgggcggcgacggtcatgcagcgtctggcgctgggcagcgtggcggggctgtgcctcttgccgttgcaggatgtgctcgggcttgggggtgaggcgcgcatgaacatgccctccatcccgcagggcaactggtcatggcgcatgctgccggaacacatggaactccgacgctatgaggcgctggcgaggatgacggccctgtacggacgttgctga

SEQ ID NO: 54950 - protein, 503 aa, Desulfovibrio vulgaris subsp. vulgaris str. Hildenborough
MSVRASGILLHFSSLPSVGGIGDIGPAAHAFVRLLASAGQSCWQFLPLNPTSTFIGNSPYSSPSAFACNPLFISLERLADEGLVSWADIGDLPGGVSEGGALSRVDYEAVDSHRRRVLRAAYERNRGALAVDGGFRDFCRAEAHWLDDYAAFVSIKSAHSGASWDEWPEKLCRRDPAALGHWAASESVEMDYVRFEQYLFHRQWRELRAVAANAGVRLIGDVPIYVTYDSADVWAAPHFFKLGEDLRPVTVAGVPPDYFSETGQRWGNPVYDWDALRADGYRWWVRRLRRNLALADMVRIDHFRGFAGFWEIPAEEATAINGRWVSAPGMELFSVLSRALPGLPFIAEDLGVITPDVRELRDTFALPGMKVLQFAFGGDPASNPDIPFRHVERSVVYTGTHDNPPTRAWFDALPDGDRWRFETYVGHEVGSDRAATVMQRLALGSVAGLCLLPLQDVLGLGGEARMNMPSIPQGNWSWRMLPEHMELRRYEALARMTALYGRC

SEQ ID NO: 54951 - DNA, 1494 bp, Streptococcus pyogenes MGAS10394
  CDS (1)..(1494): transl_table=11
atgaacaaacgtgcaagcggtatcttaatgcatattagttccctgcctgggaaatttgggataggcacttttggaaaatcagcttttgaatttgttgattttctagcagagacgaaacaaacctattggcaaattctgcctttaacaacgacgagttttggagattctccttatcagtcattttcagctattgctgggaacacacatttcattgattttgaattacttgttgcagacggctacttgcaagaagctgatctcgttggcgttgattttggttctgaccctgaggtggttgactatgctcagatttttcaggcaagacgccccttattagaaaaagcggtccaagcctttcttgcaactaaagaaggcatcaaagaattggcagcttttgaagcagaagcgagttggttgggtgactttgccgagttcatgtcattgaaagaacactttcaaaataaggccctacaagaatgggatgacagagcaattgtgaaacgcgaagaagcagccttgcatcattaccgtgagttgcttgcaaaaaagattacctatcataaagtctgtcaatacttcttttaccaacaatggtcagccttgaaaatttacgctaaccataaagggatagaaattattggtgatatgcctatttatgtttctgcggacagtgtagaagtttggacgatgcctgagctatttaaagtagatagtgataaaaagccattgtttattgcaggtgtaccagcagatggctttagtgaagatggtcagctgtggggaaatccaacctacaattggtctgctcatgaaaagtctaattttgcatggtggatttatcgtattcaagaaagttttaaactatatgatcagctaagaatcgatcattttaaaggcttctcagatttttgggaaattcctgctggtgataaaactgctagaaatggccattgggcctcagccccaggtatagcattattttctgcggttcgtgaggccttaggagagcttcctatcatcgcagaaaaccttggttatattgatgaaaaagcagagcagctattagtatcaacaggctttcctggcatgaagatattagaatttggtttatttgatataacgagtcaaagtatagatttaccacattactatgaccgtaattgtgtcgcttacacagggactcatgataacgaggtggttaacggatggtatgacaatcttagtgaagaacaagtacactttgtaaataactatcttcacaaacatgcagatgaaagtattacaaaagccatgctaagaacaatctttgcttctgtttgtgatacagccattctttgcatccaagatttattagataaagatggtaagagtcgtatgaatatgccaaatacaattggaggtaattggcaatggcgtatgcttgacggtgaattgaaccaagatcacaaagattaccttatttatttaacagatctttatggtcgcgcaagataa

SEQ ID NO: 54952 - protein, 497 aa, Streptococcus pyogenes MGAS10394
MNKRASGILMHISSLPGKFGIGTFGKSAFEFVDFLAETKQTYWQILPLTTTSFGDSPYQSFSAIAGNTHFIDFELLVADGYLQEADLVGVDFGSDPEVVDYAQIFQARRPLLEKAVQAFLATKEGIKELAAFEAEASWLGDFAEFMSLKEHFQNKALQEWDDRAIVKREEAALHHYRELLAKKITYHKVCQYFFYQQWSALKIYANHKGIEIIGDMPIYVSADSVEVWTMPELFKVDSDKKPLFIAGVPADGFSEDGQLWGNPTYNWSAHEKSNFAWWIYRIQESFKLYDQLRIDHFKGFSDFWEIPAGDKTARNGHWASAPGIALFSAVREALGELPIIAENLGYIDEKAEQLLVSTGFPGMKILEFGLFDITSQSIDLPHYYDRNCVAYTGTHDNEVVNGWYDNLSEEQVHFVNNYLHKHADESITKAMLRTIFASVCDTAILCIQDLLDKDGKSRMNMPNTIGGNWQWRMLDGELNQDHKDYLIYLTDLYGRAR

SEQ ID NO: 54953 - DNA, 1521 bp, Borrelia garinii PBi
  CDS (1)..(1521): transl_table=11
atgaaatataaaaaaataagaattaatttaaatttaaaaagaaaaagtggtattttgcttaacataagttctttgccatctaaatatggtattggagatttgggtaaaggggcttataaatttatagactttttgtttgcatcttcgcaaagctattggcaaatgtttgcttattctcctattgattttacaagatctcctccctattcaattttttcggcttttgctggcaatgtttattatattgatttagaggctcttgacaaatttatagattcagatttaaaccttttaaaggaaaatgaaacaagatactctgatttaaaaaaattaagctttaaagataaatttcttaaagaagctgctttaaattttattaatagagcttcggttgatgaggttagaagctttgaaaaatttaaaaaaaagtcttcttattggcttttagattttgcaagttttgttgcatttaaagaatattttttaaaagattcaagggatgcttttaatgttctttttgatagaggaattcttataagaaatgaaaaagacttatttaaattgagaaatatcctctcaaaagagattaaagtgcaagaggtgttgcagtatttctttttttcacagtttcaagctttaaagcgttatgcaaatgataaaggaattgagctagttatgaacttgcctctttttatagcgtatgattctgctgatgtttgggcgcatcaaaaatattttaagttaagatttgatgcaagcaaagataaggttgcaggaatttccccagattattttttagagcaagagcaagcttgggatagtccagcttatagctggaatgttttaaagaatgttaagtatgaatggtgggcaaaaaggattggaattttaagaaagtatatagatgtaattaaaattgatcatttcagaggttttgtttctacttgggaagttggtgttggtgaggcttatgcttttaatgggttgtgggtaaagtcaccaggacgagatttttttaattttattttaaatgaaattaaagatttaaaaatttgggttgaagattttgaaaatgatcttgaagatgtttcaagattaagagatttttttaattttccaggaatgagaataatgaagcttgcttttgattttgattcggacaatcagaatcttcctcataattatattaaaaattgtatagtttacacaggaattggcgataatagcacaatacgagaatttgttaattctttagatgatttgcataaaaagtatatttttgattatttaaatacaaatgaagattttgttgtttgggacatgataagaagtgctatgagtagcgtttctgatagtgtaataataccgatgcaagattatattaatttaggaaatgaattcagggcaaatattccaaaaaacactttaaacaattggatttttagattattagaaagtgatttagatgctactttgagcaaaaatataagttttattacaaggctttatggtaggacttaa

SEQ ID NO: 54954 - protein, 506 aa, Borrelia garinii PBi
MKYKKIRINLNLKRKSGILLNISSLPSKYGIGDLGKGAYKFIDFLFASSQSYWQMFAYSPIDFTRSPPYSIFSAFAGNVYYIDLEALDKFIDSDLNLLKENETRYSDLKKLSFKDKFLKEAALNFINRASVDEVRSFEKFKKKSSYWLLDFASFVAFKEYFLKDSRDAFNVLFDRGILIRNEKDLFKLRNILSKEIKVQEVLQYFFFSQFQALKRYANDKGIELVMNLPLFIAYDSADVWAHQKYFKLRFDASKDKVAGISPDYFLEQEQAWDSPAYSWNVLKNVKYEWWAKRIGILRKYIDVIKIDHFRGFVSTWEVGVGEAYAFNGLWVKSPGRDFFNFILNEIKDLKIWVEDFENDLEDVSRLRDFFNFPGMRIMKLAFDFDSDNQNLPHNYIKNCIVYTGIGDNSTIREFVNSLDDLHKKYIFDYLNTNEDFVVWDMIRSAMSSVSDSVIIPMQDYINLGNEFRANIPKNTLNNWIFRLLESDLDATLSKNISFITRLYGRT

SEQ ID NO: 54955 - DNA, 1485 bp, Methylococcus capsulatus str. Bath
  CDS (1)..(1485): transl_table=11
atggatgctcacggaattttcgaccggcgccgcgcgggtattctgctccacatcagttccctgcccggcggaccgggaaacggcgatctgggggccgaatccttccgtttcgtggatttcctcgctgcggcgggtgtttcggtatggcagacactgcccatcaatcccacccacgaggacggttcaccttatcagtgtacatccgtgcacgccggcaatccgctcttgatcgggttggactggttgattgcgcgcggactgctggaagccgatgccattcctcccgctgacgatgcgaaagcgatccggcagtgggctctggaacgtgctttcgattccttccgccggcgcggaacttccgatgctttgtgttccgcgttcggcgatttcgtcagcgcgaacgactggtggctggccgactacgccctctacgcggcactcaaggaggtcaacggtggcctgccctggcaggcctggcccaagcccttgagggaccgcaaacccgatgccctggcatcggccagcacgttgtatgccgacatcatagccagggtccgcttcgaacagttcgtattcttcgaacagtggcagggtttgcatgactatgccaagaagctcggcgtgctgctgttcggtgacatgccaattttcgtcgcatcggacagcgcggaagtctgggcggggcgggaatatttcgaactgggcgaagacggagagccgcgcgtcgtcgccggggtgcctccggactacttctccgccaccggccagcgctggggaaatccgcactacaattgggaaagcatggagcgctcgggtttctcctggtggctgaaccgcctgcgcacccagctcaacctctacgacctgatccgcatcgaccatttccgggggttcgaagcctactgggaaattcccgcccattccgaaacggcgatgaatggacgctgggtcaaggctcccggcgaggccttattgtcgcgctgtaccgagaccttcggggagtccttgccgctggtcgccgaggaccttggcatcatcaccgccgaggtggaggcattgcggcgacgtttccgcatccccggcatgcggatactccagttcgctttcgaaggcggtccctgcaatccgtacctgccccacaatcatgccatcgacagcgtcgtttacaccggtacacacgacaacgacacgaccctgtcctggttcgaagggttgtcggcggagcggcagggatatgtctacgactacctcgggcgctccggtctccccatgccggcggcgctggttcaggccgcgatggcatcagtcgcacggcttgcgatcgttccgatgcaggacgtgctggagctggggcggggccaccgcatgaacacgccgggtacggtgggcgaaaactggaactggcgtttcgactgggctcagttacgtgacgagcacgccgagcgtctggcccatcaggtccgcatgtacggccgtacggcctga

SEQ ID NO: 54956 - protein, 494 aa, Methylococcus capsulatus str. Bath
MDAHGIFDRRRAGILLHISSLPGGPGNGDLGAESFRFVDFLAAAGVSVWQTLPINPTHEDGSPYQCTSVHAGNPLLIGLDWLIARGLLEADAIPPADDAKAIRQWALERAFDSFRRRGTSDALCSAFGDFVSANDWWLADYALYAALKEVNGGLPWQAWPKPLRDRKPDALASASTLYADIIARVRFEQFVFFEQWQGLHDYAKKLGVLLFGDMPIFVASDSAEVWAGREYFELGEDGEPRVVAGVPPDYFSATGQRWGNPHYNWESMERSGFSWWLNRLRTQLNLYDLIRIDHFRGFEAYWEIPAHSETAMNGRWVKAPGEALLSRCTETFGESLPLVAEDLGIITAEVEALRRRFRIPGMRILQFAFEGGPCNPYLPHNHAIDSVVYTGTHDNDTTLSWFEGLSAERQGYVYDYLGRSGLPMPAALVQAAMASVARLAIVPMQDVLELGRGHRMNTPGTVGENWNWRFDWAQLRDEHAERLAHQVRMYGRTA

SEQ ID NO: 54957 - DNA, 1593 bp, Chlamydophila abortus S26/3
  CDS (1)..(1593): transl_table=11
atgacgccattttctaaagctttacgctatattcaagactcgccagcaaagcatagctggaaatctttaggcgctatgcccaagcatggaatttgtgttccgttattttctctacatacaaaaaatagctgtggtatcggcgagttcttagacctccttcctctgatttcctggtgccaacaacataagttacagatcatacagatccttcctattaacgatagcggtgaagatagtagcccttacaacagcatatcttcagtcgctctgaaccctctttatctttccttagcaagccttccccacgctcaatctattccccatgctcagtctaagttaaagacaatgcaagcactatcgaaactgccttatgtgcactacccacaagtcaaagtcgcaaaatgggaatttcttcatgactactatcagtacgtagtaaacatgggcgctctaaaagatgaagaatttctgatcttttgtgagaaagaaaagtattggctacgtccctatacggtattccgttctataaaatgctatctcaaaggagcgccaatcaataactggccaaaagcctatacagataggacgaacttctcaaaatttgagaaacaattccaaaaagaatgtgagtttttctcctatctccaattcctatgctttcagcaaatgtcacaagtaaaatcctatgctgatgatcatcagattctacttaaaggagatcttcctattctcattagtaaagatagttgtgatgtttggtactatagacaattcttttcctcatcaggatcggcaggcgcccctcccgatatttacaatattgaaggacaaaattggcacctccccgtgtataatatgcacaatttagcccaagatcattacacctggtggaaagcacgcctccgttatgccgagaatttctactctctgtataggctagatcatatcgtaggattctttcgtctatgggtgtgggactcttcaggtaatggaaagtttcaaccagaagattctcatgaatatattagccaaggcacagacatacttaaacacatactacgcgcatcccgcatgctccctataggagaagatttaggaagtgttcctgaggatataaaacaaaccttgttaacactcggcatctgtggcacacgcattcctcgatgggaacgcaattgggaaggtgatgggagtttcattcccctagatcaatactccccactatcggtaacctcattatccacacatgattcggatacacttgctctttggtggcgacattccccaaaagaagctcgaaaatttgcaaaatttttaggaatgtcttttactcctgtcctctccgaagaagatcaaaaacatatcctcaaagtctctcacaaaacatcctccatttttcatatcaacttaatcaacgattacctcgcactttgcccggatttagtatctgaaaacctaaaatatgagcgcataaatataccgggaacagtatcaaaaaataattgggtatatagagtccaaccttccatggaagaaatagccacccatgatgcattcaatgcgcatctctctgacatatttgctgatctgtaa

SEQ ID NO: 54958 - protein, 530 aa, Chlamydophila abortus S26/3
MTPFSKALRYIQDSPAKHSWKSLGAMPKHGICVPLFSLHTKNSCGIGEFLDLLPLISWCQQHKLQIIQILPINDSGEDSSPYNSISSVALNPLYLSLASLPHAQSIPHAQSKLKTMQALSKLPYVHYPQVKVAKWEFLHDYYQYVVNMGALKDEEFLIFCEKEKYWLRPYTVFRSIKCYLKGAPINNWPKAYTDRTNFSKFEKQFQKECEFFSYLQFLCFQQMSQVKSYADDHQILLKGDLPILISKDSCDVWYYRQFFSSSGSAGAPPDIYNIEGQNWHLPVYNMHNLAQDHYTWWKARLRYAENFYSLYRLDHIVGFFRLWVWDSSGNGKFQPEDSHEYISQGTDILKHILRASRMLPIGEDLGSVPEDIKQTLLTLGICGTRIPRWERNWEGDGSFIPLDQYSPLSVTSLSTHDSDTLALWWRHSPKEARKFAKFLGMSFTPVLSEEDQKHILKVSHKTSSIFHINLINDYLALCPDLVSENLKYERINIPGTVSKNNWVYRVQPSMEEIATHDAFNAHLSDIFADL

SEQ ID NO: 54959 - DNA, 1497 bp, Prochlorococcus marinus str. NATL2A
  CDS (1)..(1497): transl_table=11
gtgaaattggaaagaaattcaggaatcctgcttcatccaacctcattacctgatagtcctgtttgcggaagtttcggtaaacctgctcgagaatggcttaatgaacttgctgcctttggaataggtgtgtggcaatttttacctcttgctcctactgattcacttggatctccatatagctctccatcaagttttgctttgaacccatggttccttgaccaaaatgatttagtgagggacggattcttagctaataacctggaagatttttcttctgcaaatgattgttttaaaaatagagttgattttcatttagcaaattcaaaagttaagtccttacgtttttctttggttgatgattggtataaacagaatagaactattcaagaagaatttgaaatatggtgctcaaaacaattttggttagatgatcattccatatttatggaacttaagattcaaaacaatgatcttccatggtgggaatggccagaagaatatgcatgtagggataagaaagaattagaaaattggaaaaaaaataaccaaaaagaattattaggccataaacttctccagtggcatttagacaggcagtggcaatcaatcagagagcttgcgaaaaatctaggaatttatttatttggagatgtccctttttatgtatcaaaagatagtgctgatgtttgggggaatcggtcattattttctattttgactaattcagatacattccttcaaagtggagtcccacctgattatttttctgaaaccggtcagctctggggtaaccctgtttatcgctggagtaggcacaaagcaagtagatatagatggtggagaaaaagaatttcaagacatctagaacaggttgattttttacgccttgatcattttcgtgccctcgaagctttttgggcaattcccggcaaagataaaacagcagagaatggactttggttgccctctccaggaaaacagatactaagtttaatcaaaaaagattgctgcggctctcttccattaattgctgaagacttaggtctcgtaacctcaaaagtagagaagttacgcgatgattatgaattagcaggaatgaagatacttcaattcgcttttgatgggaatttggataatccgtatttgccagagaatattaaagaagaaaattggattgtttatacaggaactcacgacaattcaacttctcttggatggtggagagaaatggatcaaggtagaaaagaacaacttagagaaaggatttttgattatgagaatttcacttcttgggaattgattcgaataggcatggaaactaaagccaaattatttgtagcacctatgcaagatttgttaaatcttgatgatagctgtcgtttaaataaacctggcacaacagaaaataattggtcatggagattaccgagaaatgatttaaatattagagatgctttgaaaaaatatggtgatttagctaaagcaaataaaagataa

SEQ ID NO: 54960 - protein, 498 aa, Prochlorococcus marinus str. NATL2A
MKLERNSGILLHPTSLPDSPVCGSFGKPAREWLNELAAFGIGVWQFLPLAPTDSLGSPYSSPSSFALNPWFLDQNDLVRDGFLANNLEDFSSANDCFKNRVDFHLANSKVKSLRFSLVDDWYKQNRTIQEEFEIWCSKQFWLDDHSIFMELKIQNNDLPWWEWPEEYACRDKKELENWKKNNQKELLGHKLLQWHLDRQWQSIRELAKNLGIYLFGDVPFYVSKDSADVWGNRSLFSILTNSDTFLQSGVPPDYFSETGQLWGNPVYRWSRHKASRYRWWRKRISRHLEQVDFLRLDHFRALEAFWAIPGKDKTAENGLWLPSPGKQILSLIKKDCCGSLPLIAEDLGLVTSKVEKLRDDYELAGMKILQFAFDGNLDNPYLPENIKEENWIVYTGTHDNSTSLGWWREMDQGRKEQLRERIFDYENFTSWELIRIGMETKAKLFVAPMQDLLNLDDSCRLNKPGTTENNWSWRLPRNDLNIRDALKKYGDLAKANKR

SEQ ID NO: 54961 - DNA, 1371 bp, Thiobacillus denitrificans ATCC 25259
  CDS (1)..(1371): transl_table=11
atgaacttttccgagcgccgcgccggcatcctgctgcatccgacctcgctgccttcgggcaccttcgcggacgccgagcgctggctggatttcctgcacgatgccgggttcggcgtctggcagatgctgccgcttggcctgccgctgaccggcctgtcgccttaccagtgcgcttcggctttcgcggtcgatcccgcgctttttccgggcgacaccgccgaccccgccggcttcgaggaatggcaccaccggcagcgtcactggatcgacgactatgcgcgcttcacggtgatcaaggcggcgcagggcggtgccgcgtggaccgactggccgccgccgctgcgcgaccgcgagccggcggcgctcgccgaattcgagcgtgcgcacgccgacgccctgcgcacggtcatgcatgaccagtaccgcgccgcgcaggccgggcggaagattcgcgccgcggctgcggcgcgcggcatccggctgttcggtgacatgccgatcttcgtcgcgcacgacagcgccgacgtctgggcgcagcgccacctcttcctgctcgacggcgtcggtcatccgaccgtcgtcgcaggtgtgccgcccgattatttttccgagaccgggcagcgctggggcaacccccactacgactgggacgcgatgcaggccgacggcttcgcctggtggcgtgcgcggctgcgcgaccatttcgaatggttcgatctcgtgcgcatcgatcatttccgcgggctcgcggccgcctgggccgtgccggcgagcgagccgaccgcggtgcacggcgaatggcgcccggcgccgggggcggcgctactgcaggcgatgcgcgacgagatggcgggcgagcgaggcggcgggcgcgacgatgcgggcctgccgctggtcgccgaagacctcggcaccatcacgcccgacgtcatcgccttgcgccatcaatttggccttcccggcatggccgtgttgcaattcgccttcgatgcccacactgacaacccgcacaaacccgagaacgtgcatcccgacacggtctactacaccggcacgcacgacaacgacacgacgctgggatggtggatgtccttgccggacgacgcccgcgcgcaggtggtcgcgcggctcggcgtcgacgaggccggcgcggtgctcgacgcgatgatcgcgaccgtgctcggcagcgcggccgcgctctccgtgctgccgatgcaggatgtgctgcggctcgacaattcggcgcgcatgaacacgccgggccgcgagcagggcaactggacctggcgcttcggctgggacgcgctgcccgacggtctcgccgcgcgcctgcgcgaacaactccaggcggtcgatcgatgcgcaagctag

SEQ ID NO: 54962 - protein, 456 aa, Thiobacillus denitrificans ATCC 25259
MNFSERRAGILLHPTSLPSGTFADAERWLDFLHDAGFGVWQMLPLGLPLTGLSPYQCASAFAVDPALFPGDTADPAGFEEWHHRQRHWIDDYARFTVIKAAQGGAAWTDWPPPLRDREPAALAEFERAHADALRTVMHDQYRAAQAGRKIRAAAAARGIRLFGDMPIFVAHDSADVWAQRHLFLLDGVGHPTVVAGVPPDYFSETGQRWGNPHYDWDAMQADGFAWWRARLRDHFEWFDLVRIDHFRGLAAAWAVPASEPTAVHGEWRPAPGAALLQAMRDEMAGERGGGRDDAGLPLVAEDLGTITPDVIALRHQFGLPGMAVLQFAFDAHTDNPHKPENVHPDTVYYTGTHDNDTTLGWWMSLPDDARAQVVARLGVDEAGAVLDAMIATVLGSAAALSVLPMQDVLRLDNSARMNTPGREQGNWTWRFGWDALPDGLAARLREQLQAVDRCAS

SEQ ID NO: 54963 - DNA, 1518 bp, Anabaena variabilis ATCC 29413
  CDS (1)..(1518): transl_table=11
atgccttttattagatcaagcggtgttctactgcatcctacctcgtttcctagccgatttggcattggagacttaggtttagaagcttacaaatttattgattttctggaaaaaagctatcaacaatattggcaagtcttacccttaggccccactggatacggtaattctccttatatgtcgtactcagctttggcggggaatcatctgctgattagcccagaaaaattactagatgaaggtttgctatctgacgaagattttgccaatctcccaaattttccccacgaaaaagtagattttgagcaggctgcaccaatcaagattcaactcctcaaaaaagcttgtgaaaatttcaaaactaaagcatcacccctgcaacaaaaggggttcgcggggttttgtgaaactaaaggctattggctagatgattacgccttattcatggctctgaaggatactaatgatagctctagttggcacacttgggaaccagcactagcaaagcgagaagcagacgtattggagaaggtacagcgtcaattgacggatgagattttttattacaagttcattcagtacgaatttttccgtcagtggtcagaattgaaaagttacgccaatatgaaggggatcgaaattattggtgatatcccgatttacgtagcccatgatagtgctgatgtctgggcaaatcccgatatattttgccttgatgaagaaactggggaagttgcgctgatggcgggtgtcccaccagattattttagtgctactggtcagttgtggggcaatccggtttacaactgggaggaattacaaaaacaagactttaaatggtgggtacagcgttttgaggcaatgctggattacgttgatgtgatacgtatcgaccatttccgagggtttgaggctttctggactgtaccccaaggtgaggaaacagctatgaatggtgaatgggtgacagcaccaggggaagaactattcgatgcaattaagcaaaaactggggaaattacctgttttagccgaagatttgggggtaatcactccagaggtggaagcgttacgggacaaatacgaatttccagggatgaaggttttgcagtttgcttttggttctgaccctggaaatccatttttacctttcaactacagccgtaattttgtagtttatacgggaactcatgataatgatacaaccgtaggctggtttaacacagccaacgactacgagaaaaacaatctattactttatttgggttctgttagccctgaaggtatccactgggatttaattcgcctagctttgagttctgtagcaaatcaagccattattcccttacaagatattttgggcttgggtaatgaggcgcgaatgaattttcctagcattgctgagggaaattgggcgtggcgctatgattccgccacattaaaagacgaattaagcgatcgcttaaaaatcctcactaaactctacggtcgcgcccctcaaggtaagcagggaaactaa

SEQ ID NO: 54964 - protein, 505 aa, Anabaena variabilis ATCC 29413
MPFIRSSGVLLHPTSFPSRFGIGDLGLEAYKFIDFLEKSYQQYWQVLPLGPTGYGNSPYMSYSALAGNHLLISPEKLLDEGLLSDEDFANLPNFPHEKVDFEQAAPIKIQLLKKACENFKTKASPLQQKGFAGFCETKGYWLDDYALFMALKDTNDSSSWHTWEPALAKREADVLEKVQRQLTDEIFYYKFIQYEFFRQWSELKSYANMKGIEIIGDIPIYVAHDSADVWANPDIFCLDEETGEVALMAGVPPDYFSATGQLWGNPVYNWEELQKQDFKWWVQRFEAMLDYVDVIRIDHFRGFEAFWTVPQGEETAMNGEWVTAPGEELFDAIKQKLGKLPVLAEDLGVITPEVEALRDKYEFPGMKVLQFAFGSDPGNPFLPFNYSRNFVVYTGTHDNDTTVGWFNTANDYEKNNLLLYLGSVSPEGIHWDLIRLALSSVANQAIIPLQDILGLGNEARMNFPSIAEGNWAWRYDSATLKDELSDRLKILTKLYGRAPQGKQGN

SEQ ID NO: 54965 - DNA, 1497 bp, Streptococcus agalactiae A909
  CDS (1)..(1497): transl_table=11
atgaaaaaacgtgcaagtggtgtcttaatgcacatcacttctctaccaggtgatttaggtattggaacatttggacgagaagcctacgcttttgttgattttttggtcgaaactgatcaaaaattttggcaaattcttcccttaacaacaacaagcttcggggactctccttaccagtctttttctgcagtagctggtaatacacatttaattgattttgatttgctaacgcttgaaggttttatttcgaaagatgactaccaaaatattagttttggacaggatccagaagttgttgattatgctggtctgtttgaaaaacgtcgtccagttttagaaaaagcagttaaaaacttcttgaaagaagagagagctacgagaatgctatctgattttttgcaagaagaaaaatgggtaactgattttgctgaatttatggctatcaaagaacattttggtaataaggcgcttcaagaatgggatgacaaggctattatacgccgtgaagaagaagccttagcaggatatcgtcaaaagcttagtgaagtgataaaatatcatgaagtaacgcaatatttcttttacaaacaatggtttgagttaaaagaatatgctaatgataaagggattcaaattatcggtgatatgccaatctacgtttctgccgatagtgtagaagtttggacaatgcctgaactgtttaaattagatcgtgacaaacaaccacttgctattgctggtgtaccagcggatgatttttctgacgatggtcagctttggggcaatcctatttacaattgggattaccacaaagagtcagattttgactggtggatttatcgtattcaatctggtgttaagatgtatgactatttgcgtattgatcattttaaaggtttttcagattattgggaaattcgaggagattatcaaacagctaatgatggctcatggcaaccagctcccggtccagaattatttgcaactatcaaagaaaaattaggtgatttacctattattgctgagaatttaggctatattgatgagagagcagagagattactggctggaacagggttcccaggtatgaaaatcatggaattcggtttttatgatacaacaggaaatagtattgatattcctcataactacacagaaaatacaattgcatatgctggaactcatgataacgaagttattaatggctggtttgaaaatcttacagtcgaacagaaagcttatgcagaaaattacatgcgtcgtttgccaaatgagcccattactgagactgtactacgtaccttgtatgcaaccgttagtcaaacaacgattacatgtatgcaagatctactagataaacctgcagatagccgtatgaacatgccaaataccgttggaggtaactggcaatggcgtatgagaaaagaagacttaacagaaaatcgcaaagcattcttaaaagagattacaactatttataatagagggaataaataa

SEQ ID NO: 54966 - protein, 498 aa, Streptococcus agalactiae A909
MKKRASGVLMHITSLPGDLGIGTFGREAYAFVDFLVETDQKFWQILPLTTTSFGDSPYQSFSAVAGNTHLIDFDLLTLEGFISKDDYQNISFGQDPEVVDYAGLFEKRRPVLEKAVKNFLKEERATRMLSDFLQEEKWVTDFAEFMAIKEHFGNKALQEWDDKAIIRREEEALAGYRQKLSEVIKYHEVTQYFFYKQWFELKEYANDKGIQIIGDMPIYVSADSVEVWTMPELFKLDRDKQPLAIAGVPADDFSDDGQLWGNPIYNWDYHKESDFDWWIYRIQSGVKMYDYLRIDHFKGFSDYWEIRGDYQTANDGSWQPAPGPELFATIKEKLGDLPIIAENLGYIDERAERLLAGTGFPGMKIMEFGFYDTTGNSIDIPHNYTENTIAYAGTHDNEVINGWFENLTVEQKAYAENYMRRLPNEPITETVLRTLYATVSQTTITCMQDLLDKPADSRMNMPNTVGGNWQWRMRKEDLTENRKAFLKEITTIYNRGNK

SEQ ID NO: 54967 - DNA, 1569 bp, Synechococcus sp. CC9605
  CDS (1)..(1569): transl_table=11
atggatcagtccactgttgacctgtccaaggctgaacctgggcgcagcaccggggtgctgctgcatcccaccgccctgccgggtagtcccgtctgcggcagctttggagagccttgtcgccgttggctccagctgctggccgaccatgacatcggcgtctggcagatgctgccgctggctccgccggatcccaccggctcgccctacagctctccctcctgcaatgcgctgaacccctggttcctggacggccaggacctggccaatgagggattcatcagcggtgacgccctcagggctactcccggagctgatgcaccgctcgagggagcggagcatgtggacttcagcctcgccaggcaacggtccgctgccctcggcgatgccttgcttgatgcctggcctgagcaggatccagtgcgacatgccgacttcaagcgctggacgcaccagcagcgctcctggctggacgaccacgcccgttttcgcgtcctgcacgatcaaaaccacaaaccctggtgggagtggccgctccccctggcccggcatgacaacaaggccctgcgggcctgggctgagcaacaccacggcgcgctgctacgggaacaactgacccagtggcatctcgatcggcagtggcaggcaatccgccgccaagcggcagagctgggcatccagctgtttggcgacctgcccttctatgtgagcagtgacagcgccgatgtctggagcaaccgttcgctcttcaccgtcaaggagaacggccagctcaccacccagagcggcgtgccgcccgattacttctcggaaaccggacagctgtggggctcaccggtgtaccgctggggacagcatcggatcacgcggttccactggtggcggcgaagaatcgcgcggcagagagagtttgtggacctgctgcgcctggatcacttccgtgccctagcggccttctgggccgtccccggtgccgacagcaccgcggagaacggtcaatggcagccctccccaggccatgccctgctgcgcaagctgcgcagagatgccggtggtgctcttcccttgattgccgaggatctcggcgtgatcacaccggatgtggaggagctccgcgatgcgttccggttgcctggcatgaaagtgctgcagttcgcgttcgatggcgagcgcgacaacccttatctgccggaaaacaccaatgggcatcgatgggtcgtctacaccggcacccacgacaaccccacaaccctgggatggtggaacgctttggatgccgacagccggaaccgcatcgcgacgcgggtgaatggtgagatcacagctccagcctggcatctgctcgacatggcctttgccacgaccgcaggcctggtgatcgccccactgcaggacctgatgcacctggacgaccgggccaggttcaacactcccggcaccagcgaaggcaactggagctggaggcttcaaagctttgatgcagcgctggggaatgcactgaacggctatggaagcaggggagccgtctggggacggtcgcttgcgggagcaggcagtttgttgacccgataa

SEQ ID NO: 54968 - protein, 522 aa, Synechococcus sp. CC9605
MDQSTVDLSKAEPGRSTGVLLHPTALPGSPVCGSFGEPCRRWLQLLADHDIGVWQMLPLAPPDPTGSPYSSPSCNALNPWFLDGQDLANEGFISGDALRATPGADAPLEGAEHVDFSLARQRSAALGDALLDAWPEQDPVRHADFKRWTHQQRSWLDDHARFRVLHDQNHKPWWEWPLPLARHDNKALRAWAEQHHGALLREQLTQWHLDRQWQAIRRQAAELGIQLFGDLPFYVSSDSADVWSNRSLFTVKENGQLTTQSGVPPDYFSETGQLWGSPVYRWGQHRITRFHWWRRRIARQREFVDLLRLDHFRALAAFWAVPGADSTAENGQWQPSPGHALLRKLRRDAGGALPLIAEDLGVITPDVEELRDAFRLPGMKVLQFAFDGERDNPYLPENTNGHRWVVYTGTHDNPTTLGWWNALDADSRNRIATRVNGEITAPAWHLLDMAFATTAGLVIAPLQDLMHLDDRARFNTPGTSEGNWSWRLQSFDAALGNALNGYGSRGAVWGRSLAGAGSLLTR

SEQ ID NO: 54969 - DNA, 1491 bp, Geobacter metallireducens GS-15
  CDS (1)..(1491): transl_table=11
atgcatcatcggcgaaaaagcggcatcctccttcatcccacatctcttcccggtccgggggggattggatctctcggcaaagagtgcagacactttatcgatttccttgaagccgccggccagagcctctggcagattctccccctcggtccggccgcttacggcaactcaccctactcatgctattcggcctttgcggggaatccgcttcttattgatcttgctgcccttgtggacgagggagacctggatgaaagcgcgccggtccccgtgttccctgcggaatacgtcgatttcgccctggcggaaaattacagaattcccctgctgaaggcggcggccgcccatttttacgcctttggcgaccgtgagcggaaggaggagtactggcatttctgcgacacaaccccttggctccacgactacgccctcttcatggcgctcaaggagcatttcggggggaagagctggacctcctggcccaaggagatcgcccgcagggagccggcggccctggagaagtattcggttcggctcggtgtggccattggagagcagaagtacgcccagtggcaattttaccgtcaatggcgccatatcagggagtatgccaacggcaaggggatcggcattgtcggtgacatcccaatctttgtcgcctttgactcggctgacgtctggagcgcgccccatcttttcaagctggacgagaagggaaagcctacggtcgttgccggggtcccccccgactacttcagtgagaccggtcagcggtggggcaaccccctctacaactgggacgccatggccgccgagggatatcgctggtggatcgagcggttccgcagctgtttcgccctgtgcgacatggtccgaatcgaccacttccggggcttcgaggcatgctgggaggtgccggccaaggaaaaaaccgccgtcaacggccaatgggtcaaggggccgggggctccccttttcgacgccgtcatcggtgccctggggcaactccccatcatcgccgaggatttgggagtgatcacgccggaagtggaggaactcagggaccgttatcgtttccccggcatgaaaatcctccagttcgccttcgattccggcccggggaatccttatctcccccacaactacatccctggctgcgtaacctacaccggtacccacgataatgacaccaccgtcggctggttcaaaacactttcccctcacaaccgcaagggtgtccttgcctacacgggtacctccggcaaggagattcactgggaactggtacggcttggccttgcgtcggtagccgatctggcgattttcccccttcaggatatcctcggcctcgatggatccgcccggatgaaccttccgggaaccccccgcggcaactggtcgtggcgcttcactgctggggcattggcggagaagcatgctgaacggctccacgaattgacgacgctctttgggagaaagcggggagaatag

SEQ ID NO: 54970 - protein, 496 aa, Geobacter metallireducens GS-15
MHHRRKSGILLHPTSLPGPGGIGSLGKECRHFIDFLEAAGQSLWQILPLGPAAYGNSPYSCYSAFAGNPLLIDLAALVDEGDLDESAPVPVFPAEYVDFALAENYRIPLLKAAAAHFYAFGDRERKEEYWHFCDTTPWLHDYALFMALKEHFGGKSWTSWPKEIARREPAALEKYSVRLGVAIGEQKYAQWQFYRQWRHIREYANGKGIGIVGDIPIFVAFDSADVWSAPHLFKLDEKGKPTVVAGVPPDYFSETGQRWGNPLYNWDAMAAEGYRWWIERFRSCFALCDMVRIDHFRGFEACWEVPAKEKTAVNGQWVKGPGAPLFDAVIGALGQLPIIAEDLGVITPEVEELRDRYRFPGMKILQFAFDSGPGNPYLPHNYIPGCVTYTGTHDNDTTVGWFKTLSPHNRKGVLAYTGTSGKEIHWELVRLGLASVADLAIFPLQDILGLDGSARMNLPGTPRGNWSWRFTAGALAEKHAERLHELTTLFGRKRGE

SEQ ID NO: 54971 - DNA, 1515 bp, Desulfovibrio desulfuricans G20
  CDS (1)..(1515): transl_table=11
atgaatgtacgttccagcggcgtgctgctgcatatcacctcgttaccgtcggggtacggcataggagatctgggaccggccgcgtaccggtttgcgcggctgctgcgtaatacaggccagctgtactggcagtttctgccgctggggcccacgtcgcccgccatcggcaactctccgtattccagtccttccgcttttgcgggtaacccgttgttcatcagtcccgaactgctggtgcaacagggcgtggtggcatggcccgacattcaggttgccgatcacgcaccgttgtacgacgaccccgcgcgggtggaatatgacagggtggagcggcatcgggaacgggtgctgcgcgccgcgtttgagcgcaacagccatacgctgcccagtgacgggttttatgcggaattctgcaggcaaaacaacgcatggctggacgattacgcccgttttgtgaccatcaagcgggcacatggcggggcggagtggcgacactggccggctgcgctgcgcaaccgcgacgacgaggctctggcggcatgggacgaggacaacgccagagagatggaatatgagcgctttgtccagtacctctttttccgccagtgggacgctttgcacgcctactgccgcgaactgggcgtggtgctggtgggtgacgtgcccatatatgtgacatatgacagcgcagatgtatgggccaaccccgaatattttcagcttgatgcgtcaatggatccggtttacgtggcaggtgttccgcctgattatttcagcgagacggggcagcgttggggtaaccctgtttacaactggcaggccatgcggcaggacggtttccgctggtggatagaccgtatgcggcataatttccggctggcggacgtggtgcgtcttgatcatttcaggggatttgccggttactggcagattcccgcggcggaaaagacggctgtcaacggccgctgggtcgatgcaccgggcatggagcttttttccgcgttcgggcgggccttcaccagtctgccaatcattgccgaagatctgggagtcattaccgccgatgtgcgcgagcttaaaaacacatggaatcttccgggcatgaagattctgcagttcggcttttccggtgatctgacccgtaatcctgatgcaccttttaaccacgaacgcaggtgtgtggtgtataccggcacccatgacaacgctcctgtgcgggcctggttcacgcaggaagcgggcgacgaagagcgtttcagactgggggaatttgtcggacattcggtgcgggaggaagatgcccatcatgcattcatgcggcttgccatggccggtgtggccgatacggttgtttttccgctgcaggatgtgctgggacttggcgcggaatcgcgcatgaacacgccttcggtggctgagggcaactgggcatggcgcatgaatgcggatcagctggaagcgtatcattacgaacgctttgcggccatgacccgtttttttggaaggcagagctaa

SEQ ID NO: 54972 - protein, 504 aa, Desulfovibrio desulfuricans G20
MNVRSSGVLLHITSLPSGYGIGDLGPAAYRFARLLRNTGQLYWQFLPLGPTSPAIGNSPYSSPSAFAGNPLFISPELLVQQGVVAWPDIQVADHAPLYDDPARVEYDRVERHRERVLRAAFERNSHTLPSDGFYAEFCRQNNAWLDDYARFVTIKRAHGGAEWRHWPAALRNRDDEALAAWDEDNAREMEYERFVQYLFFRQWDALHAYCRELGVVLVGDVPIYVTYDSADVWANPEYFQLDASMDPVYVAGVPPDYFSETGQRWGNPVYNWQAMRQDGFRWWIDRMRHNFRLADVVRLDHFRGFAGYWQIPAAEKTAVNGRWVDAPGMELFSAFGRAFTSLPIIAEDLGVITADVRELKNTWNLPGMKILQFGFSGDLTRNPDAPFNHERRCVVYTGTHDNAPVRAWFTQEAGDEERFRLGEFVGHSVREEDAHHAFMRLAMAGVADTVVFPLQDVLGLGAESRMNTPSVAEGNWAWRMNADQLEAYHYERFAAMTRFFGRQS

SEQ ID NO: 54973 - DNA, 1521 bp, Prochlorococcus marinus str. MIT 9312
  CDS (1)..(1521): transl_table=11
atgtctattcaaacagctcttaaaaaaaaatcattaggtgtactcatgcatccttcatgtatcccaggaggaagagtatgtggaacctttggtaaaggggctaaagattggataaaaaagcttcataagcatgggatcgaatactggcaatttttacctcttacaccaactgattctactgggtctccatatagttcaccatctagctttgcactgaatccatggtttcttgacgtagattatttaatcgaagaaggttttatcttcatttctaatttagaagaattaggaccctcaaataaaaataagaatcattttgattttgatattgcgactaatttaacaaaaaaattaggtcgcctccttttgcaaggttggacttctcaatctgaagagagaaaacttgatttcaatcaatggattagcaagaattcttgggttgaggattatgcaacatttgttgttatcagggaggaatttaatatgttgccttggtggcaatggcctaaagaatttaaaaaaaaaaataacaagtttttaaaatcatggatttatacaaaaagtgaagaaatacttactaaaaaattaatacagtggcatttagataagcaatggagatctattaaaaattatgcgaaatcatataatattaagttaattggagatttacccttttatgtttctagggacagcgccgacgtatggagtaataaatcactattttcaatttttaaaaatggagatttaatctttcaaagtggtgtgcctcctgattatttttcatcaacaggacaattatgggggaccccaacttacttttggtcaaaacataagagtactaatttcgattggtggagaaaaagatttaaaaggcaatttgaacttgttgacttgttgagattagatcatttcaggggtttggcaggttactggagagtcaatggcaattctaaaacagcaatttctggtaaatggataaattctccaggaagaacattattaaataaactaaaaattgatttagggactacctacctaccaattatcgctgaagatctaggagtaattacacctgatgtagaaaaattaaggataaattttgaactacctggcatgaaaatattacaatttgcttttgatggaaatgaagataacccatatttacccaagaatattgacggagaaaattgggttgtttatacaggcacccatgacaactctacttccatctcatggtgggaatgtttagaaaataactccaaaaaactaataaaagatgagtataaattttcggaagatccttcatggagtttaataaaaatgggcatggaaacaaatgctaatctctttatcgctccaatccaagatatattatctttagatgactcaagtagattaaatatacctggtactacaaaaaataactggaaatggaagttaaatcgccctttaggagaaatagaaaacaatattagaagatttagtgagctaggaaataattttggcaggacaagaaaatag

SEQ ID NO: 54974 - protein, 506 aa, Prochlorococcus marinus str. MIT 9312
MSIQTALKKKSLGVLMHPSCIPGGRVCGTFGKGAKDWIKKLHKHGIEYWQFLPLTPTDSTGSPYSSPSSFALNPWFLDVDYLIEEGFIFISNLEELGPSNKNKNHFDFDIATNLTKKLGRLLLQGWTSQSEERKLDFNQWISKNSWVEDYATFVVIREEFNMLPWWQWPKEFKKKNNKFLKSWIYTKSEEILTKKLIQWHLDKQWRSIKNYAKSYNIKLIGDLPFYVSRDSADVWSNKSLFSIFKNGDLIFQSGVPPDYFSSTGQLWGTPTYFWSKHKSTNFDWWRKRFKRQFELVDLLRLDHFRGLAGYWRVNGNSKTAISGKWINSPGRTLLNKLKIDLGTTYLPIIAEDLGVITPDVEKLRINFELPGMKILQFAFDGNEDNPYLPKNIDGENWVVYTGTHDNSTSISWWECLENNSKKLIKDEYKFSEDPSWSLIKMGMETNANLFIAPIQDILSLDDSSRLNIPGTTKNNWKWKLNRPLGEIENNIRRFSELGNNFGRTRK

SEQ ID NO: 54975 - DNA, 1500 bp, Synechococcus elongatus PCC 7942
  CDS (1)..(1500): transl_table=11
gtgtttacacgagccgccggcattttgttacatcccacttcgttgccggggccattcggcagcggcgaccttggtccggcctcgcggcagtttcttgactggttggcaacggcgggacaacaactgtggcaagtgttgccccttgggccgacaggctatggctattcgccttacctctgctattccgccttggctggcaatcccgctctgatcagccctgaactcttggcagaagatggctggctccaagaatcggactgggcagactgtcctgcttttccgagcgatcgcgtcgattttgccagcgtcttgccctatcgcgatcaactgctgcgccgtgcctacagccaattcctgcaaagagcggcttccagcgatcgccaactctttcaagctttctgtgaacaggaagcccattggctggatgactacgccctgttcatggcgattaagctggctagccaaggtcagccttggacagaatggccggaagcgctgcgtcagcggcaacctcaagccttggctaaagcccgcgatcgctggggcggcgaaattggcttccagcagtttctgcagtggcaatttcgcgagcagtggttggccctgcgggaagaagcccaagcccgccatatttcgctgattggcgatattccgatctacgtcgctcatgacagtgcggacgtttgggccaatcctcagttctttgccctcgatcctgaaacgggcgcagttgatcagcaggccggtgtgccgcctgactatttctccgaaaccggccaactctggggcaatcccgtctacaactgggctgcgctgcaggcggatggctatcgctggtggttgcaacggctgcaacagctcctcagcttagtggactacattcgcatcgaccacttccgcggtttagaggcgttttggtcggttcccgctggtgaagaaacggcgatcgacggagagtgggtcaaagccccaggcgctgatctgctgagcacgattcgccaaaaactgggagcgctaccgattctggcagaggatctcggtgtgattacgccggaggtggaagcgctgcgcgatcgctttgagctgccgggcatgaagattctgcagttcgcctttgactctggggccggcaatgcctatctaccgcacaactactggggtcgtcgctgggtggcttacaccggcacccacgacaatgacacgaccgtcggctggttcctgtcccgcaatgacagcgatcgccaaacggtgctggattatctgggcgcagagtcgggctgggaaattgagtggaagctgatccgcttggcttggagctcgacggcagattgggcgatcgcaccgctccaagatgtcttcgggctggatagcagcgcccgcatgaatcgaccggggcaagccaccggcaactgggactggcgcttcagtgccgactggctgacgggcgatcgtgcccaacgcctgcggcgactctcgcagctctatggacgctgtagatga

SEQ ID NO: 54976 - protein, 499 aa, Synechococcus elongatus PCC 7942
MFTRAAGILLHPTSLPGPFGSGDLGPASRQFLDWLATAGQQLWQVLPLGPTGYGYSPYLCYSALAGNPALISPELLAEDGWLQESDWADCPAFPSDRVDFASVLPYRDQLLRRAYSQFLQRAASSDRQLFQAFCEQEAHWLDDYALFMAIKLASQGQPWTEWPEALRQRQPQALAKARDRWGGEIGFQQFLQWQFREQWLALREEAQARHISLIGDIPIYVAHDSADVWANPQFFALDPETGAVDQQAGVPPDYFSETGQLWGNPVYNWAALQADGYRWWLQRLQQLLSLVDYIRIDHFRGLEAFWSVPAGEETAIDGEWVKAPGADLLSTIRQKLGALPILAEDLGVITPEVEALRDRFELPGMKILQFAFDSGAGNAYLPHNYWGRRWVAYTGTHDNDTTVGWFLSRNDSDRQTVLDYLGAESGWEIEWKLIRLAWSSTADWAIAPLQDVFGLDSSARMNRPGQATGNWDWRFSADWLTGDRAQRLRRLSQLYGRCR

SEQ ID NO: 54977 - DNA, 1506 bp, Syntrophus aciditrophicus SB
  CDS (1)..(1506): transl_table=11
atgatcaagcaaagaggaagcggcatcctgctccatgtgacatccctgccttcgccttacgggatcggcgatctgggcggcgaggcgtaccggtttgccgatttcctcgccgaagccggccagagtttctgggaggtccttcctctctctcccacgcttgccattcacagacattctccatacagcagctattccgcctttgccggcaatcccctgctgatcagtccggaatttctgtgccgggacggtctgctgaccctgacggaacttgaggaggcgccgtgcttttcttcagatcctgtagattatgaacaggcggcggcgttcaaagagcgcctgttcggcctggcctttgaacggtttcggagtcggggcagggtgcgcagtggtcgctggacggacttctgcgaagagcaggccttctggcttgacgatcacgcactctttgcggcgctgaaaagggaattcccctacgggacctggcagacctggccgccggaactgcgggaccgaaagccggcgtcgctgaagaaaatcagaaaaaaactggccctgcccatcgccagggagaaatttcttcaatatcttttcttccggcagtggctttccctgaaagaatactgccgccggaagcgaatccatctgattggagacctgccgatctatgtggcctatgacagtgcggatgtctgggctcatccggagcttttcaaactttcggaagaaaaaaaacccctggccgtaagcggcgtgcctcccgatctcttttcccgaacaggccagctctggggaaaccctgtttatcggtgggacatcttaaaggaaaccggctatttctggtggatgaaccgtctccgtcagggctttcaatgctgcgattttttgcggattgaccattttcgggggtttatttcctattgggaggtgccggccggagaaaaaacggcagtcaacggtcagtggaaaaaagcgccggcggaagattttttccggcagctcttcaaaaccttcccctgtctgcccatcatcgctgaggatctgggtgcgacctccgcggatatgcgggaaatcatgacccgctatgaaattccgggaatgaggccggtacttttcgcctttgacgattcgctgccggacaacccctgcgcgcctcataattttcctcaaaatacaatcgcttacaccggaacacatgatctgaatacggtccggggctggttcagcagagaagcgacgcgtcaggacaaaaagcggctgtttcgctatctgggacaccgggtgacggtttcccatgtgcactgggctgtgattcggctggccatgatgagcgtggcgcaactggtcattttccccctgcaggacattctgggccttgatgaaaaggcaaggatgaacctgccgggaaggctcggggggaactggcaatggcggtttcttccggaatccctgaccccggagattattcagcggcttcgggagatgacggaactttacggccgtctgtga

SEQ ID NO: 54978 - protein, 501 aa, Syntrophus aciditrophicus SB
MIKQRGSGILLHVTSLPSPYGIGDLGGEAYRFADFLAEAGQSFWEVLPLSPTLAIHRHSPYSSYSAFAGNPLLISPEFLCRDGLLTLTELEEAPCFSSDPVDYEQAAAFKERLFGLAFERFRSRGRVRSGRWTDFCEEQAFWLDDHALFAALKREFPYGTWQTWPPELRDRKPASLKKIRKKLALPIAREKFLQYLFFRQWLSLKEYCRRKRIHLIGDLPIYVAYDSADVWAHPELFKLSEEKKPLAVSGVPPDLFSRTGQLWGNPVYRWDILKETGYFWWMNRLRQGFQCCDFLRIDHFRGFISYWEVPAGEKTAVNGQWKKAPAEDFFRQLFKTFPCLPIIAEDLGATSADMREIMTRYEIPGMRPVLFAFDDSLPDNPCAPHNFPQNTIAYTGTHDLNTVRGWFSREATRQDKKRLFRYLGHRVTVSHVHWAVIRLAMMSVAQLVIFPLQDILGLDEKARMNLPGRLGGNWQWRFLPESLTPEIIQRLREMTELYGRL

SEQ ID NO: 54979 - DNA, 1464 bp, Francisella tularensis subsp. holarctica
  CDS (1)..(1464): transl_table=11
atgagaaaagctggattattattagctatttcaagtttacctagctggtttggcattggtgatttgggtaaaagtgcgtatgagtttgttgatattttaaaacaggctagtattagaatttggcaggttttacctcttacaacactaggtttcggcaactctccatatcagtcaagctcttcttttgctggtgatgaaatctacattagcttagaaaaactagcagattatggtttgcttgaagaatcatctcttaaaaaactaaatgcaaactctaaaaaagttgaatatgaacttgttcgtaatttcaaagataactatctcgaagaagcatttagtaatttccaaagctcaaaagataagtttgaacaagagtataatgattttataactcagaattcttgggtcaaaaactatgctatttttaaagcttttagaaaggtaaataataaccaagcttggaatttttggcctgcagaatataaaaactgggtcaaagagaaagctatagaacttgatcaatttcaacaagagatagattatcaaatatttttacagtttatattttataagcagtggtttgagctaagagagtatgctaataaaaataatattgaaattatgggtgatttgcctatttatctaggttttgattctgctgatgtgtgggagcatcaagaagtatttttattagatgaggatcaaaatcctagctttgttgcaggagttccacctgactttttctcagaaactggtcagctatggggtaatcctctatatgattgggataaattcaaagaaacaaattttgatttttggatagatcgactaaatggtaatttcaagctatttgatattgttaggattgaccattttagagcttttgatacatattggaagataccagccagtgaaaaaactgctataaatggtgagtgggtagaagctcctggctatgatttctttgatacagtctataagcgtattccagatgctaatattattgcggaagatttaggagatttgcgagatgaagtatttgagctacgtgatcactataatttaaagggtatgaaagtattcccatttcattttgatctaaaaacagctagattgattgatgatgctaatatcatagcttattcaggtactcacgataataatactttgaaaggttggtattttgacgagctcaatagatatcaaagaaaattattaaaacgatattttaaagctaatgataaaaatatctttagcaaaataattaagtatttgcttagctgtgaagctgaatatgtaatcctgccagtacaagatgttttagagttagatggaactgctaggctaaatactccgggtactgtaggtgcgccaaactgggagtggaagttggttgattttaatttacttaagtcaaaaactaatcgcttagctaaacaggtatctaagtctataaatcattaa

SEQ ID NO: 54980 - protein, 487 aa, Francisella tularensis subsp. holarctica
MRKAGLLLAISSLPSWFGIGDLGKSAYEFVDILKQASIRIWQVLPLTTLGFGNSPYQSSSSFAGDEIYISLEKLADYGLLEESSLKKLNANSKKVEYELVRNFKDNYLEEAFSNFQSSKDKFEQEYNDFITQNSWVKNYAIFKAFRKVNNNQAWNFWPAEYKNWVKEKAIELDQFQQEIDYQIFLQFIFYKQWFELREYANKNNIEIMGDLPIYLGFDSADVWEHQEVFLLDEDQNPSFVAGVPPDFFSETGQLWGNPLYDWDKFKETNFDFWIDRLNGNFKLFDIVRIDHFRAFDTYWKIPASEKTAINGEWVEAPGYDFFDTVYKRIPDANIIAEDLGDLRDEVFELRDHYNLKGMKVFPFHFDLKTARLIDDANIIAYSGTHDNNTLKGWYFDELNRYQRKLLKRYFKANDKNIFSKIIKYLLSCEAEYVILPVQDVLELDGTARLNTPGTVGAPNWEWKLVDFNLLKSKTNRLAKQVSKSINH

SEQ ID NO: 54981 - DNA, 1530 bp, Acidobacteria bacterium Ellin345
  CDS (1)..(1530): transl_table=11
atgaaatttccgcgctccgccggcatcctgctccacccgacgtcgctgcccggcccctacggcatcggcgacttcggcaccagcgcctatcgcttcgccgactttctgcactcggccggcatgaagatctggcaggtgctgccgttaaaccccacaggttacggcgactctccgtaccagtcgttctcggccttcgctggaaatcctcttcttctcagtctcgacgaactgcacaagcaaggcctgctcagcgagcatgacctccgccaggcgaccttcgacaacgatggcgacatcgatttcggcgcggtcattccgcgcaaattcgcctccctcaacaaagcggccgtcgccttttatggaaaatccggcgaggccaatctcgacttccagcaattcgttgccgccaattctgcgtggctcgatgattacgcgctcttcatggccgctaaagacgcccacgatctcgtcatctggaccaagtgggacgctgatctcgccgcccgtaagccggaagcgctggctagatggcgcaagcagctctctaacgaaatcgcggcctacaagttctggcaattcgaattcttccgccaatggcgcgccttgaagtcttatgccaacgatcgcggcatccgcatcatgggtgacatccccatctacgtcgcacacgacagcgccgacgtttgggcgcgtcccgatctcttctggctcgacgcgaaagggaacccgctgaaggtcgccggcgttccccccgactacttcagcgccaccggccagctctggggaaatccgatctatcgctgggacctgatgcgcgacaacggctacaagtggtggatcgagcgcttccgcgccgcgctcaccatgttcgacctcgtccgagtggaccacttccgaggcttcgaggcctactgggagatcccgggcggcgagcccaccgccatgcatggccaatgggtgaaaggccccggcgccgaactcttcgaggtcgtgagcactgcgctcggcgatctcccgatcgtcgccgagaaccttggcgtcataacgcctgaggtcgaagctatccgtcaccagtttggattcccgggcatggcgattgcgcagttcgccttcagcattgatcccatggcgcccacgttccgtccgcacaattacgaacgccaactcgtggcctacaccggcggccacgacaacgacaccatgttcggctggtggcgctccggcgtcgccgacagcacccgcacccaggaagaggtcgaccgcgagcacaacgacgccgcagcctatttcggcgtcaccctcgacgaaatggaccgcagcgtcaactggatatacatccgcgccgtcatgatgtccgtcgccgacaccgtcctctttcccatgcaggacgtcatcggcctcggcggccaggcccgcatgaatctccccggcagcctcggtcgtaactggaaatggcgcgtgtgcaaggaagaacaacgtttcgaacatgcgaagcgcctcgatgagttcgccaaactctacgaccgctag

SEQ ID NO: 54982 - protein, 509 aa, Acidobacteria bacterium Ellin345
MKFPRSAGILLHPTSLPGPYGIGDFGTSAYRFADFLHSAGMKIWQVLPLNPTGYGDSPYQSFSAFAGNPLLLSLDELHKQGLLSEHDLRQATFDNDGDIDFGAVIPRKFASLNKAAVAFYGKSGEANLDFQQFVAANSAWLDDYALFMAAKDAHDLVIWTKWDADLAARKPEALARWRKQLSNEIAAYKFWQFEFFRQWRALKSYANDRGIRIMGDIPIYVAHDSADVWARPDLFWLDAKGNPLKVAGVPPDYFSATGQLWGNPIYRWDLMRDNGYKWWIERFRAALTMFDLVRVDHFRGFEAYWEIPGGEPTAMHGQWVKGPGAELFEVVSTALGDLPIVAENLGVITPEVEAIRHQFGFPGMAIAQFAFSIDPMAPTFRPHNYERQLVAYTGGHDNDTMFGWWRSGVADSTRTQEEVDREHNDAAAYFGVTLDEMDRSVNWIYIRAVMMSVADTVLFPMQDVIGLGGQARMNLPGSLGRNWKWRVCKEEQRFEHAKRLDEFAKLYDR

SEQ ID NO: 54983 - DNA, 1554 bp, Acidobacteria bacterium Ellin345
  CDS (1)..(1554): transl_table=11
atgttcacgaagcgagcttccggcattcttctccatccatcttccttgccgtcgcgtggcggcattggcgatttcggccccgctgcttatgaattcgtaaattggctggcggagggcaagcaaacgctgtggcagatcctgccgctcgggcctccggggatcgggaactcgccgtattcatcgacgtcggcatttgcgggaaacattgtgctcatcagcctcgagcggctggcggagcgcggaatgctcgacaacgctgcgctgaagagcttgccggaaagcgatgggagccgcgttaattttgagaacgtattgaaggtcaaactcccgctgttgcgacaggcggcggagagctttttgaagaacgcttacggaaattcgcgcgagcggttcaatcgcttttgccgcgacaacacctggtggctcgacgatttcgtgctcttcgacgctctgcgcgaacgttaccagggagcgagctggaatacgtggccgaccgagatttcgcattgccagccggaggcaattgccaagacgcgcagcgaactggcgcacgagttggaggtcgcaaagttcctgcagtttgcgttcttcgagcagtggggcgcgctgcgaaactattgtcatcagcggcgaatccggattgtgggcgacgtggcgatattcgtcagctacgacagcgctgacgtctggacgcaccgcgacatcttccgtctgcgcgacgtggaacccgaagtcgttgccggagtgccaccggatgcattcagcgataccggccagcgatgggggaatccgctatatgactggaaccgcctgcgcgagcgcggctacgactggtgggtgagccgcatgcgctgggcgcacacctggtgcgacatcctgcgcatcgatcacttccgcggctttgaatcgtattgggagattccggcggacgaaccgacggcgatccacggtagctgggcgaaaggtcccgctgacgagtttttccacgtgatcaaccgcgaactcggcgagttgccattcattgccgaagacctgggaatgatcactccggaagtgcatcaattgcgcgagcggctgaagattcccggtatgcgcgtgctgcagtttgcgtttggcgatcgcggcgcgcacatgtacttgccgcaccgctacgacacaaacaccgtggtctataccggcacccacgacaacgacaccacgatgggttggtggcaaggtgacgcccagccgcatgaaaagcgcgacgccgccgcagcctttggcgcgaacgaccagaacgtgcattgggcgttcattcgcgcggcgcagacatcgctggcaacgctgagcgtggtgccgctgcaggacgtcttcggccttgacagttccgcgcgcatgaatacgccgagcctttccgacggcaactggggctggcgctacaagcgcgggctgcttacgcaagatgcagcgaaaacgctgtcagaactagcggagacgacggatcgcgacgagttgttgttatcaggcggaaaccagcagggcaacggggaacgaccggaagatttcgctgcataa

SEQ ID NO: 54984 - protein, 517 aa, Acidobacteria bacterium Ellin345
MFTKRASGILLHPSSLPSRGGIGDFGPAAYEFVNWLAEGKQTLWQILPLGPPGIGNSPYSSTSAFAGNIVLISLERLAERGMLDNAALKSLPESDGSRVNFENVLKVKLPLLRQAAESFLKNAYGNSRERFNRFCRDNTWWLDDFVLFDALRERYQGASWNTWPTEISHCQPEAIAKTRSELAHELEVAKFLQFAFFEQWGALRNYCHQRRIRIVGDVAIFVSYDSADVWTHRDIFRLRDVEPEVVAGVPPDAFSDTGQRWGNPLYDWNRLRERGYDWWVSRMRWAHTWCDILRIDHFRGFESYWEIPADEPTAIHGSWAKGPADEFFHVINRELGELPFIAEDLGMITPEVHQLRERLKIPGMRVLQFAFGDRGAHMYLPHRYDTNTVVYTGTHDNDTTMGWWQGDAQPHEKRDAAAAFGANDQNVHWAFIRAAQTSLATLSVVPLQDVFGLDSSARMNTPSLSDGNWGWRYKRGLLTQDAAKTLSELAETTDRDELLLSGGNQQGNGERPEDFAA

SEQ ID NO: 54985 - DNA, 1551 bp, Myxococcus xanthus DK 1622
  CDS (1)..(1551): transl_table=11
atgtccacccccggccggctctccggtcttttgctcccgcttttctccctccgctcacagaccgactttggcatcggtgacttcggtgccctggagggactgttcacctggatgaagtccgcccgccagcggatgctgatggtgctgccgctgctgcccaccgcgccgggcgactcgagcccctacgcgacgcgttcggccttcggcctcaatcccctcttcatcgacctgcagcggctgccggagttcaccgcggccggcggcgaggcggccctgtccgacgcgcagcgcgcccagttggccgaggcgcgctctgcgccgcgcgtgcgctatgacctggtcttccccctcaaggacaccgccttcgcgcgcgccttcgacgtcttcgaagcgcagcactgggcgccccagtccgagcgggcgaagaccttccgccagtggcgcgacgcccagggcgaatggctggagagctacgcgctcttcaccgccatcagcgagcaggaagagcgccgcccgtggtgggagtggccggagccgctgcgcacccgtcaacccgaggccctggcccagaagtcccgggagctggagcgccgcgtgcgctaccacgcctggctccagtgggtggccgagcagcagtggaacgaggtgcggacgcaggcccgcgccaaggacgtcctcctgtgcggcgacgagccgttcatcatcggtcaggacagcgcggacgtgtgggcgcacccggacatcctgcggcgcgacgcccgcctgggcgtgcctccggatgacttctccgccacgggccaggactggggcctgccctacttcgacctggcggccatggagaaggacgacttcgcgtggctgaagacgcgcgcgaagaaggcggccagctactacgacttgcgccgcgtggaccacgcggtggggtacttccggcagtggattcgcgacgcgcagacgcccaccgggcgcttcatcccgccggacgaggagagccaccgccgcctgggcgagaagaccttccgcctgctgtccgagggcgccggcatcgtcgccgaggacctgggcgtgattccacacttcgtgcgccacatcctcgcggagctcaagctgcccggctaccgggtgatgcgctgggagcgcgacgacaaccactaccgcgacccgcgccagttcccggcggtgtccctggtcaccaccggcacgcatgacacggacacgatggccgagtggtgggagggcgcgggcgaccacgagcggcaggcggcggcgcgctcatggccggagctcaacggcgtggccatcacccgcgagttcaccccggacgtgcaccgggccatgctggcctcggcgctcaacgccaacagcgacctgtgcgtgttgccctggcaggacgtgctcggcacccgggaccgcatcaacctgcccggctccatgagcgattcgaactgggcctaccgcatcgaacagaacgtgagtgacctgctcaccgattcgcgcacgcgcgaggccgccgagcggctggcctggctcaccgcgtccgcgcggcgctga

SEQ ID NO: 54986 - protein, 516 aa, Myxococcus xanthus DK 1622
MSTPGRLSGLLLPLFSLRSQTDFGIGDFGALEGLFTWMKSARQRMLMVLPLLPTAPGDSSPYATRSAFGLNPLFIDLQRLPEFTAAGGEAALSDAQRAQLAEARSAPRVRYDLVFPLKDTAFARAFDVFEAQHWAPQSERAKTFRQWRDAQGEWLESYALFTAISEQEERRPWWEWPEPLRTRQPEALAQKSRELERRVRYHAWLQWVAEQQWNEVRTQARAKDVLLCGDEPFIIGQDSADVWAHPDILRRDARLGVPPDDFSATGQDWGLPYFDLAAMEKDDFAWLKTRAKKAASYYDLRRVDHAVGYFRQWIRDAQTPTGRFIPPDEESHRRLGEKTFRLLSEGAGIVAEDLGVIPHFVRHILAELKLPGYRVMRWERDDNHYRDPRQFPAVSLVTTGTHDTDTMAEWWEGAGDHERQAAARSWPELNGVAITREFTPDVHRAMLASALNANSDLCVLPWQDVLGTRDRINLPGSMSDSNWAYRIEQNVSDLLTDSRTREAAERLAWLTASARR

SEQ ID NO: 54987 - DNA, 1452 bp, Rubrobacter xylanophilus DSM 9941
  CDS (1)..(1452): transl_table=11
gtgcggctggagcgctcggccgggatcctgctccaccccacctccctgcccggaccccgcccctcgggggagctgggcccggaggcgctccggttcgcgcgctttctgcagggcgcgggacagcggctctggcaggtgctgcccctgaaccccacggacgaggggggctccccctactcctcgtactcggcgttcgcgggcaacccgctgctcgtgagcgcggagtggctggcggaggacggcctgatcgagggcgcgccgcgcgaggcccccgccccccgggtggactaccggcgggcgctcgccgccaaggggcgcctgctgcgggaggcctactcccgctggaggcccgacgagggcttcgagcgcttccgcgaggagcggtccttctggctggaggactacgccctgttcatggccctgcgggggcgactccggcgcccctggaaccgctggcccgcgggcctggccacccgggagccgggcgccctgcgctccgcccggcgggagctggccgaagaggctggcttccaccgcttcacccagtaccgcttcttccgggactggtccagggtgcggcgcgccgcgcccggcgtgaggatcataggggatctgcccatcttcgtctcccacgactcggccgacgtgtgggcccaccgggatctctttctgctggacgagaggggggagcccgccgctgtggccggcgtccccccggactacttctccgagaccggccagctctggggcaacccgctctacgactgggagaggatgcgccgggaagggtaccgctggtgggtggagcgggcgcgggcggcgctggccctgtgcgacgcgctgcgcctggaccacttccggggcttcgcggcgttctgggcggtgcccgcgggggagcgcaccgcggccgggggccgctgggtagagggcccgggagaggggctcttccgggtgctcagcaaggagctgggcgggctgccgttcatcgcggaggatctgggcgagatcacgccggacgtcgtgcggctgagggagcggctcgggcttccggggatgaaggtgctgcagttcgccttcgggagcgggccggagaaccccttcctcccgcacaactggcggcaggagagctgggtggtctacaccggcacccacgacaacgacaccaccgccggctggtggctctccgccgcggacggggagcgggccttcgcccggcgctacctggggcgcgagtacgccggggtgtgggacttcatccggctggcctacgcctcggcggcgggttgggcggtgatcccgatgcaggacgtcctgggcctcggcacggaggcccggatgaacaccccgggcaccggggagggcaactgggagtggcgcctcggcggcgaggcgctgaccccaaatctggccgcgcgcctcggggagctcgcgcgcacctacgggcgggcctag

SEQ ID NO: 54988 - protein, 483 aa, Rubrobacter xylanophilus DSM 9941
MRLERSAGILLHPTSLPGPRPSGELGPEALRFARFLQGAGQRLWQVLPLNPTDEGGSPYSSYSAFAGNPLLVSAEWLAEDGLIEGAPREAPAPRVDYRRALAAKGRLLREAYSRWRPDEGFERFREERSFWLEDYALFMALRGRLRRPWNRWPAGLATREPGALRSARRELAEEAGFHRFTQYRFFRDWSRVRRAAPGVRIIGDLPIFVSHDSADVWAHRDLFLLDERGEPAAVAGVPPDYFSETGQLWGNPLYDWERMRREGYRWWVERARAALALCDALRLDHFRGFAAFWAVPAGERTAAGGRWVEGPGEGLFRVLSKELGGLPFIAEDLGEITPDVVRLRERLGLPGMKVLQFAFGSGPENPFLPHNWRQESWVVYTGTHDNDTTAGWWLSAADGERAFARRYLGREYAGVWDFIRLAYASAAGWAVIPMQDVLGLGTEARMNTPGTGEGNWEWRLGGEALTPNLAARLGELARTYGRA

SEQ ID NO: 54989 - DNA, 1500 bp, Cytophaga hutchinsonii ATCC 33406
  CDS (1)..(1500): transl_table=11
atgaatatcaatcggagcagcggcgttattttacacatctcttctttatataatacatttggcgttggagatttcggaccttcagcatataggttcgcagattacttggcaacaacgggtatccgttactggcaaacacttccgttaaactatacagacggcggacgcggcttttcaccctacagctgtttatcagcatttgcaggcaatccaatgtttataagcccggaattactgttagaagatggtttactggaaacaacggatttactggaacacacctttgaggaaaatattgttgagtttgacaaagtatttgcatataaaatgtctttacttaacaaagcatttgagcgttttgaaaaaacagaacaaccagatttcaaatccttctgcaaaaagcaggcttactggctggatgatttcaccctgtttctttcgcttaagaatttttatcaaggtgcctggtggctggactggccggctgaaataaaaaacagagacacccgggcattaaataaaattaaaaaaacacttgaacattccatcgtaaaagaaaaattcattcagtatcttttttttaaacagctggcgttattacgcacctatgtaactcaaaaaaatatacaattcataggtgacatgcctttctatgtaagccatgacagtgctgatgtatggaaacatcctgaattatttaaattatttaaagacggacgtcctgctaaagtagcgggtgtgccgccggatatgttttctgaaacaggccaattatgggggatgccgattttcaattggtcggcgttgaaaaaaacgggatacgactggtggatcaaacgcattacgcacaccttactcatgtgtgatattatccgattagatcacttccgtgcgttctctgcttactatgaaatctctgctaccgaacacactgccgcaaatggcaaatgggtaaaagcaccgggcaatgatctgtttaaaaaaattcagcagatacatgccgatatgcctttcattgcagaagatttaggagaaattgatcagccggtatgggatctgatgaaaaaatttgatctgccaggaatgaaacttctgcagtttgcattctttgatgatgcgcctaccagtattcacaatccgcataactatgttccgcattgcatttcctatacgggcacgcacgacaataatacgctacaaggctggtggaaagaagaagtatcggataaaggcaagagtatgatttccgtgtatttcaataaaaccatagacgaaagtaatctgaacaaagaatttatccggaaagcaatttcttccgtggcagtgattgctgtatggcccatgcaggatatgcttggcctcggcgctgaagcaaaaatgaatcgcccgggcagcctgcatgataactggaaatggcgcttacattctcaggctccgttaacagaagaactggcaaaagaaattcataaccagctgtatttatttaaccgcttacactaa

SEQ ID NO: 54990 - protein, 499 aa, Cytophaga hutchinsonii ATCC 33406
MNINRSSGVILHISSLYNTFGVGDFGPSAYRFADYLATTGIRYWQTLPLNYTDGGRGFSPYSCLSAFAGNPMFISPELLLEDGLLETTDLLEHTFEENIVEFDKVFAYKMSLLNKAFERFEKTEQPDFKSFCKKQAYWLDDFTLFLSLKNFYQGAWWLDWPAEIKNRDTRALNKIKKTLEHSIVKEKFIQYLFFKQLALLRTYVTQKNIQFIGDMPFYVSHDSADVWKHPELFKLFKDGRPAKVAGVPPDMFSETGQLWGMPIFNWSALKKTGYDWWIKRITHTLLMCDIIRLDHFRAFSAYYEISATEHTAANGKWVKAPGNDLFKKIQQIHADMPFIAEDLGEIDQPVWDLMKKFDLPGMKLLQFAFFDDAPTSIHNPHNYVPHCISYTGTHDNNTLQGWWKEEVSDKGKSMISVYFNKTIDESNLNKEFIRKAISSVAVIAVWPMQDMLGLGAEAKMNRPGSLHDNWKWRLHSQAPLTEELAKEIHNQLYLFNRLH

SEQ ID NO: 54991 - DNA, 1494 bp, Clostridium perfringens ATCC 13124
  CDS (1)..(1494): transl_table=11
atgagaagagcaagtggaataataatgcatattgcttccttacctggaaagtatggaataggtacttttggtaaggaagcatttgagtttgtagattttttaaagaaagctggacaaggatgttggcaaatattgcccttaggtcctacaagttatggtgattcaccatatcaatcattttcagcctttgcaggaaatccatattttatagattttgatattttaaataaagaaggattacttgataaaaaagattaccaaggaattaattttggaaatgacccagaaaaaatagattatgctttattatttgacaagaagatgagagtgttaagagtagcatatgaaaaatctttagatgagaataaagaagaaattgaaaagtttagagaagaaaataaactttggcttgaagattatgctttatatatggcaatcaaaaatgaaaacgaattagtaagttggcaagaatgggatgaaaaattaagattaagagataaaaagaccttagaagaatataaagttaaattagaaaaagaaataaactactgggtattcttacaatatcatttctttaagcaatggaataaattaaaagagtatgcaaatagttttggaattaagataattggagatatgcctatatatgttgcagaggatagtgcagatgtttgggcaaatccaaaagcatttttattagatgaaaataatattcctaaaaaggttgctggatgtccaccagatgctttttcagaaacaggtcaattatggggaaatcctatatatgattggagctacatggatgacacaggatattcttggtggattgatagagtaagagaaagctttaagctttatgacatattaagaatagatcactttagagggtttgaagcttactggcaaataccatatggagatgaaactgctgtaaatggtgagtgggttaaaggccctggaataaaattatttaatgcaattaaagaagagttaggtgaggttaatgtaatagcagaagaccttggttatttaactcaagaggttatagattttagaaatgaaactggattcccaggaatgaaggttttacaatttgcctttgattctagagaagaaagtgattatcttccacataattatccagttaactcaatagcttatacaggtactcatgataatgatacatttagaggttggtttgaagttacaggaaatagagaagatgtggaatattctaaaaaatatttaaaacttactgaagaggaagggtataactgggggtttatcagaggagtttggagcagtgtatcacatacagctatagctctaatgcaagatttcttaaacttaggaaatgaggcaagaataaactatccatctactcttggtggcaattggcaatggagagttaaatatgatgctctaactgatgaattagcagagaaaatatatgatataacaaaattatatggaagggtgaatattaatgaataa

SEQ ID NO: 54992 - protein, 497 aa, Clostridium perfringens ATCC 13124
MRRASGIIMHIASLPGKYGIGTFGKEAFEFVDFLKKAGQGCWQILPLGPTSYGDSPYQSFSAFAGNPYFIDFDILNKEGLLDKKDYQGINFGNDPEKIDYALLFDKKMRVLRVAYEKSLDENKEEIEKFREENKLWLEDYALYMAIKNENELVSWQEWDEKLRLRDKKTLEEYKVKLEKEINYWVFLQYHFFKQWNKLKEYANSFGIKIIGDMPIYVAEDSADVWANPKAFLLDENNIPKKVAGCPPDAFSETGQLWGNPIYDWSYMDDTGYSWWIDRVRESFKLYDILRIDHFRGFEAYWQIPYGDETAVNGEWVKGPGIKLFNAIKEELGEVNVIAEDLGYLTQEVIDFRNETGFPGMKVLQFAFDSREESDYLPHNYPVNSIAYTGTHDNDTFRGWFEVTGNREDVEYSKKYLKLTEEEGYNWGFIRGVWSSVSHTAIALMQDFLNLGNEARINYPSTLGGNWQWRVKYDALTDELAEKIYDITKLYGRVNINE

SEQ ID NO: 54993 - DNA, 1518 bp, Trichodesmium erythraeum IMS101
  CDS (1)..(1518): transl_table=11
atgctactttcgagatctagcggtattttactgcatccaacttcttttcccagtccctttggaattggtgacttaggccaggaagcatacaattttgtgaattttttgaaaaatagtggacaaaaaatttggcaagttctaccattagggccaacaggctttggcaattctccctatcaagcttattcagcaatggcaggaaatcctctgttaattagtccagataagttaaaagatgaaggatggctttctgaggaagatttttctaatataccagaatttccaagggataaggtagattttgattcagttgcccaagtaaaaagttctttgctgaaaactgcttaccaaaactttcaaaaatatgcttctgaagaaaaaaaagagacattcaatcaattcagtaacagtaaagctttttggttagacgattatgctttttatatggctttgaaagaggctcacgaaggagcaagttggcatacctgggatcaagacatcgctcatcgtcaaccacaagcattagcagaatggcaacaacgtttagctgataaaattcagtaccataaatttcttcaatatttattctttcagcaatgggatcagctgaaaagttatgctaatcaacaaggaattaaaatctttggcgatgttcctatatatgttgcccatgatagtgctgatgtttggtcacatccagaaatattctctttagattcacaaacaagtgaaccatctttaatggctggcgttcccccagattattttagtgagactggtcaactatggggtaatccagtttatcagtgggataaattggaacaggaagattttttttggtgggtacaacggattcagtctatgctggatatagttgatttgattaggattgaccattttctaggtttggtttcttattgggcagtaccccaaggtgaaactacagctaaaaatggtacatggattacagctccaggtagggctttttttaaaactattaaagaaaagttaggtaaactgccagttattgctgaggatttaggagttattactactgaagtagaacaattacgggatcagtttgaatttcctggtatgaaaattctacattttgcttttgactcaggtagtgataatctctatttaccctgcaattataattctgctaattgggttgtttatactggcactcacgataacaatactactgtcggctggtttaataagcgttctcctcaagaacaggaaagagtttatcgttttgttggtaatagttggggtcatggcattcattgggatttaattcgtttagctatgtcttctgtggcttatatggcaatttttcctctacaagatattttagggttgggggaagaagctattatgaatcagcctggtgttcctgatggtaattggagttggcgttatcgatcagagatgttaacttcagatataagtgatcgcctcaaagaggtgacagatatttatggtcgtaccccaacaaataacgaggattaa

SEQ ID NO: 54994 - protein, 505 aa, Trichodesmium erythraeum IMS101
MLLSRSSGILLHPTSFPSPFGIGDLGQEAYNFVNFLKNSGQKIWQVLPLGPTGFGNSPYQAYSAMAGNPLLISPDKLKDEGWLSEEDFSNIPEFPRDKVDFDSVAQVKSSLLKTAYQNFQKYASEEKKETFNQFSNSKAFWLDDYAFYMALKEAHEGASWHTWDQDIAHRQPQALAEWQQRLADKIQYHKFLQYLFFQQWDQLKSYANQQGIKIFGDVPIYVAHDSADVWSHPEIFSLDSQTSEPSLMAGVPPDYFSETGQLWGNPVYQWDKLEQEDFFWWVQRIQSMLDIVDLIRIDHFLGLVSYWAVPQGETTAKNGTWITAPGRAFFKTIKEKLGKLPVIAEDLGVITTEVEQLRDQFEFPGMKILHFAFDSGSDNLYLPCNYNSANWVVYTGTHDNNTTVGWFNKRSPQEQERVYRFVGNSWGHGIHWDLIRLAMSSVAYMAIFPLQDILGLGEEAIMNQPGVPDGNWSWRYRSEMLTSDISDRLKEVTDIYGRTPTNNED

SEQ ID NO: 54995 - DNA, 1527 bp, Synechococcus sp. CC9311
  CDS (1)..(1527): transl_table=11
atggttaatcactccagaagcgaaagggatcggcgggtgggtgtactccttcaccccacagctttgccggactcaccggtgtgtggaagctttggacgatcagcccgtgaatggttgaaggctttggcgagccatggcgtcagcgtttggcagattttgccccttgctccgcctgatggcacagggtctccgtacagctcaccctccagttttgccttaaatccttggctcctggatgccgaagatttggcagaagagagctttttagagtccagtgatctggggcgtctccctggtgctgatgccaaggcggaatcgcctgccgtactggactttcatctggccgatgcgcgtgctgctgcactggctcgcgcgcttgcagcccattggcctcagcagtcttctgcgcgtcaacaagaatttcaacggtggagggttgaccaaacccattggctcacggatcacgtcaatttcgtggtgctgcgtgatcaacacaacggtttgccttggtggtcttggccccatccgctcgcagttcagcaacctgctgccttggctcaatggcgtcttcagcatggtgaagcactgctggagcaggaacttcttcagtggcatctcgatcgacagtggcaatgcctgcgcgtgcaagctcgagatttaaacatcgagattcttggtgatctgcccttttatgtggctcgcgatagtgctgatgtttggagccatcgatccttattttctattgctgctgatggacgtttacggcttcaaagcggagtgcctcccgactatttttcggagaccggtcagctctgggggacgccggtttatagctgggctcgacatcggcgaactggatttcgttggtggcgtaatcgcttaaggcgccagtggaggcttgctgatcggttgcgcttggatcatttccgcgctttggctggtttttgggcggtccccggcgatgacgacacggctcaaaatggggtttggcagcgttcacccggccatgagttgttgcagctcctgcgtcgagacgcgggagggacgcttcccatcgttgccgaagatcttggcgtgatcacgccggatgtggaacggctccgtgatcgctttcgtttaccaggaatgaaagttctgcagttcgcctttgatggcaacccaagcaacccttatctgccgcgcaatatcaaaggacgccagtgggtggtgtacaccggtactcatgacaaccccacaacgatggggtggtggcagcgacttgatgaatcgtctaggcgccaggtgggtgagctgctggggtgtcatgttgaagcacccggatggcaattgatggaactcgggatggaaacgtccgctgaactcgtggtgtctccgttacaggatttgctgcatttggatgatcaagctcgcttcaatactccaggcactgttggcggcaattggtgctggaggatgagcgcttttgatgaggccctgcagggtgctcttaagggttatggcgagagagctgcggcctggggcaggtga

SEQ ID NO: 54996 - protein, 508 aa, Synechococcus sp. CC9311
MVNHSRSERDRRVGVLLHPTALPDSPVCGSFGRSAREWLKALASHGVSVWQILPLAPPDGTGSPYSSPSSFALNPWLLDAEDLAEESFLESSDLGRLPGADAKAESPAVLDFHLADARAAALARALAAHWPQQSSARQQEFQRWRVDQTHWLTDHVNFVVLRDQHNGLPWWSWPHPLAVQQPAALAQWRLQHGEALLEQELLQWHLDRQWQCLRVQARDLNIEILGDLPFYVARDSADVWSHRSLFSIAADGRLRLQSGVPPDYFSETGQLWGTPVYSWARHRRTGFRWWRNRLRRQWRLADRLRLDHFRALAGFWAVPGDDDTAQNGVWQRSPGHELLQLLRRDAGGTLPIVAEDLGVITPDVERLRDRFRLPGMKVLQFAFDGNPSNPYLPRNIKGRQWVVYTGTHDNPTTMGWWQRLDESSRRQVGELLGCHVEAPGWQLMELGMETSAELVVSPLQDLLHLDDQARFNTPGTVGGNWCWRMSAFDEALQGALKGYGERAAAWGR

SEQ ID NO: 54997 - DNA, 1476 bp, Alkalilimnicola ehrlichei MLHE-1
  CDS (1)..(1476): transl_table=11
atgagcgggggtggattctggcagcggcgccgggccggggttctcgcccacctgagttcgctccccggagaggcgggtagcggcagcctcggccgccacgcccacggcttcattgattggctggccgatgccggcttctcggtctggcagatgctgcccctggggccgacccacgacgacctctgcccctaccaaaccctctcggtccacgccggtgacgcacggtttatcgatcaagaggcgctggaggcggtcggctggctaccgcgggaaccgcagccttcccacgccccccgccgttggcggcaggagcggttgtgccgggcgcgggccggtcgggccgccgccggcgatgaggcgtcgatggccgaggaggccgccttccgccaacgccacgcccactggctggaggactatgcgctctacgtcgcattgcgccgggagaagggggaggccccttggtgggagtggcccaccgccgagcgggaccgggaggaggctgccctggcggcggcccgggagcggctggccgacgccatcgaccaggccgtcttcgagcaattcctcttcttcagccagtgggaggcactgcgccggcacgccggcgagcgcggcgtcgcccttttcggcgacatgccccttttcgtcgcccacgacagtgccgacgtctgggcccaccgggactacttccaactggacgaggccggccgcccccggaccgtggcgggcgtgccgccggactacttctccgataccgggcaacggtggggcaacccccactatgagtgggcgcggatgcaggccgacggcttccactggtggctggatcggctcgccacccagttggagctgttcgacttcgtccgcctcgaccacttccgaggcctcgccgcctactggtcgatccccgccgaggcggagaccgcccggaacggccagtgggtcccggctcccggccgcgccttcctggccgcggtggcggaccggttcgggcgggtgccgctggtggccgaagacctcggcttcatcaccgaggacgtggaggcgctgcgggacaccttcgggctgccggggatgaaggtcctccactttgccttcgacagcgacgccgacaacccctacctgccacaccaccacgtccgcgacggcgccgtctacaccggcacccacgacaacgacaccaccgtcgggtggtaccaggggctcgatcccgttgtggcggagcgggtcgccgcctacctggggtaccccggcgaagagatgccctggccgctgatccgcgccgccctggcctcggtggccggcctggccgtggtgccgatgcaagatctgctggcgctggactccgaccaccgcatgaacatccccggcgtcgctggcggcgacaactggcggtggcgattccagtgggagtggctgccggagggattgcagcagcgcatggcggagatgaaccggctttacgggcggggctga

SEQ ID NO: 54998 - protein, 491 aa, Alkalilimnicola ehrlichei MLHE-1
MSGGGFWQRRRAGVLAHLSSLPGEAGSGSLGRHAHGFIDWLADAGFSVWQMLPLGPTHDDLCPYQTLSVHAGDARFIDQEALEAVGWLPREPQPSHAPRRWRQERLCRARAGRAAAGDEASMAEEAAFRQRHAHWLEDYALYVALRREKGEAPWWEWPTAERDREEAALAAARERLADAIDQAVFEQFLFFSQWEALRRHAGERGVALFGDMPLFVAHDSADVWAHRDYFQLDEAGRPRTVAGVPPDYFSDTGQRWGNPHYEWARMQADGFHWWLDRLATQLELFDFVRLDHFRGLAAYWSIPAEAETARNGQWVPAPGRAFLAAVADRFGRVPLVAEDLGFITEDVEALRDTFGLPGMKVLHFAFDSDADNPYLPHHHVRDGAVYTGTHDNDTTVGWYQGLDPVVAERVAAYLGYPGEEMPWPLIRAALASVAGLAVVPMQDLLALDSDHRMNIPGVAGGDNWRWRFQWEWLPEGLQQRMAEMNRLYGRG

SEQ ID NO: 54999 - DNA, 1545 bp, Solibacter usitatus Ellin6076
  CDS (1)..(1545): transl_table=11
atggaaccagacaatcgccctgaaatcgcacccctgttcccggctgattaccgcggctccggactgctcctgcacatcgcgtccctgcccgggcccttcggcatcggcgacgtcggcccctctgcctttcaatgggtcgaccgcctccaggcagccggacagcaatggtggcaggcactcccgctcggccccaccggccatcgcgattcgccatgccagtgcggctcctcctttgccgccaaccctctcctcatcagtcccaagtccctgattgatgacgagctcttgcgcgctgccgattgtcagggttattcgtttccctccgcctcggtcgattacgacactgtcgttccattgaaacaccgcctcctccatctcgcctgggccaatttcaaagccggcgcccgccccgatttgaccccgcccttcgagcaattctgcgacgcccaatccatctggctcgatgactacgctctcttccgcgccctgcatcagaaatttggcggcgtccattacctgcaatggcctcagccgctggtcttccgcgaacctgccgccctggaagaagcgcgccgcgagttggcagaccagatggaacgcgtcgccttcgaacagtttctgctcttccgccgcggcgtcacgctcaaagactacgcccactcccgaggcatccggctaatcggcgacctctcgtttttcgtcgaacccaattccagcgatgtctggtcccgccccgagtatttcctcctcgatgaaaaccgccgtccccgctctgtctccggagtgcccccggatgccgtcagttccctcggccaagtctggggcagtccggtctacaactggaacgctctccgtgaaaccggcttccgctggtgcatcgatcgcttccaggcattgctcgcccacgtccatgtcatccgcctcgatcacttccgcggcttcgccgccgcctggcatgtccccgtcggtgcgcccagtgcgcgctgcgggcaatgggtccagggacccggcgcgcagttattcgcggccgtcgaagactcactcggctccctgcccttcatcgccgacgacctgggaatgatcaccgccgacgtccgccatctcctcgatcaactcgaatcccccggcacccgcgtccttcagttcgccttcgatggccactccgataatccccacttgcccgtcaactacctgcccaacactgtcgtctataccgccacccacgaaaccgccgccacccgcacctggtttgaaaaactctcccccaacgagcgccgcaacctgtggcgccatctccggcgccccagcggtgaagccgccgatgccgctcctgccttgatgggcctggcctcgtcctcccgcgccgcacttgccatggctcctcttcaggacctgctcaacctgcccggcgctcccgccccctggcgctggcgcgccaccgaagacatgctcaatgcccacgccttcgattggctgcgccagctcaccaaggccaccaaacgcctgccccctccgttcgaactccaactccaggagatcgcctga

SEQ ID NO: 55000 - protein, 514 aa, Solibacter usitatus Ellin6076
MEPDNRPEIAPLFPADYRGSGLLLHIASLPGPFGIGDVGPSAFQWVDRLQAAGQQWWQALPLGPTGHRDSPCQCGSSFAANPLLISPKSLIDDELLRAADCQGYSFPSASVDYDTVVPLKHRLLHLAWANFKAGARPDLTPPFEQFCDAQSIWLDDYALFRALHQKFGGVHYLQWPQPLVFREPAALEEARRELADQMERVAFEQFLLFRRGVTLKDYAHSRGIRLIGDLSFFVEPNSSDVWSRPEYFLLDENRRPRSVSGVPPDAVSSLGQVWGSPVYNWNALRETGFRWCIDRFQALLAHVHVIRLDHFRGFAAAWHVPVGAPSARCGQWVQGPGAQLFAAVEDSLGSLPFIADDLGMITADVRHLLDQLESPGTRVLQFAFDGHSDNPHLPVNYLPNTVVYTATHETAATRTWFEKLSPNERRNLWRHLRRPSGEAADAAPALMGLASSSRAALAMAPLQDLLNLPGAPAPWRWRATEDMLNAHAFDWLRQLTKATKRLPPPFELQLQEIA

SEQ ID NO: 55001 - DNA, 1509 bp, Nostoc punctiforme PCC 73102
  CDS (1)..(1509): transl_table=11
atgccttttcctagatccagtggtattttgctgcatcctacatcctttcctagtcgatttggcgttggagatttaggcttagaagcctatcgctttattgattttctcaaagatagccatcaacaatattggcaagttttacccctaggccccactggatatggtaattccccgtatatgtgctactcggcaatggcaggaaatcccctgttgattagcccagaaaaactacgagataagggtttgctaactgaagaagactttgctaatttaccaggatttccggtagaaaaggtagactttgaccaggttgtaccaattaagattgggctacttaaaaaagcctgtgaaagctttaaagtgaatgctacggacatccaaaaaaacgagtttgcaggtttttgcgacagtaaagcttactggctagagaattacgccttatttatggcgctgaaagatgcccacgaaaatgcaagctggcatacatgggagccagaatttgtcaagcgtaaacccgaagcattagctcaagcagaggagcggctcaatggagatattttctattacaagttcgtccaatttgagtttttccggcagtggtcagacctgaaaagctacgccaatatgcgcggtattgacattatcggcgatatcccgatttacgtatctcatgatagtgccgatgtgtgggcacatcccaacatcttttgcttagatgaagagacaggagaagctgctcaaatggcgggagtcccaccagattactttagcgccaccggtcaattgtggggcaacccagtttataactgggaggaattacaaaaacaagactttaaatggtgggtacagcgctttgaggcaatgctggattatgtagatataattcgcattgaccatttccggggcttcgaagcttattggtcagtacccaaaggcgaagaaactgccatgaatggcaaatgggtggaagcgcctggagacgctttttttgaagcgattagacaaaaattaggtaagctacccgtcttggcagaagatttgggagtaattacattagaagtagaagcgctacgagataagtatgaatttccggggatgaaggttttgcagtttgcctttggttctgatcccggtaatccattcttaccattcaattacccgcgaaatgctgtagtttatactggcactcacgataatgacacaactgtaggctggttcaattcagctaacgactacgaaaagcacaatttgttgctttatttaggttgtgttagccctgaaggtattcactgggatctgattcgcctagctttgagttccatagccaaccaagcgattattcccttgcaagatgttttgggattaggaaacgaagcgcggatgaattttcctagtactgctgagggtaactgggggtggcgctatcaagcagaagcgttgagagatgaattacgcgatcgcttaaaagttcttaccagacttaatggacgcgccccccaagaaaattga

SEQ ID NO: 55002 - protein, 502 aa, Nostoc punctiforme PCC 73102
MPFPRSSGILLHPTSFPSRFGVGDLGLEAYRFIDFLKDSHQQYWQVLPLGPTGYGNSPYMCYSAMAGNPLLISPEKLRDKGLLTEEDFANLPGFPVEKVDFDQVVPIKIGLLKKACESFKVNATDIQKNEFAGFCDSKAYWLENYALFMALKDAHENASWHTWEPEFVKRKPEALAQAEERLNGDIFYYKFVQFEFFRQWSDLKSYANMRGIDIIGDIPIYVSHDSADVWAHPNIFCLDEETGEAAQMAGVPPDYFSATGQLWGNPVYNWEELQKQDFKWWVQRFEAMLDYVDIIRIDHFRGFEAYWSVPKGEETAMNGKWVEAPGDAFFEAIRQKLGKLPVLAEDLGVITLEVEALRDKYEFPGMKVLQFAFGSDPGNPFLPFNYPRNAVVYTGTHDNDTTVGWFNSANDYEKHNLLLYLGCVSPEGIHWDLIRLALSSIANQAIIPLQDVLGLGNEARMNFPSTAEGNWGWRYQAEALRDELRDRLKVLTRLNGRAPQEN

SEQ ID NO: 55003 - DNA, 1482 bp, Fusobacterium nucleatum subsp. vincentii ATCC 49256
  CDS (1)..(1482): transl_table=11
atgaaaagagaatgtggagttttattagcaattagttctctaccaagttcttatggtatcggagattttggaaaagaagcatatcgttttgttgatttcttagtgtcctctgggcaaagtttatggcaaatattaccattatgtcccgtggaatatggaaactctccttatcaatcaccttctacttttgctgggaattttttatatttagatttagaaaatttagttaataatgagtatttaacacaagaggatattgacatattaaaacaagaagtatcctatgttgattataaatatataaaaagccagaaagagtctttattaagaaaggcctctcaggcttttttttacaaaaagaaggaacaagaagaatttgaaaattttcaaaaagagaatcaattttggttagaagattatgcactttttcttgctttaaataaaaaatttaaaggtagaatgtggaatacttggcaaaaggaatataaatttagaaataaaaaatttatagaggaagctaggaaaatttatcaagaagagtataaatatgaaagttttattcaatattatttttataaacaatggaaacaattaaaaaattatgcaaataaaaaaggaataaaaattataggagatttacctatatatgtagcaactcacagtgctgatacttggcaaaatccaaaattattctgttttgataaacatttaaaaataaaatcagtggcaggctgcccaccagattatttttctaaaactggtcaattatggggaaatgttctctatgattggaaagaattggaaagaactacttattcttggtggataaatagaataaaacatagtttttcactctatgatattttaaggctagaccattttagaggttttgcttcttattgggctattcattatggagaaaaaactgcaatcaatggaaagtgggaaaaaggacctagatatcaattttttagaaaattagagaataaaatacctaatatggatatagttgcagaagatttaggaactcttacaccagatgtttttaaacttttagagcaaacaaaatatccaaatatgaaagtactagtatttggtttaactgaatgggataatatgtacaatcctaaaaattatccagaaaattcggttgcctatacaggtacacatgataatatgccaatagttgaatggtatgataatctaaacgaaaaagaaaaaaatatctgtgatgaaaatttaaaaaactttttaaaagattataatacaaatatttgggaacctatacaatggagagcaatagaagcactttatgcttcaaaatcaaatagagttatagtacctttacaagatatattaggtttaggaagagattcaagaatgaatactccttcaacagttggagataattgggcttggagaatttattggaattatagacatgaggatttagaaaataagttatataatttacgcaaataa

SEQ ID NO: 55004 - protein, 493 aa, Fusobacterium nucleatum subsp. vincentii ATCC 49256
MKRECGVLLAISSLPSSYGIGDFGKEAYRFVDFLVSSGQSLWQILPLCPVEYGNSPYQSPSTFAGNFLYLDLENLVNNEYLTQEDIDILKQEVSYVDYKYIKSQKESLLRKASQAFFYKKKEQEEFENFQKENQFWLEDYALFLALNKKFKGRMWNTWQKEYKFRNKKFIEEARKIYQEEYKYESFIQYYFYKQWKQLKNYANKKGIKIIGDLPIYVATHSADTWQNPKLFCFDKHLKIKSVAGCPPDYFSKTGQLWGNVLYDWKELERTTYSWWINRIKHSFSLYDILRLDHFRGFASYWAIHYGEKTAINGKWEKGPRYQFFRKLENKIPNMDIVAEDLGTLTPDVFKLLEQTKYPNMKVLVFGLTEWDNMYNPKNYPENSVAYTGTHDNMPIVEWYDNLNEKEKNICDENLKNFLKDYNTNIWEPIQWRAIEALYASKSNRVIVPLQDILGLGRDSRMNTPSTVGDNWAWRIYWNYRHEDLENKLYNLRK

SEQ ID NO: 55005 - DNA, 1509 bp, Crocosphaera watsonii WH 8501
  CDS (1)..(1509): transl_table=11
atgacattttatcaaagagccagtgggattttgttgcacccaacctctttacccagtcgctttggtattggtgacttaggtgaaagttcctatcgcttcattgaatttttagcagctagtgggcaaaatttatggcaagtcttacccttgggacccacaggatttggcaattctccttatctatcctattcggcttttgctggcaaccctctattaattagtccagatattctctgtggagatggtttacttaccaaagctgacttagatgcttatccaactctaccagatgatcgagttgattacgatttagtcattaagcataagttacccttactaaaaaaagcaagtgatacctttaaaaatggcaatttccacgaactaagaggacagtttgaccaattttgccagagtaatacctattggttagatgattattccttatttatggctattcatgacgataaccctgaaaaagcatggtccgaatgggatcgagacattgctaaacgggaacatcacgccttacaagcttatgggactaagtatgcagaggcaattttttatcacaagtttttacagtttgaatttgtgcgtgagtggaaacgggtaaaaaaatacgccaatgaccgcaacatcaagatttttggggatattcctatctatgtggcctacgatggcgcagatgtttggtctcatcctgatattttctgtgttgactcggaaactttagaagtgaacttaatggcaggtgttcccccggattattttagtgaaactggtcaattatggggcaatcccgtttataactggcaaagacttaaggaaacgggtttcagttggtggattgaacggtttagagggactttagaatactatgacgtggttagggttgaccatttccgagggtttgaaggctattgggccgttcctaaaggggaaaagactgctataaatggccaatggttaccagctccaggaaatgacctttttgcctgtctcaaggaaacattgggaaccttacccatcgtcgccgaagatttaggggtgatcaccgccgaagtggaagctttgcgggataggtatgagtttccagggatgaagatattacacttcgcttttgattcggatcggtctaatcctttcttgccctacaattattacaatcgtaattgtgtggtttatacaggaacccatgacaatgacacaaccgttggctggtttgctgaacgaaattttgaacaacgaacgagggtaacaaattatttggatggtatttctcctcaagggatacactggagcttagttgcttgcgctatgagttcggtagcgaatcaagcggtgttccctttacaggacattttgggttcagaaagtgattgtcgtatgaataccccaggtttagctgctggtaactgggaatggcgatatcgtcaggaaatgttgaccccaaaattaacagaatatttgcatcaaatgacccaattatacggaagacttccttcttaa

SEQ ID NO: 55006 - protein, 502 aa, Crocosphaera watsonii WH 8501
MTFYQRASGILLHPTSLPSRFGIGDLGESSYRFIEFLAASGQNLWQVLPLGPTGFGNSPYLSYSAFAGNPLLISPDILCGDGLLTKADLDAYPTLPDDRVDYDLVIKHKLPLLKKASDTFKNGNFHELRGQFDQFCQSNTYWLDDYSLFMAIHDDNPEKAWSEWDRDIAKREHHALQAYGTKYAEAIFYHKFLQFEFVREWKRVKKYANDRNIKIFGDIPIYVAYDGADVWSHPDIFCVDSETLEVNLMAGVPPDYFSETGQLWGNPVYNWQRLKETGFSWWIERFRGTLEYYDVVRVDHFRGFEGYWAVPKGEKTAINGQWLPAPGNDLFACLKETLGTLPIVAEDLGVITAEVEALRDRYEFPGMKILHFAFDSDRSNPFLPYNYYNRNCVVYTGTHDNDTTVGWFAERNFEQRTRVTNYLDGISPQGIHWSLVACAMSSVANQAVFPLQDILGSESDCRMNTPGLAAGNWEWRYRQEMLTPKLTEYLHQMTQLYGRLPS

SEQ ID NO: 55007 - DNA, 1509 bp, Streptococcus suis 89/1591
  CDS (1)..(1509): transl_table=11
atgacaaatcgtaccagtggaattttgatgcatattacctcacttccaggtaagtttggtattggtacttttggacagtctgcctatgattttgtagatttcttggtggaaaccaagcaaacctactggcagattttaccactaacaactacaagctatggagattctccttaccagtctttctctgctattgcaggaaatacacacttgatagactttgacctcttggttgaagatggcttattggcaacagaagatttccaagatgtaaattttggagataatcctgaaaaagtagactatgctcttatctatcaagttcgccgaccaattttggagaaggcagttcaagcatttttacaagatgataagaagaaagctgcttttctagagtttgaaaaggctaactcatcttggttgacagattatgcggagttcatggctatcaaggaatactttggtaataaagctctccaagaatgggaagataaaaaagttgtagctcgcaacgaggaagctcttgataaataccgcttagaattggcaaatcaaatcgactactacaaagtcacacagtatttcttcttcagccaatggaaacaattgaaagaatatgccaacaaacaccacatcaaaatcatcggagacatgccaatctatgtttctgctgatagcgttgaagtgtggacaaaaccccaactattcaaattggacagtgaacgcaagccgctttatgtagctggtgtaccagctgataacttctcggcagatggtcaattatggggaaatcctatttacgattggccagaacatgaaaaaacaggctataactggtggatttatcgtatccatgaaagtttcaaactttatgatgtccttcggattgaccacttcaaaggtttctcagacttctggcaagtcgatggtaaggctgaggtggcaaaagtaggtacttgggaaccaggtcctggctacaatctcttcaaggctgtcaaagaaacacttggagaccttccaatcattgcagaagaccttggaaacattgacgctaaagctcgcaaattgcttgcggattgtggctatccaggcatgaaaatcttagaatttggtttctttgatgtaacaggtaagagtatcgatgctccacaccgttgcattccaaattcagttgcctacactggaactcacgataatgaggttgtcaatggctggtacaacaatcttgagccagaacaacaagaatacgtggacgcctacagcaaccgtaagccgattgaaaaagttagccaagctatgctccgtatgctgtttgcaacagtgagtgatacagctattgcaaccatgcaagacgtcctagacttgggtgaagaaagtcgaatgaatatgccgtcaactatcggtggaaactgggaatggcgcatgaaagctgaagacttgacccaagaacgcaaagacttcttgacaaaaatgacattactataccaacgaggaaatgaaaaccatgactaa

SEQ ID NO: 55008 - protein, 502 aa, Streptococcus suis 89/1591
MTNRTSGILMHITSLPGKFGIGTFGQSAYDFVDFLVETKQTYWQILPLTTTSYGDSPYQSFSAIAGNTHLIDFDLLVEDGLLATEDFQDVNFGDNPEKVDYALIYQVRRPILEKAVQAFLQDDKKKAAFLEFEKANSSWLTDYAEFMAIKEYFGNKALQEWEDKKVVARNEEALDKYRLELANQIDYYKVTQYFFFSQWKQLKEYANKHHIKIIGDMPIYVSADSVEVWTKPQLFKLDSERKPLYVAGVPADNFSADGQLWGNPIYDWPEHEKTGYNWWIYRIHESFKLYDVLRIDHFKGFSDFWQVDGKAEVAKVGTWEPGPGYNLFKAVKETLGDLPIIAEDLGNIDAKARKLLADCGYPGMKILEFGFFDVTGKSIDAPHRCIPNSVAYTGTHDNEVVNGWYNNLEPEQQEYVDAYSNRKPIEKVSQAMLRMLFATVSDTAIATMQDVLDLGEESRMNMPSTIGGNWEWRMKAEDLTQERKDFLTKMTLLYQRGNENHD

SEQ ID NO: 55009 - DNA, 1548 bp, Prochlorococcus marinus str. MIT 9211
  CDS (1)..(1548): transl_table=11
atgatagaagttaattcagctaaaccccgatttagtggagtattgcttcaccccacgtctttaccaggtaaaaggacatgtggtgggtttggacaagaggcaagagattggctggagttacttgcaaagtcaggaatcagtgtttggcaagtattgccactatctccccctgactcaactggctctccatatagttctccttcaagttttgcattcaatccttggctgcttgatgtaaatgatcttgctcaacagggatttattgcgatggatgtttgcaatgaattatccagcagtaagcaagacataaattcaagtatggactttgacttggctaatttacatagcagaaagttaggtcaggcattaagaaaagaatggcctatccaaaatagttcttctcacaaggaatttctggattggtgtgctgatcagttttggcttgaagatcatgtgatgtttatggaacttcgtattcagaacaatcaacttccttggtgggaatggcctgaggacttagctctgcataacaaaaaagaactaaataattttaaagttaattttaaggaggctcttctagaacactctttattgcaatggcatttagatcgtcagtggtcatcaataaggtctttagcaaatgatttggggatattgatttttggagatttgcctttctatgtttcaagagacagtgctgatgtttggagtaataggtctttattctcaattcttgcaaatggagaaatgtatatgcaaagtggagttccacctgactatttttcagaaacaggtcagctatggggtacgcctgtctatcgttggcaaagcaataaaagatctcactttagatggtggcgcagaaggctttcccgacagtggaatcaatttgacttattacgactagatcattttcgagcgcttgattcattctgggctgtacctggtaatgacaaaactgctcaagatggttcgtggattccatcccctggacttaagttacttaagcttcttaaaaaagattatggtcaaaaacttccattgattgctgaggaccttggtgttattactcctcgagttgagaaattaagaaattattttggattgcccgggatgaaaattcttcaattcgcttttgatggaaatcaagaaaatccctatttgcctgaaaacattagagattatcgatcaattgtctacacaggcactcatgacaatgaaactactactggttggtgggcagaggttggacctgaaattaaatcaaggcttagaaaacaatccaatcaagaaaatgattcccctgcatggcaattaatagagcttggcttacagacacaagcatgtttattcatagctcctatgcaggacatacttggactaggcaatgaagcccgttttaatactcctggcactgttaaaagaagtaattggtcttggaggctagaggcatttaatgactcagtgttggcaggtgttgaaaaatatggacaattgtcgaaatcatatggtagaagcttcgcagaagtttctactttaattggatga

SEQ ID NO: 55010 - protein, 515 aa, Prochlorococcus marinus str. MIT 9211
MIEVNSAKPRFSGVLLHPTSLPGKRTCGGFGQEARDWLELLAKSGISVWQVLPLSPPDSTGSPYSSPSSFAFNPWLLDVNDLAQQGFIAMDVCNELSSSKQDINSSMDFDLANLHSRKLGQALRKEWPIQNSSSHKEFLDWCADQFWLEDHVMFMELRIQNNQLPWWEWPEDLALHNKKELNNFKVNFKEALLEHSLLQWHLDRQWSSIRSLANDLGILIFGDLPFYVSRDSADVWSNRSLFSILANGEMYMQSGVPPDYFSETGQLWGTPVYRWQSNKRSHFRWWRRRLSRQWNQFDLLRLDHFRALDSFWAVPGNDKTAQDGSWIPSPGLKLLKLLKKDYGQKLPLIAEDLGVITPRVEKLRNYFGLPGMKILQFAFDGNQENPYLPENIRDYRSIVYTGTHDNETTTGWWAEVGPEIKSRLRKQSNQENDSPAWQLIELGLQTQACLFIAPMQDILGLGNEARFNTPGTVKRSNWSWRLEAFNDSVLAGVEKYGQLSKSYGRSFAEVSTLIG

SEQ ID NO: 55011 - DNA, 1503 bp, Synechococcus sp. RS9917
  CDS (1)..(1503): transl_table=11
atgcgtgaactcggtgtgttgctgcaccccaccgcccttccaggcagtccggtgtgtggcggtttcggtgctgcggcccagcgctggctggagttgctggctcgccatggcatccgcgtctggcaggtgctgccgttggcccctcccgacggcaccggctctccctacagctcaccgtcgagcttcgcgctcaacccctggtttctcgatgccgatgcgctggtggcggagggctacctggcgcccgagagcctgagcggcctccccggccagaacgcccaggcttcctccggtggggcggtggatctggccctggccgagcgccgggccgccgccctcggcgaggcgctgctggcggcctggccgcagcagtcggcggcgcgtcagcgtcgtttcgcgagctggtgttcccagcaggcgttctggttggaggatcacgccgccttcatggaactgcgtcgccagcaggaggggcggccgtggtggacctggccggagcctttggcgcaacgtcagcgccgggccctggagcagtggcgccgggagcatgggcctgcgctgcagcgtcagcgcctgctccagtggcatgccgatcggcagtggcaggccctccgcagcctggcccaggatctgggggtgcgtctgttcggcgatctgcccttctatgtggcccgcgacagcgccgatgtctggagccatcgccagctctttgcgctgacgccggcgggggagctcatgctccagagcggtgtgccgccggattacttctccgccacgggccagctgtggggcacaccggtgtatcgctggtggcggcatcggctcagccgcttccattggtggcgccaacgcttccggcgtcagtggcaactggcggatctgctccgcctcgaccatttccgtgccctggcggcttactgggcggtgcccggcgctgatgacacggcgatgcggggcagttggcggccgtcgccaggagcctcgctgctgcggcgacttcgccgcgatgccgggggcgtgttgcccctggtggcggaggatctcggtgtggtcaccgccgatgtggagcggctgcgggatcgctttgcgctgccgggcatgaaaattcttcagttcgcctttgacggcaatcccgacaacccctacctgcccgccaacatcaagggggagcgctgggttgtgtacaccggtacccacgacaaccccaccagcatcggctggtggcagggcctggatgaggcggcgcggcagcggctgaccgctttggtggggggggcggtggaggcgccgggttggcagttgctggagctgggtctggccaccagcgcctggctggtggtggcaccgcttcaggatctgctccatctcgacgatgccgcccgcttcaacacccccggcacggtgggcggcaactggacctggcggctggcggtggaaccggcggcgctggagggggcgctcaagggttacggagagcgcggcgccgtctggggcaggcggtaa

SEQ ID NO: 55012 - protein, 500 aa, Synechococcus sp. RS9917
MRELGVLLHPTALPGSPVCGGFGAAAQRWLELLARHGIRVWQVLPLAPPDGTGSPYSSPSSFALNPWFLDADALVAEGYLAPESLSGLPGQNAQASSGGAVDLALAERRAAALGEALLAAWPQQSAARQRRFASWCSQQAFWLEDHAAFMELRRQQEGRPWWTWPEPLAQRQRRALEQWRREHGPALQRQRLLQWHADRQWQALRSLAQDLGVRLFGDLPFYVARDSADVWSHRQLFALTPAGELMLQSGVPPDYFSATGQLWGTPVYRWWRHRLSRFHWWRQRFRRQWQLADLLRLDHFRALAAYWAVPGADDTAMRGSWRPSPGASLLRRLRRDAGGVLPLVAEDLGVVTADVERLRDRFALPGMKILQFAFDGNPDNPYLPANIKGERWVVYTGTHDNPTSIGWWQGLDEAARQRLTALVGGAVEAPGWQLLELGLATSAWLVVAPLQDLLHLDDAARFNTPGTVGGNWTWRLAVEPAALEGALKGYGERGAVWGRR

SEQ ID NO: 55013 - DNA, 1602 bp, Synechococcus sp. WH 5701
  CDS (1)..(1602): transl_table=11
atgccagtgccccccggtcccgacgacgggccttccatcaggcagtgcggcgtgctgctccatcccacagccctgccgggcactccgggctgcggaaccttcggcctggcggctcgccagtggatcgaccagctggccgccgccggcatcgccgcctggcagttgctgcccctagcccccaccgatggcaccggctccccctacagctcccccagcggcttcgccctcaacccctggttcctcgatgccgacacgctggtggccgaggggttcctctccgccgccgctgccgaggatctgcctgccggcagctacgagcggctcgacctggaggcggcacggctacgggccgcggctctgggggcgcgcttgctggagcgctggccggcccagagccaggagcgtcagcaggccttcgcccgctggcggcgccaggaggacgactggctgcgcgaccattgccgcttcatggtgctgcgcgagcgccacggccagcagccctggtggacctggccccggcccctggcgcggcgcggccgcctggccctgcgccagctggatcgtgacgcctccgggccgctgctgcaggaggccctgcttcagtggcagctgcagcggcaatggcagcagctgcacggccatgccagcacctccggcgtccgtctgatcggagatctgcccttctatgtcgcccacgacagcgctgatgtctgggcgaaccgtcgcctgttctccgtccgcgccgatggctccctcaccgagcagagcggcgtgccccccgattacttctccgacaccggccagctctggggcacccccgtctaccgctggagcctgcatcggctcaccgggttccgctggtggatgcgccggctggagcggcagttgcagctgctcgacctgctgcggctcgaccatttccgcgcgcttgagtcgtactggagcgtggccggccaggccgagaccgcccaggagggccgctggcgcccgtcaccgggtgtggccctgctcgccagcctgaaggcgcgctggcagcggcagcagggcgccggtggcagcaatggccgctcagccccagccctgcccctgatcgccgaagacctgggcgtgatcaccccggaggtggaggccctgcgtgatcgcttcgtcctgccgggaatgaagatcctccagttcgcctttgatggcaacgccgacaatccctacctgccggtcaactaccagggtgagcactgggtggtctacaccggcacccacgacaacgccacctgcctgggctggtggcaggagctggaggaggaccagcggcgccaggtgggggagctggtgggacacaccattgacgcacccggctggcagctgctggagctggcactgggctcctccgcccagttggcggtggtgcccctgcaggatctgctgcacctcgatgaccaggcccgcttcaacacccccggcaccgcctcgggcaactggacctggcgcctggaccaaccgatcgccagccttcaggatcccctggtgggcctccaggtcttggcgcagcgctatgggcgcacgggcaccggtgcccctgaggcggtggccggcggcagccggtaa

SEQ ID NO: 55014 - protein, 533 aa, Synechococcus sp. WH 5701
MPVPPGPDDGPSIRQCGVLLHPTALPGTPGCGTFGLAARQWIDQLAAAGIAAWQLLPLAPTDGTGSPYSSPSGFALNPWFLDADTLVAEGFLSAAAAEDLPAGSYERLDLEAARLRAAALGARLLERWPAQSQERQQAFARWRRQEDDWLRDHCRFMVLRERHGQQPWWTWPRPLARRGRLALRQLDRDASGPLLQEALLQWQLQRQWQQLHGHASTSGVRLIGDLPFYVAHDSADVWANRRLFSVRADGSLTEQSGVPPDYFSDTGQLWGTPVYRWSLHRLTGFRWWMRRLERQLQLLDLLRLDHFRALESYWSVAGQAETAQEGRWRPSPGVALLASLKARWQRQQGAGGSNGRSAPALPLIAEDLGVITPEVEALRDRFVLPGMKILQFAFDGNADNPYLPVNYQGEHWVVYTGTHDNATCLGWWQELEEDQRRQVGELVGHTIDAPGWQLLELALGSSAQLAVVPLQDLLHLDDQARFNTPGTASGNWTWRLDQPIASLQDPLVGLQVLAQRYGRTGTGAPEAVAGGSR

SEQ ID NO: 55015 - DNA, 1533 bp, Synechococcus sp. WH 7805
  CDS (1)..(1533): transl_table=11
atgccccatccaagagggaccgcatcgagtcgcagggttggtgtgctcctgcaccccacagctcttcctggatcaccggtgtgcggcagttttggtgctgcggctcgtggctggcttcatgcactcgctcgccagggaatcaaggtgtggcaagtgctgccgctggccccaccggacggcacggggtctccctacagctcaccatccagtttcgccatcaatccctggttgctcgatgcccaggatctgagcgacgaagggttcatcgaccccaatgatgtgatggcccttccccaggagactggggcggacggagagggagccgagaccgttgatttcgccttggccgatcaacgggccaatgcgctggccagatctctgcgtctccgttggtcagcgcagtccgctgatcgccaccaagcctttcagcggtggtgtgtcgatcaggcgcgttggctccgtgatcactctgccttcatggtgctgcgtcatgagtctgcagggttgccttggtgggcttgggcccatgagctggcagtgcatcgcgacacggcactggagcattggcgctgctcacatcaggatgaacttcttgagcaggatcttctccagtggcatctcgatcgtcagtggcgtcagctccgcgcccttgcgcgcgaccttggggtggaaatccttggtgatcttcccttctatgtggctcgcgacagcgccgatgtatggagcaaccgctcgctgttttcgattgccggtgatggacgtctccatcagcagagtggtgttccgccggattacttctctgccaccggccagctttgggggacacccgtttacacctgggggcgccatcgtcagacaggttttcgctggtggcgtgaccgcttaagacgtcaatgggatctcgccgataggcttcgacttgaccatttccgtgctttagcggcttactggtcggttcccggtgacgatgacacggcgatcaacggacgctggcaacgctctcctggtggtgagcttctggcctgtctaagacgtgatgccggtggacgtttgccaatcgtggccgaggatctcggtgtgatcacccctgatgtggagcgacttcgcgatcgttttcatctccccggcatgaaggttcttcagttcgcttttgatggcaatcaggtcaatccctaccttccaaacaacatcaaaggcagcggctgggttgtttacaccggaacccatgacaatcccacaagcctgggttggtgggagcgtctggatcagtcgtcaaaagaccagttcgctgccacgcttcagcgaaccgttgaggcccccgggtggcagctgcttgaactgggtctgtcgacgtccgctgcgttggtggtggctcctgttcaggatctgcttcatctggatgattcggcccgtttcaacacaccaggcacggtggggggcaactggatgtggagattgccagcctttgatgcagctctcgtaggtgctcttgaaggctatggattgcgtgctgaggtttggtcgaggcggtaa

SEQ ID NO: 55016 - protein, 510 aa, Synechococcus sp. WH 7805
MPHPRGTASSRRVGVLLHPTALPGSPVCGSFGAAARGWLHALARQGIKVWQVLPLAPPDGTGSPYSSPSSFAINPWLLDAQDLSDEGFIDPNDVMALPQETGADGEGAETVDFALADQRANALARSLRLRWSAQSADRHQAFQRWCVDQARWLRDHSAFMVLRHESAGLPWWAWAHELAVHRDTALEHWRCSHQDELLEQDLLQWHLDRQWRQLRALARDLGVEILGDLPFYVARDSADVWSNRSLFSIAGDGRLHQQSGVPPDYFSATGQLWGTPVYTWGRHRQTGFRWWRDRLRRQWDLADRLRLDHFRALAAYWSVPGDDDTAINGRWQRSPGGELLACLRRDAGGRLPIVAEDLGVITPDVERLRDRFHLPGMKVLQFAFDGNQVNPYLPNNIKGSGWVVYTGTHDNPTSLGWWERLDQSSKDQFAATLQRTVEAPGWQLLELGLSTSAALVVAPVQDLLHLDDSARFNTPGTVGGNWMWRLPAFDAALVGALEGYGLRAEVWSRR

SEQ ID NO: 55017 - DNA, 1584 bp, delta proteobacterium MLMS-1
  CDS (1)..(1584): transl_table=11
ttgaaaaacgtaaaatccaagccggaacggggcagtggtatcctgctccatcttacctctttgtcgagtgagttcggcatcggtgatgccggtcccgccgcccgggactttattgatcgtctggcggcagccggccagcgttactggcagtttctacccctggtgccgaccagtcccggtctggacaattccccctacatggggctttcggcctttgccggcaatccgctgttgatcagccccgagcaactggtggccgacggcctgctgagtgccgaccggctgcgctcacccggcttttcccaacaccaggtggattatcccgaggtggcggtctggaaacggcaattactggaggccgccgcccaaaacatgagcgcccatccctggcatgccgattattgccgcttcgtggccgccgaggccgactggctggctgattatgcactctttatggccctccatgaagaaaaccagggggcggcctggtacgactggccgccggaggtggcccgccggcaacccggtgccctggccgcggcccgccagcggctggcggccgggatcaactttcaccagtgctgtcagtttatcttttttcgccagtgggagcaactgcgactttatgccgccgtgatgggggtgagtctgatcggcgatatgccgatctacgtggctcctgacagcgccgaggtttgggcccggccggaaatttttatccttgatgagcagaccatgcaaccgaccctggtggccggcgtgccgccggattatttcagtgccaccggccagcgctggggcaaccccctgtttcgctgggatggcgatgaacaggtggtgggccgcctggagcgctggtgggagcgtcgtttccggttgcagttgcgattggccgatatcgtgcggatcgatcacttccggggctttgaagcctgctggcagatccccgccgaggagaccgacgcggtcaacggccagtgggtcaaggggccgggggagcaatttttccggcggatggaaaagggtctgggctcaccgttgccgatcatcgccgaagacctggggttgatcaccccggaggtggaagagttgcgcgaccagttggggttgccggggatgaaggtgctgcagtttgcctttgattccgatgccgccaacgcctacctgccccataactatccccaccgcaactgcgtggtctacaccggcacccacgacaacgacaccacggtgggctggtttctaagtgagcgctgccccccggagacccggcggctgctgctgcgctacctgggctgggagcgggagggggcggtgcactgggggatgatccggctcgccctggcctcggtggcggccctggcgattattcccctgcaggatgtgttgggctttggcaccgactgccggctgaacacccccgggacctccgcgggcaactggcgctggcggctggcgccgggctttttcagcaccgaagccatggcacagttgcgggaagaaaccgagttctacaatcgcctgcccagtcagcaggacaatcaccaagaatcaagcaaaggagtcggcaatggcccccgttaa

SEQ ID NO: 55018 - protein, 527 aa, delta proteobacterium MLMS-1
MKNVKSKPERGSGILLHLTSLSSEFGIGDAGPAARDFIDRLAAAGQRYWQFLPLVPTSPGLDNSPYMGLSAFAGNPLLISPEQLVADGLLSADRLRSPGFSQHQVDYPEVAVWKRQLLEAAAQNMSAHPWHADYCRFVAAEADWLADYALFMALHEENQGAAWYDWPPEVARRQPGALAAARQRLAAGINFHQCCQFIFFRQWEQLRLYAAVMGVSLIGDMPIYVAPDSAEVWARPEIFILDEQTMQPTLVAGVPPDYFSATGQRWGNPLFRWDGDEQVVGRLERWWERRFRLQLRLADIVRIDHFRGFEACWQIPAEETDAVNGQWVKGPGEQFFRRMEKGLGSPLPIIAEDLGLITPEVEELRDQLGLPGMKVLQFAFDSDAANAYLPHNYPHRNCVVYTGTHDNDTTVGWFLSERCPPETRRLLLRYLGWEREGAVHWGMIRLALASVAALAIIPLQDVLGFGTDCRLNTPGTSAGNWRWRLAPGFFSTEAMAQLREETEFYNRLPSQQDNHQESSKGVGNGPR

SEQ ID NO: 55019 - DNA, 1545 bp, Synechococcus sp. RS9916
  CDS (1)..(1545): transl_table=11
atgctgtctgcgtcccgttcgtcatcggtcgaagctgcctcgcagcgagggattggtgtcctgttgcatcccaccgcattgccggacagtccggtttgcggtggattcggggctgtggcaagagcctggctgacctctttggcgcgtcacggcatctcggtgtggcaggtgttgcccgtggcgcccacggatggcaccggatccccttacagctccccgtccagttttgcgatcaacccctggctgctggatgcccaggatcttgtcgatcagggctttttgccgtgtgaggcgatgggcgccctacctggtcaagaccagaccgcaggggatgcaggcttggattgcgcgttggcggaacaacgggccgatgcgttggcggttgctttgcagttggcatggcccttgcagtccgcggagcgccatgctgcttttgcccgatggtgttccgctcaggccagctggcttgaggaccacgtgatgttcatggagctgcgtcgtcagcatcaggggcagccctggtggcagtggccgttggggttggcgcggcatcgacgcgctgcgttacgccgctgggcggcacgccatcagcaggctctcgaagcccagcggctggtgcagtggcatttggatcagcagtggcaggctctgcgcgccatggcggatcagctgggtgtgcgcatctttggtgatcttcccttctatgtcgcgcgggacagcgccgatgtctggagtcatcgcagcctgttctccatccagagagacggaacgctgacaacccagagcggtgtgccgccggattacttttccgccaccggacagctgtggggcaccccggtctaccgctggtggcgccatcggttgacgcgttttcgttggtggcgtgcccgcttgcggcgccagtggcagctttttgatctcttgcggctggatcatttccgtgctttggctgcctattgggcggtgcctggtggcgacgacaccgcagcgcggggggtgtggacgccgtctcccggccagtcgctcttgcgcaagctcaaggcggatgcgggaggccgattgccgatggtggcggaagatttgggcgtggtgaccgcggatgtagaggccttacgcgatcactttgggctgccgggcatgaagatcctgcagttcgccttcgatggcaatccggagaatccctatcttcccgccaacattcatggggatcgttgggtcgtctacaccggcacccatgacaaccccaccaccatcggctggtggcgtgatctggatgccccggccagggagcgggtgatggccgttgtcgggggcgagatccatgccccgggttggcaattgctggagctggggttggcgagtagttccgggttggtgatcacgccggtgcaggatttgctccacctcgacgattcagcacgcttcaacacccccggcaccgtgggggagcgcaattggagctggcggttgcctggcttggatcagcgtcttgatgatgcgcttcgcggctacggcgaacggggctctctctggggcaggcggtag

SEQ ID NO: 55020 - protein, 514 aa, Synechococcus sp. RS9916
MLSASRSSSVEAASQRGIGVLLHPTALPDSPVCGGFGAVARAWLTSLARHGISVWQVLPVAPTDGTGSPYSSPSSFAINPWLLDAQDLVDQGFLPCEAMGALPGQDQTAGDAGLDCALAEQRADALAVALQLAWPLQSAERHAAFARWCSAQASWLEDHVMFMELRRQHQGQPWWQWPLGLARHRRAALRRWAARHQQALEAQRLVQWHLDQQWQALRAMADQLGVRIFGDLPFYVARDSADVWSHRSLFSIQRDGTLTTQSGVPPDYFSATGQLWGTPVYRWWRHRLTRFRWWRARLRRQWQLFDLLRLDHFRALAAYWAVPGGDDTAARGVWTPSPGQSLLRKLKADAGGRLPMVAEDLGVVTADVEALRDHFGLPGMKILQFAFDGNPENPYLPANIHGDRWVVYTGTHDNPTTIGWWRDLDAPARERVMAVVGGEIHAPGWQLLELGLASSSGLVITPVQDLLHLDDSARFNTPGTVGERNWSWRLPGLDQRLDDALRGYGERGSLWGRR

SEQ ID NO: 55021 - DNA, 2109 bp, Aegilops tauschii
  CDS (32)..(1768)
gctacgccaccccgtcccgcccccctgccgcatggcgctcgcgcgaaccgtcccgctcccgcagctcgcttcggcctcgtccctcccccggcaccgccgctgccgcctcctcctccccgcaatgtcgcaggcgcgcggcccccccgcgcgagggatcgcctgccgcgccgcgacgacgacgccggccgcggtggcggcggtgggcgtcggggaggacctgcccgagggctacgagcagatgatgccgaccgtggaggcctcccagcggcggcgcgcgggggtcctgctgcacccgacgtcgctccgcggcccgcacggcatcggcgacctcggcgaccaggcaatcgcgttcctcgactggctccacggcgccggctgcacgctctggcaggttcttccacttgttcccccgggaagaaaatccggggaggatggttctccttattcaggacaggatgcaaactgcggtaatacactattgatttctcttgaagaacttgttaaagatgggctgttgatggaagacgaacttcctgatcctttagatatggaatatgttgaatttgacactgttgctaatctgaaagaacctcttattgccaaggcagcagagaggctcctacagagccctggagagctcagaaggcagtatgacgaattcaagaaaaatccagatgtttcaggttggcttgaagatgctgcacttttcgctgctatcgacaatagcatcaatgcagtgtcctggtctgagtggcctgaaccgctgaaagatcgccatcctggagccttgaaagatatatatgaaaaccagaaggactttatagaaaattttatggcacaacagttcttatttgaaaagcaatggaaacgggttcgttcacatgctcagaagctgggcatcagcataatgggtgacatgcctatatatgttggctaccacagcgcagatgtttgggcaaacaggaaatcatttttgctggacaagaatggtttccctacatttgttagtggcgttccccctgatgcattcagtaaaactggtcagctatggaacagcccattgtatgactggaaatctatggaagcagatggctttgcatggtgggtaaagaggattaaacgtgcccttgatttgtatgatgagttccgtattgaccatttccgggggcttgctggtttttgggcagttccttcgggatcagaagtagcgatgtttggaagctggagggctggaccaaggaatgccttttttgatgcgctgttcaaagctgttggtagaataaatataatcgctgaagacctgggggtgataaccgaagatgttgttgagttaaggaagtctattggggctccagggatggcagttcttcagttcgcttttggcggtggtcctggcaacccccacttacctcataaccatgaattgaaccaagttgtatacactgggacacatgataatgatacagctgttggctggtggcaaagtttaccagaggaagagaagcaaactgtgttcaagtatctaccgcaggtcagcaacttggatgtctcttgggcgctaattgctactgctctctcttccgttgcaaggacttccatggtaaccatgcaggacatactcagccttggcagctctgctaggatgaacactccagctacacagaaaggaaattggaaatggaggataccaagctgtgtcagcttcgacagccttagcctcgaagaagcaaagctgaaggagttgcttacgctgtacgaccggctgtgaagttgtcggttctccagcactcctgtgttctctgtctcttcaggcttggaactgccagacggtactgccataaactagcagccaaacatgaaggatctggctgctattgttccgtgggatgttggcacctgtccccgaataatagggttgtgttgattggttgcaaattaacatgcttgaacttgaagcgtcttgcatctttacaatttgctattatggtgtatatagatagtcctttatgttcccatttcgtctatgctattgtaactcatgagtcttggaaactcttaataagtgggatatgtgtatcaagttctttttacatttcaaaaaaaaaaaaa

SEQ ID NO: 55022 - protein, 578 aa, Aegilops tauschii
MALARTVPLPQLASASSLPRHRRCRLLLPAMSQARGPPARGIACRAATTTPAAVAAVGVGEDLPEGYEQMMPTVEASQRRRAGVLLHPTSLRGPHGIGDLGDQAIAFLDWLHGAGCTLWQVLPLVPPGRKSGEDGSPYSGQDANCGNTLLISLEELVKDGLLMEDELPDPLDMEYVEFDTVANLKEPLIAKAAERLLQSPGELRRQYDEFKKNPDVSGWLEDAALFAAIDNSINAVSWSEWPEPLKDRHPGALKDIYENQKDFIENFMAQQFLFEKQWKRVRSHAQKLGISIMGDMPIYVGYHSADVWANRKSFLLDKNGFPTFVSGVPPDAFSKTGQLWNSPLYDWKSMEADGFAWWVKRIKRALDLYDEFRIDHFRGLAGFWAVPSGSEVAMFGSWRAGPRNAFFDALFKAVGRINIIAEDLGVITEDVVELRKSIGAPGMAVLQFAFGGGPGNPHLPHNHELNQVVYTGTHDNDTAVGWWQSLPEEEKQTVFKYLPQVSNLDVSWALIATALSSVARTSMVTMQDILSLGSSARMNTPATQKGNWKWRIPSCVSFDSLSLEEAKLKELLTLYDRL

SEQ ID NO: 55023 - DNA, 2110 bp, Triticum aestivum
  CDS (34)..(1758)
  misc_feature (1982)..(1982): n is a, g, c or t
ggcaccagccacgccgccccgcccccctgccgcatggcgctcgcgcgaaccgtcccgctcccgcagctcgcttcggcctcgcccctccgcggacaccgccgctgccgcctcctcctcctccccgcaatgccgcaggcgcgcggggtcgcctgccgcgccgcgacgacgacgccggcggcggtggcgtcggtgggcgtcggggaggacctgcccgaggggtatgagcagatgatgccgaccgtggaggcgtcccagcggcgccgcgcgggggttctgctgcacccgacgtcgctccgcggcccgcacggcatcggcgacctcggcgacgaggccctcgcgttcctcgactggctccacggcgccgggtgcacgctctggcaggttcttccacttgttcccccgggaagaaaatccggggaggatggttctccttattcaggacaggatgcaaactgtggtagtaccttattgatttctctcgaagagcttgttaaagatgggctgttgatggaagacgaacttcctgatcctttagatatggaatatgttgaatttgacaccgttgctaatctgaaagaacctcttattgccaaggcagcagagaggctactacagagccctggagagctcagaaggcagtatgacgaattcaagaaaaatccagatgtttcaggttggcttgaagatgctgcacttttcgctgctatcgacaatagcatcaatgcagtgtcttggtctgagtggcctgacccgctgaaagatcgccatcctggagccttgaaagatatatatgaaaaccagaaggactttatagaaaattttatggcacaacagttcttatttgaaaagcaatggaaacgggttcgttcacatgcacagaagcttggcatcagcataatgggtgacatgccaatatatgttggctaccacagcgcagatgtttgggcaaacaggaaatcatttttgctggacaataatggtttccccacatttgttagtggtgttccacctgatgcgttcagtaaaactggtcagttatggaacagcccattgtatgactggaaatctatggaagcagatggctttgcatggtgggtaaagaggattaaacgtgcccttgatttgtatgatgagttccgtattgaccatttccgcgggcttgctggtttttgggcagttccttcgggatcagaagtagcgatgtttggaagctggagggctggaccaaggaatgccttttttgatgcgcttttcaaagctgttggtagaataaatataatcgcagaagacctgggggtgataactgaagatgttgttgagttaaggaagtctattggggctccggggatggcagttcttcagttcgcttttggtggtggtcctggcaacccccacttacctcataaccatgaattgaatcaagttgtatacactgggacacatgataatgatacagctgttggctggtggcaaagcttaccagaggaagagaagcaaactgtgttcaagtatctacagcaggtcagcaactcggatgtctcttgggcgctaattgctactgccctctcttccgttgcgaggacttccatggtaaccatgcaggacatactcagccttggcagctctgctaggatgaacactccagctacacagaaaggaaattggaaatggaggataccaagctgtgtcagcttcgacagccttagcctcgaagaagcaaagctgaaggagttgcttacgctgtacggccggctgtgaatttcttggttcttcagcaccactcctgtgttctctgtctcttcaggctcggaactgccagacggtactgccataaactagcagccaaacatgaaggatctggctgctattgttccgcgggatgttggcacctgtccccgaataatagggttgtgttgattggttgcaaattcacatgcttgaacttgaagcgtcttgcatgtctacaacttgtttattatggngtatatatagtcctatgataataaaatggtagtcctttattttcccatttcgtctatgtactattgtaactcatgagtcttggaactcttgataagtgggatatgtgtaaaaaaaaaaaaaaaaaaaa

SEQ ID NO: 55024 - protein, 574 aa, Triticum aestivum
MALARTVPLPQLASASPLRGHRRCRLLLLPAMPQARGVACRAATTTPAAVASVGVGEDLPEGYEQMMPTVEASQRRRAGVLLHPTSLRGPHGIGDLGDEALAFLDWLHGAGCTLWQVLPLVPPGRKSGEDGSPYSGQDANCGSTLLISLEELVKDGLLMEDELPDPLDMEYVEFDTVANLKEPLIAKAAERLLQSPGELRRQYDEFKKNPDVSGWLEDAALFAAIDNSINAVSWSEWPDPLKDRHPGALKDIYENQKDFIENFMAQQFLFEKQWKRVRSHAQKLGISIMGDMPIYVGYHSADVWANRKSFLLDNNGFPTFVSGVPPDAFSKTGQLWNSPLYDWKSMEADGFAWWVKRIKRALDLYDEFRIDHFRGLAGFWAVPSGSEVAMFGSWRAGPRNAFFDALFKAVGRINIIAEDLGVITEDVVELRKSIGAPGMAVLQFAFGGGPGNPHLPHNHELNQVVYTGTHDNDTAVGWWQSLPEEEKQTVFKYLQQVSNSDVSWALIATALSSVARTSMVTMQDILSLGSSARMNTPATQKGNWKWRIPSCVSFDSLSLEEAKLKELLTLYGRL

SEQ ID NO: 55025 - DNA, 1722 bp, Medicago truncatula
  CDS (1)..(1722)
atgtctttgactctgagtctcagcatcacaacactgtctttcccacaactccgacggtgtacctttacatcatcacccattcctagtttcaaactcaattcttcaccactttccttccctcgtgctgcttcttcgtctttggttaccacttccttaactcaattcaccgtcggtgaagatttgccgcaaaactacggagaagattggcttcccaaacccgaccttcatctccgcagaagagccggtattcttctccatcccacttcgtttcaaagcccctacggtatcggcgatctcggaaacgaagcctttcgtttcattgattggctccaccaaaccggttgctccctttggcaggttcttcctctcgtgcctcctgatgaagggggatctccttacgcaggccaggatgcgaattgtggcaacactcttttgatttctcttgaagagcttgttgcggatggactgttagaaaaacacgagcttcccaaaccaattgatgcagagcgcgtgaatttttcggttgttgctgatcttaaggatcctttgataactaaagctgcagaaaggctcgtttcaagcaaaggggaactcaaaaaacagcttgagaattttcgtagggatcctaacatatcaagctggcttgatgatgcagcttattttgctgctattgacgacagtttgaacacactcagctggtacgattggcccgaacctttaaaaaaccgccatcttgtagctttagaagatatttatgaacaaaagcgagattttataaatgtatttattgcccaacagttcttgttccaaaggcaatggcagaaagttcgcgactatgcacagagtaggggagtcaagataatgggagacatgcccatttatgttgattatcacagtgcagatgtttgggcaaataagaaccagtttgcactgaacaggaaaggctttcctcttttggtgagtggtgtgcctcctgatgcattcagcgaaactggtcagctgtggggaagccccctgtatgattggaaagccatggagaaagaaggatactcatggtggatacgccgcatacgacgtgcgcaggatatatatgacgaatttaggattgaccactttagaggatttgctggatattgggctgttcgctctgaagcaaaagtagctatgggtggaaagtggaaggtaggacctggaacatctttctttgatgccatttccagagctgttggaaggattaatatcacagcagaagacttgggagttatcactgaggatgtagtgcaactaagaaaatccattggagctcctggaatggctgtcctccagtttgggtttggaggtggtgctgataaccctcatttgcctcataatcacgagtgcaatcaagttgtctatacagggactcatgacaatgacacaattcagggttggtgggaagctttaaaccaaaaagagaaatcacatgtattaagttatgtttcattaaccggagaagatgatatttcatgggcactaatccagacagcgttggcctctgttgctcaaacagcaataatacctatgcaagatgttcttggacttgggagttctgccaggatgaatattcctgcaactcggtttggaaattggggatggagggttccaagttctgtgagctttgacaagttagatagagaggcaaccagacttaaagagatgctttcaatgtatggccggctttga

SEQ ID NO: 55026 - protein, 573 aa, Medicago truncatula
MSLTLSLSITTLSFPQLRRCTFTSSPIPSFKLNSSPLSFPRAASSSLVTTSLTQFTVGEDLPQNYGEDWLPKPDLHLRRRAGILLHPTSFQSPYGIGDLGNEAFRFIDWLHQTGCSLWQVLPLVPPDEGGSPYAGQDANCGNTLLISLEELVADGLLEKHELPKPIDAERVNFSVVADLKDPLITKAAERLVSSKGELKKQLENFRRDPNISSWLDDAAYFAAIDDSLNTLSWYDWPEPLKNRHLVALEDIYEQKRDFINVFIAQQFLFQRQWQKVRDYAQSRGVKIMGDMPIYVDYHSADVWANKNQFALNRKGFPLLVSGVPPDAFSETGQLWGSPLYDWKAMEKEGYSWWIRRIRRAQDIYDEFRIDHFRGFAGYWAVRSEAKVAMGGKWKVGPGTSFFDAISRAVGRINITAEDLGVITEDVVQLRKSIGAPGMAVLQFGFGGGADNPHLPHNHECNQVVYTGTHDNDTIQGWWEALNQKEKSHVLSYVSLTGEDDISWALIQTALASVAQTAIIPMQDVLGLGSSARMNIPATRFGNWGWRVPSSVSFDKLDREATRLKEMLSMYGRL

SEQ ID NO: 55027 - DNA, 1503 bp, Thermus brockianus
  CDS (1)..(1503): transl_table=11
atggagcttccttgcgcttatggtctgctcctccaccccacgagccttccgggcccttggggtgtgggggtgctgggggaggaagcccggggctttctccgcttcctgaaggaagcgggagcccgttactggcaggttctacccctgggccccacgggctatggcgactccccctaccagtcctttagcgccttcgccgggaacccttacctgatagacctaaggcccctggtggaccggggcttcgttcggctggaagaccccgggttcccggagggcagggtggactacgggctcctttatgcctggaagtggcccgccctgcgggcagctttccaaggcttccgccaaaaggcttctcctgaggagaaggaggacttcgcccgcttccaggaggaggaggcctggtggcttcgggactatgcccttttcatgaccctgaagtcccaccacggcggtcttccctggaacgcctggcccttggccctgaggacgcgggaggagagggcgctaaaagaggcggaggcttccttggcggaggaaatcgctttccacgcctttacccagtggctctttttccgccagtggggcgccctcaaggaggaggccgaggccttgggcatcgccttcatcggggacatgcccatcttcgtggccgaggactccgccgaggtctgggcccaccccgagtggttccacctggacgaggaggggaggcccacggtggtggcgggggtgcccccggattacttctcggaaaccgggcaacgctggggcaaccccctttaccgctgggaggttttggaggaggagggcttctccttttggatcgcccgcttgcggaaggcattggaactcttccacttggtacgcattgaccacttccggggttttgaggcctactgggaaatccccgcctcttgccccacggcggtggaggggcgctgggtcaaggccccgggggaaaagcttttcgcccgcatccaggaggccttcggccggattcccatcctggcggaggacctaggggtcatcacccccgaggtggaggccttgcgggaccgcttcggtctgcccgggatgaaggtcctgcagttcgcctttgacaacgggatggaaaaccccttcctcccccacaattaccccgagcacgggcgggtggtggtctacaccggcacccacgacaacgacaccaccctgggctggtaccgcaccgccacgccccacgagcgggatttcctgaagcggtatctggcggactgggggatcacctttagggaggaagccgaggtgccctgggccctcatgcgcctggggatggcgtcccgggcccggcttgccgtctacccggtccaggacgtgctggccctgggctcggaagcgcggatgaactacccgggaaggcccagcggcaactgggcctggcggcttcggccgggggagataaaggaggaacacggggaaaggcttctctccctggcggaggccacgggcagggtttaa

SEQ ID NO: 55028 - protein, 500 aa, Thermus brockianus
MELPCAYGLLLHPTSLPGPWGVGVLGEEARGFLRFLKEAGARYWQVLPLGPTGYGDSPYQSFSAFAGNPYLIDLRPLVDRGFVRLEDPGFPEGRVDYGLLYAWKWPALRAAFQGFRQKASPEEKEDFARFQEEEAWWLRDYALFMTLKSHHGGLPWNAWPLALRTREERALKEAEASLAEEIAFHAFTQWLFFRQWGALKEEAEALGIAFIGDMPIFVAEDSAEVWAHPEWFHLDEEGRPTVVAGVPPDYFSETGQRWGNPLYRWEVLEEEGFSFWIARLRKALELFHLVRIDHFRGFEAYWEIPASCPTAVEGRWVKAPGEKLFARIQEAFGRIPILAEDLGVITPEVEALRDRFGLPGMKVLQFAFDNGMENPFLPHNYPEHGRVVVYTGTHDNDTTLGWYRTATPHERDFLKRYLADWGITFREEAEVPWALMRLGMASRARLAVYPVQDVLALGSEARMNYPGRPSGNWAWRLRPGEIKEEHGERLLSLAEATGRV

SEQ ID NO: 55029 - DNA, 1503 bp, Thermus aquaticus
  CDS (1)..(1503): transl_table=11
atggagcttcctagggcctttggcctcctcctccatcccacgagcctccccgggccttacggcgtgggcgtcctgggcctcgaggcccgggacttcctccgcttcctaaaaggggccggggggcgcttctggcaggtcctccccctgggccccacgggctacggggactccccctaccaggccttcagcgccttcgccggcaacccctacctcatagacctgaggccgttggcggagaagggctacctggtcctaaaggaccccggcttcccccaggggcgggtggactacggctggctctacgcctggaaatggcccgcccttaaggccgcctaccagggttttctggaaaaggctcccaggaaggaacgggaggacttccccgccttccaggagaaggaggcctcctggctcaaggactacgccctcttcatggccctcaaggcccagcacggggggcttccctggaaccggtggccccttcccctgaggcggcgggaggagaaggccatgaaggaggcggaagcggccctggcggaggaggtggccttccacgcctggacccagtggctcttctttgaggcctggaaggccctcaaggaggaggccgaggccctggggatccagatcatcggggacatgcccatcttcgtggccgaggactcggccgaggtctgggcccaccccgagtggttccacctggacgaggagggaaggcccctggtggtggcgggggtgccccccgactacttctcggagaccggccagcgctggggcaaccccctctaccgctgggacgtcctggagagagaggggttctccttttggatagcccggctcgccaaggccctggagctattccacctggtgcgcgtggaccacttccggggctttgaggcctactgggagatcccggcctcctgccccacggcggtggaggggcgctgggtgaaggcttccggggagaagctctttgaccgcatccaggaagttttcggcgaagtgcccatcctggccgaagacctgggggtcatcacccccgaggtggagcccctgcgggaccgctacggccttccggggatgaaagtcctgcaattcgcctttgaccacggcatggaaaacccctttcttccccacaactaccccgcccatggccgggtggtggtttacaccggcacccacgacaacgacaccaccctgggctggtaccgcacggcctccccccacgagcgggccttcctggagcggtacctggcggactgggggatcagcttccgccaggaggaggaggtgccctgggccctgatgggcctttgtttgaagtccgtggccaggctggccatttaccccgtgcaggacgttctggccctgggctccgaagcccgcatgaactacccggggcgcccttcgggcaactgggcctggcggctccttccggggcagctcacccaggagcacgccgcccgtctcctggccatggcggaggccacggggaggacgtaa

SEQ ID NO: 55030 - protein, 500 aa, Thermus aquaticus
MELPRAFGLLLHPTSLPGPYGVGVLGLEARDFLRFLKGAGGRFWQVLPLGPTGYGDSPYQAFSAFAGNPYLIDLRPLAEKGYLVLKDPGFPQGRVDYGWLYAWKWPALKAAYQGFLEKAPRKEREDFPAFQEKEASWLKDYALFMALKAQHGGLPWNRWPLPLRRREEKAMKEAEAALAEEVAFHAWTQWLFFEAWKALKEEAEALGIQIIGDMPIFVAEDSAEVWAHPEWFHLDEEGRPLVVAGVPPDYFSETGQRWGNPLYRWDVLEREGFSFWIARLAKALELFHLVRVDHFRGFEAYWEIPASCPTAVEGRWVKASGEKLFDRIQEVFGEVPILAEDLGVITPEVEPLRDRYGLPGMKVLQFAFDHGMENPFLPHNYPAHGRVVVYTGTHDNDTTLGWYRTASPHERAFLERYLADWGISFRQEEEVPWALMGLCLKSVARLAIYPVQDVLALGSEARMNYPGRPSGNWAWRLLPGQLTQEHAARLLAMAEATGRT

SEQ ID NO: 55031 - DNA, 1503 bp, Thermus scotoductus
  CDS (1)..(1503): transl_table=11
atggagcttccgcgcgcctatggcctgcttctgcaccccaccagccttcccggaccctatggggttggcgttcttggggaggaggcttttgccttcctccgattcctgggggagtctggggcccgctactggcaggttttgcccttagggcccacaggatacggagactccccctaccagtccttcagcgcctttgccgggaacccctacctcatcgacctccgcctaaggcggaggcgggggtacctccgcctcgaggaccccggttttcccgagggccgggtggtatacggctggctctacgcctggaaatggccggcgcttagggaagccttccggggtttccaggagcgggctagccgggaggaaaaggaggcctttcagccttttgggacccgggaaaggagctggttggatgactacaccctcttcatggccttgaagcccacccacggaggccttccttggaaccgctggcccatgcccctacgcctgagggaggaaaaggctttaagggaagcatctttggccctctcccaagaggtggccttccacgcctggacccagtggtttttcttccggcagtggcaggccttgagggaggcggcggaggccttgggcctctccttgatcggcgacatgcccatcttcgtggccgaggactccgcggaggtctgggcccaccccgagtggttccacctggatgaggagggaaggcccacggtggtggcgggggtgccgccggattacttttcggaaacgggccagcgctgggggaatcccctgtaccgctgggaggtgctggaaagggaggggttctccttctggatagagcgcctgaggaaggccttggagcttttccacctggtgcgcatcgaccacttccggggctttgaagcctactgggagatccctgcctcctgccccacggcagtggagggacgctgggtgaaggccccgggggagaagctctttcagaagattcaggaaacctttggccgggtgcccatcctggcggaggacctgggggtgatcacccccgaggtggaggccctgagggaccggtttggccttccggggatgaaggtcctgcagttcgcctttgacggggggatggaaaaccccttcctgccccacaactacccctcccacggccgggtggtggtctacaccggcacccacgacaacgacaccaccttgggctggtaccgcaccgctaccccccacgagcgggctttccttgggcgctacctggcggagtgggggattgggttccagagggaagaggagatcccctgggccctcatgcacctggggatgaagtcggtggccaggctggccgtctaccccgtgcaggatgtgttggcgttgggaagcgaggcccggatgaactaccctgggcgcccctcgggcaactgggcttggcggcttaggcccggccagctcctgcccgagcacggggaacggcttcgctggatggccgaggccacgggcagggtgtaa

SEQ ID NO: 55032 - protein, 500 aa, Thermus scotoductus
MELPRAYGLLLHPTSLPGPYGVGVLGEEAFAFLRFLGESGARYWQVLPLGPTGYGDSPYQSFSAFAGNPYLIDLRLRRRRGYLRLEDPGFPEGRVVYGWLYAWKWPALREAFRGFQERASREEKEAFQPFGTRERSWLDDYTLFMALKPTHGGLPWNRWPMPLRLREEKALREASLALSQEVAFHAWTQWFFFRQWQALREAAEALGLSLIGDMPIFVAEDSAEVWAHPEWFHLDEEGRPTVVAGVPPDYFSETGQRWGNPLYRWEVLEREGFSFWIERLRKALELFHLVRIDHFRGFEAYWEIPASCPTAVEGRWVKAPGEKLFQKIQETFGRVPILAEDLGVITPEVEALRDRFGLPGMKVLQFAFDGGMENPFLPHNYPSHGRVVVYTGTHDNDTTLGWYRTATPHERAFLGRYLAEWGIGFQREEEIPWALMHLGMKSVARLAVYPVQDVLALGSEARMNYPGRPSGNWAWRLRPGQLLPEHGERLRWMAEATGRV

SEQ ID NO: 55033 - DNA, 1806 bp, Ostreococcus tauri
  CDS (1)..(1806)
atgcccggtgtctccgcgtccgcggcgatgttccgaacgacgactcaccgctctctgcccgcgaaacggaccgagcgcgccgcgagtggacgaaactcactcgcgaaacgcgttcggaaagttcaagccaccgccgtgggatcgcccgtcgacgccgattacggcgcgcgtttccctcccaaacgcgacgacagacgcgctggtgtgatcatgcatcccacgtcccttcccggcgcgtacggcgtcggcgacgccgggcccgaggcgcgggcgttcgtggactggttacaaaaggcgaggatgcggatttggcaggtgttgccgctcgtaccgccgggacgaccgattccgggcgtgcgagaggattactggagcccgtacagcgggcgagacgcgcactgtgggaatacgttaatgatttcgctggatgatttggtgcgcgatgggttgttacgagcggaggaattgcccaaagcgtacggaaagacgaaggtggaattcggagctgtggcggcgacgaacgaaccgctcatcgcaaaggcggcggagcggttgttagcgatgcctcgtggtgagggtctgcggggggagtacgatgcattctgcgcgagggaggacgtgcgggcttggttagatccggcggcggtgttcgacgcgatcgacaccacgccggcgctcatcgggaagtattggtgggattggccggtggagtatcgcgatcgggatccgagcgcactcgcggcgattgaacgcgatcgagcggattcaatcgagctcttcaaggcggtgcagttcttgtttcacttgcagtggatgaggttgaagaagtacgcgaacgaaagaggggtctcgctcattggagatatgccgatttatgtcggtggccacagcgccgacgtgtgggccaaccaaaatttatttcttcttggagaggacaagaagccgtccgcgttggccggggtgcccccggacgcgttctcggaggacgggcagctgtggggtaatcctctgttcgcgtggcaagagcattcgcgcacagactacgcgtggtgggcgcaaagactaaagcgcactctcgagcttcacgacgaggttcgcatagaccacttccgcgcattcgcagcgtattgggaggtcgaagccggtgcgccgacggccaagagtggtcggtggatcaccggtccggggatcgaaatgttcgagaggctcaaacccgcgctcggtgacgctaagattgtcgccgaggacctgggcgtgatcaccgccgacgtcgtcgcgctccgtgaggcgtgcggattcccgggcatggtagtcctacaattcgcttggggtggtgacggtcgtaacccacacttgccgcacaaccactacgagaactcgttctgctatccaggcacgcacgacaacgagacgtctcaaggttggtacatgtcacaggatgaggacaccaagcgacgactcgatgcgtacgcaggtgtcggctacggcgacggtgcgtgggggatgatcaaggccgggatgtccagcgtcagtaaagcgtgcgttttcaccatgcaagacgtcctcgctctcgggaacgaggcgcgcatgaacaccccaggcgtcgccgacggcaactggccctggcgtataggtgagcccggcgtcttcgccacgctcgacgccgaggccgacaagctcgcgagtttagccaccgtgtacgaccgtgtcgccgttgtggacgatagttccaggcgcgatgcgtgcatcgcaatcgccgggaaggcccgaggcgttctctttggcctcggcgtctggttcctctaa

SEQ ID NO: 55034 - protein, 601 aa, Ostreococcus tauri
MPGVSASAAMFRTTTHRSLPAKRTERAASGRNSLAKRVRKVQATAVGSPVDADYGARFPPKRDDRRAGVIMHPTSLPGAYGVGDAGPEARAFVDWLQKARMRIWQVLPLVPPGRPIPGVREDYWSPYSGRDAHCGNTLMISLDDLVRDGLLRAEELPKAYGKTKVEFGAVAATNEPLIAKAAERLLAMPRGEGLRGEYDAFCAREDVRAWLDPAAVFDAIDTTPALIGKYWWDWPVEYRDRDPSALAAIERDRADSIELFKAVQFLFHLQWMRLKKYANERGVSLIGDMPIYVGGHSADVWANQNLFLLGEDKKPSALAGVPPDAFSEDGQLWGNPLFAWQEHSRTDYAWWAQRLKRTLELHDEVRIDHFRAFAAYWEVEAGAPTAKSGRWITGPGIEMFERLKPALGDAKIVAEDLGVITADVVALREACGFPGMVVLQFAWGGDGRNPHLPHNHYENSFCYPGTHDNETSQGWYMSQDEDTKRRLDAYAGVGYGDGAWGMIKAGMSSVSKACVFTMQDVLALGNEARMNTPGVADGNWPWRIGEPGVFATLDAEADKLASLATVYDRVAVVDDSSRRDACIAIAGKARGVLFGLGVWFL

SEQ ID NO: 55035 - DNA, 1761 bp, Oryza sativa
  CDS (1)..(1761)
atggctaccctctccctccctctcccgcatctcacccaggccatccccgcgcgagcgcgtccgcgaccgcgaccgctccgtgggatccccgcgcggctcctctcctgccgcgccgcgatggcggtggcgcccgacaaggaggaggcggcggcggttgctctggacaaggcggtgaaggtggcggtggcagctcccgacagggcggcggtggccgcggtgggcgtcggggaggagctccccgaggggtacgaccagatgatgccggccgtggaggaggcgcggcggcggcgagccggggtgctgctgcacccgacctcgctccgcggcccgcacggcatcggcgacctcggcgacgaggcggtcgccttcctcgcctggctccgcgacgccggctgcacgctctggcaggttcttccgcttgttccaccgggaaggaagtctggggaggatggctctccatattcaggacaggatgcaaactgtggtaataccctattaatttcacttgaagagcttgtaaaagatgggttgttgatggagaatgaactacctgaccccttggatatggagtatgttgaatttgacaccgttgccaatctgaaagaacctcttattgcaaagtcttccatactcttaaatgagaatagcagatacaatattgtcagcaaaaaactgggttggcttgaagatgctgcactttttgctgctattgacagaagtattgatgcattatcctggtatgagtggcctgaacctctgaaaaaccgacatctcagggccttggaagacatatatcaaaaacagaaggatttcatagagatatttatggctcaacaattcttatttcaaaggcagtggcagcgaattcgtaaatatgcaaagaagttgggtatcagcataatgggtgacatgcccatatatgttggctaccatagtgcagatgtttgggcaaacaggaaatcgtttttgctggacaagaatggttttccgacttttgttagtggtgttccacctgatgcatttagtgaaactggtcagctttggaacagtccattgtacgactggaaagctatggaagcaggtggatttgaatggtggataaaaaggattaatcgtgcccttgatttgtatgatgagttccgtatagaccatttccgggggcttgcaggtttttgggcagttccttctgagtcaaaagtagcgctggttggaagctggagggctggaccgaggaatgcattttttgatgcattattcaaagctgtcggtagaataaacataatagcagaagacctgggggtgataacagaagatgttgttgacctaaggaagtctattgaggctcctggaatggcagttcttcagtttgcttttggcggtggttctgacaatccacacttgccccataaccatgaatttgatcaagtagtatacaccggaacacacgacaatgacacggttattggttggtggcaaactttaccagaggaagagaagcagactgtgttcaagtatctgcctgaggctaataggactgaaatctcatgggcactgatcactgctgccctctcttcagttgcaaggacatccatggtaaccatgcaggacattcttggcctcgacagttctgctagaatgaatactccagctacacagaaagggaactggagatggaggatgccgagctctgtcagcttcgacagcctcagccctgaagcggcgaagctgaaggaattgcttggactgtacaaccggctctaa

SEQ ID NO: 55036 - protein, 586 aa, Oryza sativa
MATLSLPLPHLTQAIPARARPRPRPLRGIPARLLSCRAAMAVAPDKEEAAAVALDKAVKVAVAAPDRAAVAAVGVGEELPEGYDQMMPAVEEARRRRAGVLLHPTSLRGPHGIGDLGDEAVAFLAWLRDAGCTLWQVLPLVPPGRKSGEDGSPYSGQDANCGNTLLISLEELVKDGLLMENELPDPLDMEYVEFDTVANLKEPLIAKSSILLNENSRYNIVSKKLGWLEDAALFAAIDRSIDALSWYEWPEPLKNRHLRALEDIYQKQKDFIEIFMAQQFLFQRQWQRIRKYAKKLGISIMGDMPIYVGYHSADVWANRKSFLLDKNGFPTFVSGVPPDAFSETGQLWNSPLYDWKAMEAGGFEWWIKRINRALDLYDEFRIDHFRGLAGFWAVPSESKVALVGSWRAGPRNAFFDALFKAVGRINIIAEDLGVITEDVVDLRKSIEAPGMAVLQFAFGGGSDNPHLPHNHEFDQVVYTGTHDNDTVIGWWQTLPEEEKQTVFKYLPEANRTEISWALITAALSSVARTSMVTMQDILGLDSSARMNTPATQKGNWRWRMPSSVSFDSLSPEAAKLKELLGLYNRL

SEQ ID NO: 55037 - DNA, 2204 bp, Chlamydomonas reinhardtii
  CDS (130)..(1887)
tccactgcacttctcgtgcattgtgaatgcattgccctattatttattgttaggagtggggtcatcaacccccaaacttgcaagcggtgctgcaagcggtgtcgggtctagtcctcttggagacgccaaatgatcccacttcgtgcgccacaaggcgttaggtatacgcaacaaatagatcgaagccagcaggtgctcccgcagcttcgctcgcgtgctccgcaatcggtatcgcacgtcgccgccggctcgcggcgcgctgtcagcaggcggtctgtccgcgccttcgcttggggaactccaaaaacgacgggcccggcgccaggcgaagtgctcggcaaggattatgaccagaaaatccccagctataataaggggcgccgcgcgggcattctgctgcaccccacctctctcccggggccgtacggcattggcgatattggtgatgaggccaagcgcttcgtcgactggctcgccgaccacggcatgcagtgctggcagctgctgccgctggtgcccccggaccccatgtactactccccctactcgggcacggacgccaactgcggcaacccccttgtggtgagcattgaggagctcatcaaggacggactgctggagttctcggagacgcccccgcgcgtgcccatcgccgacgttgactatcccgctgtggccgcggccaagctgcccctgctcaagcgcgcggcgcagcggctgcttaaggaggaccgcttcacgcggctgcgggaggaatacctcaagtaccgcaaagagcacccctgggtggaggacagcgcgctgtttgatgtggcgcgcaacctgccggagctgagccagttggcgtggtggcagtggccggagccgttgcggctgcggcagaaggaggcgctcaaggagttccgggagacaaacaaggacgcaattgacgagttcgttgtgatccagtacttcttcgagaagcagtggaaggcgatccggtcctacgcgaacggcaagggcatcaaactcatcggcgacatgcccatctacgtgggcggccacagcgcagatgtgtgggccaaccgccacctgttcgagctgaacgaggcgggcctgcccgagcaggtcagcggagtgccgccggacgccttctcagcaacgggccagctgtggggcagcccgctttacaagtggccggcccacaagaaggagggcttcaagtggtggacggcgcgcatggcccggaccctggagctgtacgacgagtgccgcatcgaccacttccgtggcttcgcaggctactggagcgtggacgccaacgagaccaccgccatgaacggcaactggcgccagggccctgggctggagctgttcacggccatgaagaaggcgctgggggcggtgcccatcctggctgaggacctgggcgtcatcaccacggacgtggtggcgctgcgcgaggccatcggcgctccgggcatggtggtgctgcagttcgcctggggcggcggccccggcaatgtgcacctgccgcacaaccactacgagaactgcttcgtgtacccgggcacccacgacaacgagacggcggtgggctggttccgcggctccgccaacgacacggacaagtcctacatcaagagctacctgcgcacggacggcggcgacatcgcctgggacttcatccgcgcctgcatggcggcggtgccacgcacgtgcgtcatcatgatgcaggacgtgatgcggctggacaacacggctcgcatgaacacgcccggcacggccgccgggaactggcgttggcgcatgggcgatggcaacgtgtggaactcgctcaagaaggagggcgaggacctgcggaaggtggcacacgacacgaaccgcctgcccaagcccaaggcgtgaaccgattgaatgagcgggactgagcgcgcacagttgcatctgcagtcgcatatgtgctcatgacacgcgtgcagcgtgcaagggattaatgagctttggatactggcttcgagcgagtaggtgtaggggtgcgtttctgtggggagaaataggtgagacaggacatcaaagcatctgcatggcacgctgagcgaaggttgtgtagtgaggtagtgaggtaggccgcccttacagccggcgcccacgccgtggccgcgcgcgcgaggaccactcaaaagtgccccgtcccaaaaaaaaaaaaaaaaaaaaaaaaaaaa

SEQ ID NO: 55038 - protein, 585 aa, Chlamydomonas reinhardtii
MIPLRAPQGVRYTQQIDRSQQVLPQLRSRAPQSVSHVAAGSRRAVSRRSVRAFAWGTPKTTGPAPGEVLGKDYDQKIPSYNKGRRAGILLHPTSLPGPYGIGDIGDEAKRFVDWLADHGMQCWQLLPLVPPDPMYYSPYSGTDANCGNPLVVSIEELIKDGLLEFSETPPRVPIADVDYPAVAAAKLPLLKRAAQRLLKEDRFTRLREEYLKYRKEHPWVEDSALFDVARNLPELSQLAWWQWPEPLRLRQKEALKEFRETNKDAIDEFVVIQYFFEKQWKAIRSYANGKGIKLIGDMPIYVGGHSADVWANRHLFELNEAGLPEQVSGVPPDAFSATGQLWGSPLYKWPAHKKEGFKWWTARMARTLELYDECRIDHFRGFAGYWSVDANETTAMNGNWRQGPGLELFTAMKKALGAVPILAEDLGVITTDVVALREAIGAPGMVVLQFAWGGGPGNVHLPHNHYENCFVYPGTHDNETAVGWFRGSANDTDKSYIKSYLRTDGGDIAWDFIRACMAAVPRTCVIMMQDVMRLDNTARMNTPGTAAGNWRWRMGDGNVWNSLKKEGEDLRKVAHDTNRLPKPKA

SEQ ID NO: 55039 - DNA, 1731 bp, Solanum tuberosum
  CDS (1)..(1731)
atggcaattcacacttgtttctcactaataccttcttctttctcttctcccaaattgccataccccaaaaacactacttttcaatctcctatcccaaaattatctagacccactttcatgtttgatcggaaaggttcctttcaaaatggcaccgctgccgttcctgctgtaggtgaggattttccgattgattatgctgattggttgccaaaacgagacccaaacgatcgtagaagagctggaattttgctccatccgacgtcgtttcctggaccttatggtattggtgaccttggccctcaggcttttaagttccttgattggcttcatcttgctggttgctccctttggcaggttcttccacttgtaccgcctggaaagagaggcaatgaagatggatcaccctattcaggacaggatgcaaattgtggaaacacacttctgatttctcttgaagagcttgttgatgatggtttactgaagatggaggagcttccggagccactacctacagatcgtgtcaattactcgactatatctgagataaaagatcctttaataaccaaggcagcaaagaggcttctctccagtgaaggggaactgaaagaccagctcgagaactttcgccgggatccaaatatttcgagttggctggaggatgctgcttattttgctgccatagacaactctgtaaacactattagctggtatgattggcctgaaccattgaaaaatcgccatcttgcagctctagaagaagtttatcaaagtgaaaaggattttattgacatattcattgcacaacagttcttgttccaacgacaatggaaaaaagttcgtgactatgcacgatccaaaggaatcagtataatgggagacatgccaatatatgttggatatcacagtgctgatgtttgggccaacaagaaacaatttttgctgaataggaaaggtttccctcttatagttagtggtgttcctccagacgcctttagtgaaactggtcaactatggggcagccctctctatgattggaaagccatggagaaggatggattttcatggtgggtacgccgaattcaacgtgcaacggatctttttgatgaatttaggatagatcactttagaggatttgctggattttgggctgttccttctgaggaaaaaattgcaattctgggacggtggaaggtgggacctggaaagcctttgtttgatgctatcttacaagctgttgggaagatcaatattatagcagaagacttgggagtaattaccgaggacgttgttcagctaagaaagtccattgaggcacctggaatggctgtactccagtttgcatttggcagtgacgctgaaaaccctcatttacctcacaatcatgagcagaaccaagtagtgtatactggaacacatgacaatgatacgatccgaggttggtgggatactttgccacaggaagagaaatccaatgtactaaagtatttatcaaatattgaggaagaggaaatatcacggggcttgatcgaaggtgcagtttcttctgtagcccgtattgcaattataccgatgcaggatgttcttgggcttgggagtgattccagaatgaacattccagcaactcagtttggaaactggagttggaggatacctagttcaactagctttgacaacctggatgcagaagcaaaaaagctaagagatatacttgcaacttatgggcggttgtga

SEQ ID NO: 55040 - protein, 576 aa, Solanum tuberosum
MAIHTCFSLIPSSFSSPKLPYPKNTTFQSPIPKLSRPTFMFDRKGSFQNGTAAVPAVGEDFPIDYADWLPKRDPNDRRRAGILLHPTSFPGPYGIGDLGPQAFKFLDWLHLAGCSLWQVLPLVPPGKRGNEDGSPYSGQDANCGNTLLISLEELVDDGLLKMEELPEPLPTDRVNYSTISEIKDPLITKAAKRLLSSEGELKDQLENFRRDPNISSWLEDAAYFAAIDNSVNTISWYDWPEPLKNRHLAALEEVYQSEKDFIDIFIAQQFLFQRQWKKVRDYARSKGISIMGDMPIYVGYHSADVWANKKQFLLNRKGFPLIVSGVPPDAFSETGQLWGSPLYDWKAMEKDGFSWWVRRIQRATDLFDEFRIDHFRGFAGFWAVPSEEKIAILGRWKVGPGKPLFDAILQAVGKINIIAEDLGVITEDVVQLRKSIEAPGMAVLQFAFGSDAENPHLPHNHEQNQVVYTGTHDNDTIRGWWDTLPQEEKSNVLKYLSNIEEEEISRGLIEGAVSSVARIAIIPMQDVLGLGSDSRMNIPATQFGNWSWRIPSSTSFDNLDAEAKKLRDILATYGRL

SEQ ID NO: 55041 - DNA, 1458 bp, Aquifex aeolicus
  CDS (1)..(1458): transl_table=11
atgagattggcaggtattttacttcacgtaacttcacttccctctccttacgggataggggatctcggaaaagaagcctacaggtttctggacttcttaaaggagtgcggttttagcctttggcaggttctacctctgaaccccacttcacttgaggcgggaaactcaccctacagttcaaactccctcttcgcgggcaattacgtactaatagaccctgaagaattattggaggaggacttaataaaagaaagggacttaaaaagatttcccttgggtgaagccctttacgaagtcgtgtacgagtataaaaaagagttgctcgaaaaagcctttaaaaatttcaggagatttgaactgcttgaagattttctgaaggaacactcttactggctcagagattacgcactttacatggctataaaagaagaagagggaaaggagtggtatgaatgggatgaagaattgaagaggagagaaaaagaggctttaaaaagggtgttaaataagttaaaggggaggttttacttccacgtattcgtccagtttgttttcttcaagcagtgggaaaaactgagaagatacgcaagggaaagggggataagcatagttggagatcttccaatgtacccctcgtactcaagtgcggacgtgtggacaaatcctgaactttttaaactggacggagatttaaaacccctttttgtagcgggtgttcctcctgattttttcagtaaaacgggacagctgtggggaaatcccgtttacaactgggaagaacacgaaaaggaaggcttcagatggtggataaggagagttcatcacaacttaaaactctttgactttttaagacttgaccacttcaggggatttgaggcgtactgggaggttccttacggtgaagaaactgcggtaaacggaaggtgggtaaaggctcccggaaagacactatttaaaaaactcttatcatacttcccgaagaacccattcatagcggaggacttaggttttataacggacgaagtgaggtacttgagggaaacttttaaaatcccgggaagcagagttattgagtttgccttctacgataaggaaagtgagcaccttccccacaacgttgaagagaacaacgtttactacacttcaactcatgaccttcctccgataagaggatggtttgagaatttaggagaagaatcaagaaaacgattatttgaatacttgggaagggagattaaagaggaaaaagttaacgaggagcttataagactcgttttaatctcaagggcgaagttcgcaataatccagatgcaggacttactcaatctcggcaatgaagcgaggatgaattaccccggaagacctttcggaaattggaggtggagaataaaggaagattacacacaaaagaaggaatttattaaaaaactcctcggaatttacggaagagaagtttaa

SEQ ID NO: 55042 - protein, 485 aa, Aquifex aeolicus
MRLAGILLHVTSLPSPYGIGDLGKEAYRFLDFLKECGFSLWQVLPLNPTSLEAGNSPYSSNSLFAGNYVLIDPEELLEEDLIKERDLKRFPLGEALYEVVYEYKKELLEKAFKNFRRFELLEDFLKEHSYWLRDYALYMAIKEEEGKEWYEWDEELKRREKEALKRVLNKLKGRFYFHVFVQFVFFKQWEKLRRYARERGISIVGDLPMYPSYSSADVWTNPELFKLDGDLKPLFVAGVPPDFFSKTGQLWGNPVYNWEEHEKEGFRWWIRRVHHNLKLFDFLRLDHFRGFEAYWEVPYGEETAVNGRWVKAPGKTLFKKLLSYFPKNPFIAEDLGFITDEVRYLRETFKIPGSRVIEFAFYDKESEHLPHNVEENNVYYTSTHDLPPIRGWFENLGEESRKRLFEYLGREIKEEKVNEELIRLVLISRAKFAIIQMQDLLNLGNEARMNYPGRPFGNWRWRIKEDYTQKKEFIKKLLGIYGREV

SEQ ID NO: 55043 - DNA, 1593 bp, Chlamydophila caviae
  CDS (1)..(1593): transl_table=11
atgactccattttctaaagctctacgttgtatccagaattctccagcaaagcaaagctggaaaactctaggaatcatgcccaaacatgggatttgccttcctctattttccctacatacaagaaatagctgtggtatcggagagtttttagatctcattcctatgatctcctggtgccgaaaacacggatttcaaatcatacaaattcttcctattaacgatagcggtgaagatagcagcccgtacaatagcatatcttcagtagcactcaaccccctgtatctttccttagcaagccttccccatgcccaatcagttgcctatgcgaatgctaagctaagaactatgcagcagctctctaaactgccctacgtacattatccacaagtcaaagctgctaaatgggagttcctccgtgactattaccaatatgtcgtcaaaatcggagctttaaaagacgaagatttcgaaattttttgtgaaaaggaaaagtattggctacgcccctacacagtatttcgctctattaaataccacctaaaaggagccccagtaaacaactggcccaaagcctacacagacattaagaacttcacggaatttgaaaaacaatttcaagatgagtgcagctttttttcctatctgcaatatctctgctttcagcaaatgtcccaggtaaaagcttttgcagatgataaccacgttttccttaaaggagatcttcccatccttatcagtaaggatagttgtgatgtttggtattatagacagttcttttcctcttcaggatctgctggagcccctccagatatttacaatacagaagggcaaaactggcatcttcctatctataatatgcataaccttgttcaagataactacacttggtggaaagctcgtctacgttatgcagaaaatttttattctctatacaggctggatcatatcgtagggctctttcgcttgtgggtgtgggatacttcaggaaatggaaaatttcaacctgacgaccctaaagaatatctcccccagggaacggatatactgacgcagattctacgtgcatctcgtatgcttcccataggagaagaccttggaagcgtacctactgatgtcaaagaaacattagtaaaactagggatatgtggaacgagaattcctcgatgggagcgtaattgggaaggagatggaaactttattcctctaggggaatattccccactttcagtaacctcattatctacgcatgattccgacacgctggctctttggtggcggcacgctccgaaagaagctcaaaaatttgcacaatttctaggaatgtttttcaccccggtcctagctgaggaagatcaaaaacatattctcacgttgtctcataagacttcgtctatttttcacattaatttaattaatgactaccttgctctctgtcccgatttagtatccaataatctaaagtatgaacgcataaatatgccagggaccgtatcaaaaaataattgggtttacaggatcaaaccttccgtggaagaaatcctgactcatgatgcattcaacgcaaatatagcggatatcttttccaagatttag

SEQ ID NO: 55044 - protein, 530 aa, Chlamydophila caviae
MTPFSKALRCIQNSPAKQSWKTLGIMPKHGICLPLFSLHTRNSCGIGEFLDLIPMISWCRKHGFQIIQILPINDSGEDSSPYNSISSVALNPLYLSLASLPHAQSVAYANAKLRTMQQLSKLPYVHYPQVKAAKWEFLRDYYQYVVKIGALKDEDFEIFCEKEKYWLRPYTVFRSIKYHLKGAPVNNWPKAYTDIKNFTEFEKQFQDECSFFSYLQYLCFQQMSQVKAFADDNHVFLKGDLPILISKDSCDVWYYRQFFSSSGSAGAPPDIYNTEGQNWHLPIYNMHNLVQDNYTWWKARLRYAENFYSLYRLDHIVGLFRLWVWDTSGNGKFQPDDPKEYLPQGTDILTQILRASRMLPIGEDLGSVPTDVKETLVKLGICGTRIPRWERNWEGDGNFIPLGEYSPLSVTSLSTHDSDTLALWWRHAPKEAQKFAQFLGMFFTPVLAEEDQKHILTLSHKTSSIFHINLINDYLALCPDLVSNNLKYERINMPGTVSKNNWVYRIKPSVEEILTHDAFNANIADIFSKI

SEQ ID NO: 55045 - DNA, 1584 bp, Chlamydia muridarum
  CDS (1)..(1584): transl_table=11
atgccattattatcccgatccttacgtatcatccaaaactctcctattcgaaaagtttggaatcaagtcgatacttccccaaaacacgggatttgtgtgccacttttttccatacatactcaaaacagctgcggaataggagagtttctcgatctgatccctatgattgactggtgcactctatgcggatttcaaattcttcaaattctccccattaatgacaccggatcttgttcaagcccttacaatagcatttcttccatatctctgaatccccttcatctatctatatcggcccttccttataaagaagaagtctcatcttcaagaaaactcatacaagaaatgcaaagactttctcagctctctcaagtaaattatgagaaagttatccctatgaagagagcttttttcaaagaatactttcgtgtatgtaaaagtaaaaaccttactaaccatccagatttttgtgacttttgtgaacgagagaaatattggttacacccttacgctcttttctgctccattcgagaacaccttaactaccttccgattaatcattggtcaacaacttacacagatctttcttacatttcacaacacgaacacacctttgctaaagatatagagttttactcctatctacaatacctttgcttcgaacaaatgaagcaagttcgtaaacatgcggatcacaaaggctgtcttattaagggggatattcccattcttatcagtaaagatagctgtgatgtctggttctatagaaaatatttttcttcttccgaatctgtaggctctcctcctgatttttataatgcggaaggtcaaaactggaacctccctatttataacatgaagactttgcgacaagacgcttaccattggtggaaagaaagattgcgttacgcagaaaatttttattctttatatcgtcttgatcatgtagttggattgtttagattttgggtatgggatgaattgggacgtggacgcttcgaaccacaagatcctaaagactacctagatcaagggacagacattttgtcccatttattaaaagcttcatcgatgctccctataggagaagatttaggcactatccccgtagatgtaaaacaagcactcgaatctttagccgtatgcggcacccgaattcctcgctgggaacgagactgggaaggtaccggcgcctacatacctttcgatcaatataatcctctatccgtcacgagtttatccacccacgactcctctactttagctttatggtggcaagaagctccccaagaagccagattatttgctcaatttttaggaatgccctatacgccttccctttcttttcataatcataaggaaatcctaaaactttctcacaaaacttcttccatttttcatatcaatctcatcaacgactacctagctttatgtcctgacttaatctcgaccaatcctttacaagaaagaattaatcttcctggaactatttcaaaaaataactgggtatatcgagttaaaccttctattgaacaattatccgctcattccaagctaaattctttacttgcatcacttttttaa

SEQ ID NO: 55046 - protein, 527 aa, Chlamydia muridarum
MPLLSRSLRIIQNSPIRKVWNQVDTSPKHGICVPLFSIHTQNSCGIGEFLDLIPMIDWCTLCGFQILQILPINDTGSCSSPYNSISSISLNPLHLSISALPYKEEVSSSRKLIQEMQRLSQLSQVNYEKVIPMKRAFFKEYFRVCKSKNLTNHPDFCDFCEREKYWLHPYALFCSIREHLNYLPINHWSTTYTDLSYISQHEHTFAKDIEFYSYLQYLCFEQMKQVRKHADHKGCLIKGDIPILISKDSCDVWFYRKYFSSSESVGSPPDFYNAEGQNWNLPIYNMKTLRQDAYHWWKERLRYAENFYSLYRLDHVVGLFRFWVWDELGRGRFEPQDPKDYLDQGTDILSHLLKASSMLPIGEDLGTIPVDVKQALESLAVCGTRIPRWERDWEGTGAYIPFDQYNPLSVTSLSTHDSSTLALWWQEAPQEARLFAQFLGMPYTPSLSFHNHKEILKLSHKTSSIFHINLINDYLALCPDLISTNPLQERINLPGTISKNNWVYRVKPSIEQLSAHSKLNSLLASLF

SEQ ID NO: 55047 - DNA, 1503 bp, Thermus thermophilus
  CDS (1)..(1503): transl_table=11
atggagcttccccgcgctttcggtctgcttctccaccccacgagcctccccggcccctacggcgtcggcgtcctgggccgggaggcccgggacttcctccgcttcctcaaggaggcgggggggcggtactggcaggtcctccccttgggccccacgggctatggcgactccccctaccagtccttcagcgccttcgccggaaacccctacctcatagacctgaggcccctcgcggaaaggggctacgtgcgcctggaggaccccggcttcccccaaggccgggtggactacggcctcctctacgcctggaagtggcccgccctgaaggaggccttccggggcttcaaggaaaaggcctccccggaggagcgggaggccttcgccgccttccgggagagggaggcctggtggctcgaggactacgccctcttcatggccctgaagggggcgcacggggggcttccctggaaccggtggccccttcccctgcggaagcgggaagagaaggcccttagggaggcgaaaagcgccttggccgaggaggtggccttccacgccttcacccagtggctcttcttccgccagtggggggccttgaaggcggaggccgaggcgttgggcatccggatcatcggggacatgcccatcttcgtggccgaggactccgccgaggtctgggcccaccccgagtggtttcacctggacgaggagggccgccccacggtggtggcgggggtgccccccgactacttctcggagacgggccagcgctggggtaaccccctttaccgctgggacgttttggagcgggaggggttctccttctggatccgccgtctggagaaggccctggagctcttccacctggtgcgcatagaccacttccgcggctttgaggcctactgggagatccccgcaagctgccccacggcggtggaggggcgctgggtcaaggccccgggggagaagctcttccagaagatccaggaggtcttcggcgaggtccccgtcctcgccgaggacctgggggtcatcacccccgaggtggaggccctgcgcgaccgcttcggccttcccgggatgaaggtcctgcagttcgcctttgacgacgggatggaaaaccccttcctcccccacaactaccctgcccacggccgggtggtggtctacaccggcacccacgacaacgacaccaccctgggctggtaccgcacggccaccccccacgagaaggccttcatggcgcggtacctggcggactgggggatcaccttccgggaagaggaggaggtgccctgggccctgatgcacctggggatgaagtccgtggcccggctcgccgtctacccggtgcaggacgtcctggccctgggcagcgaggcccggatgaactacccgggaaggccctcggggaactgggcctggcggctcctcccgggggagctttccccggagcacggggcgaggcttagggccatggccgaggccacggaacggctctag

SEQ ID NO: 55048 - protein, 500 aa, Thermus thermophilus
MELPRAFGLLLHPTSLPGPYGVGVLGREARDFLRFLKEAGGRYWQVLPLGPTGYGDSPYQSFSAFAGNPYLIDLRPLAERGYVRLEDPGFPQGRVDYGLLYAWKWPALKEAFRGFKEKASPEEREAFAAFREREAWWLEDYALFMALKGAHGGLPWNRWPLPLRKREEKALREAKSALAEEVAFHAFTQWLFFRQWGALKAEAEALGIRIIGDMPIFVAEDSAEVWAHPEWFHLDEEGRPTVVAGVPPDYFSETGQRWGNPLYRWDVLEREGFSFWIRRLEKALELFHLVRIDHFRGFEAYWEIPASCPTAVEGRWVKAPGEKLFQKIQEVFGEVPVLAEDLGVITPEVEALRDRFGLPGMKVLQFAFDDGMENPFLPHNYPAHGRVVVYTGTHDNDTTLGWYRTATPHEKAFMARYLADWGITFREEEEVPWALMHLGMKSVARLAVYPVQDVLALGSEARMNYPGRPSGNWAWRLLPGELSPEHGARLRAMAEATERL

SEQ ID NO: 55049 - DNA, 1668 bp, Oryza sativa
  CDS (1)..(1668)
atggcggtggcgcccgacaaggaggaggcggcggcggttgctctggacaaggcggtgaaggtggcggtggcagctcccgacagggcggcggtggccgcggtgggcgtcggggaggagctccccgaggggtacgaccagatgatgccggccgtggaggaggcgcggcggcggcgagccggggtgctgctgcacccgacctcgctccgcggcccgcacggcatcggcgacctcggcgacgaggcggtcgccttcctcgcctggctccgcgacgccggctgcacgctctggcaggttcttccgcttgttccaccgggaaggaagtctggggaggatggctctccatattcaggacaggatgcaaactgtggtaataccctattaatttcacttgaagagcttgtaaaagatgggttgttgatggagaatgaactacctgaccccttggatatggagtatgttgaatttgacaccgttgccaatctgaaagaacctcttattgcaaaggctgcagagaggctcctactgagccgtggagagctcagaacgcaatatgactgcttcaagaaaaatccaaatatttcaggttggcttgaagatgctgcactttttgctgctattgacagaagtattgatgcattatcctggtatgagtggcctgaacctctgaaaaaccgacatctcagggccttggaagacatatatcaaaaacagaaggatttcatagagatatttatggctcaacaattcttatttcaaaggcagtggcagcgaattcgtaaatatgcaaagaagttgggtatcagcataatgggtgacatgcccatatatgttggctaccatagtgcagatgtttgggcaaacaggaaatcgtttttgctggacaagaatggttttccgacttttgttagtggtgttccacctgatgcatttagtgaaactggtcagctttggaacagtccattgtacgactggaaagctatggaagcaggtggatttgaatggtggataaaaaggattaatcgtgcccttgatttgtatgatgagttccgtatagaccatttccgggggcttgcaggtttttgggcagttccttctgagtcaaaagtagcgctggttggaagctggagggctggaccgaggaatgcattttttgatgcattattcaaagctgtcggtagaataaacataatagcagaagacctgggggtgataacagaagatgttgttgacctaaggaagtctattgaggctcctggaatggcagttcttcagtttgcttttggcggtggttctgacaatccacacttgccccataaccatgaatttgatcaagtagtatacaccggaacacacgacaatgacacggttattggttggtggcaaactttaccagaggaagagaagcagactgtgttcaagtatctgcctgaggctaataggactgaaatctcatgggcactgatcactgctgccctctcttcagttgcaaggacatccatggtaaccatgcaggacattcttggcctcgacagttctgctagaatgaatactccagctacacagaaagggaactggagatggaggatgccgagctctgtcagcttcgacagcctcagccctgaagcggcgaagctgaaggaattgcttggactgtacaaccggctctaa

SEQ ID NO: 55050 - protein, 555 aa, Oryza sativa
MAVAPDKEEAAAVALDKAVKVAVAAPDRAAVAAVGVGEELPEGYDQMMPAVEEARRRRAGVLLHPTSLRGPHGIGDLGDEAVAFLAWLRDAGCTLWQVLPLVPPGRKSGEDGSPYSGQDANCGNTLLISLEELVKDGLLMENELPDPLDMEYVEFDTVANLKEPLIAKAAERLLLSRGELRTQYDCFKKNPNISGWLEDAALFAAIDRSIDALSWYEWPEPLKNRHLRALEDIYQKQKDFIEIFMAQQFLFQRQWQRIRKYAKKLGISIMGDMPIYVGYHSADVWANRKSFLLDKNGFPTFVSGVPPDAFSETGQLWNSPLYDWKAMEAGGFEWWIKRINRALDLYDEFRIDHFRGLAGFWAVPSESKVALVGSWRAGPRNAFFDALFKAVGRINIIAEDLGVITEDVVDLRKSIEAPGMAVLQFAFGGGSDNPHLPHNHEFDQVVYTGTHDNDTVIGWWQTLPEEEKQTVFKYLPEANRTEISWALITAALSSVARTSMVTMQDILGLDSSARMNTPATQKGNWRWRMPSSVSFDSLSPEAAKLKELLGLYNRL

SEQ ID NO: 55051 - DNA, 1767 bp, Zea mays
  CDS (1)..(1767)
atggttctcgcgcgagtcctcccgctgcccgccccgtcgtccgcgccccaccgccgcttactcctgccgactcaggcggcgccggccccggcgcgtgtgctcaccgtgcgggccgtcgcctgccgcgcagcgaacgccatggcggccgttgctctggacccgcccgcggtcgctccgagccccgcagaggtcgcagccgtgggcgtcggggaggagctgccggaagggtacgatcagatgatgccgaccgtggagccgtcgcggaggcggcgcgccgggctgctgctgcatcctacttcgttgcggggcccgcacggcatcggcgacctcggggacgaggcgcttgctttcctgcattggctccgcgacgccggctgcacgctctggcaggttctaccacttgttcctccaggtaggacggctggggaggatgggtctccttattctggacaggatgccaactgtggcaatacccttttgctatcccttgaggagcttgtaaaagatggtctactgatgtcagatgaacttcctgatcctgtggatacagagtatgttgaatttgacactgttgcaaatctgaaagaaccacttattgcaaaggcagcagagaggctcctactaagccatggagagctcagaacacaatatgactgcttcaaaaaaaatccaaatatatcaggttggcttgaagatgcagctctttttgctgctattgacaaaagcatcaatgcattctcttggtacgagtggcctgaacctctgaaaaatcgccatcttggagccttggaagatatatatgaaaaacagaaggattttatagagacatttatggctcagcagttcttatttcaaaggcaatggcagcggattcgtaaatatgcacaaaagctgggtatcagcatcatgggtgacatgcctatatatgttggctaccatagcgcagatgtttgggcgaacaggaaatcatttttgctggacaaaaacggtttccccactttcgttagtggcgttccacctgatgcatttagtgaaacgggtcaactatggaacagtccattgtacgactggaaagctatggaagcagattgtttttcatggtggataaagaggattaaacgtgcccttgatttgtatgatgaattccgtattgaccatttccgggggcttgcgggtttttgggcagtcccttctgatgcaaaagtagcactggttggaagctggagggctggaccaaggaatagcttttttgacacgctcttcaaagctgttggtagaatagatataatagcagaagatctgggggtaattactgaagatgtcgttcagctaaggaaatccattggggcccctgggatggcagttctccagtttgctttcggaggtggttctgacaaccctcatttgccacacaaccatgaaatggatcaagttgtgtacactggaacacatgataacgatacagttcttggctggtggcaaaatttaccagaggaagaaaagaaaattgtgatcaagtatctaccagaagccgagaatattgacataacatggacactgattacggctgccctctcttccgtcgcgaggacttccgtggtaaccatgcaggacattcttggccttgacagttctgctagaatgaatactccagctacccagaaaggaaactggaggtggaggataccgagctctgttggcttcgacagcctcagccctgaagcagcaaagctgaaggagctgcttgcgctgtacaatcgacagtga

SEQ ID NO: 55052 - protein, 588 aa, Zea mays
MVLARVLPLPAPSSAPHRRLLLPTQAAPAPARVLTVRAVACRAANAMAAVALDPPAVAPSPAEVAAVGVGEELPEGYDQMMPTVEPSRRRRAGLLLHPTSLRGPHGIGDLGDEALAFLHWLRDAGCTLWQVLPLVPPGRTAGEDGSPYSGQDANCGNTLLLSLEELVKDGLLMSDELPDPVDTEYVEFDTVANLKEPLIAKAAERLLLSHGELRTQYDCFKKNPNISGWLEDAALFAAIDKSINAFSWYEWPEPLKNRHLGALEDIYEKQKDFIETFMAQQFLFQRQWQRIRKYAQKLGISIMGDMPIYVGYHSADVWANRKSFLLDKNGFPTFVSGVPPDAFSETGQLWNSPLYDWKAMEADCFSWWIKRIKRALDLYDEFRIDHFRGLAGFWAVPSDAKVALVGSWRAGPRNSFFDTLFKAVGRIDIIAEDLGVITEDVVQLRKSIGAPGMAVLQFAFGGGSDNPHLPHNHEMDQVVYTGTHDNDTVLGWWQNLPEEEKKIVIKYLPEAENIDITWTLITAALSSVARTSVVTMQDILGLDSSARMNTPATQKGNWRWRIPSSVGFDSLSPEAAKLKELLALYNRQ

SEQ ID NO: 55053 - DNA, 20 bp, Artificial sequence
  primer
atgttagataaacgctgtag

SEQ ID NO: 55054 - DNA, 20 bp, Artificial sequence
  primer
ttagtctgtgtggtaaatgc

SEQ ID NO: 55055 - protein, 584 aa, Artificial sequence
  consensus sequence
  Variant (2)..(3): Xaa in position 2 to 3 is any amino acid
  Variant (5)..(5): Xaa in position 5 is any amino acid
  Variant (7)..(7): Xaa in position 7 is any amino acid
  Variant (9)..(10): Xaa in position 9 to 10 is any amino acid
  Variant (14)..(14): Xaa in position 14 is any amino acid
  Variant (15)..(20): Xaa in position 15 to 20 is any or no amino acid
  Variant (22)..(23): Xaa in position 22 to 23 is any amino acid
  Variant (25)..(26): Xaa in position 25 to 26 is any amino acid
  Variant (28)..(32): Xaa in position 28 to 32 is any amino acid
  Variant (33)..(33): Xaa in position 33 is any or no amino acid
  Variant (35)..(41): Xaa in position 35 to 41 is any amino acid
  Variant (44)..(44): Xaa in position 44 is any amino acid
  Variant (48)..(48): Xaa in position 48 is any amino acid
  Variant (50)..(54): Xaa in position 50 to 54 is any amino acid
  Variant (55)..(62): Xaa in position 55 to 62 is any or no amino acid
  Variant (65)..(65): Xaa in position 65 is any amino acid
  Variant (67)..(69): Xaa in position 67 to 69 is any amino acid
  Variant (71)..(72): Xaa in position 71 to 72 is any amino acid
  Variant (74)..(74): Xaa in position 74 is any amino acid
  Variant (76)..(83): Xaa in position 76 to 83 is any amino acid
  Variant (84)..(89): Xaa in position 84 to 89 is any or no amino acid
  Variant (91)..(104): Xaa in position 91 to 104 is any amino acid
  Variant (105)..(160): Xaa in position 105 to 160 is any or no amino acid
  Variant (163)..(163): Xaa in position 163 is any amino acid
  Variant (165)..(167): Xaa in position 165 to 167 is any amino acid
  Variant (169)..(177): Xaa in position 169 to 177 is any amino acid
  Variant (178)..(188): Xaa in position 178 to 188 is any or no amino acid
  Variant (190)..(191): Xaa in position 190 to 191 is any amino acid
  Variant (193)..(194): Xaa in position 193 to 194 is any amino acid
  Variant (195)..(204): Xaa in position 195 to 204 is any or no amino acid
  Variant (206)..(219): Xaa in position 206 to 219 is any amino acid
  Variant (220)..(222): Xaa in position 220 to 222 is any or no amino acid
  Variant (224)..(228): Xaa in position 224 to 228 is any amino acid
  Variant (231)..(236): Xaa in position 231 to 236 is any amino acid
  Variant (238)..(243): Xaa in position 238 to 243 is any amino acid
  Variant (244)..(245): Xaa in position 244 to 245 is any or no amino acid
  Variant (248)..(248): Xaa in position 248 is any amino acid
  Variant (250)..(251): Xaa in position 250 to 251 is any amino acid
  Variant (253)..(255): Xaa in position 253 to 255 is any amino acid
  Variant (261)..(265): Xaa in position 261 to 265 is any amino acid
  Variant (267)..(272): Xaa in position 267 to 272 is any amino acid
  Variant (273)..(279): Xaa in position 273 to 279 is any or no amino acid
  Variant (285)..(285): Xaa in position 285 is any amino acid
  Variant (288)..(289): Xaa in position 288 to 289 is any amino acid
  Variant (292)..(292): Xaa in position 292 is any amino acid
  Variant (295)..(295): Xaa in position 295 is any amino acid
  Variant (297)..(297): Xaa in position 297 is any amino acid
  Variant (299)..(299): Xaa in position 299 is any amino acid
  Variant (301)..(309): Xaa in position 301 to 309 is any amino acid
  Variant (310)..(312): Xaa in position 310 to 312 is any or no amino acid
  Variant (315)..(316): Xaa in position 315 to 316 is any amino acid
  Variant (318)..(325): Xaa in position 318 to 325 is any amino acid
  Variant (327)..(328): Xaa in position 327 to 328 is any amino acid
  Variant (330)..(330): Xaa in position 330 is any amino acid
  Variant (335)..(339): Xaa in position 335 to 339 is any amino acid
  Variant (341)..(348): Xaa in position 341 to 348 is any amino acid
  Variant (349)..(354): Xaa in position 349 to 354 is any or no amino acid
  Variant (356)..(357): Xaa in position 356 to 357 is any amino acid
  Variant (359)..(359): Xaa in position 359 is any amino acid
  Variant (361)..(363): Xaa in position 361 to 363 is any amino acid
  Variant (366)..(379): Xaa in position 366 to 379 is any amino acid
  Variant (380)..(396): Xaa in position 380 to 396 is any or no amino acid
  Variant (402)..(406): Xaa in position 402 to 406 is any amino acid
  Variant (408)..(409): Xaa in position 408 to 409 is any amino acid
  Variant (411)..(416): Xaa in position 411 to 416 is any amino acid
  Variant (420)..(421): Xaa in position 420 to 421 is any amino acid
  Variant (423)..(423): Xaa in position 423 is any amino acid
  Variant (425)..(431): Xaa in position 425 to 431 is any amino acid
  Variant (432)..(441): Xaa in position 432 to 441 is any or no amino acid
  Variant (443)..(443): Xaa in position 443 is any amino acid
  Variant (445)..(451): Xaa in position 445 to 451 is any amino acid
  Variant (452)..(453): Xaa in position 452 to 453 is any or no amino acid
  Variant (461)..(461): Xaa in position 461 is any amino acid
  Variant (463)..(465): Xaa in position 463 to 465 is any amino acid
  Variant (467)..(508): Xaa in position 467 to 508 is any amino acid
  Variant (509)..(524): Xaa in position 509 to 524 is any or no amino acid
  Variant (527)..(527): Xaa in position 527 is any amino acid
  Variant (529)..(529): Xaa in position 529 is any amino acid
  Variant (531)..(532): Xaa in position 531 to 532 is any amino acid
  Variant (533)..(542): Xaa in position 533 to 542 is any or no amino acid
  Variant (544)..(544): Xaa in position 544 is any amino acid
  Variant (546)..(546): Xaa in position 546 is any amino acid
  Variant (548)..(552): Xaa in position 548 to 552 is any amino acid
  Variant (553)..(553): Xaa in position 553 is any or no amino acid
  Variant (556)..(556): Xaa in position 556 is any amino acid
  Variant (559)..(578): Xaa in position 559 to 578 is any amino acid
  Variant (579)..(583): Xaa in position 579 to 583 is any or no amino acid
RXXGXLXHXXSLPXXXXXXXGXXGXXAXXXXXXLXXXXXXXWQXLPLXPXXXXXXXXXXXXXSPXYXXXSXXAXNXXXXXXXXXXXXXXLXXXXXXXXXXXXXXXXXXXXXXXXXXXXXXXXXXXXXXXXXXXXXXXXXXXXXXXXXXXXXXXXXXXXXXWLXDXXXFXXXXXXXXXXXXXXXXXXXXWXXWXXXXXXXXXXXXLXXXXXXXXXXXXXXXXXQXXXXXQWXXXXXXAXXXXXXXXGDXPXXVXXXSADVWXXXXXFXXXXXXXXXXXXXGVPPDXFSXXGQXWGXPXYXWXXXXXXXXXXXXWWXXRXXXXXXXXDXXRXDHFRXXXXXWXXXXXXXXXXXXXXAXXGXWXXXPGXXXXXXXXXXXXXXXXXXXXXXXXXXXXXXXAEDLGXXXXXVXXLXXXXXXPGMXXLXFXXXXXXXXXXXXXXXXXPXNXXXXXXXXXYTGTHDNXTXXXWXXXXXXXXXXXXXXXXXXXXXXXXXXXXXXXXXXXXXXXXXXXXXXXXXXXXXXXXXXQDXLXLXXXXXXXXXXXXRXNXPXXXXXXNWXWRXXXXXXXXXXXXXXXXXXXXXXXXXR

SEQ ID NO: 55056 - protein, 22 aa, Artificial sequence
  protein pattern
  Variant (2)..(2): Xaa in position 2 is Cys or Val
  Variant (6)..(6): Xaa in position 6 is any or no amino acid
  Variant (8)..(8): Xaa in position 8 is any or no amino acid
  Variant (10)..(10): Xaa in position 10 is any amino acid
  Variant (11)..(11): Xaa in position 11 is Asp, Glu, Asn, Ser or Thr
  Variant (14)..(14): Xaa in position 14 is any amino acid
  Variant (16)..(16): Xaa in position 16 is Gly or Asn
  Variant (17)..(17): Xaa in position 17 is any amino acid
  Variant (19)..(19): Xaa in position 19 is any amino acid
  Variant (20)..(20): Xaa in position 20 is Phe or Tyr
  Variant (21)..(21): Xaa in position 21 is any amino acid
GXPPDXFXSXXGQXWXXPXXXW

SEQ ID NO: 55057 - protein, 26 aa, Artificial sequence
  protein pattern
  Variant (3)..(3): Xaa in position 3 is any amino acid
  Variant (4)..(4): Xaa in position 4 is Ile, Leu or Val
  Variant (5)..(5): Xaa in position 5 is Asp or Thr
  Variant (6)..(7): Xaa in position 6 to 7 is any amino acid
  Variant (8)..(8): Xaa in position 8 is Ala or Val
  Variant (9)..(10): Xaa in position 9 to 10 is any amino acid
  Variant (11)..(11): Xaa in position 11 is Phe or Leu
  Variant (12)..(18): Xaa in position 12 to 18 is any amino acid
  Variant (21)..(21): Xaa in position 21 is any amino acid
  Variant (22)..(22): Xaa in position 22 is Ile, Leu or Val
  Variant (23)..(23): Xaa in position 23 is Leu or Met
  Variant (24)..(24): Xaa in position 24 is any amino acid
  Variant (26)..(26): Xaa in position 26 is Ala or Gly
LGXXXXXXXXXXXXXXXXGMXXXXFX

SEQ ID NO: 55058 - protein, 23 aa, Artificial sequence
  protein pattern
  Variant (3)..(3): Xaa in position 3 is Ile, Leu, Met or Val
  Variant (5)..(5): Xaa in position 5 is Phe or Ile
  Variant (6)..(6): Xaa in position 6 is Phe or Tyr
  Variant (8)..(8): Xaa in position 8 is Ala, Asp, Gly, Ser or Thr
  Variant (9)..(9): Xaa in position 9 is any amino acid
  Variant (10)..(10): Xaa in position 10 is Asp, Glu or His
  Variant (12)..(12): Xaa in position 12 is Ala, Ser, Thr or Val
  Variant (13)..(13): Xaa in position 13 is Asp or Glu
  Variant (14)..(14): Xaa in position 14 is Thr or Val
  Variant (16)..(20): Xaa in position 16 to 20 is any amino acid
  Variant (22)..(22): Xaa in position 22 is any amino acid
  Variant (23)..(23): Xaa in position 23 is Phe, Ile, Leu, Met or Val
GDXPXXVXXXSXXXWXXXXXFXX

SEQ ID NO: 55059 - protein, 14 aa, Artificial sequence
  protein pattern
  Variant (2)..(2): Xaa in position 2 is Ala, Ser or Thr
  Variant (8)..(8): Xaa in position 8 is any amino acid
  Variant (9)..(9): Xaa in position 9 is Pro, Thr or Val
  Variant (10)..(11): Xaa in position 10 to 11 is any amino acid
  Variant (12)..(12): Xaa in position 12 is Ala, Glu, Gly or Ser
  Variant (14)..(14): Xaa in position 14 is Phe, Trp or Tyr
YXGTHDNXXXXXWX

SEQ ID NO: 55060 - protein, 14 aa, Artificial sequence
  protein pattern
  Variant (2)..(2): Xaa in position 2 is Phe, Ile, Leu or Val
  Variant (7)..(7): Xaa in position 7 is Ala or Gly
  Variant (8)..(9): Xaa in position 8 to 9 is any amino acid
  Variant (10)..(10): Xaa in position 10 is Ala, Gly, Ser or Thr
  Variant (11)..(11): Xaa in position 11 is any amino acid
  Variant (13)..(13): Xaa in position 13 is any amino acid
  Variant (14)..(14): Xaa in position 14 is Ile or Val
RXDHFRXXXXXWXX

SEQ ID NO: 55061 - protein, 16 aa, Artificial sequence
  protein pattern
  Variant (3)..(3): Xaa in position 3 is Phe, Ile, Leu or Val
  Variant (5)..(8): Xaa in position 5 to 8 is any amino acid
  Variant (9)..(10): Xaa in position 9 to 10 is any or no amino acid
  Variant (12)..(12): Xaa in position 12 is Phe, Ile, Leu or Met
  Variant (14)..(14): Xaa in position 14 is any amino acid
  Variant (16)..(16): Xaa in position 16 is Ala, Gly, Asn or Ser
QDXLXXXXXXRXNXPX

SEQ ID NO: 55062 - protein, 8 aa, Artificial sequence
  protein pattern
  Variant (3)..(3): Xaa in position 3 is Phe, Ile, Leu, Met or Val
  Variant (7)..(7): Xaa in position 7 is Ala, Cys, Gly, Asn, Ser, Thr or Val
  Variant (8)..(8): Xaa in position 8 is Pro or Thr
WQXLPLXX

SEQ ID NO: 55063 - DNA, 1083 bp, Synechocystis sp.
  CDS (1)..(1083): transl_table=11
atggaaattggtgttcccaaggaaattaaagaccaggaatttcgggtggggctgacccccagtagtgtacgggcattgctgagccagggccatcaagtatttgtggaagaaggggccggagtcgggtctggcttccccgatggagcctacgcaaaggcgggagctgagttagttgccactgccaaagaggcttggaacagggaattggtggtgaaagtgaaagagcctctccctgaagagtatgaatatttaactttgcctaagttgttgttcacttatctccatttggcagcggaacgtaccctcaccgaagctctaattaaatctggcattacggcgatcgcctatgaaacggtggaattggctgatggtcaattgccattgttggcccccatgagccgcattgccggacgattggcggtgcagatgggtgcccattatttggaaaaacaacagggaggccggggagttctgttgggaggcgtacccggagtcaaggccggacaagtaactatcctcggcggtggcgtagtcggtacagaggcggccaaaatggcgatcggactgggggccatggtgaccatcctagacatcaatgtagaccgtttaaaccaattgggagaactgttcggttcccgggtggatctgcgctacagcaatgccagccaaatcgaagacctgttgccccatacagatttgctcatcggcgcagtattgatcacaggcaagcgggccccagtgttggtttcccgccaggaagtggagcaaatgttgccaggggcggtgattatggatgtggcgatcgaccaagggggctgtgtggagactttgcgggtaacttctcatagtcaacccagttacatcgaagcagaagtagttcatgtgggcattcccaatatgccaggagccactccctggacagcaacccaagcgttgaataatagtacattgcgctatgtgttgaaattggccaatctgggggaacaggcttgggaaaatgatttgccgttggcgaaaggagtcaatgttcaagccggaaaattggtgcaaggggcggtaaaaacggtatttcctgatttgtaa

SEQ ID NO: 55064 - protein, 360 aa, Synechocystis sp.
MEIGVPKEIKDQEFRVGLTPSSVRALLSQGHQVFVEEGAGVGSGFPDGAYAKAGAELVATAKEAWNRELVVKVKEPLPEEYEYLTLPKLLFTYLHLAAERTLTEALIKSGITAIAYETVELADGQLPLLAPMSRIAGRLAVQMGAHYLEKQQGGRGVLLGGVPGVKAGQVTILGGGVVGTEAAKMAIGLGAMVTILDINVDRLNQLGELFGSRVDLRYSNASQIEDLLPHTDLLIGAVLITGKRAPVLVSRQEVEQMLPGAVIMDVAIDQGGCVETLRVTSHSQPSYIEAEVVHVGIPNMPGATPWTATQALNNSTLRYVLKLANLGEQAWENDLPLAKGVNVQAGKLVQGAVKTVFPDL

SEQ ID NO: 55065 - DNA, 1116 bp, Mesorhizobium loti MAFF303099
  CDS (1)..(1116): transl_table=11
atgcgtgtcggttgccccaaagaaatcaagaaccacgaatatcgcgtcggcctcacgcccggctcggtccgcgaatatgtggcgcatggccacgaagtgctggtcgagaccggtgccggcgccggcatcggcgccgatgacaacgcctatcgcgctgccggcgccaccatcgccaagaccgccgccgacgtgttcgccaagtcggacatgatcgtcaaggtcaaggagccgcagcccaatgagtgggtgcagctgcgtgacggccaaatcctgtacacctatcttcacctggctccggatccggaacagaccaaggggctgctcgcttcgggcgttacggcgatcgcctacgagaccgtgaccgacgatcgcggcggcctgccgctgctcgcgccgatgtcggaagtcgccggccgcctgtcgatccaggccggtgcgacggcgctgcagaaggccaatggcggccgcggcgtgctgctcggcggcgtgcccggcgtgctgcccggcaaggtcaccgtgctcggtggtggcgtcgttggtctccacgcggcccgcatggccgccggtcttggcgccgacgtcaccatcatcgaccgctcgatcccgcgtctgcgccagctcgacgacctcttcgccggccgcgtccacacccgctattcgaccgtcgaggcgctcgaggaagaatgcttctcggccgacatcgtcgtcggcgccgtgttgatcccgggtgctgccgcacccaagctcgtcacccgcgaaatgctgtccggcatgaagaagggctcggtgctggtcgacgtcgccatcgaccagggcggttgcttcgagacctcgcatgcgacgactcacgccgagcccacctacgaggtcgacggcgtcatccactattgcgtcgccaacatgccaggcgctgtgccggtcacctcggcccatgcgctgaacaatgcgacgctgcactacggcctgcagcttgccgacaaaggcctcaaggcgctggtcgacgaccatcatttgcgcaacggcctcaatgtccacaagggcaagatcacgaatcgtgcggtggccgaagcgctgggctacgaactggtcgagccgaaagctgttctggccgcctga

SEQ ID NO: 55066 - protein, 371 aa, Mesorhizobium loti MAFF303099
MRVGCPKEIKNHEYRVGLTPGSVREYVAHGHEVLVETGAGAGIGADDNAYRAAGATIAKTAADVFAKSDMIVKVKEPQPNEWVQLRDGQILYTYLHLAPDPEQTKGLLASGVTAIAYETVTDDRGGLPLLAPMSEVAGRLSIQAGATALQKANGGRGVLLGGVPGVLPGKVTVLGGGVVGLHAARMAAGLGADVTIIDRSIPRLRQLDDLFAGRVHTRYSTVEALEEECFSADIVVGAVLIPGAAAPKLVTREMLSGMKKGSVLVDVAIDQGGCFETSHATTHAEPTYEVDGVIHYCVANMPGAVPVTSAHALNNATLHYGLQLADKGLKALVDDHHLRNGLNVHKGKITNRAVAEALGYELVEPKAVLAA

SEQ ID NO: 55067 - DNA, 1116 bp, Mesorhizobium loti MAFF303099
  CDS (1)..(1116): transl_table=11
atgcgcgtcggctgccccaaggaaatcaagaaccacgaatatcgcgtcggcctcacgccaggctcggtccgcgaatatgtggcgcacggccacgaagtgctggtcgaggccggcgcaggcgccggcatcggcgccgatgacaacgcctatcgcgccgccggcgccaccatcgccaagaccgccgccgacgtgttcgccaagtcggacatgatcgtcaaggtcaaggagccgcagcccaatgagtgggttcaactgcgcgacggccagatcctgtacacctaccttcatctggctccggatccggaacagaccaagggcctactcgcttcgggcgtcacggcgatcgcctacgaaaccgtcaccgacgatcgcggcggcctgccgctgctcgcaccgatgtcggaagtcgccggccggctgtcgatccaggccggcgccacggcgctgcagaaggccaatggcggccgcggcgtgctgctcggcggcgtgcccggcgtgctgcccggcaaggtcaccgtgctcggcggcggcgtcgtcggcctgcacgcggcccgcatggccgccggccttggcgccgacgtcaccatcatcgaccgctcgatcccgcgactgcgccaactcgacgacctctttgccggccgtgtgcacacccgctactccaccgtcgaagcgctcgaggaagaatgcttctcggccgacatcgtcgtcggcgctgtgctgatccctggcgctgcagcgcccaagctcgtcacccgcgaaatgctgtcgggcatgaagaagggctcggtgctggtcgacgtcgccatcgaccagggcggctgcttcgagacctcgcatgcgacgactcacgccgagccgacctacgaagtcgatggcgtcatccactattgcgtcgctaacatgccaggtgccgtgccggtcacctcggcccacgcccttaacaacgccacgctgcactacggcctgcagctcgccgacaagggcctcaaggcgctggtcgacgaccatcatttgcgcaacggcctcaatgtccacaagggcaagatcaccaaccgcgcggtcgccgaagcgctcggctacgagctggtcgagccgaaagcagttctcgcggcctga

SEQ ID NO: 55068 - protein, 371 aa, Mesorhizobium loti MAFF303099
MRVGCPKEIKNHEYRVGLTPGSVREYVAHGHEVLVEAGAGAGIGADDNAYRAAGATIAKTAADVFAKSDMIVKVKEPQPNEWVQLRDGQILYTYLHLAPDPEQTKGLLASGVTAIAYETVTDDRGGLPLLAPMSEVAGRLSIQAGATALQKANGGRGVLLGGVPGVLPGKVTVLGGGVVGLHAARMAAGLGADVTIIDRSIPRLRQLDDLFAGRVHTRYSTVEALEEECFSADIVVGAVLIPGAAAPKLVTREMLSGMKKGSVLVDVAIDQGGCFETSHATTHAEPTYEVDGVIHYCVANMPGAVPVTSAHALNNATLHYGLQLADKGLKALVDDHHLRNGLNVHKGKITNRAVAEALGYELVEPKAVLAA

SEQ ID NO: 55069 - DNA, 1143 bp, Helicobacter pylori 26695
  CDS (1)..(1143): transl_table=11
atgactattgggctagttaaagaaagcatggatttagaatcccgagtggctttagtgcctgatgatgtggcactaatcgttcaaaagggcgtggaggttttagttcaaaatagcgccggcgctaatagcggttatagcaacgaagcgtatgagagcgttggggctaaaatcgtggattctaaaacggcgtgggggcaggatttggtggtcaaatgcaaagagcctttagagcatgaataccctttgctaaaagaaaaagccacgctgtttagttacttggatttagcgtatcaaaaaagcttgtgcgaaatgtttatagacaaaaaaatcacttctatttgcactgaaaccattgccgggcctaaaaatgattaccctattttagcgcctatgagcgtggtggctgggaggttagccgcgcatttagtccagcattatttactggctttagagcatgttaaggggtttatgggtaagggggtcatgctagggggtttatcgggtgcgcaaagggctaaaattgtcgtagttgggggcggtgtggttggcatggagagcgcgaaagtcttaagccaaatgggggctaaagtaacgattttagaattagactacgctaaattgcaaaaccacccttattatcatttgtatgatttagaagttttaagcgtgaatgaagccaatatcattcaagccttaaacggggcggtgggtctagtgggagcggtgttagttacagcgagccaaacccctaaagtgatcttaagaaagcatttaaaatacatgcaaaaacaaggggtagtcattgatgtggcttgcgatttaggggggtgcatagagaccatacaccagacaagccattctaacccggtgtatgtggaagaggatttgttgcattatggcgtgccgaacatgccagggattgttgctaaaacgagctctacggcttatagccatgcgagcgtgccgtatttgttgtattatttagagcatggcttgaagggttttttaacagccaacactaaaatcgtggcaaacacccttggaggcttgagcgcttataacggctatatcacccaagaaggcatcgctaaagcgttcaatctggcgttcaaatcgcctttagagattttaaaggagctttga

SEQ ID NO: 55070 - protein, 380 aa, Helicobacter pylori 26695
MTIGLVKESMDLESRVALVPDDVALIVQKGVEVLVQNSAGANSGYSNEAYESVGAKIVDSKTAWGQDLVVKCKEPLEHEYPLLKEKATLFSYLDLAYQKSLCEMFIDKKITSICTETIAGPKNDYPILAPMSVVAGRLAAHLVQHYLLALEHVKGFMGKGVMLGGLSGAQRAKIVVVGGGVVGMESAKVLSQMGAKVTILELDYAKLQNHPYYHLYDLEVLSVNEANIIQALNGAVGLVGAVLVTASQTPKVILRKHLKYMQKQGVVIDVACDLGGCIETIHQTSHSNPVYVEEDLLHYGVPNMPGIVAKTSSTAYSHASVPYLLYYLEHGLKGFLTANTKIVANTLGGLSAYNGYITQEGIAKAFNLAFKSPLEILKEL

SEQ ID NO: 55071 - DNA, 1143 bp, Helicobacter pylori J99
  CDS (1)..(1143): transl_table=11
atgactattgggctagttaaagaaagcatggatttagaatctcgagtggctttagtgcctgatgatgtggcgctaatcgctcaaaagggcgtggaggttttagttcaaaatagcgcgggcgcgaatagcggttatagtaacgaagcgtatgaaagcgtgggggctaaaatcgtggattctaaaacggcgtgggggcaggatttggtggtcaaatgcaaagagcctttagagcatgaataccctttgctcaaagaaaaagcgactctgtttagttatttggatttagcgtatcaaaaaagcttgtgtgaaatgtttattaataaaaaaatcacttctatttgcactgaaaccattgccgggcctaaaaacgactaccctattttagcgcctatgagcgtggtggctgggaggttggctgcgcatttagtccagcattatttactggctttagagcatgttaaagggtttatgggtaagggggtcatgctagggggtttgtcgggtgcgcaaagggctaaaatcgtcgtaattggaggcggtgtggttggcatggagagcgcgaaagtcttaagccaaatgggggctaaagtaacgattttagaattagactacgctaaattacaaaaccacccttattatcatttgtatgatttagaagtcttaagcgtgaatgaagccaatatcattcaagccttaaacggggcggtggggctagtgggagcggtgctggttacagcgagccaaacccctaaagtgatcttaagaaggcatttaaaatacatgcaaaaacaaggggtagtcattgatgtggcttgcgatttaggggggtgcatagagaccatacgccagacaagccattctaacccggtgtatgtggaagaagatttgttgcattatggcgtgccgaacatgccagggattgtcgctaaaacgagctctacggcttatagccatgcgagtgtgccgtatttgttgtattatttagagcatggcttgaagggttttttaacagccaacactaaaatcgtggcgaacacgcttggaggcttgagcgcttataacggctatatcacccaagaaggcatcgctaaagcgttcaatctggcgttcaaatcgcctttagaaattttaaaggagctttag

SEQ ID NO: 55072 - protein, 380 aa, Helicobacter pylori J99
MTIGLVKESMDLESRVALVPDDVALIAQKGVEVLVQNSAGANSGYSNEAYESVGAKIVDSKTAWGQDLVVKCKEPLEHEYPLLKEKATLFSYLDLAYQKSLCEMFINKKITSICTETIAGPKNDYPILAPMSVVAGRLAAHLVQHYLLALEHVKGFMGKGVMLGGLSGAQRAKIVVIGGGVVGMESAKVLSQMGAKVTILELDYAKLQNHPYYHLYDLEVLSVNEANIIQALNGAVGLVGAVLVTASQTPKVILRRHLKYMQKQGVVIDVACDLGGCIETIRQTSHSNPVYVEEDLLHYGVPNMPGIVAKTSSTAYSHASVPYLLYYLEHGLKGFLTANTKIVANTLGGLSAYNGYITQEGIAKAFNLAFKSPLEILKEL

SEQ ID NO: 55073 - DNA, 1125 bp, Vibrio cholerae O1 biovar eltor str. N16961
  CDS (1)..(1125): transl_table=11
atgatcattggcgttcctaaagaaatcaagaaccacgaatatcgtgtgggcatgattccagctagcgtgcgggagcttgtctcacacggacaccaagtttacgtagaaacaaatgccggttccggcatcggcttttcagacgatgattacatcgctgtaggcgcatccattcttcctaccgctgcagacgtctttgcgaaagcagagatgattgtaaaggttaaagaacctcaagctatcgagcgagccatgctcaaagaggggcaaattttatttacttatttgcacctagctccagattttccacaaactgaagagctaatcaagagcaaagctgtctgcatagcctatgagactgtaacagataatatgggtcgcttaccactactggcaccgatgtctgaagtcgcaggccgtatgtccattcaggctggcgctcaaaccttagaaaaatcacgtggcggcagtggcttattactcggtggcgttcccggtgttgctcctgcaaaagtcgtagtactcggcggcggtgtagtcggcgctaacgcagcccgtatggctattggcctacgtgccgatgtcactattctagatcgcaacatcgatactctacgtaaactcgatgaagagtttcaaggccgagctaacgtcgtatattccaccgcagatgccatcgaaaaatacgtattagaagcagacttagtgatcggtgccgttcttatccctggtgctgctgcgcctaaactggtcactcagcaacacatcaaacgcatgaaacccggttcagccgtagttgatgtcgcgatcgaccaagggggttgcttcgaaacctctcaccctaccactcacgcagagcccacttatattgttgatgatgtggtgcactactgtgtagccaatatgcccggcgctgtggcgcgcacttctacctttgctcttaataacgccacgctaccatatatcgttaaactcgccaataaaggctaccaaaaagccctactagaagatgcaggatttttaaaaggcctcaacgtaattcacggaaaagtgacttacaaagaggttgcagaaaactttggcctcgattatgtcgaccccgctaaagcgattgcgatgtttaattaa

SEQ ID NO: 55074 - protein, 374 aa, Vibrio cholerae O1 biovar eltor str. N16961
MIIGVPKEIKNHEYRVGMIPASVRELVSHGHQVYVETNAGSGIGFSDDDYIAVGASILPTAADVFAKAEMIVKVKEPQAIERAMLKEGQILFTYLHLAPDFPQTEELIKSKAVCIAYETVTDNMGRLPLLAPMSEVAGRMSIQAGAQTLEKSRGGSGLLLGGVPGVAPAKVVVLGGGVVGANAARMAIGLRADVTILDRNIDTLRKLDEEFQGRANVVYSTADAIEKYVLEADLVIGAVLIPGAAAPKLVTQQHIKRMKPGSAVVDVAIDQGGCFETSHPTTHAEPTYIVDDVVHYCVANMPGAVARTSTFALNNATLPYIVKLANKGYQKALLEDAGFLKGLNVIHGKVTYKEVAENFGLDYVDPAKAIAMFN

SEQ ID NO: 55075 - DNA, 1137 bp, Bacillus halodurans C-125
  CDS (1)..(1137): transl_table=11
atgatcatcggggtaccgaaagagattaaaaataatgagaatcgagtcgcaatgacacctgccagtgtgatgagcttcgttcaagcaggccaccaagtgcttatcgaaagaggtgccggttctggaagtggatttgatgatattgactatggagaagctggggcgacaattgagaacgatgcagcatctgtttgggcaaaagcggatatgatcatgaaagtgaaggagcctctaccacaagagtacggttactttagaaaaggtttactcttatttacgtacttacatttagcagcggagcccgagttagcaaaggcacttgtggaaaatgaagtgacagcgattgcctacgaaaccgttcaagtaggccgaagcttgccgctcttaacaccaatgagtgaagtcgctggccggatggcagcgcaaattggtgctcaatttttggaaaaaccaaaaggcggacgaggcattcttctttctggcgtcccaggagtgacccgcgggaaagtaacgattattggtggaggtgtcgttgggaccaatgctgcaaaggtggcaatgggacttggcgcagatgtaacgatcgttgatctgagccctgaacgtttgcgccaattggatgatttatatggaaccgacattcaaacgcttatgtccaatccgatgaacatcgccgaagcagtagccgcgtcagatttagtcattggggctgtgctcattccgggagcgaaagcaccgaagcttgtaaccgaacaaatggttgaacaaatgaagccaggttctgtcatcgtggatgtagcgattgaccaagggggcatcgttgagactgttgatcggattacaacacacgatgcaccgacctatacgaagcatggcgttgtccattatgctgtagccaacatgccaggggcggttccgcgaacatcaacgattgcacttaccaatgtgacggtaccatatgcattgcagcttgcgaataatggtgttaaacgtgcaattgccgaaaatacagcattggccaaaggggtcaatacggcgaacggatgggtaacatatgaggcagtagctcgagacttaggatatgactatcaatctgtggaaagcgcgttaagcgggctttctgttgaaaatgtataa

SEQ ID NO: 55076 - protein, 378 aa, Bacillus halodurans C-125
MIIGVPKEIKNNENRVAMTPASVMSFVQAGHQVLIERGAGSGSGFDDIDYGEAGATIENDAASVWAKADMIMKVKEPLPQEYGYFRKGLLLFTYLHLAAEPELAKALVENEVTAIAYETVQVGRSLPLLTPMSEVAGRMAAQIGAQFLEKPKGGRGILLSGVPGVTRGKVTIIGGGVVGTNAAKVAMGLGADVTIVDLSPERLRQLDDLYGTDIQTLMSNPMNIAEAVAASDLVIGAVLIPGAKAPKLVTEQMVEQMKPGSVIVDVAIDQGGIVETVDRITTHDAPTYTKHGVVHYAVANMPGAVPRTSTIALTNVTVPYALQLANNGVKRAIAENTALAKGVNTANGWVTYEAVARDLGYDYQSVESALSGLSVENV

SEQ ID NO: 55077 - DNA, 1116 bp, Bacillus halodurans C-125
  CDS (1)..(1116): transl_table=11
atgaaaatcggcgtgccaacggaagtgaagaacaatgaaaatcgagtcgcgatcacacctgctggagtcatgactttaacgcagcatggacatgaggtaatcgtacaaaaaggggcaggagaaggttctggttttacggatgaacaatttgtcatagcaggagcgaagatcgtcgatacggcagacgaagtatggcagatggagatggtcatgaaagtaaaggaaccactccccgaagaatatggtttttttcgtgaaggattgattttgttcacgtatcttcatcttgctcctgaactcaagctaacggatgctcttcttgagaaaaaagtgatcggaatcgcttatgaaaccgtgcagcttgcaaacggggcgctgccgcttttaacaccgatgagcgaggtggctggtcggatggcttcacaaatcggggcacaatttttagagaagacgcaaggtggtaaaggagtcctgctttcgggtcttcccggtgtgaagcgaggaaaggtggccgtcatcggtggaggggtcgtcgggacgaacgctgccaagatcgctgtcggcttaggggcagatgtgaccatattagacttaaatcctgacagactccgtcagcttgacgatttgtttggggagtcgatcaatacgcttatgtcaaatccgcttaacatcgccgaaaccgtcaaagaatcagacctcgttattggcgcagtgctcattccaggggcaaaagcaccgaagcttgtgaccgaagaaatggtggcgtccatgcaaccgggctccgttatcgtcgatgtggcaattgaccaagggggaattgttgcgacatcggatcgtatcaccactcatagtaatccaacctatgagaagcatggtgtgctacattatgctgttgccaacatgccaggagccgttccgcgcacatctacgatcggtttgacgaatgtgacgattccatatgcgcttgccatcgcgaataaagggtacgttcaagcgtgtctggatgacccagcgttacgcaaaggattaaatactttaggtgggtatatcgtatatgaagctgtcgcagcctcacaaaacaaaccgtataaggatgttatggacctacttgcctaa

SEQ ID NO: 55078 - protein, 371 aa, Bacillus halodurans C-125
MKIGVPTEVKNNENRVAITPAGVMTLTQHGHEVIVQKGAGEGSGFTDEQFVIAGAKIVDTADEVWQMEMVMKVKEPLPEEYGFFREGLILFTYLHLAPELKLTDALLEKKVIGIAYETVQLANGALPLLTPMSEVAGRMASQIGAQFLEKTQGGKGVLLSGLPGVKRGKVAVIGGGVVGTNAAKIAVGLGADVTILDLNPDRLRQLDDLFGESINTLMSNPLNIAETVKESDLVIGAVLIPGAKAPKLVTEEMVASMQPGSVIVDVAIDQGGIVATSDRITTHSNPTYEKHGVLHYAVANMPGAVPRTSTIGLTNVTIPYALAIANKGYVQACLDDPALRKGLNTLGGYIVYEAVAASQNKPYKDVMDLLA

SEQ ID NO: 55079 - DNA, 1173 bp, Deinococcus radiodurans R1
  CDS (1)..(1173): transl_table=11
ttgcgcgacttcaaaacgatgatcgcccccgttacagacggcgacgggtgggccgtgaggtggcatatgcacgtaggacttcccaaggaaatcaaggtcaaggaaaaccgggtggcgctcacccccggcggggtagccaccctggtgcggcgcgggcaccgggtgacggtggagcgcggcgcgggtgcgggcagcggcctccccgaccaagagtacgagcaggccggagcgaccctgggcagcgccgccgacgcctggggcgccgagatggtggtcaaggtcaaggagccgatagaaagcgagtacggctacctgcgcgacgacctgctgctgtttacctacctgcacctcgccgccgaccgcccgctgaccgacgcgctgatgcaggccgggacgacggcggtggcctacgaaacggtgcaactgcccgacggcagcctgccgctgctgacccccatgtcggaggtcgccgggcgcctgagcgtgcaggcgggggcctaccacctgcaaaagccggcgggcgggaagggcgtcctgctcggcggcgttcccggcgtgacgcccggtcacgtgaccatcgtgggcggcggcgtggtcggcaccaatgctgcaaaaatggcgatgggcctgggcgccaaagtcaccattctggacgtgtcgcaccggcgcctgacgtatctggacgacgtgtttttcgggcgcctgaccaccatgatgagcagcgaggcaaacctgcgtgcgctgctcccgcagaccgatttgcttatcggcgcggtgctcattccgggggctaaggctccgaacctcgtcacccgcgacatgctggggctgctggaaccgggctcggtcatcgccgacgtcgccattgaccagggcggctgcgtggaaacgatgcaccccaccacccacgacgagccgacctacctggtggacgacatcgttcactacggcgtcgccaacatgcccggcgcggtgccgcgcacctcgactttcgcgctgacgaacgcgacttttccttatgccctcgcgcttgctgagcacggcttaggcgccctcaagcgtgacccggcgctcgctgcgggcctcaacacccatcagggcaaagtgacctgcgcgggtgtggccgacgccttcgggctgagtgggcaggacgtggaggcggtcctggcctga

SEQ ID NO: 55080 - protein, 390 aa, Deinococcus radiodurans R1
MRDFKTMIAPVTDGDGWAVRWHMHVGLPKEIKVKENRVALTPGGVATLVRRGHRVTVERGAGAGSGLPDQEYEQAGATLGSAADAWGAEMVVKVKEPIESEYGYLRDDLLLFTYLHLAADRPLTDALMQAGTTAVAYETVQLPDGSLPLLTPMSEVAGRLSVQAGAYHLQKPAGGKGVLLGGVPGVTPGHVTIVGGGVVGTNAAKMAMGLGAKVTILDVSHRRLTYLDDVFFGRLTTMMSSEANLRALLPQTDLLIGAVLIPGAKAPNLVTRDMLGLLEPGSVIADVAIDQGGCVETMHPTTHDEPTYLVDDIVHYGVANMPGAVPRTSTFALTNATFPYALALAEHGLGALKRDPALAAGLNTHQGKVTCAGVADAFGLSGQDVEAVLA

SEQ ID NO: 55081 - DNA, 1116 bp, Mycobacterium leprae TN
  CDS (1)..(1116): transl_table=11
atgcgagtcggcattccgaccgagaccaaaaacaacgaattcagggtggccatcacgccggccggcgtggccgccctgacacaccgcggccacgaggtgcttgtgcaagcaggcgccggagaaggctcggcaatcgccgacgcggagttcaaggcagcaggagcccaactgatcagcactcccgagcaggtgtggaccgaggtcgacctgctactcaaggtcaaagagcccatgcccgcagagtatgttcacctacgacacggccagatcctgtttacgtatctgcatctagctgcctcacgcccttgcaccgacgcattattggcctccggcacaacgtcaatcgcctacgagaccgtgcagaccgccgacggcgcgctgccgttactagctccaatgagcgaggttgccggacgactgtcggctcaggtaggggcctatcacctaatgcggacccacagggggtgcggggtactgatgggtggagtgcccggcgtcgaacccgctgacgtggtcgtgatcggcggcgggactgcgggatataacgccgctcgaattgccaacggtatgggtgcgaccgtcacggtttttgatgtcaacatcaacagacttcgggagctcgacgcggagttcggtggccgcctccgcacccgctactcgtcggcctacgacctagaaggtgcggtcaagcacgccgacctggtgatcggcgccgtcctggtgccaggcgccaaagccccccgattgatatcgaattcgcttgtcgcacatatgaagccgggtgctgtgttggtcgacatcgccatcgatcagggcggttgtttcgaagattcgcagccgaccacccatgatcaaccgacgttcgcggtgcatgacacgctgttctactgtgtggcaaacatgcctagcgcggtgcccaagacatcgacattcgcgctgaccaatgcaacgatgccatatatactcaaactcgcggaccaaggctggcaggaagcctgccaatcggatcccgctttggcaaaaggtctttcgacgcataacggtgcactgttgtctgaacaggtagccaccgacctgggattggccttcaccgaaccggcaagcgtgctggcctga

SEQ ID NO: 55082 - protein, 371 aa, Mycobacterium leprae TN
MRVGIPTETKNNEFRVAITPAGVAALTHRGHEVLVQAGAGEGSAIADAEFKAAGAQLISTPEQVWTEVDLLLKVKEPMPAEYVHLRHGQILFTYLHLAASRPCTDALLASGTTSIAYETVQTADGALPLLAPMSEVAGRLSAQVGAYHLMRTHRGCGVLMGGVPGVEPADVVVIGGGTAGYNAARIANGMGATVTVFDVNINRLRELDAEFGGRLRTRYSSAYDLEGAVKHADLVIGAVLVPGAKAPRLISNSLVAHMKPGAVLVDIAIDQGGCFEDSQPTTHDQPTFAVHDTLFYCVANMPSAVPKTSTFALTNATMPYILKLADQGWQEACQSDPALAKGLSTHNGALLSEQVATDLGLAFTEPASVLA

SEQ ID NO: 55083 - DNA, 1116 bp, Mycobacterium tuberculosis CDC1551
  CDS (1)..(1116): transl_table=11
atgcgcgtcggtattccgaccgagaccaaaaacaacgaattccgggtggccatcaccccggccggcgtcgcggaactaacccgtcgtggccatgaggtgctcatccaggcaggtgccggagagggctcggctatcaccgacgcggatttcaaggcggcaggcgcgcaactggtcggcaccgccgaccaggtgtgggccgacgctgatttattgctcaaggtcaaagaaccgatagcggcggaatacggccgcctgcgacacgggcagatcttgttcacgttcttgcatttggccgcgtcacgtgcttgcaccgatgcgttgttggattccggcaccacgtcaattgcctacgagaccgtccagacgcccgacggcgcactacccctgcttgccccgatgagcgaagtcgccggtcgactcgccgcccaggttggcgcttaccacctgatgcgaacccaagggggccgcggtgtgctgatgggcggggtgcccggcgtcgaaccggccgacgtcgtggtgatcggcgccggcaccgccggctacaacgcagcccgcatcgccaacggcatgggcgcgaccgttacggttctagacatcaacatcgacaaacttcggcaactcgacgccgagttctgcggccggatccacactcgctactcatcggcctacgagctcgagggtgccgtcaaacgtgccgacctggtgattggggccgtcctggtgccaggcgccaaggcacccaaattagtctcgaattcacttgtcgcgcatatgaaaccaggtgcggtactggtggatatagccatcgaccagggcggctgtttcgaaggctcacgaccgaccacctacgaccacccgacgttcgccgtgcacgacacgctgttttactgcgtggcgaacatgcccgcctcggtgccgaagacgtcgacctacgcgctgaccaacgcgacgatgccgtatgtgctcgagcttgccgaccatggctggcgggcggcgtgccggtcgaatccggcactagccaaaggtctttcgacgcacgaaggggcgttactgtccgaacgggtggccaccgacctgggggtgccgttcaccgagcccgccagcgtgctggcctga

SEQ ID NO: 55084 - protein, 371 aa, Mycobacterium tuberculosis CDC1551
MRVGIPTETKNNEFRVAITPAGVAELTRRGHEVLIQAGAGEGSAITDADFKAAGAQLVGTADQVWADADLLLKVKEPIAAEYGRLRHGQILFTFLHLAASRACTDALLDSGTTSIAYETVQTPDGALPLLAPMSEVAGRLAAQVGAYHLMRTQGGRGVLMGGVPGVEPADVVVIGAGTAGYNAARIANGMGATVTVLDINIDKLRQLDAEFCGRIHTRYSSAYELEGAVKRADLVIGAVLVPGAKAPKLVSNSLVAHMKPGAVLVDIAIDQGGCFEGSRPTTYDHPTFAVHDTLFYCVANMPASVPKTSTYALTNATMPYVLELADHGWRAACRSNPALAKGLSTHEGALLSERVATDLGVPFTEPASVLA

SEQ ID NO: 55085 - DNA, 1119 bp, Sinorhizobium meliloti 1021
  CDS (1)..(1119): transl_table=11
atgcgtgtcggttgcccgaaggaaatcaaaaaccatgaataccgtgtcggccttacgcccggatcagtacgggaatatgtagcccacggccacgaggtcatcgtggaaaccaaggccggggcagggatcggggccgatgacgactcctatcgcgcagccggtgcaaggatcgtaccgacagccagagaagtcttcgaaaaagcggacatgatcgtcaaggtcaaggagccgcaaccgtccgaatgggcgcaactgcgcgaaggccagattctctacacctatcttcacctcgcaccggacccggaacagacccagggacttcttaagtccggcgtcacggcggtcgcctatgagaccgtgacggatgagcgcggcggactgccgctgcttgcgccgatgtccgaggtcgcgggacggcttgcgatccaggctggcgctacctcgctccagaaggcaaatggcggccgcggaatcctgctcggcggggtaccgggggttcttccggccaaggtcgcgatcatcggtggcggcgtcgtcggcctgcatgcagccaagatggctgccggtctcggggccgatgtttctatcctggaccggtcgctgccgcgtctgcgccaactcgacgatatcttcaacggccgtgtccatacgcgctactcgacgatcgatgccttggaagaggaggtcttctccgccgacatggtgatcggagcggtactcattcccggcgctgctgcgccgaagctcgtcacacgcgaaatgctgtccgccatgaaaaaaggcgccgtcattgtcgatgtcgcgatcgaccagggcggctgcttcgagacgtcgcatgcgacgacgcactccgaacctacctatgaggtcgaaggcatcgtgcattattgcgttgcgaacatgccgggggcggtgccgatcacgtcggcgcacgcgctcaacaatgcgacactccaatacggactgcagctcgccgaccgcggcctcaaggcgattgccgaagaccggcatctgcgcgccggcctcaatgtccaccgaggccgcgtcaccaatgccgccgtggccgaagcactcggctacgacgcccacgctcccgaggccgtcctccacgtcgcctga

SEQ ID NO: 55086 - protein, 372 aa, Sinorhizobium meliloti 1021
MRVGCPKEIKNHEYRVGLTPGSVREYVAHGHEVIVETKAGAGIGADDDSYRAAGARIVPTAREVFEKADMIVKVKEPQPSEWAQLREGQILYTYLHLAPDPEQTQGLLKSGVTAVAYETVTDERGGLPLLAPMSEVAGRLAIQAGATSLQKANGGRGILLGGVPGVLPAKVAIIGGGVVGLHAAKMAAGLGADVSILDRSLPRLRQLDDIFNGRVHTRYSTIDALEEEVFSADMVIGAVLIPGAAAPKLVTREMLSAMKKGAVIVDVAIDQGGCFETSHATTHSEPTYEVEGIVHYCVANMPGAVPITSAHALNNATLQYGLQLADRGLKAIAEDRHLRAGLNVHRGRVTNAAVAEALGYDAHAPEAVLHVA

SEQ ID NO: 55087 - DNA, 1113 bp, Caulobacter crescentus CB15
  CDS (1)..(1113): transl_table=11
atgcgcgttggcgtcccttccgagatcaaaccgggcgaacaccgggtcggacttacccccaccgccgtccgtgaatatgtcggccacggccacaccgtcatcgtccagtcgggcgcgggcctcggcgccggctatgccgacgacgtctacgtcaaggcgggcgcgagcatcgtcgccgacgccgacgcggtgttcgccggcgcggacatgatcgtgaaggtcaaggagccgcagaaggtcgagtgggaaaagctggagccgcgccacatcctcttcacctatctgcacctggcgcccgatccggcccagaccgaaggcctgctcaagagcggctgcgcggccatcgcctatgaaaccgtgaccgacgccaagggcggcctgccgctgctggccccgatgtcggaagtggccggccgcatcgccgtgttctcggcggccgagacgttgctcaagcacaatggcggcatgggcctgctgctcagcggcgtgcccggcgtgcccccggcccgcgtcgccgtgctgggcggcggcgtggtcggcagcaacgccgcgcgcatggccgcgggcctgggcgccgaggtcgtggtgctggaacgctcgatcccgcgcatgcgcgaactggacgatctctaccagggccggatcctgacccgctactcgaccttcggggcggtggaagaagagatcctcaaggccgacgtcgtgatcggcgcggtgctgaccgccggtgcggccgcgcccaagctggtgcgtcgcgagcacctcaagcagatgaagccgggctcggtgctggtcgacgtctcgatcgaccagggcggctgctttgagaccagcaagccgaccacccacgcccagccgacctacacggtcgacggcgtcgtccactactgcgtggccaacatgccgggcgcggcgccgcgcacctcgtccgaagcgctgggcaacgccaccctgcccttcggcctggccctggccgacaagggtctcgacgccctgaaggccaacgcccacctggcccggggcctcaacgtcctgaacggcgaactgacccacccggccgtggccgaggctttgggcaagacctcgatcgatccctacggcgcctggaagtag

SEQ ID NO: 55088 - protein, 370 aa, Caulobacter crescentus CB15
MRVGVPSEIKPGEHRVGLTPTAVREYVGHGHTVIVQSGAGLGAGYADDVYVKAGASIVADADAVFAGADMIVKVKEPQKVEWEKLEPRHILFTYLHLAPDPAQTEGLLKSGCAAIAYETVTDAKGGLPLLAPMSEVAGRIAVFSAAETLLKHNGGMGLLLSGVPGVPPARVAVLGGGVVGSNAARMAAGLGAEVVVLERSIPRMRELDDLYQGRILTRYSTFGAVEEEILKADVVIGAVLTAGAAAPKLVRREHLKQMKPGSVLVDVSIDQGGCFETSKPTTHAQPTYTVDGVVHYCVANMPGAAPRTSSEALGNATLPFGLALADKGLDALKANAHLARGLNVLNGELTHPAVAEALGKTSIDPYGAWK

SEQ ID NO: 55089 - DNA, 1113 bp, Listeria monocytogenes EGD-e
  CDS (1)..(1113): transl_table=11
atgttagtcggcgtaccaaaagaaataaaaaataacgagaatagggtggcaatgaccccggcaagtgttttttcttacgtgaatgcaggacatactgtatacgtggaaaaagatgcgggtattggctctaattatcaagacgctgattttgtgcaagcgggagcaaaaattgtagagacagctaaagaagcttgggatgtagatatggttgtaaaagtaaaagaaccgattgcatcagagtatacatattttaaagaagggttactacttttcacttatttacatttggcaaatgaaccaacgcttgcgaaagctttgatggagagtaaagtaaatagtgtggcttatgaaacagtagaactagcagaccatacgttgccactactttcaccaatgagtgaagttgcaggacgaatggcggctcagattggtgcacaatttttacaaagaacgaatggtggtatgggtgtcttgctaggtggtgtacctggtgtagagagaagtgaagtggttatcattggtggtggaatcgctggaacaaatgcagccaaaattgcagctggtttaggtgccaatgtgaccatcctagatatgaatctgaaacgattgcgtgagctggatgatatttttggtaatcaagtccaaacgttaatgtcgaatgattttaatattgaaacagctgtgaaaaaagctgatttggttattggagcagtattaattccaggagcaaaagcaccgaaactcgtcaaagagcatgtggtcaaacaaatgattccaggttctgtccttgtggatattgcgattgaccaaggtgggatttttgaaactacagatcatgtttccacgcacgacaatccaacctatgaaaaatatggtgtgcttcattatgctgttgcaaatatgccaggagcagtaccgcggacgtccactttggcgctcactaacgcaactttaccatttggcttgaaactggctaatcaaggcttagaagcagcagtgcaaaatgacccattcttacttcgtgggttaaatacttatcaagggcatattacgtataaagctgttgcagattctctcgatttaccttatacggacagcaaagaattaatttaa

SEQ ID NO: 55090 - protein, 370 aa, Listeria monocytogenes EGD-e
MLVGVPKEIKNNENRVAMTPASVFSYVNAGHTVYVEKDAGIGSNYQDADFVQAGAKIVETAKEAWDVDMVVKVKEPIASEYTYFKEGLLLFTYLHLANEPTLAKALMESKVNSVAYETVELADHTLPLLSPMSEVAGRMAAQIGAQFLQRTNGGMGVLLGGVPGVERSEVVIIGGGIAGTNAAKIAAGLGANVTILDMNLKRLRELDDIFGNQVQTLMSNDFNIETAVKKADLVIGAVLIPGAKAPKLVKEHVVKQMIPGSVLVDIAIDQGGIFETTDHVSTHDNPTYEKYGVLHYAVANMPGAVPRTSTLALTNATLPFGLKLANQGLEAAVQNDPFLLRGLNTYQGHITYKAVADSLDLPYTDSKELI

SEQ ID NO: 55091 - DNA, 1113 bp, Listeria innocua Clip11262
  CDS (1)..(1113): transl_table=11
atgttgatcggcgtaccaaaagagataaaaaataatgagaatagggtggcaatgactccggcaagtgttttttcctatgtaaacgcagggcatactgtatacgtggaaaaaggcgcgggaagtggctctaattatcaagacgctgattttgtgcaagcgggggcaacaattgtcgaaacagcaaaagaagcttgggacgtagatatggttgtaaaagtaaaagaacccattgcatccgagtatacatattttaaagaaggcttattacttttcacatatttacatttagcgaatgaaccaactcttgcgaaagctttgctagagagtaaagtaaacagtgtggcttatgaaacagtagaacttgctgatcatacactaccactactttctccgatgagtgaagttgcaggaagaatggcggctcagattggcgcacaatttttacaaagaacaaatggcggcatgggcgtgttgcttggtggtgttcctggcgttgaaaaaagtgaagtcgttattattggcggcggaatcgctggaacaaatgcagcaaaaattgccgtaggtcttggcgctaatgttacaatactagatatgaatttaaaacgacttcgccaattggatgacattttcggcaaccaagtacaaactttaatgtcgaatgattttaatattgaattagctgtcaaaaaagcggatttagttataggagcagtattaatcccaggcgcaaaagcaccaaaattagttaaggaacatgttattaaacagatgattcctggctcggttcttgttgatattgcaattgatcaaggcggaatttttgaaactaccgaccatgtttccacacatgatgatccaacatatgaaaaatatggagtgcttcattatgcagttgctaacatgccaggagcagttccgcggacatctacgctagcgctaacaaatgcaacattaccgtttggattaaaacttgcaaatgatggattagaagaggctgtgaaaaaagatccttacttgctacgtggtttaaatacgtatcaaggtcacattacgtataaagccgtttctgattctctcgacttaccatatacaaatagtgcagaattaatttaa

SEQ ID NO: 55092 - protein, 370 aa, Listeria innocua Clip11262
MLIGVPKEIKNNENRVAMTPASVFSYVNAGHTVYVEKGAGSGSNYQDADFVQAGATIVETAKEAWDVDMVVKVKEPIASEYTYFKEGLLLFTYLHLANEPTLAKALLESKVNSVAYETVELADHTLPLLSPMSEVAGRMAAQIGAQFLQRTNGGMGVLLGGVPGVEKSEVVIIGGGIAGTNAAKIAVGLGANVTILDMNLKRLRQLDDIFGNQVQTLMSNDFNIELAVKKADLVIGAVLIPGAKAPKLVKEHVIKQMIPGSVLVDIAIDQGGIFETTDHVSTHDDPTYEKYGVLHYAVANMPGAVPRTSTLALTNATLPFGLKLANDGLEEAVKKDPYLLRGLNTYQGHITYKAVSDSLDLPYTNSAELI

SEQ ID NO: 55093 - DNA, 1092 bp, Nostoc sp. PCC 7120
  CDS (1)..(1092): transl_table=11
atggaaatcggcgttcctaaagaaactaaagatcaagaatttcgtgtggggttaagtcctgctagcgtgcgggtgttgaaggaaaatggtcatagtatatttgttcagactcaagctggtagtggtgctgggtttacagatgatgattatcgcagtgtaggggcggatattgtcccaacagcagaggcagtttggagtcgagagttagtagtcaaagttaaagaaccactgacgagtgagtacaactttttacagaaagggcagatattgtttacttatctgcatttagcagccgatcgcaaattaacagagcatttaattgattgtggcatttgtgcgatcgcttacgaaaccgtagaacaaccaggcgctaacagactaccactactgacccccatgagcattattgccggtcggttagcagtacaatttggcgcacgctatttagaacgccaacaaggtggtagaggtgtactgctgggtggtgttcctggagttaaaccaggaaaagtagttattctcggtggcggtgtagttggtacagaagctgccagaattgccgtaggtatgggtgcaaccgtacaaatattagatgtaaatgttgaacgtttatcttatttagaaactttgtttggttctagagtggaattactttacagcagttctgcccatatcgaagccgcagttaaagaagcagatttacttgttggtgctgttttggtactaggacgcagagcgccaattctagtatctcgtgaattagttaaacaaatgcacccaggttcggtaatagttgatgtggctgtagatcaaggtggttgtgtggaaaccttacacgccacatcccacaccaacccaacataccttgaagagggcgtagtacattacggcgttcccaatatgccaggtgcagtaccttggacagccactcaagctcttaacaacagtacattgccttacgttgtgcagttggcaaatcaaggactcaaagcgttggaagtgaatcaagtactcgccaagggtttgaatgtgcagaatcatcgccttgtacacccggctgtacaagaggtttttcctgatttagtccattga

SEQ ID NO: 55094 - protein, 363 aa, Nostoc sp. PCC 7120
MEIGVPKETKDQEFRVGLSPASVRVLKENGHSIFVQTQAGSGAGFTDDDYRSVGADIVPTAEAVWSRELVVKVKEPLTSEYNFLQKGQILFTYLHLAADRKLTEHLIDCGICAIAYETVEQPGANRLPLLTPMSIIAGRLAVQFGARYLERQQGGRGVLLGGVPGVKPGKVVILGGGVVGTEAARIAVGMGATVQILDVNVERLSYLETLFGSRVELLYSSSAHIEAAVKEADLLVGAVLVLGRRAPILVSRELVKQMHPGSVIVDVAVDQGGCVETLHATSHTNPTYLEEGVVHYGVPNMPGAVPWTATQALNNSTLPYVVQLANQGLKALEVNQVLAKGLNVQNHRLVHPAVQEVFPDLVH

SEQ ID NO: 55095 - DNA, 1125 bp, Thermoanaerobacter tengcongensis MB4
  CDS (1)..(1125): transl_table=11
atgagaattggtgttcccaaagaaataaaaactgcagagtcccgtgtagccataacgcctgcaggagtagaggcttttgtcaagaatggacatgaagtgtacattgaaaaggacgcaggattaggtagcggtatcacaaatgaggaatatgaaaaggcaggggcaaaaatacttccaactgccaaagaagtgtacgacatagctgacatgataatgaaggtaaaagagccacagccaagcgaatacgactacttaaaagagggacaagttttatttacttatctacatttagcacccgataaacagcagacagaagctttattaagacagaaagtagtaggaatcgcctatgagacggtacagcttgacaacggttctttgcctttgttaacacccatgagcgaagttgctggtagaatggctgtcaccataggagcttaccttttgactagcataaatcaaggcagaggtattgtgatgggcggggttcctggagtagagccagcagaagtagtcataataggcggcggaacagtgggcaccaatgcggcaaaggtagcagttggcatgggagcaagagttactatactggatgtaaatcctgcaaggcttgcctaccttgacgacatatttggaggaagagtgacaactctaatgtcaaatagctttaatattgcagaaagcgtaaagaaggcagacttattgataggtgctgttcttataccaggggctcgagcgcctaagcttgtaactgaagaaatggtcaagacaatgaagaagggcgctgtaattgtggatgtagcaatagaccagggtggatgcgtagaaacatgtgacagaactacttcccacacagatccatatttcatcaagcacggagttgttcactactcagttcctaatataccaggagctgtaccaaggacttcaacctttgctctcacgaatgtcacacttccttacgcattagaaattgctaacaagggctacaagagggcgttgcttgaaaatagagcacttctaaaagggctcaatgtctacaaaggcatggtgacatacaaacctgtggcagaagcgcaaggattagagtatgtggatcccgttgaagctttgaataaagcgtaa

SEQ ID NO: 55096 - protein, 374 aa, Thermoanaerobacter tengcongensis MB4
MRIGVPKEIKTAESRVAITPAGVEAFVKNGHEVYIEKDAGLGSGITNEEYEKAGAKILPTAKEVYDIADMIMKVKEPQPSEYDYLKEGQVLFTYLHLAPDKQQTEALLRQKVVGIAYETVQLDNGSLPLLTPMSEVAGRMAVTIGAYLLTSINQGRGIVMGGVPGVEPAEVVIIGGGTVGTNAAKVAVGMGARVTILDVNPARLAYLDDIFGGRVTTLMSNSFNIAESVKKADLLIGAVLIPGARAPKLVTEEMVKTMKKGAVIVDVAIDQGGCVETCDRTTSHTDPYFIKHGVVHYSVPNIPGAVPRTSTFALTNVTLPYALEIANKGYKRALLENRALLKGLNVYKGMVTYKPVAEAQGLEYVDPVEALNKA

SEQ ID NO: 55097 - DNA, 1116 bp, Streptomyces coelicolor A3(2)
  CDS (1)..(1116): transl_table=11
gtgaaggtcggcatcccccgcgaggtcaagaacaacgagttccgggtggccatcacccccgccggcgtgcacgagctggtgcgccacggtcaccaggtcgtcgtcgagcgcaacgccggcgtcggctcctcgatccccgacgaggagtacgtcacggccggtgcgcggatcctcgacaccgccgacgaggtctgggccaccgcggacctgctcctgaaggtcaaggagccgatcgcggaggagtaccaccgcctgcgcaaggaccagacgctcttcacctacctgcacctggccgcctccaaggagtgcacggacgcgctcatcgagtcccgcaccaccgccatcgcgtacgagacggtcgagctgcccagccgcgcgctgccgctgctggccccgatgtccgaggtcgcgggccgcctcgccccccaggtcggcgcctaccacctgatggccgccaacggcgggcgcggtgtgctgcccggcggtgtccccggtgtgctcgcgggccgcgccgtcgtcatcggcggcggtgtctccggctggaacgcggcgcagatcgccatcggcctgggcttccacgtcaccctgctcgacaaggacatcaccaagctcagggaagccgacaagatcttcggcacgaagatccagaccgtcgtctccaacgccttcgagctggagaaggcctgcctggaggccgacctcgtgatcggcgccgtgctcatcccgggcgccaaggcaccgaagctggtcaccaacgagctggtgtcccggatgaagcccggaagtgtccttgtcgacatcgcgatcgaccagggcggctgcttcgaggactcccacccgaccacccacgccgagccgaccttcccggtccacaactcggtcttctactgcgtcgccaacatgcccggcgcggtgcccaacacctccacctacgcgctgaccaacgccacgctgccgtacatcgtggagctggccgaccgcggctgggccgaggcgctgcgccgcgaccccgcgctggccaagggtctcaacacccatgacggcaaggtcgtttaccgggaggtcgccgaggcacacggcctggagcacgtggagctcgcctcgctgctcgcctaa

SEQ ID NO: 55098 - protein, 371 aa, Streptomyces coelicolor A3(2)
MKVGIPREVKNNEFRVAITPAGVHELVRHGHQVVVERNAGVGSSIPDEEYVTAGARILDTADEVWATADLLLKVKEPIAEEYHRLRKDQTLFTYLHLAASKECTDALIESRTTAIAYETVELPSRALPLLAPMSEVAGRLAPQVGAYHLMAANGGRGVLPGGVPGVLAGRAVVIGGGVSGWNAAQIAIGLGFHVTLLDKDITKLREADKIFGTKIQTVVSNAFELEKACLEADLVIGAVLIPGAKAPKLVTNELVSRMKPGSVLVDIAIDQGGCFEDSHPTTHAEPTFPVHNSVFYCVANMPGAVPNTSTYALTNATLPYIVELADRGWAEALRRDPALAKGLNTHDGKVVYREVAEAHGLEHVELASLLA

SEQ ID NO: 55099 - DNA, 1134 bp, Chlorobium tepidum TLS
  CDS (1)..(1134): transl_table=11
atgagcgtctccatcgccattccaaaagagcgtgcccaggacgaacggcgcgttgccatttcgccggctggagtgcagatactggtcgaacagggtatccgggtggtggtagaaagcaacgcgggctgcttctgcaatttccatgatcaggattatgccgaagccggtgcgatcatcgtcacctcacctgaggaactgtacccgcaggccaacgtcatcgtcaaggtctcgcctccgcaacccgaagagctgcaactccttttacccggccagatgctcatctcggcggtgcatctcggcaccgtcagccgccagatgctcaagacgctgatcgacaagaacatcaccgcgctcggcttcgagttcatcgaaacgagggatggcgagctgcccatcgtcagaacgctgagcgaaatcgccggatcgctggccatccagacggcggcgaaatacctcgaaaccggctatggcggcagcggtattctgcttggcggcatcgcgggcgtaccacccgcacacgtcacgatcatcggcgcgggcacggtcggcctgttcgccgcgcaggacgcgctcggcctgggagcgcaggtaacggtcatcgacaaggagatcaaccggctgcggcgattcgaagcgttcttcaaccgacacctggtgacggccatcgccaacgaacactacatttcgcagctcgcgaaaatgtccgatgtgatgatcggcgcgctcagccccaagctgaaactgaacaaaccgctggtgagcgagcaggtggtcaaaaccatgaaacccgggtcggtgatcatcgacgtttcgatcgaccagggagcctgtttcgccaccagccgtcacacaacgcacaccaacccgatttacgtcaagtacggtgtaacgcactactgcgtaccaaacatcccgtcggcagtagccaaaactgccacgttcgcgctgaccaacacgcttctgccattcctgctgaagctgaacgcgcaccagaccattccggaaattctctggaacagccacagcctgcgcaagggcacctacctttacaaaggctacatcaccaagaaaatcctcgccgaactcaccgatcttcctttccgcgaaatcgacatgctgctcgcgactgcataa

SEQ ID NO: 55100 - protein, 377 aa, Chlorobium tepidum TLS
MSVSIAIPKERAQDERRVAISPAGVQILVEQGIRVVVESNAGCFCNFHDQDYAEAGAIIVTSPEELYPQANVIVKVSPPQPEELQLLLPGQMLISAVHLGTVSRQMLKTLIDKNITALGFEFIETRDGELPIVRTLSEIAGSLAIQTAAKYLETGYGGSGILLGGIAGVPPAHVTIIGAGTVGLFAAQDALGLGAQVTVIDKEINRLRRFEAFFNRHLVTAIANEHYISQLAKMSDVMIGALSPKLKLNKPLVSEQVVKTMKPGSVIIDVSIDQGACFATSRHTTHTNPIYVKYGVTHYCVPNIPSAVAKTATFALTNTLLPFLLKLNAHQTIPEILWNSHSLRKGTYLYKGYITKKILAELTDLPFREIDMLLATA

SEQ ID NO: 55101 - DNA, 1143 bp, Chlorobium tepidum TLS
  CDS (1)..(1143): transl_table=11
ttgaaaagagaggcggagaatcctaatcatttttctgccatgaatataggaattccaagggaaatcaagattcgcgagaccagggtggcctgcactcccgcgggcgtgcggcagctcgtcggtgcggggcatcgcgtggttgtcgagcgcggcgcgggcgaggcgagcgggttcagcgacgagaagtaccggttggccggagcggtgctcgcttcctcggctgaggaggtctggaagagcgagctggtcgtcaaggtgaaagagccgctggcggaggagtatcgctttttccggaaagagctggtcatcttcacctatctgcatctggccggagtgccgggtcttgccaaagcgcttgtggattcaggcgttaccgccattggttatgagaccgtcgaggtcggcgggcgtttgccgctgctcgcgccgatgagcgaggtcgccggaaagatgagcgtgctcatgggcggatactatctctcgaagcacaacggcggcgaaggaaagctgctgtgcggcgtgccgggtgtgctgcccggcagggtgctcgtgcttggcggaggcgtcgccggcatgagcgccgcacggattgctgcaggacttggcgcggaggtgacggtcatggagaccaaccacgaccggatgcgtgagctggaagcccagcttcccgccgaagtgcatacgatctactcgaacgagcagcatctcgaagagctgttaccgggaaccgacctgttgatcggtgcggtgctgcttcccggcgcgactgcgccgaagctcgtcacacgcggcatggtgcaatcgatgaagcccggtgcggtgatcgtcgatatcgccatcgaccagggtggctgcgtcgagacctcgcgcccgacctcgcacgtcgatccggttttcatcgaagagggcgttgtccattattgcgtgaccaacatgcctgccgcctatcccgccacctcgaccgaggcgctgaccggcgtgacgctgccctacgtccggcggctcgccgacctcgggctggagagcgcgatggtggtgatgcccggtctcgcgggcgggttgaatgtctggaacggcaaaatcacccaagaagcggtagcccgctcgcttggaatggcgtgtggggagaatccgttcgcgtga

SEQ ID NO: 55102 - protein, 380 aa, Chlorobium tepidum TLS
MKREAENPNHFSAMNIGIPREIKIRETRVACTPAGVRQLVGAGHRVVVERGAGEASGFSDEKYRLAGAVLASSAEEVWKSELVVKVKEPLAEEYRFFRKELVIFTYLHLAGVPGLAKALVDSGVTAIGYETVEVGGRLPLLAPMSEVAGKMSVLMGGYYLSKHNGGEGKLLCGVPGVLPGRVLVLGGGVAGMSAARIAAGLGAEVTVMETNHDRMRELEAQLPAEVHTIYSNEQHLEELLPGTDLLIGAVLLPGATAPKLVTRGMVQSMKPGAVIVDIAIDQGGCVETSRPTSHVDPVFIEEGVVHYCVTNMPAAYPATSTEALTGVTLPYVRRLADLGLESAMVVMPGLAGGLNVWNGKITQEAVARSLGMACGENPFA

SEQ ID NO: 55103 - DNA, 1092 bp, Thermosynechococcus elongatus BP-1
  CDS (1)..(1092): transl_table=11
atgcgcattggtgtccctaaggaaattaaggatcaagaattccgcgtcggtctaacgccagcaggcgtgcaaagtctgcgggagcgcggccatgaagttctcattgaaagtggcgccggagtggggtcaggcttcctcgatgaggcctatgttgccgcaggtgcccaaattgtgcctacggctcaagccgcttgggatgcccaactggtggtcaaggtcaaggaacccttgccctcggagtatcgctatttgcgttctggccaattcctctttacctacttgcaccttgccgccagtcgcgagctaacggtggcgcttctggaatcggggacaaccgcgatcgcctacgaaagtgtggaagaaacgcaccatgaccaacgcagcttcccgctgctaacccccatgagcatgattgccggtcgcttggcggtgcagtttggtgctcgcttcctagagcgtacccaaggggggcggggggtcctcctcagtggtgttccgggggtgcggccggggcgagtggtcattttggggggcggtgtcgtcggcacagaagctgcccgcatggcggtaggcttgggagcacaggtgagcattctcgatatcaatatcgagcgcctcaaatacctagaaaccctctttggcgcacgggtagagtacctctacagcagctctcacgtgattgctgagcggttgcccgaagcggacttagtgattggtgccgttctggtgccgggtcggcgtcctccctgtttggtacccaagtcccttgtgcaaaggatgcagcccggagccgtcattattgatgtggcagtggatcaggggggctgtgtggaaacactgcgacccaccacccattccaaccccacctataccgcctttggtgtcgtgcactatggcgtgcccaatatgccgggggcggtgccttggacagcgacccaagccctgacaaatagcaccttgccctatatcctttgcctcgccgatcatggcgatcgcgccctcgagatctcccctgcccttgccaagggcttagtggtcaagcagcaccatttagtccatcccgatgtgcgggttgtctttcctgatctgtag

SEQ ID NO: 55104 - protein, 363 aa, Thermosynechococcus elongatus BP-1
MRIGVPKEIKDQEFRVGLTPAGVQSLRERGHEVLIESGAGVGSGFLDEAYVAAGAQIVPTAQAAWDAQLVVKVKEPLPSEYRYLRSGQFLFTYLHLAASRELTVALLESGTTAIAYESVEETHHDQRSFPLLTPMSMIAGRLAVQFGARFLERTQGGRGVLLSGVPGVRPGRVVILGGGVVGTEAARMAVGLGAQVSILDINIERLKYLETLFGARVEYLYSSSHVIAERLPEADLVIGAVLVPGRRPPCLVPKSLVQRMQPGAVIIDVAVDQGGCVETLRPTTHSNPTYTAFGVVHYGVPNMPGAVPWTATQALTNSTLPYILCLADHGDRALEISPALAKGLVVKQHHLVHPDVRVVFPDL

SEQ ID NO: 55105 - DNA, 1116 bp, Oceanobacillus iheyensis HTE831
  CDS (1)..(1116): transl_table=11
atgaaaattggtattcctaaagagattatgaataatgaaaatcgagtggcgattgccccttcaggtgttatgtcattaaaagatgcaggacatgagatttatgtgcagactgaagctggacttggttcgaattttactgatgaacaatatatacaagctggagcaataattgtttcgacggcacaagaagcatggtcaaaagaaatgattatgaaagtaaaagagcctctacaggaagaatttatgtattttaaagaaggacaaattttatttacgtatcttcatctggctaatgaaccagaggtaacgaaagctttaattgagaaaaaagtaattggaattgcatatgaaacagtacaactgcaaaatcgatccctaccattgctaacaccgatgagtgaggtagcagggcgtatggctacacaagtaggtgcacaattcttggaaaaacctaagggcggcaaaggcattattctttcgagcataccaggtgtgaaaagaggaaaagtaacgatcataggtggaggggtagttggaacaaatgctgcgaaaatagcaattggattaggagctgatgtaacaattattgatctgaatccggagaggctacgtcaattagatgatatatttggtagctccattaatacacttatgtctaactcactaaatataggagaagcagtaaaagagtctgatttggttataggttctgtactaatccctggtgcaaaagctcctaagttagtaagcgaaaaaatggtagagagtatgactgaaggatcagtaatagtggatgtcgctattgatcaaggtgggaattttgagacaagtgatcgaattacttcccatgatgctccaacttatacaaagcatggagttctccattatacagttgcaaacatgccgggagctgtccctcgtacatctacaattgggttaacaaatgttacagttccttatgctttacaattggcaaataaaggttacaaacgagcttgcctagaaaatgaagctttgttaagaggtattaacacattaaacggatttgtaacttataaagctgtagcagatgcccatcaattggagtatcgtgatgtaattagcattattggctag

SEQ ID NO: 55106 - protein, 371 aa, Oceanobacillus iheyensis HTE831
MKIGIPKEIMNNENRVAIAPSGVMSLKDAGHEIYVQTEAGLGSNFTDEQYIQAGAIIVSTAQEAWSKEMIMKVKEPLQEEFMYFKEGQILFTYLHLANEPEVTKALIEKKVIGIAYETVQLQNRSLPLLTPMSEVAGRMATQVGAQFLEKPKGGKGIILSSIPGVKRGKVTIIGGGVVGTNAAKIAIGLGADVTIIDLNPERLRQLDDIFGSSINTLMSNSLNIGEAVKESDLVIGSVLIPGAKAPKLVSEKMVESMTEGSVIVDVAIDQGGNFETSDRITSHDAPTYTKHGVLHYTVANMPGAVPRTSTIGLTNVTVPYALQLANKGYKRACLENEALLRGINTLNGFVTYKAVADAHQLEYRDVISIIG

SEQ ID NO: 55107 - DNA, 1113 bp, Bradyrhizobium japonicum USDA 110
  CDS (1)..(1113): transl_table=11
atgaaggtcggagttccaaaggaaatcaaggcgcacgaatatcgcgtgggccttaccccaggagctgcccgtgaatacgtggcagcgggccaccgcgtgatgatcgagaccaatgccggcgctggcattggtgcaaccgatggcgattatcgcaatgccggcgcaacgatcttaacttcggcagctgaggtattcgcatcgagcgagatgatcgtaaaggtcaaggagcctcagccggccgaatggtcccagctgcgtgaggatcaaatcctgttcacctatttgcacttggccccggacccggaacaggctgccggcctcttgaaatctggatgcattgcaatcgcctatgagaccgtaactgatgctcatggtggtcttccactgctggcgccgatgagcgaggtcgcgggcaggctttcgatcgaagcggcgggtagcgctctaaagcggagtacaggggggcgagggctgctgatcggtggggtgcccggggttcagcctgcccgaatcgtggtgattggaggtggggtcgtcggtacgcacgccgcgcgcatggcggctggtctgggcgcagaggtgaccatcatcgatcgttcgatcatccggctccgtgagctggacgagctattcgaaggacgggttcgcactaggttttcgaccatcgaatccgtggaggaagaggtatttgcggcggacgtggtgattggtgcggtgctcgtcccaggggcaagcgctccgaagctggtccgccggagcatgctgagctcaatgcgcaagagagccgtactcgtggacgtcgctatcgatcagggcggctgctttgagacatcgcgcccaaccactcacgctgatccaacatacgaagtagatggcatcattcattattgtgtggccaatatgccgggtgccgtgccgctaacctcgagccaggcactgaataacgcgaccctgccgtttggtttggctctggccaacaagggtttttccgccgtactcgagaatccacatctgcgcgcaggcctcaacgtccatcggggccggctaacatacaaggcggtggccgagagcctcgggctgcccttctccccgatcgaacaggctgcggcctga

SEQ ID NO: 55108 - protein, 370 aa, Bradyrhizobium japonicum USDA 110
MKVGVPKEIKAHEYRVGLTPGAAREYVAAGHRVMIETNAGAGIGATDGDYRNAGATILTSAAEVFASSEMIVKVKEPQPAEWSQLREDQILFTYLHLAPDPEQAAGLLKSGCIAIAYETVTDAHGGLPLLAPMSEVAGRLSIEAAGSALKRSTGGRGLLIGGVPGVQPARIVVIGGGVVGTHAARMAAGLGAEVTIIDRSIIRLRELDELFEGRVRTRFSTIESVEEEVFAADVVIGAVLVPGASAPKLVRRSMLSSMRKRAVLVDVAIDQGGCFETSRPTTHADPTYEVDGIIHYCVANMPGAVPLTSSQALNNATLPFGLALANKGFSAVLENPHLRAGLNVHRGRLTYKAVAESLGLPFSPIEQAAA

SEQ ID NO: 55109 - DNA, 1116 bp, Bradyrhizobium japonicum USDA 110
  CDS (1)..(1116): transl_table=11
atgcgtgtcggtgtgcccaaggagatcaaggtgcaggaatatcgcgtcgggctcaccccgggcgcggtccgtgaatatgtcgcggccgggcatcaggtgacggtcgagaccggcgccggcagcggcatcggtgcctccgacgaggtctatcggcgggcaggggcggagatcgccggaagcgcccgcgacgtcttcgccagctccgacatgatcgtgaaggtgaaggagccgcagaagagcgaatggacccagcttcgcgaaagccagatcctgtttacttacctccatcttgcaccggaccccgaacaggccaagggcttgctcgcctccggctgtacggcgatcgcctatgaaaccgtcaccgacgcggccggtcgcctccccctgcttgcgccgatgagcgaagtcgccggccgcctcgccatcgaggccgctggcgccgcgctcaagcggtcggccggcggtcgcgggcttttgctgggcggcgtgcccggcgtgcagccggcgcgggtcgtcgtgctcggcggcggcgtggtgggaacacaggccgcgcgcatggccgcgggccttggcgcggaggtcacggtgatcgatcgctcgattccccggctgcgcgagctggatgatgtctttctcggacgggtgcgcacccggttttcaaccatcgaggcggtcgaggaggaggtctttgccgccgacgtcgtgatcggtgcggtgctggtgccgggcgcgagcgcgccgaaactcgtcacgcgcgcgatgctgaaatcgatgcggccgggcgcggtgctggtcgacgtcgccatcgaccagggcggttgcttcgagacctctcatgcgaccacgcacacggacccgacctacgaggtcgacggcgtcgtgcattattgcgtcgccaacatgccgggtgcggtgcctgtcacgtcgagccaggcgctgaacaatgcgacgctgccgttcggcctgatgctcgcgaacaagggttttgcggcggtgctggagaacccgcatttgcgcaacggcctgaatgtccaccgtggccgcatcaccaacaaggcggtcgcggaaagcctcgggctggagttcgctccggtggagaccgggctcgcggcgtag

SEQ ID NO: 55110 - protein, 371 aa, Bradyrhizobium japonicum USDA 110
MRVGVPKEIKVQEYRVGLTPGAVREYVAAGHQVTVETGAGSGIGASDEVYRRAGAEIAGSARDVFASSDMIVKVKEPQKSEWTQLRESQILFTYLHLAPDPEQAKGLLASGCTAIAYETVTDAAGRLPLLAPMSEVAGRLAIEAAGAALKRSAGGRGLLLGGVPGVQPARVVVLGGGVVGTQAARMAAGLGAEVTVIDRSIPRLRELDDVFLGRVRTRFSTIEAVEEEVFAADVVIGAVLVPGASAPKLVTRAMLKSMRPGAVLVDVAIDQGGCFETSHATTHTDPTYEVDGVVHYCVANMPGAVPVTSSQALNNATLPFGLMLANKGFAAVLENPHLRNGLNVHRGRITNKAVAESLGLEFAPVETGLAA

SEQ ID NO: 55111 - DNA, 1125 bp, Vibrio parahaemolyticus RIMD 2210633
  CDS (1)..(1125): transl_table=11
atgatcattggcgtacctaaggaaatcaagaaccacgaataccgtgtgggtatgatccctgctagcgtgagagaactcatctcacatggccaccaagttttagttgagaccaatgcaggtgccggcattggtttttcagacgatgattacatcgccgtcggcgcatccattctccctcatgctgcagacgttttcgcgcaagcagacatgatagtaaaagtaaaagaaccccaagcagttgagagagcaatgctccgcgaagggcaaattttatttacttatttacacctagcaccagattttccacaaactgatgagctaatcaagagcaaagctgtctgtatagcctatgagactgtaacagataatatgggtcgtttgccactgttagcaccaatgtcagaagtggcaggtcggatgtctatccaagcgggtgcgcaaacgttagaaaaatcacacggtggtcgtggtttacttcttggcggcgtacctggtgttgagcctgctaaagtcgttatcgttggtggtggtgtcgttggtgcaaacgcagctcgtatggctgttggccttcgcgcagacgtcacaattcttgaccgcaacgtagacactctgcgtaaactggatgaagaattccaaggccaagcgaaagtcatttattctacagaagacgctatcgagaagcatgttctagaagcagaccttgttattggtgcagttctaatcccaggcgcggcagctccgaaactggtaacaaaagagcatattgctaagatgaagccaggcgcagcaatcgttgacgtagctatcgaccaaggtggttgtttcgaaacatctcacgcgacaacacacgccgagcctacttacgtggttgatgatgtcgttcactactgtgtagcaaacatgcctggtgcagttgcacgtacttcaactttcgcattgaacaatgccactctcccttacattgtgaaacttgcaaacaaaggctatcaacaagctcttctggaagacaaaggcttcctagaaggtctaaacgtgattcacggtaaagtcacttgtaaagaagtcgcagaaagctttgaccttgactatgtagatcctgaacaagctatcgccatgttcaactaa

SEQ ID NO: 55112 - protein, 374 aa, Vibrio parahaemolyticus RIMD 2210633
MIIGVPKEIKNHEYRVGMIPASVRELISHGHQVLVETNAGAGIGFSDDDYIAVGASILPHAADVFAQADMIVKVKEPQAVERAMLREGQILFTYLHLAPDFPQTDELIKSKAVCIAYETVTDNMGRLPLLAPMSEVAGRMSIQAGAQTLEKSHGGRGLLLGGVPGVEPAKVVIVGGGVVGANAARMAVGLRADVTILDRNVDTLRKLDEEFQGQAKVIYSTEDAIEKHVLEADLVIGAVLIPGAAAPKLVTKEHIAKMKPGAAIVDVAIDQGGCFETSHATTHAEPTYVVDDVVHYCVANMPGAVARTSTFALNNATLPYIVKLANKGYQQALLEDKGFLEGLNVIHGKVTCKEVAESFDLDYVDPEQAIAMFN

SEQ ID NO: 55113 - DNA, 1107 bp, Bacteroides thetaiotaomicron VPI-5482
  CDS (1)..(1107): transl_table=11
atgatcatcggagtacccaaagaaatcaagaacaacgagaaccgggtaggcatgacaccttccggagttgccgaagttgtgaagcaaggtcaccaagtatatatccagcatacggcaggtatcaatagtggttttccggatgaagcatatctgtctgtcggtgcacaggtgcttccgacaatagaagatgtctatgccacagcagatatgattgtaaaggttaaagagcctatcgcgcccgaataccatctgatcagaaaaggacagttattgttcacttacttccattttgcttccgataaggaactgactcttgccatgattgacaataagtcgatctgtctggcatacgaaactgtagaaaaggaagaccattcattacccctgcttatccctatgagtgaggtagccggacgcatgtccattcaggaaggagcacgctttttggaaaagccgcaaggaggaaaaggtatccttctgggaggagtccccggtgtaaagcctgccaaagtattgattctcggaggcggtattgtcggaagtaatgcagcgcagatggctgcgggaatgggtgcggatgttacagttgcagatattaatctgtcacgcctgcgctatctcagcgagacattaccgaaaaatgtcaagacgctgtacgcatccgaattaaggataaaaaaggaattgccggatgttgatctggtcatcggttccgtgctgattccgggggataaagcgcctcatctgattacccgaaatatacttgcaatgatgcagcccggtacggtacttgtggatgtagcgatagatcagggaggatgtttcgaaacgtcacaccccacgacccacagtgcacctacctatgtgatagacggtatcgttcattatgccgtagccaatattccgggagctgtaccttatacttctacgctggctttgaccaatgctactctcccttatgtcattgctttagcaaataaaggatggaaaaaagcttgtaaagacgacccggcactagcactcggcttgaatgtagtggaaggaaaagtggtatataaagcagtagcggatgtattcgatctaaaatatgaaaatataaacctataa

SEQ ID NO: 55114 - protein, 368 aa, Bacteroides thetaiotaomicron VPI-5482
MIIGVPKEIKNNENRVGMTPSGVAEVVKQGHQVYIQHTAGINSGFPDEAYLSVGAQVLPTIEDVYATADMIVKVKEPIAPEYHLIRKGQLLFTYFHFASDKELTLAMIDNKSICLAYETVEKEDHSLPLLIPMSEVAGRMSIQEGARFLEKPQGGKGILLGGVPGVKPAKVLILGGGIVGSNAAQMAAGMGADVTVADINLSRLRYLSETLPKNVKTLYASELRIKKELPDVDLVIGSVLIPGDKAPHLITRNILAMMQPGTVLVDVAIDQGGCFETSHPTTHSAPTYVIDGIVHYAVANIPGAVPYTSTLALTNATLPYVIALANKGWKKACKDDPALALGLNVVEGKVVYKAVADVFDLKYENINL

SEQ ID NO: 55115 - DNA, 1110 bp, Coxiella burnetii RSA 493
  CDS (1)..(1110): transl_table=11
atgttaataggcgttccaaaagaagtaaaaatagaagaataccgagtcggattaactccttacagcgttcgtgagctcgttctccacggccatcaagtcattatggagcgcgatgcagggaatgcaatcaatttcaccgatgaagcttaccttgctgcaggtgcgaaaattgttgatacgcctgtagaagtttaccaggctgagatgattgttaaagtgaaagagccgcaatcgagcgaatatgcgttgattcgagaaggacaaattttatttacttacttacacttagcgccagatcctcaacaagcgcaggcattaataaaatccggctgcatcgccattgcttatgaaacggtgactgacaacgagggcgggcttcccctcctttctcccatgagccaagtggcgggtcgcttagccatccaggcaggggcccactgtttggaaaaacctgaagggggaagcggcatcctcttaggcggtgttccaggcgtttatgcggggaaagtgaccgttattggcggtggcgtggtaggaagcaatgcggtgcgaatggccatggggaaaaaagcgcaagtgaccgtcttagataagtccttacgccggttacaagaactcgatttccaatttggcggacgattaaatacggcgtattctaccgaaagcagcattgaacattatgttattgatgccgacctcgtcgtcggtgctgttctggttccgggtcattcggcgccgaaactggtaggccaagatgttttgaaaaaaatgcgcccaggatcggttatggtggacgtcgccatcgaccaaggtggctgctttgaaaccagtaaaccaactacgcataagaaacccacttacgtaatcgacgggattgtccattattgcgtagctaatatgccgggcgcagttccgagaacttccacattggcgctcaataacgcaacattgccttacgtaatcgcattggccgataaaggttaccgccaagcttttttagatgaccctcattttttgaacggtctcaatgtctattgcgggcaaataacccataaaggggtagctcaaggtttacagcaagagttcaacccgccattggcgcttttataa

SEQ ID NO: 55116 - protein, 369 aa, Coxiella burnetii RSA 493
MLIGVPKEVKIEEYRVGLTPYSVRELVLHGHQVIMERDAGNAINFTDEAYLAAGAKIVDTPVEVYQAEMIVKVKEPQSSEYALIREGQILFTYLHLAPDPQQAQALIKSGCIAIAYETVTDNEGGLPLLSPMSQVAGRLAIQAGAHCLEKPEGGSGILLGGVPGVYAGKVTVIGGGVVGSNAVRMAMGKKAQVTVLDKSLRRLQELDFQFGGRLNTAYSTESSIEHYVIDADLVVGAVLVPGHSAPKLVGQDVLKKMRPGSVMVDVAIDQGGCFETSKPTTHKKPTYVIDGIVHYCVANMPGAVPRTSTLALNNATLPYVIALADKGYRQAFLDDPHFLNGLNVYCGQITHKGVAQGLQQEFNPPLALL

SEQ ID NO: 55117 - DNA, 1116 bp, Streptomyces avermitilis MA-4680
  CDS (1)..(1116): transl_table=11
gtgaaggtcggcatcccccgcgaggtcaagaacaacgagttccgggtggccatcacccccgcaggcgtgcacgagctggtgcgctacggccaccaggtcttcatcgagcagaacgccggcgtcggctcctcgatcacggacgacgagtacgtctccgccggcgcgcagatccttccgaccgccgacgaggtctgggccatcgccgacctgctgctcaaggtcaaggagcccatcgccgaggagtaccaccgcctccgcaaggaccagacgctcttcacctacctgcacctggccgcctcccaggagtgcacggacgccctcctggagtccggcaccacggcgatcgcgtacgagaccgtcgagctgcccagccgcgccctgccgctgctggccccgatgtccgaggtcgcgggccggctcgccccgcaggtcggcgcctaccacctgatgcgcgccaacggcggccgtggtgtcctgccgggcggtgtcccgggtgtgctccccgccaaggcggtcgtcatcggcggcggcgtctccggctggaacgccgcgcagatcgccatcggcatgggcttccaggtgaccctgctcgaccgtgacatcaacaagctcaaggaggcggacaagatcttcggtacgaagatccagaccgtcgtctccaacgccttcgagctggagaaggcctgcctcgaggccgacctcgtcatcggcgcggtgctgatcccgggtgcgaaggccccgaagctggtcaccaacgagctggtctcgcggatgaagcccggaagtgtccttgtcgacatcgcgatcgaccagggcggctgcttcgaggactcccgtccgaccacgcacgccgagccgaccttccgggtccacaactcggtcttctactgcgtcgccaacatgcccggcgccgtccccaacacctcgacgtacgcgctgaccaacgccacgctgccgtacatcctggaactggcgaaccgcggctgggccgaggcgctgcgccgtgaccccgcgctcgccaagggcctcaacacccatgacggcaaggtcgtttaccgcgaggtcgcggagtcgctcggcctggagtacgtcgagatcgagtccctgctcggctga

SEQ ID NO: 55118 - protein, 371 aa, Streptomyces avermitilis MA-4680
MKVGIPREVKNNEFRVAITPAGVHELVRYGHQVFIEQNAGVGSSITDDEYVSAGAQILPTADEVWAIADLLLKVKEPIAEEYHRLRKDQTLFTYLHLAASQECTDALLESGTTAIAYETVELPSRALPLLAPMSEVAGRLAPQVGAYHLMRANGGRGVLPGGVPGVLPAKAVVIGGGVSGWNAAQIAIGMGFQVTLLDRDINKLKEADKIFGTKIQTVVSNAFELEKACLEADLVIGAVLIPGAKAPKLVTNELVSRMKPGSVLVDIAIDQGGCFEDSRPTTHAEPTFRVHNSVFYCVANMPGAVPNTSTYALTNATLPYILELANRGWAEALRRDPALAKGLNTHDGKVVYREVAESLGLEYVEIESLLG

SEQ ID NO: 55119 - DNA, 1134 bp, Bacillus cereus ATCC 14579
  CDS (1)..(1134): transl_table=11
atgcgtatcggtattccaacagaaattaaaaacaatgaaaaccgtgtggcaatgacgccagcgggagcagtacatttagtacaaaatggtcacgaagtttttgttcaaaaaggagcaggtttaggatctggctttacagatgaagaatacgtacaagctggtgcgaaacttgtagaaactgctgaagaagcatggaatcaagatatggttatgaaggtaaaagagccagtagcaagtgaatacggctatttccgtgaaggcttaatcttattcacatacttacacttagctccagaaccacaattaacgaaagcattaatcgataacaaagttgcatcaatcgcatacgaaacagtacaattagacaatcgttctttaccattacttgcacctatgagtgaagtggctggtcgtatgtctgcacaaatcggtgcacaattccttgagaaaaacaaaggcggtaaaggtattttacttgcaggcgttccaggggtaaaacgcggcaaagtaacaatcatcggcggtggtcaagctggtacaaacgcagctaagattgcagtaggtttaggtgcagatgtaacaatcattgacttaagtgcagaacgtcttcgtcaattagatgatattttcggtaaccaagtaaaaacattaatgtctaatccatacaacattgcagaagctgttaaagaatctgaccttgttattggagcagtattaattccgggtgcaaaagcgccaaaacttgtaactgaagaaatgattcaatcaatggaaccaggttctgtcgttgtagatatcgcgattgaccaaggtggtatttttgaaacaactgatcgtattacaactcatgacaacccaacttacgaaaaacatggcgttgttcattatgcagttgctaatatgccaggtgcagttccacgtacgtcaactcttgcgttaacaaacgtaacagtaccatatgcagtacaaattgctaacaagggctacaaagaagcttgcttaggcaacactgcattattaaaaggtattaacacattagatggttatgtaacattcgaagcagttgcggaagctcacggcttacaatacgctgatgcaaaagagcttcttgaaaaagctcctgctttatcataa

SEQ ID NO: 55120 - protein, 377 aa, Bacillus cereus ATCC 14579
MRIGIPTEIKNNENRVAMTPAGAVHLVQNGHEVFVQKGAGLGSGFTDEEYVQAGAKLVETAEEAWNQDMVMKVKEPVASEYGYFREGLILFTYLHLAPEPQLTKALIDNKVASIAYETVQLDNRSLPLLAPMSEVAGRMSAQIGAQFLEKNKGGKGILLAGVPGVKRGKVTIIGGGQAGTNAAKIAVGLGADVTIIDLSAERLRQLDDIFGNQVKTLMSNPYNIAEAVKESDLVIGAVLIPGAKAPKLVTEEMIQSMEPGSVVVDIAIDQGGIFETTDRITTHDNPTYEKHGVVHYAVANMPGAVPRTSTLALTNVTVPYAVQIANKGYKEACLGNTALLKGINTLDGYVTFEAVAEAHGLQYADAKELLEKAPALS

SEQ ID NO: 55121 - DNA, 1158 bp, Nitrosomonas europaea ATCC 19718
  CDS (1)..(1158): transl_table=11
ttgcagtttaacaaatcagaatggcatgaaaggtttagagcatcaatgattatcggattacccaaagaaacgaaagcggatgagtatcgggtcgggctaactccaggcagtgtgcatacactggtcggacgcgggcaccgggttctggtcgaaaccggggcgggagcaggtagtgtgatttccgatcaggattatcgtgctgccggggcggaaatcgttacccatgccggggatgcctgggcagcagaactggtggtcaaggtaaaagagcccactgaaccggaatatcagtacttacggaaaggtttgctgctgttcacctatctgcatttggcttccaacagaactttgaccgaaaaactgctcgccactggcgtcagtgcgatcgcctacgaaaccgtgcagactgcatcaggtgcattaccgctgctaacacccatgagcgaagtagcgggacgcatggccgtgcagattggtgcaacctatctgctgaaaacacaaggtggccggggtgttctgatgggtggtgtgccgggagttgctcctgccaacgtagtcattctcggcgcgggagtagtcggcaccaatgccgcaactgtcgccgccggcatgggtgcgatggtaacagcactggatatcaatcatgatcgcctgaaagcgttggacgatcgtttctccgggcgactgcaaacccgctactgcgatacggtcaatgtacgccaggccgtttatgaggccgatctggtcatcggtgcgattttgattcccggcggacgctcgccctggctggtgacgcgggaaatgttgccacaaatgcgcacaggttcagtgatcgttgatgtagcggtcgatcagggagggtgcgtagaaacgactcgccccaccacacacagcaatcccatttttgaaatcgatggcgtgttgcattactgcgttgccaatatgcccggtgcggtaccgcgcaccagcacttttgcactgaacaatcagaccgccagttatgttgccacgctggcagacaatggactggctgccttgcaaaataaccaggcactgatgaacggcctcaacacccatcgtgggcaggtaacccatccggcagtggcggaagccttcgggctatcctatgcatctcccctggaagtactggtcgcctga

SEQ ID NO: 55122 - protein, 385 aa, Nitrosomonas europaea ATCC 19718
MQFNKSEWHERFRASMIIGLPKETKADEYRVGLTPGSVHTLVGRGHRVLVETGAGAGSVISDQDYRAAGAEIVTHAGDAWAAELVVKVKEPTEPEYQYLRKGLLLFTYLHLASNRTLTEKLLATGVSAIAYETVQTASGALPLLTPMSEVAGRMAVQIGATYLLKTQGGRGVLMGGVPGVAPANVVILGAGVVGTNAATVAAGMGAMVTALDINHDRLKALDDRFSGRLQTRYCDTVNVRQAVYEADLVIGAILIPGGRSPWLVTREMLPQMRTGSVIVDVAVDQGGCVETTRPTTHSNPIFEIDGVLHYCVANMPGAVPRTSTFALNNQTASYVATLADNGLAALQNNQALMNGLNTHRGQVTHPAVAEAFGLSYASPLEVLVA

SEQ ID NO: 55123 - DNA, 1086 bp, Rhodopirellula baltica SH 1
  CDS (1)..(1086): transl_table=11
atgattgttggcgtgccctcggaaattaagaccgatgaataccgcgtgggaatgctccccgtcggcgtcgctgaactgactcaagcggggcacaccgttttggtgcaagccggagcgggtctcggatcgggattgcccgaccacgactaccttcgagcgggtgccgagttggtcgcctcggccgatgacattttcgcgaaagccgatttggtggtgaaagtgaaagaaccacagcggtcggaatacgatttgatccggcccggtcagttggtattcacctatttccacttcgccgcggacgacacgctgaccaaagcgatgctggatagcggtgcgacctgcctggcctacgaaacgcttcgcgatgcatcagggcaactcccgttgttgacaccgatgagtgaagtcgctggtcggatgagcattcaagaaggcgcgaagtatctggaacggcctcagatgggacgcggcattttgctgggcggtgtccctggcgttgcccccgcgcacatcacgatcctgggtggcggtgtggtgggtgccaatgcagccaaaatcgccgcgggattccaagccgacgtggcgatcctggacgtcaatcttgatcgcttgcgataccttgacgatgtgatgccagccaacgtgaacacgctttacagcgatcgccacaacatcgtcgaacaactcgaacgagccgacctggtaatcggttccgtcttgattccgggtgctcgagcacccaacttggttcgggccgaagaccttcgcatcatgaaatcgggtgcggtcgtcatcgacgtcgccgtggatcaaggcggatgcatcgaaaccagccgccctaccacgcacagtgagccgacttatatcatcgatgaggtcgttcactactgcgtcgccaacatgcccggtgctgtcggccggacgagcacctttgcattgtgcaacgcaacaatgcgatggatttcgaaaatcgcggcggcgggaatgtccggcgtcctacaagacaccggtcctcttcaatccgcgatcaacattcacgaaggcaaaatcgtccacgaagccgtctcctccgcctaccaaggctga

SEQ ID NO: 55124 - protein, 361 aa, Rhodopirellula baltica SH 1
MIVGVPSEIKTDEYRVGMLPVGVAELTQAGHTVLVQAGAGLGSGLPDHDYLRAGAELVASADDIFAKADLVVKVKEPQRSEYDLIRPGQLVFTYFHFAADDTLTKAMLDSGATCLAYETLRDASGQLPLLTPMSEVAGRMSIQEGAKYLERPQMGRGILLGGVPGVAPAHITILGGGVVGANAAKIAAGFQADVAILDVNLDRLRYLDDVMPANVNTLYSDRHNIVEQLERADLVIGSVLIPGARAPNLVRAEDLRIMKSGAVVIDVAVDQGGCIETSRPTTHSEPTYIIDEVVHYCVANMPGAVGRTSTFALCNATMRWISKIAAAGMSGVLQDTGPLQSAINIHEGKIVHEAVSSAYQG

SEQ ID NO: 55125 - DNA, 1140 bp, Prochlorococcus marinus subsp. marinus str. CCMP1375
  CDS (1)..(1140): transl_table=11
atgccatcaccagttctatccgcaccgatttctagtatcggtataccaaaagaaattaaatcagacgaacttagagttgcaattactccggatggagttaaagaactagtgactcaaggactagaagtgcgtgtacagacagatgctggtaaaggcttagggattgaagatcaagatttttctaacgcaggcgcaagaatcgttgatcgagatgaagcttgggcagctcatctagttgtaaaggttaaggaacctcaggaagaagaatttaagtttctgagagaagatatggttctatttacatatctacacctagcagcatatccaaaagtcagcgaagcattactcacagcaggtacaacaactataggttatgaaactgttcagatggaagatgggagcctacctttacttgccccaatgagtgaaatcgctggtcgattagctgcccaagtgggagctaatctacttgaaaagcctaatgggggtagaggtatattaattggaggatgtacaggagttagacctgcaagagttattgtgcttggcgcaggcacagtaggatggaatgctgcaagacttgcagcagcaatggatgcagaggtaatgctcctagaccgatcaccggaaaggctacgcaaactagaagcatatcgcaaaggacgacttgaaagcatagtaagcagcagagggcttctagaaagattaattccaacagctgatctcataatcggagctgtattaacccctggaggtagagctccgacactcgtcgatgaaaatatggttgcacagatgaaaaacaactcagtaatagttgatgtagctatcgaccaaggaggatgtgtagcgacaagcgttgaaactactcataccaaacctacaattaatattaaaggagttcagcattatgcagtaagcaatatgcccggtgcagtaccattcacttcaacggaagcactggttagtgtaactttgccatatattcttggcattgcaggacgtggacttgaaggagcaattactgaacgcccggaaatagtatctggattaaatactattggcggctcagtatgtcatccaggagttgctaaggctcttggaattccaccaagacatcctatggcatgcttaaattaa

SEQ ID NO: 55126 - protein, 379 aa, Prochlorococcus marinus subsp. marinus str. CCMP1375
MPSPVLSAPISSIGIPKEIKSDELRVAITPDGVKELVTQGLEVRVQTDAGKGLGIEDQDFSNAGARIVDRDEAWAAHLVVKVKEPQEEEFKFLREDMVLFTYLHLAAYPKVSEALLTAGTTTIGYETVQMEDGSLPLLAPMSEIAGRLAAQVGANLLEKPNGGRGILIGGCTGVRPARVIVLGAGTVGWNAARLAAAMDAEVMLLDRSPERLRKLEAYRKGRLESIVSSRGLLERLIPTADLIIGAVLTPGGRAPTLVDENMVAQMKNNSVIVDVAIDQGGCVATSVETTHTKPTINIKGVQHYAVSNMPGAVPFTSTEALVSVTLPYILGIAGRGLEGAITERPEIVSGLNTIGGSVCHPGVAKALGIPPRHPMACLN

SEQ ID NO: 55127 - DNA, 1140 bp, Prochlorococcus marinus str. MIT 9313
  CDS (1)..(1140): transl_table=11
atggactcctctcttctttcggccccaatagccagcatcggggtaccgaccgaaattaaagccgatgagctgagagtggctcttactcctgacggggtgaaagaactggtcaccaaggggctagaagtaagggttcaggctggcgccggggctggagcaggcattggtgatgaggccttcgctgatgccggtgccaagcttgttaaacgcgaggaggcctgggcagcccatctcgtcgtgaaagtgaaggagcctcaggaagaggaattcggtctactcaggcaagacatggtgctcttcacttacctacacctagccgcctacccgaaggtgggtgaagcgctactcaatgctggcaccaccggcgtgggttacgaaacggtgcaactagaaaacggcagcctgccgctactggcaccaatgagcgaaatcgctggccgtctagccgcacaagtgggcgcccatttgctcgaacgacctcatggcggacgcggcttgctaatcggaggctgcaccggcgtgcaaccagcccgggtggtcgtgttgggcgctggcaccgtgggctggaatgcagccaggctggccgccgccatggatgccgaagtgatgctgctagaccgctcacctgaacggttgcgcagccttgaggcaaggcgccgcggcaggctgattagcgttgtcaacagccgtggcctgctggagcgactcatccccactgcagaccttttgatcggtgccgtcctgacgcccggaggccgagcacccaccctcgtcgatgaagagatggtgaaacaaatgaagcccaattcagtgatcgtggatgtagcgatcgatcagggaggttgtgtggccaccagccaagaaaccacccatacccatcccaccgtgaccatccacggcgtccagcactacgccgtcggcaacatgccaggtgcggtgccttttacctccactgaagctctggtgagtgtgaccctgccctacatccttggcattgccgggcggggccttgaggaggccgtcaccgaacgtcccgaacttctttccgggctcaacacaattcaaggctccgtttgtcatccgggtgtcgccaaggccctagggctaccaccaaggcacccaatggcatgcttacgctaa

SEQ ID NO: 55128 - protein, 379 aa, Prochlorococcus marinus str. MIT 9313
MDSSLLSAPIASIGVPTEIKADELRVALTPDGVKELVTKGLEVRVQAGAGAGAGIGDEAFADAGAKLVKREEAWAAHLVVKVKEPQEEEFGLLRQDMVLFTYLHLAAYPKVGEALLNAGTTGVGYETVQLENGSLPLLAPMSEIAGRLAAQVGAHLLERPHGGRGLLIGGCTGVQPARVVVLGAGTVGWNAARLAAAMDAEVMLLDRSPERLRSLEARRRGRLISVVNSRGLLERLIPTADLLIGAVLTPGGRAPTLVDEEMVKQMKPNSVIVDVAIDQGGCVATSQETTHTHPTVTIHGVQHYAVGNMPGAVPFTSTEALVSVTLPYILGIAGRGLEEAVTERPELLSGLNTIQGSVCHPGVAKALGLPPRHPMACLR

SEQ ID NO: 55129 - DNA, 1140 bp, Synechococcus sp. WH 8102
  CDS (1)..(1140): transl_table=11
atggcagcctccgtcctgacggccccgatggccagcatcggcgtgcccagggaaatcaaggccgatgagcaacgggtggccctcacccccgatgccgtacgggaactgatcagccaggggctggaggtgcgggtcgaggccggggccggggcgggagccggcatcggcgatgaggccttcgccgcagccggagcccagctggtgagccgtgaggacgcctggggcgcccatctggtggtgaaggtgaaggagccgcagagcgaggagttcggcttcctgcgggacgacatggtgctgttcacctacctgcacctggccgcctatccccaggtgggcgaggccttgctggaggccggcaccgctgccattgcctacgaaaccgtgcagctggaaaacggcagcctgccgttgctggcgccgatgagcgaaatcgccgggcggctggcggcccaggtgggggcccacctgctggagaaaccccatggcggacgcggcgtgctgatggggggctgcaccggcgtgcagccggcccgggtggtggtgctgggggccggcacggtgggctggaacgccgccagaaccgcggcggccatggatgcggaagtgctgctgctggaccgttcaccccagcgactgcgcagcctggaggcggatcgtcgcggtcggctgatgagcgtggtgagcagccgtggtctgctagagcgcctggtgcccacggcggatctggtgatcggcgccgtgctgacccctggcggccgagccccgaccctggtggatgaggcgatggtgcagcagatgcgtccgggctcggtgatcgtcgatgtggcgatcgaccaggggggctgcatcgccaccagccgcgaaaccacccacaccgaccccacggtgacgattcacggtgtgcagcactacgccgtgggcaacatgcccggggcggtgccgttcacctccacggaagcgctggtcagcgtcaccttgccttacatccttggcatcgccggccgaggcctggaggaagccgtcaccgaacggccggaactgctctccggtctcaacacggtgcagggatccgtgtgccatccaggggtcgccaaggccttgggagtagcgccccggcacccgatggcctgcctgcgctga

SEQ ID NO: 55130 - protein, 379 aa, Synechococcus sp. WH 8102
MAASVLTAPMASIGVPREIKADEQRVALTPDAVRELISQGLEVRVEAGAGAGAGIGDEAFAAAGAQLVSREDAWGAHLVVKVKEPQSEEFGFLRDDMVLFTYLHLAAYPQVGEALLEAGTAAIAYETVQLENGSLPLLAPMSEIAGRLAAQVGAHLLEKPHGGRGVLMGGCTGVQPARVVVLGAGTVGWNAARTAAAMDAEVLLLDRSPQRLRSLEADRRGRLMSVVSSRGLLERLVPTADLVIGAVLTPGGRAPTLVDEAMVQQMRPGSVIVDVAIDQGGCIATSRETTHTDPTVTIHGVQHYAVGNMPGAVPFTSTEALVSVTLPYILGIAGRGLEEAVTERPELLSGLNTVQGSVCHPGVAKALGVAPRHPMACLR

SEQ ID NO: 55131 - DNA, 1125 bp, Chromobacterium violaceum ATCC 12472
  CDS (1)..(1125): transl_table=11
atgttgatcggcgttccgaaggaaatcaaaaaccacgagtaccgcgtgggtctgaccccgtccggtgtccgcgagctggtggcgaacgggcacaaggtgctggtgcagacccacgcgggtctcgcgataggctttaccgacgagcaatacatccaggccggagcctccatcgcctccaacgccgaagaggtgttcgagcgcgccgacatgatcgtcaaggtcaaggagccgcagccggtggagtgcaggatgctgcgtccgggccagattcttttcacttacctgcatctggcgccggacccggaacagaccaagctgctgatcgagtccgactcggtggccatcgcctatgaaacggtcaccgacgagcgcggcggcctgccgctgttggcgccgatgtccgaagtggccggccgcatggcgatccaggccggcgcccacgcgctggaaaaggcccagggcggccgcggcgtgttgctgggcggcgtgcccggcgtggccccggccaaagtggtggtgataggcggcggcgtggtggggctcaacgccgcgcggatggcgatgggggcgggcgcagacgtcaccatcctggacaagtccctgagccggctcaaagagatagacatggtgttcggcggccgcatcaagacgctgatgtccaacggcgccaatatagacgacagcatccgcgacgccgacctggtgatcggcgcggtgctggtgcccggcgcggcggcgcccaagctggtgacgcgcgcgatgctgaagacgatgaagccgggcgcggtgctggtggatgtggcgatagaccagggcggctgtttcgaaaccagccggccgaccacccaccaggacccgatctacaccgtggacggcatcgtccactactgtgtggccaatatgcccggcggcgtcgcccgcacctccacccaggcgctgaccaacgccacgctgccgtatacgctggagctggccaacaagggctggcgccaggcgctgctggacaacgcccacctgcgcaacggcctcaacgtctgccgcgggcgggttacataccaggcggtggcccgcgatttgggccacgcctacgtcgatccgatagaggccatcaaggccgcaaactga

SEQ ID NO: 55132 - protein, 374 aa, Chromobacterium violaceum ATCC 12472
MLIGVPKEIKNHEYRVGLTPSGVRELVANGHKVLVQTHAGLAIGFTDEQYIQAGASIASNAEEVFERADMIVKVKEPQPVECRMLRPGQILFTYLHLAPDPEQTKLLIESDSVAIAYETVTDERGGLPLLAPMSEVAGRMAIQAGAHALEKAQGGRGVLLGGVPGVAPAKVVVIGGGVVGLNAARMAMGAGADVTILDKSLSRLKEIDMVFGGRIKTLMSNGANIDDSIRDADLVIGAVLVPGAAAPKLVTRAMLKTMKPGAVLVDVAIDQGGCFETSRPTTHQDPIYTVDGIVHYCVANMPGGVARTSTQALTNATLPYTLELANKGWRQALLDNAHLRNGLNVCRGRVTYQAVARDLGHAYVDPIEAIKAAN

SEQ ID NO: 55133 - DNA, 1095 bp, Gloeobacter violaceus PCC 7421
  CDS (1)..(1095): transl_table=11
atgcacatcggcgttcccaaagaaatcaaagatcaggaattcagggtcggtttgactccggcggcggtgcgcgctttgagcgatcagggccacagcgtggctatcgaagcgcgggcgggggagggatccggctttactgaccgggactatctggaggccggtgcccgcatcgtggagaccgccgcggaggtctacgcccagccgatgatcgtcaaagtcaaagagcccctgcccctggagtacgccctgctgggcaagggccagattctttttacttatttgcatctggcggcgagccgcgagttgaccgaggcgttgctcaactcaggagccacctgcatcgcctacgagaccgtggccctggccgacgggcgcctgccgctgctcacgccgatgagtgcaatcgcgggccgtctggcggtgcagttcgggtcgcgctttctggagaagcaacagggtggccgcggcgtactcctgggtggggtgcccggggtggccgcgggccatgtggcgatcttgggcggcggtatcgtcggcaccgaggcggcccgcatcgccgtcggcatgggggcacgggtgacgattctcgatgtcaacctcgaccggctcgcctacctcgaagatctgttcggttcgcgcgtcgaactgctcttcagcacccgccggaccatcgaacagatggtgccgggggcggatttgctgattggagcggtgctggtgaccgggcggcgtgcccccaagctggtcagccgcgaggtggtgggccgcatgaatcccggctcggtgatcgtcgatgtggccgtcgatcagggcggctgtgtggagacgctcagacccacctcccactccgaaccggtctacctcgaagcaggcgtcgtccactacggcgtgcccaatatgcccggggcggtgccctggacggccacccaggcgctcaacaacgccacactcccctacgtgatgaaactggcggaactgggatatccgcaggccaccgagcgcgatccggcccttgccttaggcatcaacatcgcccacagccgtctgatccacccggcggtgcagcaggtctttcccgatctcatccatgcttga

SEQ ID NO: 55134 - protein, 364 aa, Gloeobacter violaceus PCC 7421
MHIGVPKEIKDQEFRVGLTPAAVRALSDQGHSVAIEARAGEGSGFTDRDYLEAGARIVETAAEVYAQPMIVKVKEPLPLEYALLGKGQILFTYLHLAASRELTEALLNSGATCIAYETVALADGRLPLLTPMSAIAGRLAVQFGSRFLEKQQGGRGVLLGGVPGVAAGHVAILGGGIVGTEAARIAVGMGARVTILDVNLDRLAYLEDLFGSRVELLFSTRRTIEQMVPGADLLIGAVLVTGRRAPKLVSREVVGRMNPGSVIVDVAVDQGGCVETLRPTSHSEPVYLEAGVVHYGVPNMPGAVPWTATQALNNATLPYVMKLAELGYPQATERDPALALGINIAHSRLIHPAVQQVFPDLIHA

SEQ ID NO: 55135 - DNA, 1125 bp, Vibrio vulnificus YJ016
  CDS (1)..(1125): transl_table=11
atgattattggcgttccaaaggaaatcaagaaccacgaataccgtgttggtatgatcccagccagtgtgagagagcttatctcacatggtcaccaagtttttgttgaaactaatgccggtgcaggcatcggtttttcagacgatgattacatcgctgtaggcgcatccattcttcctactgctgctgacgtcttcgcgaaagcagaaatgattgtaaaggtaaaagaacctcaagctgttgagcgagccatgctcaaagaggggcaaatattatttacttatttgcacctagctccagattttccacaaactgaagagctaatcaagagcaaagctgtctgcattgcctatgagactgtaacagatcatatgggtcgcttaccactacttgctccaatgtctgaagttgctggtcgtatgtctatccaagctggtgcacaaactctagaaaaatctcacggtggccgtggcttacttcttggtggtgtaccgggcgttgaaccagcaaaagtcgttgttattggcggcggtgtcgttggtgctaacgctgctcgtatggctgttggcctacgtgctgatgttactatccttgaccgtaacgtggatacgcttcgtaaattagacgaagaattccaaggccgcgctaaagtcgtttattctacagaagatgcgatcgagaagcacgttctagaagccgatcttgtcatcggtgcggtgctcatcccaggcgcagcagcaccaaaactggtcacaaaagaacacatcgctaagatgaagccaggtgccgctgttgttgacgttgcaatcgaccaaggcggttgtttcgaaacttctcacgcaaccacacacgcagagccgacttacattgttgacgatgtcgtacactactgtgttgctaatatgccaggtgccgtcgctcgcacttctacttttgcccttaataacgcgactctaccttacattgttaagcttgcaaacaaaggatatcgtgaagcattgtcagcagataaaggcttcctacttggtctaaatgtgattcacggtaaagtgacgtgcaaagaagttgcagaaagctttaacctagaatacgtagatccggcagaagccattcgcatgtttagctaa

SEQ ID NO: 55136 - protein, 374 aa, Vibrio vulnificus YJ016
MIIGVPKEIKNHEYRVGMIPASVRELISHGHQVFVETNAGAGIGFSDDDYIAVGASILPTAADVFAKAEMIVKVKEPQAVERAMLKEGQILFTYLHLAPDFPQTEELIKSKAVCIAYETVTDHMGRLPLLAPMSEVAGRMSIQAGAQTLEKSHGGRGLLLGGVPGVEPAKVVVIGGGVVGANAARMAVGLRADVTILDRNVDTLRKLDEEFQGRAKVVYSTEDAIEKHVLEADLVIGAVLIPGAAAPKLVTKEHIAKMKPGAAVVDVAIDQGGCFETSHATTHAEPTYIVDDVVHYCVANMPGAVARTSTFALNNATLPYIVKLANKGYREALSADKGFLLGLNVIHGKVTCKEVAESFNLEYVDPAEAIRMFS

SEQ ID NO: 55137 - DNA, 1098 bp, Geobacter sulfurreducens PCA
  CDS (1)..(1098): transl_table=11
atgatcataggtgtgccccgggagataaaggtccacgaataccgggtcggcatgacgccggccggcgcagctgagctcacgcgggaaggacacagggttctcgttgaggcgggcgcgggcgaggggagcggttttgccgacgatgattttcttcgctccggtgcccgggtggtgggccgggataacctcttcggtcaggccgagctcattgtcaaagtgaaggagccgctgccggacgagtatgcgctgctgcagcccgggcaggcgctttttacctatctccacctggctccaaacgaggcgctggcccgtgcgctgctgaaacgcagcgtgaccgctattggttacgaaaccctggagaaggggggagcgctgccgctgcttgcgccgatgagcgagatcgccggccggatggcccccctggtgggagcgttttatctccagcggattcacggcggcacgggaacgctgccccccggcgttcccggcgtagctgcagggcgggcgcttatcctcggcgctggggtggtgggcagtgccgcggcacgggtctgcctcggcctcggcatggaaacaacggttatgaacagggggatcgaacggcttcagagccttgacgacatcttcaacggaaggcttcggaccctggtcctcacggccgatgccctggcggatcatcttcgggatgccgatctggtggttggtgcgctgctggttcccggcggccgtactccggtacttattacccgtcccatgctcgcgaccatgcggaagggggcggtcattgttgacgttgccgtcgaccagggtggatgcgtcgccacgagccggccgaccacgcacgacaagcctgtgtacgaagtggacggcatcattcactacaccgtggccaatatgccgggcgcctatccccgcacatccaccctggcgctcaccaacgcgacccttccctacgtgcggttgctggcaaacgttggtattgaggaagcgttgaggcgcgaccccgccctggggggagccctcaatacctggcggggcggcatcgctcaccatgccctggccgaagccctggaactgccccgcgttacctttgcctga

SEQ ID NO: 55138 - protein, 365 aa, Geobacter sulfurreducens PCA
MIIGVPREIKVHEYRVGMTPAGAAELTREGHRVLVEAGAGEGSGFADDDFLRSGARVVGRDNLFGQAELIVKVKEPLPDEYALLQPGQALFTYLHLAPNEALARALLKRSVTAIGYETLEKGGALPLLAPMSEIAGRMAPLVGAFYLQRIHGGTGTLPPGVPGVAAGRALILGAGVVGSAAARVCLGLGMETTVMNRGIERLQSLDDIFNGRLRTLVLTADALADHLRDADLVVGALLVPGGRTPVLITRPMLATMRKGAVIVDVAVDQGGCVATSRPTTHDKPVYEVDGIIHYTVANMPGAYPRTSTLALTNATLPYVRLLANVGIEEALRRDPALGGALNTWRGGIAHHALAEALELPRVTFA

SEQ ID NO: 55139 - DNA, 1122 bp, Mycobacterium avium subsp. paratuberculosis K-10
  CDS (1)..(1122): transl_table=11
atgcgagtcggcgtaccgaccgagaccaagaccaacgaatttcgcgtggccctcacccccgccggcgtcgccgagttgacccgccgcggccacgaggtgctggtgcaaagcggcgccggcgaggggtcgtcgatccccgactccgagttcaaggcggccggcgcccaactggccgacaccgccgaacaggtctgggccgacgcggagctgctgctcaaggtgaaggaaccggtgccggccgagtatgacctgttgcggcgcaaccagattctgttcacctttctgcatctggccgcctcgcgtgcctgcaccgaggcgctgttgacctccggcacgacgtcgatcgcctacgagacggtgcaaaccgcggacggcaccctgccgttgctggccccgatgagcgaggtggccggccggctgtccgctcaggtgggcgcctaccacctgatgcgcacccacggcggacgcggcgtgctgatgggcggggtgccgggggtcaagcccgccgacgtcgtggtggtcggggcgggcacggccggctacaacgcggcccgggtcgccggcgggatgggagccatggtcacggttctcgacgtcaacatcaacaagcttcggctgctcgacgccgagttcggcggtcaggtccgcacccggtattcgtcggcctacgacctggagggcaccgtcaagcgcgccgacctggtcatcggcgcggtgctgctgcccggcgccaaggcccccaacctgatctcgaattcgcttgtcgcgcagatgaagtcgggcgcggtgctggtggacatctccatcgaccagggcggctgcttcgaggactcccggccgaccacgcacgacgacccgaccttcgccgtgcacgacacggtgttctactgcgtggcgaacatgcccagcgcggtgcccaagacgtcgacggtggcgctgaccaacgccaccatgccctacgtgctggccctggccgaccgcggctggcgtgcggcgtgccgctcgaatcatgctctggccaaagggctttcgacacatgacggtgcgctgctgtcgcagcaggtggccgccgacctcggtctgccgtgcaccgacccggccggcgtgctgcagcaggactaa

SEQ ID NO: 55140 - protein, 373 aa, Mycobacterium avium subsp. paratuberculosis K-10
MRVGVPTETKTNEFRVALTPAGVAELTRRGHEVLVQSGAGEGSSIPDSEFKAAGAQLADTAEQVWADAELLLKVKEPVPAEYDLLRRNQILFTFLHLAASRACTEALLTSGTTSIAYETVQTADGTLPLLAPMSEVAGRLSAQVGAYHLMRTHGGRGVLMGGVPGVKPADVVVVGAGTAGYNAARVAGGMGAMVTVLDVNINKLRLLDAEFGGQVRTRYSSAYDLEGTVKRADLVIGAVLLPGAKAPNLISNSLVAQMKSGAVLVDISIDQGGCFEDSRPTTHDDPTFAVHDTVFYCVANMPSAVPKTSTVALTNATMPYVLALADRGWRAACRSNHALAKGLSTHDGALLSQQVAADLGLPCTDPAGVLQQD

SEQ ID NO: 55141 - DNA, 1107 bp, Bdellovibrio bacteriovorus HD100
  CDS (1)..(1107): transl_table=11
atgattatcggtgttcctaaggagattaagatttctgagaaccgcgttggtttgaccgaagcgggcgtgcgtcagtatgtgagcgaaggccacactgtgatcgttgaaaaagatgcgggcgtgggctctggtatctctaacgaacagtacgaaaaagctggtgcgaaaatcatcgacaccaaaaaagaagtgtacgcaaaagcggacatgatccaaaaagttaaagaacctcttccagacgaatacgaactgatgaaagaaaatcagatcctttacacttaccttcacttggctgcagaagcgaagctgacgaaagttctttgtgaacgtaaagtgaaagcgatcgcttacgaaaccatccagttggacaacggctctttgccattgttgactccaatgtctgaagttgccggtcgtatggcgactcagatcggtgctttctacctgcaaaaagaccacggtggaaaaggcatcctgatgggtggcgtaacgggtgttaaaccagctaaagtcaccatcatcggtggtggtgtggttggtaccaacgcagcgaaaatggctgtcggtttgggcgcttccgtaacgatccttgatgtgaacacagcacgtttggaatatcttgatgatatcttccagggccgttgcatgactttgttctctaacgcgaaaaacatcgaagattctgttaaggaatcggacctggtggttggtggcgttctgatcacgggtcacaaagctccgacgttggtttccaaagaaatgatctccagcatggctaaaggctctgttgttgtggacgttgcggtcgaccagggtggttgtattgagacgtgccgtccaacttcccacaccagcccaacttacgaagttgacggtgtgatccattattgcgttccaaacatgccaggcgttgttcctagaacatccacttacgcattgacgaacgtaactctgcgctacggttccatgatcgcagcgatgggtgtggaagatgcagttgcgaaatcccctgcattgttgaaaggtctgaacgtatacggtggccacgttgtttacgagccagtcgcacgcgaccttcacatggaatacaaaccttacaaaatctaa

SEQ ID NO: 55142 - protein, 368 aa, Bdellovibrio bacteriovorus HD100
MIIGVPKEIKISENRVGLTEAGVRQYVSEGHTVIVEKDAGVGSGISNEQYEKAGAKIIDTKKEVYAKADMIQKVKEPLPDEYELMKENQILYTYLHLAAEAKLTKVLCERKVKAIAYETIQLDNGSLPLLTPMSEVAGRMATQIGAFYLQKDHGGKGILMGGVTGVKPAKVTIIGGGVVGTNAAKMAVGLGASVTILDVNTARLEYLDDIFQGRCMTLFSNAKNIEDSVKESDLVVGGVLITGHKAPTLVSKEMISSMAKGSVVVDVAVDQGGCIETCRPTSHTSPTYEVDGVIHYCVPNMPGVVPRTSTYALTNVTLRYGSMIAAMGVEDAVAKSPALLKGLNVYGGHVVYEPVARDLHMEYKPYKI

SEQ ID NO: 55143 - DNA, 1131 bp, Mycoplasma mycoides subsp. mycoides SC str. PG1
  CDS (1)..(1131): transl_table=4
ttgattaaggagaataatatgaaaataggattacctaaagaaattaaacaaaatgaaaatcgtgttggtattactcctatgggagttgttgaattagttagaaataatcatgaagttttagttgaatcaggagctggattaggtagtggttttagtgatcttgaatatgaaaaagcaggagcgaaaatcactaaaaatgtagaagatgtttgaaaacaagaaatgattgttaaagttaaagaacctttaaaatcagaatacaaatatgaaaaccaaattatttttacttattttcacttagctggtttaaaagatttaacagaagaattaatcaaaaataaagtcattgctattgcttatgaaactgttcaaacaccagataaagctttacctttattacgtccaatgagtgaagttgctggaagaatggcagttattattgcttcaaatttattattaaaaaatacagataaagatgctttaggagtacttgttagtggaactcctggaactccaaaagctaatattactattattgatggaggagttgctgggtcttcagctcttagattagcaatagctatggaagctaatgttactataattgaatttaatgagaatagaattagacaactatatgaaacatatggacacaaagcaaacatattaaaatcaaattatgcaaatattgcaaaagctgttaaagaaagtgatgtagttatttcaactgtattaattcctggtaagttagcacccagattagtaacaacagaaatggtaaaaacaatgaaaccaaatagtgttattattgatgttgctattgatcaaggtggaagtgttgaaactgttaatcatataagttcacatgctgatcctacttttataagacacaatgttattcattactcagttccaaacattcctggagcagttccaagaacttcaacaattgctttgactaatgctacacttacttatgtagtagaaattgcatcaaaagggtgaaaaaaagctattcaagacaatagtgcattaaaattaggtgtacaaactgttaatggtaaattagtttataaaaagattgctgattcattaaatattcaatatacaaaaatagataatgcaatataa

SEQ ID NO: 55144 - protein, 376 aa, Mycoplasma mycoides subsp. mycoides SC str. PG1
MIKENNMKIGLPKEIKQNENRVGITPMGVVELVRNNHEVLVESGAGLGSGFSDLEYEKAGAKITKNVEDVWKQEMIVKVKEPLKSEYKYENQIIFTYFHLAGLKDLTEELIKNKVIAIAYETVQTPDKALPLLRPMSEVAGRMAVIIASNLLLKNTDKDALGVLVSGTPGTPKANITIIDGGVAGSSALRLAIAMEANVTIIEFNENRIRQLYETYGHKANILKSNYANIAKAVKESDVVISTVLIPGKLAPRLVTTEMVKTMKPNSVIIDVAIDQGGSVETVNHISSHADPTFIRHNVIHYSVPNIPGAVPRTSTIALTNATLTYVVEIASKGWKKAIQDNSALKLGVQTVNGKLVYKKIADSLNIQYTKIDNAI

SEQ ID NO: 55145 - DNA, 1122 bp, Methanococcus maripaludis S2
  CDS (1)..(1122): transl_table=11
atgctaattggagtaccaaaagaaattaaaaacaatgaaaacagggtagctatcacaccagcaggtgtagaagctttcgttttagctggacacaaagtatacatcgaaaaaggtgcaggtcttggaagcgcaatcactgatgaagaatatgttgctgcaggagcagaaatcttggcaactgcaaaagaagtatttgacactgcagaaatgattatcaaagttaaagaacctcttaaatcagaatttgagcttttcaaagaaggacaaatcttattcacatacttgcacttggcaccagaaccacagcttacaaaagctcttctcgataaaaaaatcacaggaattgcatacgaaacagttcaacttgctgacagaagcttacctctcttaactccaatgagtgaaattgcaggaagaatgtcaatccaactcggtgcacaatacttggaaaaacaagaaggcggaaaaggtgttttattaggtggtgttccaggagtagaacctgctgaagttgtaattgtaggtggtggaatcgttggtaccaacgctgcaaaaattgcagtaggtatgggtgcaaaagtaacgatcttagatgttaacacaagaagactcgcttacttagacgatattttcggaaacaaagttacaaccttaatgtcaaacagcttcaacattgcaaaagcagttaaaaaagcagatttactcgtaggatgtgttttaatccctggtgcaaaagctccaaaattagtttcagaagaaatggttaaatcaatgcagccaggatcagtaatcgttgacgttgcaatcgatcaaggtggatcaatcgaaacaatcgatagaatcacaacacacgacaacccaacttacgaaaaattcggagttatccactacgcagttgcaaacatccctggagcagttgcaagaacatctacatacgcattaacaaacgacacacttccttacgcattacaaatagcaaacaaaggatataaacaagcagtaatcgaaaaccctgcattattaaaaggattaaacacacttaacggaaaagtaacttacgaagcagtggcaaaagcacacgaccttccatacacacctgcagaaaaagctttaaatgaataa

SEQ ID NO: 55146 - protein, 373 aa, Methanococcus maripaludis S2
MLIGVPKEIKNNENRVAITPAGVEAFVLAGHKVYIEKGAGLGSAITDEEYVAAGAEILATAKEVFDTAEMIIKVKEPLKSEFELFKEGQILFTYLHLAPEPQLTKALLDKKITGIAYETVQLADRSLPLLTPMSEIAGRMSIQLGAQYLEKQEGGKGVLLGGVPGVEPAEVVIVGGGIVGTNAAKIAVGMGAKVTILDVNTRRLAYLDDIFGNKVTTLMSNSFNIAKAVKKADLLVGCVLIPGAKAPKLVSEEMVKSMQPGSVIVDVAIDQGGSIETIDRITTHDNPTYEKFGVIHYAVANIPGAVARTSTYALTNDTLPYALQIANKGYKQAVIENPALLKGLNTLNGKVTYEAVAKAHDLPYTPAEKALNE

SEQ ID NO: 55147 - DNA, 1140 bp, Prochlorococcus marinus str. MIT 9303
  CDS (1)..(1140): transl_table=11
atggactcctctattctttcggccccaatagccagcatcggggtaccgaccgaaattaaagccgatgagctgagagtggcacttactcctgacggggtgaaagaactggtcaacaaggggctagaagtaagggttcaggctggtgccggggctggagcgggcattggtgatgaggccttcgctgatgccggtgccaagcttgtcaaccgcgaggaggcctgggcagcccatctcgtcgtgaaggtgaaggagcctcaggaagaggagttctgtctactcaggcaagacatggtgctcttcacttacctacacctggccgcctacccaaaggtgggtgaagccctgctcaatgctggcaccaccggcgtgggttacgaaacggtgcaactagaaaacggcagcctgccgctactggcaccaatgagcgaaatcgccggccgtctagccgcacaagtgggcgcccatttgctcgaacgacctcatggcggacgcggcgtgctgatcggaggctgcaccggcgtgcaaccggcccgggtggtcgtgttgggcgctggcaccgtgggctggaatgcggccaggctggccgccgccatggatgccgaagtgatgttgctagaccgctcacctgaacggttgcgtagccttgagacaagccgccgcggcaggctgattagcgttgtcaacagccgtggcctgctggagcgactcatccccactgcagaccttttgatcggtgccgtcctgacgcccggaggtcgagcacccaccctcgtcgatgaagagatggtgaaacaaatgaagcccaattcagtgatcgtggatgtagcgatcgatcagggaggttgtgtggccaccagccaagaaaccacccacacccatcccaccgtgaccatccacggcgtccagcactacgccgtcggcaacatgccaggtgcggtgccttttacctccactgaagccctggtgagcgtgaccctgccctacatccttggcattgccgggcggggccttgaggaggccgtcaccgaacgtcccgaacttctttccggcctcaacacaattcaaggctccgtttgtcatccgggtgtcgccaaggccctaggactaccaccaaggcacccaatggcatgcttacgctaa

SEQ ID NO: 55148 - protein, 379 aa, Prochlorococcus marinus str. MIT 9303
MDSSILSAPIASIGVPTEIKADELRVALTPDGVKELVNKGLEVRVQAGAGAGAGIGDEAFADAGAKLVNREEAWAAHLVVKVKEPQEEEFCLLRQDMVLFTYLHLAAYPKVGEALLNAGTTGVGYETVQLENGSLPLLAPMSEIAGRLAAQVGAHLLERPHGGRGVLIGGCTGVQPARVVVLGAGTVGWNAARLAAAMDAEVMLLDRSPERLRSLETSRRGRLISVVNSRGLLERLIPTADLLIGAVLTPGGRAPTLVDEEMVKQMKPNSVIVDVAIDQGGCVATSQETTHTHPTVTIHGVQHYAVGNMPGAVPFTSTEALVSVTLPYILGIAGRGLEEAVTERPELLSGLNTIQGSVCHPGVAKALGLPPRHPMACLR

SEQ ID NO: 55149 - DNA, 1038 bp, Thermus thermophilus HB27
  CDS (1)..(1038): transl_table=11
atggagttcggcgtgcccaaagaacggtcgggcggggagatcccggaaaggcgggtgcccctcacgccccagggggtgcgggagctcgtcgcctcggggcaccgggtctacgtggagcggggcgcgggggaaggggcgggctttcccgacgaggcctacgaggaggcgggggccaggctcgtgggccgggaggaggccttcggccgcccccaggtggtgctcaaggtggcccgccccaccctcgaggaggtggggctcatgcgcaaaaacgccgtcctcatggccttcctccacctggcggtggcggaaagccccctcgtggaggccatggcccaaaagggcctcaccgccatcggctacgagctggtgggcgaggagggccgccgccccgtcctaaaagccatgagcgagatcgccgggcgcatggccccccagctcgccgggcggctcctcgaggccccccagggcccgggcatcctcctctccggcctggtgggcatccccccggccgacgtggtcgtcctgggggcgggggtcctgggccgggcggcggcgcgggcctttctgggcgcgggggcctcggtccacctcctggaccgggcccttcccccgctggaggaggccgcccgggaggccccgggggccataaccgccctcgtcacccaggaccgcctggagcggtacgtggccttcgccgacgtcctggtgggggcggtggccgtccctggggagcgcaccccccttctcctcacccgcggcctcctcgcccgcatgcgccccggaagcgtcctcctggacttctccatagaccaggggggcgtctcggaaaccagccgccctggggtctaccaggagatgggcgtcacccacttctgcctccccaacgtccccgccctcgtcccccgcaccgcaagccacgccctcaccgccaccctcctcccctacctgctccggatccaggaagaccccctggcccttcccgggctccgccagggggcctaccttcttttcggcgagaaaggaggccacctagaatga

SEQ ID NO: 55150 - protein, 345 aa, Thermus thermophilus HB27
MEFGVPKERSGGEIPERRVPLTPQGVRELVASGHRVYVERGAGEGAGFPDEAYEEAGARLVGREEAFGRPQVVLKVARPTLEEVGLMRKNAVLMAFLHLAVAESPLVEAMAQKGLTAIGYELVGEEGRRPVLKAMSEIAGRMAPQLAGRLLEAPQGPGILLSGLVGIPPADVVVLGAGVLGRAAARAFLGAGASVHLLDRALPPLEEAAREAPGAITALVTQDRLERYVAFADVLVGAVAVPGERTPLLLTRGLLARMRPGSVLLDFSIDQGGVSETSRPGVYQEMGVTHFCLPNVPALVPRTASHALTATLLPYLLRIQEDPLALPGLRQGAYLLFGEKGGHLE

SEQ ID NO: 55151 - DNA, 1110 bp, Thermus thermophilus HB27
  CDS (1)..(1110): transl_table=11
atggtgatcggcgtgccgagggagatcaagaccttggagaaccgggtggccctcacgcccggcggggtggagagcctggtcaggcgcggccacaccgtgctggtggagcggggggccggggagggctcggggctttccgacgcggagtacgcccgggccggggccgagctcgtgggccgggaggaggcctggggtgcggagatggtggtgaaggtgaaggagcccctacccgaggagtacggcttcctgcgggagggcctcatcctcttcacctaccttcacctggccgcggaccgcggcctcaccgaggccatgctccgtagcggggtcacgggcatcgcctacgagaccgtccagcttcccgacggcaccctccccctcctcgtccccatgagcgaggtggcggggcggatggccccccaggtgggggcccagttcctggagaagcccaaggggggccggggggtcctcctcgggggggtgccgggggtggccccggccagcgtggtgatcctcgggggcgggaccgtgggcaccaacgcggccaagatcgccctggggatgggggcccaggtgaccatcctggacgtgaaccacaagcgcctccagtacctggacgacgtcttcggcgggcgggtggtcaccctcaccgccaccgaggccaacatcaaaaagagcgtccagcacgcggacctcctcatcggggccgtcctcgtccccggggccaaggcccccaagctcgtcacccgggacatgctctctctgatgaaggagggagcggtgatcgtggacgtggccgtggaccagggggggtgcgtggagaccatccggcccaccacccacgccgagcccacctacgtggtggacggggtggtccactacggggtggccaacatgcccggggcggtgcccaggaccagcaccttcgccctcaccaaccagaccctgccctacgtgctgaagctcgcggagaaggggctggacgcccttctggaggacgcggcccttctcaaggggctcaacacccacaaaggccgcctcacccaccccggggtggccgaggccttcggcctgccctacacgcctcccgaggaggccttgagggggtga

SEQ ID NO: 55152 - protein, 369 aa, Thermus thermophilus HB27
MVIGVPREIKTLENRVALTPGGVESLVRRGHTVLVERGAGEGSGLSDAEYARAGAELVGREEAWGAEMVVKVKEPLPEEYGFLREGLILFTYLHLAADRGLTEAMLRSGVTGIAYETVQLPDGTLPLLVPMSEVAGRMAPQVGAQFLEKPKGGRGVLLGGVPGVAPASVVILGGGTVGTNAAKIALGMGAQVTILDVNHKRLQYLDDVFGGRVVTLTATEANIKKSVQHADLLIGAVLVPGAKAPKLVTRDMLSLMKEGAVIVDVAVDQGGCVETIRPTTHAEPTYVVDGVVHYGVANMPGAVPRTSTFALTNQTLPYVLKLAEKGLDALLEDAALLKGLNTHKGRLTHPGVAEAFGLPYTPPEEALRG

SEQ ID NO: 55153 - DNA, 1113 bp, Candidatus Protochlamydia amoebophila UWE25
  CDS (1)..(1113): transl_table=11
atgattattggaattccgaaagagattaaaaatcatgaatatcgtgtcggagctactcctagcatggtgcgtttattagtagatgcaggccatcaagtatttgtgcaatcccttgctggagataaaattggatataatgatgaaatgttcacccgtgcaggcgccaaaattgttcagtcggcagaagaggtttataattctgaaatgattattaaagttaaggaaccccaacttagtgaatttcctcttttgaaagaggggcaaattttattttgctatttacatttagctccagatcctgagcaaactaaacatctggtagaaaaaaaagttgttgctattgcttatgaaactgttactgatgttcaagggcgtttacctcttcttattcctatgagtgaaattgcaggtcgcatcgctattcaagtgggagctacaagcttacaactcaattacggagggcaagggttattattaggtggtgtgcctggtgttgcacctgctgaggttgtcgttattgggggtggcgttgttggaacagaagcagcccgtatggctcttgggcttggagcaagtgtgacaatatttgacagagatttaaaccgtttacggtttttggatgcactatatggacctactttgaagacaatgtattcttctcctttaacaattgaggaagcggtttctaaggcagctctcgtcattggtgctgtccttattccaggtaaaacagctcctaagcttgtaacgaggaaaatgatccaaaaaatgtctcccggtacagtagttgtcgatgtagcaatagatcaaggtggatgtatggaaacgtcaagacctaccactcacactgaacctacttatgtagttgatggtgttcttcattattgtgtaacaaatatgccgggcacttgtgcaagaacatcaactcaagcattaacaaatgctactacagaatatgctcttgtgattgccaataaaggatggaaaaaagcactactcgatcatgtgggtttacgtcatggattgaatgtttgttttgggcaaattacgaatgagtcagtggcttacgatttaggttatacatatgttccagccgaaaatctcttatcttaa

SEQ ID NO: 55154 - protein, 370 aa, Candidatus Protochlamydia amoebophila UWE25
MIIGIPKEIKNHEYRVGATPSMVRLLVDAGHQVFVQSLAGDKIGYNDEMFTRAGAKIVQSAEEVYNSEMIIKVKEPQLSEFPLLKEGQILFCYLHLAPDPEQTKHLVEKKVVAIAYETVTDVQGRLPLLIPMSEIAGRIAIQVGATSLQLNYGGQGLLLGGVPGVAPAEVVVIGGGVVGTEAARMALGLGASVTIFDRDLNRLRFLDALYGPTLKTMYSSPLTIEEAVSKAALVIGAVLIPGKTAPKLVTRKMIQKMSPGTVVVDVAIDQGGCMETSRPTTHTEPTYVVDGVLHYCVTNMPGTCARTSTQALTNATTEYALVIANKGWKKALLDHVGLRHGLNVCFGQITNESVAYDLGYTYVPAENLLS

SEQ ID NO: 55155 - DNA, 1113 bp, Desulfovibrio vulgaris subsp. vulgaris str. Hildenborough
  CDS (1)..(1113): transl_table=11
atggtcgtcggtatcctcaaggaaatcaaagcggaagagaatcgtgtcgccatgaccccggccggggttgaggtgctttgccaccacgggcacaccgtactggtcgaggccggtgcgggggcaggcagcggcttcatggacgaggcctatgtggctgcgggggcgaccctgattgccaccccggcagagatttatgggcgtgccgacatggtgatgcacgtcaaggaaccgcagccgtcggagtatccgctcatccgcaaggggcaggtggtcttcacctacctgcatcttgcggccgacgaggaactcacccgggcactcatggacaccggcgccgtgtgcatcgcgtacgagaccatccagaaggccgacggcaccctgccgttgctgactcccatgagcgaggtcgccgggcgcatggccatccagcagggggccaagtaccttgagatggcacaaggcgggcacggcgtgctgttgggcggcgtgcccggtgtcgaccccggcacggtggtcgtcatcggcggcggcgtggtcggcaccaatgccgccaagatggcctgcggtctcggggccaaggtctacattctcgacatgaatctcgacaggttgcgctatctgagtgacatcatgcccgccaactgcttcccgctcatgtcgtccccttcgttgttgcggaaactcgtccgtgaggcggatgtggtggtgggtgccgtgctcatcaccggggcgaaggccccgcgcctcgtcacccgcgacatgctcaagaccatgaagcgcggtgccgtactcgtggacgtggccatcgaccagggcggctgcttcgagacgtcgcaccccacgacgcacggttcgcccatattcgtcgtggacggcgtcgtgcactactgcgtggcgaacatgccgggggccgtggccaagacctccacccttgcgctgaccaacgccacgctgccgtatgccgtggccctcgccgacaaggggtggcggcgcgccatgtccgaaagtcacgagatggcactgggagccaacgtcgtcgacggcaagattacctacgcgggcgtggccgaagcgttcgggctgcctctcgtgtctgtggagtcgctgttctag

SEQ ID NO: 55156 - protein, 370 aa, Desulfovibrio vulgaris subsp. vulgaris str. Hildenborough
MVVGILKEIKAEENRVAMTPAGVEVLCHHGHTVLVEAGAGAGSGFMDEAYVAAGATLIATPAEIYGRADMVMHVKEPQPSEYPLIRKGQVVFTYLHLAADEELTRALMDTGAVCIAYETIQKADGTLPLLTPMSEVAGRMAIQQGAKYLEMAQGGHGVLLGGVPGVDPGTVVVIGGGVVGTNAAKMACGLGAKVYILDMNLDRLRYLSDIMPANCFPLMSSPSLLRKLVREADVVVGAVLITGAKAPRLVTRDMLKTMKRGAVLVDVAIDQGGCFETSHPTTHGSPIFVVDGVVHYCVANMPGAVAKTSTLALTNATLPYAVALADKGWRRAMSESHEMALGANVVDGKITYAGVAEAFGLPLVSVESLF

SEQ ID NO: 55157 - DNA, 1113 bp, Listeria monocytogenes str. 4b F2365
  CDS (1)..(1113): transl_table=11
atgttagtcggcgtaccaaaagaaattaaaaataacgagaatagggtggcaatgactccggcaagtgttttttcatacgtaaatgcaggtcatactgtatacgtggaaaaagatgcgggcattggctctaattatcaagacgctgattttgtgcaagcgggggcaaaaattgttgaaacagctaaagaagcttgggatgtagatatggttgtaaaagtaaaagaaccgattgcatcagagtatacatactttaaagaaggactattacttttcacatatttacatttggcaaatgaaccaacgcttgcgaaagctttgatggagagtaaagtaaatagtgtagcgtatgaaacagtagaacttgcagaccacacgttgccactactttcgccaatgagtgaagttgctgggcgaatggcagctcagattggcgcacaatttttacaaagaacgaatggtggtatgggtgtcttgcttggtggggtgccgggtgtagagaaaagtgaagtggttattattggtggcggaatcgctggaacaaatgcagcgaaaattgcagctggtttaggtgccaacgtgaccattcttgatatgaatttgaaacgattgcgcgaactggacgatatttttggcaatcaagtccaaacgttaatgtcgaatgattttaatattgaaacagctgtgaaaaaagctgatttggttattggggcagttttaattccaggagcaaaagcgcccaaactcgtcaaagagcatgtaattaaacaaatgattccgggatctgtccttgtagatatcgcgattgaccaaggagggatttttgaaacaacagatcacgtttccacacacgataatccaacctacgaaaaatatggtgtacttcattatgctgttgcaaatatgccaggtgcagtaccgcggacgtccactttggcgcttactaatgccactttaccatttggattgaaactggctaatcaaggcttagaagcagccgtgcaaaatgacccattcttacttcgtggattaaacacataccaaggtcacattacgtacaaggctgttgcagattcacttgatttaccctatacggatagcaaagaattaatttaa

SEQ ID NO: 55158 - protein, 370 aa, Listeria monocytogenes str. 4b F2365
MLVGVPKEIKNNENRVAMTPASVFSYVNAGHTVYVEKDAGIGSNYQDADFVQAGAKIVETAKEAWDVDMVVKVKEPIASEYTYFKEGLLLFTYLHLANEPTLAKALMESKVNSVAYETVELADHTLPLLSPMSEVAGRMAAQIGAQFLQRTNGGMGVLLGGVPGVEKSEVVIIGGGIAGTNAAKIAAGLGANVTILDMNLKRLRELDDIFGNQVQTLMSNDFNIETAVKKADLVIGAVLIPGAKAPKLVKEHVIKQMIPGSVLVDIAIDQGGIFETTDHVSTHDNPTYEKYGVLHYAVANMPGAVPRTSTLALTNATLPFGLKLANQGLEAAVQNDPFLLRGLNTYQGHITYKAVADSLDLPYTDSKELI

SEQ ID NO: 55159 - DNA, 1134 bp, Mycoplasma mobile 163K
  CDS (1)..(1134): transl_table=4
atgaaaataggattcccaaaagaaatcaaaaataatgaatttagaataggggtaacaccgaatatagttagtgatttagtaaaaaataaacatgaagtgttgattgaaaaaaatgcaggacttgaagcgggtttttcggatgaagattttattaaaagtggcgcaaaaatatcaactcaagaagaagtttgaaaaagtccattcataattaaaattaaagaaccattagagagtgaattcaaatttttcaaaaaagatcaagtaatttttacatatttccatttggcaactgacccaaaattagctaaggctttaatggattcgcaagcaattggcttagcatatgaattagttagaaaagacaataaaaatattttgctagctccaatgtcagtagtagcaggaaaattagcaattcttaatggggcattttatctacaaaaacaaaataaaggttttggaattcttccaggtggaatagaaggaactagacatggtaaaaccttggttgtaggtggaggtattgtaggacaaagtgcagcttgaaattctcttataattggtcaaaatacagttgttttagataaaaacgaagctttaatcaaacaattaaatgaatcaaaagaattcaaaaatgcttcaactttaagtaaaggaaagtttgaagcttatgtttcagatgagaaaactttgacagaacacattaaagatgctgatcttgttgtatctacaattcatattccaggagcaaaagtagcaaaacttattacaaaaactcatgttgaaagtatgaaaaaaggttcagtaattgttgatgttgcaatagatcaaggtggttcagtagaaactattattgctcctacttctcatagcaatcctattagtgaatataaagggattttacaatatgcggttccaaatatgcctggagcaacaccaaggaccgcttcactcgctttaacaaatgcaactgaattttacattcacgaaattgcaaataagggttttttaaattcaattaaaagtgctaaagagctttttggaggagttttagcttataaaggtaaaatgacaaacgaaaatattgctaaagcattaaaattagaatttgttcctttagaaaaattgctttaa

SEQ ID NO: 55160 - protein, 377 aa, Mycoplasma mobile 163K
MKIGFPKEIKNNEFRIGVTPNIVSDLVKNKHEVLIEKNAGLEAGFSDEDFIKSGAKISTQEEVWKSPFIIKIKEPLESEFKFFKKDQVIFTYFHLATDPKLAKALMDSQAIGLAYELVRKDNKNILLAPMSVVAGKLAILNGAFYLQKQNKGFGILPGGIEGTRHGKTLVVGGGIVGQSAAWNSLIIGQNTVVLDKNEALIKQLNESKEFKNASTLSKGKFEAYVSDEKTLTEHIKDADLVVSTIHIPGAKVAKLITKTHVESMKKGSVIVDVAIDQGGSVETIIAPTSHSNPISEYKGILQYAVPNMPGATPRTASLALTNATEFYIHEIANKGFLNSIKSAKELFGGVLAYKGKMTNENIAKALKLEFVPLEKLL

SEQ ID NO: 55161 - DNA, 1134 bp, Bacillus thuringiensis serovar konkukian str. 97-27
  CDS (1)..(1134): transl_table=11
atgcgtattggggtaccagcagaaattaaaaacaacgaaaaccgtgtggcaatgacaccagcaggtgttgtacatttaattcgtaacaatcacgaagtattcattcaaaagggtgcaggtttaggatctggtttcacagatgctcagtatgttgaagcaggagcgaaaattgttgatacagctgaagaagcttggaacatggaaatggttatgaaagttaaggaaccaattgaaagcgaatacaaacacttcagcgaaggtttgatcttattcacatacttacacttagctccagaaccagaattaacaaaagcattaatcgaaaagaaagttgtttctattgcatatgaaacagtacaattagaaaaccgttctctaccattacttgcacctatgagtgaagtagctggtcgtatggctgcacaaattggtgcacaattccttgagaaaaacaaaggcggtaaaggtatcttacttgcaggtgttccaggggttaaacgtggtaaagtaacaatcatcggtggtggacaagctggtacaaatgctgctaaaattgcagttggactaggtgcggatgtaacaatcatcgacttaagtgcagaacgtcttcgtcaattagatgatattttcggaaatcaagtaaaaactttaatgtctaatccttacaatattgcagaagctgtaaaagagtctgatcttgtaattggtgcagtattaatcccaggtgcaaaagctccaaaacttgtaacagaagaaatgattaaatcaatggaaccaggttctgttgttgtagatatcgcgattgaccaaggtggtattttcgaaacaactgaccgtattacaactcatgataacccaacttacgaaaaacacggcgttgttcattatgcagttgcaaacatgccaggtgcggttccacgtacatcaactcttgcattaacaaacgtaacagtaccatatgcagtgcaaattgctaacaaaggctataaagaagcttgcctaggcaactctgcattactaaaaggtattaacacattagatggctatgtaacattcgaagcagttgcagaagctcatggtgtagagtacaaaggtgctaaagaattattagaagcagaaacagtatcttgctaa

SEQ ID NO: 55162 - protein, 377 aa, Bacillus thuringiensis serovar konkukian str. 97-27
MRIGVPAEIKNNENRVAMTPAGVVHLIRNNHEVFIQKGAGLGSGFTDAQYVEAGAKIVDTAEEAWNMEMVMKVKEPIESEYKHFSEGLILFTYLHLAPEPELTKALIEKKVVSIAYETVQLENRSLPLLAPMSEVAGRMAAQIGAQFLEKNKGGKGILLAGVPGVKRGKVTIIGGGQAGTNAAKIAVGLGADVTIIDLSAERLRQLDDIFGNQVKTLMSNPYNIAEAVKESDLVIGAVLIPGAKAPKLVTEEMIKSMEPGSVVVDIAIDQGGIFETTDRITTHDNPTYEKHGVVHYAVANMPGAVPRTSTLALTNVTVPYAVQIANKGYKEACLGNSALLKGINTLDGYVTFEAVAEAHGVEYKGAKELLEAETVSC

SEQ ID NO: 55163 - DNA, 1134 bp, Bacillus thuringiensis serovar konkukian str. 97-27
  CDS (1)..(1134): transl_table=11
atgcgtatcggtattccaacagaaattaaaaacaatgaaaaccgcgtggcaatgacgccagcgggagcagtacatttagtacaaaatggtcatgaagtttttgttcaaaaaggagcaggtttaggatctggctttacggatgaagaatacgtacaagctggtgcgaaacttgttgaaactgctgaagaagcatggaatcaagatatggttatgaaggtaaaagagccagttgcaagtgaatacggctatttccgtgaaggtttaattttattcacatacttacacttagctccagaaccagaattaacgaaagcattaattgataacaaagttgtatcaattgcatatgaaacagtacaattagacaatcgttcattaccattacttgcacctatgagtgaagtagcaggtcgtatgtctgcacaaatcggtgcacaattccttgagaaaaacaaaggcggtaaaggtattttacttgcaggcgttccaggggtaaaacgcggcaaagtaacaattatcggcggtggtcaagctggtacaaacgcagcgaagattgcagtaggtttaggtgcagatgtaacaatcatcgacttaagtgcagaacgtcttcgtcaattagatgacattttcggtaaccaagtaaaaacgttaatgtctaatccatacaatattgcagaagctgtaaaagaatctgaccttgttattggtgcggtattaattccaggtgcaaaagcgccaaaacttgtaacagaagaaatgattcaatcaatggaaccaggttctgtcgttgtagatatcgcgattgaccaaggtggtattttcgaaacaactgaccgtattacaactcatgacaacccaacttacgaaaaacatggcgttgttcattatgcagttgcgaatatgccaggtgcggttccacgtacatcaactcttgcattaacaaacgtaacagtaccatatgcagtgcaaattgcgaacaaaggctataaagatgcttgcctaggcaacactgcattattaaaaggtattaacacattagatggatatgtaacattcgaagcggttgcagaagctcacggtttacaatacgctgatgcaaaagagcttcttgaaaaagctcctgctttatcataa

SEQ ID NO: 55164 - protein, 377 aa, Bacillus thuringiensis serovar konkukian str. 97-27
MRIGIPTEIKNNENRVAMTPAGAVHLVQNGHEVFVQKGAGLGSGFTDEEYVQAGAKLVETAEEAWNQDMVMKVKEPVASEYGYFREGLILFTYLHLAPEPELTKALIDNKVVSIAYETVQLDNRSLPLLAPMSEVAGRMSAQIGAQFLEKNKGGKGILLAGVPGVKRGKVTIIGGGQAGTNAAKIAVGLGADVTIIDLSAERLRQLDDIFGNQVKTLMSNPYNIAEAVKESDLVIGAVLIPGAKAPKLVTEEMIQSMEPGSVVVDIAIDQGGIFETTDRITTHDNPTYEKHGVVHYAVANMPGAVPRTSTLALTNVTVPYAVQIANKGYKDACLGNTALLKGINTLDGYVTFEAVAEAHGLQYADAKELLEKAPALS

SEQ ID NO: 55165 - DNA, 1113 bp, Propionibacterium acnes KPA171202
  CDS (1)..(1113): transl_table=11
atgcgtgttggtgttcctactgaggttaagaatagtgagtttcgtgtggctgtgacgccggcgggtgttcatgcgttggttggtcgtggtcatgaggtgttggttcaggctggtgctggtgtgggttcgggtattccggattcggattttgtgggtgctggtgcgcgggttgtgggtgatgtggagtcggtgtggggtgatgctgatttggtgttgaaggtgaaggagcctgttgcggaggagtatgggcggttgcatgagggtttggttctttttacgtatcttcatttggctgctgatgaggcgttgactcgtgagcttttggggcgtggggtgacgtcgattgcgtatgagacggtggagttggctgatcattcgttgccgttgttgtctccgatgtcggagattgcgggtcggttggctgctcaggtgggtgcgaattgtttgttgcagtctgctgggggtcgtggtgtgttgtttggtggtggttcgggtgtgcgtcgtggtcgggtgagtgtgcttggtggtggtgtggctgggttgtgtgcggctcgtgtggctgcgggtatgggtgctgatgtgacggtgtttgatgtggatgtggcgcggatgcgttatatcgatgaggtgtggggtgggcgtattggtacgcggttttcgagtccgttggcggttcgggaggcgtgtggtgagtctgatgtggtgattgggtcggtgttggtgcctggtgctcggactccgcatttggtggatcatgagatggtgttggggatggtgccggggtcggtgttggtggatgttgcggtggatcagggtgggtgttttgaggattctcatccgacgacgcatgcggatccgacgtttgtggtggggggttcggtgttttattgtgtggcgaatatgccgggtgcggtgccgcatacgtcgacgtatgcgttgacgaatgcgacgatgcggtatgtgttgttgttggctgatgagggttggaggggtgcgtgtgggtcgcgtgatgatttgcggcgtggtttggcgacttgtgatgggaagttggtgagtgcgccggtgggtgaggcgttgggtattgagtgtgtgcctgtgtctgaggtgttgtga

SEQ ID NO: 55166 - protein, 370 aa, Propionibacterium acnes KPA171202
MRVGVPTEVKNSEFRVAVTPAGVHALVGRGHEVLVQAGAGVGSGIPDSDFVGAGARVVGDVESVWGDADLVLKVKEPVAEEYGRLHEGLVLFTYLHLAADEALTRELLGRGVTSIAYETVELADHSLPLLSPMSEIAGRLAAQVGANCLLQSAGGRGVLFGGGSGVRRGRVSVLGGGVAGLCAARVAAGMGADVTVFDVDVARMRYIDEVWGGRIGTRFSSPLAVREACGESDVVIGSVLVPGARTPHLVDHEMVLGMVPGSVLVDVAVDQGGCFEDSHPTTHADPTFVVGGSVFYCVANMPGAVPHTSTYALTNATMRYVLLLADEGWRGACGSRDDLRRGLATCDGKLVSAPVGEALGIECVPVSEVL

SEQ ID NO: 55167 - DNA, 1116 bp, Leifsonia xyli subsp. xyli str. CTCB07
  CDS (1)..(1116): transl_table=11
atgaaggtcacgatcccccgcgagatcaagaacaacgagttccgggtggcgatcaccccggccggtgtgcatgatctggtcggcgccgggcacgaggtctatgtggagatgggcgccggggccggttcctccatccccgacgagttctatgcggcctcgggcgcgacactcctgccggacgctgcggcgacctgggcggccggtgacctcatcctgaaagtcaaagagccggtcgcgagcgagtacggccacttccgcgagggcctggtgctgttcgcctatctgcatctcgccgccgacgaagcgctcacccgcgcgctcatcgcctccggcatgaccgccatcggctacgagaccgtgcagctgccgaaccgttccctgccgttgctcgcaccgatgagcgaggtcgcagggcggctcgcgcccatcgtgggggcgaacactatgctcaagccaaacggcgggccgggtctgctggtcccgggtgtgccggggacgcatcccgccgtcgtgacggtgctcggcggcggcgtggccggcacgaacgcgatctcggtggccgtcggactgggcgcagacgtcaccgtcctcgacacgaacatcgtgcgcctccgcgaactcgaagccctgtacgccggacgcatcaaaaccatcgcgtccaacagcttcgagatcgacagggctgtcgtagcctccgacctcgccatcggctcggtgctcgtgcccggtgcgaaggccccgacgctcgtcagcgacgacctcgtctcgcggatgaagccgggcagcgtcctcgtggacatcgcggtcgaccagggcggatgcttcgccggctcccacccgaccacccacgccgccccgacgttcaccgttcaccagtcggttttctactgcgttgccaatatgccgggcgccgtgccgcacacctccacatatgccctcactaacgcgaccctgccctacgcccgctcgatcgcgaaccgcggctgggcagaagcactccgcgatgacgcctcgctggccctcggtctgaacgtccacgccggccaggtcacgaaccgcggcgtcgccgaagcccacggcctccccgagagcgagatcgccgccgcgctcgcgtag

SEQ ID NO: 55168 - protein, 371 aa, Leifsonia xyli subsp. xyli str. CTCB07
MKVTIPREIKNNEFRVAITPAGVHDLVGAGHEVYVEMGAGAGSSIPDEFYAASGATLLPDAAATWAAGDLILKVKEPVASEYGHFREGLVLFAYLHLAADEALTRALIASGMTAIGYETVQLPNRSLPLLAPMSEVAGRLAPIVGANTMLKPNGGPGLLVPGVPGTHPAVVTVLGGGVAGTNAISVAVGLGADVTVLDTNIVRLRELEALYAGRIKTIASNSFEIDRAVVASDLAIGSVLVPGAKAPTLVSDDLVSRMKPGSVLVDIAVDQGGCFAGSHPTTHAAPTFTVHQSVFYCVANMPGAVPHTSTYALTNATLPYARSIANRGWAEALRDDASLALGLNVHAGQVTNRGVAEAHGLPESEIAAALA

SEQ ID NO: 55169 - DNA, 1116 bp, Desulfotalea psychrophila LSv54
  CDS (1)..(1116): transl_table=11
atgattgtaggtatcttaaaagaaattaaaatcaaagaagatcgtgtttgtatgacccctggcggagttgtaaccatggtagctaatggtcacgatgtaattgtagagaaaggtgctggtcttggttctagtttctctgatgcagaatacgtagcagcaggcgctaccatcattgatgcagctgcagatgtttatgcaaaagctgatatggtaatgcacgttaaagagccacagccttctgagtacgcaatgatccgtaaaggtcaaatcgttttcacttaccttcacttggcagcagataagccacaaaccgatggtttggttgcatctggcgctacctgtatcgcttacgagactgttcaaatggcagatcgttcacttcctcttcttaccccaatgtctgaggttgctggtcgtatggcaattcagcagggtgctaaggctctcgaggctgtaaacggcggaattggcaaactcatcggtggtgtaccgggtgttgctccagctaaaatcatggttatcggtggtggtgttgttggtgttcaggctgctaagatggcttgtggacttggcgctcaagtttaccttcttgacatcaaccttgatcgtcttcgttatcttgaagatgtaatgcctgctaactgtaccaccatcatgtcttctaaagctgctatccacgagcttcttccacaggttgaccttgtggttggtgcggtacttatcccaggcgctaaggctccttcagtacttacccgcgcagatcttaaacttatgcgtcctaagactgctattgttgatgttgctatcgatcaaggtggttgttttgagacctctaagcctaccactcacaccgatcctacctacgttgtagacgagatcgttcattactgtgttgctaacatccctggcgcagtacctttgacctctaccatggctcttaccaatgcaaccctcccatttgcagtacaacttgcaaacaaaggttggaaaaaagcatgtcaggacaaccacgctcttgcacttggtttgaacgtacacgaaggaaaacttaccttcaaaggtgtatgtgatgcattcgacatgccttacaccccagtagaagaggttctcgcatag

SEQ ID NO: 55170 - protein, 371 aa, Desulfotalea psychrophila LSv54
MIVGILKEIKIKEDRVCMTPGGVVTMVANGHDVIVEKGAGLGSSFSDAEYVAAGATIIDAAADVYAKADMVMHVKEPQPSEYAMIRKGQIVFTYLHLAADKPQTDGLVASGATCIAYETVQMADRSLPLLTPMSEVAGRMAIQQGAKALEAVNGGIGKLIGGVPGVAPAKIMVIGGGVVGVQAAKMACGLGAQVYLLDINLDRLRYLEDVMPANCTTIMSSKAAIHELLPQVDLVVGAVLIPGAKAPSVLTRADLKLMRPKTAIVDVAIDQGGCFETSKPTTHTDPTYVVDEIVHYCVANIPGAVPLTSTMALTNATLPFAVQLANKGWKKACQDNHALALGLNVHEGKLTFKGVCDAFDMPYTPVEEVLA

SEQ ID NO: 55171 - DNA, 1116 bp, Desulfotalea psychrophila LSv54
  CDS (1)..(1116): transl_table=11
atgattgtaggtatcttaaaagaaattaaaatcaaagaagatcgtgtttgtatgacccctggcggagttgtaaccatggtagctaatggtcacgatgtaattgtagagaaaggtgctggtcttggttctagtttctctgatgcagaatacgtagcagcaggcgctaccatcatcgatgcagctgcagacgtttatgcaaaagctgatatggtaatgcacgttaaagagccacagccttctgagtacgcgatgatccgtaaaggtcaaatcgttttcacctaccttcacttggcagcagataagccacaaaccgatggtttggttgcatctggcgctacctgtatcgcttacgagactgttcaaatggcagatcgttcacttcctcttcttaccccaatgtctgaggttgctggtcgtatggcaattcagcagggtgctaaggctctcgaggctgtaaacggcggaattggcaaactcatcggtggtgtaccgggtgttgctccagctaaaatcatggttatcggtggtggtgttgttggtgttcaggctgctaagatggcctgtggacttggcgctcaagtttaccttcttgatatcaaccttgatcgtcttcgttatcttgaagatgtaatgcctgctaactgtaccaccatcatgtcttctaaggctgctatccacgagcttcttccacaggttgaccttgtggttggtgcggtacttatcccaggcgctaaggctccttcagtacttacccgcgcagaccttaaacttatgcgtcctaagactgctgttgttgatgttgctatcgatcaaggtggttgttttgagacctctaagcctaccactcacaccgagcctacctacgttgtagacgagatcgttcattactgtgttgctaacatccctggcgcagtacctttgacctctaccatggctcttaccaatgcaacccttccatttgcagtacaacttgcaaacaaaggttggaagaaagcatgtcaggacaacagagcgcttgcacttggtttgaacgtacacgaaggaaaacttaccttcaaagcagtatgtgatgcatttgacatgccttacaccccagtagaagaggttctcgcatag

SEQ ID NO: 55172 - protein, 371 aa, Desulfotalea psychrophila LSv54
MIVGILKEIKIKEDRVCMTPGGVVTMVANGHDVIVEKGAGLGSSFSDAEYVAAGATIIDAAADVYAKADMVMHVKEPQPSEYAMIRKGQIVFTYLHLAADKPQTDGLVASGATCIAYETVQMADRSLPLLTPMSEVAGRMAIQQGAKALEAVNGGIGKLIGGVPGVAPAKIMVIGGGVVGVQAAKMACGLGAQVYLLDINLDRLRYLEDVMPANCTTIMSSKAAIHELLPQVDLVVGAVLIPGAKAPSVLTRADLKLMRPKTAVVDVAIDQGGCFETSKPTTHTEPTYVVDEIVHYCVANIPGAVPLTSTMALTNATLPFAVQLANKGWKKACQDNRALALGLNVHEGKLTFKAVCDAFDMPYTPVEEVLA

SEQ ID NO: 55173 - DNA, 1119 bp, Symbiobacterium thermophilum IAM 14863
  CDS (1)..(1119): transl_table=11
gtgagggttggcgtagtgcgcgagctgaaggcctacgagaaccgggtggccatgacccccgcgggcgtcatggcgatggtcagggccggccatgaggtgtacgtggagcacgatgccggcaggggctccgggttcgacgactcggagtacgtcgccgcgggcgccaggatcctgcccagcaatgaggacgtctgggccaccgccgacatgatcgtcaaggtgaaagagccgctgccgcccgagtacgatctcatgcgtgagggccagatcatcttcacctacctgcacctggccgccgaaccggagctgacccggaagctgatcgagcggaagagcatcgccatcgcctacgagacggtgcaaccggccgaccggtccctgccgctcttgacgcccatgtccgaggtggccggccgcatggccgtccagatcggcgcccactacctggagaaggcccacggcgggcggggtgtgctgctgggcggcgtgcccggcgtcgcccccggccgggtggcgatcatcggtggcggcaccgtcggcaccaatgcggcgaagatcgccctggggatgggcgcgcacgtcaccatcctggacatcaacgccgatcggctgcgctacctggacgacatcttcggctcccgggtggagacgcggatctccaacgagttcgaaattgccaatgccgtggcgcaggccgacctggtcatcggggcggtgctgatccccggcgccaaggcgccgaagctggtaacggcggagatggtcaagcggatggccccgggttccgtcatcgtggatgtggccatcgaccagggcgggtcggtggagaccatcgaccgggtgacgacccaccaggatcccgtctacgagcggttcggcgtcgttcactacgccgtcgccaacatccctggcgcggtgccccggacctccacctgggctctgaccaacgtgacgctgccttatgccctgaagctggccaacctgggctggaaggaggcgctgcgtcaggatccggcgctggcgaagggcgccaacgtggtcagcggccacgtcacctacccggcggtcgccgaggcccacgggctggagtacgtggagctggacaacgtgctcaggtag

SEQ ID NO: 55174 - protein, 372 aa, Symbiobacterium thermophilum IAM 14863
MRVGVVRELKAYENRVAMTPAGVMAMVRAGHEVYVEHDAGRGSGFDDSEYVAAGARILPSNEDVWATADMIVKVKEPLPPEYDLMREGQIIFTYLHLAAEPELTRKLIERKSIAIAYETVQPADRSLPLLTPMSEVAGRMAVQIGAHYLEKAHGGRGVLLGGVPGVAPGRVAIIGGGTVGTNAAKIALGMGAHVTILDINADRLRYLDDIFGSRVETRISNEFEIANAVAQADLVIGAVLIPGAKAPKLVTAEMVKRMAPGSVIVDVAIDQGGSVETIDRVTTHQDPVYERFGVVHYAVANIPGAVPRTSTWALTNVTLPYALKLANLGWKEALRQDPALAKGANVVSGHVTYPAVAEAHGLEYVELDNVLR

SEQ ID NO: 55175 - DNA, 1140 bp, Bacillus licheniformis ATCC 14580
  CDS (1)..(1140): transl_table=11
atgattatcggcgtaccgaaagaaatcaaaaacaatgaaaaccgtgttgctttgactcccggtgcggcttctcaattgatcgcggcaggacaccgcgtcatcgtggaaaaagacgcggggactggaagcgggtttgaaaatgaggattacgtctcagtgggagccgagatctcagaacaagcggaagccgtctgggaagcggctgaaatggtgatgaaagtcaaagagccgctccctgaagaatatccgtattttagagaaggtctcatcttgttcacctacctgcatctagccgcagagccttccttggctgaagcattaaagcagaaaggcgtgacagccatcgcctatgaaaccgtcagcaatggccgttcccttcctttgctgacgccgatgtctgaggtagccgggcggatggccgcccaaatcggcgcgcagttcctcgaaaagccgaaaggcggaaaaggcatattattggccggtgtacccggagtcgcgcgcgggaaagtgacgatcatcggcggaggcgttgtcggcacaaatgcggcaaaaatcgcggcgggcctcggagccgacgtgacgatgatcgatttaagcgcggatcgcctgcgccagcttgatgatcaattcggcaatcaaattaaaacattgatgtccaatccggtcaacatcgccgatgccgtagcggaagccgacctcctcatctgcgcggttctgatcccgggtgccaaagcgccgactttagtgacggaagagatggtcaaacagatgaaaccgggctctgtgattgttgacgtcgcaatcgatcaaggcggcatcgtcgagacggtggatcacatcacaacccacgacaatccgacctatgtcaaacacggagtcgtccattacgctgttgccaacatgcctggcgccgttccgcggacatctacagttgcgctgacgaatgtaacagttccgtatgcgcttgaaatcgcgaacaaaggcgcggaaaaagcgattcttgaaaaccctgcgctaaaagccggcgtcaacacagcaaacggccatattacttatgaagccgtagccagggacttaaactatggctacgttcccgcagagcttgcgatcgaaaattcgtcgtcagccgccggcgcatag

SEQ ID NO: 55176 - protein, 379 aa, Bacillus licheniformis ATCC 14580
MIIGVPKEIKNNENRVALTPGAASQLIAAGHRVIVEKDAGTGSGFENEDYVSVGAEISEQAEAVWEAAEMVMKVKEPLPEEYPYFREGLILFTYLHLAAEPSLAEALKQKGVTAIAYETVSNGRSLPLLTPMSEVAGRMAAQIGAQFLEKPKGGKGILLAGVPGVARGKVTIIGGGVVGTNAAKIAAGLGADVTMIDLSADRLRQLDDQFGNQIKTLMSNPVNIADAVAEADLLICAVLIPGAKAPTLVTEEMVKQMKPGSVIVDVAIDQGGIVETVDHITTHDNPTYVKHGVVHYAVANMPGAVPRTSTVALTNVTVPYALEIANKGAEKAILENPALKAGVNTANGHITYEAVARDLNYGYVPAELAIENSSSAAGA

SEQ ID NO: 55177 - DNA, 1131 bp, Bacillus licheniformis ATCC 14580
  CDS (1)..(1131): transl_table=11
atgatcattggaattcctaaagaaattaaaaacaacgagaaccgtgtagccattactccggccggagtagtcgcgctaaaaaaaagcggtcatcaagttttaattgaacagggagccgggcttggaagcggattcgaggacgccgactacaaagcagccggggcggacattttggctgaagcgaaagatgtgtggggaaaagcggatatggtcatgaaagtgaaagagccgatcagctctgaatacggctatttccgaaaaggacttgttttatttacttatctgcacttagcggctgaacctaagcttgcgaaagcgcttgtggacagcggcgtcacagccatcgcttacgaaacggtcgaagtgaaccggacgcttccgctcttgactccaatgagtgaagtcgccggacgcatggcttcgcagatcggcgcgcaatttcttgagaaatcaaaaggcggcaaaggcatcctgttatcgggcgtacccggtgtaaaacgcggcaaagtcacgatcatcggcggcggagtggttggtacgaacgctgccaaaatcgctgtcggacttggcgctgacgtcactttgatcgacttgagcgctgagcgcctccgtcagctcgatgaccagttcggcaaagacattcaaacgcttatgtccaatccgctcaacattgcggaagccgtaaaagactcagaccttgtcatcggcgccgtcttaattcctggtgcaaaagcgccgaagcttgtcacagaagagatgatcaagtcgatgtcgccaggttcagttgttgtagacgtggcgattgaccagggcggcattatcgaaacggttgataaaatcactacgcatgacgatccgacttacacgaagcacggcgttgtccactatgccgtcgccaatatgccgggagccgttccccgtacatcaacgatcggcttaacaaacgtcaccatgccttacgccttgcaaatcgcaaataaaggcgttgaacaagcagtcgccgaaaatcaggcgctcgctctcggcgtcaacgttgcaaacggaagcatcacctacaaggccgtcgcgcgcgaccttggatatgaatatgtatctgtagaagatgcatttcaaacggtaaccgctggttaa

SEQ ID NO: 55178 - protein, 376 aa, Bacillus licheniformis ATCC 14580
MIIGIPKEIKNNENRVAITPAGVVALKKSGHQVLIEQGAGLGSGFEDADYKAAGADILAEAKDVWGKADMVMKVKEPISSEYGYFRKGLVLFTYLHLAAEPKLAKALVDSGVTAIAYETVEVNRTLPLLTPMSEVAGRMASQIGAQFLEKSKGGKGILLSGVPGVKRGKVTIIGGGVVGTNAAKIAVGLGADVTLIDLSAERLRQLDDQFGKDIQTLMSNPLNIAEAVKDSDLVIGAVLIPGAKAPKLVTEEMIKSMSPGSVVVDVAIDQGGIIETVDKITTHDDPTYTKHGVVHYAVANMPGAVPRTSTIGLTNVTMPYALQIANKGVEQAVAENQALALGVNVANGSITYKAVARDLGYEYVSVEDAFQTVTAG

SEQ ID NO: 55179 - DNA, 1134 bp, Bacillus cereus E33L
  CDS (1)..(1134): transl_table=11
atgcgtattggggtaccagcagaaattaaaaacaacgaaaaccgtgtggcaatgacaccagcaggtgttgtacatttaattcgtaataatcacgaagtattcattcaaaagggtgcaggtttaggatcgggtttcacagatgctcagtatgttgaagcgggagcgaaaattgttgatacagctgaagaagcttggaacatggaaatggttatgaaagttaaggaaccaattgaaagcgaatacaaacacttcagcgaaggtttgatcttattcacatacctacacttagctccagaaccagaattaacaaaagcattaatcgaaaagaaagttgtttctattgcatatgaaacagtacaattagaaaaccgttctctaccattacttgcacctatgagtgaagtagctggtcgtatggctgcacaaatcggtgcacaattccttgagaaaaacaaaggcggtaaaggtatcttacttgcaggtgttccaggggttaaacgtggtaaagtaacaatcatcggtggtggacaagctggtacaaatgctgctaaaattgcagttggactaggtgcggatgtaacaatcatcgacttaagtgcagaacgtcttcgtcaattagatgatattttcggaaatcaagtaaaaactttaatgtctaatccttacaatattgcagaagctgtaaaagagtctgatcttgtaattggtgcagtattaatcccaggtgcaaaagcgccaaaacttgtaacagaagaaatgattcaatcaatggaaccaggttctgtcgttgtagatatcgcgattgaccaaggtggtattttcgaaacaactgaccgtattacaactcatgataacccaacttacgaaaaacacggcgttgttcattatgcagttgcaaacatgccaggtgcggttccacgtacatcaactcttgcattaacaaacgtaacagtaccatatgcagtgcaaattgctaacaaaggctacaaagaagcttgcctaggcaactctgcattactaaaaggtattaacacattagatggctatgtaacattcgaagcagttgcagaagctcacggtgtagagtacaaaggtgctaaagaattattagaagctgaaacagtatcttgctaa

SEQ ID NO: 55180 - protein, 377 aa, Bacillus cereus E33L
MRIGVPAEIKNNENRVAMTPAGVVHLIRNNHEVFIQKGAGLGSGFTDAQYVEAGAKIVDTAEEAWNMEMVMKVKEPIESEYKHFSEGLILFTYLHLAPEPELTKALIEKKVVSIAYETVQLENRSLPLLAPMSEVAGRMAAQIGAQFLEKNKGGKGILLAGVPGVKRGKVTIIGGGQAGTNAAKIAVGLGADVTIIDLSAERLRQLDDIFGNQVKTLMSNPYNIAEAVKESDLVIGAVLIPGAKAPKLVTEEMIQSMEPGSVVVDIAIDQGGIFETTDRITTHDNPTYEKHGVVHYAVANMPGAVPRTSTLALTNVTVPYAVQIANKGYKEACLGNSALLKGINTLDGYVTFEAVAEAHGVEYKGAKELLEAETVSC

SEQ ID NO: 55181 - DNA, 1122 bp, Legionella pneumophila subsp. pneumophila str. Philadelphia 1
  CDS (1)..(1122): transl_table=11
atgttagtaggggtaccaaaagaaatcaaatcgcacgaaaacagagtaggacttgttccctcgagtgttagagaaattattagggcaggaagtgatgtattggtagagaagggagctgggcttggtatcggcatatcggatgatgattacagaaatgccggggctgaagtggttgatactgctgatgacgtatttgccaatgccgaattaatagtcaaagtaaaagagccccagcctattgaatgtaaacggttacgtgaagggcaaacattattcacttatttacatttagctcctgatcctcaccaagcgcgtttattaaaagaatctggggttacagcaatagcttatgaaactgtgacacaggatgatggcgggttacctttacttactcccatgtcccaagtggctggtcgtatggcaatccaggctggtgcacattgcttggagatggctcaagggggtagcggtatattgctaggtggtgtacctggtgttgctgcagccaatgtcgtggtcattggcggtggagttgtaggaacaaatgctgttcgcatggcgatggggatggaagctcgtgttattgtgctggatcgttcactgcaacgtttaaatgaattggattttcagtttggttctaaactcaatacagtttactcaactgcagattccatagaaaaatacgtatccagcgctgatttagtgattggtgctgtattggtaccaggtgctgcagcccccaaactagtgactcgctctatgctgagctcaatgcgtcctggctccgttttagtcgatgttgctattgatcaaggggggtgttttgagacaagtcgtgcgacaacccatcaagaacctacttacatggtcgataacgtagtgcattattgtgtggccaatatgcctggtgctgtacccagaacatcaacatttgctttaaataatgccacattacccttcattttaagtattgttaccaaaggtgttaagctggctttattaagtgatccgcatttacttaatggtctaaatgttcaccagggtaaaatcacttatgaggctgttgctcgtgatttaggatatgaatacacgccagctgcagctgctttatcaggacgataa

SEQ ID NO: 55182 - protein, 373 aa, Legionella pneumophila subsp. pneumophila str. Philadelphia 1
MLVGVPKEIKSHENRVGLVPSSVREIIRAGSDVLVEKGAGLGIGISDDDYRNAGAEVVDTADDVFANAELIVKVKEPQPIECKRLREGQTLFTYLHLAPDPHQARLLKESGVTAIAYETVTQDDGGLPLLTPMSQVAGRMAIQAGAHCLEMAQGGSGILLGGVPGVAAANVVVIGGGVVGTNAVRMAMGMEARVIVLDRSLQRLNELDFQFGSKLNTVYSTADSIEKYVSSADLVIGAVLVPGAAAPKLVTRSMLSSMRPGSVLVDVAIDQGGCFETSRATTHQEPTYMVDNVVHYCVANMPGAVPRTSTFALNNATLPFILSIVTKGVKLALLSDPHLLNGLNVHQGKITYEAVARDLGYEYTPAAAALSGR

SEQ ID NO: 55183 - DNA, 1116 bp, Burkholderia pseudomallei K96243
  CDS (1)..(1116): transl_table=11
atgctgatcggtgtgccaaaggagatcaaggtctacgaatatcgcgtcggcctgacgccggcgggcgcgcgcgagctcgcgctgcacggccatcaggtgctggtgcagcgcggtgcgggcgcggcgatcggcttgcaggacgacgattacgcggcggccggcgcgatgctggccaacgacgcggccgacgtgtacgcgcgcgccgacatgatcgtcaaggtcaaggagccgcagccggccgaatgtgcgatgctgcggcgcggccagatcctgttcgcctacctgcatctcgcgcccgatcccggtcaggccgcggcgctcgtcaagtcgcgcgcggtctgcatcgcgtacgaaaccgtgcgcgcgcccggaggcggcttgccgctgctcgcgccgatgagcgaagtggccggccgcatgtcgattcaggttgccgcggcgcatctcgaaagccccggcggcgggatgggcctgctgatggcgggcgtgcccggcgtgccggccgcgcacgtcgtcgtgatcggcgcgggcgtcgtcggcacctgcgcgctgcaaatggcggcgggcctcggcgcgcgcgtgaccgtgctcgacaccaacgtcgatcggctgcgcgagctcgacctcgtcttcggcaaccgaatcgcgaccctctactcgaacacgcatgcgatcgacggtgcggtgcgcggcgcggacgtcgtgatcggcgcggtgctggtgcccggcgcgtccgcgccgcggctcgtcacgcgcgagatgatctcgaagatgcgcgccggcgcggtcgtcgtcgatgtcgcgatcgaccagggcggctgcatcgaaacatcccacccgacgacgcacgcgcagccgacctacgtcgtcgacggcgtcgtgcactactgcgtggccaacatgcccggcgcggtcgcgcgcacgtcgacgttcgcgctcggcaacgcgacgcttcgccatgcgatcgcgctcgcgaacaaaggctggaagcgcgcgctcgccgatgacccgtacctgcgcgcggggctgaatgtgtgcgacggccacgtcacgcacgaagcggtcgcgcgcgcgctcggcctcgcttacgtgcatgcggacgagatgctcgattga

SEQ ID NO: 55184 - protein, 371 aa, Burkholderia pseudomallei K96243
MLIGVPKEIKVYEYRVGLTPAGARELALHGHQVLVQRGAGAAIGLQDDDYAAAGAMLANDAADVYARADMIVKVKEPQPAECAMLRRGQILFAYLHLAPDPGQAAALVKSRAVCIAYETVRAPGGGLPLLAPMSEVAGRMSIQVAAAHLESPGGGMGLLMAGVPGVPAAHVVVIGAGVVGTCALQMAAGLGARVTVLDTNVDRLRELDLVFGNRIATLYSNTHAIDGAVRGADVVIGAVLVPGASAPRLVTREMISKMRAGAVVVDVAIDQGGCIETSHPTTHAQPTYVVDGVVHYCVANMPGAVARTSTFALGNATLRHAIALANKGWKRALADDPYLRAGLNVCDGHVTHEAVARALGLAYVHADEMLD

SEQ ID NO: 55185 - DNA, 1101 bp, Methylococcus capsulatus str. Bath
  CDS (1)..(1101): transl_table=11
atgaaaatcggcgtacccaaggaaatcaaggacctggaaaaccgtgtggccgtcaccccgcaaggggtcgcggccctggtcaatgccgggcacgaagtgctggtggaggtcgcggccggcctcggctcggggtttgccgacgaggaatatatggcggcgggagcacggctggtgaacgcggccgacgcctgggcggccgacctcgtggtcaaggtgaaagagccggtgccctcggaatatccttacctcaagcggcagacggtattcaccttcttccatctggccggtgtcgaccccggtctgacccgggcgctgctggatggcggcaccacggcggtggcttacgagacgctggaagatgcgcaagggcgtctgccgctgctcgcgccgatgagtgcggtggcgggcaacatggccgcccaggtcggcgcttattatctggcgcgcttcaacggcggccggggagtccagctcggcgaggtcatgggtgtgcgccatggcagggtcgtggtgatcggcgacggcgtggtcggctcgcatgccgccctcactgcctggggcatgggcgccaacgtccaggtcatggggctggtgcctgcgaagggcgatgccctgtgccggcgggcgccggggctggagttcttcctctcggacggcgctcgcctggcggagactctgcgcgatgccgatctggtggtgggggcggtgctgcagccgggggcccgtgccgaatacatcgtgaccgatgccatggtgaggtcgatgccgatggggtcggtgatcgtcgacgtcagtatcgatcagggcggctgcgtggagacttccagaccgaccacgcattcccatccggtctacgtggagcacggcgtgatccactactgcgtgaccaacatgccgggagcctacccgcggacttcgaccctggcgctgaccgaggcgacactgccttacctgctgcgtctggccgatgaaggcgaggcatgtctgcgggccgacccaggtctggccaaggccgtgaacacctgcgacggccatatcacctgccgggcggcggcagaagacctcggcctgctggatcgctaccgtccctttcccggctag

SEQ ID NO: 55186 - protein, 366 aa, Methylococcus capsulatus str. Bath
MKIGVPKEIKDLENRVAVTPQGVAALVNAGHEVLVEVAAGLGSGFADEEYMAAGARLVNAADAWAADLVVKVKEPVPSEYPYLKRQTVFTFFHLAGVDPGLTRALLDGGTTAVAYETLEDAQGRLPLLAPMSAVAGNMAAQVGAYYLARFNGGRGVQLGEVMGVRHGRVVVIGDGVVGSHAALTAWGMGANVQVMGLVPAKGDALCRRAPGLEFFLSDGARLAETLRDADLVVGAVLQPGARAEYIVTDAMVRSMPMGSVIVDVSIDQGGCVETSRPTTHSHPVYVEHGVIHYCVTNMPGAYPRTSTLALTEATLPYLLRLADEGEACLRADPGLAKAVNTCDGHITCRAAAEDLGLLDRYRPFPG

SEQ ID NO: 55187 - DNA, 1134 bp, Azoarcus sp. EbN1
  CDS (1)..(1134): transl_table=11
atgctcatcggcgtaccgagagaaatcaaggtccatgaatatcgcgtcgggctcacgccggcgagcgtccgcgaggtcgtcgcgcacggccacgaggtgatcgtcgagcgcgacgcagggcgcggcatcggcgcgggcgacgacgactaccggcgcgccggggcacgcatcgaggacgacgccgcggcgctgtatgcggccgctgaactgatcgtcaaggtcaaggaaccccagcccgccgagcgcgtgcgccttggcgccggccaggtgctgttcgcctatctccacctcgcgccggatccgcaacaggcgagcgacctgctcgcgagcggcgtcaccgcaattgcatacgagacggtcagcgacgtcgacggcgggttgccgctgctcgcgccgatgtcggaagtcgccgggcggatgagcgtgcaggccggcgcccattgcctggaaaaagaagccggcggccgcggactgctgctcggcggcgtgccgggcgtcgaaccggcacgggtggtgatcctcggcggcggagtcgtcggcagcaacgccgcactgatcgcgctcggcatcggcgccgcggtgaccatcgtcgatcggtcggtggcagtcctgcgtcgtctcggcgatcgcttcggcccgcagctgcacacgctgcacgcgagcaccgacgcgatcgaagctgccgtgctcgacgccgatctggtaatcggagcggtgctggtgccgggtggtgctgcgccgaagctcgtcacgcgcgacatggtgcgcaggatgcgtcccggcgccgtggtcgtcgacgtcgcgatcgaccagggcggctgtttcgagacttcacgcccgacgactcatgccgatccgattttcatcgtcgacgagatcgtgcattactgcgtcgcgaacatgcccggtgcggtcgcccgcacctcgacgctcgcgctgaacgccgcgacgctgccctgtgtgctggcgcttgccgacaagggctggcgccaggccctgcgcgacgatccgcatctggcgcgggggctgaacatctgcgccggtcgtgtcatgcatcccggcgtcgcggaggccctgggcgtcgagcccggcaacgcgcacgacctcgcagcggtgccgccgatgagcccctga

SEQ ID NO: 55188 - protein, 377 aa, Azoarcus sp. EbN1
MLIGVPREIKVHEYRVGLTPASVREVVAHGHEVIVERDAGRGIGAGDDDYRRAGARIEDDAAALYAAAELIVKVKEPQPAERVRLGAGQVLFAYLHLAPDPQQASDLLASGVTAIAYETVSDVDGGLPLLAPMSEVAGRMSVQAGAHCLEKEAGGRGLLLGGVPGVEPARVVILGGGVVGSNAALIALGIGAAVTIVDRSVAVLRRLGDRFGPQLHTLHASTDAIEAAVLDADLVIGAVLVPGGAAPKLVTRDMVRRMRPGAVVVDVAIDQGGCFETSRPTTHADPIFIVDEIVHYCVANMPGAVARTSTLALNAATLPCVLALADKGWRQALRDDPHLARGLNICAGRVMHPGVAEALGVEPGNAHDLAAVPPMSP

SEQ ID NO: 55189 - DNA, 1116 bp, Silicibacter pomeroyi DSS-3
  CDS (1)..(1116): transl_table=11
atgaaaatcggatgccccaaggaaatcaaacctcaggagttccgtgtcggcatgaccccgaatgcagcgcgcgaggccgtctcgcacgggcatgaggtcatcatcgaaaccaatgccggcgccggtgccggatttgacaacgccgactatgtcgacgcgggcgcccggatcgtggacaccgccgcagaggtgtttgccaccgccgacatgatcgtcaaggtcaaggaaccgcaggccatcgagcgcaagatgctgcgcgagggccagctgctgttcacctatctgcacctggcacccgatccggaccagacccatgacctgctggcttcgggcgcgacctgcatcgcgtatgagaccgtgaccgaccgcaatggcggcctgccgctgctggcaccgatgtccgaggttgccgggcgtctggcaccgcaggttggcgcctggaccctgcaaaaggccaatggcggtcgcggcgtgctgatgggcggcgttcccggtgtgggcccggccaaggttctggtcatcggcggcggtgtcgtcggcacccacgcggccaagatcgccgctggcatgggcgccgatgtgaccgtgctcgaccgctcgatcccgcgcctgcgttacctcgacgacgtctttggcggcaccttcaagaacagctatgccagcgccggcaacacgatcgaactggcccgtcaggccgacatgatcatcggcgccgtgctgatcccgggcgctgctgcgcccaagctgatcagccgcgcacagctgagcgagctgaagccgggcgcggcgctggttgacgttgcgatcgaccagggcggctgtttcgagacctcgaaggcgaccacccaccaggacccgatctacgaggtcgacggcatcatgcattactgcgtggccaacatgccgggcgcggttgcgcgcacctcgaccatcgcgctgggcaacgccaccatgccgttcatgctggcgctggccgacaagggctggaaacaggcctgcgccgatgacgtgcacctgctgaacggcctgaacgtgcatgccggcaagctgacctatgccgccgtcggcgaagcgctgggcctggatgtggtctcggccagccagctggttcaataa

SEQ ID NO: 55190 - protein, 371 aa, Silicibacter pomeroyi DSS-3
MKIGCPKEIKPQEFRVGMTPNAAREAVSHGHEVIIETNAGAGAGFDNADYVDAGARIVDTAAEVFATADMIVKVKEPQAIERKMLREGQLLFTYLHLAPDPDQTHDLLASGATCIAYETVTDRNGGLPLLAPMSEVAGRLAPQVGAWTLQKANGGRGVLMGGVPGVGPAKVLVIGGGVVGTHAAKIAAGMGADVTVLDRSIPRLRYLDDVFGGTFKNSYASAGNTIELARQADMIIGAVLIPGAAAPKLISRAQLSELKPGAALVDVAIDQGGCFETSKATTHQDPIYEVDGIMHYCVANMPGAVARTSTIALGNATMPFMLALADKGWKQACADDVHLLNGLNVHAGKLTYAAVGEALGLDVVSASQLVQ

SEQ ID NO: 55191 - DNA, 1092 bp, Synechococcus elongatus PCC 6301
  CDS (1)..(1092): transl_table=11
atggacatcggagtgccgcgtgagctcaaggatcaagaatttcgggtgggactgagccctgctagtgtgcgggctttagccctacaggggcaccagatctggatcgagcaaggggcgggtgtcggttccgggtttcaggacgaggattatttactggctggggccaaggtggtcgccacagctaccgaggcctggcaacaccccctagttgtcaaggttaaggagcccctgccagcagagtacgactatctgcggcctgatctgctgctcttcacctacctgcacctcgccgccgatcgcccactaacagagcgcctcctagccagcggaaccactgcgatcgcctacgaaaccgtgaccgcccgcaatggcagcttgcccctactgatgccgatgagccggattgccggacggctgtcggtacaatttggcgctcgtttcctagagcggcagcaaggcggacggggggttttgctcggcggggttcccggcgttagccctggcactgtcatgattctgggcggcgggattgttgggactgaagcagccaagatggcgatcggattgggggccaaagttcaaatagtcgacattaatgttgagcggctagcagaactagaggccctgtttggctcccgcgtcgaattgctctatagcagtcctgcggaaattgaagcccgtgtaccgcaggccgatttactgatcggagccgtcctggtacccggtcgacgcgccccgattttggtgaaccgtgacctgattgcccagatgcgccccgggtcagtggtggttgatgtcgccgtcgatcaagggggctgtgtggaaaccctacgtcccactagtcatagccaaccgatctacctcgaagcgggagtcgtccactacggcgtacccaatatgccaggggcggtgccttggacggccacccaagcgctgaacaacagcaccctgccctatgttcaagcgatcgcggcccagggccttgccagttgtgatcgcgatccaggcctggctgagggactgaacgtcgcccagggcgtcctgactcaccctgcgatcgcggccgctcttcctgacttaccctgccgctga

SEQ ID NO: 55192 - protein, 363 aa, Synechococcus elongatus PCC 6301
MDIGVPRELKDQEFRVGLSPASVRALALQGHQIWIEQGAGVGSGFQDEDYLLAGAKVVATATEAWQHPLVVKVKEPLPAEYDYLRPDLLLFTYLHLAADRPLTERLLASGTTAIAYETVTARNGSLPLLMPMSRIAGRLSVQFGARFLERQQGGRGVLLGGVPGVSPGTVMILGGGIVGTEAAKMAIGLGAKVQIVDINVERLAELEALFGSRVELLYSSPAEIEARVPQADLLIGAVLVPGRRAPILVNRDLIAQMRPGSVVVDVAVDQGGCVETLRPTSHSQPIYLEAGVVHYGVPNMPGAVPWTATQALNNSTLPYVQAIAAQGLASCDRDPGLAEGLNVAQGVLTHPAIAAALPDLPCR

SEQ ID NO: 55193 - DNA, 1125 bp, Bacillus clausii KSM-K16
  CDS (1)..(1125): transl_table=11
atgattatcggaataccgaaagagattaaaagctatgaaaatcgggtagcgattacgccagctggagtggatgcacttgttggcagcggccaccgtatcgtagtggaggcagccgcaggtattggcagcggctttacagatgaggagtatgagaaggcaggcgcaatcattgaaaaaaacgcgaaagatgtgtgggcggcagcagacatgatcattaaagtcaaagagccgctttctgaagagtatcggtatttccgcaaagggttaattttgtttacgtacttgcatttggcggcagaacctgagttaacaaaggcactagtcgactcaggcgtgacggcgattgcttatgagacggtagagataaaccggacattgccattgttaacgccgatgagtgaagtggctggaaggatggcaacgcaagtgggcgcccagtttttggagaagacgcgaggagggaagggaatcctcctctccggtgtgcctggggttaaacggggcaaagtaacgatcattggcggcggcgttgttggcacaaacgcggcaaaaatggctgttggccttggcgctgatgtcactctgcttgatgtaagtgcagaaaggctgcgccaactggacgatcaatttggaaatgacattcagacgatcatgtcgaaccctttaaatattgccagtgctgtggccgaggccgatcttgttattggcgccgtgctcattccaggagcaagagcgcctaaactcgtaacggcagaaatgattcaaaaaatgggggcagggagtgtcgttgtcgacgtggctgtagaccaaggtggcattgttgaaacagctgataaagtaacaacacatgatgccccgacttatacgaagtatgatgtcatccattatgctgtcgctaatatgccaggagcggttccgcggacatcgacaattgcgttgacaaacgtcaccattcctttcgctgtacaaattgccaataaaggcgctaaagaggcattacggacgaatttagcacttgccaaaggcttaaatgtagcgaatggctttattacgtatgaagcagttgcacgtgatctaaactatccttataagcaagcagaagaagttttagctgagttgccttaa

SEQ ID NO: 55194 - protein, 374 aa, Bacillus clausii KSM-K16
MIIGIPKEIKSYENRVAITPAGVDALVGSGHRIVVEAAAGIGSGFTDEEYEKAGAIIEKNAKDVWAAADMIIKVKEPLSEEYRYFRKGLILFTYLHLAAEPELTKALVDSGVTAIAYETVEINRTLPLLTPMSEVAGRMATQVGAQFLEKTRGGKGILLSGVPGVKRGKVTIIGGGVVGTNAAKMAVGLGADVTLLDVSAERLRQLDDQFGNDIQTIMSNPLNIASAVAEADLVIGAVLIPGARAPKLVTAEMIQKMGAGSVVVDVAVDQGGIVETADKVTTHDAPTYTKYDVIHYAVANMPGAVPRTSTIALTNVTIPFAVQIANKGAKEALRTNLALAKGLNVANGFITYEAVARDLNYPYKQAEEVLAELP

SEQ ID NO: 55195 - DNA, 1110 bp, Bacteroides fragilis NCTC 9343
  CDS (1)..(1110): transl_table=11
atgattatcggagtacctaaggagattaagaacaacgagaaccgtgtgggcatgacgccctcgggagtcgccgagttagtgaaacgcgggcatactgtatacatacagcacaccgcaggagagaacagtggttttcaggacgaggcatatacagccgtaggagcacaaatactgcccactatggaagagacatacgctatggcccagatgatagtaaaagtaaaagaacctatcgcaccggagtacagactgatccgcaaaggacagttgttgttcacttatttccatttcgcttccgatagagagttgactcttgccatgatagagaacggctcggtctgcctggcttacgaaacagtggaaaaagccgaccattctctcccgctgctgatacctatgagtgaagtagcaggacgcatggccatacaggaaggtgcccgttttctggaaaagccacaaggtggaaaaggcattttgccgggtggtgtaccgggggtaaagccggcaaaagtgttaatcctgggtggagggatcgtaggtagtaatgcggcccagatggcagccggattgggagccgatgtcacaattgcagacatcaacctgagccgtcttcgctacctgagcgagacgttaccgaaaaatgtaaaaacactatacgcctcggaagtgaggctgaaaaaagagttgccggacgtggatcttgtagtaggttcggtactgattccgggagacaaggctccgcacctgatcacccgtgatatgctgaaaatgatgcaaccgggtacggtattggtagatgtagccatcgaccagggaggatgtttcgagacttcgcatcccacaactcatagtgaaccgacgtatgtagtcgatggaatcgtacattatgctgtagccaatattccgggggcagtgccttacacctctacattggcattgaccaacgccactctgccctatgtcatagcattggcaaacaaaggatggagaaaggcatgcaaggaagatccggcgctggctttaggtctgaatgtggtagaagggaaagtggtatatcgagcgatagccgatgtattcggcctgaaatacgagcaattgaacttagaataa

SEQ ID NO: 55196 - protein, 369 aa, Bacteroides fragilis NCTC 9343
MIIGVPKEIKNNENRVGMTPSGVAELVKRGHTVYIQHTAGENSGFQDEAYTAVGAQILPTMEETYAMAQMIVKVKEPIAPEYRLIRKGQLLFTYFHFASDRELTLAMIENGSVCLAYETVEKADHSLPLLIPMSEVAGRMAIQEGARFLEKPQGGKGILPGGVPGVKPAKVLILGGGIVGSNAAQMAAGLGADVTIADINLSRLRYLSETLPKNVKTLYASEVRLKKELPDVDLVVGSVLIPGDKAPHLITRDMLKMMQPGTVLVDVAIDQGGCFETSHPTTHSEPTYVVDGIVHYAVANIPGAVPYTSTLALTNATLPYVIALANKGWRKACKEDPALALGLNVVEGKVVYRAIADVFGLKYEQLNLE

SEQ ID NO: 55197 - DNA, 1119 bp, Colwellia psychrerythraea 34H
  CDS (1)..(1119): transl_table=11
atgattatcggtgtacctaaagaaattaaaaaccacgagtaccgtatcggccttacacctgcaggtgttaaagaattatcagtaaatggtcacgaagtgattgttgaacataatggtggtgcatctattggctttgataatgaacaatatatcgctgccggtgcaaaaataattgatagcgctgcggaaatattcgcaacagcagatatgatcattaaagtaaaagagccacagcctgttgaatgtaacatgcttcgtccaggtcaaatcttatttacttacttacatttagcaccagatcctaagcaaactgaattattagttgcttctggcgcaatctgtattgcttatgaaacagttacagctgcttcaggtggtttacctttattagcacctatgtctgaagttgcaggtcgtatgtctattcaagctggtgctcatgcactagaaaaagcacaaggcggtttaggtgctttattaggcggcgttccaggtgttgctccagctaaagtattagttattggtggcggtgttgttggtactcaagctgcacgtatggcagtaggtatgggcgcagacgttactattttagaccgttctttaccgcgtttacgtcaattagatactgaattcgatggtcgtttaaaaactgtttattctactgctgatgcaatggaccagttaattgttgaagctgatttagttatcggtgctgtattaattccaggtgctgctgcacctaaattagtaacaagagctcacatcaaaatgatgaagcaaggcgctgttgttgttgatgttgctatcgaccaaggtggttgttttgaaacgtcaaaagctactacgcatcaagaaccaacttatgtagttgacggtgttgtacattactgtgttgcaaacatgccaggtggtgttgcacgtacttcaactatggcgttaacaaatgcaacaatgccatttgctgttactattgcaaacaaaggtgctaagcaagcattgttagatgatgagcatttactagccggcttaaacgttgctgcgggtaaaatcacttacaagccagttgcagacgtactaggttacgaatatgttgagccaagtgttgctttaaacgcgtaa

SEQ ID NO: 55198 - protein, 372 aa, Colwellia psychrerythraea 34H
MIIGVPKEIKNHEYRIGLTPAGVKELSVNGHEVIVEHNGGASIGFDNEQYIAAGAKIIDSAAEIFATADMIIKVKEPQPVECNMLRPGQILFTYLHLAPDPKQTELLVASGAICIAYETVTAASGGLPLLAPMSEVAGRMSIQAGAHALEKAQGGLGALLGGVPGVAPAKVLVIGGGVVGTQAARMAVGMGADVTILDRSLPRLRQLDTEFDGRLKTVYSTADAMDQLIVEADLVIGAVLIPGAAAPKLVTRAHIKMMKQGAVVVDVAIDQGGCFETSKATTHQEPTYVVDGVVHYCVANMPGGVARTSTMALTNATMPFAVTIANKGAKQALLDDEHLLAGLNVAAGKITYKPVADVLGYEYVEPSVALNA

SEQ ID NO: 55199 - DNA, 1116 bp, Dechloromonas aromatica RCB
  CDS (1)..(1116): transl_table=11
atgcagatcggcgtaccgaaggaaatcaagaataatgaatatcgggtcggactcacaccggccagcgtacgcgagctggtggcgcatggtcatcgcgtgatcgtgcagaagaatgccggcactgccatcggcctgactgatgcgctctacgcaggtgccggagccgaattggtcgacaccgccgatgaggtgtttatccgggccgaactcatcgtcaaggtcaaggaaccgcaacccaacgaatgccgccaactcagggatggacaggtgcttttcacctacctgcacctggccccggaccgtcgccagaccgaattgctgctggcctcgggggtcaccgccattgcttatgaaacggtgactggcccgggcgccagcctccccctgctcgccccgatgagcgaggtcgccgggcgaatgtctatccaggccggagccgcagcgctcgaaaaatcgaaaggggggtccggtgttctgctcggcggcgttcccggcgtcgcgccggggaaagtcaccatcctcggcggtggcgtggttggctacaacgctgcgcagatcgcggtcggcatggggggtgacgtcaccgtcatcgaccgatcactggatcgtctgcgctggctggatcgccagtttggcaatcgaatcaggacgctgtatgcaaccgccgaatcgatcgaagccagcgtcagcgaggctgatctgaccatcggcgccgtcttgattcccggcgcctcggcaccgcatctggtcagccgcgaactgctgaaacggattcgcccgggttccgtgctggtcgatgtgtcaatcgaccagggcggctgcttcgagacgagccgaccgactacccatgccgaaccgacctatatcgtcgacgacatcgtgcattactgcgtcgccaacatgccgggggccgtagcgcgaacctcgactttcgccctgaacaacgccacccttcccttcgtactgacgctggcgaacaagggttatcgccaggccctgcgcgatgatccaaacttgcgggccgggctgaacattcaccgcggcaagctcacctgcgcaccggtcggcgaggcccttcagatccctgtctgcgatccggaggcggaattagcctga

SEQ ID NO: 55200 - protein, 371 aa, Dechloromonas aromatica RCB
MQIGVPKEIKNNEYRVGLTPASVRELVAHGHRVIVQKNAGTAIGLTDALYAGAGAELVDTADEVFIRAELIVKVKEPQPNECRQLRDGQVLFTYLHLAPDRRQTELLLASGVTAIAYETVTGPGASLPLLAPMSEVAGRMSIQAGAAALEKSKGGSGVLLGGVPGVAPGKVTILGGGVVGYNAAQIAVGMGGDVTVIDRSLDRLRWLDRQFGNRIRTLYATAESIEASVSEADLTIGAVLIPGASAPHLVSRELLKRIRPGSVLVDVSIDQGGCFETSRPTTHAEPTYIVDDIVHYCVANMPGAVARTSTFALNNATLPFVLTLANKGYRQALRDDPNLRAGLNIHRGKLTCAPVGEALQIPVCDPEAELA

SEQ ID NO: 55201 - DNA, 1122 bp, Thermobifida fusca YX
  CDS (1)..(1122): transl_table=11
gtgcgcgtcggcgtgccccgtgaaatcaaagaccatgaataccgagtagctatcaccccggccggcgtccaggagctcgtccggcacggccacgacgtcctcatcgaacgcgacgccggtgtcggctcggccatcagcaacgccgaatacgcggccgcgggcgcccgcatcatcgacagcgccgacgaagtgtggggagcggccgacctcgtcctcaaagtcaaagaacccgtccccgaggaataccaccggctccgccccggccaagtgctcttcgcctacctgcacctggcggcgtcccgggactgcaccgaagccctcctcaagcacggagtcaccgcgattgcctacgaaaccgtgcagcttcccgacgggtccctgcccctgttggcgcccatgtcggagatcgcgggacggctcgccccccaagtcggcgcgaccgccttgcagcgctccaacggcggccgcggcgtcctgctcggcggagtgcccggtgtggggcccgccaaagtcatggtgctcggcgcgggtgtctccggcatgaacgccgcccaagtcgcggcgggcatgggcgcggaagtcaccctgctcgacatcgacatcgccaaactgcgccgggcggacgccgtgttccaaggccgggtgcggacgctggcgtccaccgcctacgagattgaacggaccgccctggaatccgacctcatcatcggagcagtgctcatccccggcgcgaaagcccccaccctgatcagcagcgacctggtcgcccagatgaaacccggcaccgtgctcgtcgacatcgccgtcgaccaaggcggctgcttcgccgactcgcggcccaccacccactccgaccccacgtacccggtgcacaacacggtgttctactgcgtgtcgaacatgcccggcgcggtgcccaccacggccacgcaggcgctgaccaaagacacgctgcgctacgcgctggccctggcgaacaaaggctggcgggacgcgctcgccgacgacccggcgctcgccgcaggcctcaacacgttcgcgggagaactcaccaacgaggccgtggcccaagcccacgggatggcggcgcgcaccgtcaccgaagtcgtggccgcgggatag

SEQ ID NO: 55202 - protein, 373 aa, Thermobifida fusca YX
MRVGVPREIKDHEYRVAITPAGVQELVRHGHDVLIERDAGVGSAISNAEYAAAGARIIDSADEVWGAADLVLKVKEPVPEEYHRLRPGQVLFAYLHLAASRDCTEALLKHGVTAIAYETVQLPDGSLPLLAPMSEIAGRLAPQVGATALQRSNGGRGVLLGGVPGVGPAKVMVLGAGVSGMNAAQVAAGMGAEVTLLDIDIAKLRRADAVFQGRVRTLASTAYEIERTALESDLIIGAVLIPGAKAPTLISSDLVAQMKPGTVLVDIAVDQGGCFADSRPTTHSDPTYPVHNTVFYCVSNMPGAVPTTATQALTKDTLRYALALANKGWRDALADDPALAAGLNTFAGELTNEAVAQAHGMAARTVTEVVAAG

SEQ ID NO: 55203 - DNA, 1116 bp, Ralstonia eutropha JMP134
  CDS (1)..(1116): transl_table=11
atgcgaatcggcgtccccagggaaatcaaggaccaggagtaccgcgtcggactcaccccggccagcgtacgcgaactggtcagccgcggtcaccaagtggtggtgcaggccggtgccggcgccgcaattggcctcaccgaccattcctacaagctggccggtgcccaactggccggggatgccgaggaggtattcgcctcggccgagatgattgtgaaagtcaaggaaccgcaaccgtcggagcgggcactgctcaagcccggacagattctgtatgcatatctgcacctggcggcggaccgcgagcagacctcggagctggtgaaatccggcgcggtctgcattgcctacgagaccgtgacagccccggacggcagccttccgttgctggcgcccatgagcgaagtggccggccgcatgtccgtgcaggtggccgccgcctacctggagaagccgcgaggtggcatgggcgtgctgctgggcggcgtgccaggggttgccccgggccatgtggtggtgatcggggccggcgtggtgggcgccaacgcgatccagatggccgtcggcatgggggcgcgtgtcacagtgctggaccgcaacgtcgatcggctgcggcatctggggcttgtctatggcaatcggctagtcacgctctactccagcgcagacgccatcgagcgcgcgctgctcacggccgatgcggttattggcgcagtcctcgtgccgggcgccgaagcccccaggttagtgacgcgcgccatggtcgcccgcatgaagggcggctcggtagtggtggacgtggcgatcgaccaggggggctgcttcgagacttcgcgtcccaccagccattcggatccgacctatgtcgtggacggggtgctgcactactgcgtgaccaacatgccggcggctgttgccagaacatccacgtttgccctgaacaacgccaccatcggctatgcaatggcgcttgctgacaagggctggtcccgtgcgctcaaagaagatccttgcctgcgcgccgggctgaacatctgtcagggcaacgttacctatgccgccgtcgcaagcgcccatggttgcacgtatgtgcccacggaacgggtgctcggatga

SEQ ID NO: 55204 - protein, 371 aa, Ralstonia eutropha JMP134
MRIGVPREIKDQEYRVGLTPASVRELVSRGHQVVVQAGAGAAIGLTDHSYKLAGAQLAGDAEEVFASAEMIVKVKEPQPSERALLKPGQILYAYLHLAADREQTSELVKSGAVCIAYETVTAPDGSLPLLAPMSEVAGRMSVQVAAAYLEKPRGGMGVLLGGVPGVAPGHVVVIGAGVVGANAIQMAVGMGARVTVLDRNVDRLRHLGLVYGNRLVTLYSSADAIERALLTADAVIGAVLVPGAEAPRLVTRAMVARMKGGSVVVDVAIDQGGCFETSRPTSHSDPTYVVDGVLHYCVTNMPAAVARTSTFALNNATIGYAMALADKGWSRALKEDPCLRAGLNICQGNVTYAAVASAHGCTYVPTERVLG

SEQ ID NO: 55205 - DNA, 1119 bp, Ralstonia eutropha JMP134
  CDS (1)..(1119): transl_table=11
atgaggatcggagtaccgaaggaaatcaagaatcatgagtatcgcgtcggcctgacgccatcgtctgtgcgcgagatgacggcacacggccaccacgtgctcgtacagacgacggctggcgccggcatcggcgcaagcgatgccgattaccgcaaggccggcgccaccatcgtcgacacggcgcaggagatcttcgccaaggcggaaatgatcgtgaaggtcaaggagccgcaggccaacgagcgcgccatgctgcgcgaggggcagattctctatacctacctgcacctggcgccggatccggaccagtgcgctgacctcgtccgcagcggcgcggtgtgcatcgcctacgagaccgtcacccaggcgggcggcgggctgccgctgctggcgcccatgtctgaggtcgcgggccgcatgtcggtgcaggccggagcgcactgcctggagaaggcgcgcggcggcatgggcgtgctgctgggcggcgtggcgggcgtggagccggccaagatcgtgatcctcggtggcggcgtggtgggcagcaacgcggcgcagatcgccgtgggcaccggcgcccacgtagtggtgatcgaccgcaatatcgacgtgctgcgccgcatggaccgtctgctcggcgcccgtgtgacgacggtctactccaaccaggacaacgtcgaacgccacgtgctgtcggccgatctcgtcatcggcggcgtgctgattcctggcgcggccgcgcccaagctggtcacggccggcatggtggacgcgatgaagccggggtcggtcatcgtggatgtggcgatcgaccagggcggctgctgcgagacggcaaaggcgacgacacatgcggaaccgacctatctggtcggccaggtgctgcactactgcgtcgcgaatatgcccggcgcggtgccgcgtacctcgacctacgcactcaacaacgccacgctgccattcgcgctgcagatcgcggacaaaggctggaaggcggcattggcggacaacccgcatcttgccaacggcctgaacgtggcgttcggcaaggtgacatgcaaggaggtcgcgcacgatcttggctatgaatgccacgatgctgcgaaactgctggcgcattga

SEQ ID NO: 55206 - protein, 372 aa, Ralstonia eutropha JMP134
MRIGVPKEIKNHEYRVGLTPSSVREMTAHGHHVLVQTTAGAGIGASDADYRKAGATIVDTAQEIFAKAEMIVKVKEPQANERAMLREGQILYTYLHLAPDPDQCADLVRSGAVCIAYETVTQAGGGLPLLAPMSEVAGRMSVQAGAHCLEKARGGMGVLLGGVAGVEPAKIVILGGGVVGSNAAQIAVGTGAHVVVIDRNIDVLRRMDRLLGARVTTVYSNQDNVERHVLSADLVIGGVLIPGAAAPKLVTAGMVDAMKPGSVIVDVAIDQGGCCETAKATTHAEPTYLVGQVLHYCVANMPGAVPRTSTYALNNATLPFALQIADKGWKAALADNPHLANGLNVAFGKVTCKEVAHDLGYECHDAAKLLAH

SEQ ID NO: 55207 - DNA, 1083 bp, Thiobacillus denitrificans ATCC 25259
  CDS (1)..(1083): transl_table=11
atgcacataggcatcccgaaggaaatcaaggaccacgaataccgcgtcgcgctcacccccgaaggcgcgcgttcgctcgtcgatgccggccatgcggtgagcgtcgagagccacgccggcgccgcggtcggcttcggcgacgacgcctaccgcgccgcgggtgcgaccgtcgtgccggatgcagccggcgtgtgggcggccgagctcgtcgtcaaggtcaaggaaccgcagccgcaagagacacagcggctccgggcggggcagctgcttttctgctatctgcacctcgcggcagcgccctcgctcgcgcgcgaactcatgacgcgcggcgtcagcgcgatcgcctacgaaaccgtcgtcggccccgcgggcggcctgccgctgttgcagccgatgtccgacatcgcgggccggctcgccccgcagatgggcgcgctcgggctgcacagctcgcacggcggcaacggcaagctgatcagcggcctgcccggcgtcgcgccggcccacgtcctcgtcatcggcgccggcgtcgtcggcatggcagcggtgcgcacagcgatcggcctcggtgcacgcgtcaccctcatcgaccgcctgcgcgacaagctcgcgcaggccgaaaccctgttcggcgcgcgcgtcgagacgcgcttttcgtcgcccgacgcgatcgccgaatgcgtcgagcaggccgacatcgtgatcggcgcggcgcagatcccggggcgccacgcgccccgcctgatcagcctcgacctgctgcgccgcatgggcgccggcagcgtgctcgtcgacgtcgcgatcgaccagggcggcatcgccgaaacctcgcgcccgaccacccacagcgaccctttcttcacggccgaaggcgtcgtccattactgcgtcaccaacatgcccggtgccgtcgcccgcaccgcaaccgaagcgctgacccacgcgacgctgccctacgttgaggcactcgccgcgcaaggcctcgaagcgctcgccgccgaccccggactgcacgccgggctgcacgtccacgccggcaagatcatgcacgccgggctcgcactcgatctcaacttcgactga

SEQ ID NO: 55208 - protein, 360 aa, Thiobacillus denitrificans ATCC 25259
MHIGIPKEIKDHEYRVALTPEGARSLVDAGHAVSVESHAGAAVGFGDDAYRAAGATVVPDAAGVWAAELVVKVKEPQPQETQRLRAGQLLFCYLHLAAAPSLARELMTRGVSAIAYETVVGPAGGLPLLQPMSDIAGRLAPQMGALGLHSSHGGNGKLISGLPGVAPAHVLVIGAGVVGMAAVRTAIGLGARVTLIDRLRDKLAQAETLFGARVETRFSSPDAIAECVEQADIVIGAAQIPGRHAPRLISLDLLRRMGAGSVLVDVAIDQGGIAETSRPTTHSDPFFTAEGVVHYCVTNMPGAVARTATEALTHATLPYVEALAAQGLEALAADPGLHAGLHVHAGKIMHAGLALDLNFD

SEQ ID NO: 55209 - DNA, 1089 bp, Anabaena variabilis ATCC 29413
  CDS (1)..(1089): transl_table=11
atggaaatcggtgttcctaaagaaactaaagatcaagaatttcgggtgggcttaagtccttctagcgtgcgggtgttgaaggaaaatggtcatagtatctttgttcagactcaagctggtagcggtgctgggtttacagatgatgaatatcgcagtgtaggagcggatattgtccctacagcagaggcagtttggagtcgagagttagtagtcaaagttaaagaaccactgacgagtgagtacaactttttacaaaaagggcagatattgtttacttatctgcatttagcggccgatcgcaaattaacagagcatttaattgattctggcatttgtgcgatcgcttacgaaaccgtagaacaaccaggcgctaacagactaccactactgacccccatgagcattattgccggtcggttagcagtacaatttggcgcacgctatttagaacgccaacaaggtggtagaggtgtactgctgggtggtgtccctggagttaaaccaggaaaagtagtgattctcggcggtggtgtagttggtacggaagctgccagaattgctgtaggtatgggtgcagccgtacaaatattagatgtaaatgttgaacgtttatcttatttagaaactttgtttggttctagagttgaattactttacagcagttctgcccatatcgaagccgcagttaaagaagcagatttacttgttggtgctgttttggtactaggacgcagagcgccaattctagtatctcgtgaattagttaaacaaatgcacccaggttcggtaatagttgatgtggctgtagatcaaggtggttgtgtggaaacactgcacgccacatcccacactaacccaatctacattgaagagggcgtagtgcattatggcgttcctaatatgccaggtgcagtaccttggacagccactcaagcacttaacaatagtacattaccttacgttgtacagttggcaaatcaaggactcaaagcgctggaagtgaatcaagcactggccaagggtttaaatgtgcagaatcatcgccttgtacacccagctgtacaagaggtttttcctgatttaacgtga

SEQ ID NO: 55210 - protein, 362 aa, Anabaena variabilis ATCC 29413
MEIGVPKETKDQEFRVGLSPSSVRVLKENGHSIFVQTQAGSGAGFTDDEYRSVGADIVPTAEAVWSRELVVKVKEPLTSEYNFLQKGQILFTYLHLAADRKLTEHLIDSGICAIAYETVEQPGANRLPLLTPMSIIAGRLAVQFGARYLERQQGGRGVLLGGVPGVKPGKVVILGGGVVGTEAARIAVGMGAAVQILDVNVERLSYLETLFGSRVELLYSSSAHIEAAVKEADLLVGAVLVLGRRAPILVSRELVKQMHPGSVIVDVAVDQGGCVETLHATSHTNPIYIEEGVVHYGVPNMPGAVPWTATQALNNSTLPYVVQLANQGLKALEVNQALAKGLNVQNHRLVHPAVQEVFPDLT

SEQ ID NO: 55211 - DNA, 1119 bp, Rhodobacter sphaeroides 2.4.1
  CDS (1)..(1119): transl_table=11
atgaggatcggttgcccgaaggagatcaagccgcaggaattccgcgtgggcctcacgccccatgccgcgcgtgaggccgcaagtcacgggcacgaggtgctcgtcgaggccggggccggcgccggcgcaggattctccgacgaggattaccgcgccgcgggcgcgcgcctcgtcgacaccgccgaagagctcttcgccgcggcggagctgatcgtgaaggtgaaggagccgcagccggtcgagcgccagcggctccgcgagggccagctgctcttcacctatctgcatctcgcacccgaccctgagcagacgcgcgacctgatggcctcgggcgtgaccgccatcgcctacgagacggtgacggatgcccgcggcgggctgccgctccttgcccccatgtccgaggtcgcggggcggcttgcgccgcaggtgggcgcctggacgctgcagaaggccaatggcgggcgcggcgtgcttctgggcggcgtccccggcgtggggcccgcgaaggtcgtggtgatcggcggcggcgtggtgggcacccatgccgcgcggatcgcggccgggatgggggcggatgtgaccgtgctcgaccgctcgctgccccggctccgggcgctcgacgaggccttcggcacgctcttccgcacctcctacgcctccagcggcaccacggccgagctggtgacggcggccgatctcgtgatcggggcggtgctcatccccggcgcggcggccccgaagctcgtgagccgcgcgcagctcggcacgatgaagccgggcgcggccatcgtggatgtggcgatcgatcagggcggctgcttcgagacttcgcggccgacgacgcatcaggatccgatctacgaggtggacggggtgatgcactactgcgtggccaacatgcccggagccgtcgcccgcacctcgacgctggccctcggcaacgccaccatgcccttcctcctcgccctcgcggacaagggctggaagcgcgcctgcgaggaggacccgcatcttctggcgggcctcaacacccatgccgggcacctgacctactatgccgtgggccgggcgctcgagatcgacgtgctctcgccgcaactggccctgaagatgtga

SEQ ID NO: 55212 - protein, 372 aa, Rhodobacter sphaeroides 2.4.1
MRIGCPKEIKPQEFRVGLTPHAAREAASHGHEVLVEAGAGAGAGFSDEDYRAAGARLVDTAEELFAAAELIVKVKEPQPVERQRLREGQLLFTYLHLAPDPEQTRDLMASGVTAIAYETVTDARGGLPLLAPMSEVAGRLAPQVGAWTLQKANGGRGVLLGGVPGVGPAKVVVIGGGVVGTHAARIAAGMGADVTVLDRSLPRLRALDEAFGTLFRTSYASSGTTAELVTAADLVIGAVLIPGAAAPKLVSRAQLGTMKPGAAIVDVAIDQGGCFETSRPTTHQDPIYEVDGVMHYCVANMPGAVARTSTLALGNATMPFLLALADKGWKRACEEDPHLLAGLNTHAGHLTYYAVGRALEIDVLSPQLALKM

SEQ ID NO: 55213 - DNA, 1119 bp, Carboxydothermus hydrogenoformans Z-2901
  CDS (1)..(1119): transl_table=11
atgattattggtgtaccaaaagaaattaaaaataatgaaaaccgggtggcgattactcctgccggagttgaggctttggttgcggcggggcataaagtggtgattgaaaataacgccggtcttggcagcgggataaccaatgaagaatacataaaagctggggcggaaattcttccaactgctgccgatgtctttgctgctgcagatatgattatgaaggtaaaggagccactgccaccggaatacccgttatttaaggaagggcaaattctctttacttatcttcatctcgcgccggagccggaacttacccgggctttaatggagaaaaaggttgtagctattgcttacgaaaccattcagcttcccaacggcagcctgccattactaactccaatgagcgaggttgccgggcggatggcggtccagatcggtgctcgtttcctggaaaagcctcagggcggtcggggtatgctattggggggcgttcccggagttccaccggccgaagtggtgattattggtggcggtgtcgtcggtaccaatgctgctaagatggctatgggcatgggagctcacgtgaccattcttgataagagtgccgaccggcttagatacctggatgatatctttttcggcaaaataaccaccatgatgtccaacagctacaatattgccgaagcggtgaaaaaagctgacttattgatcggcgccgtcttaattccgggagcccgggcgcccaaattggtaacggaagagatggttaagaccatgaaacccggttcggttatcgttgacgtggctattgaccagggtggttgcgtcgaaactattgaccgggtaactacccaccaggatccgatttacgttaaacacggagttgtccattatgctgtagccaacatgcccggtgccgtaccgagaacttcaacttttgctttaaccaacgtgaccttgccgtatgctttggctattgccaataaaggctgggagcgggcggtaagggaagaccgggctttagctttaggcgttaacgttttagacggaaaagttacctgtaaagcggtagccgattctttgggcttaccttatactccgctggaagaaatcctcggttag

SEQ ID NO: 55214 - protein, 372 aa, Carboxydothermus hydrogenoformans Z-2901
MIIGVPKEIKNNENRVAITPAGVEALVAAGHKVVIENNAGLGSGITNEEYIKAGAEILPTAADVFAAADMIMKVKEPLPPEYPLFKEGQILFTYLHLAPEPELTRALMEKKVVAIAYETIQLPNGSLPLLTPMSEVAGRMAVQIGARFLEKPQGGRGMLLGGVPGVPPAEVVIIGGGVVGTNAAKMAMGMGAHVTILDKSADRLRYLDDIFFGKITTMMSNSYNIAEAVKKADLLIGAVLIPGARAPKLVTEEMVKTMKPGSVIVDVAIDQGGCVETIDRVTTHQDPIYVKHGVVHYAVANMPGAVPRTSTFALTNVTLPYALAIANKGWERAVREDRALALGVNVLDGKVTCKAVADSLGLPYTPLEEILG

SEQ ID NO: 55215 - DNA, 1116 bp, Burkholderia sp. 383
  CDS (1)..(1116): transl_table=11
atgctgatcggtgtgccgaaagagatcaagaaccacgaataccgtgtcggcctcacgccggccggcgcgcgcgaactgacgcggcacggccatcgcgtcctggtgcagcgcggcgcgggcacggcgatcggcctgctcgacaacgactacacggccgcgggcgcatcgctttgcgacggtgccgacgaagtcttcgcgcgtgccgacatgatcatcaaggtcaaggagccgcaaccggcggaatgcgcgatgttgcgacgcgggcagatcctctacacgtacctgcatctcgcgcccgatcccgaccaggcggccgcgctcgtgaagtccggcgccgtctgcatcgcctacgaaaccgtgaccggccccggcggcggcctgccgctgctcgcgccgatgagcgaggtggccgggcgcatgtcgatccaggtcgcggcgacccacctcgaaagcccgcgcggcgggcgtggcctgctgatggccggtgtgcccggcgtaccggccgcgcatgtcgtcgtgctcggcgcgggcgtggtgggcaccggcgcgctgcagatggcggtcggcctcggcgcacgcgttaccgtgctcgacaccaacgtgaaccggctgcgccagctcgacctcgtcttcgccaaccggatcacgaccgtctgctcgaatgcgcacacgatcgacgaagccgtgcgcgatgccgacgtcgtgatcggcgccgtgctcgtgccgggcgcatcggcgccgcggctcgtcacgcgcgacatgatcgcgacgatgcgcacgggagcggtcgtcgtcgacgtcgcgatcgaccagggcggatgcttcgaaacctcgcatgcgacgacgcacgcggacccgaccttcgtcgtcgacggcgtcgtgcactactgcgtcgcgaacatgcccggcgcggtcgcgcgcacgtcgaccttcgcgctgaacaacgcgacgctcacccatgcgctcgcgctcgccgacaagggctggaagcaggcgatgaccgacgatccgcacctgcgtgcgggcctgaacgtgtgcgacgggcacatcacgtacgaggcagtcgcgctggcgctcggcctgccctacgtgccggccaccggtgtgctggcatga

SEQ ID NO: 55216 - protein, 371 aa, Burkholderia sp. 383
MLIGVPKEIKNHEYRVGLTPAGARELTRHGHRVLVQRGAGTAIGLLDNDYTAAGASLCDGADEVFARADMIIKVKEPQPAECAMLRRGQILYTYLHLAPDPDQAAALVKSGAVCIAYETVTGPGGGLPLLAPMSEVAGRMSIQVAATHLESPRGGRGLLMAGVPGVPAAHVVVLGAGVVGTGALQMAVGLGARVTVLDTNVNRLRQLDLVFANRITTVCSNAHTIDEAVRDADVVIGAVLVPGASAPRLVTRDMIATMRTGAVVVDVAIDQGGCFETSHATTHADPTFVVDGVVHYCVANMPGAVARTSTFALNNATLTHALALADKGWKQAMTDDPHLRAGLNVCDGHITYEAVALALGLPYVPATGVLA

SEQ ID NO: 55217 - DNA, 1140 bp, Synechococcus sp. CC9605
  CDS (1)..(1140): transl_table=11
atggcagcctccgtcctctcggcaccgatggccagcatcggtgtgccgaaggagatcaagctcgatgagcagcgcgtggcgctgactcccgatgcggtgcgggagctggtcagccaaggcttggaggtgcgcatcgaaaccggagccggggctggagcaggaatcggtgacgaagccttcgccgccgccggtgcccaaatggtgagccgcgacgaggcctggggcgcccatctggtggtgaaagtgaaggaaccgcaggcggaggaatttgcctacctgcggaaggacatggtgctgttcacctacctgcacctggccgcctatcccagcgttggcgaagccctgctggaggcgggaactgccgccatcgcatacgaaaccgtgcagctggagaacggcagcctgccgttgctggcaccgatgagcgaaatcgcggggcgcttggcagcccaggtgggagctcacctgctggagaaaccccacggcggccgcggtgtgctgatggggggctgcaccggcgtgcagccggcccgtgtggtggtgcttggcgccggcaccgttggctggaatgccgcacgaacggccgccgccatggatgccgaggtattgctgctcgaccgctcaccccagcggttgcgcagcctggaggccgaccggcgcggtcgcttgatgagtgtggtgagcagccgcggactgctggaacggttggtgccgacggcggatctggtgatcggagccgtgctcacccccggcggacgggcccccaccctggtggacgcggagatggtgaagcagatgcgacccggttcggtgatcgtggatgtggctatcgaccaaggcggctgcatcgccacaagccaggagacgacccaccgcgatcccaccgtgaccatccacggcgtgcagcactacgccgtgggcaacatgccgggggcggtgccgttcacctccactgaagccctggtgagcgtgaccctcccctacatcctgggcatcgccgggcggggcctggaggaggcggtgacggaacgaccggaactcatctccggcctgaacacggtgcagggatcggtgtgccatcccggcgtggccaaggcactcggggtaccgccgcggcatccgatggcctgcctccgttag

SEQ ID NO: 55218 - protein, 379 aa, Synechococcus sp. CC9605
MAASVLSAPMASIGVPKEIKLDEQRVALTPDAVRELVSQGLEVRIETGAGAGAGIGDEAFAAAGAQMVSRDEAWGAHLVVKVKEPQAEEFAYLRKDMVLFTYLHLAAYPSVGEALLEAGTAAIAYETVQLENGSLPLLAPMSEIAGRLAAQVGAHLLEKPHGGRGVLMGGCTGVQPARVVVLGAGTVGWNAARTAAAMDAEVLLLDRSPQRLRSLEADRRGRLMSVVSSRGLLERLVPTADLVIGAVLTPGGRAPTLVDAEMVKQMRPGSVIVDVAIDQGGCIATSQETTHRDPTVTIHGVQHYAVGNMPGAVPFTSTEALVSVTLPYILGIAGRGLEEAVTERPELISGLNTVQGSVCHPGVAKALGVPPRHPMACLR

SEQ ID NO: 55219 - DNA, 1098 bp, Geobacter metallireducens GS-15
  CDS (1)..(1098): transl_table=11
atgatcgtcggagtgccgcgggagatcaagacccacgagtaccgggtcggcatgacgccggccggtattgcagagttggcgcgggggggacacacggttctcgtggaaaccggagccggagaggggagcggttttgccgacggggaatacctgcgggttggagcccgggtctgcggcagggaagaggtcttcggcccggcggagctcctcgtgaaggtgaaggagccgcttccgtccgagtacggcctgctgagacaagggcaggcccttttcacctacctgcacctggcccccaaccgtcccctcgcggagctgctcctggagaggggggtcacgggaatcggttacgagaccttcgagaagggagggacgctgccgcttctggcccccatgagcgaggtggcgggccgcatggcgccgctggtggggggataccatctccagcgggttctcggggggacgggggtccttccctcgggggtgccgggggtgcccgccgcccgcgccctcatcctgggggccggcgtggtggggagcggcgctgcgagggtctgcgccggcctcggcatggaaacggtggttatgaaccgggggatcgatcggcttcagcggctcgacgaaattctggccggaagggcccggaccgtggccctgaaccgggagtccctggcggaggaactttcgcgggcagacttggtggtcggcgcagtgctcgtgccgggggggcggacccctcttctcatcgaccggtcggccctcggcactatgaagcgcgggtcagtcattgtcgacgtctccatcgaccaggggggctgcgccgagacgagccgccccaccactcacgacgacccggtctacattgtggacggcgtcatccactataccgtggcgaacatgcccggcgcctatcctcgtacctcgaccctggccctcaccaatgcaacgctcccctgcgtgaaggccctggccgaccggggaatcgaggatgcgcttcgggccgatccggccctggccggcgccctcaatacctggcgcggcgccgtggtccaccgtgccctggcccaggcgctggatctgccgttttcacttttttcctga

SEQ ID NO: 55220 - protein, 365 aa, Geobacter metallireducens GS-15
MIVGVPREIKTHEYRVGMTPAGIAELARGGHTVLVETGAGEGSGFADGEYLRVGARVCGREEVFGPAELLVKVKEPLPSEYGLLRQGQALFTYLHLAPNRPLAELLLERGVTGIGYETFEKGGTLPLLAPMSEVAGRMAPLVGGYHLQRVLGGTGVLPSGVPGVPAARALILGAGVVGSGAARVCAGLGMETVVMNRGIDRLQRLDEILAGRARTVALNRESLAEELSRADLVVGAVLVPGGRTPLLIDRSALGTMKRGSVIVDVSIDQGGCAETSRPTTHDDPVYIVDGVIHYTVANMPGAYPRTSTLALTNATLPCVKALADRGIEDALRADPALAGALNTWRGAVVHRALAQALDLPFSLFS

SEQ ID NO: 55221 - DNA, 1113 bp, Desulfovibrio desulfuricans G20
  CDS (1)..(1113): transl_table=11
atgatcgtaggcattctcaaagaaataaagtccgaagagaaccgggtgtccatgacgcctgccggtgcggaagtgatggtgcatcatggacataccgtgctggtggagaaaaatgcggggacgggcagcggatttctggacgaggcctacaccagagccggagcggaaattgtagagactcctgcagagatttatgcccgcgctgatatggttatgcacgtcaaagaacctctgccttctgaatacggccttatccgtgaaggacagattgtgttcacctatctgcaccttgccgcagatgaaaagcttaccagggctctggtggacagcaaggcggtatgcatcgcgtatgaaaccattcagaagccggacggaagcctgccgctgcttactcccatgagcgaagtggccgggcggatggccattcagcagggtgccaaatatctggagatgacacagggcgggcacggcgtgctgctgggcggcgttcccggggttgatccgggtacagttgtagtcataggcggcggagtggtgggtaccaatgccgccaagatggcatgcggtctgggcgcaaaggtgtacattcttgatatgaatcttgaccggctgcgtcacctcagcgatatcatgccggccaactgctttcctctgatgtcttctcccgccacgctgcgcaagctggtacgcgaggctgacgtggtggtgggtgccgtactggttgctggcgccaaggctccgcgtcttgtaacacgtgagatgataaaaaccatgaagcgcggatccgtactggtggatgtggccattgatcagggcggatgttttgaaacttctcatcccacaacacacaaggatcccacgtttgtggtggacgatgtggtgcattactgcgtggccaacatgcccggcgccgtggcaaaaacctccacactggctctgaccaatgccacgttgccctatgccgtgactctggcggataaagggtggaaaaaagccatgcaggacagccgtgaaattgcgctgggtgccaacgtgatcgatggcgaaatcacatataaaggtgtggctgaagcatttgatatgccctacgccggagtggaaaagtttctgtag

SEQ ID NO: 55222 - protein, 370 aa, Desulfovibrio desulfuricans G20
MIVGILKEIKSEENRVSMTPAGAEVMVHHGHTVLVEKNAGTGSGFLDEAYTRAGAEIVETPAEIYARADMVMHVKEPLPSEYGLIREGQIVFTYLHLAADEKLTRALVDSKAVCIAYETIQKPDGSLPLLTPMSEVAGRMAIQQGAKYLEMTQGGHGVLLGGVPGVDPGTVVVIGGGVVGTNAAKMACGLGAKVYILDMNLDRLRHLSDIMPANCFPLMSSPATLRKLVREADVVVGAVLVAGAKAPRLVTREMIKTMKRGSVLVDVAIDQGGCFETSHPTTHKDPTFVVDDVVHYCVANMPGAVAKTSTLALTNATLPYAVTLADKGWKKAMQDSREIALGANVIDGEITYKGVAEAFDMPYAGVEKFL

SEQ ID NO: 55223 - DNA, 1092 bp, Synechococcus elongatus PCC 7942
  CDS (1)..(1092): transl_table=11
atggacatcggagtgccgcgtgagctcaaggatcaagaatttcgggtgggactgagccctgctagtgtgcgggctttagccctacaggggcaccagatctggatcgagcaaggggcgggtgtcggttccgggtttcaggacgaggattatttactggctggggccaaggtggtcgccacagctaccgaggcctggcaacaccccctagttgtcaaggttaaggagcccctgccagcagagtacgactatctgcggcctgatctgctgctcttcacctacctgcacctcgccgccgatcgcccactaacagagcgcctcctagccagcggaaccactgcgatcgcctacgaaaccgtgaccgcccgcaatggcagcttgcccctactgatgccgatgagccggattgccggacggctgtcggtacaatttggcgctcgtttcctagagcggcagcaaggcggacggggggttttgctcggcggggttcccggcgttagccctggcactgtcatgattctgggcggcgggattgttgggactgaagcagccaagatggcgatcggattgggggccaaagttcaaatagtcgacattaatgttgagcggctagcagaactagaggccctgtttggctcccgcgtcgaattgctctatagcagtcctgcggaaattgaagcccgtgtaccgcaggccgatttactgatcggagccgtcctggtacccggtcgacgcgccccgattttggtgaaccgtgacctgattgcccagatgcgccccgggtcagtggtggttgatgtcgccgtcgatcaagggggctgtgtggaaaccctacgtcccactagtcatagccaaccgatctacctcgaagcgggagtcgtccactacggcgtacccaatatgccaggggcggtgccttggacggccacccaagcgctgaacaacagcaccctgccctatgttcaagcgatcgcggcccagggccttgccagttgtgatcgcgatccaggcctggctgagggactgaacgtcgcccagggcgtcctgactcaccctgcgatcgcggccgcttttcctgacttaccctgccgctga

SEQ ID NO: 55224 - protein, 363 aa, Synechococcus elongatus PCC 7942
MDIGVPRELKDQEFRVGLSPASVRALALQGHQIWIEQGAGVGSGFQDEDYLLAGAKVVATATEAWQHPLVVKVKEPLPAEYDYLRPDLLLFTYLHLAADRPLTERLLASGTTAIAYETVTARNGSLPLLMPMSRIAGRLSVQFGARFLERQQGGRGVLLGGVPGVSPGTVMILGGGIVGTEAAKMAIGLGAKVQIVDINVERLAELEALFGSRVELLYSSPAEIEARVPQADLLIGAVLVPGRRAPILVNRDLIAQMRPGSVVVDVAVDQGGCVETLRPTSHSQPIYLEAGVVHYGVPNMPGAVPWTATQALNNSTLPYVQAIAAQGLASCDRDPGLAEGLNVAQGVLTHPAIAAAFPDLPCR

SEQ ID NO: 55225 - DNA, 1119 bp, Rhodospirillum rubrum ATCC 11170
  CDS (1)..(1119): transl_table=11
atgcgtatcggtgttcccaaggaaatcaagaatcacgaataccgggtcggcctgacccccaatagcgttcatgaattcgtcgaccacggtcacgccgtggtggtggaaagcggcgctggcctgggcatcggctcgaccgacgccgattacatcaaggccggcgccaccatcgctgcgacggcggccgaggtgttcgccggcgccgagatggtgatcaaggtcaaggagccccaggcggttgaatgcgccatgctgcgccccggccagatcctttacacctatctgcacctcgcccccgatcccgagcagacccgcgccctgatcgcctcgggcgccacctgcatcgcctatgagacggtgaccgacgccaagggcggcctgccgctgctggcgccgatgtcccaggtggccggtcgcatggcgatccaggccggcgcccattgcctggaaaaggcccatggcggcgaaggcgtgctgttgggcggcgtgcccggggtcgccccggccaaggtggcgatcatcggcggcggcgtggtcggcgagaacgccgcgcagatcgccctgggcatcggcgccgaggtcacggtgcttgatcgctcgctcgacgccctcgcccggctgtcggcgcgctttggcgccggcctcaagaccgtctattcaacccgggcggcgctggagcaaacggtgctcgagtccgatctggtgatcggcgcggtgctggtgaagggcgccgctacccccaagctggtgactcgcgccatgctgggccgcatgcgccccggcgcggtgctggtcgatgtggcgatcgatcagggcggctgcttcgagacatcaaaggcgaccacccacgacgcgccgacctatgtcgtcgatggcgtggttcattactgcgtggccaatatgcccggcgccgtcgcccgcacctcgacctatgcgctcaccaacgccaccctgccctatggtctggcgatcgccaccaagggctggaaggcggcgctggccgatgatcccggcttgctcgaagggctgaacgtccacgccggcaaggtcacctgcgccccggtcgccgccgaattgggttatgagcacaccccggcggcgtcggtgctgggcgcgtaa

SEQ ID NO: 55226 - protein, 372 aa, Rhodospirillum rubrum ATCC 11170
MRIGVPKEIKNHEYRVGLTPNSVHEFVDHGHAVVVESGAGLGIGSTDADYIKAGATIAATAAEVFAGAEMVIKVKEPQAVECAMLRPGQILYTYLHLAPDPEQTRALIASGATCIAYETVTDAKGGLPLLAPMSQVAGRMAIQAGAHCLEKAHGGEGVLLGGVPGVAPAKVAIIGGGVVGENAAQIALGIGAEVTVLDRSLDALARLSARFGAGLKTVYSTRAALEQTVLESDLVIGAVLVKGAATPKLVTRAMLGRMRPGAVLVDVAIDQGGCFETSKATTHDAPTYVVDGVVHYCVANMPGAVARTSTYALTNATLPYGLAIATKGWKAALADDPGLLEGLNVHAGKVTCAPVAAELGYEHTPAASVLGA

SEQ ID NO: 55227 - DNA, 1116 bp, Burkholderia thailandensis E264
  CDS (1)..(1116): transl_table=11
atgctgattggcgtgccgaaggagatcaaggtctacgagtatcgcgtcggcctgacgccggcgggcgcgcgcgagctcgcgctgcacggccatccggtgctggtgcagcgcggcgcgggcgcggcgatcggcttgcgggacgaggattacgcggcggccggcgcgatgctggccgatgacccggccgaggtgtacgcgcgcgccgacatgatcgtcaaggtcaaggagccgcagccggccgagtgcgcgatgctgcggcgcggccagatcctgttcgcctacctgcatctcgcgcccgatcccgggcaggcggcggcgctcgtcaggtcgcgcgcggtgtgcatcgcgtacgaaacggtccgcgcgcccggaggcggcctgccgctgctcgcgccgatgagcgaagtcgccggccgcatgtcgattcaggttgccgccgcgcatctcgaaagtcccggcggcggaatgggcctgctgatggcgggcgtgcccggcgtgccggccgcgcacgtcgtcgtgctcggcgcgggcgtcgtcggcacctgcgcgctgcagatggcggcgggcctcggcgcgcgcgtgaccgtgctcgacaccaacgtcgatcgcctgcgcgagctcgacctcgtcttcggcaaccgaatcgcgaccctctactcgaacgcgcatgcgatcgacgatgcggtgcgcggtgcggacgtcgtgatcggcgcggtgctggtgcccggcgcgtccgcgccgcggctcgtcacgcgcgagatgatctcgacgatgcgcgccggcgcggtcgtcgtcgatgtcgcgatcgatcagggcggctgcatcgagacgtcccgtccgacgacgcacgcgcagccgacctacgtcgtcgacggcgtcgttcactactgcgtcgccaacatgcccggcgcggtcgcgcgcacgtcgacgttcgcgctcggcaacgcgacgctgcgtcatgcgatcgcgctcgcgaacaaaggctggaagcgcgcgctcgcggatgacccgtacctgcgcgcggggctgaacgtgtgcgacggccatgtcacgcacgaagcggtggcgcgcgcgctcggcctcgcttacgtgcacgcggacgagatgctcgactga

SEQ ID NO: 55228 - protein, 371 aa, Burkholderia thailandensis E264
MLIGVPKEIKVYEYRVGLTPAGARELALHGHPVLVQRGAGAAIGLRDEDYAAAGAMLADDPAEVYARADMIVKVKEPQPAECAMLRRGQILFAYLHLAPDPGQAAALVRSRAVCIAYETVRAPGGGLPLLAPMSEVAGRMSIQVAAAHLESPGGGMGLLMAGVPGVPAAHVVVLGAGVVGTCALQMAAGLGARVTVLDTNVDRLRELDLVFGNRIATLYSNAHAIDDAVRGADVVIGAVLVPGASAPRLVTREMISTMRAGAVVVDVAIDQGGCIETSRPTTHAQPTYVVDGVVHYCVANMPGAVARTSTFALGNATLRHAIALANKGWKRALADDPYLRAGLNVCDGHVTHEAVARALGLAYVHADEMLD

SEQ ID NO: 55229 - DNA, 1230 bp, Syntrophus aciditrophicus SB
  CDS (1)..(1230): transl_table=11
ttgacacgccttgaaacctgtggcagtaacataccctgcttggttttcctcagggcagcggctgccttttcaccgtatgaacggaagggaaaacggaatgaacgattgaagagaggctctatgctgattggagttccgaaagaaatcaaggatcatgaataccgcgttgccttgacgccgggaagtgtcgggacgcttgtccgggcgggtcacaaaattcttgtgcagtctggagcaggggaaggcagtggatttcccgatgatgagtatcgttcatcgggagccattctttttccggaagccgccgacatatgggaaggggccgggatggtcatgaaagtgaaggagcctcagccatcagagtatatctatctgaggaatgatctgatcctttttacttacctccatctggccgctgaaccggacctgacccgtgtgcttctggattccggaacggctgccatcggttacgagacagttcagttggataatggaacgctgcccctgctcatgcccatgtcggaagttgccggccggatgtctgctcagattgttgctcactatctggagaaagaaaacggggggcgtggaaagcttctcggtggggtgcccggcgttcgtcctgcggatgtggtgatcctcggtggaggaattgtcgggagcaacgcggccaaaatcgcgttgggaatgggtgcacatgtaaccatcatcgacaccagttcggaccgcctccggtatctggatgaggtgcttcacggcaatctgacgactctcggttccaatgtgcagaatatcgctgattccgtcaatcgcgccgacggactggttggaagcgttctcatcccaggggctaagactccgaaactcgtcagccgggaaatggtggccgcgatgaagccgggaagcgtcattgtggatgttgccatcgatcagggaggctgcgtggaaacggccagaccgacaaagcacagcgatcccgtttatattgtggatgaggtgatccactattgtgtgaccaacatgcccggcgccgtcccgcgaacatctacctatgcactgaacaatgcgactcttccttatgcgttgaaaattgcaggatcaggtctgatggatgctcttaaagcagatatctcccttgtccggggcgtcaatacgctgggaggccgtctggccagccgtcctgtcgcagaggctcatggtctggagtatatcccccttttcaggcggtga

SEQ ID NO: 55230 - protein, 409 aa, Syntrophus aciditrophicus SB
MTRLETCGSNIPCLVFLRAAAAFSPYERKGKRNERLKRGSMLIGVPKEIKDHEYRVALTPGSVGTLVRAGHKILVQSGAGEGSGFPDDEYRSSGAILFPEAADIWEGAGMVMKVKEPQPSEYIYLRNDLILFTYLHLAAEPDLTRVLLDSGTAAIGYETVQLDNGTLPLLMPMSEVAGRMSAQIVAHYLEKENGGRGKLLGGVPGVRPADVVILGGGIVGSNAAKIALGMGAHVTIIDTSSDRLRYLDEVLHGNLTTLGSNVQNIADSVNRADGLVGSVLIPGAKTPKLVSREMVAAMKPGSVIVDVAIDQGGCVETARPTKHSDPVYIVDEVIHYCVTNMPGAVPRTSTYALNNATLPYALKIAGSGLMDALKADISLVRGVNTLGGRLASRPVAEAHGLEYIPLFRR

SEQ ID NO: 55231 - DNA, 1116 bp, Novosphingobium aromaticivorans DSM 12444
  CDS (1)..(1116): transl_table=11
atgcgcgtcggaaccgtccgtgaaatcaagaaccatgaataccgcgtcgggcttacccccgaaagcgtccgcgaactcgtcgcccatggccacgaagtgtgggtcgaagccggcgcgggcaacggcataggagcaagcgacgccgactacgaaggcgcgggcgcgatcatcaaggccgatgccaggaccgtgttcgacggttgcgagatgatcgtgaaggtcaaggaaccccaggccgtcgagcgcgcgatgctgcgccgtggccaggtgctctacacttatctccatctcgcacccgatccggaacagaccgccgacctcgtcaagtccggcgtcaccgcgatcgcctatgaaaccgtcaccggcgcgggcaatgccctgcccctgctcaagcccatgagccaggtcgcaggtcgcatgtcgatccaggctggcgcgacagcgctcgaaaaggccaacgggggccggggcgtgctgcttggcggcgtaccgggcgtgctgccgggcaaggtcgtcgtcatcggcggcggcgtggtggggttcaatgcggcgcagatggccgtggggcttggcgccgacgtgaccatcctcgaccgcgaccctgacgtgctcgaacgcctcgacaaccacttcgaaggccgcgcccgcacgctctattcgggcaaggccgcgcttgcagcgctggtcgccgaggccgacctcgtgatcggcgccgtgctgatccccggcgccgccgcgccgaagctggtcacgcgcgacatgctggcgacgatgaagcccggcgcggttctcgtcgacgttgccatcgaccagggcggctgcttcgagaccagcaaggcgacgacccatgccgaccccacctatgtcgtcgacggcgtggtccactactgcgtcgccaacatgccgggcgcggttgcacgtaccagcacctacgcgctgaacaacgtcacgctcccccacgcgctgcgcatcgcggacaagggctggaaggaagcgctgcgcgccgaccccaacctcgcagcgggcctgaacgtccacgagggcaaggtcacttacgaagccgtggcaaccgaactgggatacgaatacaccccggtcgccgacattctcgcctga

SEQ ID NO: 55232 - protein, 371 aa, Novosphingobium aromaticivorans DSM 12444
MRVGTVREIKNHEYRVGLTPESVRELVAHGHEVWVEAGAGNGIGASDADYEGAGAIIKADARTVFDGCEMIVKVKEPQAVERAMLRRGQVLYTYLHLAPDPEQTADLVKSGVTAIAYETVTGAGNALPLLKPMSQVAGRMSIQAGATALEKANGGRGVLLGGVPGVLPGKVVVIGGGVVGFNAAQMAVGLGADVTILDRDPDVLERLDNHFEGRARTLYSGKAALAALVAEADLVIGAVLIPGAAAPKLVTRDMLATMKPGAVLVDVAIDQGGCFETSKATTHADPTYVVDGVVHYCVANMPGAVARTSTYALNNVTLPHALRIADKGWKEALRADPNLAAGLNVHEGKVTYEAVATELGYEYTPVADILA

SEQ ID NO: 55233 - DNA, 1119 bp, Staphylococcus aureus subsp. aureus NCTC 8325
  CDS (1)..(1119): transl_table=11
atgttagttgcagtagtcaaagaattaaaacaaggtgaaggacgtgtagcttgcacacccgaaaatgtgcgtaagttaacggatgcaggacataaagtaattgttgaaaaaaatgctggcattggttcaggattttctaacgatatgtatgaaaaagaaggcgctaagatcgtaactcacgaacaagcatgggaagctgatcttgttatcaaagtaaaagaacctcatgaaagcgaatatcaatatttcaaaaagaatcaaattatctggggatttttacatctagcatcttcaaaagaaatagtagaaaaaatgcaagaagttggtgtaactgcgattagtggtgaaaccattataaaaaatggaaaagcagaattattagcgccaatgagtgctatagcaggtcaacgctcagcaattatgggagcttactactctgaagcacaacatggtggtcaaggtactttagtgactggtgtacatgaaaatgtggatatacctggtagtacatatgtgattttcggtggtggagtagcagcaacaaatgcagcaaatgttgccttgggactaaatgctaaagtaatcattatcgagttaaacgatgaccgcattaaatatcttgaagatatgtatgcagaaaaagatgtcacagtagtcaaatcaacaccagaaaatttagcagaacaaattaagaaagcagatgtatttatttctacaattttaatttcaggtgcgaaaccgccaaaattggttactcgtgagatggttaaatcaatgaaaaaaggttcagtattaatcgatatagctattgaccaaggtggaactattgaaacaattagaccaactacaatttctgatccagtgtatgaagaagaaggtgtgattcattatggtgtaccaaatcaaccaggagcagtcccaagaacttcaacaatggcattagcacaaggaaatattgattatatattagaaatttgtgacaaaggcttagaacaagcaattaaagataatgaagccttaagtactggtgtaaacatttaccaaggacaagtgacaaatcaaggattagcttcatcacatgacctagattataaagaaatattaaatgttatcgaatag

SEQ ID NO: 55234 - protein, 372 aa, Staphylococcus aureus subsp. aureus NCTC 8325
MLVAVVKELKQGEGRVACTPENVRKLTDAGHKVIVEKNAGIGSGFSNDMYEKEGAKIVTHEQAWEADLVIKVKEPHESEYQYFKKNQIIWGFLHLASSKEIVEKMQEVGVTAISGETIIKNGKAELLAPMSAIAGQRSAIMGAYYSEAQHGGQGTLVTGVHENVDIPGSTYVIFGGGVAATNAANVALGLNAKVIIIELNDDRIKYLEDMYAEKDVTVVKSTPENLAEQIKKADVFISTILISGAKPPKLVTREMVKSMKKGSVLIDIAIDQGGTIETIRPTTISDPVYEEEGVIHYGVPNQPGAVPRTSTMALAQGNIDYILEICDKGLEQAIKDNEALSTGVNIYQGQVTNQGLASSHDLDYKEILNVIE

SEQ ID NO: 55235 - DNA, 1116 bp, Desulfitobacterium hafniense Y51
  CDS (1)..(1116): transl_table=11
atgattattggcataccaaaagaaattaaaatctatgaaaatcgggtaggcatgcctcccgccggtgttgacgctctggttaaggccggtcacacatgttatctggagcaatcggcgggtttaggcagtggttttacagatgaggaatatcgagaggccggcgccgttattcttgagaccgcccaggaagtctatgaacgggcggagatgatcgttaaagtcaaggaacctttaaaatctgagtactctcttctaagggagaatcaaattctcttcacttatcttcatttggcaccgaatcaggaattgacagaagcccttttggaagcgaaggtcgtcggcatagcatatgaaacagtggagctttcgaataaatccttgccgctgctggcaccgatgagtgaagtagcgggccgcatggccattcaagtaggggctcacttgctggaaaagaccaatggcggcagaggaatgcttttgggcggcgtctcaggggtggagccggctaaggtcgtgatcatcggcggtggaaatgtgggcattaatgctgtgaagatcgccgtaggattaggtgctcaggttatcgtgctggatatcagcggcgccagactggcctatctggatgatatttttggcggccgggtggtcaccttgatgtccaataattataatatcgctaaagcggtcaggagagcggatttagtcattggcgccgttttgattcccggggccaggacccctaaggtagtcacggaagagatggtcaaaaccatgaaacccggtgcggtactggtggatgtggccatcgatcaggggggagccattgagagcatggatcgggttacctcccttgatgatccctatttcgttaagcatggcgtgattcactattcagtaggcaatatgccgggggcagtgccccggacctccaccatggctttaaccaatgccaccttgccctatgtattgaaaattgccagtttgggtgctgaaaaagctatgatggaagatgaagccctgagaaaagggctgaatgtctacaaaggaaagctgacgattaagacggttgccgaggctcaaggcctggagcatactcccagtgaagagctattttag

SEQ ID NO: 55236 - protein, 371 aa, Desulfitobacterium hafniense Y51
MIIGIPKEIKIYENRVGMPPAGVDALVKAGHTCYLEQSAGLGSGFTDEEYREAGAVILETAQEVYERAEMIVKVKEPLKSEYSLLRENQILFTYLHLAPNQELTEALLEAKVVGIAYETVELSNKSLPLLAPMSEVAGRMAIQVGAHLLEKTNGGRGMLLGGVSGVEPAKVVIIGGGNVGINAVKIAVGLGAQVIVLDISGARLAYLDDIFGGRVVTLMSNNYNIAKAVRRADLVIGAVLIPGARTPKVVTEEMVKTMKPGAVLVDVAIDQGGAIESMDRVTSLDDPYFVKHGVIHYSVGNMPGAVPRTSTMALTNATLPYVLKIASLGAEKAMMEDEALRKGLNVYKGKLTIKTVAEAQGLEHTPSEELF

SEQ ID NO: 55237 - DNA, 1125 bp, Silicibacter sp. TM1040
  CDS (1)..(1125): transl_table=11
atgagaatcggatgcccaacggaaattaagccgcaagaatttcgcgtcggcatgacgccggacgccgcgcgcgaggctattgcacatggacatcaggtgatgatccagaaaggcgcaggcctcggcgcaggttttcccgatgaggattacctcgcggcgggtgcggccattatcgacacggccgaggagatttttgccgacgccgatatgatcgtcaaagtgaaagagccgcaggcggtcgaacgcaagatgctgcgggagggacaactgctgttcacctacctgcatctggcgccagatcccgaacagactcatgacctgctggcgtcgggctgtacagcgattgcctatgaaaccgtgacggacgaccgtggtggactgccgctccttgcaccgatgtctgaagtggcgggccgtctggcgccgcaggttggcgcctacaccctgcaaaaggccaatggtggacgcggcgtgctgatgggtggcgttcccggcgttgcccctgccaaggtggtggttgtcggtggcggcgttgtgggcacccatgcggccaagatcgctgctggtatgggcgcggatgtgacggtgctggaccggtccctgccccgtctcaaatatctggatgatgtctttggcggcaccttcaagaatcggtattccacggccggcgccaccgcagaattgatccgcgacgccgatatggtcatcggtgcggtattgatccccggcgctgccgctccaaagcttgtctcgcgcgcggacctctcggacatgaagcccggtgcagttctggtggacgtggcgatcgaccaaggcggctgctttgaaacctcgcgcgccacgacccatgcggatccgatttatgaggtggacggcatcatgcattactgcgttgcgaatatgcccggcgctgtcgcgcgcacttcgacgcaggcgctcgggaacgccaccctgcccttcttgctcgcgcttgcggacaaaggctggcgacaggcctgcgcagatgacccgcacctgctgaacggcctgaacgtgcatgctggcaagctgacctattacgcggtgggcagggcgcttggtcttgatgttctatcaccgagccttgccctgcgagagggtacctaa

SEQ ID NO: 55238 - protein, 374 aa, Silicibacter sp. TM1040
MRIGCPTEIKPQEFRVGMTPDAAREAIAHGHQVMIQKGAGLGAGFPDEDYLAAGAAIIDTAEEIFADADMIVKVKEPQAVERKMLREGQLLFTYLHLAPDPEQTHDLLASGCTAIAYETVTDDRGGLPLLAPMSEVAGRLAPQVGAYTLQKANGGRGVLMGGVPGVAPAKVVVVGGGVVGTHAAKIAAGMGADVTVLDRSLPRLKYLDDVFGGTFKNRYSTAGATAELIRDADMVIGAVLIPGAAAPKLVSRADLSDMKPGAVLVDVAIDQGGCFETSRATTHADPIYEVDGIMHYCVANMPGAVARTSTQALGNATLPFLLALADKGWRQACADDPHLLNGLNVHAGKLTYYAVGRALGLDVLSPSLALREGT

SEQ ID NO: 55239 - DNA, 1125 bp, Myxococcus xanthus DK 1622
  CDS (1)..(1125): transl_table=11
gtgatcgtcggagttcccaaggagatcaaaacccgcgagtaccgcgtcggcatggtgcctgctggcgccgccgccctcatcgccgcgggtcacacggtcctgatcgagacgaacgccggcgttggctccggcatccccgattcggagtaccagcgcgtcggcgcacagatcatctccaccgcggacgaggtctggaagcgctcggagatgatcatcaaggtcaaggagccgatcgcgcccgaatacgcgcgcatccagcccggccagatcatctatacgtacttccacctggccggtgtggacccggagctgaccaagacgctgctccagaagaaggccgcggccgtggcctatgaaacgctgcagccggacgacggcagcctgccgctgctcaagcccatgagcgaggtggccggaaagatggccatccaggtgggcgccaagtgcctggagcgggcccacggcggcaagggcatcctcctgggcggcgtgcccggcgtgcgccggggccgcgtcaccgtcatcggcggcggcgtggtgggcctgtgtgccgccaaggtggcggtgggcatgggcgccgaggtcaccatcatcgacgtcaacatggagcgcctcacctacctggatgacgtgttcctcggccgcgtcggcgtgctggcctccgactcggagagcatctcccgctccgtgcgcgaggccgacctcgtcgtgggcgcggtgctcatccccggtcgcaaggccccgaagctcgtctccgaggccctcatctcggagatgagcccgggctccgtggtggtcgacgtggcggtggaccagggtggctgcatcgagacgtgcaagcccaccacccacgacaaccccacgttcgaggtccacggcgtcgtccactactgcgtcgccaacatgcccggcgccgtgccgcagacgtccacctacgccctcaccaacgtcacccgcccctattcgctccggatcgccaacgtgggcctggcggcggccgtgaaggaggaccgcgccctcgcgcgtgcgatgaacacctacaacggccacgtcacctacgaggccgtcgcgaaagacatgggctacgcctacatgcccatcgcggacgcgctcgccggcaagtaa

SEQ ID NO: 55240 - protein, 374 aa, Myxococcus xanthus DK 1622
MIVGVPKEIKTREYRVGMVPAGAAALIAAGHTVLIETNAGVGSGIPDSEYQRVGAQIISTADEVWKRSEMIIKVKEPIAPEYARIQPGQIIYTYFHLAGVDPELTKTLLQKKAAAVAYETLQPDDGSLPLLKPMSEVAGKMAIQVGAKCLERAHGGKGILLGGVPGVRRGRVTVIGGGVVGLCAAKVAVGMGAEVTIIDVNMERLTYLDDVFLGRVGVLASDSESISRSVREADLVVGAVLIPGRKAPKLVSEALISEMSPGSVVVDVAVDQGGCIETCKPTTHDNPTFEVHGVVHYCVANMPGAVPQTSTYALTNVTRPYSLRIANVGLAAAVKEDRALARAMNTYNGHVTYEAVAKDMGYAYMPIADALAGK

SEQ ID NO: 55241 - DNA, 1116 bp, Mycobacterium sp. MCS
  CDS (1)..(1116): transl_table=11
atgcgcgtcgggatcccgaccgagatcaagaacaacgagtaccgcgtcgccatcacccctgccggggtggcggaactgaccagccgtggacacgatgtgctgatccaatccggcgcaggcgaagggtcggccatctctgatgccgacttcaaagcggcaggcgcccaactcatcgcgggtgcggacgaagtgtgggccgaggcggacctcctgctgaaggtcaaggagccgatcgaacccgagtattcccggatgcgggagggccagacgctgttcacctacctgcacctggccgcgtcccaaccctgcacggacgcattgctcgcatcccggacgacgtcgatcgcctacgagaccgtgcagaccgctgacggtgcgctgccgctgctcgcgccgatgagcgaggtggccggccggctctccgctcaggtcggtgcctaccacctgatgcgcacgcagggtggccgcggcgtgctgatgggcggcgtccccggcgtcgccccggccaaggtcgtggtcatcggcggcggtatggccggcgacaacgccgccgctgtggcctggggaatgggcgcacacgtcacggtgttcgacgtcaacatcaacatcctgcgcaagatcgatgccgagtacggcggcgccatcgagacccgttactcctctcgcctcgaactggaggaggccgtcacgcaggccgacctggtgatcggcgccgtgctgatccctggagcgaaagcaccgaagctcgtcaccaattcgactgtggcgcagatgaagtcgggtgcagttctggtcgacatcgcgatcgaccagggcggctgcttcgaggactcacggcccaccacacacgacgacccgacgttcaaggtgcacgacgcggtcttctactgcgtggccaacatgccgggtgccgtgccgcgcacctcgacgtttgccctcaccaacgcgaccatgccctacgtgctcaaactggccgacaagggctggcgcgccgcatgccaggccgaccccgcactggccaagggtctgtccacccacgccggtgcactactcagcgagcaggtggccgccgacctcgacctgcccttcaccgatccggcgaccgtcctcgcctga

SEQ ID NO: 55242 - protein, 371 aa, Mycobacterium sp. MCS
MRVGIPTEIKNNEYRVAITPAGVAELTSRGHDVLIQSGAGEGSAISDADFKAAGAQLIAGADEVWAEADLLLKVKEPIEPEYSRMREGQTLFTYLHLAASQPCTDALLASRTTSIAYETVQTADGALPLLAPMSEVAGRLSAQVGAYHLMRTQGGRGVLMGGVPGVAPAKVVVIGGGMAGDNAAAVAWGMGAHVTVFDVNINILRKIDAEYGGAIETRYSSRLELEEAVTQADLVIGAVLIPGAKAPKLVTNSTVAQMKSGAVLVDIAIDQGGCFEDSRPTTHDDPTFKVHDAVFYCVANMPGAVPRTSTFALTNATMPYVLKLADKGWRAACQADPALAKGLSTHAGALLSEQVAADLDLPFTDPATVLA

SEQ ID NO: 55243 - DNA, 1134 bp, Rubrobacter xylanophilus DSM 9941
  CDS (1)..(1134): transl_table=11
ttgaggatcggggtcgtaagggaggtcgccgccggcgagagccgggtggcgctcgccccgccggcggtgcacgagctgtgccgggccgggcaccgggtcctcgtcgagtccggcgcgggggtggcctccgggatctccgacgccgactacgcggccgccggggcccgggtgctggaggaggccgggcgggtctaccgggaggccgagcttctggtaaaggtccaggggcccgtccccgaggagcacccccgcctgagggaggatctcatcctcatggccttcctctcgcttcccgtcaaccccgccctcatggaggccctcctcgcctcccgctgcgtggccttcgcgatggaggcgatccgggacgggcgcggcaggctgcccgtgctcaccccgatgagcgagatcgcgggccgcctcgtcccccagatcggggcccactacctgcagcgccagtccgggggccggggcatcctgctgggcggggcgaccggcgtgctgccggggcgggtggtgatcttgggcagcggcatcgtggggacggccgccgcccgggtggccagcgggctcggggccgagacggtggtggtggaccgcgacctggaccggctgcgcgcgctcgaggccctgcggctgcgcggggtgagcacgctcgcctccagccgcctcgccatccaggaggcggcggccggggccgacctgctgatcggggcggtgctcgtggtcagctcccgcacccccgcgctcgtggacgccgaaacggtcgggctgatgcgggaggggagcgtgatcgtggacgtggatgtggactacggcgggtgcatcgagacctcgcgccccacgacgctcgaagaccccaccttcgtggagcgcggcgtgatccactactgcgtgaggaacgtccccgccgcggtcccggtcacctccacccaggcgctctccaacgccctgctgccccacgtccggcggatagccgccctggggctcaccgacgccctcaacgccgacgaggggctcaggcagggggtggccgtggccgaggggcgcgtcgtggacccggtgctcgcccgcagcacgggcacggagtaccaccccatctcctcggtgctaccgctgcacctggaggcgagatga

SEQ ID NO: 55244 - protein, 377 aa, Rubrobacter xylanophilus DSM 9941
MRIGVVREVAAGESRVALAPPAVHELCRAGHRVLVESGAGVASGISDADYAAAGARVLEEAGRVYREAELLVKVQGPVPEEHPRLREDLILMAFLSLPVNPALMEALLASRCVAFAMEAIRDGRGRLPVLTPMSEIAGRLVPQIGAHYLQRQSGGRGILLGGATGVLPGRVVILGSGIVGTAAARVASGLGAETVVVDRDLDRLRALEALRLRGVSTLASSRLAIQEAAAGADLLIGAVLVVSSRTPALVDAETVGLMREGSVIVDVDVDYGGCIETSRPTTLEDPTFVERGVIHYCVRNVPAAVPVTSTQALSNALLPHVRRIAALGLTDALNADEGLRQGVAVAEGRVVDPVLARSTGTEYHPISSVLPLHLEAR

SEQ ID NO: 55245 - DNA, 1125 bp, Rubrobacter xylanophilus DSM 9941
  CDS (1)..(1125): transl_table=11
atgccagcggtggtgggcgtaccgaaggaggtaaaggacaaggaggggcgggtcagcctgcagcccgacggggtggtggagctggtgcaccacggccacgaggtggtggtgcagtcgggggccggcaggataagcggcttctcggacgaggagtacgagcgggcgggggcgcgggtggtggggagcgcccgcgaggtcttcgaggcggccgagctgatcgtgaaggtcaaggagcccatccccgaggagtacgagctctaccgggaggggcagcagcttttcacctacctgcacctggcggccgacaggcgcctgaccgagtttcttctgcggaagaggatcaactccatcgcctacgagacggtggagctcgaggacggctcgctgccgctgcttgcgcccatgagcgaggttgcggggaggatgtcggtgcaggcagcggcccactgcctggagagcccgcagggaggggcggggcttctgctggggggcgttcccggcacccctgccgcgaaggtcaccatcatcgggggcggggtcgtggggaccgaggcggccaagatagcggtggggatgcgggccatagtgcgggtgatggacataaaccccaagaggcttgcctacctctcggacatctttgggggcaggctggacctggtgcttcccaaccgggcgcgcacggcggcctacgtgagggagtcggatgtggtcataggggcggtgctggtgcccggggcgaaggcccccaagctcgtaagccgggagatggtggcgagcatgcgcccggggtcggtgatcgtggacgtggccatagaccagggggggtgcgtggagacggccaggcccacgacccactccgacccgacatacgtcgaggagggggtcatccactactgcgtggccaacatccccggggcggtggcgcgcacctccacgctggcgctgaccagcgccacgctgccctacctcctgaggatcgccgacagaggcatagagggggccgcgagggaggatcccgcgctgatgaggggcctgagcacgctcgggggcgcgctcgtctcccgtcccgtggccgaggcgcacgggctcccctgcaccgagcccgaggaggcgctcgggctctag

SEQ ID NO: 55246 - protein, 374 aa, Rubrobacter xylanophilus DSM 9941
MPAVVGVPKEVKDKEGRVSLQPDGVVELVHHGHEVVVQSGAGRISGFSDEEYERAGARVVGSAREVFEAAELIVKVKEPIPEEYELYREGQQLFTYLHLAADRRLTEFLLRKRINSIAYETVELEDGSLPLLAPMSEVAGRMSVQAAAHCLESPQGGAGLLLGGVPGTPAAKVTIIGGGVVGTEAAKIAVGMRAIVRVMDINPKRLAYLSDIFGGRLDLVLPNRARTAAYVRESDVVIGAVLVPGAKAPKLVSREMVASMRPGSVIVDVAIDQGGCVETARPTTHSDPTYVEEGVIHYCVANIPGAVARTSTLALTSATLPYLLRIADRGIEGAAREDPALMRGLSTLGGALVSRPVAEAHGLPCTEPEEALGL

SEQ ID NO: 55247 - DNA, 1116 bp, Mesorhizobium sp. BNC1
  CDS (1)..(1116): transl_table=11
atgcgtatcggatgtcccaaggaaatcaagaaccatgaataccgggtcggcctgaccccgggctcggtacgcgaatatatggcccacggccacgatgtgctggtcgaaactggcgccggtgccgggatcggcgcggatgacaatgcttaccgagctgcgggcgcagaaatcgccaaatcggccgaagacgtgtttgcccggtcggacatgatcgtaaaggtgaaagagccgcagccttcggaatgggtgcaacttcgtgaaggccagatcctctatacctacctccacctggctccggatcctgagcaaaccaagggcctgctcgaaagcggcgtgacggcggttgcttacgaaaccgtgacggacgcgcatggcggcctgccgttgcttgccccgatgtccgaagttgccggtcgcctcgcgatccaggcgggagctacggctctgcaaaaggcaaatggcgggcgcggcgtgctgcttgggggcgtgccgggtgtgctgcctggcaaggtcgccatcatcggcggtggagtggtcgggcttaatgcggcaaaaatggcggtgggcctcggcgccgacgtgacgatcatagaccggtcaattccacggctgcgccagctggatgacatcttcaacgggcgcatccacacgcgctattccactgtcgaagcgatcgaagaagagtgcttttcagccgatgtggtggtcggcgcggtgctcattccgggtgccgccgcgccaaagctcgtcacccgcgagatgctttccggcatgaagaaaggtgccattttggtggatgtggcgatcgatcagggcggctgcttcgagacctcgcatgccaccacccattccgatccgacctatgaggtggacggcattatccactattgcgtcgcgaacatgccgggtgcggtgcccgtcacctccgcgcatgcgctcaacaacgcgacgctgcactatggtttgcaactggccggcagggggctaagggctcttgcggacgaccagcacctgcgcaacggcctcaacgtgcataagggccgcatcacgaaccgcgcggtggcggattctctcggctatgaaatgatcgagccaaaggccgccctcgccgcctga

SEQ ID NO: 55248 - protein, 371 aa, Mesorhizobium sp. BNC1
MRIGCPKEIKNHEYRVGLTPGSVREYMAHGHDVLVETGAGAGIGADDNAYRAAGAEIAKSAEDVFARSDMIVKVKEPQPSEWVQLREGQILYTYLHLAPDPEQTKGLLESGVTAVAYETVTDAHGGLPLLAPMSEVAGRLAIQAGATALQKANGGRGVLLGGVPGVLPGKVAIIGGGVVGLNAAKMAVGLGADVTIIDRSIPRLRQLDDIFNGRIHTRYSTVEAIEEECFSADVVVGAVLIPGAAAPKLVTREMLSGMKKGAILVDVAIDQGGCFETSHATTHSDPTYEVDGIIHYCVANMPGAVPVTSAHALNNATLHYGLQLAGRGLRALADDQHLRNGLNVHKGRITNRAVADSLGYEMIEPKAALAA

SEQ ID NO: 55249 - DNA, 1116 bp, Cytophaga hutchinsonii ATCC 33406
  CDS (1)..(1116): transl_table=11
atgatcataggcgtaccaaaggaaattaagaacagagagttcagggtttctctgacaccatcgggtgtggcagaattagtttcccgaaaacatcaggtgcttgtacaaaaagatgccggccttggttcaggtttcagtaacgaacagtatacacatgccggggcaacagtctttgagcacgctgccgatgtgtatgcaaaagctgatctcatcataaaagtcaaagagccgctcgcttctgaatatgcgcttataaaagaaggacagatcgtatttacgtatttccactttgcatcttcagaagaacttacccatgcaatgatcgagcgcaaagccatctgcattgcctatgaaaccattcagaaagcagatcagtctttaccaatattgacacccatgtcagaagtagccgggcggatgtcgattcagatagcggcacattatcttgaaaaaggcaatgggggaagcggaaaattaatgggcggtgtacccggtgtaaaacccgcgcgcgtgctcattttaggtggcggtgtagttggcacacaggctgcaaagatggccgctggcttaggcgccgaagtgattttaatggatatcaatttaacacgtctccgttacctgacagacgtactgccagcaaacgttacctgtctctacccgaccaaaacattaatcgaagaatacttaccgcacacggatgtactggttggtgccgttttaattcccggaggcaaagctcctgttctggcctccagagaaatggttgagaccatgcctggaggttcagtggtgatagatgttgctgttgaccagggcggctgtattgaaacctgcaagccaacctcacacgaacatcccatctttctggtgaacgatatcattcattattgtgtacccaatattcccggagctgtaccggttacctcaaccaatgcgcttaccaatgccagtctgccctacctgcttcagctcgctgataaaggctggaaagatgcgtgcagacaatctgctgaaatagagaaaggactgtcaatcgcagcaggtaaagtaacggatgctatgctggctaaaacatttcagctatctttgcataacataaaagatctgctgaattaa

SEQ ID NO: 55250 - protein, 371 aa, Cytophaga hutchinsonii ATCC 33406
MIIGVPKEIKNREFRVSLTPSGVAELVSRKHQVLVQKDAGLGSGFSNEQYTHAGATVFEHAADVYAKADLIIKVKEPLASEYALIKEGQIVFTYFHFASSEELTHAMIERKAICIAYETIQKADQSLPILTPMSEVAGRMSIQIAAHYLEKGNGGSGKLMGGVPGVKPARVLILGGGVVGTQAAKMAAGLGAEVILMDINLTRLRYLTDVLPANVTCLYPTKTLIEEYLPHTDVLVGAVLIPGGKAPVLASREMVETMPGGSVVIDVAVDQGGCIETCKPTSHEHPIFLVNDIIHYCVPNIPGAVPVTSTNALTNASLPYLLQLADKGWKDACRQSAEIEKGLSIAAGKVTDAMLAKTFQLSLHNIKDLLN

SEQ ID NO: 55251 - DNA, 1122 bp, Rhodococcus sp. RHA1
  CDS (1)..(1122): transl_table=11
atgaggatcggtatccccaaggaagtcaagaaccacgagtaccgggtggcggccactcccgccggcgtccacgaaatggtcgcccacgggcacgacgtgttcgtggaacgcggtgcgggggagggctcgtcgatcggcgacgatgcctacggtgccgccggcgcgaagatcctcgactccgccgatgcggtgtggcagagcgcggaactgctgctcaaggtcaaggagcccatcgcggaggaataccaccggatgcgttcggacctcacgttgttcacgtacctgcacctcgctgcgggtgaggagtgcacccgggcactgctcgccgcaggcaccaattccgttgcatacgagaccgttcagcttcccgacggttcactgccgctgctgttcccgatgagcgaggtcgccggcaggctcgcaccgctcgtcggtgcgcaagcactcatgcgcccggagggtggccgcggcgtactgatcggcggtgtatccggtgtgtccccggctcgcgtcgtcgtgatcggtgccggcgtctcgggcatgaacgccgtcgccgtcgccgcaggcacctgggccgatgtggtcctgttcgacaagaacgtcgacaagctgcgcgccgccgaccggatgtaccagggccggatccgcaccctcgccgcgaacgcctactcgatcgagcaggaggtcatgcaggccgacctcgtcatcggtgccgtgctcgtcccgggcgccaaggcaccgaagatcatctcgaactcgctggtctcgcggatgaagccgggcagtgtcctcgtcgacatcgcgatcgaccagggtggttgcttcgaggattcgcgtcccaccacccacgcggagcccacgttcaaggttcacgactcggtgttctactgcgtggcgaacatgccgggagcggtgccccacacgtcgacgtacgcactcaccaacgtgaccttgccgtacaccctgcagatcgccgagaagggcctcgcccgcgctgccagggagaatgccgcactccgcgccggtgtcagcaccgtcgccgggcgcctgacgaacgatgccgtcggcgccgcactggggatcgagtcggtcagcgtcgacgacgcgctcaacctggtttga

SEQ ID NO: 55252 - protein, 373 aa, Rhodococcus sp. RHA1
MRIGIPKEVKNHEYRVAATPAGVHEMVAHGHDVFVERGAGEGSSIGDDAYGAAGAKILDSADAVWQSAELLLKVKEPIAEEYHRMRSDLTLFTYLHLAAGEECTRALLAAGTNSVAYETVQLPDGSLPLLFPMSEVAGRLAPLVGAQALMRPEGGRGVLIGGVSGVSPARVVVIGAGVSGMNAVAVAAGTWADVVLFDKNVDKLRAADRMYQGRIRTLAANAYSIEQEVMQADLVIGAVLVPGAKAPKIISNSLVSRMKPGSVLVDIAIDQGGCFEDSRPTTHAEPTFKVHDSVFYCVANMPGAVPHTSTYALTNVTLPYTLQIAEKGLARAARENAALRAGVSTVAGRLTNDAVGAALGIESVSVDDALNLV

SEQ ID NO: 55253 - DNA, 1098 bp, Rhodococcus sp. RHA1
  CDS (1)..(1098): transl_table=11
atgaagatcggcatcccccgcgaaatcaagaaccacgagtaccgcgtggccatcagccccgccggtgtccacgaactcaacgaacgcggccacgaggtcgtcatcgaatccggcgcaggcatcggctcgtccttcgccgacgaagacttcaaagccgcaggcgcccagatcctccaggccgccgaccaggtatgggacaccgccgacctgctcctgaaggtcaaggaacccatcgccgaggaatacgcccgcctgcgccaggaccaggtgctgttcacctacctgcacctggccgcatcgaaggagtgcaccgacgcactgctcgcgtcgaagaccacctccatcgcctacgaaaccgtcgtcggcgccgacggttccctcccgctgctcgccccgatgagcgaggtcgccggacgcctcgccccacaggccggcgcctaccacctcatgcgccacggcggcggccgcggcgtcctgatgggcggcgtccccggcgtgcgccccgccaaggtcgtcgtcatcggcgccggcgtctccggcaagaacgcgatcgcgatcgcctacggcatgcaggccgacgtcaccgtcctggacctgtccatcgcccgcctccgagagatcgacgccctctaccacggccaggtcaagaccatcgcttcgaacagcctcgaactcgaacaggccgtccagggcgccgacctcgtcatcggcgccgtcctcgtccccggcgccaaggcccccaccctcgtctccaacaacctcgtctcacggatgaagcccggctcggtgctcgtcgacatcgccatcgaccagggcggctgcttcgaggactcacgacccaccacccacgccgagcccacctaccaggtccacgactccgtcttctactgcgtcgccaacatgcccggcgccgtcccccgcacctccacctacgccctcaccaacgccaccctcccctacgtcgtggcgctcgccgacaagggctggaaggaagccaccgcgaccgtccccggactcgccgcgggactgtccacccacgacggacagctgctgtccgccgaagtcgctgccgcgcacggctacaccgcagtctcctga

SEQ ID NO: 55254 - protein, 365 aa, Rhodococcus sp. RHA1
MKIGIPREIKNHEYRVAISPAGVHELNERGHEVVIESGAGIGSSFADEDFKAAGAQILQAADQVWDTADLLLKVKEPIAEEYARLRQDQVLFTYLHLAASKECTDALLASKTTSIAYETVVGADGSLPLLAPMSEVAGRLAPQAGAYHLMRHGGGRGVLMGGVPGVRPAKVVVIGAGVSGKNAIAIAYGMQADVTVLDLSIARLREIDALYHGQVKTIASNSLELEQAVQGADLVIGAVLVPGAKAPTLVSNNLVSRMKPGSVLVDIAIDQGGCFEDSRPTTHAEPTYQVHDSVFYCVANMPGAVPRTSTYALTNATLPYVVALADKGWKEATATVPGLAAGLSTHDGQLLSAEVAAAHGYTAVS

SEQ ID NO: 55255 - DNA, 1086 bp, Trichodesmium erythraeum IMS101
  CDS (1)..(1086): transl_table=11
atgaaaataggtattccaaaagaaattaaggatcaggagtttcgtgtaggattaacccctgcaagtgttaaggtctgtactgaagcaggtaatgaagtatttatagagacagaagctggttggggcgcaggttttagtgatagtgactatcttaatgcaggcgggcatatcttatcagataccagggacgtttggaagtgtgacatgatagttaaggttaaggaacctctatcctcagagtatgaatttctcaaatcagaacaactgctatttacttatttacatttagctgcggatcggaagttaactaaaaaattaattgaaagtggcgtcacggccatcgcctatgaaacggtagagttatctgaccaaaggctacctttattaactcctatgagtataatagctggtcgtttgtctgtgcagtttggggcaagatttttggaaagacaacaaggtggtagaggtgttctcttgggtggggtccctggtgttacccctggcaaagttgtaattctgggaggaggaatagttggtacagaagcagctaaaattgctgttggcttgggtgcaaaagtcaaaattttggatattaatttggaaaggttggcttatttagagactgtatttggctcaaggttagagttactatatagtagttcctctgctatagaagcagcagtcgcagattgtgatttacttgtaggggcagttttagttcctggccgtcgttctccagttttagttcccaaaagtttggtggagcagatgcattctggatctgtaattatcgatgttgctgtggatcaaggtggttgtgtggaaactctacgtcctacttctcatacaaatcctatctatcaggaattaggtgtcgtacattatggagtacctaatatgcctggagcagttccctggacagctactcaagctttaaataatagtactttaccttatgtattgcagttagctaactatggtagtaaagctttagatatgaatccagggttggctaagggattgaatgttaaaaaccatgttttggttcaccctgctctccgagaagtatttcctgatttaaactag

SEQ ID NO: 55256 - protein, 361 aa, Trichodesmium erythraeum IMS101
MKIGIPKEIKDQEFRVGLTPASVKVCTEAGNEVFIETEAGWGAGFSDSDYLNAGGHILSDTRDVWKCDMIVKVKEPLSSEYEFLKSEQLLFTYLHLAADRKLTKKLIESGVTAIAYETVELSDQRLPLLTPMSIIAGRLSVQFGARFLERQQGGRGVLLGGVPGVTPGKVVILGGGIVGTEAAKIAVGLGAKVKILDINLERLAYLETVFGSRLELLYSSSSAIEAAVADCDLLVGAVLVPGRRSPVLVPKSLVEQMHSGSVIIDVAVDQGGCVETLRPTSHTNPIYQELGVVHYGVPNMPGAVPWTATQALNNSTLPYVLQLANYGSKALDMNPGLAKGLNVKNHVLVHPALREVFPDLN

SEQ ID NO: 55257 - DNA, 1113 bp, Synechococcus sp. CC9311
  CDS (1)..(1113): transl_table=11
atggccaccattggagtccccacagaaatcaaggttgatgagcaacgcgtcgcgctgacaccggatgccgttaaagagctcgtaacccatggactggaggtgcggatccagagcggtgcgggctccggcgcaggaattgatgacgaggccttcgccgctgcaggcgcacagatcgtggatcaagaacaagcgtggggcgctcatttagtcgtgaaggtgaaggagccgcagcctgaagaattccgctttttgcggaatgacatggtgctgttgacctacctgcacttggcggcttacccagaggtgggagaagcccttctcgcggcaggtactacgggcgttgcctacgaaacagtgcaactggaaaacggaaccctgccactgctggcgcccatgagcgaaatcgctggcaggcttgcagcgcaggtgggggctcgattactcgaacgcccgcaaggtggcagaggtgtcttaattggaggctgtactggtgtgcaaccagcgcgcgtggtggttcttggtgcaggaaccgtggggtggaacgcagcacggctcgtcgctgccatggatgcagaagtgatgcttctggatcgctcccccgaacgattacgcagcctggaggcctatcggagcggacgcctgatgagcgtggtgagcagccgtggtcttctcgaaagactgatccccaccgctgatctgctgattggcgccgttttgaccccgggtggcagggcaccaacgctggtggatgaagccatggtgaaagggatgaaaccaggctcagcgatcgttgatgtggctatcgatcaaggcggatgcatcgccaccagccgtgaaacaacgcataccaacccaaccgtgaccattcacggtgttcagcattacgccgtaggcaacatgcccggagccgtgccgttcacctccaccgaagccctcgtgagcgtgaccttgccttacatcgttggcatcgcagggcgaggcttagaggaagcagtcacagaacgccctgaattgctttcgggacttaatacggtgcaggggtctgtttgtcatccaggcgttgccaaagcactggatgtgccacctcgtcatcccatggcctgcttgcgctga

SEQ ID NO: 55258 - protein, 370 aa, Synechococcus sp. CC9311
MATIGVPTEIKVDEQRVALTPDAVKELVTHGLEVRIQSGAGSGAGIDDEAFAAAGAQIVDQEQAWGAHLVVKVKEPQPEEFRFLRNDMVLLTYLHLAAYPEVGEALLAAGTTGVAYETVQLENGTLPLLAPMSEIAGRLAAQVGARLLERPQGGRGVLIGGCTGVQPARVVVLGAGTVGWNAARLVAAMDAEVMLLDRSPERLRSLEAYRSGRLMSVVSSRGLLERLIPTADLLIGAVLTPGGRAPTLVDEAMVKGMKPGSAIVDVAIDQGGCIATSRETTHTNPTVTIHGVQHYAVGNMPGAVPFTSTEALVSVTLPYIVGIAGRGLEEAVTERPELLSGLNTVQGSVCHPGVAKALDVPPRHPMACLR

SEQ ID NO: 55259 - DNA, 1116 bp, Shewanella sp. MR-4
  CDS (1)..(1116): transl_table=11
atgattattggtgtaccaaaggaaattaaaaaccacgagtatcgtgtcggtatggttccttcaagcgttcgcgaattgacaatcaaaggtcacgaagtgtttgtagaaactaatgccggcacgggaattggtttttcagatcaggattatgttgatgcaggtgccaaaatattagcaactgctgctgaagtctttgctaaagcagagatgatcgtaaaggtaaaagagcctcaagcagttgaacgcgctatgctgcgtcatgaccagattttattcacttatctgcatttagcgccagatttaccgcaaacagaagatttaattaaaagtggtgccgtatgtatcgcttatgaaaccgtaactgatgaccgtggtggcctgcccctgcttgcgccaatgtcagaagtggcgggtcgcatgtcgattcaagcaggcgcgatggcattagagaaatcctctggtggccgcggcatgttacttggtggcgtacctggtgttgagccagctaaagttgtgattatcggtggcggcatggtcggtaccaatgcagcacaaatggctgtgggcatgggcgctgatgttgtcgtacttgaccgcagtatcgatgcactgcgtcgcttaaacgtacaatttggttcagcagttaaagcggtttactctactgccgacgcaattgagcgccatgtattagaagctgatctcgtgattggtggcgtattaattcctggtgctgcggcacctaaacttgtgactcgtagcatgattgcacgcatgaaaccaggcagtgctatcgttgacgtagcaatcgaccaaggtggttgtgtggaaacttcacatgcaacgactcaccaagatccaacctacatcgttgatgacgtagtgcactactgtgtggcaaacatgcctggtgccgttgcccgcacttcaacttttgctctgaataacgcgactctgccttatatccttaagttagctaacttaggttataaagctgccctgttacaagacaaacacttactaaacggtttgaacgtgatgcacggcaaactggtttgtaaagaagtagctcaagcattaaatcttgagtacacagcaccagcaagtttattagcctaa

SEQ ID NO: 55260 - protein, 371 aa, Shewanella sp. MR-4
MIIGVPKEIKNHEYRVGMVPSSVRELTIKGHEVFVETNAGTGIGFSDQDYVDAGAKILATAAEVFAKAEMIVKVKEPQAVERAMLRHDQILFTYLHLAPDLPQTEDLIKSGAVCIAYETVTDDRGGLPLLAPMSEVAGRMSIQAGAMALEKSSGGRGMLLGGVPGVEPAKVVIIGGGMVGTNAAQMAVGMGADVVVLDRSIDALRRLNVQFGSAVKAVYSTADAIERHVLEADLVIGGVLIPGAAAPKLVTRSMIARMKPGSAIVDVAIDQGGCVETSHATTHQDPTYIVDDVVHYCVANMPGAVARTSTFALNNATLPYILKLANLGYKAALLQDKHLLNGLNVMHGKLVCKEVAQALNLEYTAPASLLA

SEQ ID NO: 55261 - DNA, 1122 bp, Hyphomonas neptunium ATCC 15444
  CDS (1)..(1122): transl_table=11
atgcgaattggtgttccaactgaaatcaaaaagcaggaatcccgtgtcggtctgacacctgagagcgctggcgaactggtacgcgccggccatcaggtgaacatccaggccggtgcgggaattgcgtccggctttgccgatgaaacctacaccgccattggcgccgccatcctgccggacgccgaggccctcttcgcccaaagcgacctgatcgtgaaggtgaaggagccccagccggaagaaaccgcgcgcctcaccaaagaccacaccctcttcacctatctccatctcgcgccagaccctgtgcaggccaaaggccttatgaactccggttgcctcgccatcgcctatgaaaccgtcaccgacgcccatggcggcctccccctcctgcgcccgatgagccaggtcgccgggcgcatgtcgatgcaggtcgccgccggcgccctgatgcgcaccaagggccggggccggggcatcctgctcggcggcgtgccgggcgttgcgcccgccaaggtcgtcatcatcggcggcggtgtctccggcacccatgccgccgagatcgcggtcggcatgcgcgccgatgtctgggtcttcgaccgcaacaatgagcgcctcggcgaactcgacgaacagttccgcggcaccatcaacacgatgtattcgaccgcccattccctcgccgaagccatcaaggacgctgacctcgtgatcggcgccgtgctgatccccggcgcctcagcgcccaagctcgtcagccgcgcccagctctcgaccatgcaaccgggctcggtgctcgttgacatcgccatcgaccagggcggctgcttcgagacaagccgtccgaccacgcatgatgatccgatctatgaggtggatggtatcctgcactattgcgtcgccaacatgcccggcgccgtaccgcgcacctccacctacgcgctgaacaacgccaccctgcccttcgtcatgcagatcgccaatctcggcgcccgcaacgccatcaatgccaacaagcatctcgccaatggcctgacggccgaccagggcaccatcgcccacaaactcgtcgcgcgggatctgggcgaaaagtatgtgcgcccggactggctgacggtcgtgtaa

SEQ ID NO: 55262 - protein, 373 aa, Hyphomonas neptunium ATCC 15444
MRIGVPTEIKKQESRVGLTPESAGELVRAGHQVNIQAGAGIASGFADETYTAIGAAILPDAEALFAQSDLIVKVKEPQPEETARLTKDHTLFTYLHLAPDPVQAKGLMNSGCLAIAYETVTDAHGGLPLLRPMSQVAGRMSMQVAAGALMRTKGRGRGILLGGVPGVAPAKVVIIGGGVSGTHAAEIAVGMRADVWVFDRNNERLGELDEQFRGTINTMYSTAHSLAEAIKDADLVIGAVLIPGASAPKLVSRAQLSTMQPGSVLVDIAIDQGGCFETSRPTTHDDPIYEVDGILHYCVANMPGAVPRTSTYALNNATLPFVMQIANLGARNAINANKHLANGLTADQGTIAHKLVARDLGEKYVRPDWLTVV

SEQ ID NO: 55263 - DNA, 1119 bp, Rhizobium leguminosarum bv. viciae 3841
  CDS (1)..(1119): transl_table=11
atgcgtgtcggttgcccgaaggaaatcaagaatcatgaatatcgcgtcggcctgacgccggcttcggtgcgcgaatatgttgcccacggccacgaggtctgggtggagaccaaggcgggcgtcggtatcggcgctgatgatgccgcctatgccgcggctggcgccaagatcgccgcctccgccaaggatatcttcgaaaagtgcgacatgatcgtcaaggtgaaggagccgcagcctgccgaatgggcgcagctccgcgacggtcagcttctctacacctatctgcatctggcgccggatcccgaacagaccaaaggcctcatcgcctccggcgtcaccgcgatcgcctatgagacggtgaccgacgagcgcggcggcctgccgttgctggcgccgatgtcggaggtcgccggtcgcctgtcgatccaggcaggagcgaccgccctgcagaaggccaatggcggcctcggcgtcctcctcggcggcgtgcccggcgtgctgccggccaaggtcgcagtcatcggcggcggcgtcgtcggcctgcatgcggccaggatggccgccggccttggcgccgatgtcagcatccttgacaagtcgctgccgcgtctgcgccagctcgacgatatctttgcaggccgcatccacacccgttattccagcatccaggcgctggaggaggaagtcttctcggccgatctcattatcggcgccgtgctgatcccgggcgctgccgccccgaagctcgtcacccgcgagatgctgtccggcatgaagaagggctccgtcatcgtcgacgttgccatcgaccagggcggctgcttcgagacctcgcatgcgacgacccattccgatccgacctatgaagtcgatggcgtcgtgcattattgcgttgccaacatgccgggcgccgtgccggtcacctcggcacacgcgctgaacaatgccacattggttcatggcctggcgcttgccgatcgcggcctgcgcgccatcgccgaagacaggcatctgaggaatggcctcaacgtccacaagggccgcatcaccagcaagccggtcgccgaagcgctgggctacgaggccttcgcgccggaaagcgtgctgaacgtagcgtaa

SEQ ID NO: 55264 - protein, 372 aa, Rhizobium leguminosarum bv. viciae 3841
MRVGCPKEIKNHEYRVGLTPASVREYVAHGHEVWVETKAGVGIGADDAAYAAAGAKIAASAKDIFEKCDMIVKVKEPQPAEWAQLRDGQLLYTYLHLAPDPEQTKGLIASGVTAIAYETVTDERGGLPLLAPMSEVAGRLSIQAGATALQKANGGLGVLLGGVPGVLPAKVAVIGGGVVGLHAARMAAGLGADVSILDKSLPRLRQLDDIFAGRIHTRYSSIQALEEEVFSADLIIGAVLIPGAAAPKLVTREMLSGMKKGSVIVDVAIDQGGCFETSHATTHSDPTYEVDGVVHYCVANMPGAVPVTSAHALNNATLVHGLALADRGLRAIAEDRHLRNGLNVHKGRITSKPVAEALGYEAFAPESVLNVA

SEQ ID NO: 55265 - DNA, 1107 bp, Pediococcus pentosaceus ATCC 25745
  CDS (1)..(1107): transl_table=11
atgaaaattgctgtaattaaggagcaaaaagaaggcgaaggacgggtagcagccacacctgaaaatgtgcaaaagatggtagaagctggaaatgaagttcttgtggagcgcgatgcaggaattggtgccggattttccaatgaagaatttgaaaatgcaggaggaaaaattgtttctcatgcggaagcttggaaggctaagttgtgtattaaagttaaggagcctgacgaagaagaatatcaatattttgaaaagggtaagattgtttggggcttccagcatttagcctctgcaaaagctaccgtggaagctatgatgcaagcaggagtaacggcaattggtggtgaaacgattgtcaaagatggaaaactagaactgttagcaccaatgagccaaattgcagggcgccgctcagtaatcatgggagcatattatttagaagcgcaacatcaaggcgctggtattttattgtcaggaattccaggcatgatttcagcgggtaatgttgtaatttttggtggcggtaacgctgctaccggtgcagcagatacagcactgggattaggttgctcagtggtaattattgaattgaacgaccagagaattcaacagctccaaaaattatataaaggtaaaaaagttcgagtcgttaagtcaaatgaagcaaatttagcccaagaaatcaaagatgctgatttatttatatcgaccattttaattccaggttctcggccacccaagttggttaaagaatcgatggtcaaaaagatgaagaagggctcagtcatcgttgatattgcaattgatcaaggcggaacggtagaaaccattgaccatccaacgacgattgacgatccaatttttattaaagatggtgtaattcactatgctgtacctaatcaaccaggagcagttccacggacatccacgatggctttggctgccggtaatttagattatctattggaaatagccgatcaggggattgaagctgctggtaaaaatgatccagcattagcatctgggattaacctgtatgaaggaaaaattactaatcaaggtttggcagactccttgaatcttccatatactgaactgaaactataa

SEQ ID NO: 55266 - protein, 368 aa, Pediococcus pentosaceus ATCC 25745
MKIAVIKEQKEGEGRVAATPENVQKMVEAGNEVLVERDAGIGAGFSNEEFENAGGKIVSHAEAWKAKLCIKVKEPDEEEYQYFEKGKIVWGFQHLASAKATVEAMMQAGVTAIGGETIVKDGKLELLAPMSQIAGRRSVIMGAYYLEAQHQGAGILLSGIPGMISAGNVVIFGGGNAATGAADTALGLGCSVVIIELNDQRIQQLQKLYKGKKVRVVKSNEANLAQEIKDADLFISTILIPGSRPPKLVKESMVKKMKKGSVIVDIAIDQGGTVETIDHPTTIDDPIFIKDGVIHYAVPNQPGAVPRTSTMALAAGNLDYLLEIADQGIEAAGKNDPALASGINLYEGKITNQGLADSLNLPYTELKL

SEQ ID NO: 55267 - DNA, 1113 bp, Solibacter usitatus Ellin6076
  CDS (1)..(1113): transl_table=11
atgattatcggcgtccccaaggaaatcaaagatcacgaaacacgtgtagggctcgtgcctagcggcgttaccgcgctgcgcgaggcgggccatgaagttctggtggaaacccatgcgggcgaaggcagttcgctgcccgatagcgattatctggaggcgggcgcaaagattctttcgaccgccgccgaggtttggcagcgcgccgacctcgtcgtcaaagtgaaggaaccgcagaaaaccgagtacgcgttcttccggcccaacctgacgctgttcacctatctgcacctggctccgctgcccgagctgacggaaaaactgctggctaccaaagtcaacggcgtggcctacgaaaccatccgcgagaaggacggctccctgccgctgttgacgccgatgagcgaagtcgccgggcgcatgagcgtgcaggtgggagcgcaatacctggagcgcccgagcggcgggcgtggaatcctgctgggcggcgtgcccggtgtggctcccgggaatgtggtcatcctgggcggcgggatcgtcggcaccaatgcagcgaagatggcgatcggcatgggcgcgcacgtgaccatcatcgatcgcagcctgaaccggctgcgcgagctcgacgatatcttcaatggctacgccgtcacgctcgcctccaatgcgtggaccatcagcgaaaacctgaagacggccgacttggtggtgggcgcggtactgattccgggcgcttcggcgccgcggttggtgcggcgcgaaatgatctcgaagatgaagcccggttccgtggtcgtcgatgtcgcgatcgatcagggcggctgcttcgagacctcgcacgccaccacccacaccgaaccgatctatttcgtcgatggcgtgcttcactactgcgtcagcaatatgccggccgcggtgccgcacacctccaccttcgcactgactaacgcgaccttcccgtacctcctggaactggcgaatcacggactcgaaggcgcctgcgagcggcatgccgcgcttcgcgaaggcgtcaacacttacaacggctacatcacctataaaggcgtggccgaatcccaggggcgccagtggcgcgccctggcgagcgtggggtaa

SEQ ID NO: 55268 - protein, 370 aa, Solibacter usitatus Ellin6076
MIIGVPKEIKDHETRVGLVPSGVTALREAGHEVLVETHAGEGSSLPDSDYLEAGAKILSTAAEVWQRADLVVKVKEPQKTEYAFFRPNLTLFTYLHLAPLPELTEKLLATKVNGVAYETIREKDGSLPLLTPMSEVAGRMSVQVGAQYLERPSGGRGILLGGVPGVAPGNVVILGGGIVGTNAAKMAIGMGAHVTIIDRSLNRLRELDDIFNGYAVTLASNAWTISENLKTADLVVGAVLIPGASAPRLVRREMISKMKPGSVVVDVAIDQGGCFETSHATTHTEPIYFVDGVLHYCVSNMPAAVPHTSTFALTNATFPYLLELANHGLEGACERHAALREGVNTYNGYITYKGVAESQGRQWRALASVG

SEQ ID NO: 55269 - DNA, 1056 bp, Solibacter usitatus Ellin6076
  CDS (1)..(1056): transl_table=11
atgaatatcggagttcttcgcgagcggggtgcgtttgaccggcgggtcgcgctcacgccgcccgtggtccggcgcctgtgtggagcggggcacaccgtatggattgagagcggcgcgggcgatggcgcgatgttcaaggatccggaatatcagcgcgccggcgcccaggtaggctacacgccggcggagatcgtcggccgagcggaactggtagtgaagatcgggcgccccacccgcgaagaactcgaatggtgcaaaccggaaacggccctgatggccttctatcacatggccgtcgcggatcgcgggttgatcgacgcactggcggagcgctccgtcacggcgatcggctgcgaggtgatcgagcagcaggacggcagcctgccggtgctggcggcgatcagcgagatcgcgggacagatgacggtgccgatcgcggcacacctgatgcggaccagttcgggaggtcgcggcattctgctgggcgggacgccgggagtgccgcccgcgcgagtagttgtgttgggcgcggggtcagcgggattcgcgtcggctcgcagtgccgctggctccggcgcgcgcgtcacggcgttcgatcgcgatccgcggaagctgcgccacatgatggagcacgttccatcggtcgagacctgcctcgccgatgaggacgccattgccgaagcggtggcggccgccgacgtggtgatcggcgcggtgctggtagcgggccggcggacgccgcacgtggtgacccgcgcgatggtggagcgcatgaagccgggtgcggcgatgatcgatgtttcgatcgaccagggcggctgcttcgagaccagccatcccaccagcatggatcagcccacgttcgtccaccagggagtgacgcatttctgcgtgccgaactttacggccgatctgggacgctcggccagcgtggcgatcgcgcaggcgctgctgccttacgtattgaccatcgccaaacacggtgtcgccggcgcattcgaaaaatgctcggaactggcgcgcggcgtgtacttgatcgaggggaaacggccatga

SEQ ID NO: 55270 - protein, 351 aa, Solibacter usitatus Ellin6076
MNIGVLRERGAFDRRVALTPPVVRRLCGAGHTVWIESGAGDGAMFKDPEYQRAGAQVGYTPAEIVGRAELVVKIGRPTREELEWCKPETALMAFYHMAVADRGLIDALAERSVTAIGCEVIEQQDGSLPVLAAISEIAGQMTVPIAAHLMRTSSGGRGILLGGTPGVPPARVVVLGAGSAGFASARSAAGSGARVTAFDRDPRKLRHMMEHVPSVETCLADEDAIAEAVAAADVVIGAVLVAGRRTPHVVTRAMVERMKPGAAMIDVSIDQGGCFETSHPTSMDQPTFVHQGVTHFCVPNFTADLGRSASVAIAQALLPYVLTIAKHGVAGAFEKCSELARGVYLIEGKRP

SEQ ID NO: 55271 - DNA, 1122 bp, Magnetococcus sp. MC-1
  CDS (1)..(1122): transl_table=11
atgatcgtcggcgtcgtcaaagagatccgtaaccaagaaaaccgggttgccctcaccccagatggggtagaaaccctcatccaacacggacatgccgtgtgggtagagcaacaggccgggctaggcagcggctttgccgatcaccactatacggagcgaggcgctcaactctgcccaaccgcagcacaggtctggcaatcggcccagcttatgctcaaagtcaaagagccacaaatccaagagtaccccctgttgcaacccgaacagatgctgtttacctattttcactttgccgcgtcccagtcactcacgcaggccgtgatagacgcaaaatgtgtggccattgcctatgaaaccgttgaaaatagggcaggtcacttgccgctgctcacccccatgagcgaggtggctggacgcatggccatccaagaaagcgcgaaatatctggaacgcgcccaaggcggacgcgggattttactcggtggcgtgccaggggttgcccccgctaccgtggtggtgattggcgccggtgtggtgggaaccgaagcggcacgcatggccgccggcctcggtgcccacgtcaaagtgctggacattaatctggaacggctacgcgccatcgccgatatgctgcccgccaatgtcaccaccctagccgctacccctgggaccataagagaagccctgcaaaccgcagatgtggtggtgggggccgtgctgctcaaaggggcgcgcgcccctaaattaatcagccgagcgttgctcaaacagatgcaaccaggcgcggtcatcgtggataccgccattgaccaaggggggatttttgaaacctcacgagcaacgacacacgaaaatccggtttttatcgaagaggggattatccactactgcgtcaccaatatgcccggtgccgtgcccatcaccgccacccgcgccctcaccaatgcaaccctgccctacgtggtgaagctggcggatatgggttggcaggccgcctgtcgtgacgatgcgggtttggcgatggggctcaacattgtgcaaggtcaggtggtgtgccaagccgtggcgcagacctttaacctgccccataccccacgggcaacacagctgggtgtcgcttaa

SEQ ID NO: 55272 - protein, 373 aa, Magnetococcus sp. MC-1
MIVGVVKEIRNQENRVALTPDGVETLIQHGHAVWVEQQAGLGSGFADHHYTERGAQLCPTAAQVWQSAQLMLKVKEPQIQEYPLLQPEQMLFTYFHFAASQSLTQAVIDAKCVAIAYETVENRAGHLPLLTPMSEVAGRMAIQESAKYLERAQGGRGILLGGVPGVAPATVVVIGAGVVGTEAARMAAGLGAHVKVLDINLERLRAIADMLPANVTTLAATPGTIREALQTADVVVGAVLLKGARAPKLISRALLKQMQPGAVIVDTAIDQGGIFETSRATTHENPVFIEEGIIHYCVTNMPGAVPITATRALTNATLPYVVKLADMGWQAACRDDAGLAMGLNIVQGQVVCQAVAQTFNLPHTPRATQLGVA

SEQ ID NO: 55273 - DNA, 1116 bp, Shewanella sp. ANA-3
  CDS (1)..(1116): transl_table=11
atgattattggtgtaccaaaggaaattaaaaaccacgagtatcgtgtcggtatggttccttcaagcgttcgcgaattgaccatcaaaggtcatgaagtgtttgtcgaaacgaatgccggcacgggaattggtttttcagatcaggattatgttgatgcaggtgccgaaatattagcaactgctgctgaagtctttgctaaagcagagatgatcgtaaaggtaaaagagcctcaagcagtcgaacgcgctatgctgcgtcatgaccagattttattcacttatctgcatttagcgccggatttaccacaaactgaagatttaattaaaagtggtgccgtatgtatcgcttacgaaacagtaaccgatgaccgtggtggcttacctttgctggccccaatgtcagaagtggctggtcgcatgtctattcaagcgggtgcgatggcgctggaaaaatcttctggtggccgtggcatgcttttaggcggtgtaccaggtgtcgagcctgcaaaagttgtgatcatcggcggtggtatggttggtaccaatgctgcacaaatggctgtgggcatgggtgctgatgttgtagtgcttgaccgtagcatcgatgcactgcgtcgcttaaacgtacaatttggttctgcagttaaggctgtttactcaactgccgatgcgatcgagcgccatgtattagaagctgatctcgtgattggtggcgtattaattccaggtgctgcggcgcctaagcttgtgacacgtagcatgatcgctcgcatgaagccaggtagtgctatcgttgacgtagcaatcgaccaaggtggttgtgtggaaacttcacatgcaacgactcaccaagatccaacttacatcgttgatgatgtagtgcattactgtgtcgcgaacatgccaggtgctgttgcccgcacttcaaccttcgccctgaataacgcgactctgccttatatccttaagttagctaacttaggttataaagctgccctactacaagacaaacacttactgaacggtttgaacgtgatgcacggcaaactggtttgtaaagaagtggcgcaagcattaaatcttgagtacacagcgccagcaagtttattagcctaa

SEQ ID NO: 55274 - protein, 371 aa, Shewanella sp. ANA-3
MIIGVPKEIKNHEYRVGMVPSSVRELTIKGHEVFVETNAGTGIGFSDQDYVDAGAEILATAAEVFAKAEMIVKVKEPQAVERAMLRHDQILFTYLHLAPDLPQTEDLIKSGAVCIAYETVTDDRGGLPLLAPMSEVAGRMSIQAGAMALEKSSGGRGMLLGGVPGVEPAKVVIIGGGMVGTNAAQMAVGMGADVVVLDRSIDALRRLNVQFGSAVKAVYSTADAIERHVLEADLVIGGVLIPGAAAPKLVTRSMIARMKPGSAIVDVAIDQGGCVETSHATTHQDPTYIVDDVVHYCVANMPGAVARTSTFALNNATLPYILKLANLGYKAALLQDKHLLNGLNVMHGKLVCKEVAQALNLEYTAPASLLA

SEQ ID NO: 55275 - DNA, 1122 bp, Mycobacterium avium 104
  CDS (1)..(1122): transl_table=11
atgcgagtcggcgtaccgaccgagaccaagaccaacgaatttcgcgtggccctcacccccgccggcgtcgccgagttgacccgccgcggccacgaggtgctggtgcaaagcggcgccggcgaggggtcgtcgatccccgactccgagttcaaggcggccggcgcccaactggccgacaccgccgaacaggtctgggccgacgcggagctgctgctcaaggtgaaggaaccggtgccggccgagtatgacctgttgcggcgcaaccagattctgttcacctttctgcatctggccgcctcgcgtgcctgcaccgaggcgctgttgagctcgggcacgacgtcgatcgcctacgagacggtgcaaaccgcggacggcaccctgccgttgctggccccgatgagcgaggtggccggccggctgtccgctcaggtgggcgcctaccacctgatgcgcacccacggcggtcgcggcgtcctgatgggcggggtgccgggggtcaagcccgccgatgtcgtggtggtcggggcgggcacggccggctacaacgcggcccgggtcgccggcgggatgggagccatggtcacggttctcgacgtcaacatcaacaagcttcggctgctcgacgccgagttcgacggccaggtccgcacccggtattcgtcggcctacgacctggagggcaccgtcaagcgcgccgacctggtcatcggcgcggtgctgctgcccggcgccaaggcccccaacttgatctcgaattcgcttgtcgcgcagatgaagtcgggcgcggtgctggtggacatctccatcgaccagggcggttgcttcgaggactcccggccgaccacgcacgacgacccgaccttcgccgtgcacgacacggtgttctactgcgtggcgaacatgcccagcgcggtgcccaagacgtcgacggtggcgctgaccaacgccaccatgccctacgtgctggccctggccgaccgcggctggcgtgcggcgtgccgctcggatcatgctctggccaaagggctttcgacacatgacggtacgctgctgtcgcagcaggtggccgccgacctcggtctgccgtgcaccgacccggccggcgtgctgcagcaggactaa

SEQ ID NO: 55276 - protein, 373 aa, Mycobacterium avium 104
MRVGVPTETKTNEFRVALTPAGVAELTRRGHEVLVQSGAGEGSSIPDSEFKAAGAQLADTAEQVWADAELLLKVKEPVPAEYDLLRRNQILFTFLHLAASRACTEALLSSGTTSIAYETVQTADGTLPLLAPMSEVAGRLSAQVGAYHLMRTHGGRGVLMGGVPGVKPADVVVVGAGTAGYNAARVAGGMGAMVTVLDVNINKLRLLDAEFDGQVRTRYSSAYDLEGTVKRADLVIGAVLLPGAKAPNLISNSLVAQMKSGAVLVDISIDQGGCFEDSRPTTHDDPTFAVHDTVFYCVANMPSAVPKTSTVALTNATMPYVLALADRGWRAACRSDHALAKGLSTHDGTLLSQQVAADLGLPCTDPAGVLQQD

SEQ ID NO: 55277 - DNA, 1116 bp, Mycobacterium smegmatis str. MC2 155
  CDS (1)..(1116): transl_table=11
atgctcgtcggaatcccgaccgagatcaagaacaacgagtaccgggtcgccatcaccccggctggtgtggcagagctgacccgcagaggtcacgaggtgatcatccaggccggtgccggtgagggctcggccatctcggatcgcgacttcaaggcggcgggcgccgagatcgtcaacaccgccgaccaggtctggtcggaagcagaactgctgctcaaggtgaaagaaccgatcgagcccgagtactcgcggatgcgcaagggccagaccctgttcacctacctgcacctcgcggcgtccaagccgtgcaccgacgcgctgctggcgtccggcaccacgtcgatcgcctacgagaccgtgcagaccgccgagggcgcgctgcccctgctcgcgccgatgagcgaggtcgccggccggctctcggcccaggtcggcgcctaccacctcatgcgcagctacggtggccgtggcgtcctgatgggcggcgtcccgggtgtcgcgcctgccgaggtcgtcgtgatcggcgcaggcaccgccggctacaacgccgcgcgtgtcgctgcgggcatgggcgcccacgtgacggtgttcgatctcaacatcaacacgttgcgccgcgtcgacggcgagttcggcggacgcatcgagacccgctactcgtcgagcctcgaactcgaagaagcggtcaagaaggccgacctggtgatcggcgcagtcctggtgcccggcgccaaagcgccgaaactggtgaccaattcgactgtcgcgcacatgaagccgggtgcggtgctggtcgacatcgcgatcgaccagggtggctgcttcgaggactcgcggcccaccacgcacgacgagcccacgttcaaggtccacgacacgatcttctactgcgtggccaacatgcccggcgcggtgccgcgcacgtcgacgttcgcgctgaccaactcgaccatgccgtacgtgctcaagctcgccgacaagggctggcaggccgcgtgtgcgtcggattccgcactggccaagggtctctcgacccacgacggcaagctgctgtccgaggccgtcgccaaggatctggacctgccgttcaccgacgcggcacagttcctggcgtaa

SEQ ID NO: 55278 - protein, 371 aa, Mycobacterium smegmatis str. MC2 155
MLVGIPTEIKNNEYRVAITPAGVAELTRRGHEVIIQAGAGEGSAISDRDFKAAGAEIVNTADQVWSEAELLLKVKEPIEPEYSRMRKGQTLFTYLHLAASKPCTDALLASGTTSIAYETVQTAEGALPLLAPMSEVAGRLSAQVGAYHLMRSYGGRGVLMGGVPGVAPAEVVVIGAGTAGYNAARVAAGMGAHVTVFDLNINTLRRVDGEFGGRIETRYSSSLELEEAVKKADLVIGAVLVPGAKAPKLVTNSTVAHMKPGAVLVDIAIDQGGCFEDSRPTTHDEPTFKVHDTIFYCVANMPGAVPRTSTFALTNSTMPYVLKLADKGWQAACASDSALAKGLSTHDGKLLSEAVAKDLDLPFTDAAQFLA

SEQ ID NO: 55279 - DNA, 1116 bp, Nocardioides sp. JS614
  CDS (1)..(1116): transl_table=11
gtgaaggtgggcgtccccaaggaagtcaagaacaacgagtaccgggtggcgatcacgcccatcggtgtgcacgagctgaccgcgcacggtcaccaggtgtacatcgaacgcggtgccggtgagggctcctcgatccacgacgaggagtacgccgcggccggggcgcagatcgtcccggacgcggacagcacgtggggcgacgtcgagctggtcctcaaggtcaaggagccggtcgccgaggagtaccaccggctgcgcgaggggctgaccctgttcacctacctccacctcgcggcggacaagaggctgaccgacaagctgctcgacaccaaggtcaccgcgatcgcgtacgagaccgtgcagctgccgtcgggcggcctgccgctgctgtacccgatgtccgaggtcgccggctgcctggcgccccaggtcgggggctactccctcatgcgggcccagggcggccgcggcgtcctcatggggggtgtcggtggcgtcgccaacgccaaggtcgtgatcatcggtgccggcgtctcgggccagaacgccgccaacatcgccctcggcatgggggccgacgtcaccttgctcgacaacgacctggacaagctgcggatgtcgttctggcgctacaacaaccgggtgcacggcctcgcgtcctcgaagctggcgatcgagcagcaggtcaccgaggccgacctggtcatcggagcggtgctgatccccggggccgccgcgcccaagctggtcagcaacgagctggtctcccggatgaagcccggctcggtcctcgtcgacatcgcggtcgaccagggcggctgcttcgaggacacccggccgaccacgcacgcggacccgacgtaccaggtgcacaactcgacgttctactgcgtggcgaacatgcccggggcggtcccgaacacctcgacctacgcgctgacgaatgccacgctgccctatgtcgtcgccgtcgcggacaagggctggcagcaggccagccgcgacgaccacagcctggccctcggcctgaacacccacgcgggccggctcacgaacgcggccgtgggtgcggcggtcggggtcgcggccgacccgttggactccgtcctgacgtga

SEQ ID NO: 55280 - protein, 371 aa, Nocardioides sp. JS614
MKVGVPKEVKNNEYRVAITPIGVHELTAHGHQVYIERGAGEGSSIHDEEYAAAGAQIVPDADSTWGDVELVLKVKEPVAEEYHRLREGLTLFTYLHLAADKRLTDKLLDTKVTAIAYETVQLPSGGLPLLYPMSEVAGCLAPQVGGYSLMRAQGGRGVLMGGVGGVANAKVVIIGAGVSGQNAANIALGMGADVTLLDNDLDKLRMSFWRYNNRVHGLASSKLAIEQQVTEADLVIGAVLIPGAAAPKLVSNELVSRMKPGSVLVDIAVDQGGCFEDTRPTTHADPTYQVHNSTFYCVANMPGAVPNTSTYALTNATLPYVVAVADKGWQQASRDDHSLALGLNTHAGRLTNAAVGAAVGVAADPLDSVLT

SEQ ID NO: 55281 - DNA, 1092 bp, Nostoc punctiforme PCC 73102
  CDS (1)..(1092): transl_table=11
atggaaatcggcgttccaaaggaaaataaggatcaagaatttcgtgtagggttaagtccttctagtgtgcgagtgctgcgagaaaatggtcatagcatcttcgtagaaacacaagcaggtaatggtgctggattttcagatgacgactacagaagtgctggagccgagattgtccccacatcagaaacggcttggaatcgggaattggttgtgaaagtcaaagagccgttgacatctgagtataaatttttgcagaaagggcagatattatttacttatttacatttagctgccgatcgcaaattgacggaacatttaattgattgtggcacaactgcgatcgcctacgaaactgtagaacaacctggtgctaacaaacttcctttgctcacccccatgagcgtgattgcaggtcggttagcagtacaatttggggccagattcctagaacgtcagcaaggtggtagaggattgcttttgggcggtgtccctggagtcaagccaggtaaagtagtaattttaggtggcggtgttgtcggcacagaagcggctaaaattgctgtgggtatgggtgcgatcgtccagattttagatgtgagtgtcgagcgtttatcttacctagaaaccttgtttggctctagggtggaattgctttacagcaactctgctcatattgaagttgccgtcaaagaagctgatttgctcatcggtgcagttttagtgttaggacgtagggcaccaacattagtatcgcgtgaattagttaaacaaatgcgtcctggttcggtaatagttgatgtagctgttgaccaaggtggttgtatagaaactttacgcgccacatctcacacaaatccggtataccttgaagaaggtgtggtgcattatggtgtacctaatatgccaggggcagtaccttggacagcaactcaggcacttaataatagtacattaccttatatcgtccagttggcgaacttgggaattatggcgctagaagttaacccagccttagcgaagggtgtgaatgtgcagaatcatcgcttagtgcatccggctgtgcaagaggtattccctgatttggtaaattaa

SEQ ID NO: 55282 - protein, 363 aa, Nostoc punctiforme PCC 73102
MEIGVPKENKDQEFRVGLSPSSVRVLRENGHSIFVETQAGNGAGFSDDDYRSAGAEIVPTSETAWNRELVVKVKEPLTSEYKFLQKGQILFTYLHLAADRKLTEHLIDCGTTAIAYETVEQPGANKLPLLTPMSVIAGRLAVQFGARFLERQQGGRGLLLGGVPGVKPGKVVILGGGVVGTEAAKIAVGMGAIVQILDVSVERLSYLETLFGSRVELLYSNSAHIEVAVKEADLLIGAVLVLGRRAPTLVSRELVKQMRPGSVIVDVAVDQGGCIETLRATSHTNPVYLEEGVVHYGVPNMPGAVPWTATQALNNSTLPYIVQLANLGIMALEVNPALAKGVNVQNHRLVHPAVQEVFPDLVN

SEQ ID NO: 55283 - DNA, 1122 bp, Magnetospirillum magnetotacticum MS-1
  CDS (1)..(1122): transl_table=11
atgcgcatcggcgttcccaaggaaatcaaaagccatgaataccgggttgggctgacgcccggctcggcgcgcgagctcgtccatcacggccatcaggtgctggtggagacgggggccgggatgggaatcggttgttccgatgccgcctaccgcgccgccggggccgagatcgccacctcggccgccgaggttttcgccttcgccgatctggtggtcaaggtcaaggagccccaaccggtggagttccccctgctgcgcgcgggccaaatcctcttcacctatcttcatctggcgcccgatcccgaacagaccagggcgctggtggattcgggcgtttcggccattgcctatgagacggtgaccgatgccaatggccggctgcccttgctggcgcccatgtccgaggtagcggggcgcatgtccatccaggtgggcgcccattgcctggaaaaggagcagggcggatcgggcgtgctgctgggcggcgtgcccggcgtggccccggccaaggtggtggtgctgggcggcggcgtggtcggctccaacgcgacgcgcatggcggtgggtctgggagcgcgggtggtggttctcgaccgctcgctcacccgtctggcccagatcgacgaattgctgctcaatacggtggaaaccgcctacgccaccatggataatatcgagcaccatgtgctggaagccgatctgctgatcggcgccgtgctggtgccgggcgcctccgcgccccgtctggtcagccgcgaactggtgggcgccatgcgccccggttcggtggtggtggatgtggccatcgaccaggggggctgtatcgccacggcgcgtccgaccacccatgccgctcccacctatctcgagcaaggtgtggtacattactgcgtcaccaatatgccgggcgcggtggcgcgcacctcggccttcgcgttgaacaacgccacgctgccattcgtgctggccctggccgacaagggtctggtccaggcactgtccatcgatccgcatttccgcgcgggtctcaacattcaccatggcagcgtcacccacgccgccgtggcccgggacctcggatatgcccatgtggcgcccgagacagccctatcttctccataa

SEQ ID NO: 55284 - protein, 373 aa, Magnetospirillum magnetotacticum MS-1
MRIGVPKEIKSHEYRVGLTPGSARELVHHGHQVLVETGAGMGIGCSDAAYRAAGAEIATSAAEVFAFADLVVKVKEPQPVEFPLLRAGQILFTYLHLAPDPEQTRALVDSGVSAIAYETVTDANGRLPLLAPMSEVAGRMSIQVGAHCLEKEQGGSGVLLGGVPGVAPAKVVVLGGGVVGSNATRMAVGLGARVVVLDRSLTRLAQIDELLLNTVETAYATMDNIEHHVLEADLLIGAVLVPGASAPRLVSRELVGAMRPGSVVVDVAIDQGGCIATARPTTHAAPTYLEQGVVHYCVTNMPGAVARTSAFALNNATLPFVLALADKGLVQALSIDPHFRAGLNIHHGSVTHAAVARDLGYAHVAPETALSSP

SEQ ID NO: 55285 - DNA, 1113 bp, Listeria monocytogenes str. 4b H7858
  CDS (1)..(1113): transl_table=11
atgttagtcggcgtaccaaaagaaattaaaaataacgagaatagggtggcaatgactccggcaagtgttttttcatacgtaaatgcaggtcatactgtatacgtggaaaaagatgcgggcattggctctaattatcaagacgctgattttgtgcaagcgggggcaaaaattgttgaaacagctaaagaagcttgggatgtagatatggttgtaaaagtaaaagaaccgattgcatcagagtatacatactttaaagaaggactattacttttcacatatttacatttggcaaatgaaccaacgcttgcgaaagctttgatggagagtaaagtaaatagtgtagcgtatgaaacagtagaacttgcagaccacacgttgccactactttcgccaatgagtgaagttgctgggcgaatggcagctcagattggcgcacaatttttacaaagaacgaatggtggtatgggtgtcttgcttggtggggtgccgggtgtagagaaaagtgaagtggttattattggtggcggaatcgctggaacaaatgcagcgaaaattgcagctggtttaggtgccaacgtgaccattcttgatatgaatttgaaacgattgcgcgaactggacgatatttttggcaatcaagtccaaacgttaatgtcgaatgattttaatattgaaacagctgtgaaaaaagctgatttggttattggagcagtattaattccaggagcaaaagcgcccaaactcgtcaaagagcatgtaattaaacaaatgattccgggatctgtccttgtagatatcgcgattgaccaaggagggatttttgaaacaacagatcacgtttccacacacgataatccaacctacgaaaaatatggtgtacttcattatgctgttgcaaatatgccaggtgcagtaccgcggacgtccactttggcgcttactaatgccactttaccatttggattgaaacttgctaatcaaggcttaaaagcagccgtgcaaaatgacccattcttacttcgtggattaaacacataccaaggtcacattacgtacaaggctgttgcagattcacttgatttaccctatacggatagcaaagaattaatttaa

SEQ ID NO: 55286 - protein, 370 aa, Listeria monocytogenes str. 4b H7858
MLVGVPKEIKNNENRVAMTPASVFSYVNAGHTVYVEKDAGIGSNYQDADFVQAGAKIVETAKEAWDVDMVVKVKEPIASEYTYFKEGLLLFTYLHLANEPTLAKALMESKVNSVAYETVELADHTLPLLSPMSEVAGRMAAQIGAQFLQRTNGGMGVLLGGVPGVEKSEVVIIGGGIAGTNAAKIAAGLGANVTILDMNLKRLRELDDIFGNQVQTLMSNDFNIETAVKKADLVIGAVLIPGAKAPKLVKEHVIKQMIPGSVLVDIAIDQGGIFETTDHVSTHDNPTYEKYGVLHYAVANMPGAVPRTSTLALTNATLPFGLKLANQGLKAAVQNDPFLLRGLNTYQGHITYKAVADSLDLPYTDSKELI

SEQ ID NO: 55287 - DNA, 1116 bp, Burkholderia vietnamiensis G4
  CDS (1)..(1116): transl_table=11
atgctgatcggcgtgccgaaggaaatcaagaaccatgaatatcgcgtcggcctcactccggccggcgcacgcgagctggtgcgccacggccatcgcgtgctcgtgcagcgcggcgcgggcacggcgatcggcctgctcgacgacgactacgcagccgccggcgccgcgctctgcgacgacgcgcgcgacgtcttcgcgcgcgccgacctgatcatcaaggtgaaggagccgcaaccggcggaatgcgcgatgctgcgccgcgggcagatgctgtacacgtacctgcacctcgcccccgatcccgaacaggcggccgcgctcgtgaagtcgggcgcggtctgcatcgcgtacgaaaccgtgaccggcgtcggcggcggactgccgctgctcgcgccgatgagcgaggtcgcggggcgcatgtcgatgcaggtcgcggccgcctgcctggagagcccgcgtggcggccgcggcgtgctgatggccggtgtgccgggcgtgccggccgcgcacgtggtcgtgctcggcgcgggcgtcgtgggcaccggcgcattgcagatggcggtcggcatgggcgcccgcgtcaccgtcctcgacaccaacgtcgcgcggctgcgccaactcgatctcgtgttcgcgaaccggatctcgaccgtctgctcgaacacgcacaccgtcgaagaagccgtgcgcgacgccgacgtggtaatcggcgcggtgctcgtgccgggcgcgtcggcgccgcggctcgtcacgcgcgacatgatcgcgacgatgcgcacgggcgccgtcgtcgtcgacgtcgcgatcgatcagggcggctgtttcgagacgtcacatgcgacgacgcatgcgcagccgaccttcgtggtcgacggcgtcgtgcattactgcgtcgcgaacatgccgggagcggtcgcgcgcacgtcgacgttcgcgttgaacaacgcgacgctcggccatgcgctcgcgctcgccgacaagggctggaaacgcgcgatgaccgacgacccgcatctgcgcgcgggcctgaacgtatgcgacggacacatcacctacgaggccgtcgcgttcgcgctcgggctgccgtacgtccctgctgaagacatgctgggttga

SEQ ID NO: 55288 - protein, 371 aa, Burkholderia vietnamiensis G4
MLIGVPKEIKNHEYRVGLTPAGARELVRHGHRVLVQRGAGTAIGLLDDDYAAAGAALCDDARDVFARADLIIKVKEPQPAECAMLRRGQMLYTYLHLAPDPEQAAALVKSGAVCIAYETVTGVGGGLPLLAPMSEVAGRMSMQVAAACLESPRGGRGVLMAGVPGVPAAHVVVLGAGVVGTGALQMAVGMGARVTVLDTNVARLRQLDLVFANRISTVCSNTHTVEEAVRDADVVIGAVLVPGASAPRLVTRDMIATMRTGAVVVDVAIDQGGCFETSHATTHAQPTFVVDGVVHYCVANMPGAVARTSTFALNNATLGHALALADKGWKRAMTDDPHLRAGLNVCDGHITYEAVAFALGLPYVPAEDMLG

SEQ ID NO: 55289 - DNA, 1086 bp, Crocosphaera watsonii WH 8501
  CDS (1)..(1086): transl_table=11
atgaaaattggtgttcctaaagagattaaagatcaagaatttcgggttggcctaagtcccaacagcgttagggtattatgcgatcgagggcatcaagttgcagtagaaacccaagcaggaatcggatcggggtttagtgaccaagaatacgaacaagcaggggcaaaaattgtcaccagtgcagcgcaagcatgggaacaagatttagtggtgaaagtcaaagaacctctcaaacaagaatatgactatctcaacacctgcaaaatactctttacctatctacatttggctgctgataaagaattaactcaagctttaatctcatcgaaaataactgcgatcgcctatgaaaccgtagaactcccagacggaagactgcctttattaacccccatgagcatcatcgcaggtcgcctatccgtgcagtttggggcgagatatctagaaaaacaacaggggggtcgtggtgtacttttagggggcattcctggggttgctgcgggtcgtgtggtcatcttagggggtggtatagtcgggacagaagcggctaagatggcagtgggaatgggggcgcaggtacaaatatttgatatcaatgtggaccgtttagcctatttagagagcatttttggttcacgagtacaactgctttatagtaacgctgctgcccttgaaaaagctgtccccgatgcagatttattgattggtgcagtattagttactggaaaacgggccccaaccttggtgtctcgggaattagtctctaaaatgcgccctggttccgttatcgtcgatgtggcagtggatcaagggggatgtatcgaaaccttacgcaccacctcccacagttccccgacttatgtagaagaaggggtgctacattttggggttcctaatatgcctggggccgttccttggacagctactcaagctttgaataatagtaccttaccttatgttttgaaattggccaaccaaggtttagacgctttagaaaaagatgttagtttaggcaagggtgttaatgttcaagatgggttattagttcatcctgcggtacaagaattgtttaaagatttaatatag

SEQ ID NO: 55290 - protein, 361 aa, Crocosphaera watsonii WH 8501
MKIGVPKEIKDQEFRVGLSPNSVRVLCDRGHQVAVETQAGIGSGFSDQEYEQAGAKIVTSAAQAWEQDLVVKVKEPLKQEYDYLNTCKILFTYLHLAADKELTQALISSKITAIAYETVELPDGRLPLLTPMSIIAGRLSVQFGARYLEKQQGGRGVLLGGIPGVAAGRVVILGGGIVGTEAAKMAVGMGAQVQIFDINVDRLAYLESIFGSRVQLLYSNAAALEKAVPDADLLIGAVLVTGKRAPTLVSRELVSKMRPGSVIVDVAVDQGGCIETLRTTSHSSPTYVEEGVLHFGVPNMPGAVPWTATQALNNSTLPYVLKLANQGLDALEKDVSLGKGVNVQDGLLVHPAVQELFKDLI

SEQ ID NO: 55291 - DNA, 1125 bp, Exiguobacterium sibiricum 255-15
  CDS (1)..(1125): transl_table=11
atgatcatcggagtattaaaggaaatcaaaaacaatgaaaaccgtgtcgcgttaacgcctgctggggtagcagcattaatgggtcaaggacatacggtcatcgtcgaaacaactgctggtatggggagcggctttacaaacgaagagtacacgcaagcaggggcacaaatcatcgagacagcggctgaagtttgggcgactgcagaactcgcactgaaagtgaaagaaccggttgcttcagaatatcaatacttccgtccggaactgacactgttcacatatcttcacctggctgcagaacctgaattgacacgcgcactcgtcgattcaaaaattacagctatcgcatacgaaacggtcgaaaaaaaccggacattaccactcttgacaccaatgagcgaagtcgctggtcggatggcatcacaaatcggagcgcagttcctcgaaaaaccacacggcggcatgggaatcctgctcgcaggtgttccgggtgtgcgtcgcggtaaagtaacggttatcggcggtggtgtcgttggaacaaacgcagcgaaacttgcggttggtctcggtgcagacgtaacaatcatcgatgtcagtccggaacgccttcgtcaactcgatgatattttcggtaattccatcaacacattgatttcaaacccgtatacgatcgcagaagctgtcgctgaaagtgatctcgttgtcggtgccgtcttgattcctggagcaaaagctccgaaacttgtcacggctgaaatggtcgagcggatgaaaccgggttctgtcatcgttgacgtagcgatcgaccaaggtggaatcttcgaaacagtcgatcgtatttcgacacacgatgatccgacatatgagaagttcggtgtcgttcactatgcggtcgccaacatgccaggtgcggttccacgcacatcgacactcgctttgacgaacgcgacacttccttatgtattagagcttgcgaacaaaggcacgcatcgcgcgctggctgaaaacgccgctcttgaaaaaggtctgaacgttgtccaaggattcgtcacgtacgaagcagttgcacgcgatcttggatacacgtacaaatcggtggaagatgtgcttcatctacacgcttaa

SEQ ID NO: 55292 - protein, 374 aa, Exiguobacterium sibiricum 255-15
MIIGVLKEIKNNENRVALTPAGVAALMGQGHTVIVETTAGMGSGFTNEEYTQAGAQIIETAAEVWATAELALKVKEPVASEYQYFRPELTLFTYLHLAAEPELTRALVDSKITAIAYETVEKNRTLPLLTPMSEVAGRMASQIGAQFLEKPHGGMGILLAGVPGVRRGKVTVIGGGVVGTNAAKLAVGLGADVTIIDVSPERLRQLDDIFGNSINTLISNPYTIAEAVAESDLVVGAVLIPGAKAPKLVTAEMVERMKPGSVIVDVAIDQGGIFETVDRISTHDDPTYEKFGVVHYAVANMPGAVPRTSTLALTNATLPYVLELANKGTHRALAENAALEKGLNVVQGFVTYEAVARDLGYTYKSVEDVLHLHA

SEQ ID NO: 55293 - DNA, 1221 bp, Prosthecochloris aestuarii DSM 271
  CDS (1)..(1221): transl_table=11
atgggatactctggagacattacaggcattgagtttgatcttggcataaagacccttgagcgatggcttatcaagccggaaaaaaccatgaatatcgctctgggaattccgaaagagcggctcaacgatgagagaagagtcgccatttcccctgccggggccagaattctggttgaaaacggcatgagggtcatgattgaacacgatgccggaaaagccagcaatctctccgacgaagactatagtgatgccgggtgcaccattacagactcgctcgaaaagctttacgatgaatcaaatatcatcgtaaaagtctctccgccccaaaaccatgagctgccgttgttcaaaccctcccagatgctcatttcagctcttcaccttggagccatccacaggccgatgatgaagatgtttctggaaaaaaacatcaccgcactggggttcgaatttattcagacgcgcgatggggatctccccatagtcagaaccctgagcgaaatagccggctcacttgcaattcagaccgcagcaaaatatctggaaacaggttacggaggcagcggcattctgcttggaggcattgccggcgttcctcctgcccgaatcaccattatcggagcaggaacggttgggctgtttgcggcacaggatgcgcttggcctcggagcgcaggtcacggtcatcgacaaagaaataaaccgcttacgacgatttgaggcgttctttaaccgccatatcgttaccgcaataaccaatgaccattatatcgctgaactggccaaggaatccgatgtcatgatcggtgctctcagcccgaaacagaaattcatcaaacctatcgtcagtgaagaggttatcaaaagcatgcgccagggttcagtcattattgatgtctcaatagatcagggctcatgttttgaaacaagtcgccacacaacccacaccaacccaattttcgtcaagcacggcgtcacgcactactgcgttcccaatattccttctgccgtcgctaaaacagcgacctttgccatgaccaacaccctgctcccgtttctgatgaaactcaacgcccatgaaaccatcacggatattctctggaacagccacagcctgagaaaagggacttacgcattcaaaggctatatcacccagaaaaaccttgctgaactgaccgctctgccatacagggagatcgatatgctcctggctacagggtaa

SEQ ID NO: 55294 - protein, 406 aa, Prosthecochloris aestuarii DSM 271
MGYSGDITGIEFDLGIKTLERWLIKPEKTMNIALGIPKERLNDERRVAISPAGARILVENGMRVMIEHDAGKASNLSDEDYSDAGCTITDSLEKLYDESNIIVKVSPPQNHELPLFKPSQMLISALHLGAIHRPMMKMFLEKNITALGFEFIQTRDGDLPIVRTLSEIAGSLAIQTAAKYLETGYGGSGILLGGIAGVPPARITIIGAGTVGLFAAQDALGLGAQVTVIDKEINRLRRFEAFFNRHIVTAITNDHYIAELAKESDVMIGALSPKQKFIKPIVSEEVIKSMRQGSVIIDVSIDQGSCFETSRHTTHTNPIFVKHGVTHYCVPNIPSAVAKTATFAMTNTLLPFLMKLNAHETITDILWNSHSLRKGTYAFKGYITQKNLAELTALPYREIDMLLATG

SEQ ID NO: 55295 - DNA, 1131 bp, Kineococcus radiotolerans SRS30216
  CDS (1)..(1131): transl_table=11
atgcgcatcggcgtccccaccgaggtgaagaaccgcgagtaccgcgtcgcgctgacccccgcgggggtccacgagctcgtcggccacggccacgaggtgctcgtccaggccggggccgggctcggcagctcgctgcccgacgccgactacgaggccgccggcgccaaggtcctcaccgacgtcgacgaggtctggggcggggccgacctgctgctcaaggtcaaggaaccgatcgcggaggagcaccaccgcctgcgcgcggaccaggtgctgttcacctacctgcacctggccgcctcccgcccctgcaccgacgccctgctcacctccggcaccaccgccatcgcctacgagaccgtccagttgcccgaccgctcgctgccgctgctggccccgatgagcgaggtcgccggccggctcgccccgcaggtcggcgcgtactccctcatgcgcgccacgacgtcgggcggcggcggccgcggcgtcctcatgggcggggtccccggcgtccgcggggccgacgtcgtcgtcatcggggccggggtctccgggcagaacgcggcccagatcgccctcggcatgggcgccgaggtcaccgtcctggacctgtcgctgcccaagctgcgcgaggtcgacgcccgcttcggcggcgccgtgcgcaccatcgtgtcgaactccttcgaactggcccgcgccgtccgcggcgccgacctcgtcatcggcgccgtcctcgtccccggggccaaggcgcccaagctcgtcagcgacgagctcgtcgcgcagatgcgcccgggatcggtcctcgtcgacatcgccatcgaccagggcgggtgcttcgagagctcccgccccaccacccacgacgacccgacgttccccgtccacggctcggtgttctactgcgtcgcgaacatgcccggcgcggtcccgcacacctcgacctacgccctgaccaacgcgaccctgccctacgtcgtgaagctcgccgaccgcggctggaaggcggcgctgagcgccgacgcggccctggccggggggctctcgacccacgccggttccctgaccaacgccgaagtggctgcggcgcacgggctcccggcgatcaccctggccgaggcgctggccggctga

SEQ ID NO: 55296 - protein, 376 aa, Kineococcus radiotolerans SRS30216
MRIGVPTEVKNREYRVALTPAGVHELVGHGHEVLVQAGAGLGSSLPDADYEAAGAKVLTDVDEVWGGADLLLKVKEPIAEEHHRLRADQVLFTYLHLAASRPCTDALLTSGTTAIAYETVQLPDRSLPLLAPMSEVAGRLAPQVGAYSLMRATTSGGGGRGVLMGGVPGVRGADVVVIGAGVSGQNAAQIALGMGAEVTVLDLSLPKLREVDARFGGAVRTIVSNSFELARAVRGADLVIGAVLVPGAKAPKLVSDELVAQMRPGSVLVDIAIDQGGCFESSRPTTHDDPTFPVHGSVFYCVANMPGAVPHTSTYALTNATLPYVVKLADRGWKAALSADAALAGGLSTHAGSLTNAEVAAAHGLPAITLAEALAG

SEQ ID NO: 55297 - DNA, 1119 bp, Sulfitobacter sp. EE-36
  CDS (1)..(1119): transl_table=11
atgaaaatcggttgccccaaagaaatcaagccacaggaattccgcgtcggcatgaccccgaatgccgcttacgaggcggtgaacaagggacatgaggttgttatcgaagcaggtgccggcatcggcgctggttttgatgacgccgcctataccgacgcaggcgcgacgatccttgccaccgcgcaagaggtcttcgacagcgccgacatgatcgtcaaggtcaaggaaccccaagcggctgaacgcaagatgctgcgcgaagggcagatcctcttcacctatctgcacctcgcccccgatcccgaacagaccaaggatcttctcgcttccggggcgacttgtatcgcctatgaaaccgtcaccgaccgcaatggtggcttgccgctgcttgcgccaatgtccgaagtcgcgggtcgtctggccccgcaggtgggcgcatggacgctgcaaaaagccaacggcgggcgcggcgtgctgatgggcggcgtccccggcgttggtccggcgcgtgtggtcgtgatcggcggcggtgttgtcggcacccacgccgcacgtattgccgccggtatgggcgcggatgtcaccgtgcttgaccggtccctgccccgtctgcgctatctggatgacatctatggcggcgtgttcaacacctcttacgcctcggcgggcaatacgatcgaactggcgcgcgaggccgatatgatcatcggcgccgtcctgatccccggggccgccgcccccaaactgatcagccgcgcgcaactgtccgagctcaagcccggcgcggcgctggtggacgtggcgattgaccaaggtggctgctttgaaacctcgaaagcgaccacccaccaagaccccgtatacgacgtggacggcatcatgcactactgcgttgccaacatgcccggtgccgtggcgcggacatcgaccattgcgcttggcaacgccacgatgccgttcatgctggcactcgcggataaaggctggaagcaagcctgcgccgacgatccccacctcaaggcaggtctgaacgtgcacgcaggccagctgacctacgccgccgtggccgaagcgctcgggatggaggcgatcaccgccgatcaggccatcgccggttaa

SEQ ID NO: 55298 - protein, 372 aa, Sulfitobacter sp. EE-36
MKIGCPKEIKPQEFRVGMTPNAAYEAVNKGHEVVIEAGAGIGAGFDDAAYTDAGATILATAQEVFDSADMIVKVKEPQAAERKMLREGQILFTYLHLAPDPEQTKDLLASGATCIAYETVTDRNGGLPLLAPMSEVAGRLAPQVGAWTLQKANGGRGVLMGGVPGVGPARVVVIGGGVVGTHAARIAAGMGADVTVLDRSLPRLRYLDDIYGGVFNTSYASAGNTIELAREADMIIGAVLIPGAAAPKLISRAQLSELKPGAALVDVAIDQGGCFETSKATTHQDPVYDVDGIMHYCVANMPGAVARTSTIALGNATMPFMLALADKGWKQACADDPHLKAGLNVHAGQLTYAAVAEALGMEAITADQAIAG

SEQ ID NO: 55299 - DNA, 1119 bp, Roseovarius nubinhibens ISM
  CDS (1)..(1119): transl_table=11
atgaaaatcggatgcccaacggaaatcaaaccccaagaattccgtgttggcctcacgcccaatgccgcgcgtgaggccgttgagaacggacatgaggtgatcgttcaggccggtgctggcatcggtgccggcttttctgatgacgactatatcgctgccggggccgcgatcatcgacacggccgaggaaatctttgccagcgccgacatgatcgtaaaggtcaaggaaccgcaggcggttgagcgcaagatgctgcgcgagggccagctgctctttacctatctgcacctcgcccccgatcccgaacagaccaaggatctgctggcctccggctgtaccgccatcgcctatgagaccgtgaccgaccgcaacggcgggctgccgctgctcgcgccgatgtccgaggtcgccggccgtctcgcaccgcaggtcggcgcctatacgctgcaaaaggccaatggcggccgtggcgtgctgatgggtggcgtgcccggcgtcggcccggccaaggtcgtggtcatcggcggcggtgtcgtcggcacccatgccgcccgtatcgctgcgggcatgggcgcggatgtgaccgtgctcgaccgctcgctgccgcgtctgcgctatctcgacgatgtctttggcggcacgttcaacaccggctattcctccgccggtctcttggccgaacatctgaccgaggccgatatggtcatcggtgcggtgctcatccccggcgccgaagcgcccaagctggtgcgccgcgagcaattcgccacgatgaagcccggcgcggtgctcgtcgacgtcgccatcgaccaaggcggctgtttcgagacctcgcgcgccaccacccatgccgatccgatctacgaggtggacgggatcatgcattactgcgtggccaacatgcccggcgccgtggcccggacctcgaccatcgcccttggcaacgccaccatgcccttcatgctggccctggccaacaagggctggaaaaaggcctgcgccgacgatccgcacctgctcgaagggctcaacgtccacgccggtcagctcacctattacgccgtcggcaaggcgctcggcatcgacgtgatctcgccgcagatgctggtcaaggcctga

SEQ ID NO: 55300 - protein, 372 aa, Roseovarius nubinhibens ISM
MKIGCPTEIKPQEFRVGLTPNAAREAVENGHEVIVQAGAGIGAGFSDDDYIAAGAAIIDTAEEIFASADMIVKVKEPQAVERKMLREGQLLFTYLHLAPDPEQTKDLLASGCTAIAYETVTDRNGGLPLLAPMSEVAGRLAPQVGAYTLQKANGGRGVLMGGVPGVGPAKVVVIGGGVVGTHAARIAAGMGADVTVLDRSLPRLRYLDDVFGGTFNTGYSSAGLLAEHLTEADMVIGAVLIPGAEAPKLVRREQFATMKPGAVLVDVAIDQGGCFETSRATTHADPIYEVDGIMHYCVANMPGAVARTSTIALGNATMPFMLALANKGWKKACADDPHLLEGLNVHAGQLTYYAVGKALGIDVISPQMLVKA

SEQ ID NO: 55301 - DNA, 1164 bp, Oceanicola batsensis HTCC2597
  CDS (1)..(1164): transl_table=11
atgccgatcagggaggatgtcatgatcatcggctgtcccagggaaatcaagaatcacgaataccgcgttggtctcacccccgagagcgtcgccgagctgacgcagcgcggccattccgtgctgatggaagccggtgccggagatggcatcggtgccgcggatgacgactatgccgccgccggcgcagaggtgacggatgtcgagacggtcttcggttgggcggatatcgtggtcaaggtcaaggagccgcagcgcgtggaacgcgagcgcctgcgcacgggccagacgctttatacctatctccacctcgcgcccgatcccgaccagaccgacgacctgatcgacagcggcgcgacctgcatcgcctatgaaaccgtcaccggtccgggcggcggcctgcccctgctccgcccgatgagccaggtggccggccgcatgtcggtccaggccggggcgcatgcgctggaaaaggcacagggcggtcgcggcgtcctgctgggcggggtgccgggggtcgcgccgggccgggtgatcgtcatcggcggcggcgtggtcggccgcaatgccgcccagatggccgtcggccttggcgcggatgtcaccgtcctcgaccgatcgcacgacgtgctcgaggatatcgaccgccagttcgccggacgggtccgcacggtctattcgaccgccacggcgctgaacgacctgatcggagccgccgacctcatcgtcggtgcggtgctcattccgggcgcatcggcgccgaagctggtgacccgggccatgctcgggggcatgcagccgggcacggtgatcgtggatgtcgccatcgatcagggcgggtgtttcgagacctcgaagcccacgacccacgcggacccgatctacgaggtcgacggcatcgtccactactgcgtcgcgaacatgcccggcgcggtggcccgcacctcgacctatgcgctgaacaacgccacgctgccgcacctgctgcgcatggccgaccttggcgtcaagacggcgctggatcgcgatgcgcacctgcgcgcggggctcaacgtggcggacggccggatcacgtgccggcccgtcgccgaggcgcaggggctcgactggatttcagccgaagaggccctggcccgcctgccggaccggaccccggagccggcctga

SEQ ID NO: 55302 - protein, 387 aa, Oceanicola batsensis HTCC2597
MPIREDVMIIGCPREIKNHEYRVGLTPESVAELTQRGHSVLMEAGAGDGIGAADDDYAAAGAEVTDVETVFGWADIVVKVKEPQRVERERLRTGQTLYTYLHLAPDPDQTDDLIDSGATCIAYETVTGPGGGLPLLRPMSQVAGRMSVQAGAHALEKAQGGRGVLLGGVPGVAPGRVIVIGGGVVGRNAAQMAVGLGADVTVLDRSHDVLEDIDRQFAGRVRTVYSTATALNDLIGAADLIVGAVLIPGASAPKLVTRAMLGGMQPGTVIVDVAIDQGGCFETSKPTTHADPIYEVDGIVHYCVANMPGAVARTSTYALNNATLPHLLRMADLGVKTALDRDAHLRAGLNVADGRITCRPVAEAQGLDWISAEEALARLPDRTPEPA

SEQ ID NO: 55303 - DNA, 1086 bp, Erythrobacter sp. NAP1
  CDS (1)..(1086): transl_table=11
atgctcgtcggcgtcccgaaagagatcaagaaccacgaatatcgcgtcggcctcacgcctgaatccgcgcgcgagtacatcgccgcgggtcaccgcgtcatgcttgaaagcggcgctggcaccgggatcagcaagaccgatgacgattaccgtgcgattggcgccgagatcgttgacaccgccgaagaggtattcgcgagcgccgagatgatcgtgaaggtcaaggagccgcagccgaacgagtgggtgcagctgcgcgaagggcaaatcctttttacctatctccacctcgcccctgaccccgagcaggcaaagggcctgatggaaagcggcgtttcggctgtcgcctacgagaccgtcaccgaccgtgacggaggcctcccgctgcttgctccgatgagcgaagtggcaggtcgtctctcgatcgaagcaagcgctcattcgagccacgccaataatggcggtcgcggcatcctgatgggcggggtgcccggcgtgcttccggcgaaggtcgtcgtgatcggcggcggcgttgtcggaacgcaggctgcgcgcatggcggttggccttggcgcaaacgtcgagatcctcgaccggtcgctcccgcgtattcgcgagcttgacgacatgtttcagggccgtgccaccacgcgctattcgaacgcaggcacaatcgaagacgcgattaccgaagccgacgtggtggttggtgcagtgctcatcccgggtgcgagcgctcccaagctggtgacgcgcgacatgctcggcctgatgaagcaccgcgcggtgctggtcgatgttgcgattgaccagggcggctgtttcgaaacgtccaagccgacgacgcacgatgcgccgacttatatggtcgacgacatcatccactattgcgttgccaacatgcctggcgctgtcccgcatacgtcgagctatgcgctcaacaatgcgacgctgcctttcggccttgcgctcgccaacaagggtgttgtgaaggcttgcgaggacgatccgcatctgcgcctcggcctcaacgttcacgagggcaagatcgtgaacgaagcggtggcggagagcctcggcttctga

SEQ ID NO: 55304 - protein, 361 aa, Erythrobacter sp. NAP1
MLVGVPKEIKNHEYRVGLTPESAREYIAAGHRVMLESGAGTGISKTDDDYRAIGAEIVDTAEEVFASAEMIVKVKEPQPNEWVQLREGQILFTYLHLAPDPEQAKGLMESGVSAVAYETVTDRDGGLPLLAPMSEVAGRLSIEASAHSSHANNGGRGILMGGVPGVLPAKVVVIGGGVVGTQAARMAVGLGANVEILDRSLPRIRELDDMFQGRATTRYSNAGTIEDAITEADVVVGAVLIPGASAPKLVTRDMLGLMKHRAVLVDVAIDQGGCFETSKPTTHDAPTYMVDDIIHYCVANMPGAVPHTSSYALNNATLPFGLALANKGVVKACEDDPHLRLGLNVHEGKIVNEAVAESLGF

SEQ ID NO: 55305 - DNA, 1140 bp, Synechococcus sp. RS9917
  CDS (1)..(1140): transl_table=11
atggcccactccattctcaccgctccgatggcgagcatcggggttcccaccgaaatcaaggcggatgagcagcgggtggccctcacccccgatggcgtcagggatctggtcacccaggggttggaggtgcgcgtgcaggccggcgccggtgatggcgctggcatcgccgatgcagcctttgcagcggccggcgcccaggtggtggaccgggacaccgcctgggctgcccatctggtggtgaaagtgaaagaaccgcaggaggaagaattccggttccttcgcgatgacatggtgctgttcacctacctgcatctggccgcctacccgaaggtggggcaggccctgctggatgcgggcaccaccggcgtggcctacgagacggtgcaactcgaaaatggcagcctgcccctgctggcgccgatgagcgaaatcgccggacgcctcgcggctcaggtgggcgcgcggctgctggagaggccgaacggtggacgcggcgtgctgatcggtggctgcaccggcgtgcgcccggcccgtgtggtcgtgctcggagccggcacggtgggctggaatgcggcccgactggcggcggcgatggatgcggaggtgatgctgctggatcgctcccccgaacggttgcgcagtttggaagccgaccggcgcgggcggctgatgagcgtggtgagcagccgcggcctgctggaacggctggtgcccaccgccgacctgctgatcggtgctgtgctcacccccggcggccgtgctcccacgctggtggatgaggagatggtgcaacagatgcaacccggctcggtgatcgtcgatgtggcgatcgatcaggggggctgtgtagccaccagccgggaaacaacccacaccgaccccacggtgaccatccacagcgtgcagcactacgccgtgggcaacatgcccggtgcggtgccgttcacctccaccgaagcactggtgagcgtcacgctcccctacatcctcggcatcgccggccgcggcctggaggaagcggtgaccgagcggcctgaactgctctccggcctcaacaccgtccaaggggccgtctgccatccaggcgttgccaaagcgctgggtgttcccccgagacacccgatggcctgcctgcgctga

SEQ ID NO: 55306 - protein, 379 aa, Synechococcus sp. RS9917
MAHSILTAPMASIGVPTEIKADEQRVALTPDGVRDLVTQGLEVRVQAGAGDGAGIADAAFAAAGAQVVDRDTAWAAHLVVKVKEPQEEEFRFLRDDMVLFTYLHLAAYPKVGQALLDAGTTGVAYETVQLENGSLPLLAPMSEIAGRLAAQVGARLLERPNGGRGVLIGGCTGVRPARVVVLGAGTVGWNAARLAAAMDAEVMLLDRSPERLRSLEADRRGRLMSVVSSRGLLERLVPTADLLIGAVLTPGGRAPTLVDEEMVQQMQPGSVIVDVAIDQGGCVATSRETTHTDPTVTIHSVQHYAVGNMPGAVPFTSTEALVSVTLPYILGIAGRGLEEAVTERPELLSGLNTVQGAVCHPGVAKALGVPPRHPMACLR

SEQ ID NO: 55307 - DNA, 1200 bp, Synechococcus sp. WH 5701
  CDS (1)..(1200): transl_table=11
gtggcgaaagctggcgatcgggcggccagcccgccaacctggaaggagcttctcattggcatggccagcatgggcccagcggcaccgatcgcgagcatcggtgttcccagggagatcaaacgggatgaacagcgggtggccctcagccccgatggggtgagggagctggtgtcccagggcctcgaagtgcgtgtcgaggcgggagccggccagggggccggcatggaggacgccagttacgccgaggctggagcgcgcctggtcgaccgcgaggaggcctggggtgcccatctggtggtgaaggtgaaggaaccccagccggaggagttccccttcctgcgcggtgatcaggtgctgttcacctacctgcacctggccgcctaccccgaggtgggccgggccctgctggaggcgggcaccaccggcgtggcctacgaaaccgtccagctcgacaacggcaacctgccgctgctggcgccgatgagcgaaatcgctggtcggctggccgcccaggtgggggcccatctactcgagaaaccccatggtggcaggggtgtgctcatgggcggctgcgccggggtgcggccggcgcgggtgatcgtgctcggagccggcaccgtgggctggcatgccgcccgggtcgccgcggccatggatgcggaggtgttcctgctggatcacaccccccagcgcctgcgcatgctcgagccccagcggatcgggcggatggtgagtctggtgagcagcaacagcctgatcgagcggctggttcccagcgctgacctggtggtgggcgcggtgctgacccccggcagccgggcccccaccctggtggatgaggaggtggtgaagcggatgaagccaggctcagtgatcgtcgatgtggccatcgatcaggggggctgcatcgccaccagccgcgagaccacccacaccgatcctgtggtgaccatccatggcgttcagcactacgccgtgggcaacatgcccggcgccgtgcccttcacctccaccgaagccctggtcagcgtcaccctgccctacatcatgggcatcgccggtcggggactggtggaggcggtcaccgagcggcccgagctgctctccggcctcaacacggtggatggggccgtgtgccatcccggagtggccaaggccctggggatgccgacccgccatccgatggcctgtctgcgctga

SEQ ID NO: 55308 - protein, 399 aa, Synechococcus sp. WH 5701
MAKAGDRAASPPTWKELLIGMASMGPAAPIASIGVPREIKRDEQRVALSPDGVRELVSQGLEVRVEAGAGQGAGMEDASYAEAGARLVDREEAWGAHLVVKVKEPQPEEFPFLRGDQVLFTYLHLAAYPEVGRALLEAGTTGVAYETVQLDNGNLPLLAPMSEIAGRLAAQVGAHLLEKPHGGRGVLMGGCAGVRPARVIVLGAGTVGWHAARVAAAMDAEVFLLDHTPQRLRMLEPQRIGRMVSLVSSNSLIERLVPSADLVVGAVLTPGSRAPTLVDEEVVKRMKPGSVIVDVAIDQGGCIATSRETTHTDPVVTIHGVQHYAVGNMPGAVPFTSTEALVSVTLPYIMGIAGRGLVEAVTERPELLSGLNTVDGAVCHPGVAKALGMPTRHPMACLR

SEQ ID NO: 55309 - DNA, 1140 bp, Synechococcus sp. WH 7805
  CDS (1)..(1140): transl_table=11
atggctcattccgttctgacggccccgatggccagcatcggggtgcctactgagatcaaagctgatgaacagagggtcgccctgacaccggatggggtgcgggagttggtgacccaagggctggaagtgcgcatccagcacggtgccggtgccggtgcaggcatcggcgatgacgcgttcgcctcagcaggtgcacgcatggtcgatagggacgacgcctgggccgctcacctggtggtgaaagtaaaagagccgcagccggaggaattcggccttttgcgcgacgacatggtgctctttacctaccttcatctcgcggcctatccccaggtgggccaggcactactggaggcgggcactacgggtgtggcctatgaaacggtgcaactggaaaacggcagcctgccgctgctcgcaccgatgagcgagattgccggccgcttagcagcacaggtgggcgcacggttactggaacgtccaaacggcggtcgtggcgtactgatcggtggctgtacgggggttcaaccggcacgggtggtggtgctcggcgccggcaccgtcggctggaatgcagctcggcttgcagcagccatggatgccgaggtgatgctgctggatcgctcaccggagcggttgcgcagcctggaagccgaccggcgaggacgattgatgagcgtggtcagcagccgagggctactggagcgactcgtgcccaccgccgacctactgattggtgccgtgctcacacctggagggcgggctccgacattggtggacgaggagatggtgaaacagatgaggccaggttcagccatcgtggatgtggcgatcgaccagggcggctgcatcgccacgagccgggagaccacccacaccgatcccacggtctgcatccatgggattcagcactacgccgtgggcaacatgcctggagctgtgccgttcacctccacggaggccctggttagtgtcacgctcccgtacatccttggcatcgccggccgcggactggaggaagccgtcactgagcggcctgaattgctttcaggcttgaacaccgtgaaaggggctgtgtgtcatccaggagtggcgaaggccctgggagttccgccgcgccaccccatggcatgcctgcgctga

SEQ ID NO: 55310 - protein, 379 aa, Synechococcus sp. WH 7805
MAHSVLTAPMASIGVPTEIKADEQRVALTPDGVRELVTQGLEVRIQHGAGAGAGIGDDAFASAGARMVDRDDAWAAHLVVKVKEPQPEEFGLLRDDMVLFTYLHLAAYPQVGQALLEAGTTGVAYETVQLENGSLPLLAPMSEIAGRLAAQVGARLLERPNGGRGVLIGGCTGVQPARVVVLGAGTVGWNAARLAAAMDAEVMLLDRSPERLRSLEADRRGRLMSVVSSRGLLERLVPTADLLIGAVLTPGGRAPTLVDEEMVKQMRPGSAIVDVAIDQGGCIATSRETTHTDPTVCIHGIQHYAVGNMPGAVPFTSTEALVSVTLPYILGIAGRGLEEAVTERPELLSGLNTVKGAVCHPGVAKALGVPPRHPMACLR

SEQ ID NO: 55311 - DNA, 1119 bp, Pseudoalteromonas tunicata D2
  CDS (1)..(1119): transl_table=11
atgattatcggtgtacctaaagaaattaaaaaccatgaataccgtgtaggtatggtacctggcagcgtgcgtgagctaattaaccacggtcacaaagtatttgttgagcacaacgcaggtattggcattggttttaccgatgatgattatcaagcagttggtgcagaaattttagctactgctgctgaagtatttgctagcgctgaaatgatcgttaaagtgaaagagcctcaagctgttgagcgtgcaatgcttcgtgaagatcaaattcttttcacttatttacaccttgctccagatttaccacaaactgaagacttagtgaaaagcaaagcaatttgtatcgcttacgaaacagtgactgatgcacgtggtggtttaccattattagctcctatgtctgaagttgctggccgtatggcgattcaagctggcgctcaagcacttgagaaatcaaataacggtcgtggcatgttattaggtggtgttccaggtgttgagccagctaaagttgtcgttatcggtggcggtatggtgggtgcaaatgcagcacaaatagctgtaggtatgggtgcagatgttgttattttagaccgtaacgttgatgtactgcgtcgtttagatgcacaatttggtaacaagattaaagcggtttattctactgccgatgcgttagaaaaacacgttcttgaagctgacctagtgattggtggcgtattaattccaggtgctgccgcaccaaaattagttaccgctgatcatatcaaacgtatgaagccaggctcagcaatcgttgatgttgcaattgaccaaggtggttgtattgcaacgtcaaaagccaccacacatgctgaaccaacatttatcgttgatgacgttgttcattactgtgttgcgaacatgccaggtgctgtaccgttaacatctacctttgctttaaacaatgctacattaccttttatcatcaacttagcgaacaaaggctataaaaaagccttacttgatgatgtacatttccgtaacggattaaacgtttataaaggtcatgtaacattcaaagaagtagctgaaggtttcaacatgccttatgttactgcgttagacgcactaaacgcataa

SEQ ID NO: 55312 - protein, 372 aa, Pseudoalteromonas tunicata D2
MIIGVPKEIKNHEYRVGMVPGSVRELINHGHKVFVEHNAGIGIGFTDDDYQAVGAEILATAAEVFASAEMIVKVKEPQAVERAMLREDQILFTYLHLAPDLPQTEDLVKSKAICIAYETVTDARGGLPLLAPMSEVAGRMAIQAGAQALEKSNNGRGMLLGGVPGVEPAKVVVIGGGMVGANAAQIAVGMGADVVILDRNVDVLRRLDAQFGNKIKAVYSTADALEKHVLEADLVIGGVLIPGAAAPKLVTADHIKRMKPGSAIVDVAIDQGGCIATSKATTHAEPTFIVDDVVHYCVANMPGAVPLTSTFALNNATLPFIINLANKGYKKALLDDVHFRNGLNVYKGHVTFKEVAEGFNMPYVTALDALNA

SEQ ID NO: 55313 - DNA, 1119 bp, Photobacterium sp. SKA34
  CDS (1)..(1119): transl_table=11
atgattcttggtgtacctaaagagatcaagccccacgagtatcgtgttggtatgacaccaaccgcagtaaaagaactcacagcttatgggcatcatgtctatattgaaacccttgcgggtaaaggtattgggtttaacgaccaagactatatagacgctggcggctttatttcaccaacagctgagcatgttttttctactgcagaaatgatcattaaagtaaaagagccccaaaccagtgagcgtaaacttttacgtgggggacaaattctatttgcttaccttcacttagcccccgatctcgcacaaactaaggacttgatcaaatcaaaagctatttgtattgcttatgaaacagtcactgatcataacaataaacttcccttacttgctccgatgtctgaagtcgctggaagaatgtctattcaagcaggagcatttgcattagaaaaatcacgaggtggacaaggtattttattaggtggcgtccccggtgtaaatgcggcaaacgttgtaataattggtgggggcgttgtcggtagtaacgctgctcaaatggcaattggcttaaaagcaaatgttactattatcgacagggatatcaatgtattacgacaattagacatacaatttaatggtaaaatcaatacgatctatgcgactaatacagcaatagaagatcatgtaatcagagcagatcttgttattggaggtgtacttattgcaggcgctgcggcacctaaactgatcacaaaagcaatgatagaaaaaatgaagtctggatctgccattgttgatgttgctattgatcagggtggctgtgtagaaacatcacacccaacaacacatgatgatccgacttatattattgatgatgttgtacattattgtgtcgccaatatgcctggtgccgttgcccgtacctcaaccgttgctttaaataacgcaacactgccttatattattgcattagcaaataaagggtataaacaagcacttctcgatgataaacatctacgtgatggactcaatatttatcagggcgatataacctgtaaaaacgttgcgctatcacttcatctcccttacatagaagcagagaaaaaactgaatgaataa

SEQ ID NO: 55314 - protein, 372 aa, Photobacterium sp. SKA34
MILGVPKEIKPHEYRVGMTPTAVKELTAYGHHVYIETLAGKGIGFNDQDYIDAGGFISPTAEHVFSTAEMIIKVKEPQTSERKLLRGGQILFAYLHLAPDLAQTKDLIKSKAICIAYETVTDHNNKLPLLAPMSEVAGRMSIQAGAFALEKSRGGQGILLGGVPGVNAANVVIIGGGVVGSNAAQMAIGLKANVTIIDRDINVLRQLDIQFNGKINTIYATNTAIEDHVIRADLVIGGVLIAGAAAPKLITKAMIEKMKSGSAIVDVAIDQGGCVETSHPTTHDDPTYIIDDVVHYCVANMPGAVARTSTVALNNATLPYIIALANKGYKQALLDDKHLRDGLNIYQGDITCKNVALSLHLPYIEAEKKLNE

SEQ ID NO: 55315 - DNA, 1116 bp, Photobacterium sp. SKA34
  CDS (1)..(1116): transl_table=11
atgatcattggtatccctaaagaaatcaaaacacatgaataccgcgtaggtatggtcccagcgtcagttaaagaagtggtctctcatggtcatcgtgtttatgtcgaaaccaacgcaggtacaggtattggttttagcgatcaagactatattgatgcaggcgcacaaatcctagcaacagcatctgacgtttttgcagaagcagaaatgattgttaaagtaaaagagcctcaagctgttgagcgtgccatgcttcgcgaagggcaaattctatttacttacctacacctagccccggatccagagcaaacgcatgatctaattaatagcaaagccgtatgtattgcttacgaaaccgtaacagataaaaacggtcgtttaccactacttgcaccaatgtcagaagtggctggtcgcatgtcaatccaagctggcgcattcgcactagaaaaatctcgtggcggctgtggcatgttacttggcggcgtaccgggtgttgagccagcaaaagttgtcattattggtggtggtgttgtaggcgcaaatgcagcacaaatggcattaggtctacaagctgatgttactgttattgaccgtaatatcgatgtactgcgccaactagatgcacagttcaatggtcaactgaaaacggtttactcaaccaatgattcaattgaaaaacatgtgcttgaagcagatcttgttatcggtggcgttctcgtcgtcggtgctgcggctccgaaactggttactgctgagatgatcaagaaaatgaagccaggcgctgcaattgttgatgttgctatcgaccaaggtggctgtgtagaaacatctcatgctacaactcacagcgagcctacttacattgttgatgatgtggttcactactgcgttgcaaacatgccgggggcagttgctcgtacatcagcagtggcacttaacaatgtaacactgccttacattgttaaccttgccaataaaggctacaaaaaagcgttacaagacgataagcatctattaaatggtctaaatgtttaccgtggacaaatcacttgtgaaagcgtagcagcatcactggatttaccttacgttgatgcagactctgctatcgcataa

SEQ ID NO: 55316 - protein, 371 aa, Photobacterium sp. SKA34
MIIGIPKEIKTHEYRVGMVPASVKEVVSHGHRVYVETNAGTGIGFSDQDYIDAGAQILATASDVFAEAEMIVKVKEPQAVERAMLREGQILFTYLHLAPDPEQTHDLINSKAVCIAYETVTDKNGRLPLLAPMSEVAGRMSIQAGAFALEKSRGGCGMLLGGVPGVEPAKVVIIGGGVVGANAAQMALGLQADVTVIDRNIDVLRQLDAQFNGQLKTVYSTNDSIEKHVLEADLVIGGVLVVGAAAPKLVTAEMIKKMKPGAAIVDVAIDQGGCVETSHATTHSEPTYIVDDVVHYCVANMPGAVARTSAVALNNVTLPYIVNLANKGYKKALQDDKHLLNGLNVYRGQITCESVAASLDLPYVDADSAIA

SEQ ID NO: 55317 - DNA, 1110 bp, Oceanospirillum sp. MED92
  CDS (1)..(1110): transl_table=11
atgttgattggcgtacccaccgagataaaaaccagagaataccgggtaggattaaccccttcaggggtaaaagaactttgctctcagggtcatgacgtcatcatccaaaaaggggcaggagaaaaaataggtttcttcgatgctgagtatcaaacctcaggtgctgagattgtcgaaacggcgggtgagctatggtccagagcgcagatgatcattaaggttaaggagccgcaacctgaagaaaccgccaggcttaaacctgaacacctcctcttcacatatctgcacctggctgcggagcgccacttaaccgaatctctgcagaactctggttgtaccgccattgcttatgaaacgattaccgatcatctcggccacctccctctgctcgcaccaatgagcgaagtcgctggcagaatgtcggtgcaagccggcgcgcattgtcttgagatagcccaacaaggtcgaggggtattgctaggaggtgttcctggcgttgcaccaggcaaagtgattattctgggtggcggtgtagttggaacaaacgcagcacagatggcgacgggcctgggcgctgaggtcactatctttgataaatccccacagagactgcgcgaactggatagccaatttcatggtcgtataaagacctgttactccactaccgataatgttcaacaggcgattgcagaggctgatttgattattggagctgtcttaatcccaggtgcagccgcacccaagctggtcaccaaagctgatctaggttcaatgcagaaaggttctgtcattgtcgatgtcgctatcgatcaggggggctgtttcgagaccagtaggccaacgactcatgacgatccaacatttattgagcaggggattgtgcattattgtgtagcgaatatgccgggggctgtggcgcggacttcaactctggcactcactaatgccacacttccttacatttgccggctggccaacgccccctggcaaacgatgctgaagcaggacccgctctttgccaaaggattgaacgttcacaggggtgatatcttctgtgaaggagtcgccaaagctttcgacctcgatttcagaccaattgacagtctgtaa

SEQ ID NO: 55318 - protein, 369 aa, Oceanospirillum sp. MED92
MLIGVPTEIKTREYRVGLTPSGVKELCSQGHDVIIQKGAGEKIGFFDAEYQTSGAEIVETAGELWSRAQMIIKVKEPQPEETARLKPEHLLFTYLHLAAERHLTESLQNSGCTAIAYETITDHLGHLPLLAPMSEVAGRMSVQAGAHCLEIAQQGRGVLLGGVPGVAPGKVIILGGGVVGTNAAQMATGLGAEVTIFDKSPQRLRELDSQFHGRIKTCYSTTDNVQQAIAEADLIIGAVLIPGAAAPKLVTKADLGSMQKGSVIVDVAIDQGGCFETSRPTTHDDPTFIEQGIVHYCVANMPGAVARTSTLALTNATLPYICRLANAPWQTMLKQDPLFAKGLNVHRGDIFCEGVAKAFDLDFRPIDSL

SEQ ID NO: 55319 - DNA, 1086 bp, Flavobacteria bacterium BBFL7
  CDS (1)..(1086): transl_table=11
atgattgttggaattcccaaagaaataaagaataatgaaagcagagttagtatgactcctgccggtgtttttgagcttactaaaaacgaccatgaggtttacattcagtccactgccggtaaaggaagtggtttctttgataaagattatgaaaacgctggagccacaatcgttaatacaattgaagaggtatatgcgataagcgatttaatcgttaaagtaaaagagcctattcagtatgaatataacctagttaaagaaggtcagttattattcacctatttccattttgcctctagtgaagctcttaccaatgcaatgattaaagccaaagcaatttgtatcgcatatgaaaccgttgaggatcaagaaggcaccttaccactactcactcctatgtctgaggttgcaggaagacttgccatacagcaaggagcaaaatatttagaaaaacccgtaaaaggaagaggtgttctattaggtggtgtacctggcgttgctcctggtaaagtattagttttaggtgctggtgtagtaggcattcaagcggctaaaatggctgcaggtttaggggcacatgtaaccatcatggatattaacatgaaaagactacgttatgttaatgatgtcatgccaccgcacgtggtcacagaattttcaaacgaattcaatattagaaagcatatcaaaacgcatgatcttatcataggcggagttttattaaaaggagcaaaagctcctaaccttattactcgcgatatgcttaaagagatgagaccaggcactgtaatcgtagatgtagccgtagatcaaggtggttgcgtagaaactacaaaacctacaacacatgaaaatccaacctatatcatagacgatgtagtacattatacagtagcaaatatgccaggagcagtaccatacacctctacggtagcacttactaatgtcacattaccttatgtacttcaactggctaattatgggtgggaaaaagcatgtagccaaaaccctagcctagaaaaaggactgaatattatatcaggaaaggtagtttatcgtgagattaatgaggcctttggatggtga

SEQ ID NO: 55320 - protein, 361 aa, Flavobacteria bacterium BBFL7
MIVGIPKEIKNNESRVSMTPAGVFELTKNDHEVYIQSTAGKGSGFFDKDYENAGATIVNTIEEVYAISDLIVKVKEPIQYEYNLVKEGQLLFTYFHFASSEALTNAMIKAKAICIAYETVEDQEGTLPLLTPMSEVAGRLAIQQGAKYLEKPVKGRGVLLGGVPGVAPGKVLVLGAGVVGIQAAKMAAGLGAHVTIMDINMKRLRYVNDVMPPHVVTEFSNEFNIRKHIKTHDLIIGGVLLKGAKAPNLITRDMLKEMRPGTVIVDVAVDQGGCVETTKPTTHENPTYIIDDVVHYTVANMPGAVPYTSTVALTNVTLPYVLQLANYGWEKACSQNPSLEKGLNIISGKVVYREINEAFGW

SEQ ID NO: 55321 - DNA, 1116 bp, marine gamma proteobacterium HTCC2207
  CDS (1)..(1116): transl_table=11
atgttggtaggtgttccgaaagagattaaaaataatgaatatcgtgtgggtctgacgccatcttcggttgtcgagttagtcgcccgtggccacaaagttatggtagaagtaaatgccggtgcgggaatcgactttagtgacgaggagtatcgtgcggcgggggctgagatggtggccagcgcggcggacgtttttgcagcggcggatatgatcattaaggtgaaggaaccgcagcctcgggaatgtgaaatgttacgcgatggtcagattctttatacctatttgcatttagccccagatcctcagcagaccaaattattagttgagtccggcgccacctgtgtcgcctatgaaacggtgacggataatcagggtggcttgcctctgctggcacccatgtctgaggtggctgggcgcatgtcggtgcaggcgggagcttaccatttggagaaagctcagggcggtcgtagtgtgttgctgggcggcgttcccggcgtggcaccggcgaaggtgttggttattggtggtggtgtggtcggtgacaatgcggcggccattgccgtgggtatgggggctgatgtgactattctcgatcgttctattgcccgcctgcgtgagttggacgcgaaatacgaggggcgcgcccactgtgtctattccaccatggcgactatcgaggagtatgcccttgatgcggatctggtaattggtgcggtcttgattcccggcgcagcggcgccgaagttattgagccgcgatattatcagtcgcatgaagaagggttcggtggtggtggatgtggccattgatcagggcggttgttttgagacgtctcgtgcgacgactcatcagcagccgacctatatggtcgatgatgtagtccattactgtgttgccaatatgcccggtggtgtggcgcggacggcgactatggcgctaaacaacgcgaccttgccctatgcactggcgctagcggatgatcctgtcaatgcactgtttcgagataagcatttgcagaatggtctcaatgtgcacaaaggccatgtgacttacaaggcggtggcagatgcattgggttatagctatgtgcctgccgatgaggcgctgaaggtctga

SEQ ID NO: 55322 - protein, 371 aa, marine gamma proteobacterium HTCC2207
MLVGVPKEIKNNEYRVGLTPSSVVELVARGHKVMVEVNAGAGIDFSDEEYRAAGAEMVASAADVFAAADMIIKVKEPQPRECEMLRDGQILYTYLHLAPDPQQTKLLVESGATCVAYETVTDNQGGLPLLAPMSEVAGRMSVQAGAYHLEKAQGGRSVLLGGVPGVAPAKVLVIGGGVVGDNAAAIAVGMGADVTILDRSIARLRELDAKYEGRAHCVYSTMATIEEYALDADLVIGAVLIPGAAAPKLLSRDIISRMKKGSVVVDVAIDQGGCFETSRATTHQQPTYMVDDVVHYCVANMPGGVARTATMALNNATLPYALALADDPVNALFRDKHLQNGLNVHKGHVTYKAVADALGYSYVPADEALKV

SEQ ID NO: 55323 - DNA, 1119 bp, Rickettsiella grylli
  CDS (1)..(1119): transl_table=11
atgcgtattggtgttcctaaagagattaagaatcatgaatatcgcgtcgcgattgtaccttctattgttcgcgagttgactgcacaaaatcatcgcgtgtttcttgaaacaaaagctggaaatggcgttggtattgatgataacgattatcaagaagcgggtgccgttatcgttaatacggcacaagaagtctttggagaaagtgatcttattctgaaggttaaagaaccgcaacctcaggaatgtgcttatttaaatgaaaaaaaaaccttatttacgtttttacatttggccgcagataggaagcaaacagaattattattggcatccaagtgtacagcgattgcgtatgaaacagtaacagatgcgcaaggaggtttaccgttattaacaccgatgagtgtcgttgcaggccgaatgtcgatacaagcgggtactcattgtctagaaaaggcacagcgtggaagaggtattttattatcgggtgttcctggtgttgcttcggccagcgttgttgttttaggaggtggcgttgtgggaagtaatgccatccgtatggcgttaggtttagaagcccaagtcacggtattggataagtctgcaatgaagttaagagaactcgatcttcactttggaggtcaactcaatactgttttttcaacacaagatgccatcgaaaaatatgtaccgctggccgatttattaatcggagccgttttagtgccgggtgccgaagcccctaaaatagtgacacgagaattattaaaaaaaatgcgtccaggttctgtggttgtcgatgtatctattgatcaaggcggatgttttgcgacgagtcggccgacaacgcacactcatccgacctattacgttgatgatattgttcattattgcgtgagtaatatgccgggggctgtaccgcgtacgtcgacgtttgcgttgacacatgccacattaccttacattttaacgttggcgaataaagggattgatagagcactgactgaagatgtttatttaagaaatgggttgaatatttcacagggaagaattacacatcaagcgattgcgcatgggtttgataaaccttatgtttctgcgggagaaatcttaagtgcttaa

SEQ ID NO: 55324 - protein, 372 aa, Rickettsiella grylli
MRIGVPKEIKNHEYRVAIVPSIVRELTAQNHRVFLETKAGNGVGIDDNDYQEAGAVIVNTAQEVFGESDLILKVKEPQPQECAYLNEKKTLFTFLHLAADRKQTELLLASKCTAIAYETVTDAQGGLPLLTPMSVVAGRMSIQAGTHCLEKAQRGRGILLSGVPGVASASVVVLGGGVVGSNAIRMALGLEAQVTVLDKSAMKLRELDLHFGGQLNTVFSTQDAIEKYVPLADLLIGAVLVPGAEAPKIVTRELLKKMRPGSVVVDVSIDQGGCFATSRPTTHTHPTYYVDDIVHYCVSNMPGAVPRTSTFALTHATLPYILTLANKGIDRALTEDVYLRNGLNISQGRITHQAIAHGFDKPYVSAGEILSA

SEQ ID NO: 55325 - DNA, 1140 bp, Oceanobacter sp. RED65
  CDS (1)..(1140): transl_table=11
atgctaattggtgtaccaaaagagattaaaaaccacgagtatcgtgtcggtcttacccctgctggtgtacgtgaattgacaagtgcaggccatgacgtagtagttgaaaccaatgccggtctggctatcggtcttgataacgctcagtacgagtctgccggtgcaaaaattttagattcggctgaggcggtattcgagcaagcagatatgatcgttaaagtaaaagagccgcaaccaaacgaatgcaaaatgctgcgcgaaggccagttgcttttcacatacttgcacctagccgcagacaaaccacaaaccgatctgcttatggcgagcggtgccacttgtgtcgcttacgagaccgtaaccgatgcacatggtggccttccattattagcgccaatgtctgaagtagctggtcgtcttgctccgcaagaaggtgcggcgtgcttgaaaaaagccaacggtggtagcggtgtgttaattggtggtgtacctggtgtgtctccagcacaagtcagtgtaatcggtggtggtgttgtcggtttgaatgcagcacgcatcgcattgggtatgggtgccaacgtaacgattttggatcgttctcttgctcgtctaaaagaaattgatgatatgtttggcgacaagttaaacacgctgttcagtaccgaagaagccattcgtgaacaaatcaaaatcgctgatatggtcatcggcgccgtattaattccgggtgcagccgcaccgaagctcatcagcaaagatatgttaagtaccatgaagccaggctctgtcttagttgacgtagcaatcgaccaaggcggttgcttcgaaaccagcaagccaactacacaccaagagccaacttatgaaatcgatggtgtgattcattactgtgtcgcgaatatgccaggcgccgttgcacgtacttcaactttcgcactaaccaatgcgacattgccgtatgttgtacagcttgctaacaaaggtaaggatgcattggcagcgaaccctcacttgctagaaggcctaaacgtacacaaaggtcaattgacctgtgaagcggttgcagaagcgtttaactatgatttcgtaacgcctgcaaaagcattgggcctaagtggtaacgtacaaaagattgcgtaa

SEQ ID NO: 55326 - protein, 379 aa, Oceanobacter sp. RED65
MLIGVPKEIKNHEYRVGLTPAGVRELTSAGHDVVVETNAGLAIGLDNAQYESAGAKILDSAEAVFEQADMIVKVKEPQPNECKMLREGQLLFTYLHLAADKPQTDLLMASGATCVAYETVTDAHGGLPLLAPMSEVAGRLAPQEGAACLKKANGGSGVLIGGVPGVSPAQVSVIGGGVVGLNAARIALGMGANVTILDRSLARLKEIDDMFGDKLNTLFSTEEAIREQIKIADMVIGAVLIPGAAAPKLISKDMLSTMKPGSVLVDVAIDQGGCFETSKPTTHQEPTYEIDGVIHYCVANMPGAVARTSTFALTNATLPYVVQLANKGKDALAANPHLLEGLNVHKGQLTCEAVAEAFNYDFVTPAKALGLSGNVQKIA

SEQ ID NO: 55327 - DNA, 1113 bp, Synechococcus sp. RS9916
  CDS (1)..(1113): transl_table=11
atggccaccatcggtgttccgagcgaaatcaaggtggatgagcaacgggtcgcgctcaccccagatgcggtgcgcgagctggtcacccagggactggaagtgcgggtgcagagcgaagccggagccggggccggcatcagtgaccaagctttcgcagcggcaggcgcgcgggtggtgacccgggaagaggcctgggccgcccatctcgtggtgaaagtcaaagagcctcaagaggaggaattcggcttcctacgcgacgacatggtgctgtttacctacttgcatctcgcggcgtacccgaaggtgggtgaggccctgctgaatgcgggcaccaccggcgtcgcctacgagacggtgcagctcgaaaacggcagcctgcccctgctggctcccatgagcgaaatcgccggacgcctggcagcccaagtgggagcccacttgctcgagcaaccccatggcggccgtggagtcttgatgggcggctgcaccggtgtacagcctgctcgagtggtggtattaggtgccggcaccgtgggatggaatgcggcccgcgtggcagcagcgatggatgcagaagtgatgttgctggatcgatccccagaaaagctacgcagcctggaagcagcaaggcgaggccgattgatgagtgtggtgagtagccgtggactgctggaacgtctcgtacccagcgccgacctgctcattggcgccgtgctcactccgggaggacgggccccaacccttgtggatgaagacctggtcaaacagatgaagcccggttcagtgatcgtggatgtggcgattgaccagggggggtgcgtggccagcagcaaagaaaccacccacaccgaccccaccgtcaacatccatggcgtgcagcactacgccgtcggcaacatgccaggggctgtgcccttcacatccaccgaagcattggtgagcgtcaccttgccctacatccttggcatcgccggcaggggactggaagaagctgtcaccgagcggccggaacttctctccggtctcaacacagtgcagggggcggtctgccatcccggagtggccaaggcactcggactgccgccgcgacacccaatggcctgcctgcgctga

SEQ ID NO: 55328 - protein, 370 aa, Synechococcus sp. RS9916
MATIGVPSEIKVDEQRVALTPDAVRELVTQGLEVRVQSEAGAGAGISDQAFAAAGARVVTREEAWAAHLVVKVKEPQEEEFGFLRDDMVLFTYLHLAAYPKVGEALLNAGTTGVAYETVQLENGSLPLLAPMSEIAGRLAAQVGAHLLEQPHGGRGVLMGGCTGVQPARVVVLGAGTVGWNAARVAAAMDAEVMLLDRSPEKLRSLEAARRGRLMSVVSSRGLLERLVPSADLLIGAVLTPGGRAPTLVDEDLVKQMKPGSVIVDVAIDQGGCVASSKETTHTDPTVNIHGVQHYAVGNMPGAVPFTSTEALVSVTLPYILGIAGRGLEEAVTERPELLSGLNTVQGAVCHPGVAKALGLPPRHPMACLR

SEQ ID NO: 55329 - DNA, 1125 bp, Vibrio sp. Ex25
  CDS (1)..(1125): transl_table=11
atgatcattggcgtacctaaggaaatcaagaaccacgaatatcgtgttggtatgatcccagcaagcgtgagagaactcatctcacatggtcaccaagttttagttgagaccaatgcaggtgccggcattggtttttcagacgatgattacatcgctgtcggcgcatccattctccctcatgctgcagacgtattcgcgcaagcagacatgattgtaaaagtaaaagaaccccaagcagtagagagagcaatgctccgcgaagggcaaattttatttacttatttacacctagcaccagattttccacaaactgatgagctaatcaagagcaaagctgtctgtatagcctatgagactgtaacagataatatgggtcgtttgccactgttagcaccaatgtcagaagtggcaggtcggatgtctatccaagctggcgcgcaaacattggaaaaatcacacggcggtcgtggtctgctactaggtggcgtacctggtgttgagccagcgaaagtcgtcatcgttggtggtggtgttgttggtgcaaacgcagctcgtatggctgttggtcttcgcgctgacgtaaccattctagaccgtaacgtagatacacttcgtaagcttgacgaagaattccaaggtcgcgctaaagtggtttattctactgaagacgctatcgagaagcatgttctagaagctgaccttgttatcggtgccgttctaattcctggagcagcagcgcctaagctggtaacaaaagagcacattgctaagatgaaacctggtgcggcagtggttgacgtggctattgaccaaggtggctgtttcgagacatctcacgcaacaacccacgcagatccaacttacatcgttgatgaagtggttcactactgcgtagcaaatatgcctggtgcggttgcacgtacttcaactttcgcattgaacaatgcaacactcccttacattgtgaaactcgcaaacaaaggctaccgtgaggcacttctagaagacaaaggcttccttgaaggtctaaacgttattcacgggaaagtaacatgtaaagaagtagcagaaagctttgacttggaatacgttgaaccaactcaagctatcgctatgttcaattaa

SEQ ID NO: 55330 - protein, 374 aa, Vibrio sp. Ex25
MIIGVPKEIKNHEYRVGMIPASVRELISHGHQVLVETNAGAGIGFSDDDYIAVGASILPHAADVFAQADMIVKVKEPQAVERAMLREGQILFTYLHLAPDFPQTDELIKSKAVCIAYETVTDNMGRLPLLAPMSEVAGRMSIQAGAQTLEKSHGGRGLLLGGVPGVEPAKVVIVGGGVVGANAARMAVGLRADVTILDRNVDTLRKLDEEFQGRAKVVYSTEDAIEKHVLEADLVIGAVLIPGAAAPKLVTKEHIAKMKPGAAVVDVAIDQGGCFETSHATTHADPTYIVDEVVHYCVANMPGAVARTSTFALNNATLPYIVKLANKGYREALLEDKGFLEGLNVIHGKVTCKEVAESFDLEYVEPTQAIAMFN

SEQ ID NO: 55331 - DNA, 1122 bp, Alteromonadales bacterium TW-7
  CDS (1)..(1122): transl_table=11
atgattattggtgtacctaaagaaatcaaaaaccatgaataccgcgtaggtatggttcctgctagtgttcgtgaattagttaatcacggccaccaagtggttgtagaaacgaatgcaggtatgggtattggttttacagatgaagattacacccaagcaggtgcagacattttagcaactgcggctgacgtttttgcaaacgcagacatgattgtaaaagtaaaagaaccacaagcagttgaacgtgcaatgcttcgtgaagaccaaattcttttcacttaccttcaccttgcaccggatcttccacaaactgaagaccttgttaagagcaaagcgatttgtattgcttatgaaacagtaactgactctcgtggtggtttaccacttttagcgccaatgagtgaagtagctggccgtatgtctatccaagccggtgcacaagcccttgaaaaatctaaccacggtcgtggtatgttactaggcggtgtacctggtgttgagccggctaaagttgttgttatcggcggcggcatggttggtcgtagcgctgcacaaatggctgtaggcctaggtgctgatgttgttgtacttgaccgtaatatcgatgtactacgtgcacttgacgcacagtttggtaataaagttaaagctatttactcaacagctgatgcacttgaaaaacacgtactagaagcagatttagttattggtggcgtactaatccctggcgctgctgctcctaagcttgtaacagcagagcacatcaaagcaatgaagcctggcgctgctattgttgacgttgctattgaccaaggcggttgtattgcaacatctaaagcaacaacgcatgctgatcctactttcatcgttgatgaagttgttcactactgtgttgctaacatgccgggtgctgttcctcgtacgtctacatttgcacttaacaatgcaacattgccgtttatcattaaccttgcaaacaaaggttacaaaaaggcattgctagacgacgctaacttcctaaaaggcttaaatgtaattaaaggccaagtaacgtacaaagaagttgctgaagcatttaacatggattacgttgacccacgtacagcggttgaaaacgcttaa

SEQ ID NO: 55332 - protein, 373 aa, Alteromonadales bacterium TW-7
MIIGVPKEIKNHEYRVGMVPASVRELVNHGHQVVVETNAGMGIGFTDEDYTQAGADILATAADVFANADMIVKVKEPQAVERAMLREDQILFTYLHLAPDLPQTEDLVKSKAICIAYETVTDSRGGLPLLAPMSEVAGRMSIQAGAQALEKSNHGRGMLLGGVPGVEPAKVVVIGGGMVGRSAAQMAVGLGADVVVLDRNIDVLRALDAQFGNKVKAIYSTADALEKHVLEADLVIGGVLIPGAAAPKLVTAEHIKAMKPGAAIVDVAIDQGGCIATSKATTHADPTFIVDEVVHYCVANMPGAVPRTSTFALNNATLPFIINLANKGYKKALLDDANFLKGLNVIKGQVTYKEVAEAFNMDYVDPRTAVENA

SEQ ID NO: 55333 - DNA, 1131 bp, marine gamma proteobacterium HTCC2080
  CDS (1)..(1131): transl_table=11
atgattgttggcatccctaaagaaattaaaaaccacgaataccgcattggcatgacgcccgctggcgttcgtgagttggtcaatcgtggtcatcaggtattggtcgaaaccgagggtggtgtcggcgtgggtttcgacaacgccagctatggggcggttggggcccaaatagtcgcaagtcctgaagatattttagccgctgctgacatgatcattaaggttaaggaacctcaggccaatgagtgccgaatgctgcgttcggggcaggttttgttcacctacttgcacctcgccccagaccccgaccaagctcaactgttactggactcgggggtttcagccattgcctatgaaacggtgaccaacgctaagggtggattgcccttgttggcgccaatgagtgaggtggcaggccgtatgtcgattcaagccggcgcacaccaccttgaaaaagctcagggaggcaacggcatgctgctgggaggagtgcctggggttgagcccgcgagggttgtcgtgttgggtggcggcgttgttggtacccaagccgcgaaaatggccgctggtttgggcgctcaggtgactatatttgatcgttcgattgagcgcttacaacagctcgacgacctgtttcagggacgggctgtgggtctttactctacccaaaatgccgtggagcaatacgttcgagcggccgatctcgttattggtgcggtcctcattcccggagcatcagctcctaagctagtgactagagacgatgtggcggccatgcgccccggtgcggtgttggtcgatgtggccattgatcagggaggttgctttgaaacgtcacaagcgaccacccatcagtcgccaacgtatgtggttgatgacgtcgttcattactgtgttgcgaatatgccggggggcgtggcgcgcactgcgacgatggcattgaccaatgcgacactgccttttgcccttaagctcgctgataagggtttggccgcacttcaagatgatgatcacctgcgtcagggcctcaatgtgcacgccggtcacatcacccacgaggcggtggctgcagcgcttaacgccgactacctgcccgcagacaaggcgcttaacccgctcatgctgagtgcttga

SEQ ID NO: 55334 - protein, 376 aa, marine gamma proteobacterium HTCC2080
MIVGIPKEIKNHEYRIGMTPAGVRELVNRGHQVLVETEGGVGVGFDNASYGAVGAQIVASPEDILAAADMIIKVKEPQANECRMLRSGQVLFTYLHLAPDPDQAQLLLDSGVSAIAYETVTNAKGGLPLLAPMSEVAGRMSIQAGAHHLEKAQGGNGMLLGGVPGVEPARVVVLGGGVVGTQAAKMAAGLGAQVTIFDRSIERLQQLDDLFQGRAVGLYSTQNAVEQYVRAADLVIGAVLIPGASAPKLVTRDDVAAMRPGAVLVDVAIDQGGCFETSQATTHQSPTYVVDDVVHYCVANMPGGVARTATMALTNATLPFALKLADKGLAALQDDDHLRQGLNVHAGHITHEAVAAALNADYLPADKALNPLMLSA

SEQ ID NO: 55335 - DNA, 2113 bp, Phormidium lapideum
  CDS (623)..(1708): transl_table=11
gatcaagactggtattacaagctcatgctaggagacgtgcgatcgctgccccgcccaattcccagccacaagctgcggcgcattacgtttatccccaccacctgggcgcaactagaaacagcacaggcagtgggggatttactgaaaaaatgggcctagtgcccgattagctcatcaacaccaagcccattcaactcatcgaagtaccaacgcgagtactcagactaacttcagactaataaagacccaaccaggacagcaagccctgacccgtcaggtattcgatcgccagcgtaatcaaaaatcccaccattgccgcccgcccattcaggcgctcagcgtattcattaaagccaaacttcggttcctggagcttcggagtcacggttggttgtggcggagtttgagtcatggcttttacaattctttactcgtcctcttcattgtagagagtgcagcctattcgtcaatccaaaatcaaccccccagcctcaaactcctgctataaacggcgtaggtcgatccatccgggcgaagactctctcgcaaaagggatttaccttggaagtatctaagaatttaccgcctccgcaatgggtgggggagcttttgaggtgttggtatggaaatcggcgttcccaaagagattaagaatcaggaatttcgggtggggctgagtcccagcagcgtccgcacgctggtcgaagcaggacacacagtatttatcgaaacccaggcgggcatcggcgcaggatttgccgatcaggactatgttcaagctggcgctcaggtcgtgccttctgcaaaggatgcctggagccgagagatggtggtgaaggtcaaggaaccgctgcctgcggaatatgacctgatgcaaaaagatcaattgctgtttacctacctgcacctggcggcggcaagagaactgacggagcaactgatgcgggtggggctgacggcgatcgcctatgaaaccgtcgaactgcccaaccgcagcctgcccctgctgactcccatgagcatcatcgctgggcggctctcggttcagtttggggcccgctttttggaacgacagcagggtgggcgcggcgtgctgctaggcggcgtgccgggggtaaaaccaggcaaagtcgtgatcttgggcggcggtgtggtgggcaccgaagctgccaagatggccgtcgggctgggcgctcaggtgcaaatttttgacatcaatgtggagcggctgtcttacctggaaaccctgtttggctcgcgggtcgagctgctctacagcaattccgccgagatcgagactgcggtcgccgaggctgatttgctcatcggcgcagtgctggtaccgggccgacgtgcgcccatcctagtgcctgccagcctggtggagcaaatgcggacaggctcggtgatcgtagacgtggcggtggatcagggcggctgcgtagagacgctgcacccaacttcccacacgcagcccacctacgaggtgtttggcgtggttcactatggcgtgccgaatatgcccggagccgttccctggacagcgacgcaggcactcaacaacagcaccctgccctacgtggtgaagctggccaaccagggacttaaggcactggaaaccgatgacgcgctagccaaggggctaaacgtgcaggcccatcgcttggtgcatcccgcagtgcagcaggttttccccgatctggcgtaggttatatcgattttcgattttgggtttgcgattttggattgccggtcaaacgtctagagggcttccagcagtttcattcgccgctccgttcaggagaatcggcaggaagctggatggctagaggtagggaggcggttacgtgcccaggaactcgaacacggcaggttcaaacctgagagttcaaacctgaggattcaaacctgggcgcgatatcgccctagtgcagtgtcacggtttagttttagggtgatgcctcggctcgtagtcagcgctttagcgctgaagcgctgactaccaacctaagttctagctgtgacatagcactagtttctagaagcaggcttctaggggcggacggcttcgactgcgaccggagccacccattcgcggatggtatctgtgatc

SEQ ID NO: 55336 - protein, 361 aa, Phormidium lapideum
MEIGVPKEIKNQEFRVGLSPSSVRTLVEAGHTVFIETQAGIGAGFADQDYVQAGAQVVPSAKDAWSREMVVKVKEPLPAEYDLMQKDQLLFTYLHLAAARELTEQLMRVGLTAIAYETVELPNRSLPLLTPMSIIAGRLSVQFGARFLERQQGGRGVLLGGVPGVKPGKVVILGGGVVGTEAAKMAVGLGAQVQIFDINVERLSYLETLFGSRVELLYSNSAEIETAVAEADLLIGAVLVPGRRAPILVPASLVEQMRTGSVIVDVAVDQGGCVETLHPTSHTQPTYEVFGVVHYGVPNMPGAVPWTATQALNNSTLPYVVKLANQGLKALETDDALAKGLNVQAHRLVHPAVQQVFPDLA

SEQ ID NO: 55337 - DNA, 1585 bp, Vibrio proteolyticus
  CDS (191)..(1315): transl_table=11
gatccttgggcggctttttatagttgtctgccattttttattccaccttattacttccttgcaaaaaaatatactacaactttttaatattcagtatcaaattttactgactcacatctatactagactttaattcgacagaattaccctacacatagtcaatacaaccacaatacaatgaggagtcaggatgatcattggcgtacctaaggaaatcaaaaaccacgaataccgcgtcggtatgattccagcaagtgtccgtgagctaatctcacatggtcaccaagtttttgttgaaaccaatgccggcgcaggcatcggtttttcagacgatgattacatcgctgtaggcgcatccattcttcctactgctgctgaggttttcgctcaagcagatatgattgttaaggtcaaagaacctcaagctgtcgaacgagctatgctcaaagaagggcaaattttatttacttatttgcacctggcaccagattttccacaaactgaagacctgatcaagagcaaagctgtctgcatagcctatgagactgtaacagataatatgggtcgcttgccactattagcaccaatgtctgaagttgcgggtcgtatgtctatccaggcaggcgcacaaactctcgagaaatctcacggcggccgtggcctgctgctgggtggcgtaccaggtgttgaaccagcgaaagttgtgatcgtcggcggcggcgtcgtgggtgctaacgcagctcgtatggcagttggcatgcgcgccgacgttactatcttagaccgtaacatcgatacactgcgtaagctggatgaagagtttcagggccgtgccaaagtggtttactcaactgaagatgcgattgaaaaacacgttctggcggccgatctggttatcggtgcagttctgatcccaggtgccgcagctcctaaactggtgacaaaagagcacatcgctaaaatgaaaccaggcgcggctgttgtcgacgttgctatcgaccagggcggttgttttgaaacttctcacgcgacaacgcacgcagatccaacttacatcgttgatgatgtggttcactactgtgtagcaaacatgccaggggctgttgcccgcacttccacttttgcactgaacaacgcaaccctgccatatatcgttaaactggcaaacaaaggataccgtgaagctctgctggctgaccacggcttcctagaaggcctgaatgttattcacggtaaagtgacgtgcaaagaagtcgcagaagcgtttaatctggaatacgtacagccggaaaccgcgatcgccatgttcaactaagcactgctgaacgaataaagaaagctctcaccttggtgagagcttttttgtttatcagaaccagcgctctaacgcagttttatccaactgccggaacgcccggttgagaatcgcagccaactctttatagcgtggacgagatttgaccggttccaatgcgcagccggtatcaacaattttctggtggatttcacgataccaaccagccaacgctggaggtaactgggtattggctcgattccccagccaccatataccttgtactggatc

SEQ ID NO: 55338 - protein, 374 aa, Vibrio proteolyticus
MIIGVPKEIKNHEYRVGMIPASVRELISHGHQVFVETNAGAGIGFSDDDYIAVGASILPTAAEVFAQADMIVKVKEPQAVERAMLKEGQILFTYLHLAPDFPQTEDLIKSKAVCIAYETVTDNMGRLPLLAPMSEVAGRMSIQAGAQTLEKSHGGRGLLLGGVPGVEPAKVVIVGGGVVGANAARMAVGMRADVTILDRNIDTLRKLDEEFQGRAKVVYSTEDAIEKHVLAADLVIGAVLIPGAAAPKLVTKEHIAKMKPGAAVVDVAIDQGGCFETSHATTHADPTYIVDDVVHYCVANMPGAVARTSTFALNNATLPYIVKLANKGYREALLADHGFLEGLNVIHGKVTCKEVAEAFNLEYVQPETAIAMFN

SEQ ID NO: 55339 - DNA, 1122 bp, Rhodococcus opacus
  CDS (1)..(1122): transl_table=11
atgaggatcggtatccccaaggaagtcaagaaccacgagtaccgggtggcggccactcccgccggtgtccacgaaatggtcgcccacgggcacgacgtgttcgtggaacgcggtgcgggggagggctcgtcgatcggtgacgacgcctacggtgccgccggcgcgaagatcctcgactccgccgacgcggtgtggcagagcgcggaactgctgctcaaggtcaaggagcccatcgccgaggaataccaccggatgcgttcggacctcacgttgttcacctacctgcacctcgctgcgggtgaagagtgcacccgggcactgctcgccgccggcaccaattccgttgcgtacgagaccgttcagcttcccgacggttcgctgcccctgctgttcccgatgagtgaggtcgccggccggctcgcaccgctcgtcggtgcgcaggccctcatgcgaccggagggtggccgaggcgtactgatcggcggcgtgtccggtgtgtccccggctcgcgtcgtcgtgatcggtgcaggcgtatcgggcatgaacgccgtcgccgtcgccgcaggcacctgggccgacgtcgtcctgttcgacaagaacgtcgacaagctgcgcgccgccgaccggatgtaccagggccggatccgcaccctcgccgcgaactcctactcgatcgagcaggaagtcatgcaggccgacctcgtcatcggtgccgtgctcgtcccgggcgccaaggcaccgaagatcatctcgaactcgctggtctcacggatgaagccgggcagcgtcctcgtcgacatcgcgatcgaccagggcggttgcttcgaggattcgcgtcccaccacccacgcggagcccacgttcaaggttcacgactcggtgttctactgcgtggcgaacatgccgggagcggtgccccacacgtcgacgtacgcactcaccaacgtgaccttgccgtacaccctgcagatcgccgagaagggcctcgcccgcgcggccagggagaatgccgcactccgcgccggtgtcagcaccgtcgccgggcgcctgacgaacgatgccgtcggtgaggcactcgggatcgagtcggtcagcgtcgacgacgcgctcaacctggtttga

SEQ ID NO: 55340 - protein, 373 aa, Rhodococcus opacus
MRIGIPKEVKNHEYRVAATPAGVHEMVAHGHDVFVERGAGEGSSIGDDAYGAAGAKILDSADAVWQSAELLLKVKEPIAEEYHRMRSDLTLFTYLHLAAGEECTRALLAAGTNSVAYETVQLPDGSLPLLFPMSEVAGRLAPLVGAQALMRPEGGRGVLIGGVSGVSPARVVVIGAGVSGMNAVAVAAGTWADVVLFDKNVDKLRAADRMYQGRIRTLAANSYSIEQEVMQADLVIGAVLVPGAKAPKIISNSLVSRMKPGSVLVDIAIDQGGCFEDSRPTTHAEPTFKVHDSVFYCVANMPGAVPHTSTYALTNVTLPYTLQIAEKGLARAARENAALRAGVSTVAGRLTNDAVGEALGIESVSVDDALNLV

SEQ ID NO: 55341 - DNA, 1404 bp, Thermus caldophilus
  CDS (145)..(1254): transl_table=11
gcgggtgctggaggggatgcccctccccatcccggccatggggtacgtgaccctggtggactccaagcggcgcctcttggccatcgccgagggggacggcttcaagcttaaaatacggcgcgtgtttgcgaaggaggcgtagccatggtgattggcgtgccgaaggagatcaagaccttggagaaccgggtggccctcacgcccggcggggtggagagcctggtcaggcgcggccacaccgtgctggtggagcggggggccggggagggctcggggctttccgacgcggagtacgcccgggccggggccgagctcgtgggccgggaggaggcctggggtgcggagatggtggtgaaggtgaaggagcccctacccgaggagtacggcttcctgcgggagggcctcatcctcttcacctaccttcacctggccgcggaccgcggcctcaccgaggccatgctccgtagcggggtcacgggcatcgcctacgagaccgtccagcttcccgacggcaccctccccctcctcgtccccatgagcgaggtggcggggcggatggccccccaggtgggggcccagtttctggagaagcccaaggggggccggggggtcctcctcgggggggtgccgggggtggccccggccagcgtggtgatcctcgggggcgggaccgtgggcaccaacacggccaagatcgccctggggatgggggcccaggtgaccattctggacgtgaaccacaagcgcctccagtacctggacgacgtcttcggcgggcgggtggtcaccctcaccgccaccgaggccaacatcaaaaagagcgtccagcacgcggacctcctcatcggggccgtcctcgtccccggggccaaggcccccaagctcgtcacccgggacatgctctctctgatgaaggagggagcggtgatcgtggacgtggccgtggaccagggggggtgcgtggagaccatccggcccaccacccacgccgagcccacctacgtggtggacggggtggtccactacggggtggccaacatgcccggggcggtgcccaggaccagcaccttcgccctcaccaaccagaccctgccctacgtgctgaagctcgcggagaaggggctggacgctcttctggaggacgcggcccttctcaaggggctcaacacccacaaaggccgcctcacccaccccggggtggccgaggccttcggcctgccctacacgcctcccgaggaggccttgagggggtgagggtgccgggacgggtggtcctcacggaggcggccttggcgagcctcctcgccctggtggcccacgaggtcccgggggtggtgggcatggcccccgcgggcctcaaggaccaggtggggcgcatcctcgggcggcaggaggcgggggagg

SEQ ID NO: 55342 - protein, 369 aa, Thermus caldophilus
MVIGVPKEIKTLENRVALTPGGVESLVRRGHTVLVERGAGEGSGLSDAEYARAGAELVGREEAWGAEMVVKVKEPLPEEYGFLREGLILFTYLHLAADRGLTEAMLRSGVTGIAYETVQLPDGTLPLLVPMSEVAGRMAPQVGAQFLEKPKGGRGVLLGGVPGVAPASVVILGGGTVGTNTAKIALGMGAQVTILDVNHKRLQYLDDVFGGRVVTLTATEANIKKSVQHADLLIGAVLVPGAKAPKLVTRDMLSLMKEGAVIVDVAVDQGGCVETIRPTTHAEPTYVVDGVVHYGVANMPGAVPRTSTFALTNQTLPYVLKLAEKGLDALLEDAALLKGLNTHKGRLTHPGVAEAFGLPYTPPEEALRG

SEQ ID NO: 55343 - DNA, 1310 bp, Bilophila wadsworthia
  CDS (110)..(1243): transl_table=11
atgaactttgggaaaaatggaacgctagttgctataaagaaggcatggagtacaaccccaccctgaatttcaaaacgtacttcaacatactgctctcggaggcactcaaatgcgtgtaggtatccccaccgaaatcaaagttcaggaattccgtgtcggcatcactcccgctggcgttcatgctcttaaagaagccggtcacaccgtcctcgtgcagaagggcgctggcctcggcagcatgatcaccgacgaagagtatgtcgccgccggcgctcagatggttgctaccgccaaggaatgctgggactgcgacatggtcgtgaaagtgaaggaacccctggctcctgaatacgacctcttccatgaaggcctgatcctctacacctacctgcacctcgctccggaaccggccctgaccaaggctcttctcgaaaagaaggtcatcggcatcgcttacgaaaccgtgcagttcgacaacggcttcctgcccctgctcgctcccatgtctgaagtcgccggccgcatggccacccaggtgggcgctcagatgctgaccaagatcgaaggcggcatgggcctcctgatgggcggcaccgctggcgtgcaggccgctcacgtcgttatcctcggcgccggtaccgtgggtctctccgccgccaaggttgccatgggcatgggcgctcgcgtgaccatccttgacagcaacctcttccgcctgcgccagatcgacgacctcttcggcggccgcatccagaccctggcctccaatgccttcaacatcgccgccgccaccaaggacgccgacctcctcgtgggttccgtcctcatccccggcgctctgaccccgaaactggtcaccgaagccatggtgaagaccatgaagcccggttccgccatcgttgacgtcgccatcgaccagggcggctgcatcgaacccaccgccaagcacggcgctacctatcacgacaagccgaccttcaagtaccccgtcaacggcggcgaagtggtctgctactccgtgggcaacatgcccggcgccgtggcccgtacctctaccttcaccctgaccaacgccaccatgccttacatggtcgacctggccaacaagggctggaagaaggcttgccaggacgacaaggctctggcccgcggcatcaacacctacgacggcaaagtgtacttcaagggcgtttccgatgctctcggttacgaactgcactgcacctgcgacatcctgaagtaagacgtgattcatgactggaccagtctcatgtccgcatgagactggccagttttccggtcaaagtcaa

SEQ ID NO: 55344 - protein, 377 aa, Bilophila wadsworthia
MRVGIPTEIKVQEFRVGITPAGVHALKEAGHTVLVQKGAGLGSMITDEEYVAAGAQMVATAKECWDCDMVVKVKEPLAPEYDLFHEGLILYTYLHLAPEPALTKALLEKKVIGIAYETVQFDNGFLPLLAPMSEVAGRMATQVGAQMLTKIEGGMGLLMGGTAGVQAAHVVILGAGTVGLSAAKVAMGMGARVTILDSNLFRLRQIDDLFGGRIQTLASNAFNIAAATKDADLLVGSVLIPGALTPKLVTEAMVKTMKPGSAIVDVAIDQGGCIEPTAKHGATYHDKPTFKYPVNGGEVVCYSVGNMPGAVARTSTFTLTNATMPYMVDLANKGWKKACQDDKALARGINTYDGKVYFKGVSDALGYELHCTCDILK

SEQ ID NO: 55345 - DNA, 1134 bp, Rhizobium leguminosarum
  CDS (1)..(1134): transl_table=11
atgagaggaacgcgcatgcgtgtcggttgcccgaaggaaatcaagaatcatgaatatcgcgtcggcctgacgccggcttcggtgcgcgaatatgttgcccacggccacgaggtctgggtggagaccaaggcgggcgtcggtatcggcgctgatgatgccgcctatgccgcggctggcgccaagatcgccgcctccgccaaggatatcttcgaaaagtgcgacatgatcgtcaaggtgaaggagccgcagcctgccgaatgggcgcagctccgcgacggtcagcttctctacacctatctgcatctggcgccggatcccgaacagaccaaaggcctcatcgcctccggcgtcaccgcgatcgcctatgagacggtgaccgacgagcgcggcggcctgccgttgctggcgccgatgtcggaggtcgccggtcgcctgtcgatccaggcaggagcgaccgccctgcagaaggccaatggcggcctcggcgtcctcctcggcggcgtgcccggcgtgctgccggccaaggtcgcagtcatcggcggcggcgtcgtcggcctgcatgcggccaggatggccgccggccttggcgccgatgtcagcatccttgacaagtcgctgccgcgtctgcgccagctcgacgatatctttgcaggccgcatccacacccgttattccagcatccaggcgctggaggaggaagtcttctcggccgatctcattatcggcgccgtgctgatcccgggcgctgccgccccgaagctcgtcacccgcgagatgctgtccggcatgaagaagggctccgtcatcgtcgacgttgccatcgaccagggcggctgcttcgagacctcgcatgcgacgacccattccgatccgacctatgaagtcgatggcgtcgtgcattattgcgttgccaacatgccgggcgccgtgccggtcacctcggcacacgcgctgaacaatgccacattggttcatggcctggcgcttgccgatcgcggcctgcgcgccatcgccgaagacaggcatctgaggaatggcctcaacgtccacaagggccgcatcaccagcaagccggtcgccgaagcgctgggctacgaggccttcgcgccggaaagcgtgctgaacgtagcgtaa

SEQ ID NO: 55346 - protein, 377 aa, Rhizobium leguminosarum
MRGTRMRVGCPKEIKNHEYRVGLTPASVREYVAHGHEVWVETKAGVGIGADDAAYAAAGAKIAASAKDIFEKCDMIVKVKEPQPAEWAQLRDGQLLYTYLHLAPDPEQTKGLIASGVTAIAYETVTDERGGLPLLAPMSEVAGRLSIQAGATALQKANGGLGVLLGGVPGVLPAKVAVIGGGVVGLHAARMAAGLGADVSILDKSLPRLRQLDDIFAGRIHTRYSSIQALEEEVFSADLIIGAVLIPGAAAPKLVTREMLSGMKKGSVIVDVAIDQGGCFETSHATTHSDPTYEVDGVVHYCVANMPGAVPVTSAHALNNATLVHGLALADRGLRAIAEDRHLRNGLNVHKGRITSKPVAEALGYEAFAPESVLNVA

SEQ ID NO: 55347 - DNA, 1119 bp, Staphylococcus aureus
  CDS (1)..(1119): transl_table=11
atgttagttgcagtagtcaaagaattaaaacaaggtgaaggacgtgtagcttgcacacccgaaaatgtgcgtaagttaacggatgcaggacataaagtaattgttgaaaaaaatgctggcattggttcaggattttctaacgatatgtatgaaaaagaaggcgctaagatcgtaactcacgaacaagcatgggaagctgatcttgttatcaaagtaaaagaacctcatgaaagcgaatatcaatatttcaaaaagaatcaaattatctggggatttttacatctagcatcttcaaaagaaatagtagaaaaaatgcaagaagttggtgtaactgcgattagtggtgaaaccattataaaaaatggaaaagcagaattattagcgccaatgagtgctatagcaggtcaacgctcagcaattatgggagcttactactctgaagcacaacatggtggtcaaggtactttagtgactggtgtacatgaaaatgtggatatacctggtagtacatatgtgattttcggtggtggcgtagcagcaacaaatgcagcaaatgttgccttgggactaaatgctaaagtaatcattatcgagttaaacgatgaccgcattaaatatcttgaagatatgtatgcagaaaaagatgtcacagtagtcaaatcaacaccagaaaatttagcagaacaaattaagaaagcagatgtatttatttctacaattttaattccaggtgcgaaaccgccaaaattggttactcgtgagatggttaaatcaatgaaaaaaggttcagtattaatcgatatagctattgaccaaggtggaactattgaaacaattagaccaactacaatttctgatccagtgtatgaagaagaaggtgtgattcattatggtgtaccaaatcaaccaggagcagtcccaagaacttcaacaatggcattagcacaaggaaatattgattatatattagaaatttgtgacaaaggcttagaacaagcaattaaagataatgaagccttaagtactggtgtaaacatttaccaaggacaagtgacaaatcaaggattagcttcatcacatgacctagattataaagaaatattaaatgttatcgaatag

SEQ ID NO: 55348 - protein, 372 aa, Staphylococcus aureus
MLVAVVKELKQGEGRVACTPENVRKLTDAGHKVIVEKNAGIGSGFSNDMYEKEGAKIVTHEQAWEADLVIKVKEPHESEYQYFKKNQIIWGFLHLASSKEIVEKMQEVGVTAISGETIIKNGKAELLAPMSAIAGQRSAIMGAYYSEAQHGGQGTLVTGVHENVDIPGSTYVIFGGGVAATNAANVALGLNAKVIIIELNDDRIKYLEDMYAEKDVTVVKSTPENLAEQIKKADVFISTILIPGAKPPKLVTREMVKSMKKGSVLIDIAIDQGGTIETIRPTTISDPVYEEEGVIHYGVPNQPGAVPRTSTMALAQGNIDYILEICDKGLEQAIKDNEALSTGVNIYQGQVTNQGLASSHDLDYKEILNVIE

SEQ ID NO: 55349 - DNA, 1119 bp, Staphylococcus aureus
  CDS (1)..(1119): transl_table=11
atgttagttgcagtagtcaaagaattaaaacaaggtgaaggacgtgtagcttgcacacccgaaaatgtgcgtaagttaacggatgcaggacataaagtaattgttgaaaaaaatgctggcattggttcaggattttctaacgatatgtatgaaaaagaaggcgctaagatcgtaactcacgaacaagcatgggaagctgatcttgttatcaaagtaaaagaacctcatgaaagcgaatatcaatatttcaaaaagaatcaaattatctggggatttttacatctagcatcttcaaaagaaatagtagaaaaaatgcaagaagttggtgtaactgcgattagtggtgaaaccattataaaaaatggaaaagcagaattattagcgccaatgagtgctatagcaggtcaacgctcagcaattatgggagcttactactctgaagcacaacatggtggtcaaggtactttagtgactggtgtacatgaaaatgtggatatacctggtagtacatatgtgattttcggtggtggcgtagcagcaacaaatgcagcaaatgttgccttgggactaaatgctaaagtaatcattatcgagttaaacgatgaccgcattaaatatcttgaagatatgtatgcagaaaaagatgtcacagtagtcaaatcaacaccagaaaatttagcagaacaaattaaaaaagcagatgtatttatttctacaattttaattcctggtgcgaaaccgccaaaattggttactcgtgagatggttaaatcaatgaaaaaaggttcagtattaatcgatatagctattgaccaaggtggaactattgaaacaattagaccaactacaatttctgatccggtgtatgaagaagaaggtgtgattcattatggtgtaccaaatcaaccaggagcagtcccaagaacttcaacaatggcattagcacaaggaaatattgattatatattagaaatttgtgacaaaggcctagaacaagcaattaaagataatgaagccttaagtactggagtaaacatttaccaaggacaagtgacaaaccaaggattagctacatcacatgacctagattataaagaaatattaaatgttatcgaatag

SEQ ID NO: 55350 - protein, 372 aa, Staphylococcus aureus
MLVAVVKELKQGEGRVACTPENVRKLTDAGHKVIVEKNAGIGSGFSNDMYEKEGAKIVTHEQAWEADLVIKVKEPHESEYQYFKKNQIIWGFLHLASSKEIVEKMQEVGVTAISGETIIKNGKAELLAPMSAIAGQRSAIMGAYYSEAQHGGQGTLVTGVHENVDIPGSTYVIFGGGVAATNAANVALGLNAKVIIIELNDDRIKYLEDMYAEKDVTVVKSTPENLAEQIKKADVFISTILIPGAKPPKLVTREMVKSMKKGSVLIDIAIDQGGTIETIRPTTISDPVYEEEGVIHYGVPNQPGAVPRTSTMALAQGNIDYILEICDKGLEQAIKDNEALSTGVNIYQGQVTNQGLATSHDLDYKEILNVIE

SEQ ID NO: 55351 - DNA, 1119 bp, Staphylococcus aureus
  CDS (1)..(1119): transl_table=11
atgttagttgcagtagtcaaagaattaaaacaaggtgaaggacgtgtagcttgcacacccgaaaatgtgcgtaagttaacggatgcaggacataaagtaattgttgaaaaaaatgctggcattggttcaggattttctaacgatatgtatgaaaaagaaggcgctaagatcgtaactcatgaacaagcatgggaagctgatcttgttatcaaagtaaaagaacctcatgaaagcgaatatcaatatttcaaaaagaatcaaattatctggggatttttacatttagcatcttcaaaagaaatagtagaaaaaatgcaagaagttggtgtaactgcgattagtggtgaaaccattataaaaaatggaaaagcagaattattagcgccaatgagtgctatagcaggtcaacgctcagcaattatgggagcttactactctgaagcacaacatggtggtcaaggtactttagtgactggtgtacatgaaaatgtggatatacctggtagtacatatgtgattttcggtggtggagtagcagcaacaaatgcagcaaatgttgccttgggactaaatgctaaagtaatcattatcgagttaaacgatgatcgcattaaatatttacaagatatgtatgcagaaaaagatgtcacagtagtcaaatcaacaccagaaaatttagcagaacaaataaaaaaagcagatgtatttatttctacaattttaattcctggtgcgaaaccgccaaaattggttactcgtgagatggttaaatcaatgaaaaaaggttcagtattaatcgatatagctattgaccaaggtggaactattgaaacaattagaccaactacaatttctgatccagtgtatgaagaagaaggtgtgattcattatggtgtaccaaaccaaccaggagcagtcccaagaacttcaacaatggcattagcacaaggaaatattgattatatattagaaatttgtgacaaaggcttagaacaagcaattaaagataatgaagccttaagtactggtgtaaacatttaccaaggacaagtgacaaatcaaggattagcttcatcacatgacctagattataaagaaatattaaatgttatcgaatag

SEQ ID NO: 55352 - protein, 372 aa, Staphylococcus aureus
MLVAVVKELKQGEGRVACTPENVRKLTDAGHKVIVEKNAGIGSGFSNDMYEKEGAKIVTHEQAWEADLVIKVKEPHESEYQYFKKNQIIWGFLHLASSKEIVEKMQEVGVTAISGETIIKNGKAELLAPMSAIAGQRSAIMGAYYSEAQHGGQGTLVTGVHENVDIPGSTYVIFGGGVAATNAANVALGLNAKVIIIELNDDRIKYLQDMYAEKDVTVVKSTPENLAEQIKKADVFISTILIPGAKPPKLVTREMVKSMKKGSVLIDIAIDQGGTIETIRPTTISDPVYEEEGVIHYGVPNQPGAVPRTSTMALAQGNIDYILEICDKGLEQAIKDNEALSTGVNIYQGQVTNQGLASSHDLDYKEILNVIE

SEQ ID NO: 55353 - DNA, 1119 bp, Staphylococcus aureus
  CDS (1)..(1119): transl_table=11
atgaaaattggtataccaagggagattaaaaataatgaaaatcgtgttggtttatcaccgagtggtgtgcacgctttagtagaaagtgggcatactgttttagtggaaacaaatgcgggttcaggatcgttctttgaagatgtagattacaaagaagcaggtgctgagattgttgctgaacaagcaaaagtttgggatgtggatatggttattaaagttaaagaaccacttgaatctgaatatacatattttaaagaagggcttgtattattcacttatcttcatttagcaaatgaagaaaaattaacacaagctttgatagatagaaaagtaattagtattgcatatgagactgtgcagttaccagaccgatcttcaccattgttatcaccaatgagtgaggtagcaggaagaatgtcagctcaagttggcgcagagttcctacaaaaacttaatggtggtatgggaattctactaggtggtgtcccaggagtacctaagggtaaagtaactattatcggtggtggtcaagcaggaacaaatgcagctaaaattgcactaggactaggtgcagatgttacgattttagatgttaatccaaagcgtttacaacaattagatgatttattcggtggacgtgtacatacaattatgtcaaatccgttgaatattgagttgtatgttaaacaaagtgatttagtaataggtgcagttttaattccaggtgctaaagcgccaagacttgtaacagaagacatgattaaacaaatgaaaaatgggtcagttattattgacattgctattgatcaaggcggtatttttgaaacaactgataaaattacgacacatgatgatcctacatatattaagcatggtgtggttcattatgcagttgcaaatatgccaggtgcagtaccgcgtacttcgacgttagctttaaataatgctacgctaccttatgcgctcatgctagctaataaagggtatagagaagcatttaaatcaaatcaaccattatcattaggtttaaatacttacaaaggtcacgtaaccaataaaggcgttgcagaggcatttgaaatggaatataaatctgtagaagaagcattacaattataa

SEQ ID NO: 55354 - protein, 372 aa, Staphylococcus aureus
MKIGIPREIKNNENRVGLSPSGVHALVESGHTVLVETNAGSGSFFEDVDYKEAGAEIVAEQAKVWDVDMVIKVKEPLESEYTYFKEGLVLFTYLHLANEEKLTQALIDRKVISIAYETVQLPDRSSPLLSPMSEVAGRMSAQVGAEFLQKLNGGMGILLGGVPGVPKGKVTIIGGGQAGTNAAKIALGLGADVTILDVNPKRLQQLDDLFGGRVHTIMSNPLNIELYVKQSDLVIGAVLIPGAKAPRLVTEDMIKQMKNGSVIIDIAIDQGGIFETTDKITTHDDPTYIKHGVVHYAVANMPGAVPRTSTLALNNATLPYALMLANKGYREAFKSNQPLSLGLNTYKGHVTNKGVAEAFEMEYKSVEEALQL

SEQ ID NO: 55355 - DNA, 1119 bp, Staphylococcus aureus
  CDS (1)..(1119): transl_table=11
atgaaaattggtataccaagggagattaaaaataatgaaaatcgtgttggtttatcaccgagtggtgtgcacgctttagtagaaagtgggcatactgttttagtggaaacaaatgcgggttcaggatcgttctttgaagatgtagattacaaagaagcaggtgctgagattgttgctgaacaagcaaaagtttgggatgtggatatggttattaaagttaaagaaccacttgaatctgaatatccatattttaaagaagggcttgtattattcacttatcttcatttagcaaatgaagaaaaattaacacaagctttgatagatagaaaagtaattagtattgcatatgagactgtgcagttaccagaccgatcttcaccattgttatcaccaatgagtgaggtagcaggaagaatgtcagctcaagttggcgcagagttcctacaaaaacttaatggtggtatgggaattctactaggtggtgtcccaggagtacctaagggtaaagtaactattatcggtggtggtcaagcaggaacaaatgcagctaaaattgcactaggactaggtgcagatgttacgattttagatgttaatccaaagcgtttacaacaattagatgatttattcggtggacgtgtacatacaattatgtcaaatccgttgaatattgagttgtatgttaaacaaagtgatttagtaataggtgcagttttaattccaggtgctaaagcgccaagacttgtaacagaagacatgattaaacaaatgaaaaatgggtcagttattattgacattgctattgatcaaggcggtatttttgaaacaactgataaaattacgacacatgatgatcctacatatattaagcatggtgtggttcattatgcagttgcaaatatgccaggtgcagtaccgcgtacttcgacgttagctttaaataatgctacgctaccttatgcgctcatgctagctaataaagggtatagagaagcatttaaatcaaatcaaccattatcattaggtttaaatacttacaaaggtcacgtaaccaataaaggcgttgcagaggcatttgaaatggaatataaatctgtagaagaagcattacaattataa

SEQ ID NO: 55356 - protein, 372 aa, Staphylococcus aureus
MKIGIPREIKNNENRVGLSPSGVHALVESGHTVLVETNAGSGSFFEDVDYKEAGAEIVAEQAKVWDVDMVIKVKEPLESEYPYFKEGLVLFTYLHLANEEKLTQALIDRKVISIAYETVQLPDRSSPLLSPMSEVAGRMSAQVGAEFLQKLNGGMGILLGGVPGVPKGKVTIIGGGQAGTNAAKIALGLGADVTILDVNPKRLQQLDDLFGGRVHTIMSNPLNIELYVKQSDLVIGAVLIPGAKAPRLVTEDMIKQMKNGSVIIDIAIDQGGIFETTDKITTHDDPTYIKHGVVHYAVANMPGAVPRTSTLALNNATLPYALMLANKGYREAFKSNQPLSLGLNTYKGHVTNKGVAEAFEMEYKSVEEALQL

SEQ ID NO: 55357 - DNA, 1119 bp, Staphylococcus aureus
  CDS (1)..(1119): transl_table=11
atgaaaattggtataccaagggagattaaaaataatgaaaatcgtgttggtttatcaccaagtggtgtgcacgctttagtagaaagtggacatactgttttagtggaaacaaatgcgggttcaggatcgttctttgaagatgtagattacaaagaagcaggtgctgagattgttgctgaacaagcaaaagtttgggatgtggatatggttattaaagttaaagaacctcttgaatcagaatatccatattttaaagaaggactagtattatttacttatcttcatctagcgaatgaagaaaaattaacacaagctttgatagatagaaaagtaattagtattgcatatgagactgtgcagttaccagaccgatctttaccattattatcaccaatgagtgaggtagcaggaagaatgtcagctcaagttggcgcagagttcctacaaaaacttaatggtggtatgggaattctactaggtggcgttccaggagtacctaaaggtaaagtaactattatcggtggtggtcaagcaggaacaaatgcagctaaaattgcactaggactaggtgcagatgttacgattttagatgttaatccaaagcgtttacaacaattagatgatttattcggtggacgtgtacatacaattatgtcaaatccgttgaatattgagttgtatgttaaacaaagtgatttagtaataggtgcagttttaattccaggtgctaaagcgccaagacttgtaacagaagacatgattaaacaaatgaaaaatgggtcagttattattgacattgctattgatcaaggcggtatttttgaaacaactgataaaattacgacacatgatgatcctacatatatcaaacatggtgtggttcattatgcagttgcaaatatgccgggtgcagtaccgcgtacttcgacgttagctttaaataatgctacgctaccttatgcgctcatgctagctaataaagggtatagagaagcatttaaatcaaatcaaccattatcattaggtttaaatacttacaaaggtcacgtaaccaataaaggcgttgcagaggcatttgaaatggaatataaatctgtagaagaagcattacacttataa

SEQ ID NO: 55358 - protein, 372 aa, Staphylococcus aureus
MKIGIPREIKNNENRVGLSPSGVHALVESGHTVLVETNAGSGSFFEDVDYKEAGAEIVAEQAKVWDVDMVIKVKEPLESEYPYFKEGLVLFTYLHLANEEKLTQALIDRKVISIAYETVQLPDRSLPLLSPMSEVAGRMSAQVGAEFLQKLNGGMGILLGGVPGVPKGKVTIIGGGQAGTNAAKIALGLGADVTILDVNPKRLQQLDDLFGGRVHTIMSNPLNIELYVKQSDLVIGAVLIPGAKAPRLVTEDMIKQMKNGSVIIDIAIDQGGIFETTDKITTHDDPTYIKHGVVHYAVANMPGAVPRTSTLALNNATLPYALMLANKGYREAFKSNQPLSLGLNTYKGHVTNKGVAEAFEMEYKSVEEALHL

SEQ ID NO: 55359 - DNA, 1776 bp, Bacillus sphaericus
  CDS (491)..(1609): transl_table=11
aagcttgtgcacgctctgcaatggaacggtcatatgcttcaatagcagcgaatgaacgtgtatcaataacatttactaggtttaaaacagcaccttcgttacgtttagcaacgtcgattgatttacgaaaagcgtactctgcctctttagaaccctctactgcaactacaatgctttataatgattagccatttgtattacctccctatttgtataatgatattatatcaaatgattttctaaaggaaatactttccgaagaaaatttgtgaaaaagtgaaggcatttactgtacaatgactcgtatatctttaatagtcttactatttgatattttataaatattgtaaatttaattagtatttgctttaattaaagcattttttgcacatgtttggtaagatggaaatgcaaggggtgcatcatttacgatgaaacgtattttgatgaaaattgcttagttcataggttatgaaaggggattggaaatatgaagattggtattccaaaggaaattaaaaacaacgaaaatcgcgtagcaatgacaccagcaggagttgtatccttaacgcatgctgggcacgagaggttagctattgaaacaggaggtggtatcggttcaagttttacagatgcagagtacgtagcagcaggtgcagcatatcgttgcatcggcaaagaagcgtgggctcaagaaatgattttaaaagtaaaagaacccgtagcatcggaatacgattacttttatgagggacaaatcttatttacctacttgcacttagcgcccagagctgaattaacgcaggcattaatagataaaaaagttgtaggtattgcctatgaaacggttcaacttgcaaatggttcactacctttattaacaccaatgagtgaagtagctggtaaaatggcaacacaaattggtgcgcaatatttagagaaaaatcacggtggtaaagggattttactaggcggtgtatcaggtgtacacgcgcgtaaagtaacagtaattggtggcggaatcgcgggaacaaacgctgcgaaaattgcagttggtatgggagcagacgtaacagttattgatttaagtccagaacgtctacgtcaattagaagatatgtttggtcgcgatgttcaaacattaatgtctaacccgtataatattgcagaatctgtgaaacactcagatttagttgtcggtgctgttctaattcctggtgcaaaggctccaaagttagtttcggaagaaatgattcaatcgatgcaaccaggttctgttgttgtggatattgcgattgaccaaggtggaatttttgcgacatctgatcgtgttacaacacatgatgatccaacgtatgttaaacatggggtagtccattatgctgttgcaaatatgccaggggctgtgccacgtacttcaacgattgctttaacaaataatacaattccttatgcgttgcaaattgccaataaaggctataagcaagcatgtattgacaatcctgcattgaaaaaaggtgtgaatgcattagaggggcatattacttataaagcggtagcagaagcacaaggcttgccatatgtgaatgtggatgaattaatccaataataatgaataactaaaattaatatatcctgtggttgctattcgttacgtatgaatacatctgagccatgaaatgccaaaagaaggacagaaatatccatttatggtggattagcaattcttccttttacaataaataaaaatattgaaagctagcattagttgttgac

SEQ ID NO: 55360 - protein, 372 aa, Bacillus sphaericus
MKIGIPKEIKNNENRVAMTPAGVVSLTHAGHERLAIETGGGIGSSFTDAEYVAAGAAYRCIGKEAWAQEMILKVKEPVASEYDYFYEGQILFTYLHLAPRAELTQALIDKKVVGIAYETVQLANGSLPLLTPMSEVAGKMATQIGAQYLEKNHGGKGILLGGVSGVHARKVTVIGGGIAGTNAAKIAVGMGADVTVIDLSPERLRQLEDMFGRDVQTLMSNPYNIAESVKHSDLVVGAVLIPGAKAPKLVSEEMIQSMQPGSVVVDIAIDQGGIFATSDRVTTHDDPTYVKHGVVHYAVANMPGAVPRTSTIALTNNTIPYALQIANKGYKQACIDNPALKKGVNALEGHITYKAVAEAQGLPYVNVDELIQ

SEQ ID NO: 55361 - DNA, 1736 bp, Bacillus stearothermophilus
  CDS (515)..(1633): transl_table=11
gagctcggtctctccatttagctgaggcggacgatcccgattatgcgaaaacaacggtttggccggcatcattacgtacggatttcaaggagcggcggatcccgggctgggtgcaccgttcggcgcttcggcgcggcgaaagtcgggccttgtatcgcctgacgaaaacgatcgccctagaagaggcaatatggcattaccgccaatactggtgtgcccaggaatattctcggcgccatgaaagaggcggcgggatcagcgggcgcggcgcagaagggatcggaaacgcggtcggacgcccggggactggtgaagatatcgcccgcgtgatcgctttttatgcgaggacgactcggatttcatcaccggcgccgtcattgacgtcaccggcggaggaacgtcatttaccgccaccttttccgttgagaccagcgtctcctcctttttcgtttgcttttgcgcgaaacggagcacaataaaaggaagaagcgggaaggaaaaaggaggaaatgtaatgaagatcggcattccaaaagaaatcaaaaacaatgaaaaccgcgtcgccatcactccggcaggcgtgatgacgctcgtcaaagcggggcatgaggtgtatgtggagacggaaggcggcgctgggtcggggttttccgattccgagtatgaaaaagccggggcagctgatcgttgccgaacgtggagagatgcttggacggcggagatggtgttgaaagtgaaagagccgctggctcgagagttccgctattttcgccccggattgattttgtttacgtatttgcatttagccgcggccgaacgcgtcacgaaagccgtcgtcgagcaaaaagtggtcggcatcgcttacgagacggtgcagctggcgaacggctcgctgccactgttgacgccgatgagtgaagtcgccggccgcatgtcggtgcaagtcggcgcccagtttctcgagaagccgcacgggggaaagggcattttgcttggcggcgtgcccggagtgcggcgcggcaaagtgacgatcatcggcggcggaacggcggggacgaacgcggcgaaaatcggggtcggtctcggtgcagacgtgacgattttggacattaacgccgagcggctgcgcgagctcgatgatttgttcggcgaccacgtgacgacgctcatgtccaactcgtaccatatcgccgagtgcgtgcgcgaatcggatttggtcgtcggtgccgtcttgatcccgggggcgaaagcgaagctggtgacggaagagatggtgcgctcgatgacgccgggatcggtgttggtcgacatcgccattgaccaaggcggcattttcgaaacgaccgaccgcgtcacgacgcacgacgatccgacatacgtcaagcacggcgtcgtccattacgccgtcgccaacatgccgggcgcggtgccgcgcacgtcgacattcgcgcttacgaacgtcacgatcccatacgccttgcaaatcgccaacaaaggctaccgcgccggttgcttggataacccggcgctgttaaaagggatcaacacgctcgacgggcacatcgtgtacgaagcggtcgcggcggcgcacaacatgccgtatacagatgttcattcgttgttgcacggatgaaatcatgaagatggagccgccttgatggcatgagaaaacaagctgtccgaatcggcttggggatcgagcgtggactattcgtgcaccttattcgcagaagctt

SEQ ID NO: 55362 - protein, 372 aa, Bacillus stearothermophilus
MKIGIPKEIKNNENRVAITPAGVMTLVKAGHEVYVETEGGAGSGFSDSEYEKAGAADRCRTWRDAWTAEMVLKVKEPLAREFRYFRPGLILFTYLHLAAAERVTKAVVEQKVVGIAYETVQLANGSLPLLTPMSEVAGRMSVQVGAQFLEKPHGGKGILLGGVPGVRRGKVTIIGGGTAGTNAAKIGVGLGADVTILDINAERLRELDDLFGDHVTTLMSNSYHIAECVRESDLVVGAVLIPGAKAKLVTEEMVRSMTPGSVLVDIAIDQGGIFETTDRVTTHDDPTYVKHGVVHYAVANMPGAVPRTSTFALTNVTIPYALQIANKGYRAGCLDNPALLKGINTLDGHIVYEAVAAAHNMPYTDVHSLLHG

SEQ ID NO: 55363 - DNA, 1709 bp, Bacillus subtilis
  CDS (230)..(1366): transl_table=11
tagcccctgatgctcagcgttattccgtatcgtgatcgactcacgtcagcagtcgctgaatgattgaaaatgtgatcaaaattcaccatctatttagatatcaaaccttccggcacatggatttgtgaaatttcacaaatccatgtttttttattttcttaatcaaacaaagaattttccaaaatatcaagctacactaaaaatatcacatatacaggaggagacagatatgatcataggggttcctaaagagataaaaaacaatgaaaaccgtgtcgcattaacacccgggggcgtttctcagctcatttcaaacggccaccgggtgctggttgaaacaggcgcgggccttggaagcggatttgaaaatgaagcctatgagtcagcaggagcggaaatcattgctgatccgaagcaggtctgggacgccgaaatggtcatgaaagtaaaagaaccgctgccggaagaatatgtttattttcgcaaaggacttgtgctgtttacgtaccttcatttagcagctgagcctgagcttgcacaggccttgaaggataaaggagtaactgccatcgcatatgaaacggtcagtgaaggccggacattgcctcttctgacgccaatgtcagaggttgcgggcagaatggcagcgcaaatcggcgctcaattcttagaaaagcctaaaggcggaaaaggcattctgcttgccggggtgcctggcgtttcccgcggaaaagtaacaattatcggaggaggcgttgtcgggacaaacgcggcgaaaatggctgtcggcctcggtgcagatgtgacgatcattgacttaaacgcagaccgcttgcgccagcttgatgacatcttcggccatcagattaaaacgttaatttctaatccggtcaatattgctgatgctgtggcggaagcggatctcctcatttgcgcggtattaattccgggtgctaaagctccgactcttgtcactgaggaaatggtaaaacaaatgaaacccggttcagttattgttgatgtagcgatcgaccaaggcggcatcgtcgaaactgtcgaccatatcacaacacatgatcagccaacatatgaaaaacacggggttgtgcattatgctgtagcgaacatgccaggcgcagtccctcgtacatcaacaatcgccctgactaacgttactgttccatacgcgctgcaaatcgcgaacaaaggggcagtaaaagcgctcgcagacaatacggcactgagagcgggtttaaacaccgcaaacggacacgtgacctatgaagctgtagcaagagatctaggctatgagtatgttcctgccgagaaagctttacaggatgaatcatctgtggcgggtgcttaattcacaataagcttgcagaaagatttctgcaggacttttttatttttaaaaggaaaaaagagaccatttcacgaattatgactatgttgatcataaaggaggattcatatggctgttcagcaatatggcgtgttaaaaggcatagtattagacatgaagcgggaaacagatgatgacagtcctcatttccaagtcaaaatgctcggtgaagagaatacgtattacaggtgcgccatcaatgtgatgtccagttctgaggaatctgaagtattgtatttggctgacgatcagttgattcggctcaattaccatccttccgaacatgcgtatgatatacaggatc

SEQ ID NO: 55364 - protein, 378 aa, Bacillus subtilis
MIIGVPKEIKNNENRVALTPGGVSQLISNGHRVLVETGAGLGSGFENEAYESAGAEIIADPKQVWDAEMVMKVKEPLPEEYVYFRKGLVLFTYLHLAAEPELAQALKDKGVTAIAYETVSEGRTLPLLTPMSEVAGRMAAQIGAQFLEKPKGGKGILLAGVPGVSRGKVTIIGGGVVGTNAAKMAVGLGADVTIIDLNADRLRQLDDIFGHQIKTLISNPVNIADAVAEADLLICAVLIPGAKAPTLVTEEMVKQMKPGSVIVDVAIDQGGIVETVDHITTHDQPTYEKHGVVHYAVANMPGAVPRTSTIALTNVTVPYALQIANKGAVKALADNTALRAGLNTANGHVTYEAVARDLGYEYVPAEKALQDESSVAGA

SEQ ID NO: 55365 - DNA, 1131 bp, Oceanobacillus iheyensis
  CDS (1)..(1131): transl_table=11
atgattattggtgttcctaaggaaattaaaaacaatgagaatcgtgttgcaatgacacctgctggggtcgttcatttaataaatgctggtcatactgtacaaattgagaaaggtgcaggactaggaagtaattttgcagatgcagaatacaaagaagctggtgctgaacttatcgatagcgctgctagtgtttgggaaaatgcagatatgattatgaaggttaaagaaccactttcttctgaatataaatacttccgtaaaggtcttattttattcacttaccttcaccttgctgctgctccagaattaacaaaagcactagttgacagtgaagtaactgcaattgcttatgaaacaattacagtaaacggtacattgccactattaactccaatgagtgaagtagcaggacgtatggctacacaaatcggtgcacagtatctagagaaatcagaaggcggaaaaggtatccttcttggaggaattccaggagttagccgcggtaaagtaactgtaatcggtggtggagttgttggtacgcacgctgctaaaatcgctctaggtcttggggcagaagtaacgattattgacttaaaccctgtacgccttcgtcaattagacgatatctttggttcaagcattcaaacattaatgtctaacccgtacaacattgcagaagctgtaaaagattctgatctagttatcggttctgtattaatcccaggacgtaaagctcctaaattagttacagacgaaatgattcaatcgatgcaaccaggatctgttcttgtggacgttgcaattgaccaaggtggtaacttcgaaacagtagatcacccaactacacatgatgagccaatctatgtaaaacatgatgtacttcattatgcagttgcaaacatccctggtgcggtaccacgtacagctactgttggattaactaacgtaacagtgccatatgcggtacaaatcgcttctaaaggtgcagtaaaagcaattcaagacaacccagcaattcttactggtgtaaacgttatgaatggtaaagtaacttacgaagcagttgctgctgaccttggatacgactttgtttcacctgaagatgcaatcaaagacgcagaattagtttaa

SEQ ID NO: 55366 - protein, 376 aa, Oceanobacillus iheyensis
MIIGVPKEIKNNENRVAMTPAGVVHLINAGHTVQIEKGAGLGSNFADAEYKEAGAELIDSAASVWENADMIMKVKEPLSSEYKYFRKGLILFTYLHLAAAPELTKALVDSEVTAIAYETITVNGTLPLLTPMSEVAGRMATQIGAQYLEKSEGGKGILLGGIPGVSRGKVTVIGGGVVGTHAAKIALGLGAEVTIIDLNPVRLRQLDDIFGSSIQTLMSNPYNIAEAVKDSDLVIGSVLIPGRKAPKLVTDEMIQSMQPGSVLVDVAIDQGGNFETVDHPTTHDEPIYVKHDVLHYAVANIPGAVPRTATVGLTNVTVPYAVQIASKGAVKAIQDNPAILTGVNVMNGKVTYEAVAADLGYDFVSPEDAIKDAELV

SEQ ID NO: 55367 - DNA, 1116 bp, Staphylococcus epidermidis
  CDS (1)..(1116): transl_table=11
atgaaaattgggattcctaaagaaataaagaataatgagaatcgagtggggttatccccaagtggtgtacatgcacttgtagaccaaggacatgaagttttagtagaaacaaatgctggtctaggatcttactttgaagatggtgattatcaagaagccggtgccaaaattgttgatgagcagtcaaaagcttgggatgttgatatggtcatcaaagttaaagaaccacttgaatcggaatacaaattctttaaagaagagttaatcttatttacttatttacaccttgcgaatgaacagaaattaactcaggcacttgtggacaacaaggttatatctattgcctatgaaactgtacaattaccagacggttctttaccgttattaacaccaatgagtgaagtggctggtagaatgtctacacaagtgggagctgaatttttacaaagatttaatggaggtatgggtatcttactaggtggcatacctggagtacctaaaggcaaagtcactatcattggtggtggtcaagcaggtacaaatgcagctaagatagctttaggattgggagctgaagtgacaatactagatgttaatcctaaacgtttagaagaattagaggacttatttgatggcagagtaagaacaattatgtctaatccattaaatatagaaatgtatgtgaaagaaagcgatttagtgattggagcagtccttattccaggtgctaaagctccaaacttagtgactgaagatatgataaaagaaatgaaagatggatcagtgattgtagatattgcgatagatcaaggtggaatttttgaaacaactgataagattactactcatgataatccgacttacactaaacatggtgtcgtgcattatgctgtagctaatatgccaggtgccgttccacgtacatctacaattggattgaacaatgcaacattaccttatgcgcaattattggctaataaaggttatcgtgaagcatttaaagtaaatcatccattatctctaggtctgaatacatttaatggacatgtgactaataagaatgtagctgatacatttaattttgaatacacttcaattgaagatgcattgaaataa

SEQ ID NO: 55368 - protein, 371 aa, Staphylococcus epidermidis
MKIGIPKEIKNNENRVGLSPSGVHALVDQGHEVLVETNAGLGSYFEDGDYQEAGAKIVDEQSKAWDVDMVIKVKEPLESEYKFFKEELILFTYLHLANEQKLTQALVDNKVISIAYETVQLPDGSLPLLTPMSEVAGRMSTQVGAEFLQRFNGGMGILLGGIPGVPKGKVTIIGGGQAGTNAAKIALGLGAEVTILDVNPKRLEELEDLFDGRVRTIMSNPLNIEMYVKESDLVIGAVLIPGAKAPNLVTEDMIKEMKDGSVIVDIAIDQGGIFETTDKITTHDNPTYTKHGVVHYAVANMPGAVPRTSTIGLNNATLPYAQLLANKGYREAFKVNHPLSLGLNTFNGHVTNKNVADTFNFEYTSIEDALK

SEQ ID NO: 55369 - DNA, 21 bp, Artificial sequence
  primer
atggaaattggtgttcccaag

SEQ ID NO: 55370 - DNA, 20 bp, Artificial sequence
  primer
ttacaaatcaggaaataccg

SEQ ID NO: 55371 - protein, 393 aa, Artificial sequence
  consensus sequence
  Variant (2)..(3): Xaa in position 2 to 3 is any amino acid
  Variant (5)..(5): Xaa in position 5 is any amino acid
  Variant (7)..(7): Xaa in position 7 is any amino acid
  Variant (9)..(9): Xaa in position 9 is any amino acid
  Variant (11)..(12): Xaa in position 11 to 12 is any amino acid
  Variant (13)..(15): Xaa in position 13 to 15 is any or no amino acid
  Variant (17)..(17): Xaa in position 17 is any amino acid
  Variant (20)..(22): Xaa in position 20 to 22 is any amino acid
  Variant (24)..(25): Xaa in position 24 to 25 is any amino acid
  Variant (27)..(32): Xaa in position 27 to 32 is any amino acid
  Variant (35)..(35): Xaa in position 35 is any amino acid
  Variant (36)..(36): Xaa in position 36 is any or no amino acid
  Variant (38)..(42): Xaa in position 38 to 42 is any amino acid
  Variant (45)..(45): Xaa in position 45 is any amino acid
  Variant (47)..(50): Xaa in position 47 to 50 is any amino acid
  Variant (52)..(53): Xaa in position 52 to 53 is any amino acid
  Variant (55)..(56): Xaa in position 55 to 56 is any amino acid
  Variant (60)..(74): Xaa in position 60 to 74 is any amino acid
  Variant (75)..(76): Xaa in position 75 to 76 is any or no amino acid
  Variant (82)..(84): Xaa in position 82 to 84 is any amino acid
  Variant (86)..(92): Xaa in position 86 to 92 is any amino acid
  Variant (93)..(94): Xaa in position 93 to 94 is any or no amino acid
  Variant (103)..(110): Xaa in position 103 to 110 is any amino acid
  Variant (111)..(111): Xaa in position 111 is any or no amino acid
  Variant (113)..(119): Xaa in position 113 to 119 is any amino acid
  Variant (126)..(130): Xaa in position 126 to 130 is any amino acid
  Variant (131)..(134): Xaa in position 131 to 134 is any or no amino acid
  Variant (139)..(139): Xaa in position 139 is any amino acid
  Variant (144)..(144): Xaa in position 144 is any amino acid
  Variant (148)..(150): Xaa in position 148 to 150 is any amino acid
  Variant (152)..(152): Xaa in position 152 is any amino acid
  Variant (155)..(156): Xaa in position 155 to 156 is any amino acid
  Variant (158)..(161): Xaa in position 158 to 161 is any amino acid
  Variant (162)..(166): Xaa in position 162 to 166 is any or no amino acid
  Variant (169)..(169): Xaa in position 169 is any amino acid
  Variant (171)..(171): Xaa in position 171 is any amino acid
  Variant (173)..(174): Xaa in position 173 to 174 is any amino acid
  Variant (177)..(177): Xaa in position 177 is any amino acid
  Variant (179)..(179): Xaa in position 179 is any amino acid
  Variant (180)..(181): Xaa in position 180 to 181 is any or no amino acid
  Variant (183)..(186): Xaa in position 183 to 186 is any amino acid
  Variant (188)..(190): Xaa in position 188 to 190 is any amino acid
  Variant (192)..(192): Xaa in position 192 is any amino acid
  Variant (194)..(195): Xaa in position 194 to 195 is any amino acid
  Variant (197)..(198): Xaa in position 197 to 198 is any amino acid
  Variant (201)..(202): Xaa in position 201 to 202 is any amino acid
  Variant (204)..(204): Xaa in position 204 is any amino acid
  Variant (206)..(207): Xaa in position 206 to 207 is any amino acid
  Variant (209)..(209): Xaa in position 209 is any amino acid
  Variant (211)..(213): Xaa in position 211 to 213 is any amino acid
  Variant (215)..(219): Xaa in position 215 to 219 is any amino acid
  Variant (221)..(222): Xaa in position 221 to 222 is any amino acid
  Variant (224)..(247): Xaa in position 224 to 247 is any amino acid
  Variant (248)..(257): Xaa in position 248 to 257 is any or no amino acid
  Variant (259)..(261): Xaa in position 259 to 261 is any amino acid
  Variant (266)..(266): Xaa in position 266 is any amino acid
  Variant (269)..(270): Xaa in position 269 to 270 is any amino acid
  Variant (273)..(273): Xaa in position 273 is any amino acid
  Variant (276)..(282): Xaa in position 276 to 282 is any amino acid
  Variant (284)..(285): Xaa in position 284 to 285 is any amino acid
  Variant (287)..(287): Xaa in position 287 is any amino acid
  Variant (289)..(289): Xaa in position 289 is any amino acid
  Variant (292)..(292): Xaa in position 292 is any amino acid
  Variant (299)..(300): Xaa in position 299 to 300 is any amino acid
  Variant (303)..(305): Xaa in position 303 to 305 is any amino acid
  Variant (306)..(308): Xaa in position 306 to 308 is any or no amino acid
  Variant (312)..(313): Xaa in position 312 to 313 is any amino acid
  Variant (315)..(322): Xaa in position 315 to 322 is any amino acid
  Variant (323)..(326): Xaa in position 323 to 326 is any or no amino acid
  Variant (329)..(329): Xaa in position 329 is any amino acid
  Variant (331)..(331): Xaa in position 331 is any amino acid
  Variant (338)..(339): Xaa in position 338 to 339 is any amino acid
  Variant (343)..(343): Xaa in position 343 is any amino acid
  Variant (346)..(346): Xaa in position 346 is any amino acid
  Variant (348)..(348): Xaa in position 348 is any amino acid
  Variant (350)..(350): Xaa in position 350 is any amino acid
  Variant (352)..(356): Xaa in position 352 to 356 is any amino acid
  Variant (358)..(359): Xaa in position 358 to 359 is any amino acid
  Variant (360)..(360): Xaa in position 360 is any or no amino acid
  Variant (362)..(363): Xaa in position 362 to 363 is any amino acid
  Variant (364)..(364): Xaa in position 364 is any or no amino acid
  Variant (366)..(368): Xaa in position 366 to 368 is any amino acid
  Variant (369)..(371): Xaa in position 369 to 371 is any or no amino acid
  Variant (373)..(374): Xaa in position 373 to 374 is any amino acid
  Variant (375)..(378): Xaa in position 375 to 378 is any or no amino acid
  Variant (380)..(380): Xaa in position 380 is any amino acid
  Variant (382)..(384): Xaa in position 382 to 384 is any amino acid
  Variant (386)..(388): Xaa in position 386 to 388 is any amino acid
  Variant (389)..(391): Xaa in position 389 to 391 is any or no amino acid
MXXGXPXEXKXXXXXEXRVXXXPXXVXXXXXXGHXXVXXXXXAGXGXXXXDXXYXXAGAXXXXXXXXXXXXXXXXXKVKEPXXXEXXXXXXXXXLFTYLHLAXXXXXXXXXLXXXXXXXIAYETVXXXXXXXXXLPLLXPMSEXAGRXXXQXGAXXLXXXXXXXXXGGXGXLXXGVXGXXXVXXXXVXXXGXGXXGXXAAXXAXGXXAXVXXXDXXXXXLXXLXXXXXXXXXXXXXXXXXXXXXXXXXXXXXXXXXXDXXXGAVLXPGXXAPXLVXXXXXXXMXXGXVXVDXAIDQGGXXETXXXXXXTTHXXPXXXXXXXXXXXXHYXVXNMPGAVXXTSTXALXNXTXPXXXXXAXXXGXXXAXXXXXXLXXXXXXGXNXXXGXXXXXXVA

SEQ ID NO: 55372 - protein, 23 aa, Artificial sequence
  protein pattern
  Variant (5)..(5): Xaa in position 5 is any amino acid
  Variant (9)..(9): Xaa in position 9 is any amino acid
  Variant (10)..(10): Xaa in position 10 is Ile or Val
  Variant (14)..(14): Xaa in position 14 is Ile, Leu or Met
  Variant (15)..(15): Xaa in position 15 is Ala or Ser
  Variant (16)..(18): Xaa in position 16 to 18 is any amino acid
  Variant (19)..(19): Xaa in position 19 is Ala, Gly, Ser or Val
  Variant (21)..(22): Xaa in position 21 to 22 is any amino acid
LPLLXPMSXXAGRXXXXXXAXXL

SEQ ID NO: 55373 - protein, 20 aa, Artificial sequence
  protein pattern
  Variant (2)..(2): Xaa in position 2 is any amino acid
  Variant (3)..(3): Xaa in position 3 is Ile or Val
  Variant (4)..(4): Xaa in position 4 is Ala or Gly
  Variant (5)..(5): Xaa in position 5 is any amino acid
  Variant (6)..(6): Xaa in position 6 is Leu, Pro or Val
  Variant (7)..(7): Xaa in position 7 is any amino acid
  Variant (9)..(9): Xaa in position 9 is any amino acid
  Variant (11)..(12): Xaa in position 11 to 12 is any amino acid
  Variant (14)..(14): Xaa in position 14 is any amino acid
  Variant (17)..(17): Xaa in position 17 is Ala, Gly or Ser
  Variant (18)..(19): Xaa in position 18 to 19 is any amino acid
MXXXXXXEXKXXEXRVXXXP

SEQ ID NO: 55374 - protein, 8 aa, Artificial sequence
  protein pattern
  Variant (2)..(2): Xaa in position 2 is Phe or Tyr
  Variant (3)..(3): Xaa in position 3 is Ala, Cys or Thr
  Variant (4)..(4): Xaa in position 4 is Phe or Tyr
LXXXLHLA

SEQ ID NO: 55375 - protein, 41 aa, Artificial sequence
  protein pattern
  Variant (2)..(5): Xaa in position 2 to 5 is any amino acid
  Variant (6)..(6): Xaa in position 6 is any or no amino acid
  Variant (8)..(8): Xaa in position 8 is any amino acid
  Variant (9)..(9): Xaa in position 9 is Ile or Val
  Variant (10)..(10): Xaa in position 10 is Gly, Ile, Leu or Val
  Variant (12)..(12): Xaa in position 12 is any or no amino acid
  Variant (14)..(15): Xaa in position 14 to 15 is any amino acid
  Variant (16)..(16): Xaa in position 16 is any or no amino acid
  Variant (18)..(19): Xaa in position 18 to 19 is any amino acid
  Variant (21)..(23): Xaa in position 21 to 23 is any amino acid
  Variant (25)..(25): Xaa in position 25 is any amino acid
  Variant (26)..(26): Xaa in position 26 is Ala or Gly
  Variant (27)..(28): Xaa in position 27 to 28 is any amino acid
  Variant (30)..(30): Xaa in position 30 is any amino acid
  Variant (32)..(34): Xaa in position 32 to 34 is any amino acid
  Variant (36)..(40): Xaa in position 36 to 40 is any amino acid
  Variant (41)..(41): Xaa in position 41 is Ile, Leu or Met
VXXXXXVXXXGXGXXXGXXAXXXAXXXXAXVXXXDXXXXXX

SEQ ID NO: 55376 - protein, 19 aa, Artificial sequence
  protein pattern
  Variant (3)..(3): Xaa in position 3 is any amino acid
  Variant (5)..(8): Xaa in position 5 to 8 is any amino acid
  Variant (9)..(9): Xaa in position 9 is Asp or Asn
  Variant (10)..(11): Xaa in position 10 to 11 is any amino acid
  Variant (12)..(12): Xaa in position 12 is Phe or Tyr
  Variant (13)..(15): Xaa in position 13 to 15 is any amino acid
  Variant (18)..(18): Xaa in position 18 is any amino acid
  Variant (19)..(19): Xaa in position 19 is Ile, Leu, Met or Val
AGXGXXXXXXXXXXXGAXX

SEQ ID NO: 55377 - protein, 14 aa, Artificial sequence
  protein pattern
  Variant (2)..(2): Xaa in position 2 is Ile, Leu, Met or Val
  Variant (3)..(7): Xaa in position 3 to 7 is any amino acid
  Variant (8)..(8): Xaa in position 8 is Ala, Cys, Gly or Ser
  Variant (9)..(9): Xaa in position 9 is Ile or Val
  Variant (10)..(10): Xaa in position 10 is Ala or Gly
  Variant (14)..(14): Xaa in position 14 is Ile, Leu or Val
LXXXXXXXXXYETX

SEQ ID NO: 55378 - protein, 11 aa, Artificial sequence
  protein pattern
  Variant (2)..(2): Xaa in position 2 is Leu or Val
  Variant (3)..(3): Xaa in position 3 is Ile, Leu or Val
  Variant (4)..(4): Xaa in position 4 is Ile or Val
  Variant (5)..(5): Xaa in position 5 is Cys or Gly
  Variant (6)..(6): Xaa in position 6 is Ala, Gly or Ser
  Variant (9)..(10): Xaa in position 9 to 10 is any amino acid
DXXXXXVLXXG

SEQ ID NO: 55379 - DNA, 615 bp, Synechocystis sp.
  CDS (1)..(615): transl_table=11
atgaacaggctgagcaaaatgtatgttaagtcagcattgcttgccccattaacaatagttttgggactgcttggggcggctagggtagaggcagaaccaattgttaaaatcgagtataaatactattctatttatcccaaaactaaatgggatttaaataatgaattaaatcaacgtagcccgattatttttcaaggtaaacgttaccgtggctatactcaatggctagtgcgctggcagtatcaatggtggtccacagcccaacaatgtcaaatcactaaagttaccaccaaccttgatgttatctacaccctaccccgcattccccctaaccacggcagtgatccggaagctcgcagggtttttaatcactacttggccgctttatttaagcatgaggaaaaccataaaaattccggtctgtatggggctagggccattgaaaaagccttactaaatctcggcccatttcccaactgtcagagtctacaaaccaaagctgaaagcactgctcaacagattatccagctttaccgccaaagggatctggactacgatcgccaaactgatcacggccgcaaagaaggcattatgctcgaaaattttctccgttaa

SEQ ID NO: 55380 - protein, 204 aa, Synechocystis sp.
MNRLSKMYVKSALLAPLTIVLGLLGAARVEAEPIVKIEYKYYSIYPKTKWDLNNELNQRSPIIFQGKRYRGYTQWLVRWQYQWWSTAQQCQITKVTTNLDVIYTLPRIPPNHGSDPEARRVFNHYLAALFKHEENHKNSGLYGARAIEKALLNLGPFPNCQSLQTKAESTAQQIIQLYRQRDLDYDRQTDHGRKEGIMLENFLR

SEQ ID NO: 55381 - DNA, 561 bp, Colwellia psychrerythraea 34H
  CDS (1)..(561): transl_table=11
gtgaaagtaatactattaataactatcttcttgtcattctattcaagtgcagaaactatcgttgtagaagatactttattttatgaagtagccccaacatctaaggatgacttattggaaactttgaatagcagctcaccaatcagagaagatggtaatgtttttcatggttacactaaatatgaaattaactggcgattttggtggaaatcaaataataatcaatgtgcttttactaaggtcgaaacaacactgaagttaaaatatacgatgcctcagcttacatcttcaaagtcagacgttaacgttgtttggtctaattggtatcccaatttggagaaacatgaaaagggacatgggaagttagcgaaagatactgcatttaaaatagagaaagatttactttctattggtcctaaagccaattgtaatctattagaaaaagcgggaaataaattagcatataaattaatggctacattaaaaaaagctaataagcagtatgacatcaaaaccaaccatggtgagactcaaaatgcttggttatatttgcatttgtag

SEQ ID NO: 55382 - protein, 186 aa, Colwellia psychrerythraea 34H
MKVILLITIFLSFYSSAETIVVEDTLFYEVAPTSKDDLLETLNSSSPIREDGNVFHGYTKYEINWRFWWKSNNNQCAFTKVETTLKLKYTMPQLTSSKSDVNVVWSNWYPNLEKHEKGHGKLAKDTAFKIEKDLLSIGPKANCNLLEKAGNKLAYKLMATLKKANKQYDIKTNHGETQNAWLYLHL

SEQ ID NO: 55383 - DNA, 21 bp, Artificial sequence
  primer
atgaacaggctgagcaaaatg

SEQ ID NO: 55384 - DNA, 21 bp, Artificial sequence
  primer
ttaacggagaaaattttcgag

SEQ ID NO: 55385 - DNA, 2238 bp, Synechocystis sp.
  CDS (1)..(2238): transl_table=11
atggcccaaaccatcaatctgcaactagagggaatgcgctgtgcggcctgtgcttccagcattgaacgggcgatcgccaaagtgccgggggtgcagtcttgccaggtgaattttgccctggagcaggcggtggtcagttatcacggggaaacgaccccccaaatcctcacagatgcggtggagcgagcgggttaccacgctagggtgcttaaacaacaggttttatcttcccagcaaaccgaggataggaaacccgtgttttcggccaaattggtaacggggttagtaatcagcgctgtgctcttttttggctccttgcccatgatgctgggggtaaatattccccattttccccatattttccatgatccctggttgcaatggttattggctacgccggtgcagttttggtctggagcggagttttatcggggagcttggaaatccgttagaacccgcagtgccaccatggatacccttgtagccttgggcaccagtgcggcgtatttttactccgtagccattaccctctttccccaatggttaactagccaagggttagcagcccacgtttattttgaagcggcggcggtggtgatcaccctgattctgttggggcggtcgttggaacagcgggcccggcgggaaacttcagcagcgatccgtaaattaatggggctacaaccccaaacagcactcgttaaacggggggaacactgggaaacagtggcgatcgccgagttggcaattaacgatgtggtgcgggtgcggccgggggaaaaaattccggtggatggcgtggtggtggcgggaaattccactgtggatgaatcgttggtgacgggggaaagttttccggtagataaaaccgttgggacggaagtgattggggccacgttgaataaaagcggcagtttagacattcaagtcagcaagttgggccaggattccgtgctcgcccaaattatccaactggtacagcaagcccaagcttctaaagctcccatccagcactttgttgaccgcatcacccactggtttgtccccacagtaattgtggtggcgatcgccgctttttgtatttggtggctgaccacgggcaatattaccctggcggtgttgaccttggtggaagtgctgatcatcgcctgtccctgtgcgttgggcttggccacgcctacgtctgtgatggtgggcacgggtaaaggggcggagtatggcgtgctaatcaaagaagctagcagcctggaaatggcggaaaaattaactgctattgtgctggataaaactggcacgttaacccagggcaaacccagtgtgaccaacttttttactctgtcccccacttccacggaggaaagtttacagttaatccaatgggcggccagtgtggagcaatattccgaacatcccctagcggaagcggtggttaattatggtcaatcccaacaggttagtttgctagagatagacaatttccaggcgatcgccggttgtggggtggcaggacaatggcaggggcaatggatacgattaggaacgtccaattggttaaccgatttgggggtaactggtacggagcatcaaccatggcaaagtcaggcccagcaatgggaaaaggaacaaaaaaccgttatttggctggcagtggacacggaagttaaagctctattggcgatcgccgatgccatcaaaccatcctctccccaggtagtacaggctctgaaaaaactgggtttatccgtttatatgctcactggagacaaccaagccaccgcccaagccattgccgacacagtgggtattcgccatgtgttagcccaagtgcgccccggcgataaagcccaacaggtggaacagttgcaacagaagggaaatatcgtcgccatggtgggggatggcattaacgatgctcccgccctggcccaggccgatgtgggcatagccattggtactggcaccgatgtggcgatcgccgccagtgatattactctgattgctggagatttacagggaattttgaccgctatcaagctgagccgggccaccatgggtaatattagacaaaatctcttctttgcgtttatttacaacgtgatcggcattcccgtagctgctgggctgttctatcccctcttcggtttactgctcaatcccatcctggctggggccgccatggcctttagttccgtttccgtggtgaccaacgctctgcgtctgaaaaaattctgtccttaa

SEQ ID NO: 55386 - protein, 745 aa, Synechocystis sp.
MAQTINLQLEGMRCAACASSIERAIAKVPGVQSCQVNFALEQAVVSYHGETTPQILTDAVERAGYHARVLKQQVLSSQQTEDRKPVFSAKLVTGLVISAVLFFGSLPMMLGVNIPHFPHIFHDPWLQWLLATPVQFWSGAEFYRGAWKSVRTRSATMDTLVALGTSAAYFYSVAITLFPQWLTSQGLAAHVYFEAAAVVITLILLGRSLEQRARRETSAAIRKLMGLQPQTALVKRGEHWETVAIAELAINDVVRVRPGEKIPVDGVVVAGNSTVDESLVTGESFPVDKTVGTEVIGATLNKSGSLDIQVSKLGQDSVLAQIIQLVQQAQASKAPIQHFVDRITHWFVPTVIVVAIAAFCIWWLTTGNITLAVLTLVEVLIIACPCALGLATPTSVMVGTGKGAEYGVLIKEASSLEMAEKLTAIVLDKTGTLTQGKPSVTNFFTLSPTSTEESLQLIQWAASVEQYSEHPLAEAVVNYGQSQQVSLLEIDNFQAIAGCGVAGQWQGQWIRLGTSNWLTDLGVTGTEHQPWQSQAQQWEKEQKTVIWLAVDTEVKALLAIADAIKPSSPQVVQALKKLGLSVYMLTGDNQATAQAIADTVGIRHVLAQVRPGDKAQQVEQLQQKGNIVAMVGDGINDAPALAQADVGIAIGTGTDVAIAASDITLIAGDLQGILTAIKLSRATMGNIRQNLFFAFIYNVIGIPVAAGLFYPLFGLLLNPILAGAAMAFSSVSVVTNALRLKKFCP

SEQ ID NO: 55387 - DNA, 2982 bp, Glycine max
  CDS (1)..(2982)
atggcgccgagcaccggagacgtgcaactaacttcccccggcgccggccaagatttcgacgacctcgaagacattcgcctcctcgactcctacgacaaaaacgacgtcgtccacgatgaaaccaaacggattcaggtcagaatctccggcatgacctgcgccgcctgctccaactccgtccaaacggctctccggtccgttcacggcgtcaccgaagcctccgtcgctcttcttcagaacaaagccgaagtcgttttcatccccggcctcgtcaaggatgaggatattaagaatgcgattgaagacgcaggtttcgaggccgagatcttgccggactccggcgcggcggcgcacgctgccgcctccgccgccgtgttggggcagtttactatcgtcgggatgacgtgtgcggcgtgtgtgaattccgtggaaggcattctgagaaacctcaacggagtaaaaagagcggtggtggctctggccacttcgttgggcgaagttgagtacgatccccacgtgattagcaaggacgatattgtgtctgcgattgaagacgcgggtttcgagggcgcgtttgtgcagagtaacgggcgggaccagatagtgttaggggtgagtggcgtgtactctcttggtgatgctcaggttctggaagcgatgctaagtggcaccaaaggggtgaggcagtttcggttcgatacggcagtgaacgagcttgatgtggtgtttgaccctgaagttatcagctctaggtcgttggttgatgggatccagttggggagtaatggcaagtttaagttgcatgttaggaatccttacgctaggatggcttctaaagatggctcagaaagctcggctatgtttcgcctttttatttccagcttgtttctcagtattcctctcttcttcatgggggtgatttgtcctcatataccattggtttactctttattactttggagatgtgggccttttctcatgggtgactggctgaattgggcgttggtgagtgtcattcaatttgtgattgggaaacgcttctatatagcagctggaagagctcttagaaatggttcaacaaacatggatgtcctggttgctttgggaactacagcctcttatgtttattctgtttgtgctcttctgtatggtgcccttacaggattttggtctccaacatactttgaaacaagtgctatgcttataacatttgtattgttgggcaagtatttggagtgccttgccaagggaaagacctctgatgccattaagaagctagtagaacttactcctgcaacagctttattgattgtcaaagataaaggtggtagaactattgaagaaagggaaatagattccttgctcgttcaacctggtgacacattaaaagttcttcctggtacaaagattcctgctgatggtattgttacttggggctcaagttatgtaaatgagagtatggtgactggtgaatctatacccgtttcgaaggacgtcaatgcatctgttatcggaggtacgatcaatttgcatggtgtccttcacgttcaagctaccaaagtaggatctgatacagttttgagtcagataattagtttggtggagacagcccagatgtccaaagctcccattcaaaagtttgctgattatgttgcaagcatatttgttcctacagttgtggtgttggcattattgacactattgtgttggtatatagctggggctcttggagcataccctgatgaatggctgccaaaaaatggaaatcactttgtttttgcccttatgttttcaatatctgttgtggtgattgcatgtccatgtgcacttggtttggcaacaccaactgctgtcatggtggcaacaggggttggtgccaacaatggagtattaattaaaggaggagactccttggaaagggctcagatggtgaagtacgtcatatttgataaaacaggcactctaactcaggcgaaagccactgttactgctgctaaggtgtttgcaggaatggaccgtggagattttcttacattggtggcttctgctgaggctagcagtgaacacccactggcaaaagcaatatcgcaatatgcgcgccattttcatttctttgaggagtcttcccctaccagtggtaccaagaatgctgctgaggagttcaagtcagggtggctttatgatgtctcagacttctctgctcttccaggaaggggcatccagtgctttatagacgggaggcgtattttggtaatgtcttttgcatatcctaaacaggttggtaaccggaagctgctggaggaaaatggcataaatatttctacagaagtggaaagttttgttgtagagattgaagaaagtgcaaagacagggatactagtagcatatgatgatatattaattggagtcttagggattgcagacccactaaagagagaagctgctgttgttatagaaggcctacagaaaatgggagtcatacctgttatggttacaggagataactggagaacagctcgagctgtagccaaagaggttggcattcaagatgttagggcagaagttatgcctgcaggaaaggctgatgttgttcgttcattccaaaaggatggaagtatagttgcaatggtgggtgatggcatcaatgactctccagcattagctgctgcagatgttggtatggcaattggggctggaacagatgttgcaatagaagctgctaactatgtgctgatgagagataacttggaagatgtgatcacagccattgatctttccagaaagacctttttccgtattcgattgaattatgtatttgcgatggcttacaatgttgttgctataccagttgctgccggggttttctttccttctttggggatcaagctgccaccatgggttgctggtgcatgcatggctctgtcatctatccgctgcacccattggggtgcaattgtaattgtagctgccaattcattgtaa

SEQ ID NO: 55388 - protein, 993 aa, Glycine max
MAPSTGDVQLTSPGAGQDFDDLEDIRLLDSYDKNDVVHDETKRIQVRISGMTCAACSNSVQTALRSVHGVTEASVALLQNKAEVVFIPGLVKDEDIKNAIEDAGFEAEILPDSGAAAHAAASAAVLGQFTIVGMTCAACVNSVEGILRNLNGVKRAVVALATSLGEVEYDPHVISKDDIVSAIEDAGFEGAFVQSNGRDQIVLGVSGVYSLGDAQVLEAMLSGTKGVRQFRFDTAVNELDVVFDPEVISSRSLVDGIQLGSNGKFKLHVRNPYARMASKDGSESSAMFRLFISSLFLSIPLFFMGVICPHIPLVYSLLLWRCGPFLMGDWLNWALVSVIQFVIGKRFYIAAGRALRNGSTNMDVLVALGTTASYVYSVCALLYGALTGFWSPTYFETSAMLITFVLLGKYLECLAKGKTSDAIKKLVELTPATALLIVKDKGGRTIEEREIDSLLVQPGDTLKVLPGTKIPADGIVTWGSSYVNESMVTGESIPVSKDVNASVIGGTINLHGVLHVQATKVGSDTVLSQIISLVETAQMSKAPIQKFADYVASIFVPTVVVLALLTLLCWYIAGALGAYPDEWLPKNGNHFVFALMFSISVVVIACPCALGLATPTAVMVATGVGANNGVLIKGGDSLERAQMVKYVIFDKTGTLTQAKATVTAAKVFAGMDRGDFLTLVASAEASSEHPLAKAISQYARHFHFFEESSPTSGTKNAAEEFKSGWLYDVSDFSALPGRGIQCFIDGRRILVMSFAYPKQVGNRKLLEENGINISTEVESFVVEIEESAKTGILVAYDDILIGVLGIADPLKREAAVVIEGLQKMGVIPVMVTGDNWRTARAVAKEVGIQDVRAEVMPAGKADVVRSFQKDGSIVAMVGDGINDSPALAAADVGMAIGAGTDVAIEAANYVLMRDNLEDVITAIDLSRKTFFRIRLNYVFAMAYNVVAIPVAAGVFFPSLGIKLPPWVAGACMALSSIRCTHWGAIVIVAANSL

SEQ ID NO: 55389 - DNA, 3006 bp, Arabidopsis thaliana
  CDS (1)..(3006)
atggcgccgagtagacgggatttacagcttactccggtcaccggaggttcttcttcccagatcagtgatatggaagaagttggtcttctcgattcgtatcacaacgaagcgaacgccgatgatattttgactaaaatcgaagaaggaagagatgtttccggtttaaggaagattcaggtcggagtcaccggtatgacttgtgctgcttgttctaattccgttgaagcagctttgatgaacgttaatggcgtcttcaaagcctctgttgctttgttacagaatcgagccgatgtcgtcttcgaccctaatttagtcaaggaagaggatattaaagaagctatagaggatgctggatttgaggctgagatattggctgaagaacagacacaagctactttggtgggtcaatttacaattggaggtatgacttgtgcagcttgtgttaactctgttgaaggtattctaagagatcttcctggagtgaaaagagcagtggtagctttgtctacatcattaggagaagttgagtatgatccaaatgttattaacaaggatgatattgttaatgcgattgaagatgctgggtttgaaggttcgcttgtgcagagtaatcagcaggataagcttgttttaagggtggatgggattttgaatgagcttgatgctcaggttttagaagggatacttactagattgaatggggttagacagtttcgtcttgacaggatatctggagagcttgaggttgtgtttgatccggaagttgttagttcgagatctttggttgatgggattgaagaagatggatttgggaagtttaagttgcgtgttatgagcccttatgaaaggttgtcttcgaaagatactggagaggcctcaaatatgtttcggcgttttatctccagtcttgttcttagtattcctctcttcttcatccaagtaatctgcccccacattgctctttttgatgccttactggtatggagatgtggacccttcatgatgggtgattggttgaaatgggccttggtaagtgttattcagtttgttatcggcaagcgattctatgttgcagcatggagagctctacgaaatggttcaactaacatggatgtgctcgtcgctctgggcacgtctgcttcttacttctactctgttggggctcttttatatggagcagtcactggattttggtctccaacatactttgatgcaagcgccatgctgataacttttgtcttactgggaaaatatttagagtctcttgcaaaggggaaaacctcggatgctatgaagaaactagtacaacttacgccagcaacagcgattttactaactgaaggcaaaggaggaaagcttgtaggggaaagggagatagatgcattattgattcagcctggtgatacattaaaagttcatcccggtgcaaagatccctgcagatggtgttgtggtgtggggttcaagttacgttaatgaaagtatggtgattggtgaatcagttcctgtatcaaaagaggttgattcaccagtaatcgggggtactattaatatgcatggtgctcttcacatgaaagctacaaaggtgggatctgatgcagttctgagccagattattagtttggtcgagaccgcccaaatgtcaaaagctcctattcagaaatttgcggattatgttgcaagtatttttgttccggtagtgattactttggcattgttcaccttagtaggctggtcaattggtggagctgttggagcttacccagacgaatggcttccggagaacgggactcactttgttttctcgcttatgttctcaatatccgttgtggtaattgcttgtccttgtgcacttggcttggcaacaccgactgctgttatggtggcaacaggagttggagcaaccaatggtgtattgatcaaaggaggtgatgcattagagaaagctcacaaagtgaagtatgtaatctttgacaaaacaggcaccttaactcaaggaaaagctactgtgacaaccacaaaggtcttctcagagatggaccgtggagaattccttacacttgttgcgtctgctgaggctagcagtgaacacccattggcaaaagctatagttgcgtacgctcggcatttccacttctttgatgaatccactgaagatggcgaaacaaataacaaagatttgcaaaactctggatggttacttgatacctcggatttctctgctcttcccggaaaagggattcagtgcttagtcaatgagaagatgattctggtgggaaaccgtaaacttatgtcagaaaatgccataaacatcccagaccatgtcgagaaatttgtggaagatcttgaagaaagcggaaagacgggagtcattgtagcctataatgggaaattagttggtgtgatgggaatcgcggatcctctaaagcgagaagccgctttggttgtggaaggtctccttagaatgggtgttcgacccataatggttacaggtgataactggagaacagcaagagcagtcgccaaagaggttggtatcgaagatgtgagagcagaagtaatgccagctggtaaagctgacgttatacgttcgctgcaaaaggacggaagcacagtagccatggtaggagacggaatcaatgactctcccgctctagccgctgcagatgtgggaatggcaattggtgcaggaacagatgtagcaatagaagcagcagattacgttctgatgagaaacaacttagaagacgttataacagccatcgatctctctcgaaaaaccttaacacgaatccgattaaattacgtcttcgcaatggcgtacaatgtagtgtcaatcccgatagcagcaggagtgtttttcccggttctgcgggtgcaattaccgccttgggcagccggagcatgtatggcactctcttcggttagtgttgtttgctcttctttgcttcttagaagatacaagaagccaagacttaccactgttttgaaaatcaccacggagtaa

SEQ ID NO: 55390 - protein, 1001 aa, Arabidopsis thaliana
MAPSRRDLQLTPVTGGSSSQISDMEEVGLLDSYHNEANADDILTKIEEGRDVSGLRKIQVGVTGMTCAACSNSVEAALMNVNGVFKASVALLQNRADVVFDPNLVKEEDIKEAIEDAGFEAEILAEEQTQATLVGQFTIGGMTCAACVNSVEGILRDLPGVKRAVVALSTSLGEVEYDPNVINKDDIVNAIEDAGFEGSLVQSNQQDKLVLRVDGILNELDAQVLEGILTRLNGVRQFRLDRISGELEVVFDPEVVSSRSLVDGIEEDGFGKFKLRVMSPYERLSSKDTGEASNMFRRFISSLVLSIPLFFIQVICPHIALFDALLVWRCGPFMMGDWLKWALVSVIQFVIGKRFYVAAWRALRNGSTNMDVLVALGTSASYFYSVGALLYGAVTGFWSPTYFDASAMLITFVLLGKYLESLAKGKTSDAMKKLVQLTPATAILLTEGKGGKLVGEREIDALLIQPGDTLKVHPGAKIPADGVVVWGSSYVNESMVIGESVPVSKEVDSPVIGGTINMHGALHMKATKVGSDAVLSQIISLVETAQMSKAPIQKFADYVASIFVPVVITLALFTLVGWSIGGAVGAYPDEWLPENGTHFVFSLMFSISVVVIACPCALGLATPTAVMVATGVGATNGVLIKGGDALEKAHKVKYVIFDKTGTLTQGKATVTTTKVFSEMDRGEFLTLVASAEASSEHPLAKAIVAYARHFHFFDESTEDGETNNKDLQNSGWLLDTSDFSALPGKGIQCLVNEKMILVGNRKLMSENAINIPDHVEKFVEDLEESGKTGVIVAYNGKLVGVMGIADPLKREAALVVEGLLRMGVRPIMVTGDNWRTARAVAKEVGIEDVRAEVMPAGKADVIRSLQKDGSTVAMVGDGINDSPALAAADVGMAIGAGTDVAIEAADYVLMRNNLEDVITAIDLSRKTLTRIRLNYVFAMAYNVVSIPIAAGVFFPVLRVQLPPWAAGACMALSSVSVVCSSLLLRRYKKPRLTTVLKITTE

SEQ ID NO: 55391 - DNA, 2652 bp, Arabidopsis thaliana
  CDS (1)..(2652)
atggcgagcaatcttctccgatttcctcttcctccgccatcgagtcttcatattcgtccaagtaagttcctcgtgaaccgatgctttccaagactgcgccgttctcgtatccggcggcactgttcgcgacctttttttttagtatcaaactcggtcgagataagtactcaatcatttgaatctactgaatcttcaatcgaatctgtgaaatccattacgagcgacacgcctattctcctcgatgtgagtgggatgatgtgtggtggctgcgtcgcccgagttaaatcggttttgatgtctgatgatcgagtcgcgtctgctgtggttaacatgctgactgaaaccgcggctgtgaagtttaaaccggaggttgaggtgacggcggatacggcagagagtttagctaagagattgacagagagtggttttgaggctaagaggagagtctcgggtatgggagtggcggagaatgtgaagaagtggaaggagatggtaagtaagaaagaggacttgcttgttaagagcaggaaccgtgtggcgtttgcgtggacattggtggctctgtgttgcgggtctcacacttcgcatattcttcattccttgggaattcacattgctcatggagggatttgggatttgctacacaactcttacgtgaaaggtggtttggccgttggagctttgttgggaccaggaagagaattgctgtttgatggcataaaagctttcgggaaaagatcacctaatatgaactcgttagttggattgggatccatggctgcattttccatcagtttgatctcactagttaatccagaactggagtgggatgcttccttcttcgatgaaccggtcatgctgcttggctttgtgctccttggtcgttctttggaagaaagagcaaagcttcaagcatctaccgatatgaatgaactattgtcactcatctccactcaatcaagacttgtgattacttcatcagacaataacaccccagtggattctgtactttcctctgattcaatttgcatcaatgtgtcagttgatgatatccgagttggagactcgctattggttttgcctggtgagacatttcctgtcgatgggagtgtcctagctggaagaagtgttgtagatgaatctatgctgacaggagagtcacttccggtgtttaaagaagaaggctgctcagtttcagcgggaacaattaactgggatggccctctacggatcaaagcttcttctactggttccaactcaacgatatctaaaattgtcagaatggttgaggatgcacaaggtaatgcagctcctgtacagaggctggcagatgcaatagctggacccttcgtctatactataatgtctttatctgcaatgacgtttgccttctggtattatgtcggttcacacatattcccagatgttttactcaatgatattgctggacctgatggagatgctttggccttaagcttaaaactggctgtggatgtcttggtagtttcctgcccctgtgcactgggccttgcaacaccaactgccatattaattggcacctctcttggagcaaagcggggatatcttatcagaggaggagatgttttagaacgtctggcatccatagattgtgtggctttagacaagacaggtactcttactgaaggaagacctgtcgtctctggtgttgcttctctaggatacgaagaacaagaagttcttaaaatggctgctgcggtggagaagacagcaacacacccaatagcaaaggctattgtaaacgaggctgaatctctgaatttgaaaactccagaaacaagaggccaattgacagaaccaggctttggtactttggcagaaatagacggacgttttgttgcagtgggttcacttgagtgggtttctgatcgtttcctcaaaaagaacgactcctcggacatggtgaagctggaaagtttattggatcataaattatcaaacacatcatcaacgtctagatactcaaagactgttgtttacgttggccgtgaaggagaagggatcattggtgctattgcaatatccgattgcttacgccaagatgctgaatttactgtagccaggctgcaggagaagggcatcaaaacagtcctcttatcaggggacagggaaggggcagtggcaactgtggcaaagaatgtggggattaagagtgaatcaaccaattattccttgtctcctgaaaagaaatttgagtttatatctaatcttcaatcctctggacatcgtgttgctatggtgggtgatggcataaacgatgctccctcgttggctcaagctgatgttggaatagctctaaagatcgaggcacaagaaaacgctgcatcaaatgcagcatcagtcatacttgtccgcaacaaactttcacatgttgtggatgcactgagtcttgcacaagcaactatgtcgaaagtatatcagaatctagcgtgggcaattgcgtataatgtcatctcaatccctatagctgcaggtgtcttgcttcctcagtatgatttcgccatgacaccttcgttatctggtggactaatggcattgagctcgatctttgtcgtttcaaattcattacttctgcagctccataagtctgaaacaagtaaaaatagcttgtga

SEQ ID NO: 55392 - protein, 883 aa, Arabidopsis thaliana
MASNLLRFPLPPPSSLHIRPSKFLVNRCFPRLRRSRIRRHCSRPFFLVSNSVEISTQSFESTESSIESVKSITSDTPILLDVSGMMCGGCVARVKSVLMSDDRVASAVVNMLTETAAVKFKPEVEVTADTAESLAKRLTESGFEAKRRVSGMGVAENVKKWKEMVSKKEDLLVKSRNRVAFAWTLVALCCGSHTSHILHSLGIHIAHGGIWDLLHNSYVKGGLAVGALLGPGRELLFDGIKAFGKRSPNMNSLVGLGSMAAFSISLISLVNPELEWDASFFDEPVMLLGFVLLGRSLEERAKLQASTDMNELLSLISTQSRLVITSSDNNTPVDSVLSSDSICINVSVDDIRVGDSLLVLPGETFPVDGSVLAGRSVVDESMLTGESLPVFKEEGCSVSAGTINWDGPLRIKASSTGSNSTISKIVRMVEDAQGNAAPVQRLADAIAGPFVYTIMSLSAMTFAFWYYVGSHIFPDVLLNDIAGPDGDALALSLKLAVDVLVVSCPCALGLATPTAILIGTSLGAKRGYLIRGGDVLERLASIDCVALDKTGTLTEGRPVVSGVASLGYEEQEVLKMAAAVEKTATHPIAKAIVNEAESLNLKTPETRGQLTEPGFGTLAEIDGRFVAVGSLEWVSDRFLKKNDSSDMVKLESLLDHKLSNTSSTSRYSKTVVYVGREGEGIIGAIAISDCLRQDAEFTVARLQEKGIKTVLLSGDREGAVATVAKNVGIKSESTNYSLSPEKKFEFISNLQSSGHRVAMVGDGINDAPSLAQADVGIALKIEAQENAASNAASVILVRNKLSHVVDALSLAQATMSKVYQNLAWAIAYNVISIPIAAGVLLPQYDFAMTPSLSGGLMALSSIFVVSNSLLLQLHKSETSKNSL

SEQ ID NO: 55393 - DNA, 3093 bp, Oryza sativa (japonica cultivar-group)
  CDS (1)..(3093)
atggcccatctccagctcacgccgctcgccgccggcggcggccgcggcggcgccgacgagatggaggaggtcgcgctgctcggccccgaatcctacgacgaggaggcggcggcggcgccggggccggaggaggaggaggggatgcggcgggtgcaggtgcgggtcacgggcatgacgtgctccgcctgcaccgccgccgtcgaggccgccgtctccgcccgccgtggcgtgggcggggtcgccgtctcgctcctccagagccgcgcccgcgtcgtcttcgaccccgcgctcgccaagtgttgtaacttggaaacttgcaattgcaaacagtctccctacaatgaagaagacatcatagaagcaatagaagatgctggattcgaggcagaactactcccggactctactgtttctcagcccaagctgcagaacactttatctggacaatttaggataggggggatgacatgcgctgcatgtgtgaattctgttgagggtatcttgaagaaattgcctggtgttaaaagagctgttgttgcattagcgacctcattaggggaagttgaatacgatccttctgtcatcagcaaagatgaaattgttcaggctattgaggatgctggttttgaagctgcactgttacaaagtagtgaacaagacaaggttttgctaggcttaatgggattgcatactgaggtagatgtagatatattgcatgatatcctaaaaaaaatggaaggcttgcgtcagttcaacgtaaatttggtactctcggaagctgaaattgtatttgatccagaagttgttggtttgaggtcaattgtggataccatcgagatggaaagcagtggcagactgaaagcccatgtacagaatccttacatacgggctgcttcaaatgatgcacaggaggcctccaaaatgcttcatcttctttgctctagcttattcctaagcattcctgtattttttattcgcatggtatgccctcgcatacacttcactcgttccctcctactcatgcacttgggaccattttatataggagacttgttgaagtggatactggtgagtatagtacagtttggtgttggcaaacgattctatgttgcagcctatagggccctgagacatggctctacaaatatggatgtactagttgttcttggcaccactgcatcatacgtctactctgtatgtgcgcttctttatggtgcattcactggatttcatcccccgaaatattttgagacaagtgccatgataatcacatttgtgctatttgggaaatatcttgaggtgcttgctaaaggcagaacatcagacgctattaagaagcttgtagagctggtccctgctacagcacttttgcttctgaaagacaaagaaggaaagtatgctgcagagaaggagattgatgcatccttaatccaacctggagatgtcttgaaagtgctcccaggttccaaggtacctgctgatggtactgttgtttggggtacaagtcatgttgatgagagtatggtaactggtgaatctgcacctatctccaaggaagtatccagtatagtaattggaggcacaatgaatttacatggaatcctccatatacaagcaactaaagtaggatcagggacagtcttgagccagataatctctcttgttgaaactgcccagatgtctaaggctcctattcagaagttcgctgattatgtggctggcatttttgttccaatagttgtcaccttgtccttggttacgttcattgcatggtttctttgcggatcgttgggagcatacccaaattcatgggttgatgaaactagcaattgctttgtcttctctctcatgttctccatctctgttgtggtgatagcctgcccatgtgctcttggtctggcaacgccaactgctgtcatggtagcaactggagttggggctaatcatggggtacttgtaaagggtggagatgcactggagagggctcagaatgtgaaatatgttatatttgataaaactgggacactgacacaaggaaaggctaccgtaacatcgacgaaggtattctcaggaattgatcttggagacttccttactttggtagcatctgcagaggcaagcagtgaacatccacttgcaaaagctatattggattacgcatttcatttccatttctttggcaaactcccctcatcaaaagatgacatcaagaaaagaaaacaacagatattatcccagtggcttctggaagtagcagaattttctgccttgcctggcaaaggggttcagtgtttgatcaatgggaaaaaaatcttggtgggaaatcgtactttgataactgaaaatgggataaatattcctgaagaagctgaaagtttcttggtagacctcgaactgaacgcgaagacaggagttcttgtagcatatgacagcgaactcattggctcaattggaatgactgatcccttgaaaagggaggctgttgtagttgttgaaggcctaaaaaagatgggcatctatccagtaatggttacaggggacaactggaggactgcacaagcagttgcaaaggaggttggcattgaggatgttagagctgaggttatgcctgcgggaaaagctgatgtcgtacgttctctccaaaaggatgggagtgtcgttgcaatggttggggatggcatcaatgactccccagccctagcagcagctgacgtcggaatggccattggtgcaggaacagacattgcaattgaagcagcggactatgtgctggtgcgaaacaaccttgaagatgtcatcacagcaattgacctctcaaggaagacgttcagccgaatccgatggaactacttctttgccatggcgtacaacatcatcgctatcccggttgctgctggagcactcttcccattcaccggcctccaaatgccaccttggctggctggtgcttgcatggcgttctcatctgttagtgtagtatgttcctctctgtggttgaggagatacagaaaaccaaggctcacaaccctgttacaaataactgtagagattttgttgacagatagaacttataccagaacttctgcggcttaa

SEQ ID NO: 55394 - protein, 1030 aa, Oryza sativa (japonica cultivar-group)
MAHLQLTPLAAGGGRGGADEMEEVALLGPESYDEEAAAAPGPEEEEGMRRVQVRVTGMTCSACTAAVEAAVSARRGVGGVAVSLLQSRARVVFDPALAKCCNLETCNCKQSPYNEEDIIEAIEDAGFEAELLPDSTVSQPKLQNTLSGQFRIGGMTCAACVNSVEGILKKLPGVKRAVVALATSLGEVEYDPSVISKDEIVQAIEDAGFEAALLQSSEQDKVLLGLMGLHTEVDVDILHDILKKMEGLRQFNVNLVLSEAEIVFDPEVVGLRSIVDTIEMESSGRLKAHVQNPYIRAASNDAQEASKMLHLLCSSLFLSIPVFFIRMVCPRIHFTRSLLLMHLGPFYIGDLLKWILVSIVQFGVGKRFYVAAYRALRHGSTNMDVLVVLGTTASYVYSVCALLYGAFTGFHPPKYFETSAMIITFVLFGKYLEVLAKGRTSDAIKKLVELVPATALLLLKDKEGKYAAEKEIDASLIQPGDVLKVLPGSKVPADGTVVWGTSHVDESMVTGESAPISKEVSSIVIGGTMNLHGILHIQATKVGSGTVLSQIISLVETAQMSKAPIQKFADYVAGIFVPIVVTLSLVTFIAWFLCGSLGAYPNSWVDETSNCFVFSLMFSISVVVIACPCALGLATPTAVMVATGVGANHGVLVKGGDALERAQNVKYVIFDKTGTLTQGKATVTSTKVFSGIDLGDFLTLVASAEASSEHPLAKAILDYAFHFHFFGKLPSSKDDIKKRKQQILSQWLLEVAEFSALPGKGVQCLINGKKILVGNRTLITENGINIPEEAESFLVDLELNAKTGVLVAYDSELIGSIGMTDPLKREAVVVVEGLKKMGIYPVMVTGDNWRTAQAVAKEVGIEDVRAEVMPAGKADVVRSLQKDGSVVAMVGDGINDSPALAAADVGMAIGAGTDIAIEAADYVLVRNNLEDVITAIDLSRKTFSRIRWNYFFAMAYNIIAIPVAAGALFPFTGLQMPPWLAGACMAFSSVSVVCSSLWLRRYRKPRLTTLLQITVEILLTDRTYTRTSAA

SEQ ID NO: 55395 - DNA, 2937 bp, Oryza sativa (japonica cultivar-group)
  CDS (1)..(2937)
atggagcagaatggagagaaccatctcaaagatccacttcttcaggcagatggaggcggctccggtgcttctcccgccggggcgtcgccgcggaaggagaggaagacgaggaaggtcatgttcaatgtccgggggatctcgtgtgcttcgtgcgccgtgtcgatagagacggtggtggctggcctcaagggagtcgagagcgtctcggtttcgccgcttcagggccaagctgttgtccagtacagaccagaggaagccgatgcaagaaccataaaagaagctatcgaaggcctcaatttcgaggtcgatgaacttcaagaacaggaaattgctgtatgcagactccagataaaaggaatggcatgtacaagctgctcggaatctgtggagcgagcacttcagatggtacctggagtgaagaaagctgcagtgggacttgccctagaggaagctaaagtccattttgatccaaatatcacaagtcgtgatcttataattgaggctattgaagatgctggatttggagctgatctcattagttccggggatgatgtgaacaaagtccacctaaaactagagggtgtgagttccccagaagacatcaaactcattcagtcaagactggaatctgtcgaaggtgtgaataacgtggaatgtgacacagcgggacagacaataatagttgcatatgatcctgatgtcactggcccacgattacttattcagtgcattcaggatgctgcacagccccctaaatacttcaatgctagcttgtattcaccaccaaagcaaagagaggcagagcgccatcatgaaattaggaattacaggaatcaatttctttggagttgcctgttttctgtgcctgtattcatgttctccatggttctgccaatgatttctccttttggggattggctgttttacaaagtatgcaataacatgacgataggtatgctattacggtggttgctgtgttctccagttcagttcattattggttggagattttatgttggagcttatcatgcgctaaaacgaggatactcgaacatggacgtgcttgttgctttggggacaaatgctgcatacttctattctgtgtatatagttctgaaggcactaacatcagagtcatttgaaggacaggatttcttcgaaactagtgctatgttgatatcttttatattgctggggaaatatctggaggtggtggccaaaggaaagacatcagatgctttgtcgaagttgactgaacttgcaccagaaacagcttgtcttcttactttggacaaagatggaaatgccatttcagaaacggagatcagcactcagttacttcagagaaatgatgtcattaagattgtccctggggaaaaagtccctgttgatggtgttgtcatcaaaggccaaagtcatgtgaatgaaagtatgataactggtgaagcaaggcccattgcaaagaaaccaggagacaaggttattggtggtactgtaaatgacaatggttgtataattgttaaggtcactcatgttgggtcagaaacagctttgtcacagatagttcagttagttgaagctgctcaacttgcaagggctccagttcagaagttggcagataggatttcacggttttttgtcccaacggttgtggtggctgcatttcttacatggcttggctggttcgtagctgggcaattcgacatataccctcgagaatggattccaaaggcaatggatagctttgagcttgctctgcagtttggaatatctgttcttgttgttgcatgcccgtgtgctcttggactggctaccccgactgctgttatggttgccactggaaaaggtgcttctcaaggtgttcttattaagggtggcaatgcacttgagaaagctcacaaggttaaagctatcatatttgataaaactggaacgctgactgtcggtaaaccttctgttgttcaaacaaaggtgttctccaagataccgctactagagctgtgtgatttggctgctggtgcagaggcgaacagtgagcatcctctatcaaaggctattgtagagtacacaaagaagctcagggaacaatatggatctcacagtgaccatataatggagtccaaggactttgaggtgcatccaggggcaggggtgagtgccaatgttgaaggcaagctggtgctggttggaaacaaaaggcttatgcaagaatttgaagttccaataagttctgaagtagagggacacatgtctgaaacagaagagcttgctaggacctgtgtgcttgttgctatcgacagaaccatctgcggagctctttctgtgtcagatcctctgaaacctgaggcaggccgtgccatttcatacctcagctcaatgggtatctcgagtatcatggtgacgggcgacaattgggctacagctaaatccatagctaaagaggtcgggatcggcacagtatttgccgagatcgatccagttggtaaagccgaaaagatcaaggacttgcagatgaaagggttgacggtggccatggtcggcgacgggataaacgactcgccggctctagccgctgcagacgtaggcctggcgattggggctggaaccgacgtcgccatcgaagctgccgacattgtcctgatgaggagcagcctcgaggatgtgatcactgccatcgatctctccaggaagaccctctcaagaatccggctcaactacgtctgggctctgggctacaacgtcctgggcatgccggtcgccgcgggcgtcctgttcccgttcaccggcatccggctgccgccatggctcgccggagcttgcatggcggcctcgtcggtgagcgtcgtctgctcgtcgctgctgctccagctctacaagaagccattgcacgtcgaggaggtggctgctggacccaagaatgacccggatttggtgtga

SEQ ID NO: 55396 - protein, 978 aa, Oryza sativa (japonica cultivar-group)
MEQNGENHLKDPLLQADGGGSGASPAGASPRKERKTRKVMFNVRGISCASCAVSIETVVAGLKGVESVSVSPLQGQAVVQYRPEEADARTIKEAIEGLNFEVDELQEQEIAVCRLQIKGMACTSCSESVERALQMVPGVKKAAVGLALEEAKVHFDPNITSRDLIIEAIEDAGFGADLISSGDDVNKVHLKLEGVSSPEDIKLIQSRLESVEGVNNVECDTAGQTIIVAYDPDVTGPRLLIQCIQDAAQPPKYFNASLYSPPKQREAERHHEIRNYRNQFLWSCLFSVPVFMFSMVLPMISPFGDWLFYKVCNNMTIGMLLRWLLCSPVQFIIGWRFYVGAYHALKRGYSNMDVLVALGTNAAYFYSVYIVLKALTSESFEGQDFFETSAMLISFILLGKYLEVVAKGKTSDALSKLTELAPETACLLTLDKDGNAISETEISTQLLQRNDVIKIVPGEKVPVDGVVIKGQSHVNESMITGEARPIAKKPGDKVIGGTVNDNGCIIVKVTHVGSETALSQIVQLVEAAQLARAPVQKLADRISRFFVPTVVVAAFLTWLGWFVAGQFDIYPREWIPKAMDSFELALQFGISVLVVACPCALGLATPTAVMVATGKGASQGVLIKGGNALEKAHKVKAIIFDKTGTLTVGKPSVVQTKVFSKIPLLELCDLAAGAEANSEHPLSKAIVEYTKKLREQYGSHSDHIMESKDFEVHPGAGVSANVEGKLVLVGNKRLMQEFEVPISSEVEGHMSETEELARTCVLVAIDRTICGALSVSDPLKPEAGRAISYLSSMGISSIMVTGDNWATAKSIAKEVGIGTVFAEIDPVGKAEKIKDLQMKGLTVAMVGDGINDSPALAAADVGLAIGAGTDVAIEAADIVLMRSSLEDVITAIDLSRKTLSRIRLNYVWALGYNVLGMPVAAGVLFPFTGIRLPPWLAGACMAASSVSVVCSSLLLQLYKKPLHVEEVAAGPKNDPDLV

SEQ ID NO: 55397 - DNA, 2733 bp, Oryza sativa (japonica cultivar-group)
  CDS (1)..(2733)
atggccgccaccgctagccgttcccccctccatgtcaccgctccggttcgcggcgttaaccccctgttgctccggcgtctccggttgggtcgaggtggcggttgtggtaaggcctcgactgcgcagcgattctgcctcgtcgtcctcccccgcggcccagcggtggccaccccccgctccacggccgatccctccgcctcggcctcgagcgcggtcgacgcggccgcggcggcgggagaaggagagggggccagtgatgctgccaccgtgctgctcgacgtgagcggcatgatgtgcggtggctgcgcggcgcgggtgcggaccatcctggccgcggacgagcgggtggagaccgcggcggtcaacctcctcgcggagtcggcggccgtgcggctgaggtcgccggagccggccgccgggaaggagctggcggcgaggctgacggagtgcgggttcccctcggtggcgcggcgagggggcgcggcctcgggggctagcgacagcgctcggaagtggagggagatggcggccaggaaggcggagctcctcacgcggagccgtgggcgcgtcgccttcgcgtggacgctcgttgcgctctgctgcggctcgcacgcaacccatttcctacactcgctcggcatccacgtcggccatggaacgtttttggatctgttgcataattcgtatgtgaaatgtggcattgcaatagcggcattgtttgggcctggaagaggctttttatccttttctcaaaatgtgttcaatgtaacaccagatatactttttgatggtcttcgagcattcaagcaaggatcccccaacatgaactctcttgtagggtttggatctgcagcggcatttgctatcagttcagtgtccttgctgaaccctgaactggaatggaattcaaccttttttgatgaaccggtcatgcttctcggatttgtgcttcttggacgatctcttgaagaaagtgccaggcttaaggcttctagcgatatgaatgagctcgtttcactcttatcacctcagtcaagattggtcgttacttcctcaagtgacgatccatcctcagatggtgttttgaattcagatgcaatcactgttgaggttcctgttgatgatgttcgtgttggagacttcatattggtccttccaggagaaacaatccctgtagatggaaatgtccttggaggatcaagttttgttgacgaatcaatgcttactggggaatcgttgccagtccccaaggaaaaagggtttcctgtatttgctggaactgtaaactgggatggtcctttaaagatcaaagcgacaactactggaccatcatcaacaattgctaagattgtccgaatggttgaggatgcacaagcacgtgaagctcccgttcaaaggcttgcagattcaattgcagggccatttgtttatactgttatgacattgtctgcagcaacattttctttctggtattacattggcacccacatctttccagaggtccttctaaatgatatttctggtccagacggggattcattactattgagcttgaagctcgctgtggatgtacttgttgtttcctgtccttgtgcactcggattagctacccctacagctattttgataggaacttcactgggtgctaaacggggactacttattagagggggtgatgttttggagcgtttagctggaatagatgccattgtacttgataagacagggacgctaacaaagggaagaccagtagttacttctatagcttctttagcatatgaggaggcggagattcttcgtctcgccgctgcagtggagaaaacagcattgcatcctatcgcaaatgctataatggaggaggccgaacttctcaaactagatatcccagccacaagtggtcaacttacagagcctggttttggctgtttggcagaagtagatgggtgcttggttgcagtaggcactttggactgggtccacaatcgatttgagaccaaggcatcgtcaactgaactgacagatctcggaaatcatctagagtttgtgtcttccagtgaggcatcatctaatcactcaaaatcaattgcttatgttggccgtgagggagaaggaataataggtgctatcgctgtatcagatgttctgcgtgatgatgccaaagcaaccgtggacaggctccagcaggaagaaatcttgacatttctactatcaggagacaggaaagaagcagttgaaagcattgggagaactgtagggatcagaagtgaaaacataaagtcatccttaactccacatgaaaaggcaggcattataactgcattgcaaggagagggacgtcgggttgcaatggttggggatggaataaatgatgcaccatctttagcagctgctgatgtgggagtagctatgcgaacaaactcaaaagagagtgctgcctctgacgcggcttcagttgttctattaggaaacagactttctcaggtaatggatgctttatcactttcgaaagcaactatggccaaagttcaccaaaatttagcctgggctgtcgcatataacatagtagctatccctattgccgccggggtgttgctgcctcaatttgatttcgccatgacaccatctctatcagagtacggaaaaacaacgggaagatctgaactccaggctgaattaaatttgctcgcagaccgcatcaaatttggtccagtttgcatatcgccgcatccgtag

SEQ ID NO: 55398 - protein, 910 aa, Oryza sativa (japonica cultivar-group)
MAATASRSPLHVTAPVRGVNPLLLRRLRLGRGGGCGKASTAQRFCLVVLPRGPAVATPRSTADPSASASSAVDAAAAAGEGEGASDAATVLLDVSGMMCGGCAARVRTILAADERVETAAVNLLAESAAVRLRSPEPAAGKELAARLTECGFPSVARRGGAASGASDSARKWREMAARKAELLTRSRGRVAFAWTLVALCCGSHATHFLHSLGIHVGHGTFLDLLHNSYVKCGIAIAALFGPGRGFLSFSQNVFNVTPDILFDGLRAFKQGSPNMNSLVGFGSAAAFAISSVSLLNPELEWNSTFFDEPVMLLGFVLLGRSLEESARLKASSDMNELVSLLSPQSRLVVTSSSDDPSSDGVLNSDAITVEVPVDDVRVGDFILVLPGETIPVDGNVLGGSSFVDESMLTGESLPVPKEKGFPVFAGTVNWDGPLKIKATTTGPSSTIAKIVRMVEDAQAREAPVQRLADSIAGPFVYTVMTLSAATFSFWYYIGTHIFPEVLLNDISGPDGDSLLLSLKLAVDVLVVSCPCALGLATPTAILIGTSLGAKRGLLIRGGDVLERLAGIDAIVLDKTGTLTKGRPVVTSIASLAYEEAEILRLAAAVEKTALHPIANAIMEEAELLKLDIPATSGQLTEPGFGCLAEVDGCLVAVGTLDWVHNRFETKASSTELTDLGNHLEFVSSSEASSNHSKSIAYVGREGEGIIGAIAVSDVLRDDAKATVDRLQQEEILTFLLSGDRKEAVESIGRTVGIRSENIKSSLTPHEKAGIITALQGEGRRVAMVGDGINDAPSLAAADVGVAMRTNSKESAASDAASVVLLGNRLSQVMDALSLSKATMAKVHQNLAWAVAYNIVAIPIAAGVLLPQFDFAMTPSLSEYGKTTGRSELQAELNLLADRIKFGPVCISPHP

SEQ ID NO: 55399 - DNA, 3009 bp, Oryza sativa (japonica cultivar-group)
  CDS (1)..(3009)
atggcggcgagcactcgagccctcttcctctcctgcttccacggaagcggcggcggcggcggcacttccgaggtgagccgccgcctcgtgctgcggccgcggtacccgtccatgccgcggcgaccgaggtcggccgcggtcgccggagagggaggggaaggaggaggaggaggaggcgacggcgatctggaggcggcggccgtgggggcggaggaggaggagaaggtggcggtgttcgaggtgtccgggatgacgtgcgccgcgtgcgcgggctcggtggagaaggccgtcaagcggctccagggcatccacgacgccgccgtcgacgtcctcgggggccgcgcgcaggtcgtcttctacccggcgttcgtctcggaggaaaaaattagggaaaccatccaggatgtgggctttgaagctaagctgattgatgaggaagtcaaggaaaaaaacattctagtatgcaggctgcacataaaaggaatgacctgcacatcttgtgcgagcacagtggaatccatcttgcaagttgttcctggtgttcagagagcttctgtcgcattggctactgaagaggcagaaatccgttatgaccgtagaatcgttactgccagtcaactaacccatgcagttgaagagacgggttttgaagcaatactgatcaccactggagatgatcagagcaggatagacctcaaagtggatggcacactcaacgagagatcaatcatgatagtgaaaagctctgtccaagctcttcctggtgtggaagacataaaagttgatcctgagctccacaagatcaccatctcatacaaacctgaccagacaggtcctcgagacctcattgaagtcattgagtcagctgcctctggtgatcttactgtatcgatatacccagaagcagatggaaggcagcagcatagacatggggagatcaagcgatacaggcagtctttcttgtggagtttagtattcaccatcccggtattcctcacctccatggtgttcatgtacatcccagggctgaaggatgggctcgaaaagaaggttattaacatgatgagcattggtgagctcttgcggtggattttgtcaacgccagttcaatttgtaattggccgcagattttatactggtgcttataaagcgttatcccacggctcatcaaacatggatgtactcattgctcttgggaccaacacagcttacttctactcagtttactccatcctccgagctgcctcctcacataattacatggcaactgatttttttgaaactagttcaatgctcatatcgtttatccttcttggaaagtaccttgagatcttggcaaaagggaagacctctgaggctattgccaagcttatggatcttgcaccagaaactgcaactatgttgatatatgatcatgaagggaatgttgtgggcgagaaggaaattgacagtaggttgattcagaaaaatgatgtgatcaaagtagtcccaggtgggaaagttgcttctgatggctttgttatatggggacagagccatgtgaatgaaagcatgatcaccggagaatcacgacctgtggcaaagaggaagggtgacactgtcataggagggacggtgaatgagaatggtgtgcttcatgtccgtgcaacatttgttggatcagagagtgcccttgcacagattgtacggctagtagagtcagcgcaaatggcaaaagctcctgtacaaaagtttgctgatcagatatctagagtctttgttcccctggtcatcattctttctttgcttacttggcttgcttggttcttagctgggaggcttcatggttaccctaactcatggataccatcttccatggatagctttcaactagctctccaattcgggatatcagttatggttattgcatgcccttgcgccttagggcttgcaactccaacagctgtgatggttgctactggagttggtgcctcacaaggagttcttatcaagggtgggcaagctctggagagtgcacagaaggtcgactgcatcgttttcgacaagacagggacactaaccattgggaagcctgttgtggtcaacacaagactgttaaaaaacatggtcttgcgtgaattctatgcttacgttgcagcagcagaggtcaacagtgagcacccactgggtaaggcagtcgtggagcatgccaagaagttccattcggaagagagccatgtctggactgaagcaagggatttcatttcagtgacagggcacggtgtcaaggcaaaaataagtggcagggctgttatggtgggaaacaagagctttatgttgacttcaggcattgatatcccggtggaagctttggaaatcctaacggaagaagaggagaaggcccaaacagcgatcattgtggctatggatcaagaactcgtgggcattatctctgtatctgatccaataaaaccaaatgcccgcgaagtgatttcgtatctcaaatctatgaaggtggagagtataatggtgactggggacaactgggggactgccaatgccattagcaaagagcttggcattgagaacacagttgcagaagcgaaaccagagcagaaagctgagaaggtgaaagaacttcagtcggccggaaggaccgtggcaatggttggtgatggaatcaacgattctccagcgcttgtatcagccgacgttggcctggcgattggcgcaggcactgacgtcgccattgaagcggccgacatcgtcctcatgaagagcaacctggaagacgtgatcaccgccatcgatctgtccagaaaaaccttcttccgcatacggatgaactacgtctgggcgctcggctacaacatcatcggcataccgatcgctgccggggtgctcttcccgtcgacccggttccgcttgccgccatgggtcgccggcgctgcgatggctgcttcctccgttagcgtcgtctgctggtccctgctgttgaggtactacaagagcccaaaactgggccgttga

SEQ ID NO: 55400 - protein, 1002 aa, Oryza sativa (japonica cultivar-group)
MAASTRALFLSCFHGSGGGGGTSEVSRRLVLRPRYPSMPRRPRSAAVAGEGGEGGGGGGDGDLEAAAVGAEEEEKVAVFEVSGMTCAACAGSVEKAVKRLQGIHDAAVDVLGGRAQVVFYPAFVSEEKIRETIQDVGFEAKLIDEEVKEKNILVCRLHIKGMTCTSCASTVESILQVVPGVQRASVALATEEAEIRYDRRIVTASQLTHAVEETGFEAILITTGDDQSRIDLKVDGTLNERSIMIVKSSVQALPGVEDIKVDPELHKITISYKPDQTGPRDLIEVIESAASGDLTVSIYPEADGRQQHRHGEIKRYRQSFLWSLVFTIPVFLTSMVFMYIPGLKDGLEKKVINMMSIGELLRWILSTPVQFVIGRRFYTGAYKALSHGSSNMDVLIALGTNTAYFYSVYSILRAASSHNYMATDFFETSSMLISFILLGKYLEILAKGKTSEAIAKLMDLAPETATMLIYDHEGNVVGEKEIDSRLIQKNDVIKVVPGGKVASDGFVIWGQSHVNESMITGESRPVAKRKGDTVIGGTVNENGVLHVRATFVGSESALAQIVRLVESAQMAKAPVQKFADQISRVFVPLVIILSLLTWLAWFLAGRLHGYPNSWIPSSMDSFQLALQFGISVMVIACPCALGLATPTAVMVATGVGASQGVLIKGGQALESAQKVDCIVFDKTGTLTIGKPVVVNTRLLKNMVLREFYAYVAAAEVNSEHPLGKAVVEHAKKFHSEESHVWTEARDFISVTGHGVKAKISGRAVMVGNKSFMLTSGIDIPVEALEILTEEEEKAQTAIIVAMDQELVGIISVSDPIKPNAREVISYLKSMKVESIMVTGDNWGTANAISKELGIENTVAEAKPEQKAEKVKELQSAGRTVAMVGDGINDSPALVSADVGLAIGAGTDVAIEAADIVLMKSNLEDVITAIDLSRKTFFRIRMNYVWALGYNIIGIPIAAGVLFPSTRFRLPPWVAGAAMAASSVSVVCWSLLLRYYKSPKLGR

SEQ ID NO: 55401 - DNA, 2415 bp, Archaeoglobus fulgidus DSM 4304
  CDS (1)..(2415): transl_table=11
gtggtaaaggatacttatatctcttcagccagcaagactccgccaatggaaagaaccgtcagagttaccggaatgacgtgcgccatgtgcgtcaagtcgattgagacggctgttggaagcctggagggtgttgaagaggttagggtaaatctcgccaccgagacggcttttataaggtttgacgagaaaaggatcgattttgaaacgataaagagggtgattgaggacctcggttatggtgtggtggatgagcaagctgctgttagtgcggaggttgagcacctttcaagaatgaaaaggaagctctacgtggcagcctttgccggagtattgctgctctttcttgcgcactttatcagcttaccttacgaggacttcgttcagctcttgatagccttgcccgctatcttttattcggggagctcgattttcaaggctgcattctccgctttgaggcgcagaacgcttaacatggatgtaatgtactcaatgggagttggggcggctttccttgcaagcgttctatcaaccgccggagtccttccaagagaatactctttttacgagacgtcggttttgctgcttgcctttcttctccttggcagaacgcttgaggcgagggcgaagagcagaaccggggaggccataaagaagctcgtagggcttcaggcgaaaacagcggttgtaatcagggatggaaaggaaatagcggttccggttgaggaggttgctgttggagacatcgtgattgttaggcctggggagaagataccggttgacggtgtggtggtggagggggagagctacgttgacgagtcgatgatttcaggtgagcctgtgccagtgttgaagagcaaaggtgatgaggttttcggggcaacaatcaacaacacgggtgttttgaaaataagggccacgagggttgggggtgaaactcttcttgcccagattgtaaagctggtcgaggacgcgatgggcagcaaacctccgattcaaaggctggcagacaaagtcgttgcatatttcatccccacagtgcttctcgttgcgatctcagctttcatttactggtacttcatcgcccacgctccgttgctctttgccttcacaacgctcatcgcggttctggtggttgcctgcccctgcgctttcggccttgccacaccgacagcattaactgttggaatgggaaagggggccgagctcggaattcttataaaaaatgccgacgctctcgaagtggctgaaaaggtcacagctgtaatttttgataaaacgggcactctcaccaaaggaaaaccggaggttacggatttagttcccctcaacggggatgaaagggaacttttgaggttggctgcgatagccgagaggaggagtgagcatcccattgctgaggccatcgttaaaaaggctttagagcatggcattgagcttggcgagcccgagaaggttgaggtcattgctggcgaaggtgttgtggcagacggcattttggtggggaacaaaaggttgatggaggactttggggttgctgttagcaatgaagttgagctagcgctggagaagctggaaagggaagccaagaccgccgtaattgttgcaaggaacggcagagttgaggggattatagcggtttctgacacgctcaaggaatctgcgaaacctgctgtgcaggagcttaaaagaatggggataaaggttggaatgattacaggggataactggaggagcgccgaagccatttccagagagctgaacctcgacctcgtcattgcggaggttctgccacatcagaagtccgaggaggtcaaaaagctgcaggctaaggaggttgtagcctttgtgggggacggcataaacgatgccccggcactggctcaggcagacctcggcattgccgtagggagcgggtcggatgtggctgttgaaagcggagacattgtgcttataagggacgaccttagggacgtcgtagcggcaattcagctcagcagaaagaccatgagcaaaatcaagcagaacattttctgggccttgatttacaacgtaatcttaattcccgccgcggcgggcttgctttatcccatctttggcgttgtcttccgccccgaatttgcaggtttggctatggcgatgagcagcgtgagtgttgtggcaaactccctgctcttgagaaattacgttcctccgataaggaggggaggtgatagtgtggagaagattgtattggagctttcaggactgtcatgccaccactgcgtggccagggtgaagaaggctttggaggaagcaggagcgaaggttgaaaaggtcgatttgaacgaggctgttgttgctggaaacaaagaggatgtggataaatacataaaggcagttgaagcagcaggataccaggcaaagctcagaagctaa

SEQ ID NO: 55402 - protein, 804 aa, Archaeoglobus fulgidus DSM 4304
MVKDTYISSASKTPPMERTVRVTGMTCAMCVKSIETAVGSLEGVEEVRVNLATETAFIRFDEKRIDFETIKRVIEDLGYGVVDEQAAVSAEVEHLSRMKRKLYVAAFAGVLLLFLAHFISLPYEDFVQLLIALPAIFYSGSSIFKAAFSALRRRTLNMDVMYSMGVGAAFLASVLSTAGVLPREYSFYETSVLLLAFLLLGRTLEARAKSRTGEAIKKLVGLQAKTAVVIRDGKEIAVPVEEVAVGDIVIVRPGEKIPVDGVVVEGESYVDESMISGEPVPVLKSKGDEVFGATINNTGVLKIRATRVGGETLLAQIVKLVEDAMGSKPPIQRLADKVVAYFIPTVLLVAISAFIYWYFIAHAPLLFAFTTLIAVLVVACPCAFGLATPTALTVGMGKGAELGILIKNADALEVAEKVTAVIFDKTGTLTKGKPEVTDLVPLNGDERELLRLAAIAERRSEHPIAEAIVKKALEHGIELGEPEKVEVIAGEGVVADGILVGNKRLMEDFGVAVSNEVELALEKLEREAKTAVIVARNGRVEGIIAVSDTLKESAKPAVQELKRMGIKVGMITGDNWRSAEAISRELNLDLVIAEVLPHQKSEEVKKLQAKEVVAFVGDGINDAPALAQADLGIAVGSGSDVAVESGDIVLIRDDLRDVVAAIQLSRKTMSKIKQNIFWALIYNVILIPAAAGLLYPIFGVVFRPEFAGLAMAMSSVSVVANSLLLRNYVPPIRRGGDSVEKIVLELSGLSCHHCVARVKKALEEAGAKVEKVDLNEAVVAGNKEDVDKYIKAVEAAGYQAKLRS

SEQ ID NO: 55403 - DNA, 2202 bp, Streptococcus pyogenes M1 GAS
  CDS (1)..(2202): transl_table=11
atgagttgtgcctcttgtgctctaacaattgaaaaaacagtcaatcaattgcctgaagtagaacaggctgttgtgaatttagcgactgagaagctcacggttacttatcaagatgacgatttagaaacggccaaagttattcaagcggtgaaagctgctggttatggtgcacaagtctttgatgaacatgcaaaacacatgcaaacaggtcgtcgtgacgaagacctaaaggttatttggtctcaggtcttgtggtctgccctattcaccattcctatattatacctagctatgggtcacatggtgggcttatggcttcctccatttctgcaaccagatcgctatcctttcgtttacagctttagtcagctactcttgacgattccagtcttagtattaaatcgtcattattaccataatgggtttaaagctttgtttaagggacatcctaatatggactccttggtagctttagcaaccagctttgcttttgcttatagtctttatggagtggttgaaatcagtctgggccgggcgcactttgtgcactccctttattttgaatcggtggtagtgattttgacactcatcggtctaggaaagtattttgaaagtcgttctaagggccgtacttctcaagctattcaaaagctcctatccttgaaggctactgttgtgagggtatggagaaacagccaatggcaattgttaccattagaagaagttagctatgatgaccttgtcctggttcaaccaggtgaaaaagtttctattgacggtattatcgtggaaggacatagcagtttggatgaatcctttttaaccggggaaagtttgcctgttgaaaagggagaaaaagataatgtctttgcgggcagcttgaatgggccaggcgccctcacgattaaaccagataagcttggaaatgataccttgttagcacaaattatccaactagttgagaatgctcaagaaaataaagcacctattgcagctattgctgatagagtctcaggtgtctttgttccggtggttttggtattagctctgttaacaggggtgttttggttggtattcatgcaggaaagtcttcgttttagtttgacaacagccatcgctgttctagtcattgcttgcccttgtgcgcttggtttagcaacgccgacagcgattatggttggaacagggcgtgcagctgaaaatggtattctttttaaaggtggtgacatcttagaacaagcacatcaggtagatacggttgtttttgataaaacggggacgattacggaggggaaaccaagtcttcaaaagctcctaactttttcgggagatgatcaccttatcttgcaagaagctgcttccttggaggcctattctcaacaccccttaggggaggctattgttcgtgctgctcaggaagctggttacgatagtctaccagtggaagagtttgagtctttaaccggcctaggagttactggtcagcttgaagggcgtcgtttggcgattggaaatgctgctttaatgggaattcttggtatcgatttatcttgtgttcagtcggtttgtgctaaggcttctgagaaaggccaaacccttgtatattatgctaaagaggggcagctacgagctcttttcagtattgctgacgctgtcaaagaagatagtcaagctaccgtcgaagctttgcatcaactgggaattcacaccatcatgctaacaggtgaccacgatgctaccgctaaggctattgcctctcaagtggggattacagatgtgatcagtcaagtcttacctgatcaaaaagcaggcgtgatagcagacctccgctctcaagggagaaaagttgcaatggtaggtgatggtattaatgatgctccggcattggctgtagcagacattgggatagctatggggtcagggacagatattgccattgaatcggcggatgtgattctgatgaaacctgatatgctggatttggtgaaagctatgtcattgagtcgagtgactatgagaattgtcaaggaaaatttattttgggcattcatttacaatgtcctcatgattccagtggccatgggcttacttcatctttttggaggtccactattgaacccgatgttagcaggttttgccatgagttttagttcagtatcagttgttttgaatgccctgcgattaaaaggaaaaaccatttaa

SEQ ID NO: 55404 - protein, 733 aa, Streptococcus pyogenes M1 GAS
MSCASCALTIEKTVNQLPEVEQAVVNLATEKLTVTYQDDDLETAKVIQAVKAAGYGAQVFDEHAKHMQTGRRDEDLKVIWSQVLWSALFTIPILYLAMGHMVGLWLPPFLQPDRYPFVYSFSQLLLTIPVLVLNRHYYHNGFKALFKGHPNMDSLVALATSFAFAYSLYGVVEISLGRAHFVHSLYFESVVVILTLIGLGKYFESRSKGRTSQAIQKLLSLKATVVRVWRNSQWQLLPLEEVSYDDLVLVQPGEKVSIDGIIVEGHSSLDESFLTGESLPVEKGEKDNVFAGSLNGPGALTIKPDKLGNDTLLAQIIQLVENAQENKAPIAAIADRVSGVFVPVVLVLALLTGVFWLVFMQESLRFSLTTAIAVLVIACPCALGLATPTAIMVGTGRAAENGILFKGGDILEQAHQVDTVVFDKTGTITEGKPSLQKLLTFSGDDHLILQEAASLEAYSQHPLGEAIVRAAQEAGYDSLPVEEFESLTGLGVTGQLEGRRLAIGNAALMGILGIDLSCVQSVCAKASEKGQTLVYYAKEGQLRALFSIADAVKEDSQATVEALHQLGIHTIMLTGDHDATAKAIASQVGITDVISQVLPDQKAGVIADLRSQGRKVAMVGDGINDAPALAVADIGIAMGSGTDIAIESADVILMKPDMLDLVKAMSLSRVTMRIVKENLFWAFIYNVLMIPVAMGLLHLFGGPLLNPMLAGFAMSFSSVSVVLNALRLKGKTI

SEQ ID NO: 55405 - DNA, 2574 bp, Halobacterium sp. NRC-1
  CDS (1)..(2574): transl_table=11
atgacgaccagaacagcgcggatcgatgtcggggggatgtcctgtgcgaactgctcgggcaccgtcgaggacgccgtgggcgcgctcgacggcgtcaccgacgcgaccgcgaacttcgccaccgacgccgccaccgtcacctacgatcccaccgccgccgacctggcgggcgtctgtgccgcgatctcggacgccggctacaccccgatcacggccgacaccacgatcccggtccacgggatgacctgtgcgaactgcgcgcagacgatcgaagacgccgtcgccgacgcccccggcgtcctggacgtgtccgcgaacttcgccaccgacgacgcacacctcacgtacgtccccgcagcgttcgaccgggacgccgtccacgccgccatcaccgacgccggctacgaccccatcgatgccgactccgacaccggtgccagcacccagaccgccgccgacgaggcccgggacgcggagcggcgacgacaacgcatccgcctggcgttcggcgcggtgctgtcggcgccgctcctgtttttcgtcgccgacaccttcctgttcgggggcgctgtcgttcccgacagcttcaccgttggcggcctcacgatcccgttcgggtgggcggagttcgcactggcgacccccgtctacgtcgtcctggggcggtcgtttctcagcaactcgtatgcggcgctcgtgcgcaacggcaccgcgaacatggacgtcctcgtggcgctggggtcgacgaccgcgtacgtgtactcgctcgcgtcgctgctcggcgtcctggccggcggcggcctctacttcgacacggcggcgctcatcctcgtgttcatcacgctcgggaactacctcgaagcccgctcgaagagccaagccagcgacgccctccgggagctcctggagatggaggccaacaccgcgcgcctcgtcgacgccgacggcgagacacgcgagatccccgccgacgacgttgaggtcggcgaccgcctgaaagtcaaaccgggcgagcagattccgaccgacggcgtcgtggtgtccggggagtccgcggtcgacgaatccatggtcaccggcgagtccgtgcccgtgtccaaggcccccggcgacgacgttgtcggcgccacgatcaacgagaacggcgtgctcgtcgtgcaggccacgaaggtgggggcggacaccgcgatccagcagatcgtcaccacggttcgggacgcccagtcccgccagccggacatccagcgcctggccgaccgcatcagcgcgtacttcgtccccgcggtcatcgccaacgccgtcttctggggggcggtatggtggttcgcccccgggctgctggctgacgtggtgtcggcgcttccgctgtgggggctcgtcagcggcggcccggcggccgtcggcaccggcgagttcgccgtcgtcgtgttcgcgtccgcagtcctcatcgcgtgcccgtgtgcgctcgggctcgcgacgccggccgcgacgatgatcggcacgagcatcggcgcgaaacacggcgtgctcttccagggcggcgatgtcctggagcgcgtgaccgagttggacgcggtcgtgttcgacaagaccggcactctgacgaccggcgcgatggagctcacggacgtcgaggccgtcgccgccgtccccgacggcggcaccgccacccggagcgacgccgctgtcgacgaggacgccgtgctccggctggccgccgccgccgagtccaacagcgagcacccgctcgggaccgccatcgtcgcgggcgccgaggaccgcggcctcgacgttcccgcagtcgatgccttcgagaacgtccccggcaaaggcatcgtcgcgaccgtcgacggtcgccgcgtccgcgtggggaaccgcgcgctcctcacgagcgcggacatcgacccggcgcccgccgccgacgccatggaacgcctcgaacgcgaggggaagaccgcgatgctggttgccgtcgacgaccgggttgccggtgtcgtcgcggacgccgacacggtcaagcccgaggcagccgccaccgtcgacgccctccaggatcgcggcctcgacgtgcacatgatcacgggcgacaacgaacgcaccgcgcgcgcggtcgccgccgacgtgggggtctcgcccgagcacgttcgggcgggcgtgctccccggggagaaagccgacgccgtcgacgccatccaggcgggcgacgccgacgccatgatggtcggggacggtgtcaacgacgcccccgcgctcgccaccgcgcacgtcggcgccgcgatcggatcgggcaccgatgtagcgatcgaggcggcggacgtgacgttgatgcgcgacgaccccgcggacgtgatccaagccatccgcatcggcgagggcacgctcgcgaagatcaaacagaacctcttctgggcgctgggctacaacaccgcgatgatcccgctggcctcgctggggctgcttcagccggtgttggcggccggcgcgatggcggtgtcgagtgtcagcgtgctcaccaacagcctgctcttcggcaggtacacgcccgacgaggattactcgctgctcggtcgctag

SEQ ID NO: 55406 - protein, 857 aa, Halobacterium sp. NRC-1
MTTRTARIDVGGMSCANCSGTVEDAVGALDGVTDATANFATDAATVTYDPTAADLAGVCAAISDAGYTPITADTTIPVHGMTCANCAQTIEDAVADAPGVLDVSANFATDDAHLTYVPAAFDRDAVHAAITDAGYDPIDADSDTGASTQTAADEARDAERRRQRIRLAFGAVLSAPLLFFVADTFLFGGAVVPDSFTVGGLTIPFGWAEFALATPVYVVLGRSFLSNSYAALVRNGTANMDVLVALGSTTAYVYSLASLLGVLAGGGLYFDTAALILVFITLGNYLEARSKSQASDALRELLEMEANTARLVDADGETREIPADDVEVGDRLKVKPGEQIPTDGVVVSGESAVDESMVTGESVPVSKAPGDDVVGATINENGVLVVQATKVGADTAIQQIVTTVRDAQSRQPDIQRLADRISAYFVPAVIANAVFWGAVWWFAPGLLADVVSALPLWGLVSGGPAAVGTGEFAVVVFASAVLIACPCALGLATPAATMIGTSIGAKHGVLFQGGDVLERVTELDAVVFDKTGTLTTGAMELTDVEAVAAVPDGGTATRSDAAVDEDAVLRLAAAAESNSEHPLGTAIVAGAEDRGLDVPAVDAFENVPGKGIVATVDGRRVRVGNRALLTSADIDPAPAADAMERLEREGKTAMLVAVDDRVAGVVADADTVKPEAAATVDALQDRGLDVHMITGDNERTARAVAADVGVSPEHVRAGVLPGEKADAVDAIQAGDADAMMVGDGVNDAPALATAHVGAAIGSGTDVAIEAADVTLMRDDPADVIQAIRIGEGTLAKIKQNLFWALGYNTAMIPLASLGLLQPVLAAGAMAVSSVSVLTNSLLFGRYTPDEDYSLLGR

SEQ ID NO: 55407 - DNA, 2199 bp, Escherichia coli O157:H7 EDL933
  CDS (1)..(2199): transl_table=11
atgtcgactcctgacaatcacggcaagaaagcccctcaatttgctgcgttcaaaccgctaaccacggtacagaacgccaacgactgttgctgcgacggcgcatgttccagcacgccaactctctctgaaaacgtctccggcacccgctatagctggaaagtcagcggcatggactgcgccgcctgtgcgcgcaaggtagaaaatgccgtgcgccagcttgcaggcgtgaatcaggtacaggtgttgttcgccaccgaaaaactggtggttgatgccgacaatgacatccgtgcacaagttgaatctgcggtgcaaaaagcgggctattccctgcgcgatgagcaggccgccgacgagccacaagcatcgcgcctgaaagagaatctgccgctgattacgcttatcgtgatgatggcaatcagctggggtttggagcaatttaatcatccgttcgggcaactggcgtttatcgcgaccacgctggttgggctgtacccgattgctcgtcaggcattacggctgatcaaatccggcagctacttcgccattgaaaccttaatgagcgtagccgctattggtgcactgtttattggcgcaacggctgaagctgcgatggtgttgctgctgtttttgattggtgaacgactggaaggctgggccgccagccgcgcgcgtcaaggggtcagcgcgttaatggcgctgaaaccagaaaccgccacgcgcctgcgtaacggtgagcgggaagaggtggcgattaacagcctgcgccctggcgatgtgattgaagtcgccgcaggtggacgtttgcctgccgacggtaaactgctctcaccgtttgccagttttgatgaaagcgccctgaccggcgaatctattccggtggagcgcgcaacgggcgataaagttcctgcaggagccaccagcgtagaccgtctggtaacgctggaagtgctgtcagaaccgggtgccagcgccattgaccggattctgaaactgatcgaagaagccgaagagcgtcgcgcacccattgagcggtttatcgaccgtttcagccgtatttacacgcccgcgattatggccgtcgctctgctggtgacgctggtgccaccgctgctgtttgccaccagctggcaggagtggatttataaagggctgacgctgctgctgattggctgcccgtgtgcgttagttatctcaacgcctgcggcgattacctccgggctggcggcggcagcgcgtcgtggggcgttgattaaaggcggagcggcgctggaacagctgggtcgtgttacccaggtggcgtttgataaaaccggtacgctgaccgtcggtaaaccgcgcgttaccgcgattcatccggcaacgggtattagtgaatctgaactgctgacactggcggcggcggtcgagcaaggcgcgacgcatccactggcgcaggccatcgtgcgcgaagcacaggttgctgcactcgccattcccgccgccgaatcacagcgggcgctggtcgggtctggcattgaagcgcaggttaacggtgagcgcgtgttgatatgcgctgccgggaaacatcccgctgatgcatttgctggtttgattaatgaactggaaagcgccgggcaaacggttgtgctggtagtacgtaatgatgacgtgctgggtatcattgcattgcaggataccctgcgcgccgatgctgcaactgccatcagtgaactgaacgcgctgggcgtcaaaggggtgatcctcaccggcgataatccacgcgcagcggcggcaattgccggggagctggggctggagtttaaagcgggcctgttgccggaagataaagtcaaagcggtgaccgagctgaatcaacatgcgccgctggcgatggtcggtgacggtattaacgacgcgccagcgatgaaagctgccgccatcgggattgcaatgggcagcggcacagacgtggcgctggaaaccgccgacgcagcattaacccataaccacctgcgcggtctggtgcaaatgattgaactggcacgcgccactcacgccaatatccgccagaacatcactattgcgctggggctgaaagggatcttcctcgtcaccacgctgttagggatgaccggactatggctggcagtgctggcagatacgggtgcgacggtgctggtgacagcgaatgcgttaagattgttgcgcaggagataa

SEQ ID NO: 55408 - protein, 732 aa, Escherichia coli O157:H7 EDL933
MSTPDNHGKKAPQFAAFKPLTTVQNANDCCCDGACSSTPTLSENVSGTRYSWKVSGMDCAACARKVENAVRQLAGVNQVQVLFATEKLVVDADNDIRAQVESAVQKAGYSLRDEQAADEPQASRLKENLPLITLIVMMAISWGLEQFNHPFGQLAFIATTLVGLYPIARQALRLIKSGSYFAIETLMSVAAIGALFIGATAEAAMVLLLFLIGERLEGWAASRARQGVSALMALKPETATRLRNGEREEVAINSLRPGDVIEVAAGGRLPADGKLLSPFASFDESALTGESIPVERATGDKVPAGATSVDRLVTLEVLSEPGASAIDRILKLIEEAEERRAPIERFIDRFSRIYTPAIMAVALLVTLVPPLLFATSWQEWIYKGLTLLLIGCPCALVISTPAAITSGLAAAARRGALIKGGAALEQLGRVTQVAFDKTGTLTVGKPRVTAIHPATGISESELLTLAAAVEQGATHPLAQAIVREAQVAALAIPAAESQRALVGSGIEAQVNGERVLICAAGKHPADAFAGLINELESAGQTVVLVVRNDDVLGIIALQDTLRADAATAISELNALGVKGVILTGDNPRAAAAIAGELGLEFKAGLLPEDKVKAVTELNQHAPLAMVGDGINDAPAMKAAAIGIAMGSGTDVALETADAALTHNHLRGLVQMIELARATHANIRQNITIALGLKGIFLVTTLLGMTGLWLAVLADTGATVLVTANALRLLRRR

SEQ ID NO: 55409 - DNA, 2586 bp, Agrobacterium tumefaciens str. C58
  CDS (1)..(2586): transl_table=11
atgaacgagacagtcagacacgcccatccaaatcaaccggtttccgtgcccgtggaaggcatgacctgcgcctcctgcgtgcggcgtgtggaaaccgccgcggccaaggtaccgggtgtcgcttcgagctcggtgaacttcgccacgaagaagcttaccgtcgagccggccgaaggattctcagccaggacgctcggcgcggccatcaagaaggtcggttacgatatcgcgccggagcggcaggaatttgcggtcgacggcctgcacggcgaggcagaggccgagcgactgaaggccgttctgaacgccgtcgcgaccacagtcaacgtgaaggttgatgctgccgccggcaaggtcgcggtggaaaccatcggcggccggcgggagcgggatgcgctggtggaaacggcgaagcttgccggctttgcgttgaagacaccgaaaccgcacggacattccgcccatcacgatcacggccagcaccatgcacaccatcagggccacagccagatgacggcggccggtgaaagcggcggccatgaccatatgcaacatgccggcgaggagggcgcgctgaaacgcgacctgacgattgccgcgatcctgaccgcgccgcttttcgtgttggaaatgggcggccatatttatgagccgatgcatcactggctgatgggcatcatcgagacacagaacctctattacatctatttcgtgctggcgacggcggtgattttcggaccgggactgcgcttcctcaaggccggttttcccgctttgctacgcggcgcgccggaaatgaactcgctggtggcgctgggtgtcacagcggcctatctctactccgtcgtggcgaccttcgcacccgatctgctgccggcagaggcgcagttcgtctattatgaagcggcaaccgtcatcgtgacgctgatcctcaccgggcggcttctcgaagcacgcgccagcggccgcacgggagacgccatccgcaagctgatgagcctgcaggcgaagactgcccgggtggagcgcgacggtgccaccatcgatatttctcccgatgatctggtggccggcgatatcatcgtcatccgtcccggcgaaaggctggcagtggatggtgaagtcgtcgaaggctcgtcgtatgtcgatgaatcgatgatttcgggtgaaccagtgccggtggaaaagacggtcggcgcaactgttgtcggcggcaccatcaacaagaccggcgccttcaagttcaaggcgaccaaggtcggcgccgataccatgctgtcgcagatcatccgcatggtggaggaggctcagggctccaagctgccgatccagctgctggtggaccgtgttaccgccctgttcgtgcccgtcgtcatcgccattgcggtgcttaccttcatcgtctgggcgatcttcggtcctgagcccgcctatacattcgcgctggtcaatgctgtcgcggtactcatcatcgcctgcccctgcgccatgggtctcgccacgccgacatccatcatggtcggcaccggaagggcggcggagctgggcgtactgtttcgcaaggggcaagccctgcaggaactgcgctcggcgcagatcgtggtggtcgacaagaccggcacggtgaccaagggccgcccggaactgaccgatctggtggttgcggaaggatttgccgataacgaagttctggcgctggttgccgctgttgagggccgctcggaacacccgatagccgaagccatcgtccgggctgcggaagaaaagaatgtggcgactcctgcaggactcgcgcctaccactgtcgagaacttcgaaagcgtgacgggctacggcatcgcggccaccgtcaatggccgcaaggtcgaagtcggcgcggatcgctacatggcgaaactcggccattccgtcgatatcttcgctgaagccgccgcaaggctgggcgacgagggcaagacaccgctttatgccgccatcgacggcaggttggcggctgcgatcgccgtcgccgatccgttgaaaccctcgagcgtcaccgccatcaaggcgttgcaggcgatgggcatcgaagtggcgatggtgacgggcgacaatgaacgcacggcgaacgccattgcccggcaggtcggcatttcccgcgtcgtggcggaagtcttgcccgagggcaaggtgaaggcgatccacgaaatgcgcgccggcggcaaggtgctggccttcgtgggtgacggcatcaatgacgcaccggcgctcgccgaggccgatatcggcatcgccgtcggcaccggcacggatgtcgccatcgaaagcgccgatgtggtgctggtcggcggcgatcttctaggcgcagtcaatgccatcgagatgagccgggcgaccatgcgcaacatcaaggaaaacctgttctgggcctttggttataacgtggcgctgataccggttgcggcgggtgtgctttatcccgccttcggcatcacgctgtcgccgatgatcggcgcgggtgcgatggcgctgtccagcgtcttcgtccttgccaatgcgctgcggttgaaacgggcaaaggttgtgcacagggaggtgacgtcgtga

SEQ ID NO: 55410 - protein, 861 aa, Agrobacterium tumefaciens str. C58
MNETVRHAHPNQPVSVPVEGMTCASCVRRVETAAAKVPGVASSSVNFATKKLTVEPAEGFSARTLGAAIKKVGYDIAPERQEFAVDGLHGEAEAERLKAVLNAVATTVNVKVDAAAGKVAVETIGGRRERDALVETAKLAGFALKTPKPHGHSAHHDHGQHHAHHQGHSQMTAAGESGGHDHMQHAGEEGALKRDLTIAAILTAPLFVLEMGGHIYEPMHHWLMGIIETQNLYYIYFVLATAVIFGPGLRFLKAGFPALLRGAPEMNSLVALGVTAAYLYSVVATFAPDLLPAEAQFVYYEAATVIVTLILTGRLLEARASGRTGDAIRKLMSLQAKTARVERDGATIDISPDDLVAGDIIVIRPGERLAVDGEVVEGSSYVDESMISGEPVPVEKTVGATVVGGTINKTGAFKFKATKVGADTMLSQIIRMVEEAQGSKLPIQLLVDRVTALFVPVVIAIAVLTFIVWAIFGPEPAYTFALVNAVAVLIIACPCAMGLATPTSIMVGTGRAAELGVLFRKGQALQELRSAQIVVVDKTGTVTKGRPELTDLVVAEGFADNEVLALVAAVEGRSEHPIAEAIVRAAEEKNVATPAGLAPTTVENFESVTGYGIAATVNGRKVEVGADRYMAKLGHSVDIFAEAAARLGDEGKTPLYAAIDGRLAAAIAVADPLKPSSVTAIKALQAMGIEVAMVTGDNERTANAIARQVGISRVVAEVLPEGKVKAIHEMRAGGKVLAFVGDGINDAPALAEADIGIAVGTGTDVAIESADVVLVGGDLLGAVNAIEMSRATMRNIKENLFWAFGYNVALIPVAAGVLYPAFGITLSPMIGAGAMALSSVFVLANALRLKRAKVVHREVTS

SEQ ID NO: 55411 - DNA, 2511 bp, Agrobacterium tumefaciens str. C58
  CDS (1)..(2511): transl_table=11
atgcgcatgtcacaaatggagatccgggccagtcatcagattgcgatcgacggcatgacctgcgcctcctgtgtgggtcgtgtggagaaggcgatcgccagggtgccgggcgttttgaaggcctcggtcaatcttgcgacggagcgtgccgatatctccttttccggaccacctgatgtgcccgccgtgattgccgctgtacggcatgcgggttatggcgtcgaagaaaaaaccgtcgaactcgatattgaaggcatgacctgcgcctcctgcgtcggacgtgtcgaaaaggcgctgaaggctgtttccggcgtttccgatgcaagcgtcaatcttgcgaccgagcgcgccgccattcgtgtggcgggcaatgccgcttccgccgccactctggcggaggcgatcaagcgggcgggctatcaggcgaaagagatcgtcgccgacaaagccggcgatgcggaacaggacaggcgcgcagcggacatgcgcagtctgaaaatcagccttgccgtcgccgttgtcctgacattgccggtcttcgtgctggaaatgggttcgcacctggtgcctgccatccatgatttcgtcatggaaacggtcggcatgcggaaaagctggtatctgcaattcgtactgaccacgctggtcctattcgggcccggcctgcgcttcttcaagaagggcatacccgcccttatgaggctcgcgccggacatgaattcgcttgtggtgctgggcactgccgccgcctggggattttcggtggtcgcgaccttcctgcccgaaatcctgccgcgcggcacggccaatgtctattatgaggccgcggcggtcatcgtcacgctgatcctgctcggccgtttccttgaagcgcgcgccaaaggccgcaccagcgaggcgataaagcggctcgtcggtcttcaggccaagtcggcccgcgtgctgcgcgacggcgaaaccatcgatgtgcctcttcaggacgtgcgaacgggcgatgtgatcgtcgttcgccccggcgagaaagtgccggtcgacggtctggttctcaacggatcttcttatgtcgatgaatcgatgatcacgggtgagccggttccggttaccaagaccgagggttccgaggtcgtcggtggcacggttaaccgcaatggctccttcaccttccgcgccaccaaggtcggcagcgatacgctgatcgcgcagatcatccgcatggtagaagaagcgcaggccgacaagctgcccattcaggcgctggtggacaaggtgaccaactggttcgtgccagccgtgatgctggcggcacttgtcaccttcgccgtctggttcgtctttggacccgatccggccttgaccttcgcgctcgtcaacgcggttgcggttctcatcatcgcctgtccctgcgccatgggccttgccacgccgacgtcgatcatggtcggcaccggtcgcgccgccgaaatgggcgtgctgttccggcgcggcgatgcgctccagacgctgcgtgacgccgatgtcatcgcggtcgacaagaccggcacgctgacactcggcaagccgaaactggtgcattttaatacgacccagggtttcgatgcggatgaggtgctgcggctcgtcgcctcgcttgagaaccggtctgaacatccgattgccgaggcgatcgtcgaggctgcaaaacatggtggcctgacgcttgccgaagctgaagctttcgaggcgacccccggcttcggtgtcgcggcgacggtcgatggtcgcagggtagaggcgggtgctgaccggttcatggtgaaactcggttatgatgtcggggcctttgccacggatgccgagcggatgggcagggaagggcagtcgccgctttatgccgccgtcgatggccggctggccgcgatcatcgccgttgccgatcccatcaagcagacgacacccgaggcgattgcggcgctgcatgcgctgggcctcaaggtcacgatgatcacgggtgacaatcgccgcacggcggaagccattgcccgtcgcctcggcattgacgaggtggtggccgaagtgttgcccgacggcaaggttgaggcggtcaagaggctagccgccggcgggcgacgggtcgcctttgtcggggacggcatcaatgatgcgccggcgcttgccgcagccgatgtcgggcttgccatcggcacgggcacggatgtcgcgattgaaagtgccgacgtggtgctgatgtccggcgatctgcgcggtgttgccaacgcgattgctctctccaaggcgacgatccgcaatatccgccagaatctcttctgggccttcgcttacaatgccgcgcttgttcccgtggcggccggcatattgtatcctgtcaacggcgttctgctgtcgccagtccttgctgccggagccatggcgctttccagcgtcttcgtattgacgaatgcgctgcgtcttaaaagcttccgtgcaccgctggtggacagatcgtccgacctgcagctcgcagcggcggaatag

SEQ ID NO: 55412 - protein, 836 aa, Agrobacterium tumefaciens str. C58
MRMSQMEIRASHQIAIDGMTCASCVGRVEKAIARVPGVLKASVNLATERADISFSGPPDVPAVIAAVRHAGYGVEEKTVELDIEGMTCASCVGRVEKALKAVSGVSDASVNLATERAAIRVAGNAASAATLAEAIKRAGYQAKEIVADKAGDAEQDRRAADMRSLKISLAVAVVLTLPVFVLEMGSHLVPAIHDFVMETVGMRKSWYLQFVLTTLVLFGPGLRFFKKGIPALMRLAPDMNSLVVLGTAAAWGFSVVATFLPEILPRGTANVYYEAAAVIVTLILLGRFLEARAKGRTSEAIKRLVGLQAKSARVLRDGETIDVPLQDVRTGDVIVVRPGEKVPVDGLVLNGSSYVDESMITGEPVPVTKTEGSEVVGGTVNRNGSFTFRATKVGSDTLIAQIIRMVEEAQADKLPIQALVDKVTNWFVPAVMLAALVTFAVWFVFGPDPALTFALVNAVAVLIIACPCAMGLATPTSIMVGTGRAAEMGVLFRRGDALQTLRDADVIAVDKTGTLTLGKPKLVHFNTTQGFDADEVLRLVASLENRSEHPIAEAIVEAAKHGGLTLAEAEAFEATPGFGVAATVDGRRVEAGADRFMVKLGYDVGAFATDAERMGREGQSPLYAAVDGRLAAIIAVADPIKQTTPEAIAALHALGLKVTMITGDNRRTAEAIARRLGIDEVVAEVLPDGKVEAVKRLAAGGRRVAFVGDGINDAPALAAADVGLAIGTGTDVAIESADVVLMSGDLRGVANAIALSKATIRNIRQNLFWAFAYNAALVPVAAGILYPVNGVLLSPVLAAGAMALSSVFVLTNALRLKSFRAPLVDRSSDLQLAAAE

SEQ ID NO: 55413 - DNA, 2292 bp, Agrobacterium tumefaciens str. C58
  CDS (1)..(2292): transl_table=11
atgagctgctgcgcaccgggaacggaaggttcgctggagctcggcgaaccgcttaatccgccatcgtcggaggagttgctgctggcgagccgcgatctggggcaggggttgcgccagaccgatcttagcgtgcccggtgtttattgcggcgcctgcatcaccaccatcgagaccgcgctcggccgtctcggccaagtggagcgggcgcgggtgaacctgtcttcgaaacgtgtggcggttgtctggaaagaagaggtcaatggcgtcaggaccgatcccgccgacattgcccgcgccatccttgcgacgggatatcgcatacatcttttcgccagcgggcaggatgcttcatacgccttgcgctcgcagctgatcagggcggtggcgctgtgcggctttgcttccgccaatatcatgcttctgtcggtctccgtctggtcgggggcggatgccgcgacgcgtgacatgttccactggatatcggcgatgatcgccgcgccggcgctgatctatggcgggcgtttcttttaccagtcggcctggaacgcgctgaaacacggccgcaccaacatggatgtgccgattgcgctcgccatcacgctctcctatgccgtttcgctgtgggagaccattcatcacggcgaacatgcgtggttcgatgcgaccgtgtcgctgctgttcttcctgctgatcggccgcacgctggaccatatcatgcgcgacaaggcgcgctccgccattgccggattggcccggctttcgccgcgaggggcaacggtgatcgatgcagacggggtccgggactaccggccgcttgcggatatcgaacctggaatgtcgattgcgattgcggcgggtgaccgggtggcggtggatgccgtggtggtctgcggcagcagcgatctcgacatgtccatcgtcaatggtgaaagcgcgccgcgccgcgtcgtggccggcgacagcctgcaggccggcacgctcaatctcaccgggtcgcttgtcgcccgggtaaccgcgtccgcaaaggattctttcctgtcggaagtgatcgggttgatggaggcggccgaaggcgggcgcgcgcgttaccggcgtatcgccgaccgtgccgcgagctattattcgcccgtggtgcatcttctggcgctggtgacgtttctcggctggggcattttcggcggtgactggaaacaggcgatgctgatcgccattgctgttctcatcataacctgcccctgcgcgctcggccttgctgttccagtcgtgcaggtggtggccgcaggaaggctttttcggcgtggcatcatggtcaaggaaggctcggccatggagcgtctttcggagatcgataccgtgctgttcgacaagaccgggaccttgaccgtcggcaagcctaggctggtcgagaccgcagatgtgaagccggccatcatggcgattgcggcggggctcgctgcccattcgcgccatcctctctcgaaagccctgcatgccgcctataatggtgccttgccagcctatgaggcggtgcgggaaattccggggtcgggtgtcgaggccgagacggaagccggcacttaccggctcggcaatcgccgtttcgcctgcccggatgagacacggatcaacaatggcgatgcgcggtcggaagtggtgctgtctctcgacggccggcatctggcgagcttcggcttcgaggacaatccgcgcgcgggtgctattgcggcattgcgcagcctgtctgtgcggggccttgcgcaggaaatcgtctcgggtgaccgggccgccgccgtcagtgcgatggcgcagcggctggggatcggcaactggcgcgcggacctgtcgccgaaggacaaggcggcgcgctgtgccgcgcttgccggcgaggggcacagggtgctgatggtcggggatggtatcaacgacgcgccagcgcttgccgccgcccacgtatctatggcgcccgccaccgccgccgatattggccggcaggccgccgatttcgtgtttatgcaggaagatctcgatgccgtacctttcgcgatcgagacgtcgcagcgagccggcaacctcatccggcagaactttgcgcttgccatcggctacaatatcatcgccgtaccgattgcgattgccggttatgcgacgccgatgattgcggccattgccatgtcgacatcttcgctgatcgtcgttgccaatgcgctgcgccttgccggtgctgctgacactattctccctcagaaggaagcgaagtcgggatttacgggcgagggggcgcaactggcatga

SEQ ID NO: 55414 - protein, 763 aa, Agrobacterium tumefaciens str. C58
MSCCAPGTEGSLELGEPLNPPSSEELLLASRDLGQGLRQTDLSVPGVYCGACITTIETALGRLGQVERARVNLSSKRVAVVWKEEVNGVRTDPADIARAILATGYRIHLFASGQDASYALRSQLIRAVALCGFASANIMLLSVSVWSGADAATRDMFHWISAMIAAPALIYGGRFFYQSAWNALKHGRTNMDVPIALAITLSYAVSLWETIHHGEHAWFDATVSLLFFLLIGRTLDHIMRDKARSAIAGLARLSPRGATVIDADGVRDYRPLADIEPGMSIAIAAGDRVAVDAVVVCGSSDLDMSIVNGESAPRRVVAGDSLQAGTLNLTGSLVARVTASAKDSFLSEVIGLMEAAEGGRARYRRIADRAASYYSPVVHLLALVTFLGWGIFGGDWKQAMLIAIAVLIITCPCALGLAVPVVQVVAAGRLFRRGIMVKEGSAMERLSEIDTVLFDKTGTLTVGKPRLVETADVKPAIMAIAAGLAAHSRHPLSKALHAAYNGALPAYEAVREIPGSGVEAETEAGTYRLGNRRFACPDETRINNGDARSEVVLSLDGRHLASFGFEDNPRAGAIAALRSLSVRGLAQEIVSGDRAAAVSAMAQRLGIGNWRADLSPKDKAARCAALAGEGHRVLMVGDGINDAPALAAAHVSMAPATAADIGRQAADFVFMQEDLDAVPFAIETSQRAGNLIRQNFALAIGYNIIAVPIAIAGYATPMIAAIAMSTSSLIVVANALRLAGAADTILPQKEAKSGFTGEGAQLA

SEQ ID NO: 55415 - DNA, 2289 bp, Salmonella typhimurium LT2
  CDS (1)..(2289): transl_table=11
atgagtcagtcagaaaatcgtcacgacacgataagcttacttattgaaggtatgacctgcgcgtcgtgcgtcgctcgcgttgaaaaaggtattaaggctgtgcctggcgtaacggacgctacggtgaatctggcgacggagcgcgccaccgtccgcgggacggcgtcggcggaggcggtgatcgcggcgattgaaaaaacggggtataaggcgcgaccgatagagacggcggggcagggcgaagacgactctgaagagaaaaaagaggccgagcgcgtcaggctgaagcgcgatctgattctcgccagcgtgctggcgctccccgtttttgtgcttgaaatgggctcgcaccttattcctggtatgcacgagtgggtgataaaaacgattggcctgcaacaaagctggtactggcaatttgcactgaccctgttggtgctgacgatccccggtcgccgtttttaccttaaagggttcccggcgctggcgcgtctggcgccggacatgaactcgctggtcgccgtgggaaccgcagcggcattcggctactcgctggtggcgacctttacgcccgacctgttgcctgaagggacggtaaacgtctattacgaggccgccgcagtgattgtcgcgcttattctgctggggcgctttctggaggcaagggcgaaggggcggacttccgaagcgattaaacgtctggtggggctacaggcgcgggtcgcgcatgtgttacgcgagggccgcatcgtggatatccctgtcgacgaggttgtgctgggcgactgtgtggaggttcggccaggcgagcggatcccggttgacggcgaagtgaccgaaggccgcagcttcgttgacgagtcgatgattaccggcgaaccgataccggttgagaaatccgcaggaagcgcggtggtgggcggtaccgtaaaccaaaaaggcgcgctcacgctgcgggcgaccgccgtcggcggacagaccatgctggcgcaaatcattcgtctggtggaacaggcgcagggttcaaaactgccgattcaggccgtcgtggataaagtgacgctgtggtttgtcccgatggtgatgcttattgctgcgctgacctttgtggtatggctggcgtttgggccgtcgccagcgctgactttcgctctgatcaatggcgttgcggttctgattatcgcctgtccttgcgcgatgggcctggcgacgccgacctctattatggtgggaaccggtcgtggggcggaaatgggcgtgctgttccgtaagggggaggcgttacagctactcaaagacgctaaggtggtggccgtagacaaaaccgggacgcttaccgaaggccgcccggtactgaccgatctcgacgtggccagcggctttgaacgccgtgaggtgctggcgaaagtcgcggcggtagaatcgcgttcagagcatccgattgcccgtgcgattgtcgtgtcggcagaagaggaagggatcgcgctaccaggcatgagcggcttcgaatcggtgaccgggatgggcgtatacgctaccgttgacggtacgcgtgttgacgtgggggctgatcgctatatgcgcgaaattggcgtggatattagcggcttcgccaccaccgccgaacggttagggcaggaagggaaatcgccgctctatgcggctattgacggtcaactggcggcgattatcgccgtggccgatccgatcaaacccagtacgcccgccgcaattaacgctttacatcagctcggcattaaggtcgccatgatcactggcgataatgcccgcacggcacaggctatcgccagacagttaggaattgatgatgtggttgccgaggtattgccagaagggaaagtcgaggcgatacggcgcctgaaagcggcgtatgggcaggtggcgtttgtcggcgatggcatcaacgatgcgccagcgctggcggagtccgacgtggggctggcgattggcaccggcaccgatgtggcggtggaatccgccgacgtcgtactaatgtccggcaacctgcaaggcgtgccgaatgctatcgcgctgtctaaagcgaccatccgcaatatccaccagaatctgttctgggcctttgcttacaatacggcgctgattcctgtcgcggcaggcgcgctatttccggtctggggcatattattgtcaccggtattcgccgcaggggcgatggcgatgtcgagcgtgttcgtgctgggcaacgctttgcggctgcgccgtttccgggcgccgatggcaaccccatccgacacatccacgacatga

SEQ ID NO: 55416 - protein, 762 aa, Salmonella typhimurium LT2
MSQSENRHDTISLLIEGMTCASCVARVEKGIKAVPGVTDATVNLATERATVRGTASAEAVIAAIEKTGYKARPIETAGQGEDDSEEKKEAERVRLKRDLILASVLALPVFVLEMGSHLIPGMHEWVIKTIGLQQSWYWQFALTLLVLTIPGRRFYLKGFPALARLAPDMNSLVAVGTAAAFGYSLVATFTPDLLPEGTVNVYYEAAAVIVALILLGRFLEARAKGRTSEAIKRLVGLQARVAHVLREGRIVDIPVDEVVLGDCVEVRPGERIPVDGEVTEGRSFVDESMITGEPIPVEKSAGSAVVGGTVNQKGALTLRATAVGGQTMLAQIIRLVEQAQGSKLPIQAVVDKVTLWFVPMVMLIAALTFVVWLAFGPSPALTFALINGVAVLIIACPCAMGLATPTSIMVGTGRGAEMGVLFRKGEALQLLKDAKVVAVDKTGTLTEGRPVLTDLDVASGFERREVLAKVAAVESRSEHPIARAIVVSAEEEGIALPGMSGFESVTGMGVYATVDGTRVDVGADRYMREIGVDISGFATTAERLGQEGKSPLYAAIDGQLAAIIAVADPIKPSTPAAINALHQLGIKVAMITGDNARTAQAIARQLGIDDVVAEVLPEGKVEAIRRLKAAYGQVAFVGDGINDAPALAESDVGLAIGTGTDVAVESADVVLMSGNLQGVPNAIALSKATIRNIHQNLFWAFAYNTALIPVAAGALFPVWGILLSPVFAAGAMAMSSVFVLGNALRLRRFRAPMATPSDTSTT

SEQ ID NO: 55417 - DNA, 2199 bp, Salmonella typhimurium LT2
  CDS (1)..(2199): transl_table=11
atgtcgacccctgataccgatggcaaaaaagtcccgccctttacctccttcagattagccccggcaatacagaaggccgatagctgctgctgcgaagaacattgcgcgtccagcgcgcctgtttctactgccatggcaggcacgcgctatacctggaaaatctccggcatggactgcgccgcctgcgcccgaaaagtggagaatgcggtacgccaaattcgcggcgtcaaccaggcgcaagtgctgttcgccaccgaaaagttagtggtcgatgccgacgccgaccttcgcgcgcaaattgaacacgccgtacagaaggcgggttataccttgcgtagtgaagattcgcgcgacgccgcacctgaatctcgtcttaaagagaacctgccgcttattacgctgatcattatgatggcgataagctgggggctggagcaatttaaccacccgttcggccaactggcctttatcgccaccaccctggtcggtctgtatcctattgcccgccaggcgctgcgactgatgaaaagcggcagttggttcgctattgaaacgctgatgagcgtcgccgccattggcgcgctgtttattggcgcgacggcggaggcggcaatggtattgctgctgttcctcatcggcgagcgcctggaaggatgggccgccagccgcgcccgtaaaggcgtcagcgcgttaatggcgcttaaaccggaaacggcgacccgtctgcgcgacggcgtacgggaagaggtcgctattaataccctgcgaccgggcgatattatcgaagtcgccgccggggggcgtttacccgccgacggtaaactggtttccggtttcgccagctttgatgaaagcgcgctcaccggcgagtctatcccggtggagcgcgcaacgggcgacaaagtcccggcaggcgcgaccagcgttgaccgtctcgtcaccctggaggtgctatctgaacctggcgccagcgcgattgaccgtatcctgacgctgattgaagaggcggaagagcgccgtgcgcccattgagcggtttattgaccgtttcagccgcatctatacgccagtcattatggtcatcgcgctgctggtgacgcttattccgccgctgatgttcgatggcggctggcaggagtggatttataaagggctgacgctgctgctcatcggttgcccgtgcgcgctggtgatctccacgcccgcggccattacctccgggctggcggcggcggcacggcgcggcgcattgattaaaggcggcgcagcgctggagcaactgggccgtatcacgcaggtcgcctttgataaaaccggtacgttgaccattggtaaaccacgggtgacggcgattcatccggcaagcggtatcagcgaagctgaactgttggcgctggcggcagccgtagaacaaggcgctacgcacccgctggcacaggctattgtccgcgaagcgcagacacgcgatctggcgatcccgacggcggaatcgcagcgaacgctggctggcaccgggattgaagcgcaggttaacggcgaacgtattctgatttgcgcggcgggaaaacagcctgcggcagcgtttgccgggcaaattagcgaactggaaaacgccgggcagacggtggttctggtgctgcgtaacgagaccgttgttggcgtcctcgccctccaggatacgttgcgtgacgatgcgcgcgacgccatccgcgatctgcatcagttaggcgttaacggcgtgattctgactggcgataacccacgggcggcggcagcgattgccggcgagctggatctggcgtttaaagccgggctactgccggaagacaaggtgcgggcagtcaccgcccttaaccaacaagcgccgctggccatggtgggcgacggcattaacgatgcgcccgcgatgaaagccgccagtatcggaattgctatgggcagcggtactgacgtcgcgctggaaacggctgacgccgcccttactcataaccgtctgcgcgggttagcgcagatgattacgctggcgcgcgctacccacgcgaatatccggcagaacatcaccattgcgctggggctgaaagctattttcctggtgacgacgctactgggttttaccgggctatggctggcaatcctggcggatacgggagccacggtattggtgaccgccaacgcgctacgtttgctgcgtaaaaactaa

SEQ ID NO: 55418 - protein, 732 aa, Salmonella typhimurium LT2
MSTPDTDGKKVPPFTSFRLAPAIQKADSCCCEEHCASSAPVSTAMAGTRYTWKISGMDCAACARKVENAVRQIRGVNQAQVLFATEKLVVDADADLRAQIEHAVQKAGYTLRSEDSRDAAPESRLKENLPLITLIIMMAISWGLEQFNHPFGQLAFIATTLVGLYPIARQALRLMKSGSWFAIETLMSVAAIGALFIGATAEAAMVLLLFLIGERLEGWAASRARKGVSALMALKPETATRLRDGVREEVAINTLRPGDIIEVAAGGRLPADGKLVSGFASFDESALTGESIPVERATGDKVPAGATSVDRLVTLEVLSEPGASAIDRILTLIEEAEERRAPIERFIDRFSRIYTPVIMVIALLVTLIPPLMFDGGWQEWIYKGLTLLLIGCPCALVISTPAAITSGLAAAARRGALIKGGAALEQLGRITQVAFDKTGTLTIGKPRVTAIHPASGISEAELLALAAAVEQGATHPLAQAIVREAQTRDLAIPTAESQRTLAGTGIEAQVNGERILICAAGKQPAAAFAGQISELENAGQTVVLVLRNETVVGVLALQDTLRDDARDAIRDLHQLGVNGVILTGDNPRAAAAIAGELDLAFKAGLLPEDKVRAVTALNQQAPLAMVGDGINDAPAMKAASIGIAMGSGTDVALETADAALTHNRLRGLAQMITLARATHANIRQNITIALGLKAIFLVTTLLGFTGLWLAILADTGATVLVTANALRLLRKN

SEQ ID NO: 55419 - DNA, 2175 bp, Nostoc sp. PCC 7120
  CDS (1)..(2175): transl_table=11
atggcaagaactcacgagcatcacggacatagacacgcaagcattgtacctcaaggtgggatggcgaaagatcctatttgtggcatgacagtacctaaagccacatccttgaagacagaaagaggtggacgcaattactatttttgcagccaaacttgcttaaacacatttttagatcctgagaaggaacttaaatcaatgcggactcgcgtcaccattgcgatgacgggggtactatttttagcaattctgcgagcggctgcatttttgggactggcagctggtgtaagtatcttaagctgggtgccgatttctgctctaccctggttcacttggggagtctggctttttatcctggctacccctgtacagttcattggtggctggtcattttacgtgggagcgtggaatgccatcaaaagccgcaatgtaaacatggatttcctgattgctttaggaaccagtgttgcctatttctatagtgtggcagtgattttctttcctaatgctctacctgttggagttgaggaacgtagcgtttattttgaagtttctgccgtcgtcattgcctttgttttactaggcaagtatatggaagaaattatcaaaaagaactcatcggcagcagtacgcaaacttctagatttaaaacctgccaccgccagagtcatccgagatggtatggagatggaaattccggcagagcaattaatggtggatgaaacagttgttgtccgtccgggagaaaaagtaccgacggatggaattgtgctggatggatcttcatctgtagatgagtcaatgctgacaggggagtcactaccagtagagaagcaagccgaatctgcggtgattggtggtactttaaacagaaccggacttttccgttttcgggcgactcgtgtgggggcggaaacggctttagctcaaatcatcaaaattgtggaggaagcccagacaagtacggctcaagtccaacggttggcagataaagtgacgggttattttgtgcctgcggttgtgggaattgcggtactggcatttctcggttggttacttgtcgggaactttccgcaagctttactggcatttattgctgtgttaattatttcttgtccctgtgctttgggtattgctactcccgccgcgttgatggttggtgtgggtaagggagcagaaggcgggattttgattcggggtggtgaaattttagaacgagctgaaaagctctctaccgtaattttcgacaaaactggaactttgactcgtggtgagcctagtgtgacggatattgtacccttggcagaacgcccaaacgatgaaattctgcggttggcggcggcggtagaagcgggttcagaacatcctttgggtgaagcaattgtgcgagcagccagacatcagaggctagatattcccaaggtgagtaattttgaggcaattcccggacatgggattcggggagcaattaatcgagataggattttgctgggtaatcgccgcttgttccgcgagcaaggctatcaaataaatccggcaacagaagagatattgactcgtctggaatctgatggtaaaacagccatgctggttggttgtaatggtttgttgatggggattgtagcagtagccgacaccatcaaacctgaagccaaggaagcgatcgctgctttgcgtcgggaaaaggtcaaagttgtgatgctcactggagataaccagcgtactgccgaagcgatcgctcgtcaactaggaatcgataaggtaattgctgaggtattacccggtgataaagcccaagtcgttaaagatattcaacgacgtggcgaagttgtggcaatggtgggagatggtgttaatgatgcaccagccttagcaactgctgacattgggattgctattggttctggtgcagatgtggccaaggaaacaggcggcatcattctggttaaaaacgatgtgcgcgatgttgtcacatcaattcgcctatctcgtgccacgatgctcaaaattaaacaaaacctattttgggcatttatttacaactccattggcattcccattgctgccttcggtttactcaacccaatgattgccgcagctgcgatggctttgagttccttgtcagtgattgttaattcatcactgttgaaaggattcaaattgtcaacaaattga

SEQ ID NO: 55420 - protein, 724 aa, Nostoc sp. PCC 7120
MARTHEHHGHRHASIVPQGGMAKDPICGMTVPKATSLKTERGGRNYYFCSQTCLNTFLDPEKELKSMRTRVTIAMTGVLFLAILRAAAFLGLAAGVSILSWVPISALPWFTWGVWLFILATPVQFIGGWSFYVGAWNAIKSRNVNMDFLIALGTSVAYFYSVAVIFFPNALPVGVEERSVYFEVSAVVIAFVLLGKYMEEIIKKNSSAAVRKLLDLKPATARVIRDGMEMEIPAEQLMVDETVVVRPGEKVPTDGIVLDGSSSVDESMLTGESLPVEKQAESAVIGGTLNRTGLFRFRATRVGAETALAQIIKIVEEAQTSTAQVQRLADKVTGYFVPAVVGIAVLAFLGWLLVGNFPQALLAFIAVLIISCPCALGIATPAALMVGVGKGAEGGILIRGGEILERAEKLSTVIFDKTGTLTRGEPSVTDIVPLAERPNDEILRLAAAVEAGSEHPLGEAIVRAARHQRLDIPKVSNFEAIPGHGIRGAINRDRILLGNRRLFREQGYQINPATEEILTRLESDGKTAMLVGCNGLLMGIVAVADTIKPEAKEAIAALRREKVKVVMLTGDNQRTAEAIARQLGIDKVIAEVLPGDKAQVVKDIQRRGEVVAMVGDGVNDAPALATADIGIAIGSGADVAKETGGIILVKNDVRDVVTSIRLSRATMLKIKQNLFWAFIYNSIGIPIAAFGLLNPMIAAAAMALSSLSVIVNSSLLKGFKLSTN

SEQ ID NO: 55421 - DNA, 2262 bp, Nostoc sp. PCC 7120
  CDS (1)..(2262): transl_table=11
atgaagaatgcgacacttaagctacgcggtatgagttgcgcttcctgcgctaaaagtattgaagatactatcagttctgtcccaggtgtaaatgaatgtagtgtgaactttggggcagaacaagcaacagttaattatgaccccagaaaaacagatttacaagccatccaaaatgcggtggatgccgcaggttattctgcatctcccctccaagaacaaaacttgatggcaggagaagatgatgaagaaaaaagatatcgcctgcaagaatcccgtgatttgatgcgaaagctcacagtagggggcatcataggcatcgtgctggtgattggctcactaccaatgatgacagggttagacttacctttgattcccatatggctgcataacccttggctgcaattagtcctgaccactcctgtacagttttggtgtggttactccttctacatcaacacttggaaagctttccagcgccatgcggccacaatggataccctaattactttaggtacgagtgcagcatatttctattctttatttgcaactttatttcctagttttttcatcgcccagggattgatgccagatgtgtattatgaaactgcggcaattgtaattaccttgattttgttggggcggctatttgagaatcgcgccaaaggacaaacctcagaagctattcgcaagctgatcggtttacaagtgaaaacagccaggttgattcgcaacgggcgagaagtagatgtaccgattgaggaagtagaaattggtgatgtggtgctggttcgtcctggggaaaaaattcctgttgatggggaagtagttgacgggacatccacagttgatgaagcgatggtaactggggaaagtatacctgtgaaaaaacaaccaggggatgaagtgataggcgcaaccatcaataaaactggcagttttaagtttcgagccacaagagttggtaaagacaccgtattggcgcaaattgtccaactagtgcagcaagcccaaggctcaaaagcacccattcaaagattagcagaccaagttacggggtggtttgtgccggcggtaattgcgatcgctattctcacctttattatttggtataactttatgggtaatgtcaccctggcattgattaccacggtcggggtgttaattattgcttgtccttgtgctttgggtttagccacgccaacctcggtgatggtaggtactggtaaaggtgcagaaaacggaattttaattaaaggagctgaaagcctagaattagcgcaccaaattcaaacaattgttttagataaaaccggcacaattacccaaggtaaaccaacagttacagattttgtcacagttgacggtactgctaacagcaacgaaatcaagctgatacaattagccgcatccttagaacgcaattctgaacatcccctagcagaagcagttgtgagatatgctcaatctcaggaggtaactttagcagatgtcacagactttgcagccgtggtaggtagtggtgtacaaggtattgttactcaccatcttgtgcagattggtacacaacgctggatggaagaattaagtatcagcactcaagccttgcagcaagacaaagaacgcttagaatatctgggtaaaacagccgtgtggttggcagttgacggggaaatcgccggattaatggggattgctgatgcgattaaacccacttccacccaagctatcagagcattgcaaaaactcggtttagaagttgtcatgctcacaggcgacaatcgccgcaccgccgaaagtattgcccgtgaggtggggattaaaagagtcttagcagaagtccgtcccgaccaaaaagccgctacagtgcaagcaatacaagcagaaggcaaaattgtcgccatggttggtgatgggattaatgatgcaccagccttagctcaagccgatgtgggaattgcgattggtacaggtacagatgtggcgatcgctgcgagtgacatcaccctaatttccggcgatctgcaagccatagttacagccattcaactcagccgcgccaccattcacaacatccgccaaaacctatttttcgccttcatttataacgttgcgggtattcccatcgccgccgggattctcttccccatctttggttggttacttaatcccatcatcgccggtgcagcaatggcttttagctcggtttccgtcgtcacaaatgctctgcgtttacgtaaattccaacctaaaacacttgtatag

SEQ ID NO: 55422 - protein, 753 aa, Nostoc sp. PCC 7120
MKNATLKLRGMSCASCAKSIEDTISSVPGVNECSVNFGAEQATVNYDPRKTDLQAIQNAVDAAGYSASPLQEQNLMAGEDDEEKRYRLQESRDLMRKLTVGGIIGIVLVIGSLPMMTGLDLPLIPIWLHNPWLQLVLTTPVQFWCGYSFYINTWKAFQRHAATMDTLITLGTSAAYFYSLFATLFPSFFIAQGLMPDVYYETAAIVITLILLGRLFENRAKGQTSEAIRKLIGLQVKTARLIRNGREVDVPIEEVEIGDVVLVRPGEKIPVDGEVVDGTSTVDEAMVTGESIPVKKQPGDEVIGATINKTGSFKFRATRVGKDTVLAQIVQLVQQAQGSKAPIQRLADQVTGWFVPAVIAIAILTFIIWYNFMGNVTLALITTVGVLIIACPCALGLATPTSVMVGTGKGAENGILIKGAESLELAHQIQTIVLDKTGTITQGKPTVTDFVTVDGTANSNEIKLIQLAASLERNSEHPLAEAVVRYAQSQEVTLADVTDFAAVVGSGVQGIVTHHLVQIGTQRWMEELSISTQALQQDKERLEYLGKTAVWLAVDGEIAGLMGIADAIKPTSTQAIRALQKLGLEVVMLTGDNRRTAESIAREVGIKRVLAEVRPDQKAATVQAIQAEGKIVAMVGDGINDAPALAQADVGIAIGTGTDVAIAASDITLISGDLQAIVTAIQLSRATIHNIRQNLFFAFIYNVAGIPIAAGILFPIFGWLLNPIIAGAAMAFSSVSVVTNALRLRKFQPKTLV

SEQ ID NO: 55423 - DNA, 3660 bp, Drosophila melanogaster
  CDS (1)..(3660)
atgccaagtgacgagagagtagaagcgacgatgtccacggtgcgcctgcccattgtgggcatgacttgccagtcgtgtgtgcgcaatatcacagagcacattggccagaaatcgggaatccttggcgtgcgcgtcattctcgaggagaatgcgggctatttcgactacgatccccgacagacggatcccgcccggatagccagcgatatcgacgacatgggcttcgagtgcagctatccaggggatgcagcagatcctcccgaaactcccgccagcgcatggaccaacatacgggtggtgggcatgacctgccagtcgtgcgtgcgcaacatcgaaggcaatatcggcaccaagccgggcatccattccattgaggtgcaactggcggccaagaatgcccgcgttcagtacgatcccgcccagtatgatcccgcccagatagccgagctcatcgatgacatgggttttgaggctagtgtgcaggaacctcgatcgccatcccaatcgccgtcgcccgcccccgcctcatcacccaaaaagagggcaactcctactcctccacctccttcatatgctcaaaatggttcggcagtggccatacccgtcgaacaggagctactgaccaaatgctttctgcacatccgaggcatgacgtgcgccagctgtgtggccgccatcgagaagcactgcaagaagatctacggcctggacagcatcctggtagccctgctggccgccaaggcggaggtcaagttcaatgccaatgttgtgacggccgagaatatagcgaaatcaatcacggagctgggcttccccaccgaactcatcgatgagccggacaacggcgaggcggaggtggagttggagattatgggcatgacttgcgcctcctgcgtcaacaagatcgagagtcatgtgcttaaaataaggggcgtgaccaccgcctccgtcacactgctaacaaagaggggcaaattccggtacatcacggaggagacgggtccccggagcatctgcgaggcgatcgaggcgctgggattcgaggccaaactgatgaccggccgagacaagatggcccacaattatctggagcacaaggaggagatacggaagtggcgcaatgccttcctcgtctcgctaattttcggtggaccctgcatggtggccatgatatacttcatgctggagatgagcgacaagggacatgccaacatgtgctgcctcgtgcccggcctgtcgatggagaatctggtgatgttcctgctatcgacaccagtgcagttcttcggtggctttcacttctatgtgcaatcctatcgtgcgatcaaacacggcaccacgaacatggatgtactgatctcgatggtcacgaccatctcgtatgtgtactcagtggccgtggtgatcgccgccgtgctgctagagcagaatagctccccactgaccttcttcgatacgccgcccatgctgttgatcttcatatcgctgggtcgctggctggagcacatagccaagggaaagacctcggaggccttgtccaagctgctgtcgctcaaggcggccgatgccctgctggtcgagatatcaccggactttgatatcatcagcgagaaggtgatatctgtggattatgtacagcgtggcgatatcctaaaggtgataccgggagccaaagttccagtggacggcaaagttctgtacggtcactccagttgcgatgaatcactaatcaccggggagtctatgccggtggccaagcgaaagggatccgtcgtaatcggcggttccattaaccaaaacggtgtgctcctcgtagaggcaacgcacacgggtgagaatacgacgctcgcgcagattgtgcgattagtggaggaggcccagacgagtaaggcgcccatccagcaactggccgatcggattgccggctactttgtgcccttcgttgttgtagtgtccagtataacgctgattgcttggatcatcattggtttttccaatccaaacttggtgcccgtggccatggagcataagatgcacatggaccagaataccatcatcgttagttatgcatttaaatgtgccttgagcgtgctggccattgcgtgtccatgtgctttgggcttggccacgcccaccgctgtaatggtggccactggaacgggtgcgatcaatggcgtgctggtgaaaggagccactgccctagagaatgcccacaaggtaaagactgtggtcttcgacaagaccggcaccataacccatggcactccgatgaccagtaaggttaccctcttcgtcacagcccaggtctgcagcctggcgcgtgctctgacgatcgtgggagccgccgagcaaaacagcgagcatccgatcgcctccgccattgtgcacttcgccaaggatatgctgaacgtgggcgccacacctcaggccggcagctttggcaagagcagtcacttccaggccgtgcccggctgtggcatccgcgtcaccgtctccaattacgagcagactctgcgacaggcgtgcaacgccgatcggatcattaactacgagaacctgcatcgcactcatccacagggttcggtgccggtggacaatggagccagtatcgaacacttgctgccgcagcgcagcattctggtgctgatcggcaatcgcgaatggatggaacgcaatgccatcgaagtgccgctggagattagcgattgtatgacgcatgaagaacgaaagggacacacagctgtgctatgcgccctcaacgggcagctggtgtgcatgtttgcggtgtccgacatggtcaagccagaggcccatcttgccgtctatacactaaagcgaatgggcatcgatgtggtgctgctcacgggggataacaagaacacggcagccagcattgcccgagaggttggcatccgaaccgtgtacgcggaggttttgccctcgcataaagtggccaaaatccagcggatacaggccaacggtatacgcgtggccatggtgggcgatggagtcaacgacagtccggcgctagcgcaggcagatgtgggaattacgattgcagcgggcacggatgttgccgccgaggcatcggacattgtcctgatgcgcaacgatctgctggatgtggtggcttgcctggacttgtcccgctgcacggtgcgtcgcattcggtacaacttcttctttgccagcatgtacaatctgctgggcataccgctggccagtggcttgttcgcaccgtacggcttcaccctgctgccatggatggcgtccgtggccatggccgccagctccgtgagcgtggtatgctcatcgctgctgctcaagatgtatcgcaagcccacggcgaagacgttgcgcacggcagagtacgaggcgcagctggcggcggaacgcgcaagtgggtccgaagacgagctggacaagctgtccctccatcgtggccttgacgatttgcccgaaaagggtaggatgccattcaagcggtccagcacatcactgatttcgcgcattttcatgcacgactacgggaacatcacttcgccggatgccaaatacggggagggactgctggatcccgaggagcagtatgatggccgcaccaagatcgtgaggagtcgcttccatgccaatgacagcaccgaactgcaaaagctgtga

SEQ ID NO: 55424 - protein, 1219 aa, Drosophila melanogaster
MPSDERVEATMSTVRLPIVGMTCQSCVRNITEHIGQKSGILGVRVILEENAGYFDYDPRQTDPARIASDIDDMGFECSYPGDAADPPETPASAWTNIRVVGMTCQSCVRNIEGNIGTKPGIHSIEVQLAAKNARVQYDPAQYDPAQIAELIDDMGFEASVQEPRSPSQSPSPAPASSPKKRATPTPPPPSYAQNGSAVAIPVEQELLTKCFLHIRGMTCASCVAAIEKHCKKIYGLDSILVALLAAKAEVKFNANVVTAENIAKSITELGFPTELIDEPDNGEAEVELEIMGMTCASCVNKIESHVLKIRGVTTASVTLLTKRGKFRYITEETGPRSICEAIEALGFEAKLMTGRDKMAHNYLEHKEEIRKWRNAFLVSLIFGGPCMVAMIYFMLEMSDKGHANMCCLVPGLSMENLVMFLLSTPVQFFGGFHFYVQSYRAIKHGTTNMDVLISMVTTISYVYSVAVVIAAVLLEQNSSPLTFFDTPPMLLIFISLGRWLEHIAKGKTSEALSKLLSLKAADALLVEISPDFDIISEKVISVDYVQRGDILKVIPGAKVPVDGKVLYGHSSCDESLITGESMPVAKRKGSVVIGGSINQNGVLLVEATHTGENTTLAQIVRLVEEAQTSKAPIQQLADRIAGYFVPFVVVVSSITLIAWIIIGFSNPNLVPVAMEHKMHMDQNTIIVSYAFKCALSVLAIACPCALGLATPTAVMVATGTGAINGVLVKGATALENAHKVKTVVFDKTGTITHGTPMTSKVTLFVTAQVCSLARALTIVGAAEQNSEHPIASAIVHFAKDMLNVGATPQAGSFGKSSHFQAVPGCGIRVTVSNYEQTLRQACNADRIINYENLHRTHPQGSVPVDNGASIEHLLPQRSILVLIGNREWMERNAIEVPLEISDCMTHEERKGHTAVLCALNGQLVCMFAVSDMVKPEAHLAVYTLKRMGIDVVLLTGDNKNTAASIAREVGIRTVYAEVLPSHKVAKIQRIQANGIRVAMVGDGVNDSPALAQADVGITIAAGTDVAAEASDIVLMRNDLLDVVACLDLSRCTVRRIRYNFFFASMYNLLGIPLASGLFAPYGFTLLPWMASVAMAASSVSVVCSSLLLKMYRKPTAKTLRTAEYEAQLAAERASGSEDELDKLSLHRGLDDLPEKGRMPFKRSSTSLISRIFMHDYGNITSPDAKYGEGLLDPEEQYDGRTKIVRSRFHANDSTELQKL

SEQ ID NO: 55425 - DNA, 2400 bp, Pyrococcus furiosus DSM 3638
  CDS (1)..(2400): transl_table=11
gtgaagatcactcttaaagttaatggtatgacatgtgcaatgtgcgttaaaaccatagagatggctttaactgaattggagggggttaaagttgcaaaggcaaatctaaacaatgagaccgtctttgttgactttgatgagtcaaaagttagcctaaatcagatcatcaaagccatcgaagatgtgggctacgaggtgataagggagcgcagggatgctgtgataaagataggtggtatgacatgtgcaatgtgcgttaaaaccattgaaaatgcgataaaggagctccctggggttatggaggtaagcgtaaaccttgcaactgaaagcgcaagagtctcttacaatccgtccattttaacaatcgaagacatcaaaaaagccattgagagcgttggttacgagtttttgggtgtagaaggagaagagagtcacgacatagaaaaagaggtaagggaaaagcacataagggagatgaagcgcaaccttttagtagcttggagtgttgggatacctctgtttatttctatgcaactaaagaggtttggattccacattgaaaatcttatctatgtccagtttcttcttgcgacaatagcgatagcctacgctggtaggggaattttcaaaaaggcttattcatcgcttagacataagacgctcaacatggaggtcatgtactctttgggcataggttccgcttatctgacgagcgttctggctacatttgggataattccaagggagtttaacttttatgaggccagtgttcttctcatggcgtttcttctcttgggtcgttaccttgaagcgaaagcaaaggggagaacaagcgaggcaataaagaaactcattggtcttcaggcaaagagagctaccattgtaagagatggaaaggaaatcgaggttccaatcagtgaagttaaagttggagatatagttatcgtaaagccgggtgagaggattccggtggatggagtggttattgaaggggaaagttatgttgacgaatccatgctcacaggcgaacccattcccaacctaaagaagaagggagacaaagttattgggggaactataaacaagaactctgtcctaaagattaaagcggaaaaagttggaagggatacactcctcgcccagataataaaacttgttgaagaggcccaaaacacaaagccccccgtgcagagatttgctgatactgtggttacttattttatacctactgtccttgctgtgtctctcctctcctttgcatactggtacttcatagctgataaaccattggtgttcgccttcactactctactcagcgttcttgtcatagcctgtccgtgtgcctttggtttagcaactccaacagctttgacggtaggcattgggaagggagctgagctcggaatactaatcaaaaacggtgaggcgttggagatagctaaaaatgccacagttgtcctctttgataaaaccggaacacttacaaaaggaaagccagaggttacggatgtgatatcgttggatatagatgaaaaagagctattatcattagctgcatctgcagaaaagcgttctgagcatcctcttggcgaagcaatcgtaagaaaggcagaagagcttggaattgagatagaagaacccgagaagtttaaagtattgcctggaaggggagttgaggccagagtcaggggaaaggaagtcgttgttggtaacaaaaagctcattgctgaaaaaggtatcagtcttgagggggttaaaaatattatccataggctagagaatgaagccaagacggtagttatagtagtagtggatgggaagatagtgggaattatcggcatagcagacacgctcaaagaaggagctagagaagctattgaagagctccaccgaatgggaaagaaggtaggaataataacgggagacaacaaacggacagcagaagcgatagggaagattttgggagttgactacatacttgctgaggttttaccaggggataaagctaatgaagttagaaagcttcaggaaaagggagaaatcgtgatatttgtgggtgatgggataaatgatgcacctgctttagctcaggcagatgttggtatagcagtagggaatgcaactgatatagcgatggagagcggggacatagtgctaattagaaatgatccaagagacgttgttagagcaataaggcttagtcagaagacattatcaaaaataaagcaaaatatattctgggcgatgttttacaacacactattaattccctttgctgcaggactttcttacaagatctttggtgttacttttcagcctgaatgggctgctggcgccatgagcttaagcagtgtaagcgttgtcacaaattcccttctacttaaacgggttagaatttaa

SEQ ID NO: 55426 - protein, 799 aa, Pyrococcus furiosus DSM 3638
MKITLKVNGMTCAMCVKTIEMALTELEGVKVAKANLNNETVFVDFDESKVSLNQIIKAIEDVGYEVIRERRDAVIKIGGMTCAMCVKTIENAIKELPGVMEVSVNLATESARVSYNPSILTIEDIKKAIESVGYEFLGVEGEESHDIEKEVREKHIREMKRNLLVAWSVGIPLFISMQLKRFGFHIENLIYVQFLLATIAIAYAGRGIFKKAYSSLRHKTLNMEVMYSLGIGSAYLTSVLATFGIIPREFNFYEASVLLMAFLLLGRYLEAKAKGRTSEAIKKLIGLQAKRATIVRDGKEIEVPISEVKVGDIVIVKPGERIPVDGVVIEGESYVDESMLTGEPIPNLKKKGDKVIGGTINKNSVLKIKAEKVGRDTLLAQIIKLVEEAQNTKPPVQRFADTVVTYFIPTVLAVSLLSFAYWYFIADKPLVFAFTTLLSVLVIACPCAFGLATPTALTVGIGKGAELGILIKNGEALEIAKNATVVLFDKTGTLTKGKPEVTDVISLDIDEKELLSLAASAEKRSEHPLGEAIVRKAEELGIEIEEPEKFKVLPGRGVEARVRGKEVVVGNKKLIAEKGISLEGVKNIIHRLENEAKTVVIVVVDGKIVGIIGIADTLKEGAREAIEELHRMGKKVGIITGDNKRTAEAIGKILGVDYILAEVLPGDKANEVRKLQEKGEIVIFVGDGINDAPALAQADVGIAVGNATDIAMESGDIVLIRNDPRDVVRAIRLSQKTLSKIKQNIFWAMFYNTLLIPFAAGLSYKIFGVTFQPEWAAGAMSLSSVSVVTNSLLLKRVRI

SEQ ID NO: 55427 - DNA, 2715 bp, Schizosaccharomyces pombe 972h-
  CDS (1)..(2715)
atgtatactactacactttcagtccagggtatgacatgcaccagttgtgtggcctctatccaatccatgttggaaggagtggaaggaattgaacaattcactatatcgttgcttcttgagcgtgctattgccgttcatgatcctagcattatctcaccggatcagatcgctgagaaaattgaagattgtggatttgatgcgtctgtgatttcttcaacagagggtgaacatggtgtcatggctaattatttattactttctcctatgcaggcggaacaatggaccaaagtacataatcatatcaatgaactgcaaggcgttttgtccgtcaattgctcttcctccccggatgcagctatacgtgtcatttatgattctgagattactggccctcgttccatcatgaaggaaatattatctatgggtgtcaaatgtacatttcaaccagtagattcctccacctctcgtattctgtcacttcaacgagggagtcaaattagagtatggaaaatccgatttattatttcaatatcattctctttggcggtgatgtttttaccccagatattcgattcttgtgattccatgcgtgctgcttttttggtcccccattattttggtatatgtgctggccacatcatcagcctagtattatcccttcccgtccagtttggtgttggaagggtctactattctgccgcatatcatgcactgaaaagaggaacagccaatatggatgttttagtatctttgggctccactgtagccttcgctgccagtatctttttcatgattctctacagcgctagacatgctgataatcctgctcctatattttttgataccgctgatatgctattgacgtttgttacgttaggtcgttatttggaaagtaaagctaaaggttctacatcagctgctctttctcaactgttgagccttgctccttccagtgcaacgataatagaagacaatgaacaaattgagatcttagctgatctcatcgagcgtggagacctcattctagtcaagcctggcgaaataatccctgtagacggtacggttgttgaaggctcttcctacgtcgatgaaagttctgtttctggagaacccgttccagtgcataaaacaattgacgatgaacttttgagcggaacagctaacgggaatggacgactgcttgtaaaagcaacaaaatcacctagagaatcacagttagctgtgattgttgatcttgttcagagggctcaaatctcacatgctcctatccaacaatttgccgatcgcgttgctggaatttttgttccagtaattgttgctctttcaatttcaacttttacattttggtttttattcactaaatattcttcaaaatacccatcggtgtttgatgatccaatgggaaagtttgcagtttgcctaaaattgacaattagtgtcgtcgttgtcgcctgcccatgcgcactggggttaagtacccctacagccgttatggttggaaccggtgttggtgctctgaacggtatcatcatcaaaggtggtgaaattttagagcgtctaaatcaggttgacactgttgtctttgataagacaggcacacttacagtgggtaagctaagtgtcaccgacataagcattgtagataatttggaggaattacttgacattcctaagaatattttttgggcttttgttaaagcttcagagtcttcaagtgaacatccaattggaaaagctattactgagaaagcttcagaatttaccgatgtttctgaaattggaattgaatcattcaatgctgtgccaggtgaaggtgttgatgttgtacttaggtggaaagagcggacttttcatgctttgcttgggaattcactgttactggaacataacaacgtgtcgatacctgatgactttgattcaaagctgaagctttcttctagtagtgggcttacttgtgttcgtatcgctatcgatggccagtttgtaggtttcttgggctgtatggaccaagtgcggcccgactcgtaccaaactgtatccgctttaaaacaattaggtaaaaaggtttgtttattgacgggtgatcaaaaagccactgcccgacgcgttgcccaaggactagaaatcgatttctctgatgtttacgcggaagcagttccctctcaaaaggctgaaattattcagaagttaaaagatcagaagcattgtgtcgctatggtaggtgatggtataaatgattcgccttcacttgtgttggctgatgttggcattgctcccattaatggatcaggcattgctttagaaagtgcagatgtaatacttgtacgtaaaggcgttctacttgataccgcagtatcctttgatttgtctagagttatcgttaaaagaattaaaatgaaccttgtgtgggcttgcatatataactttgtcatgattcctattgcaatgggcttcttccttccatggggaatctacttaaatcctatgtgggctagtgctgctatgatgttttcttctcttagtgttcttgcaagtagcttacttctcaggagatggaaaaagcctaagagccttatattcagtgaagcagatgatgttgaaacagagagttcaactaattctagtgtattacagaaggtatacacagcgacaaggtcgatatttggtaggaataagtcgagcaacaaataccagccagtggctaatgaagtctga

SEQ ID NO: 55428 - protein, 904 aa, Schizosaccharomyces pombe 972h-
MYTTTLSVQGMTCTSCVASIQSMLEGVEGIEQFTISLLLERAIAVHDPSIISPDQIAEKIEDCGFDASVISSTEGEHGVMANYLLLSPMQAEQWTKVHNHINELQGVLSVNCSSSPDAAIRVIYDSEITGPRSIMKEILSMGVKCTFQPVDSSTSRILSLQRGSQIRVWKIRFIISISFSLAVMFLPQIFDSCDSMRAAFLVPHYFGICAGHIISLVLSLPVQFGVGRVYYSAAYHALKRGTANMDVLVSLGSTVAFAASIFFMILYSARHADNPAPIFFDTADMLLTFVTLGRYLESKAKGSTSAALSQLLSLAPSSATIIEDNEQIEILADLIERGDLILVKPGEIIPVDGTVVEGSSYVDESSVSGEPVPVHKTIDDELLSGTANGNGRLLVKATKSPRESQLAVIVDLVQRAQISHAPIQQFADRVAGIFVPVIVALSISTFTFWFLFTKYSSKYPSVFDDPMGKFAVCLKLTISVVVVACPCALGLSTPTAVMVGTGVGALNGIIIKGGEILERLNQVDTVVFDKTGTLTVGKLSVTDISIVDNLEELLDIPKNIFWAFVKASESSSEHPIGKAITEKASEFTDVSEIGIESFNAVPGEGVDVVLRWKERTFHALLGNSLLLEHNNVSIPDDFDSKLKLSSSSGLTCVRIAIDGQFVGFLGCMDQVRPDSYQTVSALKQLGKKVCLLTGDQKATARRVAQGLEIDFSDVYAEAVPSQKAEIIQKLKDQKHCVAMVGDGINDSPSLVLADVGIAPINGSGIALESADVILVRKGVLLDTAVSFDLSRVIVKRIKMNLVWACIYNFVMIPIAMGFFLPWGIYLNPMWASAAMMFSSLSVLASSLLLRRWKKPKSLIFSEADDVETESSTNSSVLQKVYTATRSIFGRNKSSNKYQPVANEV

SEQ ID NO: 55429 - DNA, 2220 bp, Corynebacterium glutamicum ATCC 13032
  CDS (1)..(2220): transl_table=11
atgagcactccccaccaccacggtgatcaccccgctccggaaacagaccacacccaccacccgaatcatgccggtcacgagcaccatgcggatgccgccacccacggccaggccatgccgcacgatcatccgcattccactgtcgatgaagaacatcaggtccacagtcacggtgaacacgccggccacagcgccgcgatgttccgggaccgcttctggtggtcgctgatcctgtcggttccggtggtgttcttcagcccgatgttcgccgacctgctgggatataatattccggagattccgggagcctactggattcctccggtcctgggcacgatcatcttcctctacggcggcacccccttcctcaagggcgcaatgaccgagctgaaatcccgccaaccgggcatgatgctcctgatcgccatggcgatcaccgtggcgtttatcgcctcctgggtcaccaccctggggctgggcgggttccacctagatttctggtgggaactggccctgctggtgaccatcatgctgttgggccactggctggagatgcgcgctcttggtgcagcctcctccgcgcttgacgcgctggcagcgctcctgcccgatgaggccgagaaggtcgtcgacgggaccacccgcaccgtagcgatctcagagctggccgtcgacgatgtcgtgctggtccgagcaggtgcccgcgtcccggccgacgggaccatcatcgacggagcggccgaattcgatgaggccatgatcaccggcgaatcccgacccgtctaccgggataccggtgagaccgtggtggccggcaccgtggccaccgacaacaccgtccgtatccgggtggaggccaccggtggggacaccgccctggcaggcatccagcgcatggtcgccgacgcccaggcctcctcctcccgggcccaggccctggccgatcgagccgcagccttcctgttctggttcgccctgatcacggccctgatcaccgccgtggtctggaccatcatcggcagccccgacgatgccgtggtccgcgcggtgaccgtgctgatcatcgcctgcccgcacgccctgggcctggccatcccgctggtcatcgcgatctcctccgagcgcgccgcgaaatccggggtgctcatcaaggaccgcatggcactcgagcacatgcgcaccatcgacgtcgtcttgttcgataagaccggcaccctgaccgaaggcgcacacgccgtcaccggcgtggctccggccacgggtatcgccgagggtgagctgctggccctggccgccgccgctgaggccgatagtgagcaccccgtggcccgcgcgatcgtgactgccgcggccgcacacccggaggcctcgcagcgtcagctgcgcgcaaccggtttcaccgccgcctccggccgcgggatccgggccaccgtcgacggtgccgaaatcctcgtgggcgggccgaacatgctacgcgagttcaatctgaccaccccgggtgagctcgccgacatcaccggttcctgggcacagcgaggtgccggagtgctccatgtcgtccgcgacggtgagatcatcggtgcggtggcagtggaggacaaaatccgccccgaatcccgcgcggcggtacgcgccctgcaggcccgcggggtgaaggtggcgatgatcaccggtgacgccacccaggtcgcccaggcagtgggcaaggatctggggatcgatgaggtcttcgccgaggttctgccgcaggacaaggacaccaaggtcacccagctgcaggagcgcggtctgagcgtggccatggtcggcgacggtgtcaatgacgccccggccctggcccgggccgaggtcggtattgcgattggcgcgggtacagatgtggcgatggagtccgccggggtggtcctggccagtgatgatccccgggccgtgctgtcgatgatcgagctctcccatgccagctaccgcaagatggtccagaacctggtctgggcgaccgggtacaacatcgtggccgttccgctggccgccggtgtgctcgcccctatcggtgtgctgcttcccccggcggcggccgccatcttgatgtccctgtccacgatcatcgtcgccctcaacgcccagctgctacgccggatcgacctggacccggctcacctagctccgaccgacgggaaggaggagaaggctgctgtgagctctgcagcccccgtccgctga

SEQ ID NO: 55430 - protein, 739 aa, Corynebacterium glutamicum ATCC 13032
MSTPHHHGDHPAPETDHTHHPNHAGHEHHADAATHGQAMPHDHPHSTVDEEHQVHSHGEHAGHSAAMFRDRFWWSLILSVPVVFFSPMFADLLGYNIPEIPGAYWIPPVLGTIIFLYGGTPFLKGAMTELKSRQPGMMLLIAMAITVAFIASWVTTLGLGGFHLDFWWELALLVTIMLLGHWLEMRALGAASSALDALAALLPDEAEKVVDGTTRTVAISELAVDDVVLVRAGARVPADGTIIDGAAEFDEAMITGESRPVYRDTGETVVAGTVATDNTVRIRVEATGGDTALAGIQRMVADAQASSSRAQALADRAAAFLFWFALITALITAVVWTIIGSPDDAVVRAVTVLIIACPHALGLAIPLVIAISSERAAKSGVLIKDRMALEHMRTIDVVLFDKTGTLTEGAHAVTGVAPATGIAEGELLALAAAAEADSEHPVARAIVTAAAAHPEASQRQLRATGFTAASGRGIRATVDGAEILVGGPNMLREFNLTTPGELADITGSWAQRGAGVLHVVRDGEIIGAVAVEDKIRPESRAAVRALQARGVKVAMITGDATQVAQAVGKDLGIDEVFAEVLPQDKDTKVTQLQERGLSVAMVGDGVNDAPALARAEVGIAIGAGTDVAMESAGVVLASDDPRAVLSMIELSHASYRKMVQNLVWATGYNIVAVPLAAGVLAPIGVLLPPAAAAILMSLSTIIVALNAQLLRRIDLDPAHLAPTDGKEEKAAVSSAAPVR

SEQ ID NO: 55431 - DNA, 2310 bp, Fusobacterium nucleatum subsp. nucleatum ATCC 25586
  CDS (1)..(2310): transl_table=11
atggagaataatataaatttaaaaacagaaattggcaacaatcaggaaaatgaaaatcaaaaattagaactaaaaattgatggtataagttgtcaagcttgtgttgcaaagattgaaagaaaattatcaaagactaatggagtaggaaaagcacttgttaatatttcaaataatatggcagatattgaatataatgaaaaagaaataaaagctagtgaaattatgaaaataattgaaaagctaggttatactccaaaaagaagagaagatttaaaagataaagaagaagctcttagagcagaaaaaaaactaaaattagaattaactaaatcaaaaattgttatagttctatcttttatacttatgtatatttcaatgagccatatgtttggattgccgcttccaaatatacttaatccagaaatgaatattgtaaattatgtgctaacacaattaattttagctataactgttatgataattggaaaaagattttataaggttggttttagacagttatatatgttaagtcctaatatggatagcttagtagcagtgggaacaagttcagcatttatatatagtttatatataagctataaaatatttgcaggtaataatatccatttgatacattcactatattatgaatcagctgcaatgataatagcctttgtaatgctaggaaaatacttagaaactttaagcaaaggtaaagcttcagctgcaataaagaaattggtaaattttcaagctaaaaaagctagtattataagaaatggcgaaataattgaaatagatatagaagaagtatcaaaaggagatacagtttttataaagcctggtgaaaaaattccagttgatggtgtaataatagagggacattcaactattgatgaagctatgattacaggagaaagtatcccagttgaaaaaactgaaaatgataaggtatatagtggaagcataaataaagatggagcattgaaagttactgtaaatgcaacagaaggagaaactctaatatcaaaaatagccaaacttgttgaagatgcacagatgacaaaagcaccaatagcaaggcttgcagataaagtttctttaatatttgttccaacagttatttttattgctgtttttgcagctttactttggtggtttttaataaaatacaatgtgatatcagtaagtcaaaatcaatttgagtttgtattgactatttttatatctatacttataattgcctgtccttgttcattgggacttgccacaccaacagctataatggttggaacaggtaagggagcagagttaggtatcttaataaaatctggtgaagcattagaaaaattaaatcaaattgacactattgtttttgacaaaacaggtactttaacagaaggtatgccaaaagttatagatatagtaagtttaggtaatatagataaagatgaaatattaaaaatatctgcttctatggaagtaagttcagaacacccactaggaaaagcaatctatgatgaagcaaaagaaaagaatattaacttatatgatgtaaaaaatttcttagctatttcaggtaggggagtaattggagaaattgaagctaaaaaatatttattgggaaataaaaaattacttcttgataataatataaaagatttatatgaagaagaaatacataaatatgaattacaagggaaaacaaccatttttttagctgatgaagaaaagttaattgcttttataacattggcagatgttgttagaaatgaaagtcttgaacttataaagaaattaaaaaaagaaaatataaaaacatatatacttacaggtgataatgaaagaactgcaagagtaatagcagaaaaattaggaatagatgatgttattgcagaagtgtcccctgaagataaatataaaaaggttaaggaattacaagaacaaggtaagaaagttgcaatggttggggatggaataaatgattctcctgcacttgcacaagcagatgttggaatagcaataggaagtgggacagatattgcaatagaaagtgctgatatagttcttatgggaaaagatataaaaattattcttactgctataagattgagtagagcaactataaaaaatattaaagaaaatctattctgggcatttttctataacacttgtggcattccaatagctggaggtttactatatttattcacaggacatttactaaatcctatgatagcagggcttgctatgggaatgagttctgtatcagttgtaagtaatgctttgagattaaagagatttaagtaa

SEQ ID NO: 55432 - protein, 769 aa, Fusobacterium nucleatum subsp. nucleatum ATCC 25586
MENNINLKTEIGNNQENENQKLELKIDGISCQACVAKIERKLSKTNGVGKALVNISNNMADIEYNEKEIKASEIMKIIEKLGYTPKRREDLKDKEEALRAEKKLKLELTKSKIVIVLSFILMYISMSHMFGLPLPNILNPEMNIVNYVLTQLILAITVMIIGKRFYKVGFRQLYMLSPNMDSLVAVGTSSAFIYSLYISYKIFAGNNIHLIHSLYYESAAMIIAFVMLGKYLETLSKGKASAAIKKLVNFQAKKASIIRNGEIIEIDIEEVSKGDTVFIKPGEKIPVDGVIIEGHSTIDEAMITGESIPVEKTENDKVYSGSINKDGALKVTVNATEGETLISKIAKLVEDAQMTKAPIARLADKVSLIFVPTVIFIAVFAALLWWFLIKYNVISVSQNQFEFVLTIFISILIIACPCSLGLATPTAIMVGTGKGAELGILIKSGEALEKLNQIDTIVFDKTGTLTEGMPKVIDIVSLGNIDKDEILKISASMEVSSEHPLGKAIYDEAKEKNINLYDVKNFLAISGRGVIGEIEAKKYLLGNKKLLLDNNIKDLYEEEIHKYELQGKTTIFLADEEKLIAFITLADVVRNESLELIKKLKKENIKTYILTGDNERTARVIAEKLGIDDVIAEVSPEDKYKKVKELQEQGKKVAMVGDGINDSPALAQADVGIAIGSGTDIAIESADIVLMGKDIKIILTAIRLSRATIKNIKENLFWAFFYNTCGIPIAGGLLYLFTGHLLNPMIAGLAMGMSSVSVVSNALRLKRFK

SEQ ID NO: 55433 - DNA, 2277 bp, Streptococcus pyogenes MGAS8232
  CDS (1)..(2277): transl_table=11
ttgcctgcctgggcagtgccactgtcagaaaaaggagacgtattaatggctaaagagatatttttagtggagggaatgagttgtgcctcttgtgctctaacaattgaaaaaacggtcaatcaattgcctgaggtagaacaggctgttgtgaatttagcgactgagaagctcacggttacttatcaagatgacgatttagaaacggccaaagttattcaagcggtaaaagctgctggttatggtgcacaagtctttgatgaacatgcaaaacatatgcaaacaggtcgtcgtgacgaagacctaaaggttatttggtctcaggtcttgtggtctgccctattcaccattcctatattatacctagctatgggtcacatggtgggcttatggcttcctccatttatgcaaccagatcgctatcctttcgtttacagctttagtcagctactcttgacgattccagtcttagtattaaatcgtcattattaccataatgggtttaaagctttgtttaagggacatcctaatatggactccttggtagctttagcaaccagctttgcttttgcttatagtctttatggagtggttgaaatcagtttgggccaggcgcactttgtgcactccctttattttgaatcggtggtagtgattttgacactcatcggtctaggaaagtattttgaaagtcgttctaagggccgtacttctcaagctattcaaaagctcctatccttgaaggctactgatgtgagggtatggagaagcagccaatggcaattgttaccattagaagaagttagctatgatgaccttgtcctggttcaaccaggtgaaaaagtttctattgacggtattatcgtggaaggacatagcagtttggatgaatcctttttaactggggaaagtttgcctgttgaaaagggagaaaaagataatgtctttgcgggcagcttgaatgggccaggcgccctcacgattaaaccagataagcttgggaatgataccttgttagcacaaattatccaactagttgagaatgctcaagaaaataaagcacctattgcagctattgctgatagagtctcaggtgtctttgttccggtggttttggtattagctctgttaacaggggtattttggttggtattcatgcaggaaagtcttcgttttagtttgacaacagccatcgctgttctagtcattgcttgtccttgtgcgcttggtttagcaactccgacagcgattatggttggaacagggcgtgcagctgaaaatggtattctttttaaagggggtgacatcttagaacaagcccatcaggtagatacggttgtttttgataaaacggggacgattacggaggggaaaccaagtcttcaaaacctcctaactttttcgggagatgatcaccttatcttgcaagaagctgcttccttggaggcctattctcaacacctcttaggggaggctattgtccgtgctgctcaggaagctggttacgatagtctaccagtggaacagtttgagtctttaaccggcctaggagtcaccggtcagcttgaagggcgtcgtttggcgattggaaatgctactttaatggcaacccttggtattgatttagcttctgttcagtcagtttgtgctaaggcttcagggaaaggtcaaacccttgtatattatgctaaagaggggcagctaagagctcttttcagtattgctgacgctgtcaaagaagatagtcaagctaccgtcgaagctttgcagcaactgggaattcacaccatcatgctaacaggtgaccacgatgctaccgctaaggctattgcctctcaagtggggattacagatgtgatcagtcaagtcttacctgatcaaaaagcaggcgtgatagcagacctccgctctcaagggagaaaagttgcaatggtaggtgatggtattaatgatgctccggcattggctgtagcagacattgggatagctatggggtcagggacagatattgccattgaatcggcggatgtgattctgatgaaacctgatatgctggatttggtgaaagctatgtcattgagtcgagcgactatgagaattgtcaaggaaaatttattttgggcattcatttacaatgtcctcatgattccagtggccatgggcttacttcatctttttggaggtccactattgaacccgatgttagcaggttttgccatgagttttagttcagtatcagttgttttgaatgccctgcgattaaaaggaaaaaccatttga

SEQ ID NO: 55434 - protein, 758 aa, Streptococcus pyogenes MGAS8232
MPAWAVPLSEKGDVLMAKEIFLVEGMSCASCALTIEKTVNQLPEVEQAVVNLATEKLTVTYQDDDLETAKVIQAVKAAGYGAQVFDEHAKHMQTGRRDEDLKVIWSQVLWSALFTIPILYLAMGHMVGLWLPPFMQPDRYPFVYSFSQLLLTIPVLVLNRHYYHNGFKALFKGHPNMDSLVALATSFAFAYSLYGVVEISLGQAHFVHSLYFESVVVILTLIGLGKYFESRSKGRTSQAIQKLLSLKATDVRVWRSSQWQLLPLEEVSYDDLVLVQPGEKVSIDGIIVEGHSSLDESFLTGESLPVEKGEKDNVFAGSLNGPGALTIKPDKLGNDTLLAQIIQLVENAQENKAPIAAIADRVSGVFVPVVLVLALLTGVFWLVFMQESLRFSLTTAIAVLVIACPCALGLATPTAIMVGTGRAAENGILFKGGDILEQAHQVDTVVFDKTGTITEGKPSLQNLLTFSGDDHLILQEAASLEAYSQHLLGEAIVRAAQEAGYDSLPVEQFESLTGLGVTGQLEGRRLAIGNATLMATLGIDLASVQSVCAKASGKGQTLVYYAKEGQLRALFSIADAVKEDSQATVEALQQLGIHTIMLTGDHDATAKAIASQVGITDVISQVLPDQKAGVIADLRSQGRKVAMVGDGINDAPALAVADIGIAMGSGTDIAIESADVILMKPDMLDLVKAMSLSRATMRIVKENLFWAFIYNVLMIPVAMGLLHLFGGPLLNPMLAGFAMSFSSVSVVLNALRLKGKTI

SEQ ID NO: 55435 - DNA, 2391 bp, Thermoanaerobacter tengcongensis MB4
  CDS (1)..(2391): transl_table=11
atggccgaaaaagctaatttaaaaataactgggatgtcttgtgcagcttgtgcaaccaaaatagaaaaagggcttaaaagcttagatggagttttagacgcaaatgtaaatcttgccgttgaaaaagcaacagttatatatgatccagataaaattaatatatgcgatattgagaaaaagatagaagatataggatatggtgtaataaaagataaagtagagcttgcacttatgggtatgtcctgcgcatcctgcgctgccaaaatcgaaaaaaccttaaaaaacctgcctggtgtaagcaatgcatcagttaattttgcagctgagacggcaattgtcgaatatgattcaaatgaaattgatacagaaaaaatgattaaagcgataaaagatataggatatgatgcaaaagaaaagactggagtaggtattgacacagaaaaagagataaaggagagagaaataaatacattaaggaaacttgtaatatattcagcgattttaactgtgccgttagtaatatcaatggttttgagaatgtttaaaatttcaggtggaatacttgataatccatggttacaggtatttttatcttcacctgttcagtttattgtaggttttagatattataaaggtgcttggaacaatttaaaaaatatgacggcaaatatggatactttggtagctatgggaacatctgcagcatatttttatagtttgtacaatgtatttactaaaccctctcatgagatacacaattacttgtattttgaggcatcagcagttattataacgcttgtaacattaggtaagctgcttgaagctatagccaagggaaaaacgtctgaagcaataaaaaacctcatgggactacaagcaaagaccgcaagagtgataagggatgggcaagaattagatatacctattgaagaagtcaaagtcggggatatcgttgttgtaaggccgggcgaaaaaataccagttgacggtaaaatagttgagggtagttccacaatagatgaatctatgataactggtgaatctattcctgtagaaaaaggcgttggtgatgaagtaattggcgctacgataaataaaacaggaacgtttaaatttgaagcgacaaaagtgggtaaagatacggtactatcgcaaattattaaaatggtagaagatgcccaaggatcaaaagcgccaattcaacaaattgctgataaaatctctggtatttttgtacccacagttatagccatagctgctaccacatttttaatttggtattttgggtatggagattttaatgcgggcataataaatgcagtatcagtacttgtaattgcctgcccgtgtgcgcttggacttgcagttcccacttctgtgatggtagggacaggaaaaggagcagaaaatggtatactcataaagggaggagaacatctgcagagggcagggaaaataacggcaatagtatttgataagactgggacgataacaaaaggagaaccggaagttacagacatagtaacttttggagatttcaccgaagatgagattttgaaaattgcgggaattgcggaaaaaaattctgagcatccattgggacaagcaattgtcaataaagcaaaagaaaaattcaaaatattggaagaccctgagaaatttgaggctgtaccaggctatggtatatgcattacgataaatgaaaaagagttttatattggcaatagaaggctcatggacagacaaaatattgatataacgtcaattgaagataaggttgaagaactagaattacaaggtaaaacagcaatgatattggcatctcacgacagagtttatggcattatagctgttgcagatactgtaaagagtgactcggcaaaagcaattcaaaagttacaagctatgggtattgaagtatacatgattacgggagataataaaaggactgctgaggcaatagcaaaacaagttggtataaaaaatgtgttggcagaagtattgccagaacataaggctttggagattatgaagcttcaaaaaatgggaaaagtagttgcaatggtgggagatggtattaatgatgctcctgctttagctactgcggatgttggcatagcgataggtacaggtacagatgtggcgatagaaacctcagatataacgcttttaagtggaaatcttatgggtattgtgaccgctataaaattaagcaaagctacgatgagaaatatatatcaaaatttattctgggcttttgtatacaatacaatcggcataccatttgctgcgatgggccttttaactccagctatagcaggaggggcaatggcatttagctcagtgtcagttgtaacaaatgctttaagactgagaagatttaaagtataa

SEQ ID NO: 55436 - protein, 796 aa, Thermoanaerobacter tengcongensis MB4
MAEKANLKITGMSCAACATKIEKGLKSLDGVLDANVNLAVEKATVIYDPDKINICDIEKKIEDIGYGVIKDKVELALMGMSCASCAAKIEKTLKNLPGVSNASVNFAAETAIVEYDSNEIDTEKMIKAIKDIGYDAKEKTGVGIDTEKEIKEREINTLRKLVIYSAILTVPLVISMVLRMFKISGGILDNPWLQVFLSSPVQFIVGFRYYKGAWNNLKNMTANMDTLVAMGTSAAYFYSLYNVFTKPSHEIHNYLYFEASAVIITLVTLGKLLEAIAKGKTSEAIKNLMGLQAKTARVIRDGQELDIPIEEVKVGDIVVVRPGEKIPVDGKIVEGSSTIDESMITGESIPVEKGVGDEVIGATINKTGTFKFEATKVGKDTVLSQIIKMVEDAQGSKAPIQQIADKISGIFVPTVIAIAATTFLIWYFGYGDFNAGIINAVSVLVIACPCALGLAVPTSVMVGTGKGAENGILIKGGEHLQRAGKITAIVFDKTGTITKGEPEVTDIVTFGDFTEDEILKIAGIAEKNSEHPLGQAIVNKAKEKFKILEDPEKFEAVPGYGICITINEKEFYIGNRRLMDRQNIDITSIEDKVEELELQGKTAMILASHDRVYGIIAVADTVKSDSAKAIQKLQAMGIEVYMITGDNKRTAEAIAKQVGIKNVLAEVLPEHKALEIMKLQKMGKVVAMVGDGINDAPALATADVGIAIGTGTDVAIETSDITLLSGNLMGIVTAIKLSKATMRNIYQNLFWAFVYNTIGIPFAAMGLLTPAIAGGAMAFSSVSVVTNALRLRRFKV

SEQ ID NO: 55437 - DNA, 2289 bp, Streptomyces coelicolor A3(2)
  CDS (1)..(2289): transl_table=11
atggccggcgaaccgacgtccgtacaggaggtgaccgacctcgctgtcggcggcatgacctgcgcggcctgcgtgacgcgggtggagaggaagctggccaagctggacggtgtcagcgcgagcgtgaacctcgccaccgggcgggcccgtgtgcaccatccgcccgaggtgctcccggagcagctcgtggccgccgtcgaacaggccggatacaccgccgcgctgccccaatccgtcgaagagcggcgccgcgggagcgatgacgatgccgggacggaggcacagcgggaacgcgaccggctgacggtcacggccctgctcgccgtccccgtgctggtcctgtccatggtccccgcctggcagttccgcaactggcagtggctgtgcttcgtgctcgccgcgcccgtcgtggcctggggagcctggcccttccaccggcgggcggcgcgggcactgcggcactcgacgtcgaccatggacaccctggtgtcgctgggcgtggtggcctccttcgcctggtcctcctatgcgttgttcctcggcggcgccggtgatccggacctgcggatgcccttcagcctggtgccgacggcgtcggacggcgtcgcccacatctacctggaggccgccgtcggcgtccccctgttcgtcctggcgggccggtacctggaggcgcgggcccgccgtggcaccggagcggccctgcgcgcactggcggagctggccgtcaaggaggtcgccgtgcgcgacggcacgggcgggcgccgcatcccgatcgaggagctccgggtggggcaggtcttcgtcgtgcggcccggagaacgcgtggcgaccgacggcacggtcgtcgagggcagttcggccgtcgacctctccctggtcaccggggagagcgaaccggccgaggtcgctcccggtacggccgtgatcgccggcggcgtgaacgtcggcggcctgctggcggtgcgggccaccgcggtcggcgccgacacccggcttgcccgcatcacccacctggtcaccgaggcacaggcgggcaaggcgcgggcacagcgcctcgccgacaaggtcgccggcgtcttcgtcccggtcgtgctcaccctggccgccaccgtcctcggcttctggctcggcgccggtgccgacccccaggcggcgatcaccgcctccgtggccgtcctggtcgtcgcctgcccctgcgccctcggtctcgccaccccgaccgccctgatggcagccaccggccgcggcgcccaactcggcgtcctggtcagcggcccacaggccctggaaggactgcggcacatcgacgtcgtggtcctcgacaagaccggcaccctgacctccgggcacatgagcgtcgcccgggtcacggcgatgccccggggcatcggcgaggagcaggcggtcaggctggccggtgcggtcgaacagggctccgagcaccccttgggccaagccgtcacggcgtacgcccggcgcaccatgccgacggggtcgctgccggaggtgaccgacttcgccgctctgccgggacgtggtgtgcggggcagggtcgagggacgcctggtggaggtcacggctccggacgacgagctgcccgtaccgctcgacgaggcgatgtccggcgcggagtcggccgcccacacgcccgtcgtggtccgcgtcgacggggtgaccgaggggctcatcgaggtcggcgacgtactgcggccgggcagctaccgggccgtggaccggctgcggcgcctgggcgtacggccggtactggccaccggagaccgggaggcacccgcccgcgccgtcgccaccgccctgcgcatcgacgacgtacacgcccgccgcacccccgaggacaaggcccggctcgtccgcgaactacgggaagagggccaccgggtcgccgtcgtcggcgacggagtcaacgacgccgcggccctggccggggccgacctcggcatcgcgatgggcaccggcaccgacgcggcgatcggagccgccgacgtcaccctggtccgcggagacatcgacgccctcgccgacgctgtccgcctctcccgcagcacgctggccaccatccgggtcaacctgctgtgggccttcggatacaacgtcgtgaccatgccgccggccatggtcggcctgctcagcccgatgccggccgccgcggtgatgtccgtcagctcactcctcgtggtcggcaacagcctgcggctgcgtgcctggcagccggcacggacccgcagccgtccgtccgcctcgcccgcccgcggggagagccttcgatga

SEQ ID NO: 55438 - protein, 762 aa, Streptomyces coelicolor A3(2)
MAGEPTSVQEVTDLAVGGMTCAACVTRVERKLAKLDGVSASVNLATGRARVHHPPEVLPEQLVAAVEQAGYTAALPQSVEERRRGSDDDAGTEAQRERDRLTVTALLAVPVLVLSMVPAWQFRNWQWLCFVLAAPVVAWGAWPFHRRAARALRHSTSTMDTLVSLGVVASFAWSSYALFLGGAGDPDLRMPFSLVPTASDGVAHIYLEAAVGVPLFVLAGRYLEARARRGTGAALRALAELAVKEVAVRDGTGGRRIPIEELRVGQVFVVRPGERVATDGTVVEGSSAVDLSLVTGESEPAEVAPGTAVIAGGVNVGGLLAVRATAVGADTRLARITHLVTEAQAGKARAQRLADKVAGVFVPVVLTLAATVLGFWLGAGADPQAAITASVAVLVVACPCALGLATPTALMAATGRGAQLGVLVSGPQALEGLRHIDVVVLDKTGTLTSGHMSVARVTAMPRGIGEEQAVRLAGAVEQGSEHPLGQAVTAYARRTMPTGSLPEVTDFAALPGRGVRGRVEGRLVEVTAPDDELPVPLDEAMSGAESAAHTPVVVRVDGVTEGLIEVGDVLRPGSYRAVDRLRRLGVRPVLATGDREAPARAVATALRIDDVHARRTPEDKARLVRELREEGHRVAVVGDGVNDAAALAGADLGIAMGTGTDAAIGAADVTLVRGDIDALADAVRLSRSTLATIRVNLLWAFGYNVVTMPPAMVGLLSPMPAAAVMSVSSLLVVGNSLRLRAWQPARTRSRPSASPARGESLR

SEQ ID NO: 55439 - DNA, 2262 bp, Streptomyces coelicolor A3(2)
  CDS (1)..(2262): transl_table=11
atgaccaccagtacgaccagcgcaccggccgaggtggaactcaccatcggcggcatgacctgcgcctcgtgcgccgcccggatcgagaagaagctgaaccggatggagggggtcaccgcgaccgtcaactacgcgacggagaaggcgaaggtcagctatgccggtgacgtgtccgtcccggagctgatcgccaccgtcgaggcgaccgggtacacggcccgcgagcccgaaccggtgcgtaccggtgccgggtccgggccggggggcgccgagaccgtcgacgagctgcggccgctgcgggagcggctggtgacgtcggtggtgctggcggtcccggtgatcgcgatggcgatggtgcccgcgctgcagttcgagtactggcagtggctgtcgctgacgctggcggcgcccgtggtgacgtacgcggcctggcccttccacaaggcggcgttcaccaacgcccggcacggcgcggccaccatggacaccctgatctcggtcggcacctcggcagcgttcctgtggtcgttgtgggcactgttcctcggcaccgcgggcacgcccggcatgacccaccccttcgagctgaccatcgcgcgcggcgacggctccgggaacatctacctggaggccgcggccggggtgaccgccttcatcctcgccgggcgctacttcgaggcgcggtccaagcgcaaggccggtgccgcgctgaaggcgctgctggagctgggcgccaaggacgtcacggtcgtgcggggcggccgtgaggagcggatcccggtgggggacctgacggtcggcgaccggttcctggtccgccccggcgagaagatcgcgaccgacggcacggtcgtcgagggcagctctgcggtcgacgcgtcgatgctcaccggcgagtcggtgccggtcgaggtcgccgcgggcgacggggtcaccggggcgaccgtgaacgcgggcggccgactggtggtcgaggcgacgcgggtcggcgcggacacccagctggcgcggatggccaggctggtggaggacgcgcagaacggcaaggccgcggcccagcggctcgccgaccgcatctccggtgtcttcgtccccgtcgtgatcgccctcgcgctggccaccctcggcttctggctcggcaacggctccggaccggccgccgcgttcaccgccgccgtcgccgtcctgatcatcgcctgcccctgtgcgctgggcctcgccaccccgaccgcgctgatggtcggcaccggtcgcggcgcccagctcggcatcctcatcaagggccccgaggtcctggagtccacccgaaaggtcgacaccatcgtcctggacaagaccgggaccgtcaccaccggccgcatgaccctgctcgccgtgcacaccgccgacggcaccgacgaggcggacgtgctgcggctggccggagcactggagcacgcctcggagcacccgatcgcgcaggcggtggccgcgggcgccaccgaacgggccggcgccctgcccacccccgaggacttcgccaacgtgcccggtctcggcgtgcagggcgtcgtcgagggccacgcggtcctggtcggccgcgagaagctgctcgccgagtgggccatggaactgcccgccgagctcgggcgcgcgaagacccgggcggaggccgccggccgcaccgcgatcgccgtcgcctgggacggcgaggcccgggccgtcctggaggtcgccgacgcggtcaaggacaccagcggcgaggccgtcacccggctgcgggcgctgggcctgacaccgatcctcctcaccggtgacaaccgggccgtcgccgaggcggtggccgccgaggtcggcatcgctcccgcgcacgtgatcgccgaggtcatgcccgaggacaaggtcgccgtcgtcaagcgcctccagggcgagggtcgttcggtggcgatggtcggcgacggggtcaacgacgccgccgcgctcgcccaggccgacctgggcctcgccatgggcaccggcaccgacgccgccatcgaggcgggcgacctcaccctcgtccgcggcgacctgcgcgccgccgccgacgccatccggctggcccgcaggacactcggcaccatcaagtccaacctgttctgggccttcgcctacaacgtcgccgccctgccgctcgccgccgccggactcctcaacccgatgatcgccggagcggccatggccttctcctccgtcttcgtcgtcggcaacagcctgcggctgcgcggattcaaggccgccgactga

SEQ ID NO: 55440 - protein, 753 aa, Streptomyces coelicolor A3(2)
MTTSTTSAPAEVELTIGGMTCASCAARIEKKLNRMEGVTATVNYATEKAKVSYAGDVSVPELIATVEATGYTAREPEPVRTGAGSGPGGAETVDELRPLRERLVTSVVLAVPVIAMAMVPALQFEYWQWLSLTLAAPVVTYAAWPFHKAAFTNARHGAATMDTLISVGTSAAFLWSLWALFLGTAGTPGMTHPFELTIARGDGSGNIYLEAAAGVTAFILAGRYFEARSKRKAGAALKALLELGAKDVTVVRGGREERIPVGDLTVGDRFLVRPGEKIATDGTVVEGSSAVDASMLTGESVPVEVAAGDGVTGATVNAGGRLVVEATRVGADTQLARMARLVEDAQNGKAAAQRLADRISGVFVPVVIALALATLGFWLGNGSGPAAAFTAAVAVLIIACPCALGLATPTALMVGTGRGAQLGILIKGPEVLESTRKVDTIVLDKTGTVTTGRMTLLAVHTADGTDEADVLRLAGALEHASEHPIAQAVAAGATERAGALPTPEDFANVPGLGVQGVVEGHAVLVGREKLLAEWAMELPAELGRAKTRAEAAGRTAIAVAWDGEARAVLEVADAVKDTSGEAVTRLRALGLTPILLTGDNRAVAEAVAAEVGIAPAHVIAEVMPEDKVAVVKRLQGEGRSVAMVGDGVNDAAALAQADLGLAMGTGTDAAIEAGDLTLVRGDLRAAADAIRLARRTLGTIKSNLFWAFAYNVAALPLAAAGLLNPMIAGAAMAFSSVFVVGNSLRLRGFKAAD

SEQ ID NO: 55441 - DNA, 2283 bp, Streptomyces coelicolor A3(2)
  CDS (1)..(2283): transl_table=11
atgaccagcaccaccgcggacacgcgcacctccacgacggccaccgggcccgatcccggcgtcgccgaagtcgagctgctcatcggcgggatgacctgcgcctcctgcgcggcccgcgtcgagaagaagctcaaccgcatggacggtgtcaccgccacggtgaactacgcgaccgagaaggcccgggtcagctacccggcgaccaccggggtcgccgacctgatcgccaccgtcgtgaagaccgggtacacggccgaggagcccgcgccgccaccggagcccgccgacgaggccggggccggggagcgcggcaccggggacggcgggagcgacccggaactgtcggccctgcgtcagcgcctgctggtctccgtcctcctcgccgcccccgtcgtgctgctcgcgatggtcccggcgctccagttcgacaactggcagtggctctcgctcactctggccgcgcccgtcgtggtctggggcgggctgcccttccaccgcgccgcctggaccggcctgcggcacggcgcggccaccatggacacgctggtctcgctcggcacgctggcggcgttcggctggtccctgtgggcgctgttcttcggggacgcgggcatgccgggcatgcggcacggcttcgacctcaccgtctcccgcaccgacggcacctccgcgatctacctggaggccgccgccggggtcaccgccttcctgctcctgggccgctggctggaggcccgctccaagcgccgcgcgggggccgccctgcgggcgctgatggagctgggcgccaaggacgtggccgtactgcgggccgggcgcgaggtgcggataccggtggcccgcctggcggtgggcgaccggttcgtcgtacgccccggcgagaagatcgccaccgacggcacggtggccgagggcgcctcggccgtggacgcctcgctgctgaccggcgagtccgtgccggtggacgtcgccgtcggcgacaccgtcaccggcgccacggtcaacgccgggggccggctggtggtcgaggcgacccgggtgggcgcggacacgcagctggcgcggatggcgaagctggtggaggacgcgcagagcggcaaggcgcaggtgcagcggctcgccgaccggatctcggggatcttcgtccccgtcgtgctgctgatcgcgttcgccaccttcggcggctggctcggtgccaccggtgacacggtcgccgcgttcaccgcggccgtcgccgtcctgatcatcgcctgcccgtgcgcgctgggcctggccaccccgacggcgctgctggtcggcaccggtcgcggcgcccagctcggcatcctcatcaagggcccggaggtactggagaacacgcgccgcgtcgatacggtcgtcctggacaagaccggcaccgtcaccaccggccgcatgaccctgcacgaggtgtacgccgccgagggcaccgacgaggaggagctgctgcggctcgcgggcgccgtcgagcacgcctccgagcacccggtggcccgcgcgatcgccgcaggcgccgaggcacggctcggcacgctgccgggcgccgaggacttcgagaacgtccccgggcgcggcgcacgcgcccgcgtggcgggccacgaggtggccgtggggcgcctccacgacaccctgccgcccgaggtgtcccgggccagggacgaggccgagcagcggggccgtacggccgtcgtcgtcggctgggacggcgcggcgcgcggggtgctcgccgtggcggacgcggtcaaggagaccagcgccgaggcggtggccgggctgcgccggctgggtctgaccccggtcctgctgaccggcgacaaccgccgggtggccgagtcggtcgcggcggccgtcggcatcgacgaggtgatcgccgaggtgctgcccgaggacaaggtcgcggtggtggagcggctgcgggccgagggccgtacggtcgccatggtcggcgacggcgtcaacgacgcggccgccctcgccaccgccgatctgggcctggcgatgggtacggggacggacgcggcgatcgaggcgggcgacctgacgctggtgcgcggtgacctgcgggtggcggcggacgcgatccggctctcccggcgcaccctggccacgatcaagggcaatctcgtgtgggccttcggctacaacgtggccgcgctgccgctggccgccgccgggctgctgaacccgatgatcgcgggggcggcgatggccttctcctcggtcttcgtggtcaccaacagccttcggctgcgcgctttccgatag

SEQ ID NO: 55442 - protein, 760 aa, Streptomyces coelicolor A3(2)
MTSTTADTRTSTTATGPDPGVAEVELLIGGMTCASCAARVEKKLNRMDGVTATVNYATEKARVSYPATTGVADLIATVVKTGYTAEEPAPPPEPADEAGAGERGTGDGGSDPELSALRQRLLVSVLLAAPVVLLAMVPALQFDNWQWLSLTLAAPVVVWGGLPFHRAAWTGLRHGAATMDTLVSLGTLAAFGWSLWALFFGDAGMPGMRHGFDLTVSRTDGTSAIYLEAAAGVTAFLLLGRWLEARSKRRAGAALRALMELGAKDVAVLRAGREVRIPVARLAVGDRFVVRPGEKIATDGTVAEGASAVDASLLTGESVPVDVAVGDTVTGATVNAGGRLVVEATRVGADTQLARMAKLVEDAQSGKAQVQRLADRISGIFVPVVLLIAFATFGGWLGATGDTVAAFTAAVAVLIIACPCALGLATPTALLVGTGRGAQLGILIKGPEVLENTRRVDTVVLDKTGTVTTGRMTLHEVYAAEGTDEEELLRLAGAVEHASEHPVARAIAAGAEARLGTLPGAEDFENVPGRGARARVAGHEVAVGRLHDTLPPEVSRARDEAEQRGRTAVVVGWDGAARGVLAVADAVKETSAEAVAGLRRLGLTPVLLTGDNRRVAESVAAAVGIDEVIAEVLPEDKVAVVERLRAEGRTVAMVGDGVNDAAALATADLGLAMGTGTDAAIEAGDLTLVRGDLRVAADAIRLSRRTLATIKGNLVWAFGYNVAALPLAAAGLLNPMIAGAAMAFSSVFVVTNSLRLRAFR

SEQ ID NO: 55443 - DNA, 2277 bp, Chlorobium tepidum TLS
  CDS (1)..(2277): transl_table=11
atgacaacgaaaacctactcggtcaaggggatgcactgtgcgagctgcgcggccatcatcaccaagaaactctcaaaggtcgaaggcatcgaaaaggctgacgtcaacctcgccaccgaaaaagcccagctcgaattcacgggcgaagccgtgacggacgatgcgctaaacgaactgctcggcaagtacggctacggtctggtatcggagcaacctccagccaccccatcggcgccgttcgtcgatcggaaggcggcggcggaaaaggcgaagatggaaaaagagatggagcttcaggcacaactggccaaggtgcagttggccctgccgatcgccctgatggtttttatcctgatgatgtgggacatcgccgcccgttcgttcccgtcgatgccgggcatgcccattccgatggcgctgttcaacatcgtctcgatggcgctcgcaacctacatggtgttccgcatcggcgcaccgttcctgcacggcatcgtcatgttcgtccagagcggcgcggcgagcatggataccctcatcggtatcggtacgctcaccgcgtacctctacagcaccgtcatcacactgatgccggaagttcgcgaactgctcagagtcccgaactacacctatttcgacaccaccatcgtcgtcatcggtttcgtgctgctcggcaaatacctcgaggcccgctcgaagctgaaaaccggcgaggcaatcgagaaactcatcggtctgcaggccaaatcggccatcgtcagacgcggcggggcggaggtcgaagtcccgctcgaacaggtgcagaaaggcgacctcatcgtcgtcaggcccgggacgaaggtaccggtggacggcaccatcactgaaggaagctcctccatcggcgaatcgatggtcaccggcgaaccggttccggtggacaagacggtcggcgatccggtcatcggcggcaccatcaaccggcagggcgcgttcgttttcaccgcctccagagtcggcgaggagaccgtactggcgcgcatcatcgccatggtcgaggaggcccagggctccaaggcccccatccagaatatcgccgaccggatcgccgccatcttcgttccggcggtactggttatcgccgccctcaccttcatcctctggctgacggtcgggtcgctgttcatcgatttttcgaccgcgctctccttcggcatcatgggcatggtcggcatcctcgtgatcgcctgcccctgcgctctcggtctggccaccccgaccgcgatcatcgtcggcatcggcaagggcgccgagtacggcatcctcatccggaatgcgcagagccttgagaccctcagcacggtggacacggtcgtcttcgacaaaaccggcaccatcaccacagggacgccctcggtcaccgacgtcctgcctttcgacgataccgttgatccggaaaagatcctgcaactggcggccagcatcgaaaaccgctccgagcatccccttgcccaggcgattctcgccgccgccaaagagaaaggcatcgacctccacgaagtcaccggcttcgaggccctcgaagggatcggcgtcaaaggaacgatcgacggaaaaaatattagcgtgaggaagccggacagtggcgacagcagccgatcccgaatcgcagagctccagcagcagggcaagaccgtggtcatcctcgaagaggagggcgcgccgctgggtctcgtcgccctctccgatacgatcaagacggaggcggctgatgctgtgaaggcactgcacgccaaaggggtcaaggtcatcatgctcactggcgacaacaaactagccgcgaacttcatggcccgccaggcaggcatcgacaaagtcatcgccgaagtgctgccgcaagagaaggccgaccgtgtcagggagttgcagcagcagggccgcaaggtcgccatggctggcgacggcatcaatgacgccccggcgctggccctcgccgacgtcggcatcgccatggcgaccggcaccgacatcgccatcgaatcggccggggtcaccatcctgcagggaggcatccgcaaagtcgcccagtcgatcacactcgcccgggcaaccatgcgcgtcatccgccagaacctcttctgggccttcatctacaacgtaatcggcattccgctcgccgccggagcgctctatccgttcttcgggatcttcctcaacccggtcttctcgggcgttgcgatggccggaagcagcgtctcagtcgtcaccaactcgcttcgactcaaagcgaaaaaactctga

SEQ ID NO: 55444 - protein, 758 aa, Chlorobium tepidum TLS
MTTKTYSVKGMHCASCAAIITKKLSKVEGIEKADVNLATEKAQLEFTGEAVTDDALNELLGKYGYGLVSEQPPATPSAPFVDRKAAAEKAKMEKEMELQAQLAKVQLALPIALMVFILMMWDIAARSFPSMPGMPIPMALFNIVSMALATYMVFRIGAPFLHGIVMFVQSGAASMDTLIGIGTLTAYLYSTVITLMPEVRELLRVPNYTYFDTTIVVIGFVLLGKYLEARSKLKTGEAIEKLIGLQAKSAIVRRGGAEVEVPLEQVQKGDLIVVRPGTKVPVDGTITEGSSSIGESMVTGEPVPVDKTVGDPVIGGTINRQGAFVFTASRVGEETVLARIIAMVEEAQGSKAPIQNIADRIAAIFVPAVLVIAALTFILWLTVGSLFIDFSTALSFGIMGMVGILVIACPCALGLATPTAIIVGIGKGAEYGILIRNAQSLETLSTVDTVVFDKTGTITTGTPSVTDVLPFDDTVDPEKILQLAASIENRSEHPLAQAILAAAKEKGIDLHEVTGFEALEGIGVKGTIDGKNISVRKPDSGDSSRSRIAELQQQGKTVVILEEEGAPLGLVALSDTIKTEAADAVKALHAKGVKVIMLTGDNKLAANFMARQAGIDKVIAEVLPQEKADRVRELQQQGRKVAMAGDGINDAPALALADVGIAMATGTDIAIESAGVTILQGGIRKVAQSITLARATMRVIRQNLFWAFIYNVIGIPLAAGALYPFFGIFLNPVFSGVAMAGSSVSVVTNSLRLKAKKL

SEQ ID NO: 55445 - DNA, 2238 bp, Thermosynechococcus elongatus BP-1
  CDS (1)..(2238): transl_table=11
gtgtccctaagttcaagtcttgattcccaggcccctgaggtagcaattctgcgggtgagcggcctgcgttgtgctggctgtgtgcgatcgctggaaaatcagttaaaagagcagccgggcgtcaatgctgcggccgtgaatctggtgacgggaaccgccgtcgtcacctattcccccaatgaaacaacccccaccgccattgtcgagagcctcaaccaaggccgctttcaggccacccttgcagaagccaatgtccttttggaactgcccacgaccgccgaggaaacctctttgccaaggttggcgatcgcccttgtgctcctgattctctccagtgtcggccacgggattaatctgctgccgggacactggcccatgttagaagcgatgatctggcactgggggctagcgacgattgcccttgtcctaccggggtgggagattttgcgggagggaatagctggcttgagccaagggcgcccaaatatgaatacgctggtggctcttggcgccttgggggcttacctcaccagtacggtggcgtggctgtggccggccttggggtggcagtgtttctttgatgaaccagtgatgatccttgggtttattttgctggggcgatcgctggagcaacgagtccgccaacaggcacaacgggacttgcgatcgctcctcgccctgcagccaaaacaggcactatggcaaccgagtttgaccgctagcgatcgctggcccattcccgtcagtcgtatccaggtgggagactggctgtgggtggatgctggggaaccctttcccgccgatggcacgattgtaaccggggagaccttggtggatgaatccatgctcacgggggagtctctaccggtggccaaaggggtaggggcatttgttctagcgggcagtcgcaatgtgggtgcggcggtcaccctacgggtagaacgctgtggtcgagcctcctttctcgggcagattttagaccttgtggtgcaggcacaaaatcgcaaagcaccggtgcagcaaatggcagatgtggtggcgggctattttggctatggcgtgttgctcttagcagcaggcacggcgcttttttggggggcgatcgccccccattttttcccagaaatcaccaataacacgcccctattgcccctaaagctggccttaagtgtgttggtgattgcctgtccctgtgcccttggccttgccaccccgatcgcccttcttgtgggcatcagtcgtgccgctgccaaaggcttaattattcgcggcggcgatgttctccagcacagtcaacagttggacacgattgtctttgacaagacgggcacactgacgacgggtgaactcgaagtagcagagattcacctgtacggggacctctccttagaaaccgtcctgtacctactggccagcctagagcacaagagtcgccatccccttgcggtagcgattcagaaggcatgggctgcgaccaaccagacaacagaactagcaacggtgactgagctggaaactgtccttggactggggatcagcggttggattgaggggcattactatcaagcgggacgtctcagttggctgcgtgatcagggcattgactcccctcccctagcggtagaaacccatgtggccttggcccgcgatcgccagttgatggcggtggtcacctttcgcgatcgcctgcgcccagaggcagtgagcaccattcaagccctgcaagcccaaggctatgagattcatgtcctcacgggcgacaccgccaaagcggcacaacaactcctagaacccctcggcctcctcccagtcaatatccacccagatctgcaaccacagcaaaagctggccctcattgaggagtggcaaactaagggcaaaacagtggcaatggttggggatggcatgaatgatgcccccgctctgacagcagctcaggtggggattagtcttggcagtggtacagaggtggccattgaagcagcagatattatcctcacccgcaatcatctggaggatgtgctcgccgtcctagccctcagccgtgccaccttccgcaaaattcagcagaatcttctgtgggccgtggcctacaatatcgtcgctttacctattgcagccggtgtcggattacccctgtggggactcagtctcacgcccgggcttgcggccgctggcatggccttcagttccattatcgttgttctaaattccctaagcctcagtcgagcaaactag

SEQ ID NO: 55446 - protein, 745 aa, Thermosynechococcus elongatus BP-1
MSLSSSLDSQAPEVAILRVSGLRCAGCVRSLENQLKEQPGVNAAAVNLVTGTAVVTYSPNETTPTAIVESLNQGRFQATLAEANVLLELPTTAEETSLPRLAIALVLLILSSVGHGINLLPGHWPMLEAMIWHWGLATIALVLPGWEILREGIAGLSQGRPNMNTLVALGALGAYLTSTVAWLWPALGWQCFFDEPVMILGFILLGRSLEQRVRQQAQRDLRSLLALQPKQALWQPSLTASDRWPIPVSRIQVGDWLWVDAGEPFPADGTIVTGETLVDESMLTGESLPVAKGVGAFVLAGSRNVGAAVTLRVERCGRASFLGQILDLVVQAQNRKAPVQQMADVVAGYFGYGVLLLAAGTALFWGAIAPHFFPEITNNTPLLPLKLALSVLVIACPCALGLATPIALLVGISRAAAKGLIIRGGDVLQHSQQLDTIVFDKTGTLTTGELEVAEIHLYGDLSLETVLYLLASLEHKSRHPLAVAIQKAWAATNQTTELATVTELETVLGLGISGWIEGHYYQAGRLSWLRDQGIDSPPLAVETHVALARDRQLMAVVTFRDRLRPEAVSTIQALQAQGYEIHVLTGDTAKAAQQLLEPLGLLPVNIHPDLQPQQKLALIEEWQTKGKTVAMVGDGMNDAPALTAAQVGISLGSGTEVAIEAADIILTRNHLEDVLAVLALSRATFRKIQQNLLWAVAYNIVALPIAAGVGLPLWGLSLTPGLAAAGMAFSSIIVVLNSLSLSRAN

SEQ ID NO: 55447 - DNA, 2376 bp, Oceanobacillus iheyensis HTE831
  CDS (1)..(2376): transl_table=11
atggctaataaacagtcaacatatcatattaccggtatgacatgtgccgcttgctccaaccgtatagaaaaagtattaaatcgtatggatggggtagaagctaatgtgaatctaactaccgagaaagcatcaattcgatacgatgattccaaatttacgaatgatgatttaaccaaaaaaatagaaaaaattgggtatggcattcaaatagagaaggttgatttagacattagcggtatgacatgtgccgcttgttccaatcgaatagaaaaagtattaaacaaaatggatggtgtaaaagacgcaacggtaaatcttactacggaaacgggatctatttattattatccagatttgatattggaatctgatctattgaacaaaataaagaaaataggatacgaggcaactcctagaagtgagaataaggaaaatataaaacaaaaacagatagcaagaacgaagcgaaaattaataatttcagcagtattatcttttccattactactaactatgctggtacatctttttaattttgaaattcctgcttttttaatgaatccatggttccaattggtagtagcaacaccgattcaattttgggtcgggtggcagttctacgttggagcatttaagaatttgcgtaataaaactgcaaatatggacgtattagttgcagttggcactagtgcagcttacttttatagtctgtacgaaggattattaacgattaataattctgcttatcacccacatctttattacgagacaagtgcaattattattacactcgtattgtttggtaagtacctcgaagcacgtgcaaaaggacaaactacaactgctattacaaagctattaaatctacaagccaaagaggccagagtattacgtaaaggaacggaacttctaattcctctagaagaagtggttgttggagatcgattaattgtaaaaccaggagaaaaaataccagtagacggtatcgtaaaacaaggaagaacctccgttgatgagtcgatgattactggggagtctatacctgtagaaaaaaatttggactcagaagtgataggttcaacaataaataaaaatggttcaattgaaatggaagcatctagagtaggtacggagactgcattatcatctattgtgaaagctgtggaggatgctcaaggatcgaaagcgccaatacaacgattagcggatgttatttcaggatactttgttccagtcattgtcatgatagcaatcttaaccttctttgtctggtttctatttgtgcaaccaaatcaagtggaacctgctttagtagcgtccattgcagtattagtaattgcttgtccctgtgcattaggtttggcaacaccaacttcaattatggtgggtactggacgtgcagcagagagtggaattcttttcaaaggtggagagcacatagagcaagcgtacaaaattcaatccgtagtatttgataaaactgggactataaccaatggcaaaccagtcgtaactgattttaatggagacgatgagacgctattattattagcaagtgcagaaaaagggtcagaacatcctcttgccgaagcaattacacaacatgcggaggaaaaacaactggatttattatcaacaactgattttgaagctattccaggtcgtggtataactgcaaagatagataataagcatattattgtcggaaatcgtcaattaatgaaagaatataaggtagatagcagaaaagaagaagaacatttattagaactagaaaatgaaggaaaaactgctatgttaattgcaatcgacgggaaaatccgaggtactgtcgctgttgctgatacgattaaagaaaatgccaaggaagctataaaccaattaaaagatatgaatatacaagtagttatgttaacaggtgataatgaacgaactgcgaaagctattggacgattagctggaatagatcatattattgctgaagtattacctgaagagaaagccgaaaatataaaagcgttgcaaaaagatggaactgcagtcgcaatggttggagatggaattaatgatgcccctgctcttgctgtggcagatatcggaattgcgattggaactggtactgaaatcgcaattgaggcagctgatattacgattttaggaggagatcttctccttgtatcaaaagctattaagattagtcaagcaacgattaaaaatataaagcaaaatctattctgggcttttggttacaatactgctggagtaccaattgcagcaattggattattagctccttggattgctggggctgcgatggctttaagttccgtaagtgtcgttacaaattcattaagactaaaaaaactaaaggtttaa

SEQ ID NO: 55448 - protein, 791 aa, Oceanobacillus iheyensis HTE831
MANKQSTYHITGMTCAACSNRIEKVLNRMDGVEANVNLTTEKASIRYDDSKFTNDDLTKKIEKIGYGIQIEKVDLDISGMTCAACSNRIEKVLNKMDGVKDATVNLTTETGSIYYYPDLILESDLLNKIKKIGYEATPRSENKENIKQKQIARTKRKLIISAVLSFPLLLTMLVHLFNFEIPAFLMNPWFQLVVATPIQFWVGWQFYVGAFKNLRNKTANMDVLVAVGTSAAYFYSLYEGLLTINNSAYHPHLYYETSAIIITLVLFGKYLEARAKGQTTTAITKLLNLQAKEARVLRKGTELLIPLEEVVVGDRLIVKPGEKIPVDGIVKQGRTSVDESMITGESIPVEKNLDSEVIGSTINKNGSIEMEASRVGTETALSSIVKAVEDAQGSKAPIQRLADVISGYFVPVIVMIAILTFFVWFLFVQPNQVEPALVASIAVLVIACPCALGLATPTSIMVGTGRAAESGILFKGGEHIEQAYKIQSVVFDKTGTITNGKPVVTDFNGDDETLLLLASAEKGSEHPLAEAITQHAEEKQLDLLSTTDFEAIPGRGITAKIDNKHIIVGNRQLMKEYKVDSRKEEEHLLELENEGKTAMLIAIDGKIRGTVAVADTIKENAKEAINQLKDMNIQVVMLTGDNERTAKAIGRLAGIDHIIAEVLPEEKAENIKALQKDGTAVAMVGDGINDAPALAVADIGIAIGTGTEIAIEAADITILGGDLLLVSKAIKISQATIKNIKQNLFWAFGYNTAGVPIAAIGLLAPWIAGAAMALSSVSVVTNSLRLKKLKV

SEQ ID NO: 55449 - DNA, 2505 bp, Shigella flexneri 2a str. 301
  CDS (1)..(2505): transl_table=11
atgtcacaaactatcgacctgaacctggacggcctgtcctgcggtcactgcgttaaacgcgtgaaagaaagtcttgaacagcgcccggatgtggaacaagcggatgtgtctatcactgaagcgcacgttaccgggactgccagtgcagaacagctgatcgaaaccatcaaacaagcgggttatgacgcatctgtaagccacccaaaggctaaaccgctggcggagtcatcaatcccgtcggaagcactgacagcggtttctgaggcgcttccggcagcgaccgccgatgacgatgacagccagcagttgctgctgagcggcatgagctgcgccagctgtgtcacccgcgtacaaaatgcgctgcaaagcgtaccgggcgtcactcaggcacgggtaaacctggcggagcgtactgcgctggtgatgggcagtgcctccccacaagatttagtgcaggcggtggaaaaagcgggctacggcgcggaagcgattgaagatgacgcgaaacgccgcgaacgccagcaagaaaccgccgtcgctacgatgaagcgcttccgctggcaggcaattgtcgcactggcggtgggtatcccggtgatggtctgggggatgatcggcgataacatgatagtcaccgccgacaaccgcagcctgtggttggttatcggcctgataaccctggcggtgatggttttcgccagcggccatttttaccgcagtgcatggaaaagcctgctgaacggtgcagcgacgatggatacgctggtggcgctgggaacgggcgtggcgtggctctattcgatgagcgtcaacctgtggccgcagtggttcccgatggaagcgcgacatctttactatgaagccagtgcgatgattatcggtctgatcaatctcggccatatgctggaagcacgcgcacgtcagcgttcttctaaggcactggagaaattactcgatttaaccccaccgacggcgcgcctggttactgacgaaggtgaaaaaagcgtgcctctggcagaagtgcagccaggtatgttgctgcgcctgacgaccggcgatcgcgtgccggtagatggcgagattacccagggcgaagcatggctggatgaagcgatgctgacgggcgaaccaatcccgcagcaaaaaggcgaaggcgatagcgtccatgccgggacagtggtacaggacggcagtgtgctgtttcgtgccagtgcggttggcagccataccacgctatcaaggatcattcgcatggtgcgccaggcccagagcagcaagccagaaatcggtcagctggcggataaaatctcagccatatttgtgccggtagtagtggttattgcgcttgtcagtgcggcaatctggtatttctttggtccggcaccgcagattgtctataccctggtgattgccactacggtgctgattatcgcctgcccgtgtgcgctgggactggcgacgccgatgtcgattatttccggcgtcgggcgggcggctgagtttggcgtgctggtgcgggacgccgacgcgctgcaacgcgccagtacactcgataccgtcgtgttcgataaaaccgggacgctgaccgaagggaagccgcaggttgtcgcagtgaaaacatttgctgatgttgacgaagcgcaggcgctgcgtctggcggcggcgctggagcaaggttccagccatccattggcacgagcgatccttgataaagcaggcgatatgcagctaccgcaggtcaacggtttccgcacattgcgcgggctgggcgtgagcggtgaagcagaaggtcatgcgttattgctgggtaatcaggcgttgttaaatgatcagcaagtcgatactaaagcgattgaagccgatatttcagctcaggcatcgcaaggagcaacgcctgtgctgctggcgattgacgggaaagcagtagccctgctggctgtacgcgatccgttgcgtagtgatagcgtggcggcgctgcaacgcctgcataaagcgggatatcgtctggtgatgttgaccggggataacccaaccaccgccaatgcgatcgccaaagaagctggaattgatgaagtgattgccggagtgctgccggacggtaaagccgaagcgatcaaacgtctgcaaagtgaaggacgtcaggtggcaatggtgggcgacggcattaacgacgcgccagcgctggcccaggcggatgtcggcattgcgatgggtggcggcagtgatgttgccattgaaaccgcggcgattaccctgatgcgccatagcctgatgggcgttgcggatgcgctcgcgatttcccgcgcaacgctgcgcaacatgaagcagaacctgctcggtgcctttatctacaacagcatcggtattccggtcgccgccggtattttgtggccgtttactggaacactgcttaacccggtagttgccggagcggcaatggcgctctcgtcaattaccgtagtaagtaacgccaaccggttgctgcggtttaaaccgaaggaataa

SEQ ID NO: 55450 - protein, 834 aa, Shigella flexneri 2a str. 301
MSQTIDLNLDGLSCGHCVKRVKESLEQRPDVEQADVSITEAHVTGTASAEQLIETIKQAGYDASVSHPKAKPLAESSIPSEALTAVSEALPAATADDDDSQQLLLSGMSCASCVTRVQNALQSVPGVTQARVNLAERTALVMGSASPQDLVQAVEKAGYGAEAIEDDAKRRERQQETAVATMKRFRWQAIVALAVGIPVMVWGMIGDNMIVTADNRSLWLVIGLITLAVMVFASGHFYRSAWKSLLNGAATMDTLVALGTGVAWLYSMSVNLWPQWFPMEARHLYYEASAMIIGLINLGHMLEARARQRSSKALEKLLDLTPPTARLVTDEGEKSVPLAEVQPGMLLRLTTGDRVPVDGEITQGEAWLDEAMLTGEPIPQQKGEGDSVHAGTVVQDGSVLFRASAVGSHTTLSRIIRMVRQAQSSKPEIGQLADKISAIFVPVVVVIALVSAAIWYFFGPAPQIVYTLVIATTVLIIACPCALGLATPMSIISGVGRAAEFGVLVRDADALQRASTLDTVVFDKTGTLTEGKPQVVAVKTFADVDEAQALRLAAALEQGSSHPLARAILDKAGDMQLPQVNGFRTLRGLGVSGEAEGHALLLGNQALLNDQQVDTKAIEADISAQASQGATPVLLAIDGKAVALLAVRDPLRSDSVAALQRLHKAGYRLVMLTGDNPTTANAIAKEAGIDEVIAGVLPDGKAEAIKRLQSEGRQVAMVGDGINDAPALAQADVGIAMGGGSDVAIETAAITLMRHSLMGVADALAISRATLRNMKQNLLGAFIYNSIGIPVAAGILWPFTGTLLNPVVAGAAMALSSITVVSNANRLLRFKPKE

SEQ ID NO: 55451 - DNA, 2220 bp, Leptospira interrogans serovar Lai str. 56601
  CDS (1)..(2220): transl_table=11
atgaaagttcaacaagaattgcatttaaatgaagtaacattagacgtaattggaatgacctgtgccaattgtgcacttagaattgaaaaaggacttaaaaaaataccaggagttaaggatgtaagagttaattttgcaatggaaaccgcaaagatagattttgaatcttcaatctcaaaagaaattctaatggataaaatagattttttaggttatcgtgcggttgttcacgaagatatagaaatagatggagaaattcagaaaaaagaattcaaaaaactaaaagttcgagttattgtttccgcatttttgtctttaccattacttttaagtatgattgggcattttgagaataatctaaattttgaatatttatcttttctaatgaatccttggttacagtttgttttagctaccccaatccaattttggatcggagcttctttttataaaggtagttttcgcgctcttagaaatgggggagctaatatggacgttctagttgttttaggaacgtctgccgcgtatttttatagcgtctatttgacatttattttcaatgaaaaatacattcataagacagcgaatctatattacgaaacttcatctgtgttgatcactttgattctttttggaaaattgttggaacatatagtaaagggtaaatcttcgaaggcaattcaatccttggtaaatttacaaccaaaaaaagcgaacgtcattagagaaaaagagattcaagagatccctttgcttgcagttcgctctggagatttgattttggtaaagccgggagaaagtattcctgtggacggaataatagaagagggaagttcaaccatcgacgaatcgatgttaaccggagaaagcattcctgttgaaaaaacaatttccaatttcgtttacggaggttcattaaatcaaaacggaactttcaagttcagggctttaaaagttggaaaagaaactttgctctcgggaatcattcgagcggttcgagaagcccaaggaaccaaggctccgattcaaaggattgcagatcaaatttcggaaatatttgttccagtgattgttttgatctcagtaattactttatgtgtatggtatttttggattttgccttctaccttttcagtagcactagaaaaggcaattgctgtgcttgtggtcgcttgtccttgtgctttaggtttggcgactccgatttcggttttaaccgggtctggaaaagcggctactatgggaattttgtttcgtagtgcagaagcattagaaatattgcataaagtaaatgcaattgtttttgataagaccgggaccttaacttatggaaaaccggttttgaaaagtttagaaagtttgaatatagctaaagaaaataatttacttacgttagccgcttctgctgaacagaactcggaacatcctctttcaaaagcgatcgtagaaagtgcaaagaaaaaaggtcttgttttagcgattcccgaaaattttgaaacaatacctggaggaggtatttccgccattgtggagggaaatcggatattgattggaacagagagattattttacgcaaaaggaatagagctgaatcaagaattaaacaatctgaaacgaataagagaagaagaaggaaatacggtcgtccatttgagtgtgaacgaaattcattctgctatattgacattagcagatacacttaaagaatctactccggcaacgatcgcaaagttgaaatctttgggtatagaagtttatatgataactggagacaatgaaagaacggctcgagttatctcaaaagattgtggtattgaacgcgtgttagctgaagttcttccggagaaaaaagcgatggaagtaaagaatctaaaaagtttaggaaaagtggtttctatggtgggggacggaattaacgatgctcctgcgcttgcgatttcggatcttgggattgctatgggaaccggaacggatgtggcaatggaatcttccgatttagtgatcgtaaacggggatttgaattcaattgtaaacgctattactatcagcagaaaaacggtttataatattcgacagaattttttctgggcgctactctataatacgttaggtattccgatcgcagccgcaggatttttagcaccttgggttgcgggtggggctatggctctcagttcggtttcggtagttttaaacgcccttagattacaaagggattga

SEQ ID NO: 55452 - protein, 739 aa, Leptospira interrogans serovar Lai str. 56601
MKVQQELHLNEVTLDVIGMTCANCALRIEKGLKKIPGVKDVRVNFAMETAKIDFESSISKEILMDKIDFLGYRAVVHEDIEIDGEIQKKEFKKLKVRVIVSAFLSLPLLLSMIGHFENNLNFEYLSFLMNPWLQFVLATPIQFWIGASFYKGSFRALRNGGANMDVLVVLGTSAAYFYSVYLTFIFNEKYIHKTANLYYETSSVLITLILFGKLLEHIVKGKSSKAIQSLVNLQPKKANVIREKEIQEIPLLAVRSGDLILVKPGESIPVDGIIEEGSSTIDESMLTGESIPVEKTISNFVYGGSLNQNGTFKFRALKVGKETLLSGIIRAVREAQGTKAPIQRIADQISEIFVPVIVLISVITLCVWYFWILPSTFSVALEKAIAVLVVACPCALGLATPISVLTGSGKAATMGILFRSAEALEILHKVNAIVFDKTGTLTYGKPVLKSLESLNIAKENNLLTLAASAEQNSEHPLSKAIVESAKKKGLVLAIPENFETIPGGGISAIVEGNRILIGTERLFYAKGIELNQELNNLKRIREEEGNTVVHLSVNEIHSAILTLADTLKESTPATIAKLKSLGIEVYMITGDNERTARVISKDCGIERVLAEVLPEKKAMEVKNLKSLGKVVSMVGDGINDAPALAISDLGIAMGTGTDVAMESSDLVIVNGDLNSIVNAITISRKTVYNIRQNFFWALLYNTLGIPIAAAGFLAPWVAGGAMALSSVSVVLNALRLQRD

SEQ ID NO: 55453 - DNA, 2235 bp, Streptococcus agalactiae NEM316
  CDS (1)..(2235): transl_table=11
atggctaatagaaaagaaacatttttgattgatgggatgacttgtgcatcttgtgctttaacgatagaaaaagctgtcaacaagttagaccatgtggatagtgcagtagtaaatttagcaacagagaaaatgacagttacgtttgatgatacaaccttatcgccaaatgtgattgaagagtgtgtttctgagagtggatacgaagcatcgcttttcaaagaggaaacttctaaaagccaatctgaacggcaccaattagccattgaaaagatgtggcatcgcttttggatgtcagcagttgcaactatacctcttctctatatttccatgggaccaatgattaacttatggttaccatcatttttgatgccagataagggacctctaaactatggtatgatacaattattgttaacactaccggtgatgtattttgggcgtatcttttaccaaaatggttttaaagcactttttaaaaggcatcccaatatggattcattagttgctatagccacaacagcggctttcatttatagcttatatggattgtacgaaatattacagggtgacatacactacgctcaccagctttatttcgaatctgttgcagttattttaacacttattactctaggaaaatattttgaaatattatccaaagggcgtacttcggcctcgattgaaaaattattaactttatcagcaaaagaagcaagagttatcaaagatggtgaagactatatggttcctttggataaagttaaaataggtgaaacaattcttgtcaaacctggagaaaaaattcctcttgatggccatgttgtagcaggagaatcaagtattgatgaatccatgttaacaggtgaaagtattccagttgaaaaaaaggttggtagtaaggtttacggtgccagcattaatgggcaaggtagcttaacgattttcgttgaaaaagaagctggcggttcccttctatcacaaattattaacttagtagaagctgcacagacaagtaaggctccaattgctaacttagcagacaaagtatcaggagtctttgtcccttttgttattgtcattgcaattttatcaggcttgagttggtacttaattctggggcaaagttttgccttctctctgaagattatgattgcagtcttagtgattgcttgtccatgtgctttagggttggcaactcctacagctattatggtggctagtggtaaagcagctgagaatggtattttatttaaaggtggtgaagtgttggaaaaggctcaccacattgatacaatagtttttgataaaacaggaaccttgaccaaagggaaaccagaagtagttgctatcaaaacatatgggggagataaagaggagtttttaggtcaggtagcatcagtagaaaaactttcaaatcatccacttagccaaacaattgttaataaagcaaaagagaaagaacttcccttaagggaagtcatggcttttaaaaatattttgggttacggtttgagtgcaactattaatggtaaaactatgcttgtaggtaatgctaacttaatgactaagaacgatgttaatttagatttagcaaaggctgatatagaaatagctcaagaagaagcacaaactgtggtttacgtttccgaaaatggagtgttgagcggtttaataactttaacggaccagctaaagacagatagccaagaaacagttaagcagttacaaagattaggatttaatttagttttacttactggtgataataaggctagtgcagatgccatagcacaaaaattgggtatcacgacagttgtttcagaagttttacctgatcagaaagcaaacgttattttagaacttaaagaaaaaggcggacagattgcgatggttggtgatggcatcaatgatgctcctgcgctagctagcagtgatgtaggtatctctatgagttctggaacagatattgctattgaatcagcagatatcgtgttgatgaaacctgagttaacagatctcttaaaagcaatgactatcagtaaacaaacgattcaaattattaaggaaaatttattttgggctttcttttataacgttttagcgattccagtggcaatgggtgttttacatctttttggtggtcccttactcaatcctatgttggcaggcttagctatggcgtttagttcagtttcagtagttttaaacgcacttcgcttaaaagtcttaaaataa

SEQ ID NO: 55454 - protein, 744 aa, Streptococcus agalactiae NEM316
MANRKETFLIDGMTCASCALTIEKAVNKLDHVDSAVVNLATEKMTVTFDDTTLSPNVIEECVSESGYEASLFKEETSKSQSERHQLAIEKMWHRFWMSAVATIPLLYISMGPMINLWLPSFLMPDKGPLNYGMIQLLLTLPVMYFGRIFYQNGFKALFKRHPNMDSLVAIATTAAFIYSLYGLYEILQGDIHYAHQLYFESVAVILTLITLGKYFEILSKGRTSASIEKLLTLSAKEARVIKDGEDYMVPLDKVKIGETILVKPGEKIPLDGHVVAGESSIDESMLTGESIPVEKKVGSKVYGASINGQGSLTIFVEKEAGGSLLSQIINLVEAAQTSKAPIANLADKVSGVFVPFVIVIAILSGLSWYLILGQSFAFSLKIMIAVLVIACPCALGLATPTAIMVASGKAAENGILFKGGEVLEKAHHIDTIVFDKTGTLTKGKPEVVAIKTYGGDKEEFLGQVASVEKLSNHPLSQTIVNKAKEKELPLREVMAFKNILGYGLSATINGKTMLVGNANLMTKNDVNLDLAKADIEIAQEEAQTVVYVSENGVLSGLITLTDQLKTDSQETVKQLQRLGFNLVLLTGDNKASADAIAQKLGITTVVSEVLPDQKANVILELKEKGGQIAMVGDGINDAPALASSDVGISMSSGTDIAIESADIVLMKPELTDLLKAMTISKQTIQIIKENLFWAFFYNVLAIPVAMGVLHLFGGPLLNPMLAGLAMAFSSVSVVLNALRLKVLK

SEQ ID NO: 55455 - DNA, 2274 bp, Corynebacterium efficiens YS-314
  CDS (1)..(2274): transl_table=11
atggacaccatgccacgggcggtgaatctgattgagcttgatctcggcgtgacgggtatgacctgtacgtcctgttccgcgcgggtggaacgcaagctcaacaaggtcgacggtgtggaggcgtccgtcaactacgccaccgaatcagcgtcggtgaaatacgatccggagaaggtcaccgaggatcagctcatcgacaccatcaagggtgccggttacggtgccttcgcgctgtcgaccaccaccccggagaccaccaccccgaccaccgacgccgacgccgccaccggtcaggagcgtatcgacgccgcccgcgacgccgaggccgatgacctcaaacaccgcctgatcatctccgcgatcctgacggtgcccatcaccctgctcagcatgatcccggcgctgcagttcaccaactggcagtgggcggtgctgaccatgaccaccccggtgttcttctggggtggcgcaccgttccacaaggccacctgggcgaatctgcgccacgggtccttcaccatggacacgctgatctcgctcggcaccacagccgcctacctgtggtcactgtgggcgttgttcatcggtaatgccggcatgcccgggatgaccatggagatacacctgttccccaccgattcctccatggatgagatctacctggagaccgccgcggtggtcatcaccttcctgctgctggggcgctggttcgagacgaaggccaagggccgctcctccgaggcattgcgcaagctcctcgacatgggtgccaaggacgccgcagtcatccgcgatggccatgaggtgcgcatccccatcagccagcttgagatcggcgatgtcttcatcgtgcgcccgggcgagaagatcgccaccgacggccgcgtcaccgacggttcctccgcggtggatgaatccatgctcaccggtgaatccatccccgtcgaggtaaccaaggggtccaaggtcaccggcgccaccctcaacacctccggtcgcctgctcgtggaggccacccgcatcgggtcggacaccacgctggcacagatggccaagctggtcaccgaggcccagtccaagaaggccccggtccagcgtctggtggaccggatctcccaggtgttcgtaccggtggtcatcgtcatctcgatcctcacgctggccggtcatctgctcttcaccgaccacggcctggccgccgccttcaccgcggccgtcgcggtactcatcatcgcgtgtccgtgtgcgctcggcctggccacccccaccgccctgctggtgggcaccggccgcggcgcgcagctgggtctgctgatcaagggcccggagatcctcgaatccaccaagaaggtcgacaccatcgtcatggacaagaccggcaccgtcacctccggtgtgatgtcggtccacgatgtcacgaccgccccgggcttcgaccgcgatgaggtgctcaccctcgccgccgccgtggaatccgcctccgaacaccccatcgcccaggcgatcgccgccgcacccagggctgcattgcccgaggtcaccggtttccagaacaccgccgggcgcggcgtgacaggcgtggtcgacggtcgcaccgtcaccgtgggtcgcccctcaagcacgcttgacgacgccctctccgcttcattcacccaggcccagaaccagggagccacccccgtggtggtgatgatcgacggtgtcaacgccggtgtcatcaccgtgcgcgacaccgtcaaggacacctccgccgaggctgttgccggactgaagaaactcggcctgacccccatgctgctcaccggtgacaacctgggtgccgcccgggcggtggccgcggaggtgggtatcgcgccggagcatgtcatcgctgaggtgatgccggatgagaaggtatcggtcgtcaacaagctccagtcggagggccgcaacgtcgcgatggtcggtgacggcgtcaatgatgccgcggcactcgcgcaggccgacctcggcctggccatgggggcgggcaccgacgtggccatcgaggcctccgacatcaccctgatgaacaacgacctgcgctccgcggtcgatgcgatccgcctgtccaggcgcaccctgggcaccatcaagggcaacctgttctgggcgttcgcctacaacgtggccctgatccccgtcgccgccgccggattcctcaacccgatgctcgccggtgtggccatggcgttcagctccgtgttcgtcgtgaccaactccctgcgcctgcgccgattctccaccaaccactag

SEQ ID NO: 55456 - protein, 757 aa, Corynebacterium efficiens YS-314
MDTMPRAVNLIELDLGVTGMTCTSCSARVERKLNKVDGVEASVNYATESASVKYDPEKVTEDQLIDTIKGAGYGAFALSTTTPETTTPTTDADAATGQERIDAARDAEADDLKHRLIISAILTVPITLLSMIPALQFTNWQWAVLTMTTPVFFWGGAPFHKATWANLRHGSFTMDTLISLGTTAAYLWSLWALFIGNAGMPGMTMEIHLFPTDSSMDEIYLETAAVVITFLLLGRWFETKAKGRSSEALRKLLDMGAKDAAVIRDGHEVRIPISQLEIGDVFIVRPGEKIATDGRVTDGSSAVDESMLTGESIPVEVTKGSKVTGATLNTSGRLLVEATRIGSDTTLAQMAKLVTEAQSKKAPVQRLVDRISQVFVPVVIVISILTLAGHLLFTDHGLAAAFTAAVAVLIIACPCALGLATPTALLVGTGRGAQLGLLIKGPEILESTKKVDTIVMDKTGTVTSGVMSVHDVTTAPGFDRDEVLTLAAAVESASEHPIAQAIAAAPRAALPEVTGFQNTAGRGVTGVVDGRTVTVGRPSSTLDDALSASFTQAQNQGATPVVVMIDGVNAGVITVRDTVKDTSAEAVAGLKKLGLTPMLLTGDNLGAARAVAAEVGIAPEHVIAEVMPDEKVSVVNKLQSEGRNVAMVGDGVNDAAALAQADLGLAMGAGTDVAIEASDITLMNNDLRSAVDAIRLSRRTLGTIKGNLFWAFAYNVALIPVAAAGFLNPMLAGVAMAFSSVFVVTNSLRLRRFSTNH

SEQ ID NO: 55457 - DNA, 2400 bp, Pseudomonas putida KT2440
  CDS (1)..(2400): transl_table=11
atgcccgcatccaccacatacgacctgccgatctccggcatgacctgcgccagctgtgctggccgggtcgagcgcgccctgcgcaaggtcaccggcgctgaacaggtcagcgtaaacctcaccactgaaaaagctcgggttctggccccgcctgccagcctgccagccttggtcgaagccgtgcgcgaggccggttacggggtaccaacccgcaccctcgaactgcagataggcggcatgacctgcgccagttgtgtcggccgagtagagcgcgccctgggcaaattggccggggtcgagcaggtcagcgtcaacttggccagcgaacgcgcgcacctcgaagtgcttgccgcgcttgatgacaacctgctgatcgacgctgtgcaaaaggcaggctacagcgccagcctgccgcaatcgaccaaggacgaccaaagcgctgtccagcgccgcctgcgcaacgagcgcctggcagtcggtgcagccttgctgttggccctgccgctggtattacccatgctggtacaaccgttcggcttgcactggatgctacccgcctgggcgcagttcctgctggccacacccgtgcagttcattctcggtgcccgcttctacattgcagcctggaaggccgtgcgcgccggcgccggcaacatggacctgctggtggccctgggcaccagcgctggttatggcctgagcctgtaccaatgggcacaggctcccgccggcatggccccgcacctgtacttcgaagcctcagccgtggtgattgccctggtattgctgggcaagtacctggaaagccgcgccaaacgccagaccgccagtgccatccgagccctcgaagccctgcgcccggaacgcgccttgcgcgtggtcgacggcgtggaagaggacgtggccatcgcccacttgcgcgtgggcgacctggtactggtcaagcccggcgaacgcttcccggtcgacggcgtggtcgaagacggcagcagccatgccgatgaggccctgatcagcggcgagagcctgccagtgcccaagcaacccggtgacagcgtcaccggtggcgccatcaatggcgaaggccggctgctggtgcgtacccaggcgctgggcaccgagaccgtgctggcgcgcatcatccgcctggtggaagacgcccaggccgccaaagcgccgatccagaagctggtcgaccgtgtcagccaggtgttcgtcccggccgtgctggtactggcgctgatcaccctgattggctggtggctggctggggtaccgctggaaaccgcgctgatcaacgccgtcgccgtgctggtcatcgcctgcccctgcgccctcggcctggccacgcccgccgcgatcatggccggtaccggggtcgccgcccgccacggcatcctgatcaaggatgccgaagccctggagcgtgcccatgcggtcaaccgcgtagtgttcgacaaaaccggcaccctcacctccggcagcccgcaggtggttcacagccaggcgctggacggcaacagcgccgacctttaccgcctggccggcgccctgcagcgtgggagtgaacacccgctggccaaggcggtgctggtggcctgtgcagagcaagggctggacgtgccaaccgttgccgacagccagtcgctgaccgggcgcggcattgccggtcgcgttgaaggccgtgaactggcgctgggcaaccgccgactgcttgacgaaagcggtctgcagcccggcgagttggccgcccaggcccaggcctgggaagctgaagggcgcacactgtcgtggctgatcgagcgcggcaagcaaccgagagtggtgggcctgttcgcctttggtgacagcctcaagcctggcgctgcgcaggccatcgaaacccttcacgcccaacacatcagcagccacctgctgaccggtgacaaccgtggcagcgccaacgtggttgccgaggccctgggcatcgacgatgtgcatgccgaagtgctaccggccgacaaggccgcgaccgtggccgcgctcaagcaggaaggagtggtcgccatggttggcgatggtatcaacgatgcaccggcgctggccgcggccgacatcggcattgccatgggtggcggtaccgacgtggccatgcaggccgccggcatcaccctgatgcgtggcgacccgcgcctggtgcccgccgcgctggaaatcagccgcaagacctacgcgaagatccgccagaacctgttctgggccttcatctacaacctgatcggcattccgctcgccgcgctgggttacctcaacccggtactggcaggagccgccatggccctgtccagtgtcagcgtcgtcagcaatgcactgtggcttaaaacgtggaaacccaccagcagcacccaggaggcgccatga

SEQ ID NO: 55458 - protein, 799 aa, Pseudomonas putida KT2440
MPASTTYDLPISGMTCASCAGRVERALRKVTGAEQVSVNLTTEKARVLAPPASLPALVEAVREAGYGVPTRTLELQIGGMTCASCVGRVERALGKLAGVEQVSVNLASERAHLEVLAALDDNLLIDAVQKAGYSASLPQSTKDDQSAVQRRLRNERLAVGAALLLALPLVLPMLVQPFGLHWMLPAWAQFLLATPVQFILGARFYIAAWKAVRAGAGNMDLLVALGTSAGYGLSLYQWAQAPAGMAPHLYFEASAVVIALVLLGKYLESRAKRQTASAIRALEALRPERALRVVDGVEEDVAIAHLRVGDLVLVKPGERFPVDGVVEDGSSHADEALISGESLPVPKQPGDSVTGGAINGEGRLLVRTQALGTETVLARIIRLVEDAQAAKAPIQKLVDRVSQVFVPAVLVLALITLIGWWLAGVPLETALINAVAVLVIACPCALGLATPAAIMAGTGVAARHGILIKDAEALERAHAVNRVVFDKTGTLTSGSPQVVHSQALDGNSADLYRLAGALQRGSEHPLAKAVLVACAEQGLDVPTVADSQSLTGRGIAGRVEGRELALGNRRLLDESGLQPGELAAQAQAWEAEGRTLSWLIERGKQPRVVGLFAFGDSLKPGAAQAIETLHAQHISSHLLTGDNRGSANVVAEALGIDDVHAEVLPADKAATVAALKQEGVVAMVGDGINDAPALAAADIGIAMGGGTDVAMQAAGITLMRGDPRLVPAALEISRKTYAKIRQNLFWAFIYNLIGIPLAALGYLNPVLAGAAMALSSVSVVSNALWLKTWKPTSSTQEAP

SEQ ID NO: 55459 - DNA, 2649 bp, Pseudomonas putida KT2440
  CDS (1)..(2649): transl_table=11
gtgacgaagccctgcaaggcgccgaacaccaacagtagcaacaccgcaaatccctgtgggagcgggcacgcccgcgaatgcgatagctcaggcaaaggtatttccaggtctgacgcattcgcgggcgcgcccgctcccacagggtttcctatctgcctgagcagtgtctgccctatgacccaaccgaccccctgctaccactgcgccctgcccgtccccaccggcagccgcttcaccgccgtggtcctcggccagccccggcagttctgctgccccggctgtcaggcggtggccgagtcgatcgtcgctggaggcctggaacattactaccaacaccgcagcgacaacagcgccaaccccgaagccctgcccaaacaactacaggacgaactggccctgtacgaccgcagcgacgtgcagcaaaccttcgtccgccaccagggtgagctggccgaaaccaccttgcttgtcgagggcatcagctgcgccgcctgcggctggctgatcgaaaagcacctgcgcaacctgcccggtgtcgccgaagcgcgcctgaacctgtccaatcaccgcctgctgctgaactgggatgacaagcagctaccgctgtcgcgcctcctcgccgaacttcgccagatcggctacgccgcccacccctaccagcctgaccaggccgccgagcaattggcccgggaaaaccgcagcgccctacgccgcctgggcgtggccgggctgctgtggttccaggcgatgatggcgaccatggccacttggccggaattcaacatcgacctgacacccgagttgcatgccatcctgcgctgggtggcgctgttcctgacaattcccatcgtgttctacagctgcgcgcccttcttcaagggcgcggcgcgcgacttgcgaacgcgccacctgaccatggacgtttcggtgtcgctggccattggcctggcgttcggtgccggcatctggacagccatcactggcagcggcgagctttatttcgacacggtgggcatgttcgccctgttcctgctgaccggccgctacctggagcgccgcgcccgcgagcgcacagcggcggccactgcacagctggtcaacctgctgccagcctcatgcctgcgcctggacgccatcgggcgcagcgaacgcatcctgctcagcgagttacagtgcggcgacaccgtgcaggtgctgcccggcgcggtcatccctgccgacgggcgcatcgtcgagggccgctccagcgtcgacgaatcgctgctgaccggcgagtatctgccgcaaccacgccgggtgggtgagcgggtcactggcggtacgctgaacgttgaaagcgcgctgaatgtggaagtggaagccctcggccatgactcacgcttgtcggccatcgtccgcctgctggaacgcgcccagaccgaaaaaccgcgcctggcggaaatcgccgaccgcgcctcgcagtggttcctgctgttctcgctgctggccgccgttgccatcggcctgtggtggtggcacctggacccgacacgggcgttctggatcgtactggccatgctcgtggccacctgcccttgtgccctgtctttggctacgccaaccgcactgaccgccgccaccggaaccctgcacaagcttggcctgctggtgacccgcggccacgtgctggaaggcctgaaccagatcgacacggtgatcttcgacaagaccggcacactgaccgagggccgcctgaccttgcgcagcatccgcccgctcggcagccaggccgccgaccgctgcctggccctggccgcggcgctggaaaaccgctctgaacaccccatcgctcgcgcctttggtcgtaccgccacacctgccgatgacgtacagagcgtacccggcctgggcctggagggggtggtcgacggccagcgcctgcgcattggtcaggctaccttcgtctgcgccttgagtggtgcggaaatccccgctgtacccgagccgcgcggccagtggctgctgctgggcgaccgccaggggccactggcctggttcggcctggatgaccgcctgcgcgacgatgccccggccctgctcgctgcctgcaaggcgcggggctggcacaccctgctgctgtcgggcgacagctcgccgatggttgccgaagtggccgcgcagctgggtatcgaccaggccattggcggcctgcgcccggatgacaaactggaccgcctgaaagccctgcaggctgacgggcgcaaggtgctgatgctcggcgacggggtcaacgatgtaccggtactggccgccgccgatatcagcatcgccatgggcagcgccaccgacctggccaagaccagtgccgacgccgtcttgctgtccaaccgcctgcaagcgctggtgcaggcgttcgagctggcccgccgcacccgccgcaacatcctcgagaacctgctgtgggcgaccctgtataatggcctgatgttgccgttcgccgcgctcggctggatcacgccggtgtgggccgccatcggcatgtcggtcagctcgctgatcgtggtgctcaacgccctgcgcctgacccgaatgcccgtggcctcgggcccgctgccccacgaagcccctttacccgggaggaagtcgccatgcccgccctctatgtcatga

SEQ ID NO: 55460 - protein, 882 aa, Pseudomonas putida KT2440
MTKPCKAPNTNSSNTANPCGSGHARECDSSGKGISRSDAFAGAPAPTGFPICLSSVCPMTQPTPCYHCALPVPTGSRFTAVVLGQPRQFCCPGCQAVAESIVAGGLEHYYQHRSDNSANPEALPKQLQDELALYDRSDVQQTFVRHQGELAETTLLVEGISCAACGWLIEKHLRNLPGVAEARLNLSNHRLLLNWDDKQLPLSRLLAELRQIGYAAHPYQPDQAAEQLARENRSALRRLGVAGLLWFQAMMATMATWPEFNIDLTPELHAILRWVALFLTIPIVFYSCAPFFKGAARDLRTRHLTMDVSVSLAIGLAFGAGIWTAITGSGELYFDTVGMFALFLLTGRYLERRARERTAAATAQLVNLLPASCLRLDAIGRSERILLSELQCGDTVQVLPGAVIPADGRIVEGRSSVDESLLTGEYLPQPRRVGERVTGGTLNVESALNVEVEALGHDSRLSAIVRLLERAQTEKPRLAEIADRASQWFLLFSLLAAVAIGLWWWHLDPTRAFWIVLAMLVATCPCALSLATPTALTAATGTLHKLGLLVTRGHVLEGLNQIDTVIFDKTGTLTEGRLTLRSIRPLGSQAADRCLALAAALENRSEHPIARAFGRTATPADDVQSVPGLGLEGVVDGQRLRIGQATFVCALSGAEIPAVPEPRGQWLLLGDRQGPLAWFGLDDRLRDDAPALLAACKARGWHTLLLSGDSSPMVAEVAAQLGIDQAIGGLRPDDKLDRLKALQADGRKVLMLGDGVNDVPVLAAADISIAMGSATDLAKTSADAVLLSNRLQALVQAFELARRTRRNILENLLWATLYNGLMLPFAALGWITPVWAAIGMSVSSLIVVLNALRLTRMPVASGPLPHEAPLPGRKSPCPPSMS

SEQ ID NO: 55461 - DNA, 2199 bp, Pseudomonas syringae pv. tomato str. DC3000
  CDS (1)..(2199): transl_table=11
atgcaagacatcaccaccttcgacctgccgatcagcggtatgacctgtgccagttgcgcaggtcgggtcgagcgtgccctggccaaagtgccgggggtcaacagtgtgacggtcaacctcgccaatgaacgcgcgcacgtcagcgttgcgccgcaaaccgatccgcacaccctgatttcagccgtcacccgcgccggttatggcgcaacactgattcaggaccggcaggccgacgccgagaaaaaaatccagcatctgcaccgagagcgctgggccttgctgctggccattgcgctggcgttaccactgatcgcgccgatgctcctgacgccgctgggcgtgcactggatgctgcccgcatgggcgcagttcgcactggcgacaccggtgcagttcattctgggcgcgcggttttatctggccgcatggaaagcagtgcgcgcgggcgcaggtaacatggacctgctggtcgccatcggcaccagcgcgggttatggcctgagcgtctatcaatggctgcatgccgcaccgggcactacgccgcatctgtattttgaagcatcggcggtggtcatcgccttggtgctgctgggcaagtacctggaaagccgcgccaaacgccagaccgccagcgccattcgcgccctggaagcattgcgcccggaccgcgccctgcggctgattgacggcattgagcaagacgtcgcgatcagcgagcttcggcttggcgacgcggtgctggtcaagccaggtgaacgctttccagtggacggcgaagtgctcgagggccgcagccacgccgacgaagcgttgattaccggtgaaagtctcccggtggccaaacagccgggtgacaaggtcaccggcggtgcaatcaatggcgaaggtcgcttgctgattcgtactgccgcgctgggtgcggaaacggtgctggcgcgcatcattcgtctggtcgaagacgcacaggcaggcaaggcaccgatccagaaactggtggataaagtcagccaggtgtttgtgccgaccgtgctggttatcgccttcttcacattggcgggctggctgctggtcggtgcatcgctggaagtggcactgatcaacgccgtcgcggtgctggtgatcgcctgcccctgctcgctgggcctcgcgacgccgacagcgattatggccggaacgggtgtggcggcgcgctacggcattctgatcaaggacgcagaagccctggagcgcgcccatgatgtggacgccgtggtgttcgacaagaccggcacgctgacgtccggcaccccgcgcatcaccaacatgagcgccgtgctgggcaatgaagagcacttgctgcaactggcgggcgcactgcaacgcggcagcgaacatccgttagccaaggccgtgctggacgtctgcgatgaatggcaactgacactcgacccggtcgaaaacagccacgccctgagtggccgagggatcgccggcacggttcagggccgcgaactggcgctgggcaatcggcgcttgctggacgaaagcggcctgccgatgggcgatctggccgaatccgcacgcatctgggaagccgacgggcgcacgctgtcctggctgatcgagcaggctccagagccgaaagtgatcggcatgtttgcgtttggggacacgctcaagcccggcactgatcaggcaataagggcgctgaatgcgcgcggcatcaccagccatttgctgaccggcgataaccgcggcagcgcgcagatggttgccagggcgctggggatacacgacgtacacgccgaggtgctgcctgccgacaaggccgataccgtgatgcggctgaaaagcaaccatgtggtggccatggtcggtgacggcatcaacgatgcaccggcgctggcggcggctgacgtgggcattgcgatgggcggcgggactgatgtcgcgatgcatgccgcaggcattacattgatgcgcggcgacccgcgactggtgccggctgcgctggacatcagccaacggacctacgcgaagatccgccagaacctgttctgggcgttcgtctataacctgatcggcatcccgcttgcggcgctgggctatctcaacccggtactggcgggcgcggccatggcactgtccagcgtcagcgtggtgggcaacgccctgctgttgaaaacctggaagccgcgtaatctggaggacaaaccatga

SEQ ID NO: 55462 - protein, 732 aa, Pseudomonas syringae pv. tomato str. DC3000
MQDITTFDLPISGMTCASCAGRVERALAKVPGVNSVTVNLANERAHVSVAPQTDPHTLISAVTRAGYGATLIQDRQADAEKKIQHLHRERWALLLAIALALPLIAPMLLTPLGVHWMLPAWAQFALATPVQFILGARFYLAAWKAVRAGAGNMDLLVAIGTSAGYGLSVYQWLHAAPGTTPHLYFEASAVVIALVLLGKYLESRAKRQTASAIRALEALRPDRALRLIDGIEQDVAISELRLGDAVLVKPGERFPVDGEVLEGRSHADEALITGESLPVAKQPGDKVTGGAINGEGRLLIRTAALGAETVLARIIRLVEDAQAGKAPIQKLVDKVSQVFVPTVLVIAFFTLAGWLLVGASLEVALINAVAVLVIACPCSLGLATPTAIMAGTGVAARYGILIKDAEALERAHDVDAVVFDKTGTLTSGTPRITNMSAVLGNEEHLLQLAGALQRGSEHPLAKAVLDVCDEWQLTLDPVENSHALSGRGIAGTVQGRELALGNRRLLDESGLPMGDLAESARIWEADGRTLSWLIEQAPEPKVIGMFAFGDTLKPGTDQAIRALNARGITSHLLTGDNRGSAQMVARALGIHDVHAEVLPADKADTVMRLKSNHVVAMVGDGINDAPALAAADVGIAMGGGTDVAMHAAGITLMRGDPRLVPAALDISQRTYAKIRQNLFWAFVYNLIGIPLAALGYLNPVLAGAAMALSSVSVVGNALLLKTWKPRNLEDKP

SEQ ID NO: 55463 - DNA, 2232 bp, Streptococcus pyogenes SSI-1
  CDS (1)..(2232): transl_table=11
atggctaaagagatatttttagtggagggaatgagttgtgcctcttgtgctctaacaattgaaaaaacggtcaatcaattgcctgaagtagaacaggctgttgtgaatttagcgaccgagaaactcacggttacttatcaagatgacgatttagaaacggccaaagttattcaagcggtaaaagctgctggttatggtgcacaagtctttgatgaacatgcaaaacacatgcaaacaggtcgtcgtgacgaagacctaaaggttatttggtctcaggtcttgtggtctgccctattcaccattcctatattatacctagctatgggtcacatggtgggcttatggcttccttcatttctgcaaccagatcgctatcctttcgtttacagctttagtcagctactcttgacgattccagtcttagtattaaatcgtcattattaccataatgggttcaaagctttgttcaagggacatcctaatatggactccttggtagctttagcaaccagctttgcttttgcttatagtctttatggagtggttgaaatcagtctgggccaggcgcactttgtgcactccctttattttgaatcggtggtagtgattttgacactcattggtctaggaaagtattttgaaagtcgttctaaaggccgtacttcccaagctattcaaaagctcttatccttgaaggctactgttgtgagggtatggagaaacagccaatggcaattgttgccgttagaagaggttagctatgatgaccttgtcctggttcaaccaggtgaaaaagtttctattgacggtattatcgtggaaggacatagcagtttggatgaatcctttttaacaggggaaagttttcctgttgaaaagggagaaaaagataatgtctttgcgggcagcttgaatgggaaaggcgccctcacgattaaaccagataagcttgggaatgataccttgttagcacaaattatccaactagttgagaatgctcaagaaaataaagcacctattgcagctattgctgatagagtctcaggtgtctttgttccggtggttttggtattagctctgttaacaggggtgttttggttggtattcatgcaggaaagtcttcgttttagtttgacaacagccatcgctgttctagtcattgcttgcccttgtgcgcttggtttagcaaccccgacagcgattatggttggaacagggcgtgcagctgaaaatggtattctttttaaaggtggtgacatcttagaacaagctcatcaggtagatacggttgtttttgataaaacggggacgattacggaggggaaaccaagtcttcaaaagctcctaactttttcgggagatgaacgcctcatcttgcaagaagctgcttccttggaggcctattctcaacaccccttaggggaggctattgtccgtgctgctcaggaagctggttacgatagtctaccagtggaagagtttgagtctttaaccggcctaggagtcactggtcagcttgaagggcgtcgtttggcgattggaaatgctactttaatggcaacccttggtattgatttagcttctgttgagtcagtttgtgctaaggcttcaggaaaaggccaaaccattgtatattatgctaaagaggggcagctacgagctcttttcagtattgctgacgctgtcaaagaagatagtcaagctaccgtcgaagctttgcatcaactgggaattcacactatcatgctaacaggtgaccacgatgctaccgctaaggctattgcctctcaagtggggattacagatgtgattagtcaagtcttacctgatcaaaaagcaggcgtgataacaaacctccaatctcaagggagaaaagttgcaatggtaggtgatggtattaatgatgctccggcattggctgtagcagacattgggatagctatggggtcagggacagatattgccattgaatcggcggatgtgattctgatgaaacctgatatgctggatttggtgaaagccctgtcattgagtcgagcgactatgaggattgtcaaggaaaatttattttgggcattcatttacaatgtcctcatgattccagtggccatgggcttacttcatctttttggaggcccattattgaacccgatgttagcaggttttgccatgagttttagttcagtatcagttgttttgaatgccctgcgattaaaaggaaaaaccatttga

SEQ ID NO: 55464 - protein, 743 aa, Streptococcus pyogenes SSI-1
MAKEIFLVEGMSCASCALTIEKTVNQLPEVEQAVVNLATEKLTVTYQDDDLETAKVIQAVKAAGYGAQVFDEHAKHMQTGRRDEDLKVIWSQVLWSALFTIPILYLAMGHMVGLWLPSFLQPDRYPFVYSFSQLLLTIPVLVLNRHYYHNGFKALFKGHPNMDSLVALATSFAFAYSLYGVVEISLGQAHFVHSLYFESVVVILTLIGLGKYFESRSKGRTSQAIQKLLSLKATVVRVWRNSQWQLLPLEEVSYDDLVLVQPGEKVSIDGIIVEGHSSLDESFLTGESFPVEKGEKDNVFAGSLNGKGALTIKPDKLGNDTLLAQIIQLVENAQENKAPIAAIADRVSGVFVPVVLVLALLTGVFWLVFMQESLRFSLTTAIAVLVIACPCALGLATPTAIMVGTGRAAENGILFKGGDILEQAHQVDTVVFDKTGTITEGKPSLQKLLTFSGDERLILQEAASLEAYSQHPLGEAIVRAAQEAGYDSLPVEEFESLTGLGVTGQLEGRRLAIGNATLMATLGIDLASVESVCAKASGKGQTIVYYAKEGQLRALFSIADAVKEDSQATVEALHQLGIHTIMLTGDHDATAKAIASQVGITDVISQVLPDQKAGVITNLQSQGRKVAMVGDGINDAPALAVADIGIAMGSGTDIAIESADVILMKPDMLDLVKALSLSRATMRIVKENLFWAFIYNVLMIPVAMGLLHLFGGPLLNPMLAGFAMSFSSVSVVLNALRLKGKTI

SEQ ID NO: 55465 - DNA, 2217 bp, Bacteroides thetaiotaomicron VPI-5482
  CDS (1)..(2217): transl_table=11
atgggtaatatagcaaaaaaagcgtttcccgtgcttaatatgcattgtgcgggatgcgctaacaatgtagaaaagacagtgaaaaagttgccgggagtcgttgatgcttccgtcaactttgcttcaaatacattgacgatttcttatgaggacgacaagctcacccccggagaaatccgtgcagcggtacttgctgccggttatgatctgatagtagaagaagcgaataaagaagaacgtcgggaagaagaacagcataagcgctaccttcgtctgaaacggaaagtgatcggtgcgtggatatttgtagtgccgttgcttatcttttcaatgttattaatgcatatgccatactctaacgagatacaaatgttgcttgctattccggtaatggtgctcttcggaggaagtttcttcacgggggcatggaaacaggcgaagatcggtcgtagcaatatggatacgctggttgcgttgagtacctcgatagccttccttttcagtttgttcaacaccttctttccgcagttctggacagatcgcggactggaaccgcacgtctattacgaagcttccgcagtgatcattgccttcgttctgaccggaaagatgatggaggaacgcgccaaaggaaatacctcggatgccattcgcaaactgatgggaatgcagcccaaagtggcacgtgtattgcgtggtggggtagaggaagagatacaaatagacctgttgcaggtaggcgatatggtggtagtccgtcccggcgaacagattcccgtggatggccagctttcggagggcgattcgtatgtggatgaaagtatgattagcggtgagccgattccggtagagaagaaaaagggcgataaggtccttgccggaacaatcaatcagcgcggttccttcatcattcgtgcttctcaggtgggaagcgatactgtgctggcacgcatcattcacatggtgcaggaagcacaaggcagcaaagctcctgtgcagcgcatcgtcgaccgtattacaggcatcttcgttcctgtcgtgttgggaattgccattctgacgtttgtgctgtgggtggctatcggtggcagtgagtatatttcttatggtattctttctgccgtatccgttctggtcatagcctgtccctgtgctttgggacttgctacacctactgcgctgatggtaggaatcggtaaagctgccggacagcatattctgataaaagacgccgtcgctctggagcagatgcgtaaagtagatgtggtggtactggataaaaccggtactttgaccgaaggacatcctaccgctaccggatggttgtgggcacagccgcaggaagaacacttcaaagatgtacttctggctgccgaactgaaatcggaacacccgttggcaggcgcgattgtcgccgtacttcaagacgaggaaaagataactcccgctcctttgagcagttttgagagcatcacaggcaaaggtataaaggtgtcttatcaaggcaagacttactgggtgggcagccataaacttctgaaagatttcagcgctacagtgagcgatgtcatggcggatatgctggtacactacgaatcagacggaaacggaatcatatacttcggacgtgagaatgaacttttggctatcattgccgtttccgacccgatcaaggctacttctgccgaagcagtgaaagaactgaaacgtcagggcatcgatatctgtatgcttaccggtgacggtcagcggacggctctggcagtctcttcccgtctgggtatcgagcggtttgtggcagatgccttgccggacgacaaagccgaatttgtgcgtgaactgcaaatgcagggaaagaaagtggcaatggtgggcgatggtatcaatgactcgcaggcacttgcattggctgacgtcagcattgctatgggaaagggtacggatattgctatggatgtcgctatggtaacgctgatgacatccgacttgctgttacttcccaaagccttcgaactatccaggcagactgtacgactgattcatcagaaccttttctgggcattcatctacaatctgatcggtattcctatcgctgccggagtattgttccctataaacggattgttgctgaatccgatgctggcaagtgccgccatggcattctccagtgtgagtgtagtgctcaattcgttgagtttgggaagaaggaagatttaa

SEQ ID NO: 55466 - protein, 738 aa, Bacteroides thetaiotaomicron VPI-5482
MGNIAKKAFPVLNMHCAGCANNVEKTVKKLPGVVDASVNFASNTLTISYEDDKLTPGEIRAAVLAAGYDLIVEEANKEERREEEQHKRYLRLKRKVIGAWIFVVPLLIFSMLLMHMPYSNEIQMLLAIPVMVLFGGSFFTGAWKQAKIGRSNMDTLVALSTSIAFLFSLFNTFFPQFWTDRGLEPHVYYEASAVIIAFVLTGKMMEERAKGNTSDAIRKLMGMQPKVARVLRGGVEEEIQIDLLQVGDMVVVRPGEQIPVDGQLSEGDSYVDESMISGEPIPVEKKKGDKVLAGTINQRGSFIIRASQVGSDTVLARIIHMVQEAQGSKAPVQRIVDRITGIFVPVVLGIAILTFVLWVAIGGSEYISYGILSAVSVLVIACPCALGLATPTALMVGIGKAAGQHILIKDAVALEQMRKVDVVVLDKTGTLTEGHPTATGWLWAQPQEEHFKDVLLAAELKSEHPLAGAIVAVLQDEEKITPAPLSSFESITGKGIKVSYQGKTYWVGSHKLLKDFSATVSDVMADMLVHYESDGNGIIYFGRENELLAIIAVSDPIKATSAEAVKELKRQGIDICMLTGDGQRTALAVSSRLGIERFVADALPDDKAEFVRELQMQGKKVAMVGDGINDSQALALADVSIAMGKGTDIAMDVAMVTLMTSDLLLLPKAFELSRQTVRLIHQNLFWAFIYNLIGIPIAAGVLFPINGLLLNPMLASAAMAFSSVSVVLNSLSLGRRKI

SEQ ID NO: 55467 - DNA, 2229 bp, Coxiella burnetii RSA 493
  CDS (1)..(2229): transl_table=11
ttgctaatgaataccacgaaacaccaactaaccctaaaaaacatgcactgtgcgagctgtgtcgcgagtatcgagtctgcgttaaaaagtgttgccggtgttaaaagcgtgtcgattaattttgcgacgaaacaagcagaagtggaaggtgatgtcgatgtaaaaacaatcctaaaagcgattaaagaccaaggatacgaggctgaaatagcaggtgacgatgaagaggcacaaaatgaagcgcaaagtcatttccgtgatttacttaaaaaagcaatttttgctgctgtcgttggttttcctttaatgattaacgaattttgggcgtggttaccttctgtcaatcaaccacgaatccagtgggtgtgggttatcatcggcgtgctgagcttttttgttttgtactattgtggcggacatatttaccgcggcgcatggcgagcgtttttaaaacgtcaaaccaacatggatacattagtagcaatgggcaccgggacggcttggctctattcttttgtcgtcgttcttattccgatgtggattcctcccatggcgcggcatgcttattttgatacgtccactattttaattgcttttattacctttggagcggctttggaaattcgcgcgcgcggtaaaacgggagaagctattaaacgtcttatcggtttgcagcctaaaactgcgcgcgttattcgcgatgatcaagaaatcgatattcctattgctgaagttcaaatcgatgatcatctgcgcgtgcgtcccggggaaaaaattcccgtggatggtaaaatcatcaaaggcgcttctccaatagacgaatcgatgctaaccggtgaaccgcttccagtagttaaatcccagggtgacgaagtgatcggcggtaccataaataaatcaggtacgtttatttatcgcgccacgcgagtgggaaaagacaccgccttagcccagattattgcgttagtgaaacgagcgcaaaattccaaacctaaaattggacgaatcgtcgataaagtgtcagccgtttttgtgcccgtcgttattattgtagcgattttgaccgcgatagggtggcttaatttcgggcctgaacccaaagccgcttttgttttaattaccacggtggctgtattagtgatcgcctgtccgtgtgcgttgggattagccacacctatttcaattatcgtcggtgtgggaaaaggagcggaaatgggcgtactgattcgcaacggcgacgccttacaaatggcttcacaattgacggcaattattcttgataaaacaggaaccgtcactgaaggaaaaccgatgttgagcgatttctataccgctgatggattcgatgaaaaaaaattattgtcgatcgcggccagcgttgaaaaaggttcagaacatccattggctaacgccattatcgagggcgctaaaaaatacaatattccactagcaaaagcgacgcaatttgaatccattgcaggtcatggtgttaaagcgaaaatagaaaaccaatcgattttgttaggtaatttacatttaatgaaaaatgaaaaagtggaactcggtggcgcgcccgcccacgctgagcggatggcggatcaaggacaaacacctatttatatcgctcttgatggaaagatagccggcatcgtttccattgtggaccccattaaacccgattcgcaaaaagcgattgcggacttacaacgcgccggattaaaagtcgttatggttacgggcgataatcccctaacagccaacgcggttgcaaaacaagtgggaattgaacaggtgattgctgaagtactaccggaggataaagctaaaaaagtaaaactattgcagcaacaaggtgagcgtgtggcaatggtgggcgatggtattaatgatgcgcccgcattagcagcggctgacgtgggatttgccattgggacaggaaccgacgtcgcgattgaaagcgcagacatcgctttaataagcggttctttaactggcgtggtcaatgcgatctccatttcaagagccacgttacgtaacatcaaacaaaatctattcggcgcctttatttataatactttgggcattccaatcgcggcaggggttttctatccattaacgggtttgttattaagccctatcattgcgggcgctgccatggcactgtcatcagtgactgttgttgcgaacgccaatcgattacgattttttagacgcaggaaaagaacatga

SEQ ID NO: 55468 - protein, 742 aa, Coxiella burnetii RSA 493
MLMNTTKHQLTLKNMHCASCVASIESALKSVAGVKSVSINFATKQAEVEGDVDVKTILKAIKDQGYEAEIAGDDEEAQNEAQSHFRDLLKKAIFAAVVGFPLMINEFWAWLPSVNQPRIQWVWVIIGVLSFFVLYYCGGHIYRGAWRAFLKRQTNMDTLVAMGTGTAWLYSFVVVLIPMWIPPMARHAYFDTSTILIAFITFGAALEIRARGKTGEAIKRLIGLQPKTARVIRDDQEIDIPIAEVQIDDHLRVRPGEKIPVDGKIIKGASPIDESMLTGEPLPVVKSQGDEVIGGTINKSGTFIYRATRVGKDTALAQIIALVKRAQNSKPKIGRIVDKVSAVFVPVVIIVAILTAIGWLNFGPEPKAAFVLITTVAVLVIACPCALGLATPISIIVGVGKGAEMGVLIRNGDALQMASQLTAIILDKTGTVTEGKPMLSDFYTADGFDEKKLLSIAASVEKGSEHPLANAIIEGAKKYNIPLAKATQFESIAGHGVKAKIENQSILLGNLHLMKNEKVELGGAPAHAERMADQGQTPIYIALDGKIAGIVSIVDPIKPDSQKAIADLQRAGLKVVMVTGDNPLTANAVAKQVGIEQVIAEVLPEDKAKKVKLLQQQGERVAMVGDGINDAPALAAADVGFAIGTGTDVAIESADIALISGSLTGVVNAISISRATLRNIKQNLFGAFIYNTLGIPIAAGVFYPLTGLLLSPIIAGAAMALSSVTVVANANRLRFFRRRKRT

SEQ ID NO: 55469 - DNA, 2253 bp, Streptomyces avermitilis MA-4680
  CDS (1)..(2253): transl_table=11
atgagcagcaccaccgcagaggcaccgataggcccggcctcgcaggtcgagctcaccatcggcgggatgacctgcgcctcctgcgcggcccgcgtcgagaagaagctcaaccggatggacggcgtcacagccacggtgaacttcgcgacggagaaggcgagggtctcctacccggcggaggtggaggtcgccgacctcatcgccaccgtggtgaagaccggctacacggcgacggagccgccaccaccgcggcccgaggcgcccgaggaaccccagccgtcccgggcatccgaggaagaccccgagctgacgtcgctgcgcgggcggctcaccgtctccgtcctgctcgccctgcccgtcgtcctgctctccatgatcccggccctccagttcgacaactggcagtggctgtcgctgaccctcgccgcgcccgtcgtcgtctggggcgcgctgcccttccaccaggccgcgttcaccaacgcccggcacggcgcggccaccatggacacgctcgtctcggtgggcacgctcgccgccttcggctggtccgtgtgggcgctgttctgggggcacgccgggatgccgggcatgcgccacggcttcgacttcaccgtctcccgcgggaacggcgcgtccacgatctacctggaggtcgccgccggtgtcgtcgcgttcatcctcctcggccgctatctggaggcccgctccaagcgacgcgcgggtgcggccctgcacgccctcatggagctgggcgcgaaggacgtcgccgtcgtacggaacggtcgtgaggtacgcgttccggtgacccggctgaccgtcggcgaccgcttcgtcgtacggcccggcgagaagatcgccaccgacggcaccgtcgtcgagggcgactcggcggtcgacgcgtccatgctgaccggcgagtcggtaccggtggacgtgaccgtgggggacaccgtcacgggcgcgaccgtgaacgccggcgggcgcctcgtcgtcgaggccacgcgagtcggcgcggacacccaactcgctcggatggcacagctcgtcgaggccgcgcagaacggcaaggccgaggtgcagcgcctcgccgaccgcatctccggcgtgttcgtgcccgtcgtcctgctgatcgcgctcggcacgttcggggtctggctcgcggtcaccgatgacacggtcgccgcgttcaccgcggccgtcgcggtgctgatcatcgcctgcccgtgcgccctgggcctggccaccccgaccgcgctgatggtcggcacgggccgcggcgcccagctcggcatcctcatcaagggccccgaagtcctggagtccacacgccgcgtcgacaccgtcgtcctggacaagaccggaacggtgacgaccggccgtatgaccctccaggaggtgtacgtcgccgagggcgccgccgagaaggaggtcctgcggctcgcaggagccctggaacacgcctccgagcacccgatcgcccgggcgatcaccgcgggcgctcaggagcgcgcaggggcccttcccgcgccggagcgcttcgagaacgtccccgggctcggcgtacgcgggcgcgtggaaggtcatgaggtcctggtgggccggcttcccgaggtggccctcccggagggcctggcacgcgccaaggcgacggccgaggccgaggggcgtacggccgtcgtggtgtcccgggacggcgtggcgctcggcgtcctgaccgtcgccgacgcgatcaaggagaccagcgccgaggcggtacgcgaactgcgcgccctggggctcacgccggtgctgctgaccggtgacaaccgggcggtcgccgagtcggtcgcccgtgcggtcggcatcgacgaggtgatcgccgaggtgctgccgcaggacaaggtggccgtcgtcgaacggctgcgcggacagggccgtacggtcgcgatggtcggcgacggggtcaacgacgcggccgcgctcgccaccgccgatctggggctcgcgatgggcacagggacggatgcggcgatcgaggcgagcgacctgacgctcgtgcgcggggatctacgggtggcggcggacgcgatccggctgtcgcgcaggacgctctccacgatcaaggggaacctggtgtgggccttcggctacaacgtggccgcgctgccgctggccgcggccgggctgctcaacccgatgatcgcgggggcggccatggccttctcctcggtgttcgtggtgacgaacagccttcggctcaggacattctcatga

SEQ ID NO: 55470 - protein, 750 aa, Streptomyces avermitilis MA-4680
MSSTTAEAPIGPASQVELTIGGMTCASCAARVEKKLNRMDGVTATVNFATEKARVSYPAEVEVADLIATVVKTGYTATEPPPPRPEAPEEPQPSRASEEDPELTSLRGRLTVSVLLALPVVLLSMIPALQFDNWQWLSLTLAAPVVVWGALPFHQAAFTNARHGAATMDTLVSVGTLAAFGWSVWALFWGHAGMPGMRHGFDFTVSRGNGASTIYLEVAAGVVAFILLGRYLEARSKRRAGAALHALMELGAKDVAVVRNGREVRVPVTRLTVGDRFVVRPGEKIATDGTVVEGDSAVDASMLTGESVPVDVTVGDTVTGATVNAGGRLVVEATRVGADTQLARMAQLVEAAQNGKAEVQRLADRISGVFVPVVLLIALGTFGVWLAVTDDTVAAFTAAVAVLIIACPCALGLATPTALMVGTGRGAQLGILIKGPEVLESTRRVDTVVLDKTGTVTTGRMTLQEVYVAEGAAEKEVLRLAGALEHASEHPIARAITAGAQERAGALPAPERFENVPGLGVRGRVEGHEVLVGRLPEVALPEGLARAKATAEAEGRTAVVVSRDGVALGVLTVADAIKETSAEAVRELRALGLTPVLLTGDNRAVAESVARAVGIDEVIAEVLPQDKVAVVERLRGQGRTVAMVGDGVNDAAALATADLGLAMGTGTDAAIEASDLTLVRGDLRVAADAIRLSRRTLSTIKGNLVWAFGYNVAALPLAAAGLLNPMIAGAAMAFSSVFVVTNSLRLRTFS

SEQ ID NO: 55471 - DNA, 2349 bp, Nitrosomonas europaea ATCC 19718
  CDS (1)..(2349): transl_table=11
atgacatgcgctgcatgcgctgcccggatcgagaaaaatctcaacaaactgccgggcgtgcatgcagctgtcaattttgccaatgagaaagccctcataaagttcgatcacgattccacccaccctgaagagctggttcaatccatcgaaaaggcaggattccaggtcccggaacagaccgtacagctgcaaatcagcggcatgacttgtgccgcatgcgcaaatcgtatcgaaactgtcctgaatgagatacccggagtcagagccatattgaatccggctgcagaaattgcttatatcagcttcaatcccgccattacttcggtcgagcaactggtttctgctgtagaaaaggcaggttatggcgctaatcagatcagtgatgacaattacgttaaagaacaatcccgcaatcaagctgcctaccggaaagaactccgtatattctggatctctgccgccctgactgtacccttcatgctggaaatgatcatgatgctgacgggtaatcacaacaacctgctcccttactggctgcaatggctgcttgcaacgctgatccagttttggcccggcaggcgtttctatatcagcgcctggcgcacactgcgtggcggaggagccaatatggatgtactcatcgcactgggtaccagcatggcctatctcttcagcaccgccgtcatcattttgcaactggaccagcatgtttactttgaggccagcgcgatgatcatcacgctcgtgcttctgggcaagctgatggaaaccagagcaaaaagaaaaacttcagcagccattgaaacactcatcaaacttcagcccaaaacggccagagtcgaacgtgatggggaaattatcgagatcgatatcaatagccttaagaatgaggatatttttcttgtccgctcgggcgaaagcctgcccgccgatggcatcgtcattgaaggatcttccagcataaacgaagccatgttgacaggtgaaagccagccggttaccaagcaggtgggcgcaaaggtttatgccgctacccagaatcagcatggtttactcaaatgccgtgtaacgggtgtcggtaaaaatacccagcttgcagccatcattcgtctggttgagattgcacagggctctaaagcacctatccagcgtatggcagatactgtctctggtatttttgtaccaattgtaattggtatcagcattctgacattgggactaacctggtggcttacaggccatttcgtcatagcactcatcaatgcagtagcagtactggttattgcttgcccttgcgcactgggtctggccactcctactgcaatcatggttggcacaggaagaggagcacaagaaggaattctggtaaaaaacgcgaccgcactggaactcgcagaaaaaatccagatgcttgttgtagataaaacagggacgctgaccgaaggccatccatcagtcacagatattatcgtggccgatgaggtgaatgagcacgatttattacagattgcagcttcactggaacaaggctctgaacaccccctggcaaaggcggtatcgcaatatgcttcttcatcaaaaatcagattattggcgataaccaattttgcctctgtgaccggcagcggaatcaaagcggatatcgacaatgcatcttacattcttggttcacccaaatttttggcagaaaaaggtgctgtgctcgatcagcagcgtatcactgcactccagacagaaggtaaaaccgtcgtgggtgtcgctatccaaattaatgaatcagtccgggtaatcggctatcttgccattgcggattcactacgcgaaacttccatcaaagcaattcaacgcatccagaatctgggcatagatgtcatgatgctgacaggtgacaacccgactacggctgccgccatcgcaaaacaggcgggaataaaaatttttcatgcagaagtttcgcctcagaataaagcagccgaaatcgaaaaaatcaaggcaaatggccagtttgtcgggatggtaggagatggaatcaatgatgcacctgcactggcagccgcgaatgtgagttttgcgattggtgctggatcagatatagcaattgaagccgctgacattacattgatgcgcaatgatctgatgagtgttgcggatgccatctcactatcgcgcagcacactgcacaaaatccggcagaatctgttttttgcattcttttataatattttaggtattccactggcagcagcaggtatgctaagccccgtaattgcaggtgcagcaatggcaatgagttcggtatcagtcattaccaattcattactgttgaaacgctggcgtgcaggcgtttaa

SEQ ID NO: 55472 - protein, 782 aa, Nitrosomonas europaea ATCC 19718
MTCAACAARIEKNLNKLPGVHAAVNFANEKALIKFDHDSTHPEELVQSIEKAGFQVPEQTVQLQISGMTCAACANRIETVLNEIPGVRAILNPAAEIAYISFNPAITSVEQLVSAVEKAGYGANQISDDNYVKEQSRNQAAYRKELRIFWISAALTVPFMLEMIMMLTGNHNNLLPYWLQWLLATLIQFWPGRRFYISAWRTLRGGGANMDVLIALGTSMAYLFSTAVIILQLDQHVYFEASAMIITLVLLGKLMETRAKRKTSAAIETLIKLQPKTARVERDGEIIEIDINSLKNEDIFLVRSGESLPADGIVIEGSSSINEAMLTGESQPVTKQVGAKVYAATQNQHGLLKCRVTGVGKNTQLAAIIRLVEIAQGSKAPIQRMADTVSGIFVPIVIGISILTLGLTWWLTGHFVIALINAVAVLVIACPCALGLATPTAIMVGTGRGAQEGILVKNATALELAEKIQMLVVDKTGTLTEGHPSVTDIIVADEVNEHDLLQIAASLEQGSEHPLAKAVSQYASSSKIRLLAITNFASVTGSGIKADIDNASYILGSPKFLAEKGAVLDQQRITALQTEGKTVVGVAIQINESVRVIGYLAIADSLRETSIKAIQRIQNLGIDVMMLTGDNPTTAAAIAKQAGIKIFHAEVSPQNKAAEIEKIKANGQFVGMVGDGINDAPALAAANVSFAIGAGSDIAIEAADITLMRNDLMSVADAISLSRSTLHKIRQNLFFAFFYNILGIPLAAAGMLSPVIAGAAMAMSSVSVITNSLLLKRWRAGV

SEQ ID NO: 55473 - DNA, 2346 bp, Chromobacterium violaceum ATCC 12472
  CDS (1)..(2346): transl_table=11
atgacacaagccctgttgacgctgccggtttccggcatgagctgcgccgcctgcgcggcccgcatcgagaagcagttgaaccgcatggacggcgtggaggcggcggtcagcttcgccaatgaaagcgcccagctgcgctacgacccggatcagaccaagccgcagcaactggtggacgccatcgtccgctgcggtttcgaggtgccgcgccagacgcttgagctgggcatcggcggcatgagctgcgccgcctgcgcggcgcggctggagaaggcgctgggccgcttgcccggcgtggaggccagcgtcaatttcgccgccgagtcggcgcgggtggacttcctgcccggattgatggaccgcgaccgggtgttggacgcggtgcgcaaggccggtttcgagccctcgctgcgcgaggatggcggcggcgaggccgaagccgcggcgcgctatcgccgcgagctggcgtggttcgccgcgtcggcgctgctgacgctgcctttcctgatcgaaatggcggcgatgttcgccggcggccaccatggctggctgcccaggatgtggcagctggcgctggcgacgccggtgcagttcgtcgtcggctggcgcttttaccgcggcgcctggcaggcgctgcggggcggcgtcgccaatatggacgtgctggtggcgctgggcaccagcatggcctggctgctgtcggcggcggtcaccttgctgggtctggaagaccagcacgtgtatttcgaggccagcgcggcggtgatcacgctggtgttgctgggcaagctgctggaggcgagggccaagggcaagacctcggcggcgatcgccgcgctggtgaagctggcgcccaggaccgcccgcgtcgagcgcgatggcgagctggtcgaggtggcggtggacaagctgcagcgcggcgacgtggtggtggtgcgccacggcgacagcctgccggtggacggcgaggtggtggacggccaggcttggctggacgagagcatgctgaccggcgagagccggccggtggccaagcaggccggcgacaaggtctacgccgccacccgcaaccaggacggcatgctcaaggtgcgcgccaccggcgtcggcggcgacacccagttggctgagatcgtgcgcatggtggcggcggcccagggcagcaaggcgccgatccagcgcttggcggaccgcatctcggcggtatttgtgccggcggtcagcgcggtggcgctgctgactttcctgctgaccggctggctgaacggcgactgggcgcaggcgctgatccacgcggtggcggtgctggtgatcgcctgcccgtgcgcgctgggcctggccacgccgaccgcggtgatggtgggcgtgggcaatggcgcgcgccgcggtgtcctgttccgcaacgccgccgcgctggagcaggccggcaaggtggacgtgctgctggtggacaagaccggcacgctgaccgagggccggccgacgctgcgccacgcgctggcgctggacggcgacgaaaatcgcttgatccggctggccgccagcgccgaagccggctccgagcatccgctggcccacgccttgctgcagcgggcgaaagaacgggaactgcccttgctggcctgcgagcgcttccgcgccgacgtcggcaacggcgtcgaggccgcgctgccgggcgcgggcacggtcaaggtgggcgtgccgtcctggataggcctggagctgccggccgaggcggccgcctggccgcaggaaggatgcacggtggtggcggtcagcctggacggccagccgctgggcctgctggcgctggccgatccgctgcgggacagttcaaagggcgcggtgaaagcgctgcgggggctgggcgtcaaggtggtgatgctgaccggtgaccacgaaagcaccgcgcgcagcatcgccgccgaggccggcatagacgaatggcgcgccggcatgaagccgcaggacaaggccgatgtggtcaaatactggcagcggcagggcggcaaggtggcgatgctgggcgacggcgtcaacgacgcgccggcgctggccgcggccgatgtcagcctggcgatgggcgccggttccgatgtggccatcgccgccgccgacatcacgctgatgcacggcgacctggcgcacgcggtggatgccatccgcctgtcgcgcgccagcctggccaagatccgccagaatctggccttcgcctttgtttacaacgtgctgggcatcccgctggcggccgtcggcatgctgaacccggtgatcgccggcgcggcgatggcggcgagctcggtgtcggtggtgtccaactctttgctgctgcgccgctggcgctga

SEQ ID NO: 55474 - protein, 781 aa, Chromobacterium violaceum ATCC 12472
MTQALLTLPVSGMSCAACAARIEKQLNRMDGVEAAVSFANESAQLRYDPDQTKPQQLVDAIVRCGFEVPRQTLELGIGGMSCAACAARLEKALGRLPGVEASVNFAAESARVDFLPGLMDRDRVLDAVRKAGFEPSLREDGGGEAEAAARYRRELAWFAASALLTLPFLIEMAAMFAGGHHGWLPRMWQLALATPVQFVVGWRFYRGAWQALRGGVANMDVLVALGTSMAWLLSAAVTLLGLEDQHVYFEASAAVITLVLLGKLLEARAKGKTSAAIAALVKLAPRTARVERDGELVEVAVDKLQRGDVVVVRHGDSLPVDGEVVDGQAWLDESMLTGESRPVAKQAGDKVYAATRNQDGMLKVRATGVGGDTQLAEIVRMVAAAQGSKAPIQRLADRISAVFVPAVSAVALLTFLLTGWLNGDWAQALIHAVAVLVIACPCALGLATPTAVMVGVGNGARRGVLFRNAAALEQAGKVDVLLVDKTGTLTEGRPTLRHALALDGDENRLIRLAASAEAGSEHPLAHALLQRAKERELPLLACERFRADVGNGVEAALPGAGTVKVGVPSWIGLELPAEAAAWPQEGCTVVAVSLDGQPLGLLALADPLRDSSKGAVKALRGLGVKVVMLTGDHESTARSIAAEAGIDEWRAGMKPQDKADVVKYWQRQGGKVAMLGDGVNDAPALAAADVSLAMGAGSDVAIAAADITLMHGDLAHAVDAIRLSRASLAKIRQNLAFAFVYNVLGIPLAAVGMLNPVIAGAAMAASSVSVVSNSLLLRRWR

SEQ ID NO: 55475 - DNA, 2199 bp, Wolinella succinogenes DSM 1740
  CDS (1)..(2199): transl_table=11
atggacaggatcaaactgagaatcgaagggatgcattgtagcgcttgtgcagagggaatcatcgccaatctctccaaagaatcgggtgttttggatgtgagtgtgaatgccatcacgggcaaagggcgcatccaatatgaagaggagcgtatcactcaagagaggatcatccgcctcatcgaatcgtatgggttcaaggcgtttaaggagagcagcagagatcaagaagagcgggagcttcaggagcttgggcggcgattttttctctgcctgcctctctttttggtcatttttgggcttcatatgttcttcccccatgagcccctctatctctacacacagtttcttttagccagcgtggtgcagtttgtcggtggagcaggcttttacaagggggcagggggtctttggcgcaccaagagcgcagacatgaatctcctcatcgtcatcggaacttccgctgcttatctctactcatgcatcgcgctttgggcgccttcgctctttcctaacacacagatggggctctattttgagggttcttcagcggtgatcacctttgtgcttttgggtgaatggctcaaagcaagagccaaaaagcgttcaggcgagagcgtgagagctctagcgagtctccttcctcaaagagcgcggctttggcgagagggggccgaggtggaggtggagctctctgaagtgggggtgaatgagatctctcttgttagggcgggggagaagattcctttagatggagagattgttgagggggaggccgaggtggacagctcccatattagcggggagtatctgcccgtgcataaaaaggtcggcgatggggtcgtgggcgggagtatcgctgtgaatggctatctcaaggtgcgtgttcttaaatccgcccaagaatcgcttctttatgagatggtcgatctgctcgaagaggctcagagccaaaagccccccattgggaagcttgccgatcaaatcgcctcaatctttgtgcccgccgtcatctttctctccctcttgacgcttggagtgtggatcttttggggtgatggctatgagcatgcttttttggcgagtgtggcggtgctcatcatctcttgtccttgcgcgctgggtctagctacgcccatctcgattgtcacagcgatctctaggggggctagagaggggattcttatcaaaaatcctgatgtaattgagcgtgccgtagtgatttctaaagtggttttggacaagacgggcactctcacccaagggatgctctctatctctaaagtgcgatggatgagagaggctccagagggcttttttgagatgcttttgggaattgaatcaacgagcgctcacccgatttctctagccctcacgcgctatgcaaaagagcagattaaagaggggagcgaagcggctcttattcccgaatcgcctcaaaattttatcggccttgggttggcggcgaagtttggaggggaggagtttgtggtggggaataagcggcttatgattcagaagggaatcttaagcgatgaggcgcttttggagagcttgagggaggaatttttgggccttagcacgatttatgtggcctatcaaggagagatgattgcagccataggcgtggaagattctcttcgtcaaggggctagagagatgcttgaattctttaaaaagcgagggattgaacctgtcattttgagtggagattcaaaagaggcggtgttggatttagctcaaagattagagattgagcgattttatgcagaggtgttgcccaaggataagcacagagtaatcaaagagctcaaagaggaggggggagtgctctttgtgggagatggagtgaatgatgccctagcgcttgaagaggcagacatggggatcgccctctctagtggcacggcaattgcccaagaatcgggggatattttgctgatgaaagaggagcttacaggggtgagtgaggcgctggagctttgcctttttgctttgaggaatatcaagcagaatctcttctttgcctatctctataatacgattctcatccctgtagcagcgggcgctctctatccttggtttggaatcttgcttcagccctcttttgcgggtgcggcgatggcgctaagctcggtgagcgtggtgagcaatgcgcttcgaatcggacgatggaaaagccaaggcgcccttggggcctag

SEQ ID NO: 55476 - protein, 732 aa, Wolinella succinogenes DSM 1740
MDRIKLRIEGMHCSACAEGIIANLSKESGVLDVSVNAITGKGRIQYEEERITQERIIRLIESYGFKAFKESSRDQEERELQELGRRFFLCLPLFLVIFGLHMFFPHEPLYLYTQFLLASVVQFVGGAGFYKGAGGLWRTKSADMNLLIVIGTSAAYLYSCIALWAPSLFPNTQMGLYFEGSSAVITFVLLGEWLKARAKKRSGESVRALASLLPQRARLWREGAEVEVELSEVGVNEISLVRAGEKIPLDGEIVEGEAEVDSSHISGEYLPVHKKVGDGVVGGSIAVNGYLKVRVLKSAQESLLYEMVDLLEEAQSQKPPIGKLADQIASIFVPAVIFLSLLTLGVWIFWGDGYEHAFLASVAVLIISCPCALGLATPISIVTAISRGAREGILIKNPDVIERAVVISKVVLDKTGTLTQGMLSISKVRWMREAPEGFFEMLLGIESTSAHPISLALTRYAKEQIKEGSEAALIPESPQNFIGLGLAAKFGGEEFVVGNKRLMIQKGILSDEALLESLREEFLGLSTIYVAYQGEMIAAIGVEDSLRQGAREMLEFFKKRGIEPVILSGDSKEAVLDLAQRLEIERFYAEVLPKDKHRVIKELKEEGGVLFVGDGVNDALALEEADMGIALSSGTAIAQESGDILLMKEELTGVSEALELCLFALRNIKQNLFFAYLYNTILIPVAAGALYPWFGILLQPSFAGAAMALSSVSVVSNALRIGRWKSQGALGA

SEQ ID NO: 55477 - DNA, 2244 bp, Gloeobacter violaceus PCC 7421
  CDS (1)..(2244): transl_table=11
atgagtaagtccctggaagtcgaagtgcgcgggatgacctgtgcctcgtgcgccagccggttggagcgggtgctcggggggatcgacggggtggtggccgcgagcgtcaatctggccaccgaacgggcacaggtgagttatgtgccgcccgccgaaccggcgcacttgcgcgcggccatcgaagcagcagggttcaaagttcctgccgccgccgatactgccaataccgacgcgcgcaccctggaaacagaagcactgaaggcatcggtgatcttctcggccgccttcgccgtgccgctggcggtcctcgcgatgttgccgatgctctggccggccctggagacggcgatgatggccgccgctcccgaagccgtctggcgctggttgatgttcgcactggccaccccggtgcagttcgggccggggctgagattctaccgcagcggctgggcgagcctgcgccatggggcgcccgacatgaacgcgctggtgatgatcggcacttgcgccgcttacttttacagtgcgacggcggtgctgtttgcggggtggtttccggcgggtaccggccacgtctatttcgaggcgagtgccgtggtgatcaccttgattttgctgggccgctacttcgagtcgctggccaaggggcgcgcctccgaggcgatgaagcgcctattgaacctgcagccgcccaccgctcgggtggtgcgcgacggcatcgagcaggaggtgcccgtcgaggcggtcgcggtgggggatgtggtcgccgtgcggcccggcgagaaggtgccggtcgatggcgaggtgatctcaggcgccagctacgtcgatgagagcatgatcaccggcgagccgctgccggtggccaagggcgaaggggcggcggtcgtgggggggacgatcaaccagaacggcgcctttcgcttccgggtaagccgtgtgggagccgggaccgtactggcgcagattatgcggctggtggagaccgctcaggcatccaaaccggccatccaggggctggcggatagagttgtggcctacttcgtgcccgtcgtgctggtcatcgccgcgcttaccttcgtgctctgggtggtcttcggcggccccgccgccgtcggtttcgccctggtcaatacggtggcggtgctgattatcgcctgcccctgcgccatgggccttgccacccccacctcggtgatggtgggcaccggcaaagcggccgaactgggtgtgctcttccggcggggtgcggccctggagacgctcgcaaacgtgcaggtggtggccctcgacaagaccggcaccctcacccgcagccggccggaattgaccgattttctggcccagcccggtttcgagcgccaggaggttttgatcctggtggctgcggctgaatcgatgagcgaacacccgctggcgcgggcgctgacggccgcggtgggcgatgttgcgttgcccgaggccgagcgcttcgccgccgtccccggctacggcatcgaggcgatggtgcagggccgccgggtgcaggtggggtccgaacgctacatgggtcgcctcgccgtcgccacagacgcggtggcttcccgggccgtcgcccttgccgcggcgggcaaaagcccgatctacgccgccgtggatggacggcttgcggccgtgctcgccgtggccgacccgatcaaacccgaaagccgcgccgctgtcgagcaattgcaccgccagggtctagaagtggtgatggtaagcggcgacaaccgccgcaccgccgaggccatcgcccgcgaactgggcatcgaaacggtcatcgccgaagtgctcccggacgccaaagccgaaacggtgcgcaagttgcaaagcgccggccggacggtggcgttcgtgggagacggcatcaacgacgccccggccctcgcccaggccgacgtcggtatcgcgatcggcaccggcaccgatatcgccatcgagaccggcgaggtgatcttgatggcgggcgacgtgggcggtgtgcccaacgccattgccctcgcccgcaccgccctgaccaacatcaaggtcaacttgttctgggcttttgcctacaacgtcctgttgattccggtggcggcaggggtgctctatccggctctcggctggctgctcaaccccgtgcttgcagcggcggcaatgggtttttcgagcctctttgtggtcagcaacgccctgcgcctgcgccgcttccgcccgccgctcacccaccatgcggcctga

SEQ ID NO: 55478 - protein, 747 aa, Gloeobacter violaceus PCC 7421
MSKSLEVEVRGMTCASCASRLERVLGGIDGVVAASVNLATERAQVSYVPPAEPAHLRAAIEAAGFKVPAAADTANTDARTLETEALKASVIFSAAFAVPLAVLAMLPMLWPALETAMMAAAPEAVWRWLMFALATPVQFGPGLRFYRSGWASLRHGAPDMNALVMIGTCAAYFYSATAVLFAGWFPAGTGHVYFEASAVVITLILLGRYFESLAKGRASEAMKRLLNLQPPTARVVRDGIEQEVPVEAVAVGDVVAVRPGEKVPVDGEVISGASYVDESMITGEPLPVAKGEGAAVVGGTINQNGAFRFRVSRVGAGTVLAQIMRLVETAQASKPAIQGLADRVVAYFVPVVLVIAALTFVLWVVFGGPAAVGFALVNTVAVLIIACPCAMGLATPTSVMVGTGKAAELGVLFRRGAALETLANVQVVALDKTGTLTRSRPELTDFLAQPGFERQEVLILVAAAESMSEHPLARALTAAVGDVALPEAERFAAVPGYGIEAMVQGRRVQVGSERYMGRLAVATDAVASRAVALAAAGKSPIYAAVDGRLAAVLAVADPIKPESRAAVEQLHRQGLEVVMVSGDNRRTAEAIARELGIETVIAEVLPDAKAETVRKLQSAGRTVAFVGDGINDAPALAQADVGIAIGTGTDIAIETGEVILMAGDVGGVPNAIALARTALTNIKVNLFWAFAYNVLLIPVAAGVLYPALGWLLNPVLAAAAMGFSSLFVVSNALRLRRFRPPLTHHAA

SEQ ID NO: 55479 - DNA, 2232 bp, Corynebacterium diphtheriae NCTC 13129
  CDS (1)..(2232): transl_table=11
atgaccaacgccgcagtagagatagatttcggtgtgacgggcatgacgtgtacgtcgtgttcggcgcgtgtggagcgcaagctcaacaaggttgcgggtgtggaggctacggtcaactacgcgacagagacggcgtcggtacgctacgatccggcgtcgacaacgcccgcgcagcttatcgacgtcatccgcggcgctggttacgatgccttcgaggtcgccgaggctgagcccgctaccgcagaacccagcgataccgcacgtgatcaccacgctgaggagctcaagacccgcttaatctattccgcaatcttggctctaccagtttttttgatgtctatgtttggtcagctgcagtttaacaactggcagtggctggcctttgcgctcgcgtcaccggtgtatttctggggtggctggccattccaccgcgctacactgcgtaacctccgccatggttccttcaccatggacaccctaatctccttgggcacgtcggctgcgtatctgtggtcggtgtgggccttgtttatcggcaatgccggcgatccagctatgcgtatgcacatgagttttacagctcatgctcatggtggcatggacgagatttatcttgagtcggccgccatggtgattgtgttcttgctgctggggcgctggtttgaaactcgtgcgaaggggcgaagcggggaggcgctgcgttccctgcttaaccttggggcgaaggatgccgccattattcgcgataaccgtgaagtgcgcatacccatccaatcgctgcaggtaggcgacgtttttgtggtgcgccctggtgagaagatcgccacggatggtgtggttgttgagggcacttccgctgtggatcagtcgatgatcaccggcgagtcggttcctgtggaagttgctcaaggttctcacgttaccggtgcaacaatgaacacctctgggcgtttgctggtcactgcccagcgcgtgggtgccgacaccaccctagctgccatggggcggttggttgctgaggcgcagtcgaataaagcgccggtgcaaaaactggtggataagatttctcagatctttgttcccgcagtgatcgttatttctttgatcacgctggcggttcacctcgccacggggtctgctactgccgacgccttcgcagccgcagtagccgtgctgattattgcttgtccttgtgcgctgggtcttgccactcccacggcattgttggtgggtactggccgtggcgcgcagatgggtctggtgattaaaggccccgaggtgttggagcaggcacgaaacatcgacacggtggtgttggataaaactggcacgatcaccactggtgatatgcaggttcgcaatgtttatggccatcctagttggcaagaacaagatgtgctgcgcttggcgggtgctgtggagcaggcttcggagcaccctattgctcgtgctatcacggcggcagctgtggctcagactcgtaccggcacgttgcctaaggtgacagactttaataatcaggcaggtcatggtgttgctggcaccgtggaagatcaccgcgtgtgggtaggtcgcccagccgacgacgaggccacgcagcaggtcaagaccgcggaaaatgagggtgctacgtgtgtggtggtgcgtatcgacgaccacctcgccggtgtgatcagcgtgcgtgacactgtgaaagagcactctcgactgagcgtggaaaaactcaccgctatggggcttactccggtgctgctgactggcgataacgccggtgccgccgccgcagttgcccgcgaggtgggcattcctgccgaccgtgtgatttccggtgtgcttccagaaaacaaagtccaaacggtcgaacagctgcaacgcgaaggccgcgtggttgccatggttggcgatggcgtgaatgatgcagcggccctaacccaagccgatttgggtcttgcaatgggtgctggaaccgacgtggccatcgaggcttccgacatcaccgtcatgaacaatgatccgcgttccatcgccaatgcgatcaatctctcacgacgcagtttgcgcaccatcaaaggcaacctgttctgggcttttgcatataacgtgatacttattccagtggctgcgttaggcctgcttaaccctatgttcgcaggagctgcaatggcgctaagttcagtgttcgtggtgactaattcgcttcgtcttcgcagcgtacgcagcgtattttcctag

SEQ ID NO: 55480 - protein, 743 aa, Corynebacterium diphtheriae NCTC 13129
MTNAAVEIDFGVTGMTCTSCSARVERKLNKVAGVEATVNYATETASVRYDPASTTPAQLIDVIRGAGYDAFEVAEAEPATAEPSDTARDHHAEELKTRLIYSAILALPVFLMSMFGQLQFNNWQWLAFALASPVYFWGGWPFHRATLRNLRHGSFTMDTLISLGTSAAYLWSVWALFIGNAGDPAMRMHMSFTAHAHGGMDEIYLESAAMVIVFLLLGRWFETRAKGRSGEALRSLLNLGAKDAAIIRDNREVRIPIQSLQVGDVFVVRPGEKIATDGVVVEGTSAVDQSMITGESVPVEVAQGSHVTGATMNTSGRLLVTAQRVGADTTLAAMGRLVAEAQSNKAPVQKLVDKISQIFVPAVIVISLITLAVHLATGSATADAFAAAVAVLIIACPCALGLATPTALLVGTGRGAQMGLVIKGPEVLEQARNIDTVVLDKTGTITTGDMQVRNVYGHPSWQEQDVLRLAGAVEQASEHPIARAITAAAVAQTRTGTLPKVTDFNNQAGHGVAGTVEDHRVWVGRPADDEATQQVKTAENEGATCVVVRIDDHLAGVISVRDTVKEHSRLSVEKLTAMGLTPVLLTGDNAGAAAAVAREVGIPADRVISGVLPENKVQTVEQLQREGRVVAMVGDGVNDAAALTQADLGLAMGAGTDVAIEASDITVMNNDPRSIANAINLSRRSLRTIKGNLFWAFAYNVILIPVAALGLLNPMFAGAAMALSSVFVVTNSLRLRSVRSVFS

SEQ ID NO: 55481 - DNA, 2448 bp, Serratia marcescens
  CDS (1)..(2448): transl_table=11
gtgaaaaatgacaatgcagtgcaacacaacaaccagactgcttctgagcagacattatccccggacgagggccacgtattgcataaggtgagagatcccgtgtgcgggatggccatcctgcccgacagggcgcacagcagcattcgataccaggaccatcaactttatttctgctccgccagctgtgagagtaaatttaaagcccatcccgatcgttatcttaccgaagatgccagtgaacattcccatcaccatcaccacgatcatcacgaagtcagccctgatcagataaaacagcctcaccaccaggcggaaaaagagaattctgaaggtgtgtggacatgtccgatgcacccggagatacgccgcagtggtcccggaagctgtcctgtctgtggaatggcactggagccgctcgtagctacggcatccacggggccgagtgatgaacttcacgacatgacaagacgcttctggctggggttgttgctggcgtttccggttctggtactcgaaatgggatctcatctgtttcccgagttgaggaatacagtaccgccacagtacaacacatggctgcagctgcttctggcctcccctgtcgtgttgtggtgtggctggccattcttcgcccgggccggaatgtcgttacgtaaccgctccctgaatatgtttacccttgttgcaatggggaccggcgtagcctgggtttacagcgtcattgcaaccgtcttcccctcctggtttcctgcatcgttcagaaacatggatggcctggtggccgtttattttgaagccgcagcagttattacggtgcttgttctgctgggacaggttcttgagctgcgggcacgggaacaaacctcaggcgccattactgcgcttctgaaccttgcccccaaaaccgccagacggctggatcatgacggtcatgaaacggatattaatgcggaagatgtcctgcctggcgataagctccgcatcagacctggagagagtattccggtcgacggtatcgtgatcgaaggcaaaacaaccgttgatgaatcgatggtgaccggggaatctatgccggttaccaaaacggagggtgaccctgtcatcggggggaccattaatcagacagggagtctcatcatccgtgcagagaaagtcggtgatgaaacaatgctctcacgaattgttcagatggtcgctgatgcacagcgttcgcgtgcccccatccagagaatggctgacagcgtttcaggctggtttgttcctctggtgatacttatcgcggttgttgctttcgtgatctggtctgtctgggggcccgagcccaggatggcgcacggtctcattgcggctgtgtcggtcctgattattgcctgtccctgcgcgctggggctggccacgccgatgtcgataatggtgggggtgggcaaaggagcccaggccggggtgttaatcaggaatgccgaagcccttgagcgtcttgaaaaagtggacacgctggttgtcgacaaaacaggcacgctcacggaaggttcgcctacggtgacagggattatcagtctcaatccgggtggggaaacatctcttttgcgtgtaacagccgcagtggaaaaaggctcgcagcatccgctgggtatggcagtagttaaagcagcacaggaaaaggggatcgcaatacccgcagtcactcatttcgatgcaccgtcgggtaaaggtgtctcaggcgatgtcgaaggtcaacgggttgttattggtaatgaactggctatgcaggaaaacagtatagttattgataatcaaaaggccgttgcggatacgttgcggatggaaggcgctaccgttatctatgtggccacagacggggaccttgcaggcctgatagctatctcggatcccgtgaaaacaaccacgccggatgcgcttaaagctttgcgtcaggcggggatccgcatcgttatgctcaccggggataaccagcttactgctgaagcagtcgcacggaaactgggaatagatgaggttgaagccggaattctgccggatggcaaaaaagcagtgataacccgactgaaagagtctggccatgtggttgcgatggccggagacggtgtgaatgatgccccggcgctggcagcggctgacgtgggtatagccatgggaacgggtacagatgtggcaattgaaagtgccggagtcacccttctcaaaggcgacttgatgatactgaacagggcccgtcatctgtcagagatcaccatgaaaaatatccgtcagaatctgttttttgcatttatctacaacgcacttggcgtgcctgtggctgcaggtctgctttatcctgtgtatggaatactgctgtcgccagttattgcggcggcggccatggctctttcctccgtcagcgtcattgtgaatgcgttgcgtctgaaaagtgtcaggctcgggaaataa

SEQ ID NO: 55482 - protein, 815 aa, Serratia marcescens
MKNDNAVQHNNQTASEQTLSPDEGHVLHKVRDPVCGMAILPDRAHSSIRYQDHQLYFCSASCESKFKAHPDRYLTEDASEHSHHHHHDHHEVSPDQIKQPHHQAEKENSEGVWTCPMHPEIRRSGPGSCPVCGMALEPLVATASTGPSDELHDMTRRFWLGLLLAFPVLVLEMGSHLFPELRNTVPPQYNTWLQLLLASPVVLWCGWPFFARAGMSLRNRSLNMFTLVAMGTGVAWVYSVIATVFPSWFPASFRNMDGLVAVYFEAAAVITVLVLLGQVLELRAREQTSGAITALLNLAPKTARRLDHDGHETDINAEDVLPGDKLRIRPGESIPVDGIVIEGKTTVDESMVTGESMPVTKTEGDPVIGGTINQTGSLIIRAEKVGDETMLSRIVQMVADAQRSRAPIQRMADSVSGWFVPLVILIAVVAFVIWSVWGPEPRMAHGLIAAVSVLIIACPCALGLATPMSIMVGVGKGAQAGVLIRNAEALERLEKVDTLVVDKTGTLTEGSPTVTGIISLNPGGETSLLRVTAAVEKGSQHPLGMAVVKAAQEKGIAIPAVTHFDAPSGKGVSGDVEGQRVVIGNELAMQENSIVIDNQKAVADTLRMEGATVIYVATDGDLAGLIAISDPVKTTTPDALKALRQAGIRIVMLTGDNQLTAEAVARKLGIDEVEAGILPDGKKAVITRLKESGHVVAMAGDGVNDAPALAAADVGIAMGTGTDVAIESAGVTLLKGDLMILNRARHLSEITMKNIRQNLFFAFIYNALGVPVAAGLLYPVYGILLSPVIAAAAMALSSVSVIVNALRLKSVRLGK

SEQ ID NO: 55483 - DNA, 2190 bp, Gordonia westfalica
  CDS (1)..(2190): transl_table=11
atgacctgcggtgcgtgcgcagctcgggtggaacgcaaactcaacaagctcgacggcgtgcgcgcctcggtcaactacgccacacggcgagccaccgtggaactcgatacccacgcacacgtcgccgatgctatcgacgccgtgcacacagcagggtatgcggctgcggaactgtccgagcaggcccctgccgtcaacgaagattcagcgactgcgaaggcactgttcacccggctgatcgtcgcgctagccctgttcgtgcccctggccaacctctccgtggtgcttgctgtcgtccccgaccttcgctttcccggctggcaagcagtgttggtggcgcttgccgcgccggtggtgacctactgcgcgtggcccttctaccgcaccgcggtgcgcacgttgcggaccggcgtggccacgatggacaccctcgtctcgctgggagtgctggccgcgaccgcactgtcggtgtactcgatgttctcggccgaagcgacctcgaccgcaggccagggggtgtggtcggcaatcttttccagcgactccatctatctcgaagttgcagccggtgtcaccgtcttcgtgctggcaggacgctactacgaggcgcgtgcccgggcacaagctgttcaagcactgacggcgctggccgctctgcgtgccaccgacgcccgagtcgagtgcgcaggggacacgaccatgctcatacccctcgcggaactcaaagtggggcaacgactcatcgtgctgccgggagagaccattccatcagatgggcaggtgatcgagggcgccgccagtgtggacctcagcgccatgaccggtgagacgacgccggttcaggtgtcagccgagcaaggctccaccgccgtcgggggcacgacgtgcctcgacgggcgactacgcgtcgaagtcaccgcagtcggtgacgacacccgcctggccgagatgatcgcgctggtcgacagcgcgcagacagccaaggctcgcgctcaacgcgtcgccgaccgtatcgccgcgatcttcgttccgtgtgtcatcgccctagccgcagccactctcgtgggttggtcgctcaccggggcgtcatgggagcacgccgtgagtgccgcggtggccgtgctgattatcgcctgtccgtgcgccctgggcctggccatgcccatggcgttggtgatcgctaccgggcgaggcgctcaactgggcatcttcctcaaaggacacgccgcgttggaactgtccgggacgatcgatgtggtggtcttcgacaagaccggcaccctcaccaacgggcagccacacgtcaccggcgtgtacaccgtcgacgacgacagtgccgagctgatcctggactgggcggcgacactcgagcagcacaccagccaccccatcgccaccgctatcgctgccgcggccggttcgcagtcgcttgccgcaccggtcgacgaggtggtcaccgacgttggtagcggcgtgcgaggggtgatcgacggtgtgaaggtgcaggtgggttccccggcatggatcgccagtagcgccgcggtgcccgccgtgatcgacgcgcggcgcgctgacatcgagcgctctgggggcaccgcggtctatgtcgcagccgatgatgcagtccggggcctgatcgacattcgggatggcatcaaaccctctgcccgccaggcggtcgatgagttgcaccgcatgggaattcgcacgttcctggtcaccggtgataacgccggcgcagcgcagcgcaccgcggagcaggtcggcatcgacgacgtgatcgccggggtgctcccggccgagaaagtggccatcatcgacaacgtgcgcagtagtggcgccggtgtggcgatggtcggcgacggcatcaacgacgggcctgcactcgcctcggctgatctgggcattgcgatcggacgcggcaccgatgttgctatcggcgccgccgacatcgtgttagtgcgcgatgacctcaccgccgtcgctctggcgctgcaactcgcctcggccacacgacgcacgatgcgcaccaatctggcatgggcgttcggctacaacctcgccgcgctgccgctggctgccgctggactgctcaatcctctgatcgccggggccgcaatggctttgtcatcgttcttcgtcgtctccaacagcctgcgtttgcagaacttcgcgcgtatagaccgctga

SEQ ID NO: 55484 - protein, 729 aa, Gordonia westfalica
MTCGACAARVERKLNKLDGVRASVNYATRRATVELDTHAHVADAIDAVHTAGYAAAELSEQAPAVNEDSATAKALFTRLIVALALFVPLANLSVVLAVVPDLRFPGWQAVLVALAAPVVTYCAWPFYRTAVRTLRTGVATMDTLVSLGVLAATALSVYSMFSAEATSTAGQGVWSAIFSSDSIYLEVAAGVTVFVLAGRYYEARARAQAVQALTALAALRATDARVECAGDTTMLIPLAELKVGQRLIVLPGETIPSDGQVIEGAASVDLSAMTGETTPVQVSAEQGSTAVGGTTCLDGRLRVEVTAVGDDTRLAEMIALVDSAQTAKARAQRVADRIAAIFVPCVIALAAATLVGWSLTGASWEHAVSAAVAVLIIACPCALGLAMPMALVIATGRGAQLGIFLKGHAALELSGTIDVVVFDKTGTLTNGQPHVTGVYTVDDDSAELILDWAATLEQHTSHPIATAIAAAAGSQSLAAPVDEVVTDVGSGVRGVIDGVKVQVGSPAWIASSAAVPAVIDARRADIERSGGTAVYVAADDAVRGLIDIRDGIKPSARQAVDELHRMGIRTFLVTGDNAGAAQRTAEQVGIDDVIAGVLPAEKVAIIDNVRSSGAGVAMVGDGINDGPALASADLGIAIGRGTDVAIGAADIVLVRDDLTAVALALQLASATRRTMRTNLAWAFGYNLAALPLAAAGLLNPLIAGAAMALSSFFVVSNSLRLQNFARIDR

SEQ ID NO: 55485 - DNA, 2175 bp, Bdellovibrio bacteriovorus HD100
  CDS (1)..(2175): transl_table=11
atggaaactcaaggtaacagcgccgaattgcaattgattggcatgtcctgcgtgaattgtgcgggtaaaattgaaaagacattgaatggtttgccgggagtcacggcgacagtcaattttgcgactgaaaaggcccaggtgaatctgggcgacagccctttgactgtgggaaatctgattaaaacaatccaggagctcggatatcaggcttttgaggtgaattcagaggtcgatgcacaaaagataaaggaagaggccgccgcggaataccgtaaagagctgcgtctattcattgtctctgccattctgacagctccttttttggtcgagatggccatgatgctgaccggggccgcgcatgagatgatcccgcgctgggtgcagtggattctggccacgccggtgcagttctgggttggttggagattctatcgtggctcctattacgcgttgaaatccggcagtgccaacatggatgtgctggtggctttgggaactacgatggcttatggcttaagcgcggtgatgacggtcatggactggcatcatcatcacgtttacttcgaggccagcacggccgtgatcaccctgatcctgctgggtaaactgatggaaagccgtgcgaagggcaaaacttcagaagcggtggaaggcctgctgcgactgcagccgaaacaagccatggtggaaagaaacggagaagtcgttgccctggatatcaccgaactggttgccggtgacatcgtgattgtgaaaaatggtgaatccattcccgtggacggattggtggtgcagggtgtttcttcggtcgacgaatccatgctgaccggggaaagtatgccggtacaaaaaggtattgatgaccgggtgtatgcggcaacgctgaatcaggaaggcagcctgcgtatcaaggccacaggagtgggaagcaagacgcagttggcgcaaatcatcaaaattgtgacgaccgcccagggatccaaggctcccattcagcgacttgcggataagatctctgcggtctttgtgccggtcgttgtgggtatcagtgttttgaccttcattggcacctggctgtggaccggtgatttgactatggccttgatctcgtcagtgtcagttctggtgattgcgtgtccatgtgctttgggactggccacgccaacggcggtggtcgtgggcattggcaagggggcgcaggccggtgttttgttccgcgatgccaaagctctcgagctggcagaaaaaattgacatcttggttttggataagacgggcacaatcaccgagggaaaacccgtggtgactgaaattcatgtgactgccgggcaggatcgcaatcaggtgctgtctttcgctgcaagccttgaagccgggtcctcgcatcctctggcgcacgccattttggaagaagcccgtaaagaggggctgagcctgcacacagtgcaaaacttcaaaagcgtgatgggtcagggagttgaagggcaaatcggcaatcaatccctgaagctgggaagaagtgcctgggtggctccggagttttctctgaatcaggatttgttgaaagagctcgagagcaagggccagactttgatggtgctggcggatgaagcccgcgtgctcgggtatattgctgtggctgaccgaattcgtgaaagttccaaagaggctattgccgaaattcaaaagcgcggcgtgaaagtgatgatgctgaccggggataatgaaggcacagcccgcgaaatttcccgtcaggcgggcatcacggactttaaacacagtgtgaagccagccgacaaagccaatgtgattgtgaccttgaagcgcaaaaagctgcgggtggcaatggtgggtgatgggatcaacgatgcgccagcgctggccatggccgatgtcagtttctcgatgtcctcgggcacggacattgccattgaaactgcggacgtcactttgatgaaaaacgatctgagatcagtggcgcaagccattcagctttcgcacctgacgttaaagaaaatccgccagaacctgttcttcgcctttatctataacgttctgggtatcccactggccgcattaggaatgctcaatcctgtcatcgcgggtgccgccatggccatgagctcagtctctgtagtcagcaactcgttgttgctgaaaagaaagaagatctaa

SEQ ID NO: 55486 - protein, 724 aa, Bdellovibrio bacteriovorus HD100
METQGNSAELQLIGMSCVNCAGKIEKTLNGLPGVTATVNFATEKAQVNLGDSPLTVGNLIKTIQELGYQAFEVNSEVDAQKIKEEAAAEYRKELRLFIVSAILTAPFLVEMAMMLTGAAHEMIPRWVQWILATPVQFWVGWRFYRGSYYALKSGSANMDVLVALGTTMAYGLSAVMTVMDWHHHHVYFEASTAVITLILLGKLMESRAKGKTSEAVEGLLRLQPKQAMVERNGEVVALDITELVAGDIVIVKNGESIPVDGLVVQGVSSVDESMLTGESMPVQKGIDDRVYAATLNQEGSLRIKATGVGSKTQLAQIIKIVTTAQGSKAPIQRLADKISAVFVPVVVGISVLTFIGTWLWTGDLTMALISSVSVLVIACPCALGLATPTAVVVGIGKGAQAGVLFRDAKALELAEKIDILVLDKTGTITEGKPVVTEIHVTAGQDRNQVLSFAASLEAGSSHPLAHAILEEARKEGLSLHTVQNFKSVMGQGVEGQIGNQSLKLGRSAWVAPEFSLNQDLLKELESKGQTLMVLADEARVLGYIAVADRIRESSKEAIAEIQKRGVKVMMLTGDNEGTAREISRQAGITDFKHSVKPADKANVIVTLKRKKLRVAMVGDGINDAPALAMADVSFSMSSGTDIAIETADVTLMKNDLRSVAQAIQLSHLTLKKIRQNLFFAFIYNVLGIPLAALGMLNPVIAGAAMAMSSVSVVSNSLLLKRKKI

SEQ ID NO: 55487 - DNA, 2850 bp, Arabidopsis thaliana
  CDS (1)..(2850)
atggagtctacactctcagctttctcaaccgtcaaggcaacagcgatggctcgaagtagtggtggtccttcattacctctcctcactatttctaaagcacttaaccgccactttaccggcgccagacacctccatcctttattgctcgctcgctgttctccctccgtgcgacgtcttggtgggtttcatggcagtcgatttacttcgtcgaattcagctttgagaagcttgggagctgctgttttgccggtaatccgacaccgtttagagtgtttgtcgagctcatcgccgtctttcaggagtatctcaagtggcggcggttctggatttggggggtataatggtggaagcggcggtggtggtggcggaggatcggagagtggtgattccaagtcaaaactgggtgctaatgcaagtgatggtgtctctgttccgtcgtcagatatcattattctcgatgttggagggatgacatgtggagggtgttcagcaagtgtgaagaagatactggaaagccaacctcaagttgcttcagctagtgttaatctcaccaccgagacggcaattgtgtggcctgtaccggaagctaaaagtgtacctgattggcaaaagagtttaggcgagacgcttgcaaaccatctgaccaattgcgggtttcagtctactcctcgagatttggtgacagagaatttcttcaaagttttcgaaacaaagacaaaagacaagcaggctcgcttaaaagagagtggccgcgagcttgctgtttcatgggccctatgtgctgtatgcttggttggccatttaactcactttctaggggttaatgctccctggattcatgcgatccattcaacggggtttcatgtgtctttatgtttgattacgttgcttggtcctggacgcaagctagtacttgatggtatcaagagtcttttaaaaggttccccaaacatgaacacgctagttggtcttggtgctttgtcatcattttctgttagctcactggcagccatgattccaaaattgggctggaagacattttttgaggaaccagttatgttaatagcttttgtattgctgggaaggaatcttgaacagagagctaaaataaaagccaccagtgatatgactggccttctgagtgttttgccttcaaaagctcgccttctgcttgatggtgatctgcagaattcaactgttgaggttccttgtaatagtctctctgttggtgatctagtcgtcatactaccaggagatcgagttccagcagatggtgtggtcaagtcaggtagaagcaccattgatgagtcaagtttcacaggtgaaccattgccagtgacaaaagagtcagggagtcaagtcgcagcaggatctataaacctgaacggaactcttactgtcgaagtgcatagatcagggggtgaaactgcagttggggacattattcgtctggttgaagaggctcagagtagagaagcaccagtacagcagttggttgacaaggtcgcagggcgcttcacgtatggagtgatggcactctctgcagctacatttacattctggaatctatttggtgcacatgttcttccttctgccttgcataatgggagcccaatgtctttggcccttcaactatcttgcagcgttctggttgtggcttgtccttgcgcccttgggttggctactccaacggcaatgctggttggtacatcattaggagcaagaagaggattacttcttcgtggtggtgatattcttgaaaagttttccttggttgatactgttgtcttcgacaaaactgggacactgacgaagggacaccctgttgtgactgaagttattattcctgaaaatccaagacacaatttgaatgatacttggtcagaagtagaggttttgatgttagcagctgctgttgagtcaaacactactcaccctgttgggaaagcgattgtaaaagcagcccgggctcgtaattgtcaaacaatgaaggcagaggatggaacatttactgaagaaccagggtctggtgctgttgctattgtcaacaacaaaagggttacagttgggactctagaatgggtcaagagacatggagccaccgggaactcattgcttgcattagaagagcatgaaattaacaaccagtctgttgtgtatattggggtggataatacacttgctgcagtcatccgttttgaagataaagtcagggaggatgctgctcaagttgttgagaatttgactcgccagggaattgatgtgtacatgctgtctggtgacaagaggaatgctgccaattatgtagcttctgtcgtaggaattaatcatgaacgggttatagcaggagttaaaccagctgagaaaaagaattttatcaatgaacttcaaaaaaataagaagattgttgcaatggtgggggatggaataaacgatgctgctgctctggcatcatctaatgttggagtggccatgggtggtggtgcaggagcggccagtgaggtgtctcctgttgtcttgatgggcaatcggttaacacagttgcttgatgcgatggagctaagtcggcaaaccatgaagaccgtgaagcaaaacctttggtgggcgttcggatacaacattgtaagaatcccaattgcggctggagtgttgctaccattgactggaaccatgttgactccatcaatggcgggggctctcatgggtgtaagctctctcggtgtcatgactaattccttacttctaaggtacagattcttctcgaaccgaaacgacaaaaatgtcaaaccggaaccaaaagagggaacaaaacagccacatgagaacacaagatggaagcaaagctcttag

SEQ ID NO: 55488 - protein, 949 aa, Arabidopsis thaliana
MESTLSAFSTVKATAMARSSGGPSLPLLTISKALNRHFTGARHLHPLLLARCSPSVRRLGGFHGSRFTSSNSALRSLGAAVLPVIRHRLECLSSSSPSFRSISSGGGSGFGGYNGGSGGGGGGGSESGDSKSKLGANASDGVSVPSSDIIILDVGGMTCGGCSASVKKILESQPQVASASVNLTTETAIVWPVPEAKSVPDWQKSLGETLANHLTNCGFQSTPRDLVTENFFKVFETKTKDKQARLKESGRELAVSWALCAVCLVGHLTHFLGVNAPWIHAIHSTGFHVSLCLITLLGPGRKLVLDGIKSLLKGSPNMNTLVGLGALSSFSVSSLAAMIPKLGWKTFFEEPVMLIAFVLLGRNLEQRAKIKATSDMTGLLSVLPSKARLLLDGDLQNSTVEVPCNSLSVGDLVVILPGDRVPADGVVKSGRSTIDESSFTGEPLPVTKESGSQVAAGSINLNGTLTVEVHRSGGETAVGDIIRLVEEAQSREAPVQQLVDKVAGRFTYGVMALSAATFTFWNLFGAHVLPSALHNGSPMSLALQLSCSVLVVACPCALGLATPTAMLVGTSLGARRGLLLRGGDILEKFSLVDTVVFDKTGTLTKGHPVVTEVIIPENPRHNLNDTWSEVEVLMLAAAVESNTTHPVGKAIVKAARARNCQTMKAEDGTFTEEPGSGAVAIVNNKRVTVGTLEWVKRHGATGNSLLALEEHEINNQSVVYIGVDNTLAAVIRFEDKVREDAAQVVENLTRQGIDVYMLSGDKRNAANYVASVVGINHERVIAGVKPAEKKNFINELQKNKKIVAMVGDGINDAAALASSNVGVAMGGGAGAASEVSPVVLMGNRLTQLLDAMELSRQTMKTVKQNLWWAFGYNIVRIPIAAGVLLPLTGTMLTPSMAGALMGVSSLGVMTNSLLLRYRFFSNRNDKNVKPEPKEGTKQPHENTRWKQSS

SEQ ID NO: 55489 - DNA, 2397 bp, Bacillus cereus ATCC 10987
  CDS (1)..(2397): transl_table=11
atggataaacaaaagcatgtgacgctcggcgttacaggaatgacatgtgcagcatgtgcaacccgaattgaaaaagtgctaaataaaatggatggggtagacgctaatgtaaacttggctatggaaaaagcaagtattaaatatgatccatcacagcaagaaatctctaatataaaaaataaaattgaaaacctaggctataacgtagcagaggaaaaaatcactttagatattgaaggaatgacatgtgcagcatgtgcaactcgaattgaaaaggtactaaataaaatggaaggtgtttcaaatgctactgttaatttagctacaaacagcgcggttgttgaatataatgaaggtttaatttctacagaaaatattttagaaaagataaagaaaacaggatataaaggacaaatacgcagtgaagatgtagatcgttcagaacgaaaagaagaagtgattaaggcaaaaaaacgtcaacttatcatttcaattattttatccttgcccttactctatacaatgattggacatatgccatttgatacagggataccaatgccacatattttaatgaatccgtggtttcaacttttattagcaacacctgttcaattttatattggtggacatttctatgtaggtgcttaccgtgcgcttcgaaataaaagtgctaatatggatgttttagttgccttaggaacatcggcagcgtacttttatagcttatatgaggcattgaaaacactaggaaacgcaaactacagtccggatctttattttgaaacaagcgcagttttaattacattaatactagttggaaaatattttgagacattagcaaaaggacgtacaacggaagcaatttctaaattattgagtttacaagccaaagatgcacttgttgtgcgtgatggtcaagaaatacgagtaccactcgaggaagtagttatcggagatacgattattgtaaaaccaggtgaaaaaataccagtagatggtattgtaacctcaggggtatcttctgttgatgaatctatgattactggagaatctattccagttgataaaaaagagggagacgctgttattggcgctactataaatgcaaatggagttctaacaattaaggctgaaaaggttgggaaagatacagctttagcaggtattattaaaattgttgaggaagcacaagggtcaaaagcacctattcagagattagcggacatcatttcaggtatttttgttcctattgttgtagcgattgctgtagttgcttttattgtatggtatttctttatcacaccaggagatttaccaaatgcattagaagttgggattgcaatccttgtaattgcttgtccgtgtgcgttaggtctggctacaccaacttctattatggttggtacaggaaagggagcagagaaaggaattctctttaaaggaggtgaattcctagaaggaacgcataaaattaatgctgtattacttgataaaacaggaactgtaacaaaagggaaaccggaagttactgatgtcttagaatttgaagaaggtatgttggattatgccatttcagctgaaagtgcttctgaacatccattggcacatgccattgttgaatacggaaagcaacagggaattaacttaaaagatttagcgcagttttcagcaatcccaggccatggtattgaagcaaacattgaagataaaaaagttcttgttggaacacgtaaattaatgaatgaacagtcaattgagatatcacagcatgaagaagttatgaaagacttagagtatcaaggtaaaacagcaatgcttgtcgcgattgatggaaaacttgctggaattatcgctgtagctgatacagtaaaagaaagctctaaggctgcgattcaaacattaaaagagataggaatcgaagtatacatggtaacgggggataataaacgtacagctgacgcaattgcgaagcttgttgatcttgaccatgtatatgcagaggtattaccagaagataaggctaaaattgtagaagatttacaaaaacaaggaaaacgagtagcgatggtgggagacggcattaatgatgcaccagctcttgcgaaagctgatattggtatggctattggaactggtgcagatgttgcaattgagactgcagatgttactttagttggtggtgatttgtcacacataccaaaagcaattgaattaagccgtaagacaatgaaaaatattcgacaaaatttattctgggcattattttataatgcaattggaattcctgtagctgcggctggactattagagccttgggtagcaggggcagcgatggcatttagctcagtatctgttgttactaacgcgcttcgtttgaaacgtgtcaaaatataa

SEQ ID NO: 55490 - protein, 798 aa, Bacillus cereus ATCC 10987
MDKQKHVTLGVTGMTCAACATRIEKVLNKMDGVDANVNLAMEKASIKYDPSQQEISNIKNKIENLGYNVAEEKITLDIEGMTCAACATRIEKVLNKMEGVSNATVNLATNSAVVEYNEGLISTENILEKIKKTGYKGQIRSEDVDRSERKEEVIKAKKRQLIISIILSLPLLYTMIGHMPFDTGIPMPHILMNPWFQLLLATPVQFYIGGHFYVGAYRALRNKSANMDVLVALGTSAAYFYSLYEALKTLGNANYSPDLYFETSAVLITLILVGKYFETLAKGRTTEAISKLLSLQAKDALVVRDGQEIRVPLEEVVIGDTIIVKPGEKIPVDGIVTSGVSSVDESMITGESIPVDKKEGDAVIGATINANGVLTIKAEKVGKDTALAGIIKIVEEAQGSKAPIQRLADIISGIFVPIVVAIAVVAFIVWYFFITPGDLPNALEVGIAILVIACPCALGLATPTSIMVGTGKGAEKGILFKGGEFLEGTHKINAVLLDKTGTVTKGKPEVTDVLEFEEGMLDYAISAESASEHPLAHAIVEYGKQQGINLKDLAQFSAIPGHGIEANIEDKKVLVGTRKLMNEQSIEISQHEEVMKDLEYQGKTAMLVAIDGKLAGIIAVADTVKESSKAAIQTLKEIGIEVYMVTGDNKRTADAIAKLVDLDHVYAEVLPEDKAKIVEDLQKQGKRVAMVGDGINDAPALAKADIGMAIGTGADVAIETADVTLVGGDLSHIPKAIELSRKTMKNIRQNLFWALFYNAIGIPVAAAGLLEPWVAGAAMAFSSVSVVTNALRLKRVKI

SEQ ID NO: 55491 - DNA, 3534 bp, Strongylocentrotus purpuratus
  CDS (1)..(3534)
atggcttccgttgccattatcaaagtccccaacatgaactgtgagctttgccgcagaacgatcgagattgaactcaccaagcttcaaggggtcaaacttgtgaaaagttctttgccgaccaggatcgtcagggtcttctatgacaatgaactgattggtcatgatgtcatagctcatgtcattgatgagcttggttatatagtaggcaaagtggagtcttttgccaatccagtttcacccgacgttggatcaaaggatgagaacgctcctgttgtatctgagtccggaaaatctgatgatgatgattctgctgtagccaatgtacaaacagattttgaggagaaggaaatagggccaccgaagtgtgagacatttaacttgataatcaaggttgaaggaaagatcataagagggagtcagttgccggcttgcgtcttggagaaggttcgtgagtgtcctggggtcatgagagcaacagtcaaccacgagggcgccctaacagtggttcatgatccgggaaggaagagcatgaagagctttgtgatggacgtcattgccaagctgggctatcagtcagaatcaagcacagactgttcacagccagctgacgatgcccatcttcccaaatcaacgagcgattgcatacagagttaccacaaccccaggggagggggtaacgacgatcacccttccacgagccccgcccaccccaaagagaaacccacctccgtagacagggccgagatacaagccctgatagcatctgagggggataccccaccctctacctccagggagaatgggattaagaacggggatgttgtgcttgagatgaagcctagggttgctatggtgaaggatgatgggaaggtggaggtcgggagatgtgtcattacagtgactgggatgacctgtgcctcctgtgtcaataccattgaaaaatcactcatcaaacaaagaggcatcgaagctgtgactgtttctctaatagcccaaaagacagaggtgaagtaccaggttgctgtggtaactcctgcagagattgcattgatgatagaagacatgggatttgatgcagaggtgaaagaggagcagatggctggagaagagacgctcaatctcattatcaatggtatggaatgttcttcatgtgtcaataacattgagagtctaacaaaagcactggagggagttaaagatgcttctgttgccttgacaacctgtaaaggtgtcttccgctatgatccagggagcattggaccaagaaccatcatggattccattgaggatgctggctttgattgtgaaatcagtacagaagagaaccagatcaacttggcaaatcaacacatgaaaactatcaaaaagtggaggacatcattcttcatctcactcatctttggtgtgccagccattacaacgatgctctactttatgatctcaaagaatcacatcatcgtcattcctggactctcacttgagaatcttatcctcttcatctgtgccaccatggttcagtttctaggtggtcggtacttctacgtccaagcctacaaggccctcaaacatcgcacagccaacatggatgtcctcatcatgatggcgacatcgactgcatacgtctactccctcatcattgtcctcgtcgccatcggtcgtcaagaagacggcagtcctatgacgttctttgacactcctcccatgctgcttgtctttgtttcgctaggcagatggttggaacacatggctaaggccaagacgtcggatgccctgtccaagctcatgtcccttcagcccgctgaggccatcttggtagaactaggtccagagtaccaggtcctcaaagagcgtcagatcagtatagaactagtacaaaggggtgataaactcaaggtggttccaggctctaagctacctgtcgatggggaggtgatttatgggatatcgtcggttgatgaagctcttattacgggagagtctatgcctgtcagtaagaaaccaggatctaaggtgattggtggatctatcaatcaaactggtgttttaatgatggaggctactcacgttggtaaggataccgctctggctcagatcgtcaaattagttgaggatgcacagacttctaaggctccaattcagcagattgcagacaagatatccgggcgctttgttccaaccattctcttcttatccatcattacgttgggtatctggttaactattggatttgtggacattgaaatagttcctatatactccccacctgctgaaaatgctaccgaagacgtgattcatcaagaaagaatggaaaccatcttttcttttgcctttgagcttgccattgccgtcatggctattgcctgcccctgcgccctaggtttggcaacccccactgcagtgatggtaggcaccgggattggggcgagaaacggcatcttgatcaaagggggtgaacccctggaaatggcccacaaggtgaagacagttgtgtttgataagacagggactgtgacctatggtaaaccaagggtcatgaggactaagctcttctctgctggattggacagtatgacagaggaagaattccttgctatctgtgggacagcagagtctggtagtgaacatcctctgggtacggctgttcttaagcatgccaaggaggtacttaacctatgtgtaagaggtgcagatggggatacgatgggcgccgaacaggttgggaggtgctcagacttcaatgccgagcctggctacggactccgctgcactgtcagtcatgtgggagccatgcttgacaattttcccacaatgcaattgcttgccaatgagagcgagaaacaggagaaatgcggagaaattaagaaagctgtggatcagaagaatgaattcacagtactaattggaaacagggaatggatgaaaaagaatgacctgacggtcacagctgatatgaacgaggcattgggtcataacgaagcacaggggcaaacagctgtattagttgcagtggatgatcaaatagtgggaatgatcgccattgctgatacagtgaaaccagaagccaaacaatctattaaatggattattataaatgtctcatggcaggttggaatatctcaagtctttgctgaggtcctccctcataacaaggtggaaaagatcactgaactacaggccaagggtcagcgtgttgctatggtaggagatggggtcaacgatagccccgccctagtgaaggctgatgtgggtattgccatcggaacagggacggatgttgctgtagaggcaggggacattgttctcatcaagagtgacctgatggacgttgcaggtgccattgacctttccaaacacaccgtaagaaggatctacatcaacttcttctttgcttgtatctacaactctgtaggcatccctattgctgctggtgtcctagctccagtcaacatcttcctacgtccctggatggcatcagctgccatggcaatgtcttctgtttccgtggtttcctcctctctcatgctcaaactgtaa

SEQ ID NO: 55492 - protein, 1177 aa, Strongylocentrotus purpuratus
MASVAIIKVPNMNCELCRRTIEIELTKLQGVKLVKSSLPTRIVRVFYDNELIGHDVIAHVIDELGYIVGKVESFANPVSPDVGSKDENAPVVSESGKSDDDDSAVANVQTDFEEKEIGPPKCETFNLIIKVEGKIIRGSQLPACVLEKVRECPGVMRATVNHEGALTVVHDPGRKSMKSFVMDVIAKLGYQSESSTDCSQPADDAHLPKSTSDCIQSYHNPRGGGNDDHPSTSPAHPKEKPTSVDRAEIQALIASEGDTPPSTSRENGIKNGDVVLEMKPRVAMVKDDGKVEVGRCVITVTGMTCASCVNTIEKSLIKQRGIEAVTVSLIAQKTEVKYQVAVVTPAEIALMIEDMGFDAEVKEEQMAGEETLNLIINGMECSSCVNNIESLTKALEGVKDASVALTTCKGVFRYDPGSIGPRTIMDSIEDAGFDCEISTEENQINLANQHMKTIKKWRTSFFISLIFGVPAITTMLYFMISKNHIIVIPGLSLENLILFICATMVQFLGGRYFYVQAYKALKHRTANMDVLIMMATSTAYVYSLIIVLVAIGRQEDGSPMTFFDTPPMLLVFVSLGRWLEHMAKAKTSDALSKLMSLQPAEAILVELGPEYQVLKERQISIELVQRGDKLKVVPGSKLPVDGEVIYGISSVDEALITGESMPVSKKPGSKVIGGSINQTGVLMMEATHVGKDTALAQIVKLVEDAQTSKAPIQQIADKISGRFVPTILFLSIITLGIWLTIGFVDIEIVPIYSPPAENATEDVIHQERMETIFSFAFELAIAVMAIACPCALGLATPTAVMVGTGIGARNGILIKGGEPLEMAHKVKTVVFDKTGTVTYGKPRVMRTKLFSAGLDSMTEEEFLAICGTAESGSEHPLGTAVLKHAKEVLNLCVRGADGDTMGAEQVGRCSDFNAEPGYGLRCTVSHVGAMLDNFPTMQLLANESEKQEKCGEIKKAVDQKNEFTVLIGNREWMKKNDLTVTADMNEALGHNEAQGQTAVLVAVDDQIVGMIAIADTVKPEAKQSIKWIIINVSWQVGISQVFAEVLPHNKVEKITELQAKGQRVAMVGDGVNDSPALVKADVGIAIGTGTDVAVEAGDIVLIKSDLMDVAGAIDLSKHTVRRIYINFFFACIYNSVGIPIAAGVLAPVNIFLRPWMASAAMAMSSVSVVSSSLMLKL

SEQ ID NO: 55493 - DNA, 3561 bp, Magnaporthe grisea 70-15
  CDS (1)..(3561)
atggccccaacaaacatcaaagtccctgcgcagggcggatccggcagtacgggagccccgctactcacgccgagtttccacatggcgacaacgacattaagggtcggtggcatgacttgtggtgcatgcacctctgccgttgagtcaggcttcaaaggcgtcgacggcgtaggcaacgtctcggtgagccttgttatggagcgtgctgtcatcatacacaaccctcaaataatcagcgccgaacaaatacaagaaatcatcgaggaccgcggcttcgacgcagaagtcctagcaacagaccttccttctccgaatccgaaccagaccgaattcgacaccgatggcgacgatacggaccatgaccacagctctaccgtggtagtcacaacagtggctgtagagggaatgacatgtggcgcctgcacttccgctgttgaggcgggcttcaaagacgtttcgggagtcataaagttcaacatttccttgatgtctgaaagggccgtcatcgagcatgataagtccttgctcagtgtggagaccattgccgagatgatcgaagataggggctttggcgcgaccatcgtgggtagcaaagagaagactcagccaggacgggcacaaagaaggtcgaggagtcggtcgaggaagccaacaagcgcaacaaccactgtagcgatagagggcatgacctgtggtgcatgcacctcggccgttgaaggcggcttccagggagtgagtggggtgcaccgttttaacattagccttctcgcagaacgcgcagttatcacgcatgaccccacggaattaccagccgaaaagatcgccgagatcattgaagacaggggctttggtgccgagattctttctacagtcttggaaacatccgaagcatcgcgcaatgcggcaacctcgcaattcaagattttcggcaacctagacgcaacgacagcgacgagcttggaaggtgtactgacaggtctatctggggttcaatctgcaaaagttagcctcgcaacatcaagactgagcgtggtacatcttcccggcgtcgtgggtctgcgtgccatcgtccaggctgttgaaggtgccggcttcaatgctctggtcgcagacaatgacgacaacaatgcacagctggaatcactcgccaaaactaaggaaatcaacgaatggcgccgtgctttcaaggtttccctgtcattcgccatccctgtgtttttactcagcatggtgattccaatgctgcttcccgcgatcgacattggcaaagtccagctgctgcctggcttgttcctgggtgatattgtctgcttggctttgacgataccagtgcaatttggcatcggcaagcgcttctacatttctgcatggaaatcaatcaagcaccgatcgcctactatggatgttctcgtggtcttgggtacatcgtgtgccttcttcttcagctgcattgccatgctaatctcgttcctgttcccccctcacactcgaccggccaccatcttcgacacgagcacaatgttgatcacgttcatcactctcggccggttccttgaaaatagggccaagggtcaaacttcaaaggcattgtcaagattaatgtctctagcaccgtcgatggcaaccatttatgcggatcccattgctgctgagaaggcaaccgaaatatgggcctccgataaggctcctacaactgagaagcagtccacgccggaaggaaacgccgccgaagagaaggtcattcccacagaactgattcaagtaggcgatatcgtcatacttcgacctggtgacaagattccggccgacgggctcatcaccatgggcgaaacctacgttgacgaaagcatggttactggagaggctatgcccgtgcagaagaaaaagggcagcactgtcatcggcggcacagtcaatggtcatggaagagttgactttagagtgacccgggccggccgtgatactcagctcagtcaaatcgtcaagcttgtgcaggatgcacagaccactcgggctcctattcagcgtctcgctgacaccttggccggcatcttcgtacccacgattctcattcttggttttttgactttcgccacatggatggtactgtcccacgtcctcgcgaacccgcccaagatctttctcgaggataccagcggtggcaaggttttcgtatgcctcaagctctgcatttctgtcattgtttttgcttgtccgtgtgcccttggcctcgctactcccacagcggttatggtaggaacaggaattggcgctgaaaacggaattttggtcaagggcggtgctgcacttgagacggctaccactatcaccaaggttgtccttgacaaaactggtacaattacatacggcaagatgcgcgtagccaacgctcacatagcagagcattggcagactaccgaatgggtgcgaaaactttggtggacgatcgtaggtctggctgagatgggcagtgaacaccctgtgggcaaggctgtacttggcgctgccaagaccgagctcaacctggacgctgaaggtacaatagaaggcagcgttggtgacttcgaagctgccgttggacgaggaataagcgccgtggttgagcctgtgtcaggtacagaccgcatcaggtataaggtgcttgtgggcaatatcaagttcctacgccaaaataacgtcaacgtccctgaggatgcagttgaggcatctgagcagattaatacccgagcggcgcagaaacgcaaggctggcagcagcgacaaggcctcctcggctggcacaaccaacattttcatcgcaatagacggcacatatgctggacatttgtgcctttccgacaccatcaaggagggcgcggcagcggcgattgctgttcttcaccgcatgggcatcaaaacagccattgtcacgggagaccagcgcagcacggcactagcagtggctgcttctgttggcatctcccctgaggaggtctatgctggtgtctcgccagaccagaagcaagccatcgtaaaacagatgcaagaacaaggcgagtgtgttgcgatggtcggtgatgggatcaacgactctcccgccctggccactgccgacgttggcatcgccatgtcctctggtaccgatgtcgccatggaggcagccgatgtggtcttgatgcgacctgacgacctcatgaatatccccgcggctctacatttagcacgaagcatattcactcgaatcaagatgaacctggcgtgggcatgcatgtacaatgtagtcggcctaccattcgctatggggttattcctgccttacgggctacatttacatcccatggccgccggcgcagccatggcactctcgagcgtcagcgtcgttgtcagcagtctgttactaaagctttggaagaggccatcttggatggatgagtctatgtatgatgagcgtggaggcctgcggaggaagggatctctgtggagctcggttggcagtattatctctgtcgcacaggatttgtttggtcgggtcttccgtgggagaggaaagagagaggagggaatttccctcgatcttatataa

SEQ ID NO: 55494 - protein, 1186 aa, Magnaporthe grisea 70-15
MAPTNIKVPAQGGSGSTGAPLLTPSFHMATTTLRVGGMTCGACTSAVESGFKGVDGVGNVSVSLVMERAVIIHNPQIISAEQIQEIIEDRGFDAEVLATDLPSPNPNQTEFDTDGDDTDHDHSSTVVVTTVAVEGMTCGACTSAVEAGFKDVSGVIKFNISLMSERAVIEHDKSLLSVETIAEMIEDRGFGATIVGSKEKTQPGRAQRRSRSRSRKPTSATTTVAIEGMTCGACTSAVEGGFQGVSGVHRFNISLLAERAVITHDPTELPAEKIAEIIEDRGFGAEILSTVLETSEASRNAATSQFKIFGNLDATTATSLEGVLTGLSGVQSAKVSLATSRLSVVHLPGVVGLRAIVQAVEGAGFNALVADNDDNNAQLESLAKTKEINEWRRAFKVSLSFAIPVFLLSMVIPMLLPAIDIGKVQLLPGLFLGDIVCLALTIPVQFGIGKRFYISAWKSIKHRSPTMDVLVVLGTSCAFFFSCIAMLISFLFPPHTRPATIFDTSTMLITFITLGRFLENRAKGQTSKALSRLMSLAPSMATIYADPIAAEKATEIWASDKAPTTEKQSTPEGNAAEEKVIPTELIQVGDIVILRPGDKIPADGLITMGETYVDESMVTGEAMPVQKKKGSTVIGGTVNGHGRVDFRVTRAGRDTQLSQIVKLVQDAQTTRAPIQRLADTLAGIFVPTILILGFLTFATWMVLSHVLANPPKIFLEDTSGGKVFVCLKLCISVIVFACPCALGLATPTAVMVGTGIGAENGILVKGGAALETATTITKVVLDKTGTITYGKMRVANAHIAEHWQTTEWVRKLWWTIVGLAEMGSEHPVGKAVLGAAKTELNLDAEGTIEGSVGDFEAAVGRGISAVVEPVSGTDRIRYKVLVGNIKFLRQNNVNVPEDAVEASEQINTRAAQKRKAGSSDKASSAGTTNIFIAIDGTYAGHLCLSDTIKEGAAAAIAVLHRMGIKTAIVTGDQRSTALAVAASVGISPEEVYAGVSPDQKQAIVKQMQEQGECVAMVGDGINDSPALATADVGIAMSSGTDVAMEAADVVLMRPDDLMNIPAALHLARSIFTRIKMNLAWACMYNVVGLPFAMGLFLPYGLHLHPMAAGAAMALSSVSVVVSSLLLKLWKRPSWMDESMYDERGGLRRKGSLWSSVGSIISVAQDLFGRVFRGRGKREEGISLDLI

SEQ ID NO: 55495 - DNA, 3525 bp, Gibberella zeae PH-1
  CDS (1)..(3525)
atgtcttactcggaagctggccagaagaaggaatatcccatctctcccattccggctcaagtgagggttacttattggtggcatacgccctaccatgccgagatatcggatagggaacatgcggattgcgactggggtgaggagtgggcctcttgggtatcattattggctcttcaacgacgaatcacatcattcatctgcatcacatatttggcatcaagattgcgagcgaactgcttgctatctttcgctgtgatgggacaatcctacatgcgcctgccagaagatggcgatggtacagctggcagactttccgtgtctggtagcgcacatcttgcaacaaccacgctgcaggtcggcggcatgacatgcggtgcttgcacatcagccgttgagtccggtttcaaaggcgttgacggcatcggaacagtctctatcagtctcgtaatggagcgcgccgtagtcacgcatgacccacggatcatacccgccgagaagatacatgagatcatcgaggatcgtgggtttgatgcagaggttctctcgacagatattcccaacgctggggctactcggaccaacaaccacttcaacgagagcactgccatcaatggcgaaactacaaccactgcgacaacaactttcgccatcgagggaatgacatgtggtgcctgcacatcagcagttgaaggcagctttaagggcgtggacagtatcctcaagtttaacattagccttttggctgagcgcgccgttattacgtacgatgaaaccaagatttcccccgaggagatagccgagattatcgaggatcgcggattcgatgctaccattctatccacacaacgcgacatggcctgccagggacgagacaccacatctgcccaattcaaagtctttgggtgcaaagatgcaacgacggcccaagctctggaggaaggcctcattgcgatccaaggcatccaatcagtatctctcagcctcagtacggatcgtcttacagttgtttatcaacccatgaccataggacttcgtggcattgtcgaagccatagaggcgcagggcttgaatgccctcgttgcaagcggagaagataacaacgcgcaacttgaatcgttggcaaaaacgcgtgaaatcactgagtggaggagagcattcaagatctcactcgcctttgcgattcctgtccttctaattggaatgatcattcctatggccttccctgcgatagacattgggagtttcgaactcattcctggtctattcttgggtgacattgtgtgtctcattatcacattacctgtccagttcggcattggcaagagattctatatttctggttacaagtctctcaagcatggatcaccgacaatggatgttctggtcgttcttggcacaacgtgtgcttttctctttagcgtcttctcgatgctggtctcagttcttcttgagccgcattccaaaccttccaccatcttcgatacaagtactatgctcattactttcataacactatctcgatggctcgaaaatcgcgccaagggcaagacctccaaggcattatctcgccttatgtccctagctccgtcaacagcagccatctatgctgatccgatcgccgtggaaaaagcagccgagaactgggcaaagtcttttgacgacccgtcaacgccaaggacacctggtaaccaaactggcggatccgcttgggaggaaaaggtcatcccaacagagctacttgaggttgacgatatcgtggtcatccggccaggtgacaagattccagcagatggtatcctggtccggggtacaacattcgttgatgaaagcatggttacaggagaagctatgcctgtccacaagcgtataggtgataacatgatcgccggtactgtcaatggtgacggacgtgttgatcttcgtgttactcgagctggccatgctacccaattaagccaaatcgtcaagttggttcaagatgcgcaaacggcccgcgccccaatccaggagctcgctgataagctggccggctactttgttcccatgattctcattcttggtcttagcacattccttgtatggatggtcctttgtcacgttttatctcaccctcctgagatcttccttgaagacaatagcggtggtaaaatcgtggtatgtgtcaagttgtgcatttccgtcatcgtctttgcctgtccatgtgcccttgggctcgctacgcccacggccgtcatggtcggtacaggagttggggccgagaacggaattctcatcaaaggaggcgctgccttggagcgtataaccaaggtcacgcatatcatccttgataagactggcacaattacgtacggaaaaatgagcgttgccagcacagatctcatctcgcagtgggccagaagcgatgtcaacaaacgactgtggtggtccatcgtgggtctggccgagatggggagcgaacaccccgttggcaaggctatcctgggcgctgcaaaggaagaattgggcatggatcccgagggaaccattgatggcactgtcggtgacttcaaagctgttgtaggcaagggtgtcagcgtgactgtagagccagctacctcgagccgtacacgatacctcgttcaagttggaaatctcgtctttttgcaagataatggtgttgatgtccccgaggatgctgtccaggctgcagagaagatcaatttgtcggctgacgtaggtaaatcgacggtcaagagcaacggcgctggaaccaccaacatctttgtggccatcgatggcgtttacacaggctatgtatgtctgtctgataagatcaaggaggacgctgctgcggctatctcggttctacaccgcatgggcatcaaaacctcgatagtaacaggcgatcaacggtctaccgcactcgctgtcgcttctgtcgtgggtattgatgccgatcatgtctacgctggcgttagtcccgatcaaaagcaagccatcgtacaagagatccaacagtctggtgaagttgtcggcatggttggtgacggcattaatgactctccagcccttgcgacagcagacgttggcatcgccatggcaagcggcacggatgtagcgatggaagcagcagatgtcgttcttatgagaccgacagagctcatgattatacctgctgctttgactcttacacacactattttccgtcgaatcaagttaaaccttggatgggcttgtctgtataacgccattggtctcccgatcgcaatgggcttttttcttccgctgggtctgagcgtacaccctatcatggcgagtcttgcgatggcgtttagcagtgtcacggtggtggttagtagtctcatgcttaactcatggacaaggcctacttggatgaatgaaatggctatgaacgatgacaagacgcccaaggcggagaggtgggcatttggaaggggcatcgttggctgggtgagggaaatgatgggacgtaggggaaaggtggaggaaattgggtatttgccgttacagaacatggagggctga

SEQ ID NO: 55496 - protein, 1174 aa, Gibberella zeae PH-1
MSYSEAGQKKEYPISPIPAQVRVTYWWHTPYHAEISDREHADCDWGEEWASWVSLLALQRRITSFICITYLASRLRANCLLSFAVMGQSYMRLPEDGDGTAGRLSVSGSAHLATTTLQVGGMTCGACTSAVESGFKGVDGIGTVSISLVMERAVVTHDPRIIPAEKIHEIIEDRGFDAEVLSTDIPNAGATRTNNHFNESTAINGETTTTATTTFAIEGMTCGACTSAVEGSFKGVDSILKFNISLLAERAVITYDETKISPEEIAEIIEDRGFDATILSTQRDMACQGRDTTSAQFKVFGCKDATTAQALEEGLIAIQGIQSVSLSLSTDRLTVVYQPMTIGLRGIVEAIEAQGLNALVASGEDNNAQLESLAKTREITEWRRAFKISLAFAIPVLLIGMIIPMAFPAIDIGSFELIPGLFLGDIVCLIITLPVQFGIGKRFYISGYKSLKHGSPTMDVLVVLGTTCAFLFSVFSMLVSVLLEPHSKPSTIFDTSTMLITFITLSRWLENRAKGKTSKALSRLMSLAPSTAAIYADPIAVEKAAENWAKSFDDPSTPRTPGNQTGGSAWEEKVIPTELLEVDDIVVIRPGDKIPADGILVRGTTFVDESMVTGEAMPVHKRIGDNMIAGTVNGDGRVDLRVTRAGHATQLSQIVKLVQDAQTARAPIQELADKLAGYFVPMILILGLSTFLVWMVLCHVLSHPPEIFLEDNSGGKIVVCVKLCISVIVFACPCALGLATPTAVMVGTGVGAENGILIKGGAALERITKVTHIILDKTGTITYGKMSVASTDLISQWARSDVNKRLWWSIVGLAEMGSEHPVGKAILGAAKEELGMDPEGTIDGTVGDFKAVVGKGVSVTVEPATSSRTRYLVQVGNLVFLQDNGVDVPEDAVQAAEKINLSADVGKSTVKSNGAGTTNIFVAIDGVYTGYVCLSDKIKEDAAAAISVLHRMGIKTSIVTGDQRSTALAVASVVGIDADHVYAGVSPDQKQAIVQEIQQSGEVVGMVGDGINDSPALATADVGIAMASGTDVAMEAADVVLMRPTELMIIPAALTLTHTIFRRIKLNLGWACLYNAIGLPIAMGFFLPLGLSVHPIMASLAMAFSSVTVVVSSLMLNSWTRPTWMNEMAMNDDKTPKAERWAFGRGIVGWVREMMGRRGKVEEIGYLPLQNMEG

SEQ ID NO: 55497 - DNA, 3825 bp, Apis mellifera
  CDS (1)..(3825)
atgcggaagatagtaaatatcgattggcgatataaattactgaatgttactaaatatttaggggatggtgacgaagatgtcgattatgaaggctcgacacacttggtctgcattcctcgatctcaagagattaaagattcctcgaatgcttctagcacgatgaaggttaatattgagggtatgagatgtcaaagctgcgtgaagaatatcgagggaactataggtagtcgaccagaagttctaagcattaaaataatcctagaagaaaagttaggttacattgaatacaaagcaaacgaaattacacctgaagaattggtcgaagctatagaggatatgggttttaccgcttctttatttaaggaagaaagtaattctatagaaaagaaacagataaatcatgtatcacaatcaaacattagtatatgtagtatacacgtcgatggaatgacttgtatgtcttgtgttaaaactattaccggagttttatcggagaaatcaggaataaaacaagtgaatgttagtttagagaacaaggaagcaagagtttcttatagcgataacgatgtaacagctgaacaaatatcgggattcattgaagaaatgggttttaattcgtttgttaaagaagtaaatgggatggtttataacacaacgattaatttaaacattaatcctccagacagtggaaatgtctcgttagaactgaatggaggaggtgatgtgaaaaaagagaatcaaacagcaaaatgcttcttacatataacgggaatgacttgtgcttcctgtgttgctgccatagaaaaacattgtaaaaaattatatggtgtaaatagtattttaattgcattgatggcagccaaagcagaaattacatttgatccggataagataagagcagtagacattgcatccagcatatccgaattgggttttcctactactttgattgaggaacccggcacaggggaaggtgaagttgaattgaaaattgcaggtatgacgtgcgcatcttgcgtgaataaaatagaatcaactgtgaaaaaattgccaggtgttcattcggcagtagttgcgttagcaactcagcgtggtaaatttaaatacgatgtagaaaaaattggcattagagatattattgaatgtattaacaaattaggtttcacagccatgttatttagtaatagagataaagaaaatagagattatttggatcaaaaggaagaaataaataaatggcgaactgcatttttagtttctttaatttttggtataccatgtatgttagctatgacatattttatggtggatatgtctattggtgaaaaaacacataaggatatgtgttgtatagtacctggtctttctttggaaaatctaattctttttatattttctactccagttcagttttttggtggctggcatttttatgtacaagcgtacagagctttaaaacacggaacaacaaatatggatgttttaatttctatgactactacaatatcttatttgtattcagttgccgtacttacagcagccatgataatgcaggaacatgttagtcctcaaacattttttgatactcctccaatgttgttagtgttcataagtttaggaagatggttggaacatgttgcaaagggcaaaacttcggaagctttatcgaaattattgtctttaaaagcaacggatgcagttcttgtttcattaggtcctaataatgaaatattatctgaacgattaatcagtatagatttagtacaacgaggagatatattaaaagtagtgcaaggtgctaaagttcctgtcgatggcaaagttctatcgggtcactctacttgcgacgaaagtttgattactggagaaagcatgccagtgccaaaaaagaaagggtcagttgtaataggtggctcgataaatcaaaatggtccacttttaattactgccacacatacaggagaacatacaacattagcacaaattgtacgattagtagaagaggcacaaacaaataaagcacctattcaacatttagccgataaaatagcgggttacttcattcctcttgttatagctgtttctatagtgactttaattatttggataatagtgggatatataaatataaatagtttaccaatttcgcacaatgatcaaattaataaacagggaatgaatagagaagagattatatttcagtatgcttttcgaagtgctctttgtgtattagcaatagcttgtccatgtgctttaggattagctacaccaactgctgttatggttggtactggagttggcgcattaaatggtattttaataaaaggtgctgaacctttggaaaatgcgcacaaagttaaatgcattgtttttgataaaaccggaacgataacacacggtgtattaatggtaacaaagataagtctctttgtaaatgaaaaactttgttcattagcaaagttcttagttattgtttgtacagctgaagcaaatagtgaacatccaattgcatcagcgattgtccggtacgtaaaggaaacaatagcttccgaaacaactggaaagtgtatgaattttcaagcagttgctggttgtggacttaaatgtaaagtgtcatatatttcaaatatattgatcgatgcattaaaatctgagaaaattattaactatattaatgaggtaaaaaaattatcttctggaacatataccttaaacaatgtgccaatcgatgttacgccaattacaaatacaagtcaagaaagacagaatttggatctggaattattattgaatccagattctcatggtgatcaaagtaatcctgaggatgtatatgaaatatgtattggtaatagagaatggatgcgaagaaatggtataaatataccacaagaagtcgaattaaaaatggttgctgaagaagaattaggatgtactgctgttttagcagcagtaaataatgtattagtagctatgattagtgtagcagatacagttaaaccagaagctcatttggcagtttatactttaaaaaaaatgggtttagaagttattctattaactggagataatagaaagacagctgtttctattgccagacaagttggtattactagagtatttgcagaagtgttaccttcgcataaagttgctaaaattcaacgtttacaagatcaaggattaagagttgctatggtaggagatggtgttaatgatagtccagctcttgcacaatcagatgttggtattgcaatatcttctggcacagatgttgctgtagaagctgctgatgtagttctcatgagaaatgatcttttggatgttattgcgtgtctggatttatcaagaaaaacggttcttcgaataaggctgaattttttatttgctagtatctataatttattgggtattcccattgctgctggaatatttagttcttttggattcttccttcaaccttggatgtcatcagcagcaatggcattaagctcagcatctgtagttggcagttctttgttattaaaattataccataaaccaacaaaggctacattagaaacatcagaatatttattagcaatgcatgctcattctactgcaagaatgattgatttagatacaatatctcttcatcgtggtttagatgattctgtgttacccattatgcatagatcgacatcgacattatccagattatttcgaagatcaaaggatgatatcgaaggtcggcttctaagtgaggatgttgatgaaattgatttgataactgatttttctggttatcgaaaaaatataaaggaccatacaaatataacaccattataa

SEQ ID NO: 55498 - protein, 1274 aa, Apis mellifera
MRKIVNIDWRYKLLNVTKYLGDGDEDVDYEGSTHLVCIPRSQEIKDSSNASSTMKVNIEGMRCQSCVKNIEGTIGSRPEVLSIKIILEEKLGYIEYKANEITPEELVEAIEDMGFTASLFKEESNSIEKKQINHVSQSNISICSIHVDGMTCMSCVKTITGVLSEKSGIKQVNVSLENKEARVSYSDNDVTAEQISGFIEEMGFNSFVKEVNGMVYNTTINLNINPPDSGNVSLELNGGGDVKKENQTAKCFLHITGMTCASCVAAIEKHCKKLYGVNSILIALMAAKAEITFDPDKIRAVDIASSISELGFPTTLIEEPGTGEGEVELKIAGMTCASCVNKIESTVKKLPGVHSAVVALATQRGKFKYDVEKIGIRDIIECINKLGFTAMLFSNRDKENRDYLDQKEEINKWRTAFLVSLIFGIPCMLAMTYFMVDMSIGEKTHKDMCCIVPGLSLENLILFIFSTPVQFFGGWHFYVQAYRALKHGTTNMDVLISMTTTISYLYSVAVLTAAMIMQEHVSPQTFFDTPPMLLVFISLGRWLEHVAKGKTSEALSKLLSLKATDAVLVSLGPNNEILSERLISIDLVQRGDILKVVQGAKVPVDGKVLSGHSTCDESLITGESMPVPKKKGSVVIGGSINQNGPLLITATHTGEHTTLAQIVRLVEEAQTNKAPIQHLADKIAGYFIPLVIAVSIVTLIIWIIVGYININSLPISHNDQINKQGMNREEIIFQYAFRSALCVLAIACPCALGLATPTAVMVGTGVGALNGILIKGAEPLENAHKVKCIVFDKTGTITHGVLMVTKISLFVNEKLCSLAKFLVIVCTAEANSEHPIASAIVRYVKETIASETTGKCMNFQAVAGCGLKCKVSYISNILIDALKSEKIINYINEVKKLSSGTYTLNNVPIDVTPITNTSQERQNLDLELLLNPDSHGDQSNPEDVYEICIGNREWMRRNGINIPQEVELKMVAEEELGCTAVLAAVNNVLVAMISVADTVKPEAHLAVYTLKKMGLEVILLTGDNRKTAVSIARQVGITRVFAEVLPSHKVAKIQRLQDQGLRVAMVGDGVNDSPALAQSDVGIAISSGTDVAVEAADVVLMRNDLLDVIACLDLSRKTVLRIRLNFLFASIYNLLGIPIAAGIFSSFGFFLQPWMSSAAMALSSASVVGSSLLLKLYHKPTKATLETSEYLLAMHAHSTARMIDLDTISLHRGLDDSVLPIMHRSTSTLSRLFRRSKDDIEGRLLSEDVDEIDLITDFSGYRKNIKDHTNITPL

SEQ ID NO: 55499 - DNA, 2928 bp, Kluyveromyces lactis NRRL Y-1140
  CDS (1)..(2928)
atggcagacactcaagctttgatttccgttcagggaatgacttgcggcgcctgtgtcaaaaccgttcaaacacaagttggaaatgttgatggtgtcactgagtgtgaggtgtctttgttgacagaagaatgtcatgtcctttttgataaaggacgtactaccacatctgaaatattggaaacaatagatgagtgtgggtttgatggtagcttaatttctgaggaaccgctagattacgatgtgacaacaactgaacaaatttcagggattcttctcgttagcggtatgacgtgtggtgcttgcgtgaaaactgtcactggtcaagtattgaaactaagcggtgtattggaatgtgacgtatctttagttacagaagagtgcaaagttaagttcgatccccatttcacttcgatggctgaaattgccgaatgtattgatgattgtgggtttgatgccaaagtcattagtgagaactcaagctctgtacctagcaacgaaaagcgtttgtgcttaaaaatattcggtatgttgtctgaatcggatagggccgatatcgagtcaaaagtttctgagttgaaaggtgtgatatctatcgatacttcattgcaaagtgaagaggcaacagtcatccatgatgctaacgagatcggaaaccgtgatatcatagactgtatcgaagagatggggtttcaaacttttatttcaaatacattggataattctacacaattatcattactctctaaaactaaagaaatccaattctggaagaagaattgtataagaggtggtatttcttctattctaataatggggttgtacatgtgtgtaccgatgctgttcccagctgtgttgactcatttcccattcgtacaaacaccaattattggcttgttttatagagatatcatcggaattatcattactacctacgttcaaatctatgttggttcctatttttataaagctgcatggatctctttgaaacatggctcaggtacaatggacactttgatcggtctttctactgtttgtgcatatattttttcatgctattccataatttctagcatttaccataaatcgacaaaaatgccaaaagtcatctttgacaccgctgtcatgcttctcacatttatttctttgggcaaattactcgaaaataaagcgaaatcggaaacttcaactgcaatgagtaaactcatctctttgaccccgtcctcctgttccatagttttaccagatggctctaccagggaaatatcagttgaattgttacaaccaaatgatatcgtagaagtcgtaccaggaatgaaaataccagctgatggtgttgttattcgtaatgaaactgaagttgacgaatcgctaatcacaggtgaatcgatgttggtggaaaaaatcgtcggatctcaagtcatcggggggagtgtcaatggacctggtcatttctacttcagagctattcgtgtcggagaagatacaaaattagcgaacattatcgcaacgatgaaaaaggcacagttatctaaagctcctattcaaaaatacgctgataagatggcgggcatatttgtcccgtttgtgatatcactatcagcaataacatttataacttggatgcttgtgagttacacgatgaagactcctcctctcatctttaacagtgaaaatggcaaattcttcatgtgcatgcaaatgtctatttctgtaattattgttgcatgtccttgtgcattgggtctagcggcacctacggcgattatggttggtactggtgtaggtgctagtcatggtgttctcatcaaaggtggtgatgttttggagaagtgtagtgctctacagacgtttttgttcgataagacaggtaccctcacgacggggcggatgagtgtagaaaatttcattaattataacagtgatgtatctgatttacactggaagatgatttcattgtgtgaatcaataggagaacatccagttgcaaaagctattgtcaattatgctgattcccacgtaaataaatcaagcattttcgatttggatttatcgaatgaggaagttctcattggaaagggaatttcctgtaacatcacagataaaaatacttctaaaatccatacaataaccataggtaacaagaaattatttcccgatgagagtttgagtgatatcgcttcttctactttaacagaatcttatgtttccatcgatggtagtttagtcggcaaatttgaaatatctgacagggtcaaagaagacgcacattttgttgtagaatatttacaaaatttgggcattaaatgctgcatggtcacaggagatgcgcatcaatctgctctgaaagtggcacaacaacttggcatatccgctaatgatgtcttcagtgaagtcactcctgagcagaaacgtgatattgtcattcaactccaaaacaacggtacagagagggttgcctttgtcggagatggtattaatgattctccggctttggttgaggcagatctaggaatttcgatatcttctggtactgatattgcaatcgaagctgccgatatcgttattcttgattcggataataaaaataattcgttaaaaggtttggtttatgcacttgatattgcgcgtaaaacattctatagagtgaagctgaatttcttttgggctgtctgttataacacattcatgattcccattgctatgggtttattagctccttggggtatcactttacatccaatgttgtctagtgctgcaatggctctaagttccgtgtccgtggtctgcagttcgctaatgttgaagaggtggacaccgccttcactcaatatcaaatcaatggaagcttccggtggattgtcatggcttagatttggtagaaacagtaacagaggtgatgatattgaacttcaggaaagattgatgtaa

SEQ ID NO: 55500 - protein, 975 aa, Kluyveromyces lactis NRRL Y-1140
MADTQALISVQGMTCGACVKTVQTQVGNVDGVTECEVSLLTEECHVLFDKGRTTTSEILETIDECGFDGSLISEEPLDYDVTTTEQISGILLVSGMTCGACVKTVTGQVLKLSGVLECDVSLVTEECKVKFDPHFTSMAEIAECIDDCGFDAKVISENSSSVPSNEKRLCLKIFGMLSESDRADIESKVSELKGVISIDTSLQSEEATVIHDANEIGNRDIIDCIEEMGFQTFISNTLDNSTQLSLLSKTKEIQFWKKNCIRGGISSILIMGLYMCVPMLFPAVLTHFPFVQTPIIGLFYRDIIGIIITTYVQIYVGSYFYKAAWISLKHGSGTMDTLIGLSTVCAYIFSCYSIISSIYHKSTKMPKVIFDTAVMLLTFISLGKLLENKAKSETSTAMSKLISLTPSSCSIVLPDGSTREISVELLQPNDIVEVVPGMKIPADGVVIRNETEVDESLITGESMLVEKIVGSQVIGGSVNGPGHFYFRAIRVGEDTKLANIIATMKKAQLSKAPIQKYADKMAGIFVPFVISLSAITFITWMLVSYTMKTPPLIFNSENGKFFMCMQMSISVIIVACPCALGLAAPTAIMVGTGVGASHGVLIKGGDVLEKCSALQTFLFDKTGTLTTGRMSVENFINYNSDVSDLHWKMISLCESIGEHPVAKAIVNYADSHVNKSSIFDLDLSNEEVLIGKGISCNITDKNTSKIHTITIGNKKLFPDESLSDIASSTLTESYVSIDGSLVGKFEISDRVKEDAHFVVEYLQNLGIKCCMVTGDAHQSALKVAQQLGISANDVFSEVTPEQKRDIVIQLQNNGTERVAFVGDGINDSPALVEADLGISISSGTDIAIEAADIVILDSDNKNNSLKGLVYALDIARKTFYRVKLNFFWAVCYNTFMIPIAMGLLAPWGITLHPMLSSAAMALSSVSVVCSSLMLKRWTPPSLNIKSMEASGGLSWLRFGRNSNRGDDIELQERLM

SEQ ID NO: 55501 - DNA, 3630 bp, Yarrowia lipolytica CLIB122
  CDS (1)..(3630)
atggattcctacgtctttgaagtttcgaacctgcactgttcgagttgcgaaacgtcggtcaaggaggctctggctcccgtgattcccccttcttggcaggtgttcgtgtctgtggctgaaggaaaagtcaccctggtccctgatgaaggcaagctcgactccaagggtatcagacgagtggtcgaccggctgctcgcgtctggatacgatgtggaggacatgaacgtggacgagattgtggccaaacctggctggttcagacagttcaagagtgcgctgttcgatggaggacagaaggagaaacgacacaagaaacactgcgaatcgtgccgcgatgagaaacacaaggaatcagaagactcagatgaagcacctacaatcatcggagagaactcccccgccacagctaccgagttcaagaccacatttgccattggtggcatgtcttgtgtctcgtgttctaaccaaatcaccgagactgtcaaggctcagtttccatcgctcgatacttttgccgtcgacctgatgaacaaatccgctgtggtcattatcaacaacaaaaccaccgccacaaagatccaggagtgcattcgtggaatgggctacatgtgtgatcttgtcgagatggctcctgtgaagagcaccaaggcatacaaggtgactgctagtattggaggtatgacttgtgctgcctgcgtcaaccaaattgttgcagcagttcaggacattgagggtgtggactgtgtcactgtttccctcatgtccaatagtgctgacatcatcattgctgacaagaaatggcttcccaaggttgttgaagccatcgaggactctggatatgactgtgacatccatgctgtcgaagataccgaatccaagcgtgtcgaggagatgactcgaactgtcaacctggctatcgacggcatgttctgtgaccactgtcctgacaacattaacaatgcactgtcttcatatggccaagctatggttgttgatgatcccgttgctctcgatcatccttttgtcaagttcacatacaagcctgagctccccaacgttactattcgacacattatccgaaaggtgcaagacctttctcctcagttcaccctgtctatcgtgcaccccatgactctcgaggaacgatcagccaagctccagaagcacgagcaggtgcgtctattcttccgactggcactttctgttgctgtggccattcctacattcattcttggtattgtcggcatgtctctgctcaagaaggaccaccccttccgaatgtacatcgatgaatctgcctgggctggcagtgcatcccgagtcacatgggctctcctgattctcgctactcccatttacttctttgccgctgatgtctttcatatcaaggcagtgaaggagattagaaacctgtggcgccctggagtgtcttggaagcgacggttcttcaagtttggatccatggacatgctgatgagtctcggtgtcaacgtttcctactggacttcacttgcccttctgattctggcagccaagtcccccaacagagaagaacatggtaagggggacgaggagatgggctaccataccaccttctttgactctgtcgtgttcctgaccatgttcttgcttatcggtcgatgtctagaggcctactctaaggcccgagctgcttctgcaatctccctgttatctgatctgcgtcctaaggaagccatccttgtgttcgctgaagacggagccctggctaaagagaaggtcgactttgaagagggcaagatggagagtgatgaagaggaggaggagcatactacctactctggtgacgacaaagtctccgttgactatcttgagattggtgactacattcgtgttcttccaggaatgactccacccaccgactgtattgtcgtccagggtggctctaccttcgatgagtctgctctaacaggtgaaagtcgacccgttcgtcatggccagggtgaccagatctttgctggtaccgtcaataacggctctggttctctgattgcaaaggtcatggctctggagggaggctctcttctggaccagattgtcaatgttgtccgagagggtcagcttcaccgagcacccattgagagagttgctgacagactgacgtctgtatttgttcccattgtcacttctctcgccatcatcacctggatcatttggcttgctcttggcaccaccggttctcttcctccccactacctcgacattgatctcggaggatgggttgtctggtcacttcaattcgccatctctgtctttgttgttgcctgcccttgtggtattggtcttgctgctccgactgctctttttgtgggcactggactagctgccaaatacggtattcttgcacgaggtggaggagaggccttccaggagggagccaaagtcgatgttgtttgttttgataagaccggaaccctgactgaaggaggagagcctaagatcaccgacgagaaggtgatttcatacgacaccaaggagatcttcttcctagctaagctcattgagcagcagtctggccaccctctggctgttgctgttgtcaaccacgtaaccgacatgaacattgagcttccgggatactcagttacagttgaagaggttcccggtaagggtctcaagggttctctttctgttcccaagacttcttctcttggccaggctggtgtcactgagttcttgttcggaaatgagcgtcttattgaggagaacaacgccgccatctccaatgaagacgctgccctgttgcatcgatggaagaccgagggaaagtctgtcatgctgatggctcttagaccggacgggggtaactttgctctggctctcattatctctgcggaggacaagattcgacccgagactccctcggttctcaaggctcttcaggagcagaacatccagacctggatgatctctggagacaaccagatcaccgccaatgctgtcgctgctcgtatcggaattcctgccgacaatgtcattggtggagtgttgcctcaggaaaaggcagctaaggtccagtggctccagaagactgccgtttcagcccgttctggcaaatcaaccggtcgagctatcgttgccatggttggagacggtgtcaatgatgccccttctctgtctactgcagacgtcggtattgctattggctctggagctgatatcgccatgtcgtcggccaagtttgtcctgatgcgatcggaactgacttcggttcttactctctttgatctctcccgtgccatcttccgacgaatcaaactcaactttgcctgggctctggtctacaactgcattggtattcctgttgcagctggtgtcatctacccttataacaactctcgtctggatcctgtgtgggcctctctggctatggctctgtcttccgtctcggtcatttgctcatctctgcttctcagactgtacagaccccccaaggtccagttcgacgctgaggttggtgatgaaggcgagagtatcaagagtgtccacaccaaccgaaagtggaagcgccgactggccaagattaagaacgtgaagaagctcaagaacgccggaaagcgactggagactatcgaggttgtggaagagtga

SEQ ID NO: 55502 - protein, 1209 aa, Yarrowia lipolytica CLIB122
MDSYVFEVSNLHCSSCETSVKEALAPVIPPSWQVFVSVAEGKVTLVPDEGKLDSKGIRRVVDRLLASGYDVEDMNVDEIVAKPGWFRQFKSALFDGGQKEKRHKKHCESCRDEKHKESEDSDEAPTIIGENSPATATEFKTTFAIGGMSCVSCSNQITETVKAQFPSLDTFAVDLMNKSAVVIINNKTTATKIQECIRGMGYMCDLVEMAPVKSTKAYKVTASIGGMTCAACVNQIVAAVQDIEGVDCVTVSLMSNSADIIIADKKWLPKVVEAIEDSGYDCDIHAVEDTESKRVEEMTRTVNLAIDGMFCDHCPDNINNALSSYGQAMVVDDPVALDHPFVKFTYKPELPNVTIRHIIRKVQDLSPQFTLSIVHPMTLEERSAKLQKHEQVRLFFRLALSVAVAIPTFILGIVGMSLLKKDHPFRMYIDESAWAGSASRVTWALLILATPIYFFAADVFHIKAVKEIRNLWRPGVSWKRRFFKFGSMDMLMSLGVNVSYWTSLALLILAAKSPNREEHGKGDEEMGYHTTFFDSVVFLTMFLLIGRCLEAYSKARAASAISLLSDLRPKEAILVFAEDGALAKEKVDFEEGKMESDEEEEEHTTYSGDDKVSVDYLEIGDYIRVLPGMTPPTDCIVVQGGSTFDESALTGESRPVRHGQGDQIFAGTVNNGSGSLIAKVMALEGGSLLDQIVNVVREGQLHRAPIERVADRLTSVFVPIVTSLAIITWIIWLALGTTGSLPPHYLDIDLGGWVVWSLQFAISVFVVACPCGIGLAAPTALFVGTGLAAKYGILARGGGEAFQEGAKVDVVCFDKTGTLTEGGEPKITDEKVISYDTKEIFFLAKLIEQQSGHPLAVAVVNHVTDMNIELPGYSVTVEEVPGKGLKGSLSVPKTSSLGQAGVTEFLFGNERLIEENNAAISNEDAALLHRWKTEGKSVMLMALRPDGGNFALALIISAEDKIRPETPSVLKALQEQNIQTWMISGDNQITANAVAARIGIPADNVIGGVLPQEKAAKVQWLQKTAVSARSGKSTGRAIVAMVGDGVNDAPSLSTADVGIAIGSGADIAMSSAKFVLMRSELTSVLTLFDLSRAIFRRIKLNFAWALVYNCIGIPVAAGVIYPYNNSRLDPVWASLAMALSSVSVICSSLLLRLYRPPKVQFDAEVGDEGESIKSVHTNRKWKRRLAKIKNVKKLKNAGKRLETIEVVEE

SEQ ID NO: 55503 - DNA, 2802 bp, Yarrowia lipolytica CLIB122
  CDS (1)..(2802)
atgaaagaagctggtgatagctccacaacgccacctaagcccgacaccacctcggcttaccaggtcggcggcatgacatgcggatcgtgcgtctccgccatcatcaacggcctggaggcatgtcccggtgtcacagaagcagctgtgtctctggtcaccgaacgagccagtgtacaccacaacaagagcataatctccgccgaagagctgcaggaaagaatagaggactgcggcttcgacgcctcgctcatcgactcatcgccgatagctgcgcccgtcagcacacccatggaacgtctcaaggttaagatcttcggaatgacctgttccagttgtaccaacgcagtgcgagacactatccaggacattagaggcgtcgccaatgtcgtggttgctctcgcgactgaggaggccaccatttctttcaatccccaggaatgtggagctcgagacatcatcaacgccattgaagactgtggctttgagggcgtcctatctgcacagcaagataacgctacccaactagcaagcttatctcgaatcaaggagatacagaaatggcgaagcgacggtatccagtgtttcattcttggtctgcctgtgatgttgctcactcatattcttcccatggttggtctccagcctctgcatgatctaaccatcttcaagggcctgtacgtggacgatctcgtctgctttgtgctggcaacatacatccagttttggctgggccacaagttctatgtctcttcgcgacgagctctgtcccatggaactgccaccatggacgtgttggtggccatctccacctcctcagcctacttcttttctgtcttttccatgctctatgcgatcgccactgtggccgatactcaccctcatactctgtttgagacttcggcaatgctgattgccttcacgaccctcggaaaatacttggaaaatcgagccaagggacagacctcgggtgccctcagtaagcttatttccctgactcctaccactgccactattctcaaggactcctccaagtacgaccccagtattgtatacgacgagtctgccgagatggatattgctgccgagcttcttcagagaggtgatattgtcattctcaagcctggtgccaaggtacctgctgacggagtcgtcgtttccggtgaaacttatatcgatgagtctcttctcactggagagtctactcctgtggtccgaaaggttggagaccaggttgtgggtggctccattaacggctctgggcgtattgacttccgagtcgagcgtgctggtaaggatactgcccttgccaacattgtccggctagttgaggaggcccagacctctcaggccgagatccagcgatacgccgacaagatttccggagtctttgtgccatgtgttgttgctcttgccctgcttaccttcatcttctggattatcatgagcaacgtcatgaagcatcctcctaacgtcttttctctgcccgaaggaaagttcctcatctgtcttcgtctgtgcatctctgtcgtggtcgttgcttgtccctgtgctcttggtcttgccactcccacagcggtcatggtcggaactggtgttggagctactcatggtattcttgtaaagggcggagcagttttggaaaccgcttcaaagatcaagactgttgttttcgataagactggtacactcaccaccggccgaatgaccattcaaaaacacgtctttgagaaggatactctcaagaacctcaacatgaccgaaactgaaatgtggctaattctggctggcgtggaggcttcgtctgaacatcccattgcccagtctctagttcgacaggcgaaggaggctgcccaggttgaggatgttcccggtgtggctgactttgttgctattgttggtcagggtgttactggtgtagttgatggccacagtgttgctgttggctcttctgagcttgtcaactcgtcctgcaagtcgctggataagccccccgccacccctcactcccctgacaaccctgctactgtgatccatgcttgtgttgacggccagtatgtcggttacatggcctttgctgatagcgtcaagtccgacgctcgagctgcagtgtctgtgctcaagaagatgggaatcaacgtcgccatgatgaccggagacaaccacttcgttgcccacgctgttgctgatgaggtcggtatcccccgatccaatgtctgggcatcgacctcgcctgctcagaagctcgccatcatcgaacagctgcaggagccccaggaccccaacgaagctgctgactccacagatctgtctctaaatgcctctgtggttgccatggtcggcgatggtatcaacgactcgcctgccctggccaaggctgctattggaattgcaatgtcctccggaaccgacatcgccatggacgctgccgatattgtgctgctcaacaaggagagtctcatggacgtccctgcctccattaacctatcgcaggtcaccttccgacgaatcaaaatcaacctcgtgtgggcctccgtgtacaacctgattatgattccctttgctatgggctgcttcctgccattcaactttatgctgcaccccatggaggcatctgcagccatggcgctgagttccgtgtctgttattgtttcttctctggctctcaagaaatggcaaccccccaaggacaccgaatatggctctgacgagtggcgagacatggagagccagacagtcaaacccaagcggcgttggtggcagaagctctggagaagcgagggtgttcgatacgagcggctctag

SEQ ID NO: 55504 - protein, 933 aa, Yarrowia lipolytica CLIB122
MKEAGDSSTTPPKPDTTSAYQVGGMTCGSCVSAIINGLEACPGVTEAAVSLVTERASVHHNKSIISAEELQERIEDCGFDASLIDSSPIAAPVSTPMERLKVKIFGMTCSSCTNAVRDTIQDIRGVANVVVALATEEATISFNPQECGARDIINAIEDCGFEGVLSAQQDNATQLASLSRIKEIQKWRSDGIQCFILGLPVMLLTHILPMVGLQPLHDLTIFKGLYVDDLVCFVLATYIQFWLGHKFYVSSRRALSHGTATMDVLVAISTSSAYFFSVFSMLYAIATVADTHPHTLFETSAMLIAFTTLGKYLENRAKGQTSGALSKLISLTPTTATILKDSSKYDPSIVYDESAEMDIAAELLQRGDIVILKPGAKVPADGVVVSGETYIDESLLTGESTPVVRKVGDQVVGGSINGSGRIDFRVERAGKDTALANIVRLVEEAQTSQAEIQRYADKISGVFVPCVVALALLTFIFWIIMSNVMKHPPNVFSLPEGKFLICLRLCISVVVVACPCALGLATPTAVMVGTGVGATHGILVKGGAVLETASKIKTVVFDKTGTLTTGRMTIQKHVFEKDTLKNLNMTETEMWLILAGVEASSEHPIAQSLVRQAKEAAQVEDVPGVADFVAIVGQGVTGVVDGHSVAVGSSELVNSSCKSLDKPPATPHSPDNPATVIHACVDGQYVGYMAFADSVKSDARAAVSVLKKMGINVAMMTGDNHFVAHAVADEVGIPRSNVWASTSPAQKLAIIEQLQEPQDPNEAADSTDLSLNASVVAMVGDGINDSPALAKAAIGIAMSSGTDIAMDAADIVLLNKESLMDVPASINLSQVTFRRIKINLVWASVYNLIMIPFAMGCFLPFNFMLHPMEASAAMALSSVSVIVSSLALKKWQPPKDTEYGSDEWRDMESQTVKPKRRWWQKLWRSEGVRYERL

SEQ ID NO: 55505 - DNA, 3549 bp, Aspergillus nidulans FGSC A4
  CDS (1)..(3549)
atggcagtctccaatacgctagccgcccggggtggcgccctctctccgagccagacaacatcgcaaatggccacgaccacagttagtgtggagggaatgacatgcggcgcatgtacttctgccgttgagggcgctttcaacggcgtcgaaggtgccggtgaagtctccgtgagtttgatgatgagcagggccgtcatccaccacgatcccactctcctccctccaggtaaagtcgccgagattattgaagactgcggctttgatgcgactgtgatctccaccgacagttcgtcgattccgtcgcggagcgccagcgatcatggagcatctgaggcgaatgtcgtgacaacaacactggccgttgcaggaatgacttgcggggcctgcacctctgcagtggaaagcgggctggcagagaaccccggtgtacgatccgtcaatgtctcgctgctatcagagcgagcggtgattgagcatgatctgtcgacggtctccgctgagcagcttgccgagatagtggaggatcgtggctttggcgcaagggtcttagaaacctcgacatcccgggctggtcctcgcggatccgagtctacggatccctcgtctcagtcaatgaccactaccgttgctatcgagggtatgacatgcggcgcatgtacgtcaagtgtacaggcggcgtttgacggcgtggaaggtgtgattcaattcaacatcagcttgctcgccgaacgagcaatcatcacccataatcctcaaatacttccatctcggaaaattgtcgagatcatcgaagatgccggcttcgatgccaaggtcgtttctgaggtccaggcgcttggtcagaagggcgggccgactcaggtcacgcttgacgttcatggcttacgagatgctaattctgctgcagccctggaggactccttaatgcaaaagccggggataatctcagcgtcagtaacacttgccacctctcggctggttgtctcgtacgacacctctatggtcgggatccgtacaattgttgccgtcattgaagctgctggctgcaatgctttactagcggattctgatgacaagaacacgcagctagagtctttggcgaagacgaaagaggtcttggagtggagacgcgccttcctgttctcactatccttcgccatccctgtgttcttgataaacatgattcttccgatgtacctaccaacgctcgattttggcggtatccgaatcattccgggtctttacctcggcgactccgtgtgtctattactcacaattcctgtgcaattcggtatcggtaaacgcttctacatcacaagctataagtccttacggcaccgtgccccaaccatggatgttctcgttatgcttggcacttcagcagccttcttctacagtgttttcaccatgattgtagccatcgttattgaccctcaccaaagacccaacactgtctttgacacaagtactatgctcatcaccttcataacccttggtcggtggcttgagaacagggccaagggtcaaacgtccgctgctctttctcggcttatgtccctcgcaccatcaatgacgaccatttacgatgacccgatagccgccgagaagatggtagaagaatgggataaagttgacggccaagagcaaaaaacggctacaaacgaaatgtccaccgtctcacaaaaaatcatccccactgaactcattgaagtgggcgacattgtcgttctccatcccggcgacaaggttcctgctgatggagttgtcattcgaggagagacatatgtcgatgagagtatgatcactggtgaagcattgcctattcataaggcaaaaggaagcctggtcattgcgggaacagtgaatgggacaagcgcagttgacattaaggttattcgcactggcaaggacactcagctcagcaagattgtcaagctggtacaagacgctcaaacaagccgagcttccattcaacgcatggcggatatcgtcgctggctattttgtaccatcgattatcagccttgggttggttacattctttggctggatgtttgtgagccacttgctgcctcaccctccgaagatctttgtgacaaaagaaggcgggggtaaggtcatggtctgtcttaagctgtgcatctcagtcattgttttcgcctgtccgtgcgctctgggactcagcacccctacagcggtaatggtcggcacaggggttggtgccactcagggtatcctcgtcaagggcggtgctgtactcgaggctgctaccaagatcacacatgttgtgtatgacaagaccggtactttgacaaccggacagatgagtgtcaccgaggctagaattgagcctcactggagttcaagtgactggcgtcgtcgactctggtggttgattgttgggctggcggagatgaacagcgagcatcctattggcaaggcaatccacttggcagcaaagagtgaatcaggaaattcgggcgaaggtggacttccaggaagcttaggcgatttcgaagctcgcatcggcaagggcatagctgccttggttgagccagcttccggtgtcgaacgcgtccgctaccgtgtcctgattggaaatgctgcttttctgcaatcgcacagcgttgctgtcccagaatcagctgaaacgactccagatgcttccggttacaagaattcccgggtcggcatcacccaaatccacgtcgcaatcgacggtcacttcgccggcacgatagctctccaagataccgtcaaggtaaccgccgtagctgctgtagccgccctgcaccgaatgggaatctcgacctctttgattactggagactcccgcgcagcggccatctcaatcgcctcggctgttggcatcgcacccgaagccgtgcacgcctccgtctccccttccgataaacagtccatcatcgcatccctccaagagacaggcgatcgcgttgccatggtaggtgatggcatcaatgactcccccgccctggccaccgcgtctgtcggcatcgctctcgcctcaggcacagacgtcgccatggaagcagccgacatcgtactcatgcggcccgacgacctgctctcagtcccggctagtctcgccctttcccgttccgtcttcaaccgcatcaagctcaacctcgtttgggcctgtggttacaacattatcggcctgcccttcgcaatgggactcttcctaccctttggcgggtttatgctcccgccaatggctgccggtgcggcaatggcgctttccagtgtctccgttgtagtaagcagtctcctcttaaaattctggagacgaccctcatggatggacgcggagctgctggagaaggaggttggcatagcgtcggatggcaattctcggaagaattggctcggggctacgctctttacgtcccctaacaagactcgtcgcgctgcccagtgggctcagggcatcggtgctagggtctggtccgtctttactggacgccctagtcagtcggcgagtatagagcctagctatgtgcctctgcagacggtagaacccgccgtctag

SEQ ID NO: 55506 - protein, 1182 aa, Aspergillus nidulans FGSC A4
MAVSNTLAARGGALSPSQTTSQMATTTVSVEGMTCGACTSAVEGAFNGVEGAGEVSVSLMMSRAVIHHDPTLLPPGKVAEIIEDCGFDATVISTDSSSIPSRSASDHGASEANVVTTTLAVAGMTCGACTSAVESGLAENPGVRSVNVSLLSERAVIEHDLSTVSAEQLAEIVEDRGFGARVLETSTSRAGPRGSESTDPSSQSMTTTVAIEGMTCGACTSSVQAAFDGVEGVIQFNISLLAERAIITHNPQILPSRKIVEIIEDAGFDAKVVSEVQALGQKGGPTQVTLDVHGLRDANSAAALEDSLMQKPGIISASVTLATSRLVVSYDTSMVGIRTIVAVIEAAGCNALLADSDDKNTQLESLAKTKEVLEWRRAFLFSLSFAIPVFLINMILPMYLPTLDFGGIRIIPGLYLGDSVCLLLTIPVQFGIGKRFYITSYKSLRHRAPTMDVLVMLGTSAAFFYSVFTMIVAIVIDPHQRPNTVFDTSTMLITFITLGRWLENRAKGQTSAALSRLMSLAPSMTTIYDDPIAAEKMVEEWDKVDGQEQKTATNEMSTVSQKIIPTELIEVGDIVVLHPGDKVPADGVVIRGETYVDESMITGEALPIHKAKGSLVIAGTVNGTSAVDIKVIRTGKDTQLSKIVKLVQDAQTSRASIQRMADIVAGYFVPSIISLGLVTFFGWMFVSHLLPHPPKIFVTKEGGGKVMVCLKLCISVIVFACPCALGLSTPTAVMVGTGVGATQGILVKGGAVLEAATKITHVVYDKTGTLTTGQMSVTEARIEPHWSSSDWRRRLWWLIVGLAEMNSEHPIGKAIHLAAKSESGNSGEGGLPGSLGDFEARIGKGIAALVEPASGVERVRYRVLIGNAAFLQSHSVAVPESAETTPDASGYKNSRVGITQIHVAIDGHFAGTIALQDTVKVTAVAAVAALHRMGISTSLITGDSRAAAISIASAVGIAPEAVHASVSPSDKQSIIASLQETGDRVAMVGDGINDSPALATASVGIALASGTDVAMEAADIVLMRPDDLLSVPASLALSRSVFNRIKLNLVWACGYNIIGLPFAMGLFLPFGGFMLPPMAAGAAMALSSVSVVVSSLLLKFWRRPSWMDAELLEKEVGIASDGNSRKNWLGATLFTSPNKTRRAAQWAQGIGARVWSVFTGRPSQSASIEPSYVPLQTVEPAV

SEQ ID NO: 55507 - DNA, 3171 bp, Ustilago maydis 521
  CDS (1)..(3171)
atgtcgccaacagccccactcctcgaggaacctcaggcttccggctcaacttcgccacccatgggtgcaaaagtaacagcgacatttcagatcggaggaatgacatgcggtgcgtgcgtcgaaaccattgaaagaatgatacgttcgcagccgggcatcgagtccatctctgtcgctctgttggccgagaaagcaactatcacctttgacgattccatatggtcgctcgacaaggtggctgaggagatcgaggacaccggcttcgatgcgaccttcctcgaggtcctccgcacagagcgaccagatgccggtttcgcttccaaggaggcttcctccgaccccgtaccgcggcttgatacggtacaactcagtgtctacggtatgacatgtgcgtcttgctcttccaccatcgaacgcgaaacagccaaaatcgacgggataaggtcaatatcggtatcactgtcaaccgagaaagcggcgatcgtctacgaccctagtaaacttggtattcgtgatctgatcgaacacatcgaagacctcggcttcgatgcggtcgtaagtgacgatcgcaactcaacacagctggcatcgctcggaaggatcaaggagattgcagaatggcgctcggctttcctcttctcgctttcgatgggcctgcctgtctttttcctttccatggtgctgcccaaattttcagtcacacacgccatcctatggtggcagccgatttcgggcttctatctccaagacctcatatgcttggcactcacgattcccgtacaatttggcatcggcctgcgcttctaccgcacttcatggaaagcaatcaagcatggcagcgcaaccatggacgtcctcatcgtcatcggtactaccgcttcgtggacgttcagcgtcttttccatgatcgcaagactgttctgtgttgatgaacttgcaactgcgaccaaggaggcggcctcaatcgtcgcgcgtagttcgggtatgatcgacatgatggtaccaggccagtgcacaaaaccggccacattcttcgacacgaccacgatgctcttcaccttcgtctcgttcggccgatttctggaaaacacagccaaaggaaaaacaagcgaggctctctcacgcctcatcggcctcacgcctacctcggctaccatctatacagatggcgccgagggcaagattgagaagaaggtggcatcggaacttgtccaacgtggcgactacgtcaaagtggtgccaggagagaggattgtcgccgacggtgtcattgtgcgtggcgagtcgactgtggacgagtctatggtcactggcgaagctgttcctatccacaagctgagaggcagcagcgtcattggtggtacggtcaacggcacaggaacctttgactttttagtccagcgcgccggaaaagatacgagtctggctcagatcgtcaagctcgttgacgaggcgcagacatccaaagcacccatccaagcatttgcggatcgagtcgcaggctactttgtaccgacagtggtgggccttggagcactcacgtttgttgcatggatggtgattgcacatctgctttcgggccacatgctcccatccatcttcaaccagcaaggcgtgaccaagttcatggtctgtctcaagctctgcatcagcgtcatcgttgttgcatgtccgtgcgcgttgggtctctcgacaccgacagcagtcatggtcggtactggcgtgggggcgcagaacggcattcttatcaaaggcggaggaccgctcgaagcttcaaccaccatccgtcgcatgctctttgacaagacaggcacgcttacggttggaaagctcaccttaagccaggtgatatggcccaatggagaggaaggtggtctcgacaacatcgccgttggcggtctttcgcgtcgtcaagtgattcgcatcatcggtgctgctgaaacgcgttccgagcatccgcttgcacgcgccatcgcctcgtgggcggcaagtcaactcgagaccggcatcacagctgtcgacgagcaagcagacatcgtgatgtcaggtaccagcatcgaagcgttccaaagtttcacgggtaaaggcgttgtctgtcgggtacagctggaggagaccatgacgttgcacgaggtgcgaatcggaactcccgaattcatcttgtcggatgaaaagcacgctctcgaccacaccgaattcgggagccaagcaaccgaggtgctttcccagcaacagtcacaggggcgaacagcggtgctagcaagcgtcgatggcacccttgcggccgttcttagcttaagtgacaggttgaaaccagaggccaagcagacgcttggcgcacttcggcgcatgggcatccagtgcagcatggtgaccggcgatgcatatgctacagcacgtgctctggcccgcgagctaggtatggacgagcagaatgacgtctatgccgagatgagcccgatcgacaagcaggagatcatcttgcagcttcgaagagaatcgagagttgcggatcttgaaagtggtgaaacgttctcgcccttccgagccaacggtcgatccaaatctggcgggatcgctatggtcggtgacggtatcaatgattctcctgcgctggcatctgctgatctcgggattgcactaggcacgggatcagacgtggcgatcgaagcagcctcgatcgtactcatgcgatccagcttgctcgacgtagccgcatcgatccacctatcgcgccgcatcttccgacaaatcaagctcaactttatctgggctaccgtctacaacatgatcggaattcctcttgcgatgggcatcttcctgccctgggggttgagcttgcatccgatgatggcaggagcagccatggcattttccagcgtcagtgttgtggccagctcgttgacgttgaaatggtacaagcgtccagccgaactcactctgcctacagaagtcgagacgccagattcgatccagttgcaagagatgctcgctcgttccgatgcaggagcgcttgatcgagtcgtggcaaatctaaaagatgtgggctatcaggtgttgggcaagttcgagtcgattctgtccaagtctcgtctcagcttggggagagggtcgtcgaggagacccgctcagaccgagggttatcagcaggtggcttccgacgatgtttag

SEQ ID NO: 55508 - protein, 1056 aa, Ustilago maydis 521
MSPTAPLLEEPQASGSTSPPMGAKVTATFQIGGMTCGACVETIERMIRSQPGIESISVALLAEKATITFDDSIWSLDKVAEEIEDTGFDATFLEVLRTERPDAGFASKEASSDPVPRLDTVQLSVYGMTCASCSSTIERETAKIDGIRSISVSLSTEKAAIVYDPSKLGIRDLIEHIEDLGFDAVVSDDRNSTQLASLGRIKEIAEWRSAFLFSLSMGLPVFFLSMVLPKFSVTHAILWWQPISGFYLQDLICLALTIPVQFGIGLRFYRTSWKAIKHGSATMDVLIVIGTTASWTFSVFSMIARLFCVDELATATKEAASIVARSSGMIDMMVPGQCTKPATFFDTTTMLFTFVSFGRFLENTAKGKTSEALSRLIGLTPTSATIYTDGAEGKIEKKVASELVQRGDYVKVVPGERIVADGVIVRGESTVDESMVTGEAVPIHKLRGSSVIGGTVNGTGTFDFLVQRAGKDTSLAQIVKLVDEAQTSKAPIQAFADRVAGYFVPTVVGLGALTFVAWMVIAHLLSGHMLPSIFNQQGVTKFMVCLKLCISVIVVACPCALGLSTPTAVMVGTGVGAQNGILIKGGGPLEASTTIRRMLFDKTGTLTVGKLTLSQVIWPNGEEGGLDNIAVGGLSRRQVIRIIGAAETRSEHPLARAIASWAASQLETGITAVDEQADIVMSGTSIEAFQSFTGKGVVCRVQLEETMTLHEVRIGTPEFILSDEKHALDHTEFGSQATEVLSQQQSQGRTAVLASVDGTLAAVLSLSDRLKPEAKQTLGALRRMGIQCSMVTGDAYATARALARELGMDEQNDVYAEMSPIDKQEIILQLRRESRVADLESGETFSPFRANGRSKSGGIAMVGDGINDSPALASADLGIALGTGSDVAIEAASIVLMRSSLLDVAASIHLSRRIFRQIKLNFIWATVYNMIGIPLAMGIFLPWGLSLHPMMAGAAMAFSSVSVVASSLTLKWYKRPAELTLPTEVETPDSIQLQEMLARSDAGALDRVVANLKDVGYQVLGKFESILSKSRLSLGRGSSRRPAQTEGYQQVASDDV

SEQ ID NO: 55509 - DNA, 3591 bp, Tribolium castaneum
  CDS (1)..(3591)
atgttcaaggcgctcagaggggcgaagccccagtacgtcaggcttgaagcggacgccaccgaatccctcggtttcgagccccttatcaacgaaaaatcgaccgaaagtgaatcggtctcactgctggcccccacaggcgactacacctccgaccaaccaacaataatcacagtgtcagaagatgacacgattaaaatcaccgtcttgggcatgacgtgccaaagctgtgtcaaaaacatcgaagagaccctgagtcgtaaacccggcatttacaacatcaaagtcagccttcaggaaaaagccgctctagtccattatgacacacgccaactgacaccgcaacaaatatgcgattttatcgacgatatgggtttcgaagcaacacttccaggtgcgaaaatgcgtcaatgcctcgtccatatcgacggcatgacgtgcaaatcatgcgtgcaaagcattgaaggcatgatatcggccaaaccaggcattaaaacagcaagcgttgacttggaaacaaaagaagggcggtttgagtacgaccctggattagtcaaagccgaggaaattgccgaacagatcgatgatatgggctttgaggcttcccttaaatcagttgatgggaaaccagtagctaaagccgcccctgaccaccgtcaaacccagccaatcccaagcgacctcaaccttgaaaaatgtcagttgcaagtcaaaggcatgacttgtggtagttgtgtggcagcgattgaaaaacacgtgaaaaagatcgccgggtgccacaaaattctagtttcgttactcgccgctagggcagaaatccattatgatccgtcgctagtgtcgccgtttgaattagcgacctgtattaccgacctggggtttccggctagtgttgttcaagaatcgggtgctggagcttcggaagttgatttggagataacggggatgacgtgtgcgagttgtgtgcacaaaatcgagacaaatatcgctcgattacagggcgttttgagtgcgaaagttgctctcacgacgaagcgcggcaaattcaaatatgatcctgaggtgacaggagcgcgtgatataatcgaagcgatcgctaaattggggttcgaggctcgacttttcgatcgtgatcatggtaatgattatttggaacagaaggaggagattaggaggtggaaacatgcgtttttgttttcgttggcgttcggtgggccctctatgatcgcaatgatgtatttcatgacgctgatgtcaagtgggcatatgtcgcacgaggatatgtgttgtgtgattcccggactttcgctcgagaatttgataatgtgggtattatcaactcctgttttattactcggggggcggcattttttcgtccaagcttacaaagcactaaaacatcggacgaccaacatggacgttttgatcgcaatggctacttcgatttcgtacacttatagtgtcatcgtggtcatagccgccatgattatgagacaaaaaacttcacctcagactttttttgacacgcctcctatgctactggtctttattagtttaggccgatggttggaacatgtcgctaaaggcaaaacatccgaagctttatcgaaattattatcactcaaagccacagatgcggttttagtaaaattggggcccaagggcgaaatttcaaatgagacacttgttcacgtcgatttggtgcaacgtggggatgttttaaaagtggtaccgggggccaaagtaccagtcgacggcaaagttttacagggccaatcaatgtgcgacgagagcctcataactggggaaagcatgccggtaccgaagaaaatcacaagtagtgtgattggtggatcaatcaatcagcacggcctacttataatcgaagccacacatacaggagaggcaacaaccctatcacaaattgtcaaattggtcgaagaagcacaaacgtcaaaagcacccatccaacaattggccgataaaatcgctggttatttcgtcccaactgtcgtcttcctgtcacttttgacacttattgtctggtctattatcggctcaatcgatataaacgcacttccggtgaccgaaagtgaaaaacacgattttaccaaaactgggattattctccaattcgttttccggtgcgcgttaagtgtgctcgcgattgcgtgtccgtgtgcgttaggtttggccacgcccactgccgtcatggtggggactggcatcggtgctgtgaatggtattttaatcaaaggggcggaaccgttagaaaacgcccacaaagttaaagcaatcatgtttgataaaaccggaactattacaaaaggcgtaccggaagtaacacgtgtttggctcaaaggtgactctttaagccccgccttgattttggcagcggtcggttgtgccgaaacaaattccgaacatccgatcgcttctgcgattatcaaatacgtgagggaggcgattggggcggagctaacggggactagtagtgcgttccaggcggtgccagggtgtggcttgaaatgtacggtctcgtcgttgggtcaagtggtcaaaaatgcgaaaaattgccaagagatgagtaattttatgacgttggtgggggcggggagttcgggcgtgtttacgttgaatggggtcgaagtcgaggttagcaacagtcagagtatgaaactgggacagttgattggcatggaggcggggtctggcgaaggggaggggcgctacgaggttgttataggcaaccgggagtggatgaatcggaatgggctggtcgtgacggaggaagttgataagaaaatgatcggggaggaggagcaaggcaggtcggcggtgctctgcgtcattgatggcgaaatcgttgccatggttagcgtggccgacatggtgaagcccgaagcccacttggccgtttactcgctcaaaaaaatgggtctcgaggttatacttttgaccggtgataaccgccaaaccgccgccagtatcgcaagacaagtcggtatcaagaaagtctacgctgaagtgcttccgtcacataaagtcgcacgtgtccaaagactccagtctcgcggtattaaagtggcaatggtgggcgatggggttaatgatagccccgccttggcgcaagctgacgtagggatggcgatcgccgctggcacggatgttgccgttgaagccgctcatgtcgtacttatgaggaacgatctcttggacgtggtcgcctgtctcgaactgtcccgaaagactgtcaatcgcatccgattgaatttcctcttcgcgtccgtttataatttgttggggattcccctggcggctggtgcttttagttttatagggtttacgttggcaccgtggatggcgagtgccgcgatggctttgagtagtgtctcggtggttggatcgagtcttttattgaaattgtggaaaaaaccgacagttagggatttgcaaactgaggagtatttagccgaacgaaattcgggagaactcgattcgatttcgattcatcgggggttggatgatatcgaacagaatggagcgccatctatatcaaggtatatgaggcaatgtaacgaatacattttataa

SEQ ID NO: 55510 - protein, 1196 aa, Tribolium castaneum
MFKALRGAKPQYVRLEADATESLGFEPLINEKSTESESVSLLAPTGDYTSDQPTIITVSEDDTIKITVLGMTCQSCVKNIEETLSRKPGIYNIKVSLQEKAALVHYDTRQLTPQQICDFIDDMGFEATLPGAKMRQCLVHIDGMTCKSCVQSIEGMISAKPGIKTASVDLETKEGRFEYDPGLVKAEEIAEQIDDMGFEASLKSVDGKPVAKAAPDHRQTQPIPSDLNLEKCQLQVKGMTCGSCVAAIEKHVKKIAGCHKILVSLLAARAEIHYDPSLVSPFELATCITDLGFPASVVQESGAGASEVDLEITGMTCASCVHKIETNIARLQGVLSAKVALTTKRGKFKYDPEVTGARDIIEAIAKLGFEARLFDRDHGNDYLEQKEEIRRWKHAFLFSLAFGGPSMIAMMYFMTLMSSGHMSHEDMCCVIPGLSLENLIMWVLSTPVLLLGGRHFFVQAYKALKHRTTNMDVLIAMATSISYTYSVIVVIAAMIMRQKTSPQTFFDTPPMLLVFISLGRWLEHVAKGKTSEALSKLLSLKATDAVLVKLGPKGEISNETLVHVDLVQRGDVLKVVPGAKVPVDGKVLQGQSMCDESLITGESMPVPKKITSSVIGGSINQHGLLIIEATHTGEATTLSQIVKLVEEAQTSKAPIQQLADKIAGYFVPTVVFLSLLTLIVWSIIGSIDINALPVTESEKHDFTKTGIILQFVFRCALSVLAIACPCALGLATPTAVMVGTGIGAVNGILIKGAEPLENAHKVKAIMFDKTGTITKGVPEVTRVWLKGDSLSPALILAAVGCAETNSEHPIASAIIKYVREAIGAELTGTSSAFQAVPGCGLKCTVSSLGQVVKNAKNCQEMSNFMTLVGAGSSGVFTLNGVEVEVSNSQSMKLGQLIGMEAGSGEGEGRYEVVIGNREWMNRNGLVVTEEVDKKMIGEEEQGRSAVLCVIDGEIVAMVSVADMVKPEAHLAVYSLKKMGLEVILLTGDNRQTAASIARQVGIKKVYAEVLPSHKVARVQRLQSRGIKVAMVGDGVNDSPALAQADVGMAIAAGTDVAVEAAHVVLMRNDLLDVVACLELSRKTVNRIRLNFLFASVYNLLGIPLAAGAFSFIGFTLAPWMASAAMALSSVSVVGSSLLLKLWKKPTVRDLQTEEYLAERNSGELDSISIHRGLDDIEQNGAPSISRYMRQCNEYIL

SEQ ID NO: 55511 - DNA, 2232 bp, Clostridium thermocellum ATCC 27405
  CDS (1)..(2232): transl_table=11
atggacggaaaaggattgtcggtaaaaaatcaaaatatggcgaaagttgagcttaaaatatcgggaatgtcctgtgctgcgtgtagtgcaagaattgaaaaaagactgaataaagttgccggagtggccaaagcatccgtaaaccttgcgacggaaagggccaacattgagtatgacgcggacaaagtcaaaacggatgatttgattaaaattgtggacgaccttggctataaggccgaaaggattgaaaatatctcaaaagaccgtgaaaaagagcagagggagaaggaaataaagaagcttaaggcagaacttattgcttctgccattttaagttctccgctgatactggcaatggttttcatgctcacaggtattgatgttcctttcctgcacaatgaatatttccagcttgtgattgcaactccggtgcagtttattattggacttaggttctacaggaatgcttaccatgccataaaagcaagaagcgccaacatggacgtgctgattgcaatgggaacatcggcggcttattttttcagtgtgtacaatgctttctttgctcatccggtggaaatgggcatgatgaaagagctgtattttgaagcaagcagtacgattattacgctgattcttcttggaaagtaccttgaggctgtcgccaaaggaaaaacttcagaagccattaagaaactcatgggccttcaggcaaagaccgcaagggttgtaagaaatggtgttgaagaggatattccggtggaagaggtgcaagttggagatattattgttgtgcggcccggtgagaaaattccggtggacggaaggataattgaaggaaattcctccgtcgatgaatcgatgctgaccggtgaaagcctgccggtggagaaaaaggtcggagattttgtaaccggtgcgaccataaacaaattcggtacattcaagtttgaagccaccaaagtcggaaaagacacggttctttcccagattatcaaaatggtggaggatgcccagggttcaaaggctcccattcaaaaaatcgccgaccgggtatccggcatctttgtacctgcagtcattggaatagctgttgtaacctttgcggcgtggtacctggcaaccggcgaactgaattcagccattgtaaatgctgtgtcggtactggttattgcctgcccctgcgcccttggactggcaacaccgaccgccatcatggtgggaaccggaaaaggagcggaaaagggcatactgataaaaggcggcgaacacctggagatggcatacaagcttaattccgttgtattggacaaaaccggaacaataacaaagggcaaacctgaagttactgatatcattcccttgggaagtatggaaaagaacgaaattgtgaaactttccgccgtcgctgagaaggcatcggaacatcctttgggagttgccatatatgagaagggtaaaagcgaatttggagccataccggatccggcaaagtttgaagcaattcccggaaggggtgttgcggcagtattcgatgataagaacatatatattggcacaagaaaacttatgaaagaaaaaggacttgatatttcgaaaatagagtccgatattgcaaaactcgaagacgaaggcaaaactgcaatgcttatggcggtagatgatcgggtggaagcaatcctggccgttgcggataccgtgaaggagcactccggggaagcaatagagcagcttttgaaaatgggaattgacgtgtatatgattacaggcgataatgaaagaacggcaaaggctattgcaaaacaggtgggaataaccaatgtgctggctgaagttttgcctgaaaacaaagcggaggaagttgagaaacttaaaaaacagggcagaattgtcggaatggtgggagacggcattaatgacgccccggcccttgcaacggcggatattggaatggctatcggcacaggaacggatgttgccatggaagctgcggatattacccttatgagaggggatttgagagcaataccgactgccataaagctgtccagaagaacaatgaggaaaatcaagcagaatcttttctgggcgtttatatacaatataatcggcattccctttgcagcctttggcctgcttagtccgattattgcgggagcggccatggcctttagctccgtgtcggttgtaaccaattctttaagcttgaaaagatacgacccggaaaagtaa

SEQ ID NO: 55512 - protein, 743 aa, Clostridium thermocellum ATCC 27405
MDGKGLSVKNQNMAKVELKISGMSCAACSARIEKRLNKVAGVAKASVNLATERANIEYDADKVKTDDLIKIVDDLGYKAERIENISKDREKEQREKEIKKLKAELIASAILSSPLILAMVFMLTGIDVPFLHNEYFQLVIATPVQFIIGLRFYRNAYHAIKARSANMDVLIAMGTSAAYFFSVYNAFFAHPVEMGMMKELYFEASSTIITLILLGKYLEAVAKGKTSEAIKKLMGLQAKTARVVRNGVEEDIPVEEVQVGDIIVVRPGEKIPVDGRIIEGNSSVDESMLTGESLPVEKKVGDFVTGATINKFGTFKFEATKVGKDTVLSQIIKMVEDAQGSKAPIQKIADRVSGIFVPAVIGIAVVTFAAWYLATGELNSAIVNAVSVLVIACPCALGLATPTAIMVGTGKGAEKGILIKGGEHLEMAYKLNSVVLDKTGTITKGKPEVTDIIPLGSMEKNEIVKLSAVAEKASEHPLGVAIYEKGKSEFGAIPDPAKFEAIPGRGVAAVFDDKNIYIGTRKLMKEKGLDISKIESDIAKLEDEGKTAMLMAVDDRVEAILAVADTVKEHSGEAIEQLLKMGIDVYMITGDNERTAKAIAKQVGITNVLAEVLPENKAEEVEKLKKQGRIVGMVGDGINDAPALATADIGMAIGTGTDVAMEAADITLMRGDLRAIPTAIKLSRRTMRKIKQNLFWAFIYNIIGIPFAAFGLLSPIIAGAAMAFSSVSVVTNSLSLKRYDPEK

SEQ ID NO: 55513 - DNA, 2448 bp, Herminiimonas arsenicoxydans
  CDS (1)..(2448): transl_table=11
atgagcagcccagccgtatccgacagcatccaccgcattacgctagacgtagccggcatgacctgcgcttcctgcgccggtcgcgtggaaaaagccatcaacgcgattcccggcgtgacgaaaaccagcgtgaatctggctaccgatagcgtcgcggttgaagtggatcatgcagccgctgtcgatgcggcaacagtgcaacaggcaattgaaaaagccggttacagcgtgccgcagcaggaaatcgagctggatattaccggcatgacctgcgcttcctgcgccggccgggtggaaaaagccttgcgcaaggtcgatggcgtactcgatgccagcatcaatctcgccacagatcgcgcacgcatcaaggtcagcggtgcaacatcggcagcggccctgattgccgccgtagatggcgccggttacggcgccgccttgccgcgcgagccgtcgggcgcggcctcctccaccagcactgcgacatccggagactggctgccggttgtgctgtctgcactgctggccatccccttggttctacccatgctgctggagccgttcggcgtgcacttcatgctgccgggctggctgcaatgggcgctggccacgccggtgcaattctggctgggcgcacgtttttacaaggccggctggcatgccgtcaaggccggcaccggcaatatggatttgctggttgcgctcggcaccagcgccgcctatggcttgagcatctatctgctgctgacggcgatgccggatcagatgccgcatctgtattttgaagccgcagtcgtggtgatcacgctgatcctgctcggcaagtggctggaagcacgcgccaagaagcagactgcatcagccatacgcgcgctgcaaaaactgcgtcccgaatcggcccgcgtgcggcgcggcggcaacgatatcgatgtcgccatcaatgcggtgcgggtcggcgatatcgtcgtcgtgcgtcccggcgaacggatcgcggtcgacggcaccgtacttgaaggcagcagccaggtcgatgaatcgctgatcaccggcgagagcctgccggtattgaaacaggtcggcgataaagtcacaggcgcagccatcaatgccgacggcgtgctgctggtgcgcaccgacgccatcggcgcagaaaccaccttgtcgcgcatcatccgcatggtggaaaacgcacaatcggaaaaagcgcccatccagcgtctggtcgacaaggtcagcgcgatcttcgtgccggtagtgctggcgattgccctgttcacctttatcggctggtggctggccggcagcagcatggaaaccgccatcatcaacgccgtcaccgtgctggtcatcgcctgcccatgcgcactcggattggccaccccgactgccatcatggcaggcaccggcgtggccgccagatacggcatcctgatcaaggatgcggaagcgctggaaatcgcgcatcgcatcacgaccgtcgtattcgacaagaccggcacgctgacgcaaggcaaaccgcaggtcagcgaatttctgaccaatggcatcgctgaagacaagctgctgcaactggccgccgccatccagcgcgacagtgagcatccgctcggacgcgccgtggttgaacgggcggcggcacggcaccttgcactgctggagtcgactgccgtccaggccctgcccggtcgcggcatgcaggcaacggtcgaaggccgtccgctgcagctaggcaatgcacgtctgatgggcgagctcggcatcgacatgacgcagtttgcacaacgtgctcagcaactggaagaaagcggccacaccgtgtcatggctggcagaaaccggcgcgcaagcaggcgtgctcggcctgattgcctttcgcgacacgatcaagcacagcgcgccgcaggcagtggaacgcctgcatgcactgggcattcaaaccatactgctgaccggcgacaatcagggcaacgccaatgcagtcggcagacagctcggcatagaccgcgtgctggcgcaagtgctgccgggcgacaagagcgcaaagatcagcgcactgcaggacgaaggccagatcgtcgcaatggtcggcgacggcatcaacgatgcgccggcactggccgccgcccatgtcggcatcgccatggcgaccggcaccgatgtggcgatgcatgcagcaggcattaccctgatgcgcggcgatccggcgctggtcgccgatgccatcgatatctcgcgccgcacctacaacaagatcaggcaaaacctgttctgggcatttatctacaatctggtcggcatcccgctggcggcattcggcttgctgaatccgatgtttgccggcgcggccatggccttcagttcggtcagcgtgatcagcaatgccctgctgttgcgacgctggcagccggcgaccggcgaagcgcgcaagacactgtcaacgcataccgtttga

SEQ ID NO: 55514 - protein, 815 aa, Herminiimonas arsenicoxydans
MSSPAVSDSIHRITLDVAGMTCASCAGRVEKAINAIPGVTKTSVNLATDSVAVEVDHAAAVDAATVQQAIEKAGYSVPQQEIELDITGMTCASCAGRVEKALRKVDGVLDASINLATDRARIKVSGATSAAALIAAVDGAGYGAALPREPSGAASSTSTATSGDWLPVVLSALLAIPLVLPMLLEPFGVHFMLPGWLQWALATPVQFWLGARFYKAGWHAVKAGTGNMDLLVALGTSAAYGLSIYLLLTAMPDQMPHLYFEAAVVVITLILLGKWLEARAKKQTASAIRALQKLRPESARVRRGGNDIDVAINAVRVGDIVVVRPGERIAVDGTVLEGSSQVDESLITGESLPVLKQVGDKVTGAAINADGVLLVRTDAIGAETTLSRIIRMVENAQSEKAPIQRLVDKVSAIFVPVVLAIALFTFIGWWLAGSSMETAIINAVTVLVIACPCALGLATPTAIMAGTGVAARYGILIKDAEALEIAHRITTVVFDKTGTLTQGKPQVSEFLTNGIAEDKLLQLAAAIQRDSEHPLGRAVVERAAARHLALLESTAVQALPGRGMQATVEGRPLQLGNARLMGELGIDMTQFAQRAQQLEESGHTVSWLAETGAQAGVLGLIAFRDTIKHSAPQAVERLHALGIQTILLTGDNQGNANAVGRQLGIDRVLAQVLPGDKSAKISALQDEGQIVAMVGDGINDAPALAAAHVGIAMATGTDVAMHAAGITLMRGDPALVADAIDISRRTYNKIRQNLFWAFIYNLVGIPLAAFGLLNPMFAGAAMAFSSVSVISNALLLRRWQPATGEARKTLSTHTV

SEQ ID NO: 55515 - DNA, 2232 bp, Streptococcus pyogenes str. Manfredo
  CDS (1)..(2232): transl_table=11
atggctaaagagatatttttagtggagggaatgagttgtgcctcttgtgctctaacaattgaaaaaacggtcaatcaattgcctgaggtagaacaggctgttgtgaatttagcgactgagaagctcacggttacttatcaagatgacgatttagaaacggccaaagttattcaagcggtaaaagctgctggttatggtgcacaagtctttgatgaacatgcaaaacatatgcaaacaggtcgtcgtgacgaagacctaaaggttatttggtctcaggtcttgtggtctgccctattcaccattcctatattatacctagctatgggtcacatggtgggcttatggcttcctccatttatgcaaccagatcgctatcctttcgtttacagctttagtcagctactcttgacgattccagtcttagtattaaatcgtcattattaccataatgggtttgaagctttgtttaagggacatcctaatatggactccttggtagctttagcaaccagctttgcttttgcttatagtctttatggagtggttgaaatcagtttgggccaggcgcactttgtgcactccctttattttgaatcggtggtagtgattttgacactcatcggtctaggaaagtattttgaaagtcgttctaagggccgtacttctcaagctattcaaaagctcctatccttgaaggctactgatgtgagggtatggagaaacagccaatggcaattgttaccattagaagaagttagctatgatgaccttgtcctggttcaaccaggtgaaaaagtttctattgacggtattatcgtggaaggacatagcagtttggatgaatcctttttaactggggaaagtttgcctgttgaaaagggagaaaaagataatgtctttgcgggcagcttgaatgggccaggtgccctcacgattaaaccagataagcttgggaatgataccttgttagcacaaattatccaactagttgagaatgctcaagaaaataaagcacctattgcagctattgctgatagagtctcaggtgtctttgttccggtggttttggtattagctctgttaacaggggtattttggttggtattcatgcaggaaagttttcgttttagtttgacaacagccatcgctgttctagtcattgcttgtccttgtgcgcttggtttagcaactccgacagcgattatggttggaacagggcgtgcagctgaaaatggtattctttttaaaggtggtgacatcttagaacaagctcatcaggtagatacggttgtttttgataaaacggggacggttacggaggggaaaccaagtcttcaaaagctcctaattttttcgggagatgatcaccttatcttgcaagaagctgcttccttggaggcctattctcaacaccccttaggggaggctattgttcgtgctgctcaggaagctggttacgatagtctaccagtggaagagtttgagtctttaaccggcctaggagtcactggtcagcttgaagggcgtcgtttggcgattggaaatgctgctttaatgggaattcttggtatcgatttatcttgtgttcagtcagtttgtgctaaggcttcaggaaaaggccaaacccttgtatattatgctaaagaggggcagctacgagctcttttcagtattgctgacgctgtcaaagaagatagtcaagctaccgtcgaagctttgcatcaactgggaattcacaccatcatgctaacaggtgaccacgatgctaccgctaaggctattgcctctcaagtggggattacagatgtgatcagtcaagtcttacctgatcaaaaagcaggcgtgatagcagacctccgctctcaagggagaaaagttgcaatggtaggtgatggtattaatgatgctccggcattggctgtagcagacattgggatagctatggggtcagggacagatattgccattgaatcggcggatgtgattctgatgaaacctgatatgctggatttggtgaaagctatgtcattgagtcgagcgactatgagaattgtcaaggaaaatttattttgggcattcatttacaatgtcctcatgattccagtggccatgggcttacttcatctttttggaggtccactattgaacccgatgttagcaggttttgccatgagttttagttcagtatcagttgttttgaatgcattgcgtttaaaaggaaaaaccatttga

SEQ ID NO: 55516 - protein, 743 aa, Streptococcus pyogenes str. Manfredo
MAKEIFLVEGMSCASCALTIEKTVNQLPEVEQAVVNLATEKLTVTYQDDDLETAKVIQAVKAAGYGAQVFDEHAKHMQTGRRDEDLKVIWSQVLWSALFTIPILYLAMGHMVGLWLPPFMQPDRYPFVYSFSQLLLTIPVLVLNRHYYHNGFEALFKGHPNMDSLVALATSFAFAYSLYGVVEISLGQAHFVHSLYFESVVVILTLIGLGKYFESRSKGRTSQAIQKLLSLKATDVRVWRNSQWQLLPLEEVSYDDLVLVQPGEKVSIDGIIVEGHSSLDESFLTGESLPVEKGEKDNVFAGSLNGPGALTIKPDKLGNDTLLAQIIQLVENAQENKAPIAAIADRVSGVFVPVVLVLALLTGVFWLVFMQESFRFSLTTAIAVLVIACPCALGLATPTAIMVGTGRAAENGILFKGGDILEQAHQVDTVVFDKTGTVTEGKPSLQKLLIFSGDDHLILQEAASLEAYSQHPLGEAIVRAAQEAGYDSLPVEEFESLTGLGVTGQLEGRRLAIGNAALMGILGIDLSCVQSVCAKASGKGQTLVYYAKEGQLRALFSIADAVKEDSQATVEALHQLGIHTIMLTGDHDATAKAIASQVGITDVISQVLPDQKAGVIADLRSQGRKVAMVGDGINDAPALAVADIGIAMGSGTDIAIESADVILMKPDMLDLVKAMSLSRATMRIVKENLFWAFIYNVLMIPVAMGLLHLFGGPLLNPMLAGFAMSFSSVSVVLNALRLKGKTI

SEQ ID NO: 55517 - DNA, 2232 bp, Novosphingobium aromaticivorans DSM 12444
  CDS (1)..(2232): transl_table=11
atgccatggtcggtcaacagggatgcggctgcgatgagcgattgccaccatcatcaccatgcacacgccgcaatgccggatgtgccgcgcgaccctgtccctggccctgtccccgaaggcacggtctggacctgcccgatgcacccgcaggtgcggcaggaccaccccggcccctgcccgatctgcggcatggcgctggaacccgaactggcccgcgccgacaccggccccagccccgagcttgccgacatgacgcgccgcttcgccgtgggcctggcgcttgccctgccagtgttcctgctggaaatgggtggtcacctgtttccggccatccaccacgcggtgccgatgcgcctgtcgatcttcatccagctcgcgctgtccacaccggtagtcttgtgggcgggctggccgttcttcgcgcgcggctgggcctcgttgcgcaaccgcagcctcaacatgttcacgctgatcgcgatgggtacgggcgtcgcctgggcctacagcatggtcgcagcccttgcccccgcgctcttcccgccggcgttccgcaatcccgatggcagcgtcgcggtctatttcgaggcggcggcggtcatcaccgtcctcgttctcctcggccaggtcctggagctgcgcgcgcgggaacgcacgtcgggcgcgatcaaggccctgcttggcctcgcgcccagaaccgcgcgccgcctgctcgcagacggcagcgaggaggaactcggcatcgacctgatccagccaggagaccgcgtccgggtgcgcccaggcgagaaggtccctgtcgacggcacggtcgtcgacgggcgttcctcggtcgacgaatccatggtcaccggcgaatccatgcccgttgcccgccaggtgggcgacgcggtgatcggcggcacgatgaaccagaccggggcgctggtcgtcgccgccacccgcaccgggcgcgattcgatgctcgcccggatcgtgcggatggtggccgacgcccagcgctcgcgcgcaccgatccagcgcatggctgaccaggtggccggttggttcgtgccggcggtgatcgcggccgccctccttgccttcgccgcgtggagcatctggggcccgccgccgcgccttgccaacggtctggtgtcggctgttgcggtgctcatcatcgcctgcccctgcgcgctgggcctcgccactccaatgtcgatcatggtcggcgtcggcaggggcgcgggattgggcgtgctgatccgcaacgccgaagcgctggagcggatggagaaggtggacaccctcgtcgtcgacaagaccggcacgctgacccaggggcatccagcggtgaccgccatcgtcccgtcggagggcttcagcaaggacgagattctgcgccttgccgcagcggtcgagcgcgcatccgaacatccgctcgcccttgccatcgtcgaggccgccacggccaggtcgctctcgctgccgccggtcaccggcttcgattcccccaccgggcgcggagcgctgggcacggtcgagggacggcggatcgtgctcggcaacgcgcgcttccttgccgaccacgggctcgacaccgccgcacttgccgcccgtgccgacgccctgcgcgcagaaggcgcgaccgcgatcttcgtcggcatcgacactgcggtcggcggggtgctagccattgccgatccggtaaagccgaccacccccgaagcgctcgaggcactgcgccgcgaaggcatccgggtggtcatgctgaccggcgacaatcgcaccaccgcgcacgccgtcgccgcccggctaggcatcggcgaggtcgaggccgaagtccttcccgaccagaaaagcgcagtcgtcgcccgcctcaggtccgagggcagggtcgtcgccatggccggagacggcgtcaacgacgcccccgcgctcgccgccgccgacgtcggcatcgcgatgggatcgggcaccgacgtcgcgatcgaaagcgcgggcgtcaccctgctcaagggcgatctcaacggcatcgtgcgggcgcgcaggctcagccaggctacgatgtcgaacatccgccagaacctcgtcttcgcgttcgtctacaacgccgctggcgtgcccgtcgcggcgggattgctctatccctggttcggcatcctgctctcgcccgtgatcgcggcggcggcgatggcgctatcctcggtcagcgtcatcgccaatgcgctcaggctcaaccggcaggcgatttga

SEQ ID NO: 55518 - protein, 743 aa, Novosphingobium aromaticivorans DSM 12444
MPWSVNRDAAAMSDCHHHHHAHAAMPDVPRDPVPGPVPEGTVWTCPMHPQVRQDHPGPCPICGMALEPELARADTGPSPELADMTRRFAVGLALALPVFLLEMGGHLFPAIHHAVPMRLSIFIQLALSTPVVLWAGWPFFARGWASLRNRSLNMFTLIAMGTGVAWAYSMVAALAPALFPPAFRNPDGSVAVYFEAAAVITVLVLLGQVLELRARERTSGAIKALLGLAPRTARRLLADGSEEELGIDLIQPGDRVRVRPGEKVPVDGTVVDGRSSVDESMVTGESMPVARQVGDAVIGGTMNQTGALVVAATRTGRDSMLARIVRMVADAQRSRAPIQRMADQVAGWFVPAVIAAALLAFAAWSIWGPPPRLANGLVSAVAVLIIACPCALGLATPMSIMVGVGRGAGLGVLIRNAEALERMEKVDTLVVDKTGTLTQGHPAVTAIVPSEGFSKDEILRLAAAVERASEHPLALAIVEAATARSLSLPPVTGFDSPTGRGALGTVEGRRIVLGNARFLADHGLDTAALAARADALRAEGATAIFVGIDTAVGGVLAIADPVKPTTPEALEALRREGIRVVMLTGDNRTTAHAVAARLGIGEVEAEVLPDQKSAVVARLRSEGRVVAMAGDGVNDAPALAAADVGIAMGSGTDVAIESAGVTLLKGDLNGIVRARRLSQATMSNIRQNLVFAFVYNAAGVPVAAGLLYPWFGILLSPVIAAAAMALSSVSVIANALRLNRQAI

SEQ ID NO: 55519 - DNA, 2220 bp, Leptospira interrogans serovar Copenhageni str. Fiocruz L1-130
  CDS (1)..(2220): transl_table=11
atgaaagttcaacaagaattgcatttaaatgaagtaacattagacgtaattggaatgacctgtgccaattgtgcacttagaattgaaaaaggacttaaaaaaataccaggagttaaggatgtaagagttaattttgcaatggaaaccgcaaagatagattttgaatcttcaatctcaaaagaaattctaatggataaaatagattttttaggttatcgtgcggttgttcacgaagatatagaaatagatggagaaattcagaaaaaagaattcaaaaaactaaaagttcgagttattgtttccgcatttttgtctttaccattacttttaagtatgattgggcattttgagaataatctaaattttgaatatttatcttttctaatgaatccttggttacagtttgttttagctaccccaatccaattttggatcggagcttctttttataaaggtagttttcgcgctcttagaaatgggggagctaatatggacgttctagttgttttaggaacgtctgccgcgtatttttatagcgtctatttgacatttattttcaatgaaaaatacattcataagacagcgaatctatattacgaaacttcatctgtgttgatcactttgattctttttggaaaattgttggaacatatagtaaagggtaaatcttcgaaggcaattcaatccttggtaaatttacaaccaaaaaaagcgaacgtcattagagaaaaagagattcaagagatccctttgcttgcagttcgctctggagatttgattttggtaaagccgggagaaagtattcctgtggacggaataatagaagagggaagttcaaccatcgacgaatcgatgttaaccggagaaagcattcctgttgaaaaaacaatttccaatttcgtttacggaggttcattaaatcaaaacggaactttcaagttcagggctttaaaagttggaaaagaaactttgctctcgggaatcattcgagcggttcgagaagcccaaggaaccaaggctccgattcaaaggattgcagatcaaatttcggaaatatttgttccagtgattgttttgatctcagtaattactttatgtgtatggtatttttggattttgccttctaccttttcagtagcactagaaaaggcaattgctgtgcttgtggtcgcttgtccttgtgctttaggtttggcgactccgatttcggttttaaccgggtctggaaaagcggctactatgggaattttgtttcgtagtgcagaagcattagaaatattgcataaagtaaatgcaattgtttttgataagaccgggactttaacttatggaaaaccggttttgaaaagtttagaaagtttgaatatgactaaagaaaataatttacttacgttagccgcttctgctgaacagaactcggaacatcctctttcgaaagcgatcgtagaaagtgcaaagaaaaaaggtcttgttttagcgattcccgaaaattttgaaacaatacctggaggaggtatttccgccattgtggagggaaatcggatattgattggaacagagagattattttacgcaaaaggaatagagctgaatcaagaattaaacaatctgaaacgaataagagaagaagaaggaaatacggtcgtccatttgagtgtgaacggaattcattctgctatattgacattagcagatacgcttaaagaatctactccggcaacgatcgaaaagttgaaatctttgggtatagaagtttatatgataactggagacaatgaaagaacggctcgagttatctcaaaagattgtggtattgaacgcgtgttagctgaagttcttccggagaaaaaagcgatggaagtaaagaatctaaaaagtttaggaaaagtggtttctatggtgggggacggaattaacgatgctcctgcgcttgcgatttcggatcttgggattgctatgggaaccggaacggatgtggcaatggaatcttccgatttagtgatcgtaaacggggatttgaattcaattgtaaacgctattactatcagcagaaaaacggtttataatattcgacagaattttttctgggcgctactctataatacgttaggtattccgatcgcagccgcaggatttttagcaccttgggttgcgggtggggctatggctctcagttcggtttcggtagttttaaacgcccttagattacaaagggattga

SEQ ID NO: 55520 - protein, 739 aa, Leptospira interrogans serovar Copenhageni str. Fiocruz L1-130
MKVQQELHLNEVTLDVIGMTCANCALRIEKGLKKIPGVKDVRVNFAMETAKIDFESSISKEILMDKIDFLGYRAVVHEDIEIDGEIQKKEFKKLKVRVIVSAFLSLPLLLSMIGHFENNLNFEYLSFLMNPWLQFVLATPIQFWIGASFYKGSFRALRNGGANMDVLVVLGTSAAYFYSVYLTFIFNEKYIHKTANLYYETSSVLITLILFGKLLEHIVKGKSSKAIQSLVNLQPKKANVIREKEIQEIPLLAVRSGDLILVKPGESIPVDGIIEEGSSTIDESMLTGESIPVEKTISNFVYGGSLNQNGTFKFRALKVGKETLLSGIIRAVREAQGTKAPIQRIADQISEIFVPVIVLISVITLCVWYFWILPSTFSVALEKAIAVLVVACPCALGLATPISVLTGSGKAATMGILFRSAEALEILHKVNAIVFDKTGTLTYGKPVLKSLESLNMTKENNLLTLAASAEQNSEHPLSKAIVESAKKKGLVLAIPENFETIPGGGISAIVEGNRILIGTERLFYAKGIELNQELNNLKRIREEEGNTVVHLSVNGIHSAILTLADTLKESTPATIEKLKSLGIEVYMITGDNERTARVISKDCGIERVLAEVLPEKKAMEVKNLKSLGKVVSMVGDGINDAPALAISDLGIAMGTGTDVAMESSDLVIVNGDLNSIVNAITISRKTVYNIRQNFFWALLYNTLGIPIAAAGFLAPWVAGGAMALSSVSVVLNALRLQRD

SEQ ID NO: 55521 - DNA, 2190 bp, Candidatus Protochlamydia amoebophila UWE25
  CDS (1)..(2190): transl_table=11
atggagaaaaaaaaattgttaattcgagggatgcactgtgtttcatgcgcgcaaaatcttgaaaacagtttgaagaaagtttctggattacaagagattcatgttgattattcgactagtcaagctgatattatttttgacgaaaacaaagtttcatttgcctcactagaaaagcatataaaaaaaatgggatatgagagttattcatttaggccttctttagatgaagatagacgaataaagcaaaaagaaattcaaaatacttttaaaacctttttgatcgctgctgttttgtctttgccttttgtgattcagatgttggcgatgatgttaggatatgctttttccattcctccaacatggcaattttttttagccacccttgtacaatttgggtgtggaggaacattttatcgatcctctttttatgctcttaaaaactggcaaattaatatggatgttttggttgttttgggatcaactgcggcttatctatttagcttttatgtttatcttttaaaactttcttactctttttattttgaaagtagcgcgctcattattacattgattttatttggacgttggttagaagccgtcactaaaggaaaaacctctaaagcactagagcgtttatatcatttacagcctaaaattgctcgtattgaaaaaaatggtgaaattatagaggttgatgttgcctcgattcaagtaggtgatatttttatggtacgtcctggagatcatattccagttgatggatgggtgatagaaggagagtcttccatcaatgaatctttgttaacgggagaaagtttgccggtttataagaaacagggatcgaaactttatgcagcgacaatcaatgaaactggttacttgaaagggcaggcctcttcagttggatccgatacaattttagctcagatacttcgagctgtagaaaaagctcaatcttcgaaagcacctattcaaaaatttgtggataaaatttctgcagttttcgttccctgcgtacttctaatcagttgtttgacgatattaatttggacatttctaataggtgattttacaaatggattgattaatgcggtctctgttctagtgattgcatgcccttgtgttttaggattagccacgccggcagttcttgtggtagcaagtggggttggagcacaatacggaatattttttaaacaagcttcatcgatcgagcagtctgaaaaaatcaaatttttatttttagataagaccggtaccttaacgaaaggaattccttctgtgatgggaatctatccaaatgccaaatatcttaaaaatgacgtattacaaatagcagcttcgcttgaaaattgctcttcccatcctttagctaaggctatattaaatgaggccaaagaagagggaattcttttaaaaattgtcaaagaatttaattcatttattggaaaaggagttacaggaacaattgatgaaaaggtttattatttaggctctgctaactttgcaaaagaaatgggaattgaaatcgaccctgctttttctcttcttgaagaacaaggagaatcactggtctttgtttggacagaccatcaattattaggcatgattaccatcatggatgagctaagaaaggaaagtatggaagtaattcgtttgttgaaattgaaaggaatttatcccatccttttaactggagatcgaaaatatgttgctgaaactattgcaaaaaaattggggattgaagatgcgcggtttgaattgcttccagacgataaaatgcagattatccgagaagctaaaaatagtggaaaagtaggaatgattggagacggaattaacgatgctccagcccttgcagaagctgatgtgagttttgctcttgcctttggtagcgatattgctattgaagtcgctgatattactttaatacgaaatgatttaatgagtttagtggacgctatagatctttcccagcaaaccatgcgtaaaatgaaatataatttatttttagcatttatttataatgttcttgcgattcctttggcagcttttggactacttaatccaatgattgcggcaggaacaatggcaatgagctctgtttctgtgatcgccaatgcgttattactacgttattggaagccagaaataaatagaaataatgtggagaggattgtcaaagtttaa

SEQ ID NO: 55522 - protein, 729 aa, Candidatus Protochlamydia amoebophila UWE25
MEKKKLLIRGMHCVSCAQNLENSLKKVSGLQEIHVDYSTSQADIIFDENKVSFASLEKHIKKMGYESYSFRPSLDEDRRIKQKEIQNTFKTFLIAAVLSLPFVIQMLAMMLGYAFSIPPTWQFFLATLVQFGCGGTFYRSSFYALKNWQINMDVLVVLGSTAAYLFSFYVYLLKLSYSFYFESSALIITLILFGRWLEAVTKGKTSKALERLYHLQPKIARIEKNGEIIEVDVASIQVGDIFMVRPGDHIPVDGWVIEGESSINESLLTGESLPVYKKQGSKLYAATINETGYLKGQASSVGSDTILAQILRAVEKAQSSKAPIQKFVDKISAVFVPCVLLISCLTILIWTFLIGDFTNGLINAVSVLVIACPCVLGLATPAVLVVASGVGAQYGIFFKQASSIEQSEKIKFLFLDKTGTLTKGIPSVMGIYPNAKYLKNDVLQIAASLENCSSHPLAKAILNEAKEEGILLKIVKEFNSFIGKGVTGTIDEKVYYLGSANFAKEMGIEIDPAFSLLEEQGESLVFVWTDHQLLGMITIMDELRKESMEVIRLLKLKGIYPILLTGDRKYVAETIAKKLGIEDARFELLPDDKMQIIREAKNSGKVGMIGDGINDAPALAEADVSFALAFGSDIAIEVADITLIRNDLMSLVDAIDLSQQTMRKMKYNLFLAFIYNVLAIPLAAFGLLNPMIAAGTMAMSSVSVIANALLLRYWKPEINRNNVERIVKV

SEQ ID NO: 55523 - DNA, 2409 bp, Acinetobacter sp. ADP1
  CDS (1)..(2409): transl_table=11
atgacaaatcctcctgtaaaaaaccaaaccatcatccttcctattgaaggcatgtcctgtaatgcctgtgctacacgtattgaaaaagtactaaatcgcctacccgatgttcaagcgcatgtaaattttgctagcgaaaaagctcaaattgaactaaaaagcaccgaaagtacgctagatgatgttattcatcatattgaaaaagcagggtttaaagttcctcctcaacatcttgaactttcaattgagggtatgagctgtgctgcgtgtgcagcgcgaattgaaaaggtcttaaataagcagaaccacgtagaggccgtcgtcaattttagcaatgagacagcccatgttgattatgttacgggtttaatcacaccagaacaaatcattcaaaaaattgaaaaagcaggttttaaagcgattcaaaaacaggaacttaactcgaaggatcttcaacaacacaaacagcaacaatggaaacaacagcaacacatgttaatcattgcaatcattttcactctaccccttatggttgaaatgatgggcatgatgtttggcatgcatgaattgattcctcgctggattcagtggttactggctactcctgtgcaattctggtgtggctggcagttttatcgcaatgcatatctttctttgcgtggtggttcagccaatatggatgtactcgtcgtgctaggtacaacatcggcttatttatttagcagtgttgtagtgctgtttggtctggatcaacatgtttattttgaagccagtgcagcaattatcactttggttttattaggtaaattactcgaagcacgagcgaaagcaaaaactggtgcagcaatcgaaagtcttctcaatttgcaacctcaaattgcgcatcgtgaaatagagggtgaaatcagtgatattgcggtaaatgagcttcattctggcgatatctttattgttcgccctggtgaaagtattccagtagacggcatcattttagaagggacttccgaaatagatgaagctatgctgacgggtgaaagtatgcccgtcatcaaacatccacaggatcaagtttttgcagccacgattaattatcacggcgtacttcgtgtcaaagcaactggtgttggaaatgatactgtactggccaaaattattggtatggtcgaacaagcacaaggttctaaagcagcaatacaaaaacttgcagatcagatcgccagtatttttgttcctgtcgtcatcatcattagtttgttaacattgttgttgacttggtggttaagtcaatcttttacctctagcttaatcagcgctgtggcagtattggtcattgcttgcccgtgtgctttaggattggcaacacctaccgctattatggtcgggacaggtcgtggtgctcaatcgggcatcttgtttagaaatgcacaggccctcgaacatgctcaaaaaatcagcgttatggtcatggataaaactggaaccttaaccgaaggaaaacccgcagttgcacacagtaaaattgaggctggtatttctgtatctcatttttggtcggcaattaagacattagaacgcgactcagaacatcctatcgcacgcgcactggttcaacatacagaaacgatgcagacagaccaactcgaattacaagatttcaaagtcttatcaggccatggtattcaagcaagaatcaacggtgatctggcgttattgggctctcctcggtttttatctgaacacgatatcacgcttgatcacacgctggttgaagaacttgagcatcagggaaataccgtgattgccctatcgattgcgggacagttgcaaggctatattgggttacaggatcagttaagagccgatgcttcatctacaatttatgctttacaacagcgtggtatcgagattgttatactcactggcgatagtcctagagtggctaaggtcattgcaaaacaacttaatatcgagaaatttgtcgctggtgtactaccacaaaacaaagcagcagaagttgccaagctcaaacagcaaggtcattgggttgcaatggtgggtgatggcatcaatgatgcaccagcattagccaccgcagatatctcatttgccattggagcaggttcagatatcgcaattgattcggcagatattgtactgatgcaaagtcaattgactggtttaatcaatgcgattgatctgtcaaaagcaaccctatctaaagtaaagcaaaacctgttttttgcgtttatttataattcgttgggtatcccacttgctgcactcggcttattaaaccccgtagtggcaggtgcagccatggcactgagttcggtgtcagttttaaccaattcactgttgttacgtcgttggaaacccctaaaatttaattcaactcaggagattaaataa

SEQ ID NO: 55524 - protein, 802 aa, Acinetobacter sp. ADP1
MTNPPVKNQTIILPIEGMSCNACATRIEKVLNRLPDVQAHVNFASEKAQIELKSTESTLDDVIHHIEKAGFKVPPQHLELSIEGMSCAACAARIEKVLNKQNHVEAVVNFSNETAHVDYVTGLITPEQIIQKIEKAGFKAIQKQELNSKDLQQHKQQQWKQQQHMLIIAIIFTLPLMVEMMGMMFGMHELIPRWIQWLLATPVQFWCGWQFYRNAYLSLRGGSANMDVLVVLGTTSAYLFSSVVVLFGLDQHVYFEASAAIITLVLLGKLLEARAKAKTGAAIESLLNLQPQIAHREIEGEISDIAVNELHSGDIFIVRPGESIPVDGIILEGTSEIDEAMLTGESMPVIKHPQDQVFAATINYHGVLRVKATGVGNDTVLAKIIGMVEQAQGSKAAIQKLADQIASIFVPVVIIISLLTLLLTWWLSQSFTSSLISAVAVLVIACPCALGLATPTAIMVGTGRGAQSGILFRNAQALEHAQKISVMVMDKTGTLTEGKPAVAHSKIEAGISVSHFWSAIKTLERDSEHPIARALVQHTETMQTDQLELQDFKVLSGHGIQARINGDLALLGSPRFLSEHDITLDHTLVEELEHQGNTVIALSIAGQLQGYIGLQDQLRADASSTIYALQQRGIEIVILTGDSPRVAKVIAKQLNIEKFVAGVLPQNKAAEVAKLKQQGHWVAMVGDGINDAPALATADISFAIGAGSDIAIDSADIVLMQSQLTGLINAIDLSKATLSKVKQNLFFAFIYNSLGIPLAALGLLNPVVAGAAMALSSVSVLTNSLLLRRWKPLKFNSTQEIK

SEQ ID NO: 55525 - DNA, 2259 bp, Propionibacterium acnes KPA171202
  CDS (1)..(2259): transl_table=11
atgtctaccccgactcaccccgacgcgcagtctgagctgaaggacgcgacggaacctacctccatcaacctcgacatcacaggtatgagttgcgcatcgtgcgccgcccgcatcgccaagaagctcaacaaggttgatggggcccaggccaccgtcaactacgcgactagcaaggcccatgtcctcaccaccaagcctattggggtcgacgatctcatcggggtggtcgaggctgctggctacggggctagtgtccccacgccggccgcaccacccgaggaccacgcggcgaaaattcgcgccagactgatcgttgccatcattctcgcggtgccggtcatgctgctctcgatgattccagccctgcagtttgacggatggcagtggctggcgctggctcttagcctcccggtcgtcttttggtgcggggagggtttccatcgcgccgcctggacgaacctgcggcatggcgcaacctcaatggacactctcattagcctcggctctttggtctcgttggggtggtctgtctgggcgctgatgtggggcagtgctggacatgtcggtatgcgccaccgcatgacatgggccctggagcgcactgatccttcctctgccctatatctggaggcatcagtcggcgttattacctttatcctcattgggcggtggattgaggcccgtaaccgcgctgaggccggatcggccttgcaagcgttgctacggatgggcgccaagtcggtgcggatgatccgtgacgggcaggaggtcaccgtcccgatcgaggccctcacggtgggggatcacttcgtagtgcggccgggggagaaggtcgccaccgatggtcgggttgctgagggaagctcagcgatcgacgcgtctcttgttaccggggagtcattgccggtcgaggtggcggtcggtgacgaggtgatcggcgccaccgttaacacctctggacggcttgttgtggaggcaaccgccgttggttcagataccgagctgtctcgcatcgccacccttgttgaggctgctcaaaccagtcgctctaagacccaggatctcgccgacaaagtctcgtcgatttttgtgccgacagttttgatcatctcggccctgacgatgattgtgtgggctgtattgggtcagggggtcacggcggctttcaccgctggggtggcggttctcatcattgcgtgcccctgtgccctgggcttggcgacccccatggccctgcttgctggcacgggtcgcggtgccaggttgggaatcgttattaaaggtgcggggtccctggaaagggcccgcggtatcgacgttatggcgatggataagaccggcaccctcaccactggccggatggccgtagtcgcggtgtgggatgaatctggacgtgtggtgaacatttctgacaacccacctgcacttgctgttacagcagcgcttgaagtggggtcggagcacccgatttcgcgggccatcgttgaggcgtgcccaggtgtggcccccgccgaggactttcgggctctgcctggccttggggtcagtgggactgtgaacgggttgccggccaaggctgggcgggtgtcgctttttgacgccatccctgacacgttgtcgaaaaatgtcgagcgagcccaggctgagggccgtacggtgcttgtggtggggcgaggcgacgacattctcggtgccatcgcggtgagcgacgagatcaagccggaagctgtcgttgcggtgaagcggatggttcaagctggcgtgcgcccggtgctggtgacgggtgataattccggcgctgcagctcacgtggcgtcagaattgggcattgacgaggtcatgagtgaggtcatgcccgcggacaaggtcgacgttgtcactcggctgtgttcggacggctcccgcgtcgcgatgatgggggatggggtcaatgacgctgctgccctccaaacggcagatttgagcatcgctatgggaactggcaccgatgtcgctattgctgccagcgacatcatctgtacccgaggtgatccgcgtttggcggttgacgccctgtctcttgctcacgccacggaccgcacgattcgccagaacttgttctgggccttcgcttataacgtgattgctattccggtcgccgccgtgggcttgttgagcccggttatcgcggctgcggcaatggcctttagctcgatcttcgttgtcacgaactcgatgaggctggtgcgttggcatcctgggatgagcgattcaaactga

SEQ ID NO: 55526 - protein, 752 aa, Propionibacterium acnes KPA171202
MSTPTHPDAQSELKDATEPTSINLDITGMSCASCAARIAKKLNKVDGAQATVNYATSKAHVLTTKPIGVDDLIGVVEAAGYGASVPTPAAPPEDHAAKIRARLIVAIILAVPVMLLSMIPALQFDGWQWLALALSLPVVFWCGEGFHRAAWTNLRHGATSMDTLISLGSLVSLGWSVWALMWGSAGHVGMRHRMTWALERTDPSSALYLEASVGVITFILIGRWIEARNRAEAGSALQALLRMGAKSVRMIRDGQEVTVPIEALTVGDHFVVRPGEKVATDGRVAEGSSAIDASLVTGESLPVEVAVGDEVIGATVNTSGRLVVEATAVGSDTELSRIATLVEAAQTSRSKTQDLADKVSSIFVPTVLIISALTMIVWAVLGQGVTAAFTAGVAVLIIACPCALGLATPMALLAGTGRGARLGIVIKGAGSLERARGIDVMAMDKTGTLTTGRMAVVAVWDESGRVVNISDNPPALAVTAALEVGSEHPISRAIVEACPGVAPAEDFRALPGLGVSGTVNGLPAKAGRVSLFDAIPDTLSKNVERAQAEGRTVLVVGRGDDILGAIAVSDEIKPEAVVAVKRMVQAGVRPVLVTGDNSGAAAHVASELGIDEVMSEVMPADKVDVVTRLCSDGSRVAMMGDGVNDAAALQTADLSIAMGTGTDVAIAASDIICTRGDPRLAVDALSLAHATDRTIRQNLFWAFAYNVIAIPVAAVGLLSPVIAAAAMAFSSIFVVTNSMRLVRWHPGMSDSN

SEQ ID NO: 55527 - DNA, 2262 bp, Streptococcus pyogenes MGAS10394
  CDS (1)..(2262): transl_table=11
gtgccactgtcagaaaaaggagacgtattaatggctaaagagatatttttagtggagggaatgagttgtgcctcttgtgctctaacaattgaaaaaacggtcaatcaattgcctgaggtagaacaggctgttgtgaatttagcgactgagaagctcacggttacttatcaagatgacgatttagaaacggccaaagttattcaagcggtaaaagctgctggttatggtgcacaagtctttgatgaacatgcaaaacatatgcaaacaggtcgtcgtgacgaagacttaaaggttatttggtctcaggtcttgtggtctgccctattcaccattcctatattatacctagctatgggtcacatggtgggcttatggcttcctccatttctgcaaccagatcgctatcctttcgtttacagctttagtcagctactcttgacgattccagtcttagtattaaatcgtcattattaccataatgggtttaaagctttgtttaagggacatcctaatatggactccttggtagctttagcaaccagctttgcttttgcttatagtctttatggagtggttgaaatcagtttgggccaggcgcactttgtgcactccctttattttgaatcggtggtagtgattttgacactcatcggtctaggaaagtattttgaaagtcgttctaagggccgtacttctcaagctattcaaaagctcctatccttgaaggctactgatgtgagggtatggagaaacagccaatggcaattgttaccattagaagaagttagctatgatgaccttgtcctggttcaaccaggtgaaaaagtttctattgacggtattatcgtggaaggacatagcagtttggatgaatcctttttaactggggaaagtttgcctgttgaaaagggagaaaaagataatgtctttgcgggcagcttgaatgggccaggcgccctcacgattaaaccagataagcttgggaatgataccttgttagcacaaattatccaactagttgagaatgctcaagaaaataaagcacctattgcagctattgctgatagagtctcaggtgtctttgttccggtggttttggtattagctctgttaacaggggtattttggttggtattcatgcaggaaagttttcgttttagtttgacaacagccatcgctgttctagtcattgcttgtccttgtgcgcttggtttagcaactccgacagcgattatggttggaacagggcgtgcagctgaaaatggtattctttttaaaggtggtgacatcttagaacaagctcatcaggtagatacggttgtttttgataaaacggggacggttacggaggggaaaccaagtcttcaaaagctcctaattttttcgggagatgatcaccttatcttgcaagaagctgcttccttggaggcctattctcaacaccccttaggggaggctattgttcgtgctgctcaggaagctggttacgatagtctaccagtggaagagtttgagtctttaaccggcctaggagtcactggtcagcttgaagggcgtcgtttggcgattggaaatgctgctttaatgggaattcttggtatcgatttatcttgtgttcagtcagtttgtgctaaggcttcaggaaaaggccaaacccttgtatattatgctaaagaggggcagctacgagctcttttcagtattgctgacgctgtcaaagaagatagtcaagctaccgtcgaagctttgcatcaactgggaattcacaccatcatgctaacaggtgaccacgatgctaccgctaaggctattgcctctcaagtggggattacagatgtgatcagtcaagtcttacctgatcaaaaagcaggcgtgatagcagacctccgctctcaagggagaaaagttgcaatggtaggtgatggtattaatgatgctccggcattggctgtagcagacattgggatagctatggggtcagggacagatattgccattgaatcggcggatgtgattctgatgaaacctgatatgctggatttggtgaaagctatgtcattgagtcgagcgactatgagaattgtcaaggaaaatttattttgggcattcatttacaatgtcctcatgattccagtggccatgggcttacttcatctttttggaggtccactattgaacccgatgttagcaggttttgccatgagttttagttcagtatcagttgttttgaatgcattgcgtttaaaaggaaaaaccatttga

SEQ ID NO: 55528 - protein, 753 aa, Streptococcus pyogenes MGAS10394
MPLSEKGDVLMAKEIFLVEGMSCASCALTIEKTVNQLPEVEQAVVNLATEKLTVTYQDDDLETAKVIQAVKAAGYGAQVFDEHAKHMQTGRRDEDLKVIWSQVLWSALFTIPILYLAMGHMVGLWLPPFLQPDRYPFVYSFSQLLLTIPVLVLNRHYYHNGFKALFKGHPNMDSLVALATSFAFAYSLYGVVEISLGQAHFVHSLYFESVVVILTLIGLGKYFESRSKGRTSQAIQKLLSLKATDVRVWRNSQWQLLPLEEVSYDDLVLVQPGEKVSIDGIIVEGHSSLDESFLTGESLPVEKGEKDNVFAGSLNGPGALTIKPDKLGNDTLLAQIIQLVENAQENKAPIAAIADRVSGVFVPVVLVLALLTGVFWLVFMQESFRFSLTTAIAVLVIACPCALGLATPTAIMVGTGRAAENGILFKGGDILEQAHQVDTVVFDKTGTVTEGKPSLQKLLIFSGDDHLILQEAASLEAYSQHPLGEAIVRAAQEAGYDSLPVEEFESLTGLGVTGQLEGRRLAIGNAALMGILGIDLSCVQSVCAKASGKGQTLVYYAKEGQLRALFSIADAVKEDSQATVEALHQLGIHTIMLTGDHDATAKAIASQVGITDVISQVLPDQKAGVIADLRSQGRKVAMVGDGINDAPALAVADIGIAMGSGTDIAIESADVILMKPDMLDLVKAMSLSRATMRIVKENLFWAFIYNVLMIPVAMGLLHLFGGPLLNPMLAGFAMSFSSVSVVLNALRLKGKTI

SEQ ID NO: 55529 - DNA, 2445 bp, Bacillus licheniformis ATCC 14580
  CDS (1)..(2445): transl_table=11
gtgaaggatatggacggacaaaaagaagccaccctccaaatctctggcatgacctgcgccgcctgtgcggcgcggatcgagaaagggttgaaaaggcttgacggcgttcaggacgcaaatgtgaacttggcgctggaaaaatcaaaaatcgtttatgatccggggcaaatcgaagtcggacagctggctgagaaagtcgaatcgctcggctatcaagttcctgcggaaaaagccgaatttgcggtttccggcatgacgtgtgcggcttgcgccaaccgggttgaaaagcgcctcaacaagctgtctggcgtcaaaagcgccgccgtcaactttgccattgagactgcgacagtcgactatcatgctggcgcggtttcgccggaggagatgatcgaagccgttgaaaagctcggctacaagctcgagctgaaaaaagaccgaactgcggacggtcgggcggaacaaagagaaaaagatattcagcgtcaaaccggcaaatttattttttcagccattttgtcttttccgctgctctgggcaatggtcagccatttcaaattcacgtcatttatatggctgccggggatgttcatggatccctgggttcagttcgcgttggccacaccggttcagtttatcgtcgggaagcagttttacactggggcttataaagcgctgcggaacaaaagtgccaacatggatgtgctggtcgctctcggcacgtctgccgcctatttctacagcttgtatttaagcattgaaagcctcggtacaaaccggcatccggacggcctttactatgaaacaagcgccatcctcttaactttgatcattttaggaaagctgtttgaagcgaaagcgaaagggcgttcatccgaagcgatcaaaaagctgatggggctgcaggcaaagacagcgaccgtcgtcaggaacggcgaagagatgaccgtgccgattgaaaacgttttggcaggcgacatcatgtatgtgaagcccggtgaaaaagtaccggcagacggggagattgtcgaaggtcgttcagcgctggatgaatcgatgatcaccggtgaaagcatccctgttgacaaaacggttggagatccggttatcggcgctacaatcaataaaaatggatttttaaaagtcagagcagaaaaagtaggcaaagatactgcgctggcgcagattataaaagttgtggaagaggcgcaaggttcaaaggcgccgattcaacggctcgcagaccggatttccggggtttttgtgccgattgtcgtggcgatcgcggccatcacatttttcatctggtatttggcggtcagccccggcgaattcggcacggcgctggagaagctgattgcggtgcttgtgatcgcatgtccgtgtgcgctcggcttggcaacgccgacatcgatcatggccggatctggccgcgcggctgaattcggaatcttattcaaaggcggcgaacatttggagacggctcaccgcttggagacgatcgtgcttgacaagacggggacggtcacaaatgggaagcctcagctgacagatgtgcgccctgaaccatggatcgatgaaacatcgtttctcaagcttatcggtgctgcagaaaaaagctctgaacacccgcttgctgaagccattgtcgaaggcatcaaagagaaagggatagaacccgcctcagcagacagctttgaagcgatacccggctatggtatcgaagccgcagtcaatgaaaagcggattttgatcggtacaagacgtctgatggaaaaccgtgatattgacattcaagatgcgaacggcgaaatggaagagctcgaaacacaaggaaagacggcgatgcttgccgccgtcgacggtcggtttgccgggctgatcgccgtcgccgatacgattaaagacacgtcgaaggcagcggtgaaaaggctgcatgatatggggctggaagtcgtcatgatcaccggggacaatcggcggacggcagaagcgattgctgctgaagccggcattcaccacgtcatcgccgaagttctgccggaaggaaaagcggatgaggtgaagaaaatccaggcaaaaggcaaaaaagtcgcgatggtcggcgacggcatcaacgatgcgccggcattggcggcggccgatacaggtatggcgatcggaacagggactgacgtcgccatggaagccgccgacgtcaccttgatccgcggcgatttaaacagcatcgccgatgcgatcctcatgagcagattgaccatcaaaaacattaaacaaaatcttttctgggcgtttgcctacaacagcatcggcattccgttcgcggctgtcgggcttttggctccgtggatcgcaggtgccgcgatggcgttcagttcggtctcagtcgttctgaatgcactcaggctgcaaaaggtgaagcttgattggaggaatccgtcttga

SEQ ID NO: 55530 - protein, 814 aa, Bacillus licheniformis ATCC 14580
MKDMDGQKEATLQISGMTCAACAARIEKGLKRLDGVQDANVNLALEKSKIVYDPGQIEVGQLAEKVESLGYQVPAEKAEFAVSGMTCAACANRVEKRLNKLSGVKSAAVNFAIETATVDYHAGAVSPEEMIEAVEKLGYKLELKKDRTADGRAEQREKDIQRQTGKFIFSAILSFPLLWAMVSHFKFTSFIWLPGMFMDPWVQFALATPVQFIVGKQFYTGAYKALRNKSANMDVLVALGTSAAYFYSLYLSIESLGTNRHPDGLYYETSAILLTLIILGKLFEAKAKGRSSEAIKKLMGLQAKTATVVRNGEEMTVPIENVLAGDIMYVKPGEKVPADGEIVEGRSALDESMITGESIPVDKTVGDPVIGATINKNGFLKVRAEKVGKDTALAQIIKVVEEAQGSKAPIQRLADRISGVFVPIVVAIAAITFFIWYLAVSPGEFGTALEKLIAVLVIACPCALGLATPTSIMAGSGRAAEFGILFKGGEHLETAHRLETIVLDKTGTVTNGKPQLTDVRPEPWIDETSFLKLIGAAEKSSEHPLAEAIVEGIKEKGIEPASADSFEAIPGYGIEAAVNEKRILIGTRRLMENRDIDIQDANGEMEELETQGKTAMLAAVDGRFAGLIAVADTIKDTSKAAVKRLHDMGLEVVMITGDNRRTAEAIAAEAGIHHVIAEVLPEGKADEVKKIQAKGKKVAMVGDGINDAPALAAADTGMAIGTGTDVAMEAADVTLIRGDLNSIADAILMSRLTIKNIKQNLFWAFAYNSIGIPFAAVGLLAPWIAGAAMAFSSVSVVLNALRLQKVKLDWRNPS

SEQ ID NO: 55531 - DNA, 2253 bp, Mannheimia succiniciproducens MBEL55E
  CDS (1)..(2253): transl_table=11
gtgcaacaaactgtgcaaattgatgacagagccgagcagactaccttaatgctggaaggcatgagctgtgcagcctgtgtgcgcaaggtggaaaaagccttattagcagtgcctgaagtggcggcggcacaggtgaatctggcggaaaataccgcattggtgtacggcaacggcgatgtggaattaatgctgcaagcgattgagaatgccggttatcatgccgaagtagtggaagatgaaaattcccgtcgcgaaaaacaaaatgtacaggcggagcatgaaattaatcagcgcaaatggcagtcaattgtcgccttaattgtcggtttcggtttgtttttttggggaattttcggcggaacgaccgttgccacggcggaaaatcactggaactgggtaatggtcggtctcattgtgttggtgactatgctttgtaccggctggcatttctttgaacgcgcctggaaaaacttattgaaaggtaatgcgactatggataccttagtggcgctaggcaccggtgtggcttggttattttcgatgtttatttccctcactccggattttttccccgatggatcgcgccatctttattttgaatccggcgtgatgattatcggtttaatcaatgtagggaaaatgcttgaagccaaggcgaagcaacgttcatcaaaagcattggaacgtttgcttgatttaaccccgaaaactacgcggattattgatgagctgggtgagcgtgaaattccgctgaaagatgtaaaaacgggaatgcggattcgtttgcaaaccggcgatcgcgtatctgtagacggcatcgttctgcaaggttccggttggattgacgaaagtatgctgaccggtgaaccgattcccgtgcaaaagcaggaaggagataaaatcagcgccggcacattagttaccgacggtgcattacaatttcgcgccgagcaggtgggcaataaaaccatgttggcgaatattatccgcttagttcgccaggcgcaaagcagtaagccggaaatcggtcagttggcggataaaattgccggaatttttgtacctgtggtaatttgtatcgctgtttttgccgcgttgatttggtatttggtcggccctgaaccgcagatttcttatgcgcttgtagtgctgacaacggtactgattatcgcctgtccttgcgcgttgggattggcaacgccaatgtcgattatcggcggtgtcgggcgtgccgcggaactgggcatattggtacgtaatgcggatgccttacaaaaagcttcaaatgtcgatactattgtctttgataaaaccggtaccttgacgaaaggtgagccgaaagtgaccgcacttttaacctttaatcattttgatgaatcggttgcactggagtatgcggcaagtattgagcaaggggcaaaccatccaatagcgaaagcggtacttagtttggcacaggaatataacctgaaccttgaacacgagccggaagatttccgcaccttaaaaggtttaggcgtgagtgccaaggttgatcagcagaacattctgctcggtaattatactttattgcaacagcataatattgatgcgagtgcggcgaataggttcttccaaaccgaaagcgaaaaaggtgcgacggtaatatttttagcggtaaataatgtattggcgggtgttttcgcaattcgggatcctttgcgcgaagactcggtggaagccatacaacgcttgcataaacagggttatcacctgattatgttaaccggcgatcaggaaaaaacggcgcaggctattgcaaaagaagcgggaattgatcaagtcattgcagggattcttccggaaggaaaagccaatgtgatccgacaattacaagaacaaggcggaaaagttgtgatggtgggtgacggcattaatgatgcgccggcattggcgcaagcggatgtgagtattgctatcggcagcggtagcgatatagccattgaaacttccgaactgactttaatgcggcacagcattcatgcggtagcggatgctttagcgcttgctaaaggaacgttgcataacatgaaacaaaatcttttctttgcttttgtttacaatgttatctgtattcctgtcgctgccggcgtattctatccgcttttcggcttcctactgaatccgatgttcggcggagcggcaatggcttgttcatctattacggtagcaaccaatgcaaaccgcttattaaaattccaaccgaaagattag

SEQ ID NO: 55532 - protein, 750 aa, Mannheimia succiniciproducens MBEL55E
MQQTVQIDDRAEQTTLMLEGMSCAACVRKVEKALLAVPEVAAAQVNLAENTALVYGNGDVELMLQAIENAGYHAEVVEDENSRREKQNVQAEHEINQRKWQSIVALIVGFGLFFWGIFGGTTVATAENHWNWVMVGLIVLVTMLCTGWHFFERAWKNLLKGNATMDTLVALGTGVAWLFSMFISLTPDFFPDGSRHLYFESGVMIIGLINVGKMLEAKAKQRSSKALERLLDLTPKTTRIIDELGEREIPLKDVKTGMRIRLQTGDRVSVDGIVLQGSGWIDESMLTGEPIPVQKQEGDKISAGTLVTDGALQFRAEQVGNKTMLANIIRLVRQAQSSKPEIGQLADKIAGIFVPVVICIAVFAALIWYLVGPEPQISYALVVLTTVLIIACPCALGLATPMSIIGGVGRAAELGILVRNADALQKASNVDTIVFDKTGTLTKGEPKVTALLTFNHFDESVALEYAASIEQGANHPIAKAVLSLAQEYNLNLEHEPEDFRTLKGLGVSAKVDQQNILLGNYTLLQQHNIDASAANRFFQTESEKGATVIFLAVNNVLAGVFAIRDPLREDSVEAIQRLHKQGYHLIMLTGDQEKTAQAIAKEAGIDQVIAGILPEGKANVIRQLQEQGGKVVMVGDGINDAPALAQADVSIAIGSGSDIAIETSELTLMRHSIHAVADALALAKGTLHNMKQNLFFAFVYNVICIPVAAGVFYPLFGFLLNPMFGGAAMACSSITVATNANRLLKFQPKD

SEQ ID NO: 55533 - DNA, 2211 bp, Legionella pneumophila subsp. pneumophila str. Philadelphia 1
  CDS (1)..(2211): transl_table=11
atgaaacacgaccaccatcaaggacatacccattctggtaaaggacatgcttgtcatcacgaacataattctcccaagactcagcaagcctcttccaaaatggaggggcctattgtttatacgtgtcccatgcacccagaaattcgccaatctgcccctggtcattgtcctctttgtggtatggctttagaaccggaaacggtgacggtttcggaggttgtgagccctgaatatcttgatatgagacgtcgattttggattgcattgatgttaactatacctgttgtgatattggagatgggtggacatggtttgaagcattttatttctggtaatggttccagttggatccaattgcttcttgccacgccagtggtgttatggggaggttggccttttttcaagcgcggttggcagtctctaaaaacaggccaactcaatatgtttaccttgattgccatgggtattggtgtggcgtggatttacagtatggtggctgtcctttggccaggtgtatttccccatgcgtttagaagtcaagaaggagtagttgctgtttattttgaagcggcagcagtgattactacgcttgtcttgttggggcaagtgctggaactaaaagctcgagaacaaacgggtagtgccatccgtgccttgttaaaattggtccctgaaagtgcacaccgaattaaggaagatggcagtgaagaggaggtgtccctggataacgttgccgttggtgatttgttgcgtgttcggcctggtgaaaaaataccagtggatggtgaagtgcaagaaggacgaagctttgtcgatgaatccatggtgacaggtgagcccattccagttgctaaagaggccagcgctaaagttattggtgctacgattaatcagacgggtagctttgtcatgaaagcgctgcatgtgggcagtgataccatgcttgcacgcattgtgcagatggtgagtgatgcccaacgaagccgtgcgccgattcagcgactagccgataccgtctcaggatggtttgtgcccgctgtgattttggttgcggtgctgtcttttattgtgtgggcactgttgggtccgcaaccagcgcttagctatggtttaatcgctgctgtgtcagtactcatcatcgcttgcccttgtgcgttaggtttagcaacgcccatgtccattatggtcggtgttggaaaaggagcacaaagcggggtattgattaaaaatgccgaagcgttggaacgaatggagaaggtcaataccctggtggtcgataaaacgggcacgcttactgaaggtcaccctaaattgacacgcattgtgaccgatgatttcgtggaggataatgctttagcattagctgcggcacttgagcatcaaagtgaacatccgctggccaatgctattgtgcatgctgcaaaagaaaaaggattgtcccttggatcagtcgaagcgtttgaagcgcccactggaaaaggggttgtaggtcaggtagacggccatcatgttgctattggtaacgccagattaatgcaagagcatggaggcgataatgcccctctttttgaaaaggctgatgaacttcgtggtaaaggcgcctcagtcatgtttatggcggttgatggtaaaacagtagctctcttggtggttgaagaccctattaaatcgagtactccagagaccatcctcgaacttcagcaaagtggcattgaaattgtcatgctcaccggagatagcaaaagaacagctgaagcggtagcaggtacacttggcatcaaaaaggtagtagctgaaatcatgcctgaagacaagagccgcatcgtgagtgaattaaaagacaaaggtcttattgttgccatggcaggagatggggtgaatgatgccccagcgcttgccaaagctgatattggtattgccatgggaacaggcactgatgtggccatcgaaagtgctggtgttaccttgttgcatggagatttgcgtggtatcgccaaagcgcgacgtttgtcagaaagtaccatgagcaacattcgccaaaatcttttcttcgcctttatttataatgtactgggtgtgcccttggctgctggggttttgtaccctctaactggcttgctcttaagtcctatgattgcagcagcagcgatggcgctttcttcagtgtcagtgattatcaatgcgctgagactaaagagagtgacactatga

SEQ ID NO: 55534 - protein, 736 aa, Legionella pneumophila subsp. pneumophila str. Philadelphia 1
MKHDHHQGHTHSGKGHACHHEHNSPKTQQASSKMEGPIVYTCPMHPEIRQSAPGHCPLCGMALEPETVTVSEVVSPEYLDMRRRFWIALMLTIPVVILEMGGHGLKHFISGNGSSWIQLLLATPVVLWGGWPFFKRGWQSLKTGQLNMFTLIAMGIGVAWIYSMVAVLWPGVFPHAFRSQEGVVAVYFEAAAVITTLVLLGQVLELKAREQTGSAIRALLKLVPESAHRIKEDGSEEEVSLDNVAVGDLLRVRPGEKIPVDGEVQEGRSFVDESMVTGEPIPVAKEASAKVIGATINQTGSFVMKALHVGSDTMLARIVQMVSDAQRSRAPIQRLADTVSGWFVPAVILVAVLSFIVWALLGPQPALSYGLIAAVSVLIIACPCALGLATPMSIMVGVGKGAQSGVLIKNAEALERMEKVNTLVVDKTGTLTEGHPKLTRIVTDDFVEDNALALAAALEHQSEHPLANAIVHAAKEKGLSLGSVEAFEAPTGKGVVGQVDGHHVAIGNARLMQEHGGDNAPLFEKADELRGKGASVMFMAVDGKTVALLVVEDPIKSSTPETILELQQSGIEIVMLTGDSKRTAEAVAGTLGIKKVVAEIMPEDKSRIVSELKDKGLIVAMAGDGVNDAPALAKADIGIAMGTGTDVAIESAGVTLLHGDLRGIAKARRLSESTMSNIRQNLFFAFIYNVLGVPLAAGVLYPLTGLLLSPMIAAAAMALSSVSVIINALRLKRVTL

SEQ ID NO: 55535 - DNA, 2307 bp, Burkholderia mallei ATCC 23344
  CDS (1)..(2307): transl_table=11
atgaaggtgccgatcgacacaccccgtcgatacgactatcaaggccgcacgtatcgcttctgcagcgacaagtgcgcgacggcgttccgcgcgtcgccgcagcggttcgtcggcacgccgaagcagcgggccggcgcatccgcggcgaagccgggcacggtctacacgtgcccgatgcacccgcagatacgcgcgaacgcgccgggtgcctgcccgatctgtggaatggcgctcgagccgctcacgccggacgccaccgaagacggcaatcccgagctccgatcgatgacgcggcgcttccagctcgggctcgtgctggccgtgccgctcgtgctgatgacgatgggtgcgatggtgctgccgttcgacatcggcgccggcatcgacgcgctgctcgcgcgctggccgcggccgttcggaatgccggcatcgtggtcgcaatgggtgcaggccgcgctcgcgacgcccgtcgtgctgtggggcggctggccgtttctcgtgcgcggctggaagtcgttcgtcacgcggcggttgaacatgttcagcctgatcgggcttggcgtctgcgtggcgtatctgttcagcgtgttcgcgctgctgttccccgacacgctgccgcaggcgtttcgcagcggccacgaaatcccgctctacttcgaggcgtccgcggtgatcgtgacgctcgtgctgctcggccaggtgctcgagttgcgcgcgcgctcgcgcacgtcgagcgcgatccgcgacctgctgcagctcgcgccgcacacggcggtgcgcgtgaatcccgacggctcggagcaaaccgtgccgctcgacgcggtcgtcgtcggcgacacgctgcgcgtgaagcccggctcgaaggtgccggtcgacggcatcgtcgtcgccgggcattcgagcgtcgacgaatcgatgatcaccggcgagccggtgcccgccgagaagaccgagggcagcccggtgacgggcgcgaccgtcaaccagacgggcaccttcgtgatgcgcgcgcagaagatcggcaccgacacgctgctcgcgcggatcgtgcagatggtcgccgaggccgggcgctcgcgcgcgccgatccagaaactcgccgatcaggtgtccggcgggttcgtgctcgccgtcatcgtgctcgccgcgctcgcgttcgccgcctgggcggcgttcggtccggctcccgcgctcgcgaacgcgctcgtggtggcgatcagcgtgctcatcatcgcctgcccgtgcgcgctcggcttcgcgacacccgtgtcgatcatcgtcggtgtcggccgcggcgcgcgcgagggcgtgctcatcaaggatgccgaagcattggagctgatggagaaagtcgataccgtcgtcgtcgacaagaccggcacgctgaccgaggggcgcccgcgcgtgcagacgatcgtcgcgctcggcgggcagtccgagcgcgcgctgctgggcgatgcggcgagcctcgagggcgcgagcgagcatccgctcgcgcaggcgatcgtcgagcacgccgcgcggatgggcgccgagcgcaagcccgtcgcgtcgttcgattcggtgcccggaaaaggcgtgaaaggcaccctcgacgcccgcacggttgcgctcggcaacgcgcacctgatggcggatctcgcgatcgactgcacggcggccgacgccgattcgaaccgcctgcgcgaagccggccagacggtgatgtacgtcgcgatcgacgggcggctcgccggttatatcggcgttgccgacccgatcaaggagacgacgccggacgcggtgcaactgctcaaggcgtcgggcacgcgcatcgtgatgctgacgggcgacaaccccgtcaccgcgaacgcggtcgcccggacgctgtcgctcgacggcgtgaaggcgggcgtgctgcccgaggacaagtacaggcacgtgcaagcgctgcagcaacaagggcacgtcgtcgcgatggcgggcgacggcgtcaacgatgcgccggcgctcgcgcaagcgaacgtcggcatcgcgatgggcacgggcaccgacgtcgcgatgaacagcgcgcggatcgtgctcgtgaagggcgacctgcgcggcatcgcgcgggcgcgcgcgctcagcgtcgcgacgatgaagaacatccggcagaacctgttcttcgcgttcgtctacaacgcggtcggcattccggtcgcggcgggcgtgctgtatccgtggttcggcatcacgctgagcccgatcttcgcgagcgccgcgatggcggcgagctcggtttccgtcatcggcaacgcgctgcggctgcgcggcgcgaagacgtga

SEQ ID NO: 55536 - protein, 768 aa, Burkholderia mallei ATCC 23344
MKVPIDTPRRYDYQGRTYRFCSDKCATAFRASPQRFVGTPKQRAGASAAKPGTVYTCPMHPQIRANAPGACPICGMALEPLTPDATEDGNPELRSMTRRFQLGLVLAVPLVLMTMGAMVLPFDIGAGIDALLARWPRPFGMPASWSQWVQAALATPVVLWGGWPFLVRGWKSFVTRRLNMFSLIGLGVCVAYLFSVFALLFPDTLPQAFRSGHEIPLYFEASAVIVTLVLLGQVLELRARSRTSSAIRDLLQLAPHTAVRVNPDGSEQTVPLDAVVVGDTLRVKPGSKVPVDGIVVAGHSSVDESMITGEPVPAEKTEGSPVTGATVNQTGTFVMRAQKIGTDTLLARIVQMVAEAGRSRAPIQKLADQVSGGFVLAVIVLAALAFAAWAAFGPAPALANALVVAISVLIIACPCALGFATPVSIIVGVGRGAREGVLIKDAEALELMEKVDTVVVDKTGTLTEGRPRVQTIVALGGQSERALLGDAASLEGASEHPLAQAIVEHAARMGAERKPVASFDSVPGKGVKGTLDARTVALGNAHLMADLAIDCTAADADSNRLREAGQTVMYVAIDGRLAGYIGVADPIKETTPDAVQLLKASGTRIVMLTGDNPVTANAVARTLSLDGVKAGVLPEDKYRHVQALQQQGHVVAMAGDGVNDAPALAQANVGIAMGTGTDVAMNSARIVLVKGDLRGIARARALSVATMKNIRQNLFFAFVYNAVGIPVAAGVLYPWFGITLSPIFASAAMAASSVSVIGNALRLRGAKT

SEQ ID NO: 55537 - DNA, 2178 bp, Methylococcus capsulatus str. Bath
  CDS (1)..(2178): transl_table=11
atgcgttgtgccggatgcgtcgaggcggtggaaaccgcgttgaaggaggtgccgggtgtggagtccgtcagcgtcaatttcggcgaccattccgccctggtgaagggcgaggccgatccggaaagcctgaaggccgcgctcaaggaggcgggctatgacggtgcggtgatggaagccctcgaagacccggcagcgcaggagcgggccgaagaggagcgctaccgcgaactgctgaaaaaagccgcctgggccggctcactgggcgtgccgctgatgctgggggcgcacctggattggtttccgatgatcggaacggcctcggggacgacgttctggaccctcgtttcgctgctcaccctggtcgtgctgtatttctccggcgggcatttcttccgcggcgcggtcaagtcgttccagcaccgccaggcgaacatggacaccctcattgcgctgggcactggcgcggcctggttttattcgacggttgccatcgactccgtcgagctgctgccggcgcaagggcagcatgcctatttcgaggcggcggcggtcatcctcgcgttcatcaatctcggttcggcgttggagacgcgcgcccgcggcaagacttcttccgcgatccgcgcgttgatcggcctgcagccccgcaccgcgcgggtgatccgcgacggccaggaactcgacgtaccgattgccgaggtcggtctggacgaaatcctgcgggtacggccgggagaaaagattcccgtggacggcgtcctggtcgagggccggtcgaccgtggacgagtccatgctgaccggcgagcccatgccggtggaaaaaggcgagggcgataccgtggtggcgggcactttgaaccagtccggcagcttcttgttccgcgccacccgcattgggcgtgataccgtactggcgcagatcatcgccagcgtgcgtcaggcccagtctaccaagcccgagatcgcccgcctggtggacaaggtgtccgcggtgttcgtgccagtggtggtcggcatttccgccttcacctttctggtctggtggattttcgggccggcgccttcgttcggctatgccttcgtcaccgcgatgacggtattggtcatcgcctgtccctgtgccctggggctggcgacgccgatttcgatcatggtcgcggtcggccgcgccgcccagcacggcatcctcatccgccggggcgaggcgttgcagagcgcgggccgtctcaccgccgcggtgctggacaagacggggacgatcaccgaaggccggcccagcgtgatgggcatcgacacggccccgggctggtcggaggaacgggtgctgggcctggccgcgagcctcgaagcagggtccgaacatccgctggcttcggcggtgctgcgggccgcggaggcgggcaagatagccacgtccgcggtggagggtttcgccgcggagcctggtcacggtgtggccggcagcgtcgacggcagtcgcttgctgctcggcaacgtggccatgatggaaaagtacggcgtcgatttgcatgcgttcgagggtctgctggcgaactgcttccaggaggcgctgacgccactcctgctggcggccgacggccgggtggtcggtctgctgcgggtcgccgacccgatcaagccggatgcgcgtgaagcggtgcaacgcctgaaggagctgggtatccgggtattgatggtgaccggcgatcatgaggcgaccgcccgggcgatcgcccgctcggtcgggatcgacgaagtccgagcccaggtattgccgcaggacaaggcgacggtggtgaaagaactccagtcgcgcggcgagatcgtcggcatggtcggcgacggcatcaacgacgctccggcccttgcgcaagccgatgtgggtttcgccatcggcaccggcaccgacatcgccatcgaaagcggtgacgtcgtgatcatggcgggttcgccgctgaaagtctccgaggccgttcacttgtcgcggctgacggtgcgcaacatcaaacagaatctgctgggggcgttcatttacaacaccctgagcataccgatcgcagccggaatcctgtatcccttcgccggcatactgttgaacccgatgatcgccggcgcggccatggcgctttcttcggtcaccgtggtcaccaatgccaaccgtttgcgctggctatga

SEQ ID NO: 55538 - protein, 725 aa, Methylococcus capsulatus str. Bath
MRCAGCVEAVETALKEVPGVESVSVNFGDHSALVKGEADPESLKAALKEAGYDGAVMEALEDPAAQERAEEERYRELLKKAAWAGSLGVPLMLGAHLDWFPMIGTASGTTFWTLVSLLTLVVLYFSGGHFFRGAVKSFQHRQANMDTLIALGTGAAWFYSTVAIDSVELLPAQGQHAYFEAAAVILAFINLGSALETRARGKTSSAIRALIGLQPRTARVIRDGQELDVPIAEVGLDEILRVRPGEKIPVDGVLVEGRSTVDESMLTGEPMPVEKGEGDTVVAGTLNQSGSFLFRATRIGRDTVLAQIIASVRQAQSTKPEIARLVDKVSAVFVPVVVGISAFTFLVWWIFGPAPSFGYAFVTAMTVLVIACPCALGLATPISIMVAVGRAAQHGILIRRGEALQSAGRLTAAVLDKTGTITEGRPSVMGIDTAPGWSEERVLGLAASLEAGSEHPLASAVLRAAEAGKIATSAVEGFAAEPGHGVAGSVDGSRLLLGNVAMMEKYGVDLHAFEGLLANCFQEALTPLLLAADGRVVGLLRVADPIKPDAREAVQRLKELGIRVLMVTGDHEATARAIARSVGIDEVRAQVLPQDKATVVKELQSRGEIVGMVGDGINDAPALAQADVGFAIGTGTDIAIESGDVVIMAGSPLKVSEAVHLSRLTVRNIKQNLLGAFIYNTLSIPIAAGILYPFAGILLNPMIAGAAMALSSVTVVTNANRLRWL

SEQ ID NO: 55539 - DNA, 2478 bp, Escherichia coli
  CDS (1)..(2478): transl_table=11
atgcttcagatatgcataaggagagttacagtgaaaaataacaatgcagtgcaacacaacaaccagactgcttctgagcagacattatccccggacgagggccacgtattgcataaggtgagagatcccgtgtgcgggatggccatcctgcccgacagggcgcacagcagcattcgataccaggaccatcaactttatttctgctccgccagctgtgagagtaaatttaaagcccatcccgatcgttatcttaccgaagatgccagtgaacattcccatcaccatcaccacgatcatcacgaagtcagccctgatcagataaaacagcctcaccaccaggcggaaaaagagaattctgaaggtgtgtggacatgtccgatgcacccggagatacgccgcagtggtcccggaagctgtcctgtctgtggaatggcactggagccgctcgtagctacggcatccacggggccgagtgatgaacttcacgacatgacaagacgcttctggctggggttgttgctggcgtttccggttctggtactcgaaatgggatctcatctgtttcccgacttgaggaatacattaccgccacagtacaacacatggctgcagttgcttctggcctcccctgtcgtgttgtggtgtggctggccattcttcgcccgggccggaatgtcgttacgtaaccgctccctgaatatgtttacccttgttgcaatggggaccggcgtagcctgggtttacagcgtcattgcaaccgtcttcccctcctggtttcctgcatcgttcagaaacatggatggcctggtggccgtttattttgaagccgcagcagttattacggtgcttgttctgctgggacaggttcttgagctgcgggcacgggaacaaacctcaggcgccattactgcgcttctgaaccttgcccccaaaaccgccagacggctggatcatgacggtcatgaaacggatattaatgcggaagatgtcctgcctggcgataagctccgcatcagacctggagagagtattccggtcgacggtatcgtgatcgaaggcaaaacaaccgttgatgaatcgatggtgaccggggagtctatgccggttaccaaaacgaaggatgaccctgtcattggggggacgattaatcagacaggtagtcttatcatccgtgcagagaaagtcggtgatgaaacgatgctctcacgaattgttcagatggtcgctgatgcacagcgttcgcgtgcccccatccagagaatggctgacagcgtttcaggctggtttgttcctctggtgatacttatcgcggttgttgctttcgtgatctggtctgtctgggggcccgagcccaggatggcgcacggtctgattgcggctgtgtcggtcctgattattgcctgcccctgcgcactggggctggccacaccgatgtcgataatggtgggggtaggcaaaggagcccaggccggggtgttaatcaggaatgccgaagcccttgagcgtcttgaaaaagtggacacgctggttgtcgacaaaacaggcacgctcacggaaggttcgcctacggtgacagggattatcagtctcaatccgggtggggaagcatctcttttacgtgtagcggccgcagtggaaaaaggctcgcagcatccgctgggtatggctgtagtccgggcagcccagcacagggggatcatgatacccgcagtcagtgatttcaatgctccgtcggggaaaggtgtttcaggcgatgttgaaggtcaacgggttgttattggtaatgaactggctatgcaggaaaacagtatcgttattgataatcaaaaggccgttgcggataagttgcggatggaaggcgctaccgttatctatgtggccacagatgggtaccttgcaggcctgatagctatctcggatcccgtgaaagcaaccacgccggatgcacttaaagcgttgcgtcaggcggggatccgcatcgttatgctcaccggggataaccagcttaccgctgaagcagtcgcacggaaactgggaatagatgaggttgaagccgggattctgccggatggcaaaaaagcagtgataacccgactgaaagcgtctggccatgtggttgcgatggccggagacggtgtgaatgatgccccggcgctggcagcggctgacgtgggaatagccatgggaacgggtacagatgtggcaattgaaagtgccggagtcacccttctcaaaggcgacctgatgatactgaacagggcccgtcatctgtcagagatcaccatgaaaaatatccgacagaatctgttttttgcatttatctacaacgcacttggtgtgccggtggctgcaggcctgctttatcctgtgtatggaatactgctgtcgccagttattgcggcggcggccatggctctttcttccgtcagcgtcattgtgaatgcgttgcgtctgaaaagtgtcaggctcgggaaataa

SEQ ID NO: 55540 - protein, 825 aa, Escherichia coli
MLQICIRRVTVKNNNAVQHNNQTASEQTLSPDEGHVLHKVRDPVCGMAILPDRAHSSIRYQDHQLYFCSASCESKFKAHPDRYLTEDASEHSHHHHHDHHEVSPDQIKQPHHQAEKENSEGVWTCPMHPEIRRSGPGSCPVCGMALEPLVATASTGPSDELHDMTRRFWLGLLLAFPVLVLEMGSHLFPDLRNTLPPQYNTWLQLLLASPVVLWCGWPFFARAGMSLRNRSLNMFTLVAMGTGVAWVYSVIATVFPSWFPASFRNMDGLVAVYFEAAAVITVLVLLGQVLELRAREQTSGAITALLNLAPKTARRLDHDGHETDINAEDVLPGDKLRIRPGESIPVDGIVIEGKTTVDESMVTGESMPVTKTKDDPVIGGTINQTGSLIIRAEKVGDETMLSRIVQMVADAQRSRAPIQRMADSVSGWFVPLVILIAVVAFVIWSVWGPEPRMAHGLIAAVSVLIIACPCALGLATPMSIMVGVGKGAQAGVLIRNAEALERLEKVDTLVVDKTGTLTEGSPTVTGIISLNPGGEASLLRVAAAVEKGSQHPLGMAVVRAAQHRGIMIPAVSDFNAPSGKGVSGDVEGQRVVIGNELAMQENSIVIDNQKAVADKLRMEGATVIYVATDGYLAGLIAISDPVKATTPDALKALRQAGIRIVMLTGDNQLTAEAVARKLGIDEVEAGILPDGKKAVITRLKASGHVVAMAGDGVNDAPALAAADVGIAMGTGTDVAIESAGVTLLKGDLMILNRARHLSEITMKNIRQNLFFAFIYNALGVPVAAGLLYPVYGILLSPVIAAAAMALSSVSVIVNALRLKSVRLGK

SEQ ID NO: 55541 - DNA, 2511 bp, Bacteroides fragilis NCTC 9343
  CDS (1)..(2511): transl_table=11
atggaaaatcagaatttgactcaagaaaactttcctattataggtatgagttgtgcttcttgtgccgcacgaatagataaggtactcaatcgccaaccgggtgtcagcaaagctattgtaaactatgcggccggtactgctactgtggtatataccccttccgtatgtactcccaatgcattgcaacaagctgttcaggctgccggatatgacctgttgattcaacagactcccaatatgcttgaagaggtcgaagtagtgcacgatcaaaaataccatgcactcaaattacgcacgatatgggccatcattctatctataccgattgtcattatcggtatgttcttcatggatatgccatacgccaacctaattatgtggatactttctactccggttgttttctggttgggaagaggctttttcaccaatgcatggaagcaattaaagcatggcagtgccaatatggatacgttggtggcaaacagcactggaatagcctatctgttcagcttgttcaacctgttttttccagagttctgggtgtcaaggggtgttcatccgcacgtttacttcgaggcagcaagtactattattgccttcatcctattgggacgacttctggaagaaaaggccaaaggcaacacttcatcagccatcaaaaagctaatgggattgcaacctaaaaacgtaaccattatcacctctacaggcgaacaaaaggaaattcccatcgaacaaatccgaccaggaaatattcttttagtaaaacccggtgaacgtattgcggtggacggtgtggttacagagggtgcatcctatgtggatgagagtatgcttaacggtgaaccgatagccatatccaaggataaagattctaaagtctttgccggtaccatcaatcaaaaaggaagtttccgttttcgggctgaaaaagtaggaaccgacacgcttttggctaaaatcatccatatggtacaagatgcgcaaggaagtaaggcacccgtgcaacaaatagtggataagatagcaggtatttttgttcctactattatctccattgccgtattgtctttcgtggtatgggttatgctggggggaacaaacggattcacacacggcttactggctttggttactgtattaattatcgcttgcccatgcgccttgggcttggcgacccccaccgccattatggtaggtatcggcaaaggtgcggaaagaggtattctgataaaagatgccgaaagtctggaaacagccaagaaaatagacaccattgtacttgataagaccggaactgtgactgaaggtaagccaaaggtcagcacggtggtatggaataacttgtcggaaaacgcagaaagtatcttttatagtttggagaaactctcggaacatccacttgccgaagctgttaccagctattttaaggacactcgccaaatcgaaatcaaacatttcgagagtattaccggaaagggtgtgaaaggagaatcggaaggcaagacctattatgctggtaatcgccaattactggaagaacataagattgctatctcttctgtcctgttcaacaactttactcatctgacggcagaagcacaaaccgttatctggtttgcggatgacacaaatgccttggcaatcgttgctattacagaccaaatcaagaaaacctccatacaagctgtaacggaactgaaagctgccaatattgaagtgcatttattgaccggagataatgaaactaccgccagggagattgcccgtaaagcaggaatacagcattataaagcaggagtattgccgcaagacaaagcagcttttgtccgccagttgcagaaaaaaggtaaaaaggttgcgatggtgggcgatggcataaatgatagcgcagctcttgcacaagcagatttgggtatcgccatgggaagcggaagtgacatagccatagatgtagcccaaatgactgttatttcttccgacttgacaaagataccagaagctcttgaattgtccaggcaaacggtacgaaccatccgccaaaacttgttttgggcatttatctacaatctgcttggtgtacctgtagcggcaggtatcctttatcccatcaacggctttttattaaacccaatgatagccggagcagctatggcgttcagtagtgtcagcgtggtaagcaacagcctacggctgagaaaaaagaagatacaaaatgcagatgtttcggttaatttatccgtcacagagcaagatagagaacttgaagagaaagtagaaacattatcagaaaaatttatgaaaaaagaatttaaagtagaaggaatgagttgcaatcattgtcgtatgcgtgtggaaaaagcattgaacaaaatggaaggaatacgtgctacggtaactcttaatccatcggtagccatcgttgaatttaccaatggcgagaaaactttggaagagctacagaacatggttacccaagaagccggtgattacgtgttgagagaataa

SEQ ID NO: 55542 - protein, 836 aa, Bacteroides fragilis NCTC 9343
MENQNLTQENFPIIGMSCASCAARIDKVLNRQPGVSKAIVNYAAGTATVVYTPSVCTPNALQQAVQAAGYDLLIQQTPNMLEEVEVVHDQKYHALKLRTIWAIILSIPIVIIGMFFMDMPYANLIMWILSTPVVFWLGRGFFTNAWKQLKHGSANMDTLVANSTGIAYLFSLFNLFFPEFWVSRGVHPHVYFEAASTIIAFILLGRLLEEKAKGNTSSAIKKLMGLQPKNVTIITSTGEQKEIPIEQIRPGNILLVKPGERIAVDGVVTEGASYVDESMLNGEPIAISKDKDSKVFAGTINQKGSFRFRAEKVGTDTLLAKIIHMVQDAQGSKAPVQQIVDKIAGIFVPTIISIAVLSFVVWVMLGGTNGFTHGLLALVTVLIIACPCALGLATPTAIMVGIGKGAERGILIKDAESLETAKKIDTIVLDKTGTVTEGKPKVSTVVWNNLSENAESIFYSLEKLSEHPLAEAVTSYFKDTRQIEIKHFESITGKGVKGESEGKTYYAGNRQLLEEHKIAISSVLFNNFTHLTAEAQTVIWFADDTNALAIVAITDQIKKTSIQAVTELKAANIEVHLLTGDNETTAREIARKAGIQHYKAGVLPQDKAAFVRQLQKKGKKVAMVGDGINDSAALAQADLGIAMGSGSDIAIDVAQMTVISSDLTKIPEALELSRQTVRTIRQNLFWAFIYNLLGVPVAAGILYPINGFLLNPMIAGAAMAFSSVSVVSNSLRLRKKKIQNADVSVNLSVTEQDRELEEKVETLSEKFMKKEFKVEGMSCNHCRMRVEKALNKMEGIRATVTLNPSVAIVEFTNGEKTLEELQNMVTQEAGDYVLRE

SEQ ID NO: 55543 - DNA, 2268 bp, Corynebacterium glutamicum ATCC 13032
  CDS (1)..(2268): transl_table=11
atggctcagacacccgccaaaatcccggcggcactgaatttcattgacgtcgacctcggcgttaccggcatgacctgcacttcttgctccgcccgcgtcgagcgcaaactgaacaagctcgacggcgttgaagcaaccgtcaactacgcgacggaatccgcacaggtcagctacgacccctcaaaggtcagccctgaacagctgattaagactgttgaggacaccggctacggtgctttcacgatggcttccgcagctgccgaatcagaagaggacaacgctccagctgacagcggccagtcccgcatcgacgcagctcgcgaccacgaagcagccgacctgaaacaccgcgtgatcgtctctgcactgttgtcagttcctgtggttttggtcagcatgatcccggcgctgcaattcaacaactggcagtgggccgtactcactttggtcaccccgattttcttctggggcggttcaccgttccacaaggcaacgtgggcaaacctgaagcacggttccttcaccatggacaccctggtttcactcggcacgtccgctgcttacctgtggtccctgtgggctttgttcattggaaatgctggtcaccctggcatgaagatggagatgcacctgctgccgtcggcctccacgatggatgagatttacctcgaaaccgtcgcggtcgttattacgttcctgctgcttggacgctggtttgagacaaaagctaagggccaatcttcggaagctctgcgcaagctgctggacatgggcgccaaagatgcagtcgtcttacgtgccggcgccgaagtccgcgttcctgtgaatcagcttaaactcggcgacgttttcatcacccgccccggcgagaaaatcgccaccgacggtgaagtcgtcgaaggttcctccgcagtcgacgaatccatgctcaccggcgaatccatccccgttgaagtcaccaagggctccaaagttaccggcgcaacgctgaacacttccggccgcctcatggtgaaagtaacccgcatcggcgccgacaccaccctgtcgcaaatggctaaactggtcacggacgcacagtccaaaaaggcccctgtccagcgtcttgttgaccaaatctcgcaggttttcgttcccgttgtcatcgtaattgctattgcgacgctgatcgcgcacctcgtcttcaccgacgccggcctcgccccagcattcaccgcagcagtcgccgtcctcattatcgcctgcccttgtgccctcggcctggcaaccccaaccgcacttctggtcggaaccggccgcggcgcgcaactcggtctgttgatcaagggccctgaaatcctcgaatccaccaaaaaagtcgacaccatcgtcctcgacaaaaccggcaccgtcaccaccggcaccatgtccgtcaccgacgtcaccgccatcaactacagcgaaaccgaaatcctcgaattcgctgcagccgtcgagtccgcctccgaacaccccatcgcccaggcaatcgccaaggccgccgaacacgagcaagtcaccgacttccaaaacaccgcaggtcagggagtcaccggtgtagtccgcggacacgaggtccgcgtgggcaggccttcaagcacgcttatcgacgccctcctccaccccttccaacacgcccaaaaaatcggcggaacccccgtagtcgtcacgattgacggcgtagattccggaataatcacggtccgcgacaccgtcaaagacacctccgccgaagcaatccgcggactcaaggaactgggactcaccccaatcctactcaccggagacaatgaaggcgcagctaaatccgtagccgctgaagtcggcatcgaccaagtcatcgccaacgtcctcccccacgaaaaagtccaaaacgtagaagccctccaagcacaaggcaaaaacgttgcgatggtcggcgacggcgtcaacgatgccgcagctcttgcccaagctgacctcggactcgccatgggagccggcaccgacgtagccatcgaagcctccgacatcaccctcatgaacaacgacctccgatccgcagtcgacgccatccgactgtcccgtaaaaccctcggcaccatcaagggaaaccttttctgggctttcgcctacaatgttgcactaatcccagtagcggcgatcggactcctcaacccaatgcttgccggcattgcgatggccttcagttcagttttcgtcgtctccaattccttgcgtctgcgaggattcaaagcaaggagcaactaa

SEQ ID NO: 55544 - protein, 755 aa, Corynebacterium glutamicum ATCC 13032
MAQTPAKIPAALNFIDVDLGVTGMTCTSCSARVERKLNKLDGVEATVNYATESAQVSYDPSKVSPEQLIKTVEDTGYGAFTMASAAAESEEDNAPADSGQSRIDAARDHEAADLKHRVIVSALLSVPVVLVSMIPALQFNNWQWAVLTLVTPIFFWGGSPFHKATWANLKHGSFTMDTLVSLGTSAAYLWSLWALFIGNAGHPGMKMEMHLLPSASTMDEIYLETVAVVITFLLLGRWFETKAKGQSSEALRKLLDMGAKDAVVLRAGAEVRVPVNQLKLGDVFITRPGEKIATDGEVVEGSSAVDESMLTGESIPVEVTKGSKVTGATLNTSGRLMVKVTRIGADTTLSQMAKLVTDAQSKKAPVQRLVDQISQVFVPVVIVIAIATLIAHLVFTDAGLAPAFTAAVAVLIIACPCALGLATPTALLVGTGRGAQLGLLIKGPEILESTKKVDTIVLDKTGTVTTGTMSVTDVTAINYSETEILEFAAAVESASEHPIAQAIAKAAEHEQVTDFQNTAGQGVTGVVRGHEVRVGRPSSTLIDALLHPFQHAQKIGGTPVVVTIDGVDSGIITVRDTVKDTSAEAIRGLKELGLTPILLTGDNEGAAKSVAAEVGIDQVIANVLPHEKVQNVEALQAQGKNVAMVGDGVNDAAALAQADLGLAMGAGTDVAIEASDITLMNNDLRSAVDAIRLSRKTLGTIKGNLFWAFAYNVALIPVAAIGLLNPMLAGIAMAFSSVFVVSNSLRLRGFKARSN

SEQ ID NO: 55545 - DNA, 2199 bp, Pseudomonas syringae pv. syringae B728a
  CDS (1)..(2199): transl_table=11
atgcaagacaccaccaccttcgacctgccgatcagcggcatgacctgcgccagttgcgcaggtcgggtcgagcgtgccctggccaaagtgccgggggtcaacagcgtgacggtcaacctggccaatgaacgcgcccacgtagacaccgcagcgcacaccgatccgcaaaccctgatcgacgccgtcagccgtgccggttatagcgccacgctgaaccaggatcgtcacgccgaagccgaccagaaagcccgtcacctgcaccacgagcgctgggccttgctgctggccatcgtgctggcgctacctttgatcctgccgatgctgctgacaccgctgggcgtgcactggatgctgcctgcgtgggtgcaatttgcgctggcgacgccggtgcagttcatccttggcgcacgtttttacgtggccgcctggaaagccgtgcgcgcaggtgccggcaatatggacctgctggtcgcgatcggtaccagcgccggctacggcctgagcgtctatcaatggctgtacgctgcgcccggaacgacgccgcacttgtatttcgaagcatcggcggtggttatcgcgctggtactgttgggcaaatacctggaaagccgcgccaagcgccagaccgccagtgccatccgcgcccttgaagcgctgcgcccggagcgcgccctgcgggtggtcgacggcctcgaacaggacgtcgcgatcagcgcgctgcagctcgatgatcgggtgctggtcaaacccggcgaacgctttccggtggacggcgaagtggtcgaaggccgcagccatgccgacgaagcgctgatcaccggtgaaagcctgccggtggtcaagcaaccgggcgacaacgtcaccggcggggcaatcaatggcgaaggccaattgttgatcaggaccaccgcgctgggcgcggaaacggtgctggcgcgcatcattcgtctggtcgaagacgctcaggcaggcaaggccccgatccagaagctggtggataaagtcagccaggtgttcgtgcccaccgtgctggtgattgccttgttcacactggccggctggctgctggtcggtgcctcgctggaagtcgcgctgatcaatgccgtcgccgtactggtgatcgcctgcccttgctccctgggcctggcgacgccgacagcgatcatggccgggaccggtgtggcagcgcgttacggcattctgatcaaggacgccgaagcgctggaacgggctcacgaggtcgatgccgtggtgttcgacaagaccggcacgctgacttcgggcacgccgcgtatcactaacatgagcgcggtgctgggcaatgaagaacaccttctgcaactggcgggcgcgctgcaacgcggcagtgaacaccccttggccagagcggtgctggatgtctgtcaggaatggcaactcaagcctgatgccgcgcaaaacagccgcgtcctgagcggtcggggcatcgccggcaccgttgagggccgtgaactggcgctgggcaatcgacgcttgctggaggacagcggcctgccgatgggcgatctggccgagtccgcacgcatctgggaagccgaggggcgcacgctgtcctggctgatcgagcaggctccggagccgaaagtgatcggtatgttcgccttcggtgacacgctcaagcctggaaccgatcaggcaatcaaagcgctgaatgcgcggggcatcagcagccatctgctgaccggcgataaccggggcagtgctcaggtggttgccagggcattgggcatacacgatgtgcatgccgaagtgctgcctgccgacaaggcagccaccgtcacccaactgaaaagcctgcatgtggtggcgatggtcggtgacggcatcaacgatgctccggcgctggcggcagcggatgtcggtatcgcgatgggcggcgggaccgatgtcgccatgcatgcagcgggcatcaccctgatgcgcggcgacccgcgactggttccggcagccctggacatcagccggaggacctacgcgaaaatccgccagaacctgttctgggcgttcgtctacaacctgatcggcattcccctcgcggcactgggctatctcaatccggtattggcgggcgcggccatggcgctgtcgagcgtcagcgtagtgagcaatgcgctgctgctgaaaacctggaaaccccgcgacctggaggacgcaccatga

SEQ ID NO: 55546 - protein, 732 aa, Pseudomonas syringae pv. syringae B728a
MQDTTTFDLPISGMTCASCAGRVERALAKVPGVNSVTVNLANERAHVDTAAHTDPQTLIDAVSRAGYSATLNQDRHAEADQKARHLHHERWALLLAIVLALPLILPMLLTPLGVHWMLPAWVQFALATPVQFILGARFYVAAWKAVRAGAGNMDLLVAIGTSAGYGLSVYQWLYAAPGTTPHLYFEASAVVIALVLLGKYLESRAKRQTASAIRALEALRPERALRVVDGLEQDVAISALQLDDRVLVKPGERFPVDGEVVEGRSHADEALITGESLPVVKQPGDNVTGGAINGEGQLLIRTTALGAETVLARIIRLVEDAQAGKAPIQKLVDKVSQVFVPTVLVIALFTLAGWLLVGASLEVALINAVAVLVIACPCSLGLATPTAIMAGTGVAARYGILIKDAEALERAHEVDAVVFDKTGTLTSGTPRITNMSAVLGNEEHLLQLAGALQRGSEHPLARAVLDVCQEWQLKPDAAQNSRVLSGRGIAGTVEGRELALGNRRLLEDSGLPMGDLAESARIWEAEGRTLSWLIEQAPEPKVIGMFAFGDTLKPGTDQAIKALNARGISSHLLTGDNRGSAQVVARALGIHDVHAEVLPADKAATVTQLKSLHVVAMVGDGINDAPALAAADVGIAMGGGTDVAMHAAGITLMRGDPRLVPAALDISRRTYAKIRQNLFWAFVYNLIGIPLAALGYLNPVLAGAAMALSSVSVVSNALLLKTWKPRDLEDAP

SEQ ID NO: 55547 - DNA, 2376 bp, Colwellia psychrerythraea 34H
  CDS (1)..(2376): transl_table=11
atgaatacaactacacaattcaaaattgacggtatgacctgtgcttcatgtgtaggtcgtgttgaaaaggcgttacacaaagtgattggcgtgacagatgttacagtcaacctagctacagatacggcaactattcaaggtactgccagtcatagtgaattaattacggctgttattgaggcgggttatcaagtgccagtaaaggtaaagcaatttggtattggaaagatgagttgctcctcttgtgtgaagcgggtcgaacaggcattgctaaaagtaaccggtatggtcagtgcatcggtaaatttagccacagagcacgtacaagtaaaaactttatcctttgtaaccgatgaacaactagcccaagccgtgacacaagccggttacctttttatcccgttgaacaatgacagcgtgataaaaataaccagtcaacatcagcctttttatactaaagcatggtggcccgtgttgggagcaggcctacttaccttgccattggtgttacccatgttaggcatgttgtttgcgcaacaatggatgttaccgcctgtttggcaatggttgttagctacgccagttcagttctattttggcgctcgtttttatcgtgcaggctggggggcattaaaagcgggtatgggcaacatggatcttcttgtctccatcggtaccagtgcagcctacggactatctttgtatttgtggtggagctttgatagcgctcatggcatgccgcacttgtattttgaaagcagtagcgcagtaataaccttggttctgctgggtaaatatttagaacacaaagcaaaacgccgaacaactgatgcacttagagcattggaaaatttgaaacctgttgaggcgacagtgcaacgcttaggtaaatggcaaaaagtggccgcttcatcagtgcaatcaggtgaaaaagttaaagtaataccgggcgaaagcgtccctgttgacggtgagattttacaggggcaaagtcatctggatgaagcgttaattagtggagaatcgattccgttaagtaaaaaagaaggggatattgtcacgggtggctcacttaacttggacggtattttagagatccgtgccactaatgttggtaccgaatctaccttatctaaaatcattgaattagttgagcaagcccaaggtgctaaagcccccgtacaggcaatagtagataaagtcagcagtatctttattcctgtggtgttattggtcgcacttaccaccttattggtgacaggtttagtatttgatgactggaccaatggcattctcaatgcagtagccgttttagttattgcctgtccatgtgcacttggtttagcaactcctgcagccataatggcaggcacaggaaccgctgccagattaggcgtattggttaaagatgcagtggcattagagcaggcaaaaaaaatcgatttagtggtatttgataaaacaggtaccttgacccaaggcaaacctgttgtaaatgaaatgacggtcatcagtggcagtgaagaaacagtattgcagttggcctattccttacaaataaatagtgagcacccattaggcaaggcagtggttgaaaaggcattaaccaaagggacacaagcattacctgtcaatgaatttcaggttgtcgcgggttatggtgtcaaaggcaacattgctgacaatttagtattgatgggcagtagtcattggatgcaagaggtaggcgtaacactgccaaccgaacaaataaaaatagcgggagcttctgtttcttggttggcttgtcagcaacaagatcaaataacattacttgggctattttgttttagtgataaattaaaatctgatgcgctgcaagctgtgaagctattgcaacaacaaggtataaaggttgctatgcttaccggtgacaatcaagcgagtgcaacatcggtggcgacagaattacagttagacgattttaaagctgaggtactgccagcagataaagcaaaatatattattcaatatcaagagcaaggttatcaggttgctatggttggtgatggcattaatgatgcgccagcactagcacaagcagatttgggcatggcaatggcatcgggtactgatgttgcggttagcgctgcgtctttcactttaatgcgcagtaagccaagcctagtacccacggcattgatcattgcaagactgacttatcgtaaaatacagcaaaaccttttttgggccttcatctttaatgcagtgggaattccactagcagcctttggttatcttgaccccattattgccggagctgcaatggcatttagtagcttatttgttgtcagtaacgcattgttattgcaacgctggacacttaaggagaaataa

SEQ ID NO: 55548 - protein, 791 aa, Colwellia psychrerythraea 34H
MNTTTQFKIDGMTCASCVGRVEKALHKVIGVTDVTVNLATDTATIQGTASHSELITAVIEAGYQVPVKVKQFGIGKMSCSSCVKRVEQALLKVTGMVSASVNLATEHVQVKTLSFVTDEQLAQAVTQAGYLFIPLNNDSVIKITSQHQPFYTKAWWPVLGAGLLTLPLVLPMLGMLFAQQWMLPPVWQWLLATPVQFYFGARFYRAGWGALKAGMGNMDLLVSIGTSAAYGLSLYLWWSFDSAHGMPHLYFESSSAVITLVLLGKYLEHKAKRRTTDALRALENLKPVEATVQRLGKWQKVAASSVQSGEKVKVIPGESVPVDGEILQGQSHLDEALISGESIPLSKKEGDIVTGGSLNLDGILEIRATNVGTESTLSKIIELVEQAQGAKAPVQAIVDKVSSIFIPVVLLVALTTLLVTGLVFDDWTNGILNAVAVLVIACPCALGLATPAAIMAGTGTAARLGVLVKDAVALEQAKKIDLVVFDKTGTLTQGKPVVNEMTVISGSEETVLQLAYSLQINSEHPLGKAVVEKALTKGTQALPVNEFQVVAGYGVKGNIADNLVLMGSSHWMQEVGVTLPTEQIKIAGASVSWLACQQQDQITLLGLFCFSDKLKSDALQAVKLLQQQGIKVAMLTGDNQASATSVATELQLDDFKAEVLPADKAKYIIQYQEQGYQVAMVGDGINDAPALAQADLGMAMASGTDVAVSAASFTLMRSKPSLVPTALIIARLTYRKIQQNLFWAFIFNAVGIPLAAFGYLDPIIAGAAMAFSSLFVVSNALLLQRWTLKEK

SEQ ID NO: 55549 - DNA, 2208 bp, Dechloromonas aromatica RCB
  CDS (1)..(2208): transl_table=11
atgagcgacgaggctgaccggggcagggtggttgaatttgccattggcggcatgacctgcgctgcttgttcggcccgtcttgagaaagtcctgaaccggcaagccggcatgcaagccaatgtcaatctggcggctgagcgcgcccgggtgcgactctcggcaatggccgatgaggccgccgtggtcgcggccgtagcgaaggccgggttcacggccgagttggtcgatagccagacacgcgaacgcgaaaaggccgaaaagctgcgtgtctatcagcgggaaatcagacgcttctggattgccgtggcgctcaccctgcccttggtcgggcagatgctgttcatgtttggcgaacacggccacctcaacgaaatgccgcgctggttgcaactggcgctggcgacaccggtccagttctggattggctggcgtttctacgatggcgcctacaaggccctgcgtggtggtggcgccaacatggatgtgctggttgcgctcggtaccagcatggcctggggcttttcgacggtggtgacgctgtttggcctcaatcagcacatctatttcgagggcggggcagcggtgatcacgctggtcctgcttggcaagttgcttgaggctcgggccaaggcaagaacctccgaagctatcgagtcgctgatccgcctgcagccgaagacggcgcgcgttgaacgggatggccagtgggtggaaatggccgtcgaggcgctgatgccgggcgatatctttctggttcgtccgggcgaaagcgtgccggtcgacggtgaggtggtcgatggcgaatcgagtgtcaacgaggccatgctgaccggtgaaagcatgccgctaggcaagcgggccggcgacagggtctttgccgctacggccaacgggcagggcgccctgcgttgtcgggccaccggcgtgggcgagcacaccttgctggccggcatcattcggctcgtcggcgaggcgcaaggatcgaaggcgccggtgcagcgtctggcggacaagatttcatcgatcttcgtaccgacggtgtgcatcatcgcgctcgtgacctttgccggctggtggatttattccggcgatttttccgaggccctggtcaatgccgtggcggtgcttgtcattgcctgtccgtgtgcgttggggctggccactccgacggcgatcatggtcggaaccgggcagggggccagggccggcattctggtcagaaatgccgaggcgctcgaacgggctgagcgcatcactgtgctggcgctggacaagaccggcacactgacttgcggcctgccgcaggtgaccgatgtcgtgccgcgtgtgctggctggcaacgaagcgctccgtctggccgccttgcttgagcagaattccgagcatccgctggccagggcgattgttgcggcggctggggcagttcagtctggtggagacgatagaaaagtagctgcgttcaaggcaattcccggttgtggcgtcgaaggcgagattgatgggcgggtattgcgcctcggttcgcccacttggttggggctggcggccgacctggccgtcggtgagttgcagcaggccggcaaaactgtcgtcgcattgaacgagggtgattcgaccttggccatttttgccgtggccgatgccttgcggccaagttcgcggctcgctgtcagtcgtttgcgcgaacgcggcatccgggtggtgatgttaactggtgacaatgtggcaacagcagcagcaatcgctgccgaagccggtatcgatgaatatcgggccggcatcctgcccggcgacaaagcagcggctgttcaggagttgaaggctggcggtgggcttgtggcgatggtcggtgacggaatcaacgatgcgcctgctttggcggcggcagatgtcagcttcgcgatcggggctggttcggatgcggctatcgaggctgcggatttaacattgatacgcagcgacctgctcggtgtttttgatgcaattgacctatcggcggccaccttggggaaaatccgccaaaatcttttcttcgctttcatttacaatgttttgggaattccgctggctgccttggggtggcttaacccggtggtcgcgggagcggcgatggcgatgagttcggtttcagtggtttcgaactcgcttctgctcaagcgttggcgacccaaagacagggctgggcggcagggaatggagtctcgatga

SEQ ID NO: 55550 - protein, 735 aa, Dechloromonas aromatica RCB
MSDEADRGRVVEFAIGGMTCAACSARLEKVLNRQAGMQANVNLAAERARVRLSAMADEAAVVAAVAKAGFTAELVDSQTREREKAEKLRVYQREIRRFWIAVALTLPLVGQMLFMFGEHGHLNEMPRWLQLALATPVQFWIGWRFYDGAYKALRGGGANMDVLVALGTSMAWGFSTVVTLFGLNQHIYFEGGAAVITLVLLGKLLEARAKARTSEAIESLIRLQPKTARVERDGQWVEMAVEALMPGDIFLVRPGESVPVDGEVVDGESSVNEAMLTGESMPLGKRAGDRVFAATANGQGALRCRATGVGEHTLLAGIIRLVGEAQGSKAPVQRLADKISSIFVPTVCIIALVTFAGWWIYSGDFSEALVNAVAVLVIACPCALGLATPTAIMVGTGQGARAGILVRNAEALERAERITVLALDKTGTLTCGLPQVTDVVPRVLAGNEALRLAALLEQNSEHPLARAIVAAAGAVQSGGDDRKVAAFKAIPGCGVEGEIDGRVLRLGSPTWLGLAADLAVGELQQAGKTVVALNEGDSTLAIFAVADALRPSSRLAVSRLRERGIRVVMLTGDNVATAAAIAAEAGIDEYRAGILPGDKAAAVQELKAGGGLVAMVGDGINDAPALAAADVSFAIGAGSDAAIEAADLTLIRSDLLGVFDAIDLSAATLGKIRQNLFFAFIYNVLGIPLAALGWLNPVVAGAAMAMSSVSVVSNSLLLKRWRPKDRAGRQGMESR

SEQ ID NO: 55551 - DNA, 2220 bp, Dechloromonas aromatica RCB
  CDS (1)..(2220): transl_table=11
atgagtcttgatccccacccgaaacctcttcaagaaactgcccatagcggctgtgcgggtggctgttccgcagaaatgaccaccgccacagaaatcccggcagcttccgatctcgcccaaagcgatggcatacccgttttcgtcattccaaccatggactgcccgaacgaggagaatgacatccgtcgggcggtggccggtatcgatggcatccgttccctgcgtttccaactgtctgcacgcacaatttcgatagatgcgacgacagatgccctcgatgcagccttggccgccatccgcaaggcggggttcagccccaaagcggtgtcggcagatcaggcggaaacgaaaaacgtcggcgtcagtgagctatggcgaagtgttctggcgttgggcctggccgtcggcgctgaagccctggatttcttcgcgcccgacacattgcctttcaagggtttcggtatggcattagccgtcgccgccatctggctgtccggcatttctacctatagcaaaggcgtggcggcattgcggcgcgggcagttgaacatgaacgcgctgatgggtgtggcggtgaccggggccttcctcataggacagtggcccgaggcggcgatggtcatggccttgtatgccattgccgaactgatcgaagcccgctccgtggatcgggcgcgtaacgccatcaagggcctgctcgacctgacgccagagacggcggaagttcggcaggctgatggaacgtggctggacgttccggccgcagcggtaacgctggagtcctgcgtgcgggtcaaacccggcgccaggataccgctcgatggtcaggtgacggcaggaagcagtgcggtcaatcaggcgccggtcaccggcgaaagtatcccgattgacaaggtggtaggcgacccggtatttgccggcacgatcaacgaaaccggcatcctggagttccgtgtgacggctgctgccgacaacaccacgctggcccgcatcattcacgcggtcgaacaggcgcaggggacgcaagcgccaacccaacgcttcgtggatcggtttgccgcaatctacaccccggccgtgttcggcatcgcggttgccgtggccgttctgacaccctggctcctcggctggacctggacgcaggcgatctacaaggccctggtgctgctggtcatcgcttgcccctgcgcgttggtgctcgccacgccggtgacggtggtcagcgggctggcggcagcggcccgacgcggcatcctgatcaagggcggtgtctatcttgaagaggcccgaaaactgcgggtcattgccctcgacaagaccggtaccattaccgaaggcaaaccccgtctggtcgccacggaaatacttccctcggcggtccccgaatcgcaagtgcttgcctgggcggccagcctggccggacactcggaccatccggtctcaaaagcgattgcgaccggtctcaaggttccagagaacggcttgaccgattttgtcgcactcgccggacgaggtattgaagctcgcacggatggccaacgcctctttctcggcaaccatcgactggttgaggagcgcaacttgtgcagcgccgaaatcgaggctcgccttcaggcgcacgagatgcaaggccggacggtcaccatgctggcatcggcaaagcaggtgctggcgatttttgcggtggcggacaccatcaaggaaagttcgcgggaggcggtggccgatctgcaccgtctcggtgtcgtctcggtcatgttgaccggcgacaatgtggcgacggccgcgagcatcgcaaaggaggccggcatcgacgacgctcggggcaatcttctcccagaggagaaactggcggccatcgaagatttgcagcgtcgctatggcccgaccgcgatgaccggcgacggcatcaacgacgcgccagccctggcgcgtgccgacatcggcgtggcgatgggcgcggctggcacggacacggcgatggaagcggccgacgtggtgatcatgaacgacgacctgcggcgtattcctgagaccattcgcctctctcggcgcacccatgcggtactctggcaaaacatcgggctggccctgggcatcaaagcgatctttctcggactcgccatttttggcaatgcaaccatgtggatggcggtattcgccgacatgggcgcaagtctgctggtggtgggaaacggcgtgcggctgttgcgcaaatga

SEQ ID NO: 55552 - protein, 739 aa, Dechloromonas aromatica RCB
MSLDPHPKPLQETAHSGCAGGCSAEMTTATEIPAASDLAQSDGIPVFVIPTMDCPNEENDIRRAVAGIDGIRSLRFQLSARTISIDATTDALDAALAAIRKAGFSPKAVSADQAETKNVGVSELWRSVLALGLAVGAEALDFFAPDTLPFKGFGMALAVAAIWLSGISTYSKGVAALRRGQLNMNALMGVAVTGAFLIGQWPEAAMVMALYAIAELIEARSVDRARNAIKGLLDLTPETAEVRQADGTWLDVPAAAVTLESCVRVKPGARIPLDGQVTAGSSAVNQAPVTGESIPIDKVVGDPVFAGTINETGILEFRVTAAADNTTLARIIHAVEQAQGTQAPTQRFVDRFAAIYTPAVFGIAVAVAVLTPWLLGWTWTQAIYKALVLLVIACPCALVLATPVTVVSGLAAAARRGILIKGGVYLEEARKLRVIALDKTGTITEGKPRLVATEILPSAVPESQVLAWAASLAGHSDHPVSKAIATGLKVPENGLTDFVALAGRGIEARTDGQRLFLGNHRLVEERNLCSAEIEARLQAHEMQGRTVTMLASAKQVLAIFAVADTIKESSREAVADLHRLGVVSVMLTGDNVATAASIAKEAGIDDARGNLLPEEKLAAIEDLQRRYGPTAMTGDGINDAPALARADIGVAMGAAGTDTAMEAADVVIMNDDLRRIPETIRLSRRTHAVLWQNIGLALGIKAIFLGLAIFGNATMWMAVFADMGASLLVVGNGVRLLRK

SEQ ID NO: 55553 - DNA, 2259 bp, Thermobifida fusca YX
  CDS (1)..(2259): transl_table=11
atgggtgaggaagccacacggcgccgcgacgccgaacgggttgaactcctcatcggcggcatgacctgcgcgtcgtgcgccaaccgagtggaacgcaaactcaacaagctcgccggggtgcgggccagcgtcaactacgccactgagaaagcgtcagtggagttcgacagcggcgtcaccatcgacgacctgatcaccacggtcgagaaagcaggctacacggcggccctccctgccccgccctgcgccgcccaggacacggaagaccaggccgctgacccggtggcagcgctgcgcacacggctgctggtcagcgcggtgctgtcgattccggtcatcgccatggcgatgatcccggccctgcagttcacctactggcagtgggcgtccctcgtcctggccgctccggtggtggtgtggggtgcgctgcccttccacatcgccgcggtcaaaaacctgaggctgggggaggccaccatggacacgctggtgtccatgggcacgctggcggctttcgcctggtcgctgtatgcgctgttcttcggggaagcgggcatgcccggcatgacgcacccgttcgagttcaccatcagccgcaccgacggttctgccgccatctacttggaggtcgcggccggggtcaccacgttcatcctcgccggacgctacttcgaagctcgggctaagcggcgggccggggccgcgctgcgcgccctcctggaattgggcgcgaaagaggtcacggtggtgcgcggcggccgggagacgcggatccccgtggagcagctcgccgtcggtgaccggttcgtggtgcgtcccggggagaagatcgccacggacggggttgtggaggagggcgcctccgccgtggacgcgagcatgctcaccggtgagtccgtgcccgtcgaagtcggggtcggcgacgcggtggtcggcgccacggtcaacgtcggcggccggctcgtggtgcgcgcaacccgcgtgggcgcggacacccagctcgcgcagatggcgaagctggtggaggaggcgcagagcggcaaggccgaggtgcagcggctcgccgaccggatttccggggtgttcgtgcccgtggtgatcgcgctcgcggtggccacgctcgggttctggctgggggcgggcggcccggtggaggccgcgtttaccgctgctgtcgcggtgctcatcatcgcctgcccgtgcgcgctgggcttggccactcccacggcgctcctggtgggcacgggccgtggagcccagctcggcatcctcatcaaaggccctgaagtgttggagaacacgcgccgcgtggacacggtggtgctcgacaagaccggcacggtcaccatgggcacgatggcgctcgtcgacgtggccgctgccgacggggaggacgccgacgaggtgctgcggctagccggggctgtggagcacgcctccgagcaccctattgcgcgggcgatcgcccggagcgccgccgaccgggtcgggaatgtgccgccggtgactgatttcgctgccaccgcagggctgggggtgcggggggtagtggacggccgcacggtcctcgtggggaaggccgccctgctcgcccaggaaggcgtggccgtgccggaggcggtggcgcggaaggccgcacaggcggaagccgcaggccacaccgcggtcctggccgcctgggacgggaaggctcgcggggtgcttgtcgtcgccgacacggtgaagcccacgagcgccgaggccgtggcccagttgcggcagctggggctcaccccgattctgctcaccggcgacaacgcggccgtggcccgcacggtcgccgaacaggtcggtattgacgaggtcatcgccgaagtgctgcccgccgacaaggtggacgtggtcaaacggctgcaggacgaaggccgcgtggtggcgatggtcggtgacggggtgaacgatgcggccgcactcgcccaagccgatttggggctggcgatgggcactggcacggatgcggcgatcgaggccgcggacctcaccctggtccgcggggatctgcgggtcgccgcggacgcgatccggctgtcccgccgcaccctggccacgatcaaaggcaacctgttctgggcgttcgcctacaacgtggcggcgctgccgctggccgctgccgggctgctcaacccgatgattgcgggcgcggccatggcgttctccagcgtcttcgtggtcagcaacagtctgcggctgcggggcttccgcccccatgccgcgccgtga

SEQ ID NO: 55554 - protein, 752 aa, Thermobifida fusca YX
MGEEATRRRDAERVELLIGGMTCASCANRVERKLNKLAGVRASVNYATEKASVEFDSGVTIDDLITTVEKAGYTAALPAPPCAAQDTEDQAADPVAALRTRLLVSAVLSIPVIAMAMIPALQFTYWQWASLVLAAPVVVWGALPFHIAAVKNLRLGEATMDTLVSMGTLAAFAWSLYALFFGEAGMPGMTHPFEFTISRTDGSAAIYLEVAAGVTTFILAGRYFEARAKRRAGAALRALLELGAKEVTVVRGGRETRIPVEQLAVGDRFVVRPGEKIATDGVVEEGASAVDASMLTGESVPVEVGVGDAVVGATVNVGGRLVVRATRVGADTQLAQMAKLVEEAQSGKAEVQRLADRISGVFVPVVIALAVATLGFWLGAGGPVEAAFTAAVAVLIIACPCALGLATPTALLVGTGRGAQLGILIKGPEVLENTRRVDTVVLDKTGTVTMGTMALVDVAAADGEDADEVLRLAGAVEHASEHPIARAIARSAADRVGNVPPVTDFAATAGLGVRGVVDGRTVLVGKAALLAQEGVAVPEAVARKAAQAEAAGHTAVLAAWDGKARGVLVVADTVKPTSAEAVAQLRQLGLTPILLTGDNAAVARTVAEQVGIDEVIAEVLPADKVDVVKRLQDEGRVVAMVGDGVNDAAALAQADLGLAMGTGTDAAIEAADLTLVRGDLRVAADAIRLSRRTLATIKGNLFWAFAYNVAALPLAAAGLLNPMIAGAAMAFSSVFVVSNSLRLRGFRPHAAP

SEQ ID NO: 55555 - DNA, 2460 bp, Ralstonia eutropha JMP134
  CDS (1)..(2460): transl_table=11
atgtcgaatgccagcctttcccccaccttgacgggcagccaggcgccggagtggcggctgccgatcgacggcatgacctgcgcgtcgtgcgtgcggcgtgtcgagaatgcgctggccaaggtgcccggcgtgcaggacgtggccgtgaaccttgccaccgagcaggccacgctccatgcggacagcggcgccgtgctgccggccgcagccaaggccgtggcggatgccggctatgaagtgccacgcgagacggtagaactcaatatcgcagacatgacctgcgcttcctgcgtgggccgtgtcgaacgcgcgctgcgcgccgtgccaggtgtgcttgatgcccaggtcaatcttgctaccgaacgcgcgagcgtgaccctgctgcgcggcgccgccgatgccgattcgctcgccgccgcggtcgcgcgcgcgggctacggtgcaaccccggtcaccgaaacgctgccatcggctgcgccgggcgatgccgcacgcgacttctggaccggtccatggccggtgatcttctcggcggcgctttccgtgccgctggtcgcaccgatggtgctcgaatggttcggcatgcactggatgctgccgggctcggtgcagtggctgcttgccacgccggtgcagttcgtgtttggctggcgcttctacaaggccggctggaaggcagtgcgcgcccgcgccggcaatatggacctgctggtggcgctgggcacgagcgctgcctatggcctgtccctgtggctgatgtggcgcatgccggacggcatgccgcatctctacttcgaaagcgccgcggtggtcatcacgctcgtgcggctgggcaaatggctggagacgcgggccaagcgccagaccgccgatgccatccgcgcgctcgccgcgctgcgacccgacaccgctcgcgtgcgccgcgacggccaggaagtgacggtgccgctgggatcggtgcgtgtgggggacgaagtggtggtgcgtccgggcgagcgtatccccgtcgatgccgtggtgatcgaaggcagcagccatgccgatgaatcgatgctgaccggcgaaagcgtgcccgtaccgaagggccccggcgacaaactcaccggcggcgccatcaatttcgaagggctgctggtagcgcgcactgtcgcggtgggcgccgagaccgtgcttgctcgcatcatccgcatggtcgagcatgcgcaggcggccaaggcaccgatccagcgcctggtcgaccaggtcagcgcggtgttcgtgccggtggtgctgggcattgcgctggtgacgctgctcggctggggcctgttcgcgggcgactgggaaacggcactgctcaatgcggtggcagtgctggtgatcgcctgcccgtgcgcgctggggctcgccacgccaaccgcgatcatggccggcaccggcgccggtgcgcgcgcgggcattctgatcaaggatgcagaggcgctcgagattgcccatcgcgtgagcgtggtggcgttcgacaagaccggcacgctgaccgtgggccggccggaagtggtggcgctgcacgccgccgacccggaggatgccgacggcgccaggctgctggcgcggctggcggcacttcaggcaggaagcgagcacccgctggcgcgcgcggtgctgaatgcggcgcaaacgcgcggcatcaccgcacccgcggccactgatgtgcaggcgttgccggggcgcggcattgccggcgtggtcgacgggcaagcgctgcagctcggcagcgaacggctgcgcgaagcgctcggcgctgatgcgggtacgctgcaggcggcggcggaacgcctgcgcgacgagggtcgcacggtgtcgtggctggtggaaacgcagccgccacgcgtcactggcctggtggcgtttggcgatgccatcaagcccggcgcacccgcggccattgcgcggctgcgcgcagccggcgtgcgcacggtgatgctgaccggcgacaacaagggcgccgcggcacgcgtggcccaggcgctcggtctcgatgaagtacaggccgaggtactgcccgaagacaaggcggcgcgtgtgcgtgcgctcggccaggatggcgcggtggtggccatggtcggcgatggcatcaacgatgcgccggcgctggccgcggccgatgtcggcattgcgatgtccactggtaccgatgtcgccatgcacgcagcggggatcacgctgatgcgcggggatccggcgctcgtcgccgacgcgctggccgtgtcacaccgcaccgtgcgcaagattcgccagaacctgttctgggcgttcttctacaacgtggtcggcattccgctggctgcggcagggctgctgaacccggtggtcgccggggccgcgatggcgttctcgagcgtgagcgtcgtcagcaacgcgttgctgctgcggcgctggcatccgggtggcgagacgggtgaaacaggagcaaaggcatga

SEQ ID NO: 55556 - protein, 819 aa, Ralstonia eutropha JMP134
MSNASLSPTLTGSQAPEWRLPIDGMTCASCVRRVENALAKVPGVQDVAVNLATEQATLHADSGAVLPAAAKAVADAGYEVPRETVELNIADMTCASCVGRVERALRAVPGVLDAQVNLATERASVTLLRGAADADSLAAAVARAGYGATPVTETLPSAAPGDAARDFWTGPWPVIFSAALSVPLVAPMVLEWFGMHWMLPGSVQWLLATPVQFVFGWRFYKAGWKAVRARAGNMDLLVALGTSAAYGLSLWLMWRMPDGMPHLYFESAAVVITLVRLGKWLETRAKRQTADAIRALAALRPDTARVRRDGQEVTVPLGSVRVGDEVVVRPGERIPVDAVVIEGSSHADESMLTGESVPVPKGPGDKLTGGAINFEGLLVARTVAVGAETVLARIIRMVEHAQAAKAPIQRLVDQVSAVFVPVVLGIALVTLLGWGLFAGDWETALLNAVAVLVIACPCALGLATPTAIMAGTGAGARAGILIKDAEALEIAHRVSVVAFDKTGTLTVGRPEVVALHAADPEDADGARLLARLAALQAGSEHPLARAVLNAAQTRGITAPAATDVQALPGRGIAGVVDGQALQLGSERLREALGADAGTLQAAAERLRDEGRTVSWLVETQPPRVTGLVAFGDAIKPGAPAAIARLRAAGVRTVMLTGDNKGAAARVAQALGLDEVQAEVLPEDKAARVRALGQDGAVVAMVGDGINDAPALAAADVGIAMSTGTDVAMHAAGITLMRGDPALVADALAVSHRTVRKIRQNLFWAFFYNVVGIPLAAAGLLNPVVAGAAMAFSSVSVVSNALLLRRWHPGGETGETGAKA

SEQ ID NO: 55557 - DNA, 2373 bp, Thiobacillus denitrificans ATCC 25259
  CDS (1)..(2373): transl_table=11
atggcttcctcgcattccatcggcatcgaaggcatgacctgcgcgagttgcgcgacccgggtcgaaaaagcgctccggcagctgcccggcgtgaccgacgcctgcgtcaacctcgcgaccgagaccgcgaccgtcaccggcgacgcggacctcgccgccgtgcagcaggcgatcgagaaaaccggcttcagcgtgccgaccgaatcgctcacgctcgcgatcaccggcatgacctgcgcgagctgctcggcacgcgtcgaaaaagccctcgcgcgggttcccggcgtggtcggcgcgagcgtcaatctcgcgaccgaacaggcgacggtcgacgtcgcgcgcggcacctcgccggcagcgctgatcgcggcggtcgagcgcgcgggctacggcgcgcaactgccgcaacaggcggctgccgcgccggcaccggccgcggcgctgcccgactggtggccggtcgcgctcgcgatggccctgtcggcgccgctcgttgcgccgatgctcgcgagccttgccggcgcgcactggatgctgcccggctggctgcagctcgcgctcgcgaccccggtgcagttctggctcggcgcgcgcttctaccgcgcgggctggaaggccttgcgcgcgggcagcggcaacatggacctgctcgtcgccgtcggcaccagcgcggcctggggcctttccgtctatctgctgctgacccgcgacgatccgatgcacctgtatttcgaggcctcggccgtcgtcatcagcctcgtgctgctcggcaagtggctcgaggcgcgcgcgaagcggcagacgaccgaggcgatccgcgcgctgcaggcgctgcgcccggcgaccgcacgtgtgcgcgtcgacggcgtcgaccgcgacgtaccgatcgaggcgatccgcgtcggcgacctcgtcgtgatccgccccggcgaacgcgtgccggtcgacggcgaggtgatcgaaggcacgagccaggtcgacgaatcgctgctgaccggcgaatcgctgccggtcgacaagcagccgggcgcggggctcaccggaggcgcgatcaacgcccacggcgtgctcgtcgcgcgcacgaccgccgtcggcgccgagacgacgctcgcgcgcatcattcgactggtcgagaacgcccaggcagccaaggcgccgatccagcgtctggtcgacaaggtcagcgcggtgttcgtgccggtcgtcatggtcatcgcgctcgtgaccttcatcggctggtgggcgtggggcggcagcgcagaacaggcgatcctcaacgccgtcgccgtgctcgtgatcgcctgcccctgcgcgctcggacttgcgacgccgaccgcgatcatggccggcaccggcgtcgcggcgcggcacggcatcctgatcaaggacgccgaagcgctcgaactcgcgcacagcatcgacaccgtcgtgttcgacaagaccggcacgctgaccgacggcacgcctcacctcgccgcacacgtcgccgcgccgggcgaagacgcgaaccggctgctcgcgctggcagcgggcctgcagcgcggcagcgaacatccgctcgcgcgcgcggtgctcgccgcgagcgacgcggccgggctcgcgccgttgccggccgaagcccagcaggccctgcccggccgcggcatcgcgggcaaagtcgagggcaccggctactggctcggcaaccgccggctgatgcaggatcagcaggtcgacacgagcgcgctcgaccccgccgcacgcgaacacgaagccgccggacgcagcgtctcctggctcgcgcgcgccgacgagcgccggctcctcggcctgctcgccttcgccgacgcggtcaagccgagcgcggcgcaggccgtagcgaagctcaaggcgcagggcgtcgagacggcgatgctgacgggcgacaaccgcggcgccgcggcctacgcggcgcaggcgctgggcgtcgaaaacgtgttcgccgaagtgctgccggaagacaaggccggccacgtcggcgcgctcaagggccgcggcaggaccgtggcgatggtcggcgacggcgtcaacgacgcgcccgcgctcgccgcggccgacgtcggcatcgcgatgtcctcgggcagcgacgtcgcgatgcataccgccggcgtcacgctgatgcgcggcgacccggcgctcgtggccgacgcgatcgacatctccaagcgcacctacgccaagatccggcagaatctgttctgggccttcgtctacaacgtcgtcggcatcccgctcgccgcggccggcctgctgagcccggtcattgcgggcgcggcgatggcgttctcgagcgtgagcgtcgtcaccaacgcgctgacgctgaaacgctggcgcccggccgaggacaggcgatga

SEQ ID NO: 55558 - protein, 790 aa, Thiobacillus denitrificans ATCC 25259
MASSHSIGIEGMTCASCATRVEKALRQLPGVTDACVNLATETATVTGDADLAAVQQAIEKTGFSVPTESLTLAITGMTCASCSARVEKALARVPGVVGASVNLATEQATVDVARGTSPAALIAAVERAGYGAQLPQQAAAAPAPAAALPDWWPVALAMALSAPLVAPMLASLAGAHWMLPGWLQLALATPVQFWLGARFYRAGWKALRAGSGNMDLLVAVGTSAAWGLSVYLLLTRDDPMHLYFEASAVVISLVLLGKWLEARAKRQTTEAIRALQALRPATARVRVDGVDRDVPIEAIRVGDLVVIRPGERVPVDGEVIEGTSQVDESLLTGESLPVDKQPGAGLTGGAINAHGVLVARTTAVGAETTLARIIRLVENAQAAKAPIQRLVDKVSAVFVPVVMVIALVTFIGWWAWGGSAEQAILNAVAVLVIACPCALGLATPTAIMAGTGVAARHGILIKDAEALELAHSIDTVVFDKTGTLTDGTPHLAAHVAAPGEDANRLLALAAGLQRGSEHPLARAVLAASDAAGLAPLPAEAQQALPGRGIAGKVEGTGYWLGNRRLMQDQQVDTSALDPAAREHEAAGRSVSWLARADERRLLGLLAFADAVKPSAAQAVAKLKAQGVETAMLTGDNRGAAAYAAQALGVENVFAEVLPEDKAGHVGALKGRGRTVAMVGDGVNDAPALAAADVGIAMSSGSDVAMHTAGVTLMRGDPALVADAIDISKRTYAKIRQNLFWAFVYNVVGIPLAAAGLLSPVIAGAAMAFSSVSVVTNALTLKRWRPAEDRR

SEQ ID NO: 55559 - DNA, 2262 bp, Anabaena variabilis ATCC 29413
  CDS (1)..(2262): transl_table=11
atgaagaatgtgacactcaagctacgcggtatgagttgcgcttcctgcgctaaaagtattgcagatactattaattctgtcccaggtgtccatgactgtagtgtgaactttgggacagaacaggcaacagttaattatgaccccagaaaaacggatttacaagccatccaaaacgcagtgaatgcagcaggttattctgcatctcccctccaagaacaaaacttgatggcgggagacgatgatgaagaaaaaagatatcgtctgcaagaatcccgtgatttgcggcgaaaggtaacagtagggggcatcatcagtatcgtgctggtgattggctcactaccaatgatgacagggttacacctgcctagcattcctacatggctgcataacccttggctgcaattaatcctcaccactcctgtacagttttggtgtggttactccttctacatcaacagctggaaagctttccagcgccatgctgccacaatggataccctaattgttttaggtacaagtgcagcatatttctattccctattcgcaactttatttccgggcttcttcatcgcccagggattgatgccggatgtgtattatgaaactgcggcaattgtcattactttgattttgttggggcgactgttcgagaatcgtgccaaaggacaaacctcagaagctatccgcaagctgatcggtttacaagcgaaaacagcccggttgattcgcaacggacgagaagtagatgtaccgattgaggaagtagaaattggtgatattgtgctggttcgtcctggggaaaaaattcccgttgatggagaagtaattgacgggacatccacaattgatgaagcgatggtgactggggaaagtatacctgtgcaaaaacaaccaggggatgaagttataggtgcaactatcaataaaactggcagttttcagtttcgagccaccagagttgggaaagacactgtactggcgcagattgtccaactagtgcagcaagcccaaggctcaaaagctcctattcaaagactagcagaccaagttacagggtggtttgtgccggcggtaattgcgatcgctattctcacctttattatttggtataacttcatgggtaatatcaccctggcattgatgaccactgttggagtgttaattatcgcttgtccttgtgctttgggtttagccaccccaacttcagtgatggtaggtactggtaaaggtgcagaaaacggaattttaattaaaggcgctgaaagcttagaattagcgcaccaaattcacacaattgtcttagataaaaccggcacaattacccaaggtaaaccaacagttacagattttgtcgcagttaacggtactgttaacagcaatgaaattaagctgatacagttagccgcatccctagaacgcaattctgaacatccccttgcagaagcagttgtgagatatgctcaatctcaggaagtaactttagcaaatgtcacagactttgccgccgtggtaggtagtggtgtgcaaggtattgttgctcaccatcttgtgcagattggtacacaacgctggatggaagaattaagtattaacactcaagctttgcagccagacaaagaacgcttagaatatctgggtaaaacagccgtgtggttggcagttgacggggaaattgccggattaatgggaattgctgatgccattaaacccacttccacccaagctatcagagcattgcaaaaacttggtttagaagttgtcatgctcacaggcgacaatcgccgcaccgccgcaagtatcgcccgtgaggtggggattaaaagagtgttagcagaagtccgtcccgaccaaaaagccgctacagtccaagcaatacaagcagaaggcaaaattgtcgcaatggttggtgatgggattaatgatgcaccagctttagctcaagccgatgtgggaattgccattggtacaggtacagatgtggcgatcgctgccagtgatattaccctgatttctggcgatttgcaagccatagttacagccattcaactcagccgcgccacaatttacaacatccgccaaaacctattttttgcctttatttacaacgttgcaggtatccccatcgccgccgggattctcttccctatcttcggttggttacttaatcccatcatcgccggtgcagcaatggcttttagctcagtttccgtcgtcacaaatgctctgcgtttacgtaaatttcaacctaaaacacctgcataa

SEQ ID NO: 55560 - protein, 753 aa, Anabaena variabilis ATCC 29413
MKNVTLKLRGMSCASCAKSIADTINSVPGVHDCSVNFGTEQATVNYDPRKTDLQAIQNAVNAAGYSASPLQEQNLMAGDDDEEKRYRLQESRDLRRKVTVGGIISIVLVIGSLPMMTGLHLPSIPTWLHNPWLQLILTTPVQFWCGYSFYINSWKAFQRHAATMDTLIVLGTSAAYFYSLFATLFPGFFIAQGLMPDVYYETAAIVITLILLGRLFENRAKGQTSEAIRKLIGLQAKTARLIRNGREVDVPIEEVEIGDIVLVRPGEKIPVDGEVIDGTSTIDEAMVTGESIPVQKQPGDEVIGATINKTGSFQFRATRVGKDTVLAQIVQLVQQAQGSKAPIQRLADQVTGWFVPAVIAIAILTFIIWYNFMGNITLALMTTVGVLIIACPCALGLATPTSVMVGTGKGAENGILIKGAESLELAHQIHTIVLDKTGTITQGKPTVTDFVAVNGTVNSNEIKLIQLAASLERNSEHPLAEAVVRYAQSQEVTLANVTDFAAVVGSGVQGIVAHHLVQIGTQRWMEELSINTQALQPDKERLEYLGKTAVWLAVDGEIAGLMGIADAIKPTSTQAIRALQKLGLEVVMLTGDNRRTAASIAREVGIKRVLAEVRPDQKAATVQAIQAEGKIVAMVGDGINDAPALAQADVGIAIGTGTDVAIAASDITLISGDLQAIVTAIQLSRATIYNIRQNLFFAFIYNVAGIPIAAGILFPIFGWLLNPIIAGAAMAFSSVSVVTNALRLRKFQPKTPA

SEQ ID NO: 55561 - DNA, 2442 bp, Rhodobacter sphaeroides 2.4.1
  CDS (1)..(2442): transl_table=11
atgaccgaccaacaaccgatccgcacgggcctgcgcagcctgcgcctgcacccggacggaatgagctgcgcctcctgcgtggcgcgcaccgagcgcgtgcttgccgcggtgccgggcgtggccgaggcgcgggtgagcctcgcggacgagagcgcggacatccgctattccgatccggccacgccggaggctctggccgaggcgcttgcgcgcgcgggctacccggcccggcaggagcggctcaccctctcggtcgaggggatgagctgcgcctcctgcaccggccgggtcgagcgggtgctgaaggcgcagccgggggtgatcgaagccacggcgaacctcgcgagccgccgcgcgcaggtgacgctctgggagggcgcggccacggccgccgccctcgcgcaggccgtcaccaaggccgggtttgcggcctcgcccctcacggccgatgccccggatcgccgcgccgaggagatggcgatgctccgccgcgatgcctggctcgcggcgctgctgacgatcccggtgttcctcgtcgagatgggcggccatctcgtgcccgccttccaccactggatcgcgggcaccatcggcacgcagacctcgtggatcgcgcagttcctgctcacgagcctcgtgctggcggggcccgggcgacgcttctatgccaagggcgtgccggcgctcctgcgcggggcgcccgacatgaacagcctcgtggccgtcggcactttcgcggcctgggcttactcgacggtcgcgaccttcgcgccgggcctcctgcccgcagccgcccgctcggtctatttcgaggccgcggcggtgatcgtcgtgctgatcctgctcggccggctgatggaggcgcgcgcgcgggggcaggcgggcgcggccatcgcggggctcctgcgcctccagccgaagacggcgcgggtgagccgcgacggcacggagaccgaggtgccgatcgagagcatcgggcccggcgcgatcctcctcatccgtccgggcgagcgcattcccctcgacggggtggtggtggcaggcgagagcgcggtcgacgagagcatgttgaccggcgaggcgctgccggtcgccaaggccgagggggccgatgtcaccggaggcacggtgaacggcaccggcgcgctcaccatgcgggcgacgcgggtcggcgccgacacggtgctcgcgcggatcgtggccatggtcggagaggcgcagggcgccaagctgccggtgcaggcgctggtcgaccggatcacgctgcgcttcgtgccggtggtgatgggcgtggcggcgctcacggtgctcgtctggctcctgttcgggccgggccttggcgaggcgctggtggcgggcgtgtcggtcctcatcatcgcctgcccctgcgcgatggggctggcgacgccggtctcgatcatggtcggcaccggccgggccgccgagctgggcgtgctcttccgcaagggcgaggcgttgcagcggctgtccgaaatcgagcgggtggggttcgacaagaccggcacgctcaccgaaggccggccgcaggtgacggacgtcctgcccggcgaggggttgggccgcgaggagcttctggcgctggccgcggccgtcgaggcccggtcggaacatccgctggcgggcgcgatccggcgcgcggccgaggaccttccgccgctcgaggctgagggcttctcctcccggcccggccacggtgccgaggcgcgcgtcgcgggccggcgcgtgcgggtgggcagcctccggatgatggaggggctggatccgggcccgctcgggcccgaggcggcgcggctcgaggccgaagggcgcacgccggtctggctcgctctggacgaccggatcgccgggctgatcgccgtggccgaccgggtgaagcccacggcgcgggcggcggtcgaggcgctcgggcggctgggcctgcccgccgcgatggtcacgggagatgccccgggcgtcgcgcgcgccatcggacgggagctcgggatctcggacatccacgcgggtgtcctgcccggcggaaaggtcgaggaggtgacggccatgggccgggcggccttcgtgggcgacgggatcaacgatgcgccggcgctcgccgcagccgaggtgggcatcgccatcggcacgggcaccgatgtggccatcgaggccgcggatgtcgtgctcatgtcgggagatccggtgggcgtggccacggcggtggcactcagccgccggaccatgcgcaacatccgccagaacctcgcctgggccttcggctacaatgtggcgctgatcccggtggccgccggggtgctggtgccgttcggcgggccgcagctctcgccgatgctcgcggcgggcgcgatggccttctcgtcggtcttcgtgctgacgaacgcgctgcgcctgcgtcgcgcgcccgcggcggaggctctggcgtga

SEQ ID NO: 55562 - protein, 813 aa, Rhodobacter sphaeroides 2.4.1
MTDQQPIRTGLRSLRLHPDGMSCASCVARTERVLAAVPGVAEARVSLADESADIRYSDPATPEALAEALARAGYPARQERLTLSVEGMSCASCTGRVERVLKAQPGVIEATANLASRRAQVTLWEGAATAAALAQAVTKAGFAASPLTADAPDRRAEEMAMLRRDAWLAALLTIPVFLVEMGGHLVPAFHHWIAGTIGTQTSWIAQFLLTSLVLAGPGRRFYAKGVPALLRGAPDMNSLVAVGTFAAWAYSTVATFAPGLLPAAARSVYFEAAAVIVVLILLGRLMEARARGQAGAAIAGLLRLQPKTARVSRDGTETEVPIESIGPGAILLIRPGERIPLDGVVVAGESAVDESMLTGEALPVAKAEGADVTGGTVNGTGALTMRATRVGADTVLARIVAMVGEAQGAKLPVQALVDRITLRFVPVVMGVAALTVLVWLLFGPGLGEALVAGVSVLIIACPCAMGLATPVSIMVGTGRAAELGVLFRKGEALQRLSEIERVGFDKTGTLTEGRPQVTDVLPGEGLGREELLALAAAVEARSEHPLAGAIRRAAEDLPPLEAEGFSSRPGHGAEARVAGRRVRVGSLRMMEGLDPGPLGPEAARLEAEGRTPVWLALDDRIAGLIAVADRVKPTARAAVEALGRLGLPAAMVTGDAPGVARAIGRELGISDIHAGVLPGGKVEEVTAMGRAAFVGDGINDAPALAAAEVGIAIGTGTDVAIEAADVVLMSGDPVGVATAVALSRRTMRNIRQNLAWAFGYNVALIPVAAGVLVPFGGPQLSPMLAAGAMAFSSVFVLTNALRLRRAPAAEALA

SEQ ID NO: 55563 - DNA, 2397 bp, Geobacter metallireducens GS-15
  CDS (1)..(2397): transl_table=11
atgcataagacgatgttcggcattaccgggatgcactgcgccgggtgcgcggcccggatcgagaaggagatcggcctgatggacggggtcgtcatggcggtggtgaacttcgccaccgaggagatggcggtggagtacgacgaggcgaagacctcggaagacgtcatcgactcccgggtgaaggagttgggctacgggacgcgacgggccgctgcggcaggggagctccgcttcggggtccgggggctccactgcgcctcctgcgtggcgaacctggagaagaagctcctctccaaccccgccgtgaccgccgccgtggtgaacctggcccaggaggaggccctggtccggttcgatccggcccgcctcggccaggccgacatcttcgccctagtgacggaggccgggtacaccccggtggagccggagcaggggggggcggaagccgcgtcggagctcctctcccaacggaactggttcatcctgagtgccgttctctcgcttcccatcatgttcaccatggcccagcacgacaaccgggccgtggggtggatgaacctggtgctggccaccatcgtccagttctcggcggggctcaccttctaccgggggagctggttcgccctgaagaacaagagcgccaacatggacgtcctggtggcgctgggaacctccgccgcctacttctactccctcttagccttcttcggtgccttcggggagcacggggggcatgtcttcttcgagacctcggccatgctcatcgccttcatccggctcggcaagtacctggaggcccgggccaggggcaaggcgggagaggccctgaaaaagctcctgcggctccaggccgacaaggcgcggctcgtgacccccgagggggagcgggaggtgccggcctccgcggtccgggttggggacctggtgcgggtcttcccgggtgaggcccttcccgtggacggggaggtggttgaggggagctccaccgtggacgagtccatggtcaccggcgagtcggtgccggtgacgaaaaagccagggaatccggtcaccggcgccacggtgaacagaggcggcgtcctcacggtccgagcgacccgtatcggcgaggaaacgctcctctcccagatcgtccggatggtgcgcgaggcccaggctgacaaggcccccatccagcgttttgccgaccgggtttccggcgtctttgtgccggtggtcatcgccctggccgtcatcaccttcgcggtctggtactgggggctccaccaggagttcctcttcgccttcaagctggccatcgccgtggtggtcatcgcctgcccctgcgccatggggcttgccacccccacagccatcatggtggggagcggcgtggggctcaatcgggggatcctcgtgaagcgggggtcggtactggagaacatctcccgggtccaggcgatccttctcgacaagaccggtaccctcacccggggggagccggccctcaccgacatcgtgccggtgccgggggagacggaggagcggctcctgacgctccttgccgcagccgagtcccgctccacccaccccctggcacaggctgccgtggccggtgcggcggaacgtggcgtgatgctggcggagacggccgactaccgggaaatcgaaggggggggcgttgtctgcaccgtggccggagagccggtcatggccgggaacgcccgcttcctggaggaggcgggaatcgtcaccgcaccactggcgaccgatgcggcgcggctggggggggaggggaaatccctggtcttcgtggctgcaggtgggcgccctgtgggggtcgctgccctggctgaccggctcaaggagggttcggccgcggccgtggcggccatgaaagccatgggaatcgccaccttcatgattaccggcgaccaccgggccgtggccgctgccgtggcccgagaggcgggtgttgacggcttcgaggcggaggtccttccgggccgcaaacaggaggtggtgaaggaataccaggcgaaggggcttttcacggccatggtgggggatggcatcaacgacgctccggccctggcccgggccgacgtggggatcgccatcggcggcggcaccgatgttgccaaggagaccggcgacgtgatcctcgtccgggacgatctcatggatgtggtgcgggccatccggctcggtcgggccaccctcgccaaggtgaagcagaacctgttctgggcactcttctacaacatcctcggcatccccgtggcagcggggatcctctactaccccttcggcatcaccctcaagcccgagtacgccgggctcgccatggccttctcgtcggtgtcggtggtgaccaactcgattcttctcaggaaagttggcaagaaatttgaatga

SEQ ID NO: 55564 - protein, 798 aa, Geobacter metallireducens GS-15
MHKTMFGITGMHCAGCAARIEKEIGLMDGVVMAVVNFATEEMAVEYDEAKTSEDVIDSRVKELGYGTRRAAAAGELRFGVRGLHCASCVANLEKKLLSNPAVTAAVVNLAQEEALVRFDPARLGQADIFALVTEAGYTPVEPEQGGAEAASELLSQRNWFILSAVLSLPIMFTMAQHDNRAVGWMNLVLATIVQFSAGLTFYRGSWFALKNKSANMDVLVALGTSAAYFYSLLAFFGAFGEHGGHVFFETSAMLIAFIRLGKYLEARARGKAGEALKKLLRLQADKARLVTPEGEREVPASAVRVGDLVRVFPGEALPVDGEVVEGSSTVDESMVTGESVPVTKKPGNPVTGATVNRGGVLTVRATRIGEETLLSQIVRMVREAQADKAPIQRFADRVSGVFVPVVIALAVITFAVWYWGLHQEFLFAFKLAIAVVVIACPCAMGLATPTAIMVGSGVGLNRGILVKRGSVLENISRVQAILLDKTGTLTRGEPALTDIVPVPGETEERLLTLLAAAESRSTHPLAQAAVAGAAERGVMLAETADYREIEGGGVVCTVAGEPVMAGNARFLEEAGIVTAPLATDAARLGGEGKSLVFVAAGGRPVGVAALADRLKEGSAAAVAAMKAMGIATFMITGDHRAVAAAVAREAGVDGFEAEVLPGRKQEVVKEYQAKGLFTAMVGDGINDAPALARADVGIAIGGGTDVAKETGDVILVRDDLMDVVRAIRLGRATLAKVKQNLFWALFYNILGIPVAAGILYYPFGITLKPEYAGLAMAFSSVSVVTNSILLRKVGKKFE

SEQ ID NO: 55565 - DNA, 2607 bp, Desulfovibrio desulfuricans G20
  CDS (1)..(2607): transl_table=11
atgaaagacgattcacaattgtcagccgcggacgggggcgaaaccggcgcggcaggtgtaacgcacgacggtgcacagccgccccgtacagccagaatgccggtcaagggtatgacctgcgcggtctgcgccggacggatagaaaaagttgtcggcgccatgcagggcgtgcagtccgtcaatgtcaaccttgcttctgaaatcatggacgtgagctggaatccggaagtggtccggcttgatgatattactgccggagtgaaaaaactgggctttgaggcgatgcctccccgggacgaagctccggaagagactgtgctgcgcttttctgtgggaggcatgacctgtgccgcctgttccggaagaatagaaaaagttgtgggcggcatggagggcgttgcttcggtgacggtaagcctgccggcggaaacggccaccgtggtgcccatggcgggaacggcgcaccgggcactggttgacgctgtggaagcgcgcatacgggcgctgggtttcaccgcgcagtacatggcgcccgaagcggcggacgatgcacatgctctgtgggaaaagcagaaggccgaaagcgacgcccgtcttgccgaaatgcggcgcaggcttgttcctgcttttctttttgcactgccgctgtttgtcatctccatgggagaaatggcggggttgcccatgcccgcgttgctttcaccgcatcggtcgccggtgtcgtttgcccttgtgcagcttatgctggtgctgcctgtcatgtggtcgggccgcaatttttaccgcgtgggtttcagaaacctgatcaacggcggacccaacatggattcgcttattgcggtgggtacgggagcggcgtttgcctacagcctgtggaacaccgtggagattgtgctgggcgtggatgtgatgcagcgcgccatggacctgtattacgagtcggcagccgtgatcattgccttgatttcgcttggcaaatactttgaagtccgctcccgcgcccgtacgtccgaggccatccggggactcatggagctgacgcctgacacggctctgctggttgagccggaaggccaccgcgaggttcccgtggcagaagtgcatcgcggcgacaggttgctggtgcgccccggtgacagaattcccgtggacgggatattggtttccggcacttcaagtgttgatgaatccatgctgacgggtgaaagcatgccggtgaccaagcgtgaaggcgacagcgtggcgggcggcaccattaacggtaccggctcgttcaccatgcgcgcggaacgcgtgggagccgacactgtgctggcgcgtatcatccggctggtgcaggacgcgcagggatccaaggctcccattgccagtctggcagacagagtgtcgttgtattttgttcccattgtcatggctgtggcactgctgtccggtctcagctggtttgctttcagcggagaaggctttgctttttcgctgcgcattttcattgcggtgctggttatcgcctgcccgtgcgccatgggactggccactcccacttccattatggtgggcacgggacgcggagcgcagctgggtgtgctgatcaaaagcggtaccgcgctggaagccgccggcagggtgcaggccgttgtgtttgataaaaccggaaccctgacggaagggcatcctgtgcttgaggatgtggagccggtaggctctgcggcacagccggatgttctggtacggcttgccgcgtctctcgaatctgcttctgaacacccgctgggcgcggccattgtggaaggtgcccgcaggcgtcagctttcgctgtggccggtggacggcgtatctgccgtgccgggacgcggggttacgggcactgtcgcttcaccggaaggtgagcgcaggattcatataggcaataccgcctttctgcgtgaagcaggtatgcaggccgattgggacgctgtggggcggcttatgcaggggcatgccgaaaaaggccgaacccccctgctgatgggggtggacggtcaggtggccggggtgcttacggtggctgatccgttgaaggaaaacgctccggctgtggttgccggtctgaaagatatgggcatccatgtggtgatgctgaccggtgacaacgccaccacggcgcgggccgtggcggagcgtgccggtatagatgacgtggtggccgaagtgatgcccgatgaaaaggatgccaaagtggcggcgctgcaggagcgcggctacagagtggccatggtgggagacggtatcaacgatgctcccgcactggcgcgcgccgatgtgggcatagccatgggaacgggcatcgatgtggccgtggaggccggcgacgtggtgctgatgaaaggagacctgcacggtgtgctgactgcgctggcgctttcgcgtgccacggtgcgcaacatcaagcagaaccttttctgggcattcggctataacgtgctcggcattccggtggccatggggcttttgcatgcgcttttcggcggccccacgctttcgcccatgatagcgggcgctgccatggccatgagttccgtgtccgtagtcagcaatgcgctgaggctgcgatttttcaggccctcatag

SEQ ID NO: 55566 - protein, 868 aa, Desulfovibrio desulfuricans G20
MKDDSQLSAADGGETGAAGVTHDGAQPPRTARMPVKGMTCAVCAGRIEKVVGAMQGVQSVNVNLASEIMDVSWNPEVVRLDDITAGVKKLGFEAMPPRDEAPEETVLRFSVGGMTCAACSGRIEKVVGGMEGVASVTVSLPAETATVVPMAGTAHRALVDAVEARIRALGFTAQYMAPEAADDAHALWEKQKAESDARLAEMRRRLVPAFLFALPLFVISMGEMAGLPMPALLSPHRSPVSFALVQLMLVLPVMWSGRNFYRVGFRNLINGGPNMDSLIAVGTGAAFAYSLWNTVEIVLGVDVMQRAMDLYYESAAVIIALISLGKYFEVRSRARTSEAIRGLMELTPDTALLVEPEGHREVPVAEVHRGDRLLVRPGDRIPVDGILVSGTSSVDESMLTGESMPVTKREGDSVAGGTINGTGSFTMRAERVGADTVLARIIRLVQDAQGSKAPIASLADRVSLYFVPIVMAVALLSGLSWFAFSGEGFAFSLRIFIAVLVIACPCAMGLATPTSIMVGTGRGAQLGVLIKSGTALEAAGRVQAVVFDKTGTLTEGHPVLEDVEPVGSAAQPDVLVRLAASLESASEHPLGAAIVEGARRRQLSLWPVDGVSAVPGRGVTGTVASPEGERRIHIGNTAFLREAGMQADWDAVGRLMQGHAEKGRTPLLMGVDGQVAGVLTVADPLKENAPAVVAGLKDMGIHVVMLTGDNATTARAVAERAGIDDVVAEVMPDEKDAKVAALQERGYRVAMVGDGINDAPALARADVGIAMGTGIDVAVEAGDVVLMKGDLHGVLTALALSRATVRNIKQNLFWAFGYNVLGIPVAMGLLHALFGGPTLSPMIAGAAMAMSSVSVVSNALRLRFFRPS

SEQ ID NO: 55567 - DNA, 2265 bp, Rhodospirillum rubrum ATCC 11170
  CDS (1)..(2265): transl_table=11
atgtccggcaaggccgccgttctttcccccccagcccccccgacctccaatgagggcggcgatgttgtcgatctcgccatcagcggcatgacctgcgcggcctgttcggcccgcctggaaaaggtgctgggcaaggttcccggcgtgtcggcggtcagcgtcaatctgggcaccgaccgcgcccgcatccacatcgaggggggcgatcggcgggcgcccgatctggtggccgccgtcaatcgcgccggcttcggcgccgaaccgctcagccaaagcgccccgccgcccgccgccgttcccgccgaggaccgcggcgaccggctgatctttgcgatggccgccctgctaaccctgccgctggtctgggacatgatcgcccatgtcagcggtctgcccggccatgtgccgccgctctggcagtggatcctggcgacgcccgtgcaatttatcgccggcgcccgcttctataagggagcctggcgggcgctgaagggccgggcgggcaatatggacagccttgtcgttctcggctccaccgccgcctatggcctgtcggcctggcgggtggcgaccgggacgacccaccatggcctgtatttcgaaggggcggcggtggtcatcaccctggtgatgctgggcaaggccctggaaggccgggccaagcgctccgccgcctcggccatccgcgccctgatgaccctgcgcccggctctcgcccacctcgagcgcgacggcgtggtcagcgacgtggcggtcgagcgtttggtcgttggcgatatcgtcgtggtccgccccggcgagggggtgcccgtcgatggcacggtgattgaaggcggggcggctattgatgaaagcctgctgaccggtgaaagcctgccggtgacgcgcggtcccggcgaccgggtgatcggcggctcgatcgatactgacgggctgatccgcctgcgcgtcggggcgacgggcaaggacgcgacgctggcgcgcatcatcgccctggtcgaaaacgcccaggccagcaaggcccccgtccaggtgatggtcgataaggtggccgccgtcttcgtgcccgccgtcgtgctgctggcccttggcgccttcaccggctgggccctgctcggcgagaccatggaaaccgccgtggccgcggcgatctcggttctggtggtcgcctgtccctgcgccctgggcttggcgacgccgacggcggtgatggtcggaaccggggtggcggcgcggcgcggcattttgatccgcgacgccggggcgctggaacaggcccatcgcgtcagcgttctcgccttcgacaagaccggaaccctgacccaggggcgcccggcccttgacgcggtgattatcgcgcccggggctgacgggttggacgagaataccctgctcgcccttgccgccgccgtgcagggcggcagcgcccatcccttggcccgggcgatgcgcgaggcggcaggcgatcgcgggctggacctgtcggcgatcagtgatttccgctcgctgcccggtctcggggttgaagccagggtggccgggcgggcgctgatcctgggcagccggcggttgctcgacgccaaagggatcgagcgggcatccctggagagccgggctggcgcccttgaagaggccggcgcctcggtcgtctgggtggccgagggcgaggcgaccgggggacggctgttgggcgtcatcgccctggccgatccgccgcgcgagggcgcggccctggcggtgagccgcttgaaggcgctgggtgtgcgcccggtgatgctgaccggcgatgccggccgcgtcgcccatgccatcgccgcccgcctgggcatcgacgacgttcgcgccgaggttctgcccgagggcaaggcggcggtggtcgaggccctgcgccagggcggggcggtcgtcgccatggttggcgatggcgtcaacgacgcgccggccctggcggcggccgatgtcggcatcgccatgggcacgggcacggatgtggcgatggaaaccgccggcatcaccctgatgcgcggcgatcccgggctgttgcccgaggccctggcgctgtcgcgggccacccatcgcaaaatccgccagaatttattctgggctttcctctataacgtcatcgctttgccgctggccgccagcggccgcctcgacccgatgctcgccggtgccgccatggcgctgtcgagcgtgtcggtggtggcgagttccctatggctaaggcggtggatgccgccgtccggagaccgtttccgtgcttga

SEQ ID NO: 55568 - protein, 754 aa, Rhodospirillum rubrum ATCC 11170
MSGKAAVLSPPAPPTSNEGGDVVDLAISGMTCAACSARLEKVLGKVPGVSAVSVNLGTDRARIHIEGGDRRAPDLVAAVNRAGFGAEPLSQSAPPPAAVPAEDRGDRLIFAMAALLTLPLVWDMIAHVSGLPGHVPPLWQWILATPVQFIAGARFYKGAWRALKGRAGNMDSLVVLGSTAAYGLSAWRVATGTTHHGLYFEGAAVVITLVMLGKALEGRAKRSAASAIRALMTLRPALAHLERDGVVSDVAVERLVVGDIVVVRPGEGVPVDGTVIEGGAAIDESLLTGESLPVTRGPGDRVIGGSIDTDGLIRLRVGATGKDATLARIIALVENAQASKAPVQVMVDKVAAVFVPAVVLLALGAFTGWALLGETMETAVAAAISVLVVACPCALGLATPTAVMVGTGVAARRGILIRDAGALEQAHRVSVLAFDKTGTLTQGRPALDAVIIAPGADGLDENTLLALAAAVQGGSAHPLARAMREAAGDRGLDLSAISDFRSLPGLGVEARVAGRALILGSRRLLDAKGIERASLESRAGALEEAGASVVWVAEGEATGGRLLGVIALADPPREGAALAVSRLKALGVRPVMLTGDAGRVAHAIAARLGIDDVRAEVLPEGKAAVVEALRQGGAVVAMVGDGVNDAPALAAADVGIAMGTGTDVAMETAGITLMRGDPGLLPEALALSRATHRKIRQNLFWAFLYNVIALPLAASGRLDPMLAGAAMALSSVSVVASSLWLRRWMPPSGDRFRA

SEQ ID NO: 55569 - DNA, 2481 bp, Syntrophus aciditrophicus SB
  CDS (1)..(2481): transl_table=11
ttgtcggataaggcgatccttcatatctcggggatgacctgcgcttcctgtgtgcgccgcgtggaggagggactgcgggaaatggccggcgtggagaaggccgcggtcaatttcgccaccgagcaggccgtcgtggacttcgatcccgctgcggtcaagcctgagcagctcggtaaaaaggtccgggaactggggtacgaggtcgtcaggatcgatcagcccgtttccggggggctggataaaacgacgatctccgtcggcggaatgacctgcgccgcctgcgtgcgccgcgtggagaacgccctgaaaaccgtcggcggcgtgaaggatgtgtcggtcaatctggctacagcccgggccaccgttctccatgaacaaacctggaatggcgtggcgggcctgaagcaggccgtcaccgatcagggctacgaatttctcggcgttctcgacgagcttcaggaagaccccatcgccgccgcccgaatccgggaaatccgggacctgagactccggtttaccgtgggggccgtcctcagcgtcatcatcttcatgggctccatgcagcactggtttccctttctccatgccatcccgccgcgccccctgcaaatggttctctttgttctcactgcccctgtcgtcttctgggtgggcagccgcttttttgtcggcgcgctcaaggcggcccggcagaagaccagcgacatgaacaccctcgtggccatcggcgcgttatccgcctatctctattccgccctggccaccttttttccccggttctttgccgaagcgggcattatgcctcatgtctactatgacggggcggcggtcatcgtaaccctgatcctcctcgggcggctgctggaagcgggggccaagggccggacttcccaggcgatccggcggctcgtcgggctcaaaccgaagaccgcccgcgtcgtgcgcgacggccgggaacaggacatccccgtggaggaactgctcaaaggcgatctcatcgtggtccggccgggggaaaagatccccacggacggcatcgtccggtccggcgcttctgcagtggacgaatccatgctgacgggggaaagcgtgccagtcaacaaggagccgggcaacgaggttttcggcgccacgttgaaccggagcgggagtttcaccttcgaagcgacgaagatcggggcggaaacggccctggcccagatcatccggctggtggaagaggcccagggttctaaggcccccattcagaggctggctgaccgtgtggcggcggtctttgtccccaccgttctggccatcgggttggtgacctttatcgtctggtatttcttcatccccgaacctgttttcagccgcgcccttctgaatttcgtctccgttctggtcattgcctgtccctgcgccctcggactggccactcctacggcggtcatggtgggaacgggtctgggggcggaacacggcatcctgatcaagggcggagaaagtctggaaaaggcctatcggctgactatcgtggtttttgacaagacgggcaccctgacccggggggagccggaggtgacggatatcgttccggcggagggattcacaccgcaaaatgtccttcaaacggcgctttccatcgaatccctgtcagagcatcccctggcccaggccatcgtgaaacggggaaaagcggagggactgtctcccctgcccgtggaaaactttgaagcgctgtccggattgggaacgagggcaaaaattgcaggcagatcctgcctgctgggaaatccccgtcttatggtccaggaaggcatggccctgcaggggttggatcggcaggctgccgacctcgccggccagggaaagacctgcgttctggtcgccgaagaggggctggtcattggcctgattgccctgtccgatgtgccgcgggaatcggccggagcggccatcgccgctctcaaggttgcggggctccgggtggccatgatcaccggcgacaacgccagcaccggtcaggcgatcgcacggcagctggagatcgatcaggttctggcggaggtgctgcccggcgacaaggccagagaaatccggcgtctgcagcaggagggacagatcgtggccatggtcggcgacggcatcaacgacgcgccggccctgacggcggcggatatcggcatcgccatcggcgccggaacggatgtagccatcgaggccagcgacatcaccctgatgaccggcgatctccaggccgttccccgggccatccgactttctttcgaaaccatgaaggtcatccgtcagaacctcttctgggccttcatttacaacatcatcggcattcccatcgctgccggggtgctctaccccttcttcggcatcctgcttaatccggagttcgccgcagccgccatggctctgagttctgtctccgtcgtcagtaattctctgcgtctccgccacacggggttaaagaaagataaaaacggataa

SEQ ID NO: 55570 - protein, 826 aa, Syntrophus aciditrophicus SB
MSDKAILHISGMTCASCVRRVEEGLREMAGVEKAAVNFATEQAVVDFDPAAVKPEQLGKKVRELGYEVVRIDQPVSGGLDKTTISVGGMTCAACVRRVENALKTVGGVKDVSVNLATARATVLHEQTWNGVAGLKQAVTDQGYEFLGVLDELQEDPIAAARIREIRDLRLRFTVGAVLSVIIFMGSMQHWFPFLHAIPPRPLQMVLFVLTAPVVFWVGSRFFVGALKAARQKTSDMNTLVAIGALSAYLYSALATFFPRFFAEAGIMPHVYYDGAAVIVTLILLGRLLEAGAKGRTSQAIRRLVGLKPKTARVVRDGREQDIPVEELLKGDLIVVRPGEKIPTDGIVRSGASAVDESMLTGESVPVNKEPGNEVFGATLNRSGSFTFEATKIGAETALAQIIRLVEEAQGSKAPIQRLADRVAAVFVPTVLAIGLVTFIVWYFFIPEPVFSRALLNFVSVLVIACPCALGLATPTAVMVGTGLGAEHGILIKGGESLEKAYRLTIVVFDKTGTLTRGEPEVTDIVPAEGFTPQNVLQTALSIESLSEHPLAQAIVKRGKAEGLSPLPVENFEALSGLGTRAKIAGRSCLLGNPRLMVQEGMALQGLDRQAADLAGQGKTCVLVAEEGLVIGLIALSDVPRESAGAAIAALKVAGLRVAMITGDNASTGQAIARQLEIDQVLAEVLPGDKAREIRRLQQEGQIVAMVGDGINDAPALTAADIGIAIGAGTDVAIEASDITLMTGDLQAVPRAIRLSFETMKVIRQNLFWAFIYNIIGIPIAAGVLYPFFGILLNPEFAAAAMALSSVSVVSNSLRLRHTGLKKDKNG

SEQ ID NO: 55571 - DNA, 2409 bp, Staphylococcus aureus subsp. aureus NCTC 8325
  CDS (1)..(2409): transl_table=11
gtggctaatacgaaaaaaacaacattagatatcactggtatgacttgtgccgcatgttcaaatcgtatcgaaaagaaactgaataaacttgatgacgttaatgcccaagtgaatttaactacagagaaagcaactgttgagtataaccctgatcaacatgatgtccaagaatttattaatacgattcaacatttaggttacggtgtcgctgtagaaactgtcgaattagacattacaggtatgacttgtgctgcatgctcaagccgtattgaaaaagtgttaaataaaatggacggcgttcaaaatgcaacggtcaatttaacaacagagcaagctaaagttgactattatcctgaagaaacagatgctgataaacttgtcactcgcattcaaaaattaggttatgacgcgtctattaaagataacaataaagatcaaacgtcacgcaaagctgaagcgctacaacataaattgattaagcttatcatatcagcagtattatctttaccactattaatgttaatgtttgtacatcttttcaatatgcatataccagcactatttacgaatccatggttccaatttattttagctacacctgtacaatttattattggatggcaattttatgtaggtgcttataaaaacttaagaaatggtggcgccaatatggatgtacttgttgctgttggtacaagtgcagcatatttttacagtatttatgaaatggttcgttggctaaatggctcaacaacgcaaccgcatttatactttgaaacaagcgccgtactaattaccttaatcttattcggtaagtatttagaagctagagcgaagtctcaaacaaccaatgcgcttggcgaattattaagtttacaagctaaagaagcacgcattttaaaagatggtaatgaagtgatgattcctctaaatgaagtacatgttggagatacacttatcgttaaaccaggtgaaaagatacctgttgatggcaaaattattaaaggtatgactgccatcgacgaatctatgttaacaggtgaatctatccctgttgagaagaatgttgatgatactgtaattggttcaacgatgaacaaaaacggtactattactatgacagcaacaaaagttggcggggacactgcgttggcaaatattattaaagttgtcgaagaagctcaaagttctaaagcgccgattcaacgattggcagatattatttctggttatttcgttcctatcgttgttggtatcgcactattaacatttatcgtgtggattactttagttacaccaggtacatttgaacctgcacttgttgcgagtatttccgttctcgtcattgcttgtccatgcgcattgggacttgctacaccaacttctattatggtaggtactggtcgcgctgctgaaaatggtattttatttaaaggtggcgagtttgttgaacgcacacatcaaattgataccatcgttttagataagacgggtaccattacaaatggtcgtccagtcgtgacagattatcatggtgacaatcaaacgctacaactacttgctactgctgaaaaagattctgaacacccattggcagaagccattgtcaattatgcaaaagaaaagcaattaatattaactgagacaacaacatttaaagcagtacctggccatggtattgaagcaacgattgatcatcaccatatattggttggtaaccgtaaattaatggctgacaatgatattagcttgcctaagcatatttctgatgatttaacacattatgaacgagatggtaaaactgctatgctcattgctgttaattattcattaactggtatcatcgcagtggcagatactgtcaaagatcatgccaaagatgctataaaacaattgcatgatatgggcattgaagttgccatgttaactggcgataataaaaacactgctcaagccattgcaaaacaagtaggcatagatactgttattgcagatattttaccagaagaaaaagctgcacaaattgcgaaactacagcaacaaggtaagaaggttgcgatggttggtgacggtgtaaatgatgcacctgcattagttaaagctgatatcggtatcgccattggtacaggtacagaagttgccattgaagcagctgatattactattcttggtggcgacttgatgcttattcctaaagccatttatgcaagtaaagcaaccattcgtaatattcgtcaaaatctattttgggcattcggctataatattgccggtatccctatagctgcattgggcttacttgcgccatgggttgctggtgctgcaatggcactaagttcagtaagtgttgtcacaaacgcacttagattgaaaaagatgcgattagaaccacgccgtaaagatgcctag

SEQ ID NO: 55572 - protein, 802 aa, Staphylococcus aureus subsp. aureus NCTC 8325
MANTKKTTLDITGMTCAACSNRIEKKLNKLDDVNAQVNLTTEKATVEYNPDQHDVQEFINTIQHLGYGVAVETVELDITGMTCAACSSRIEKVLNKMDGVQNATVNLTTEQAKVDYYPEETDADKLVTRIQKLGYDASIKDNNKDQTSRKAEALQHKLIKLIISAVLSLPLLMLMFVHLFNMHIPALFTNPWFQFILATPVQFIIGWQFYVGAYKNLRNGGANMDVLVAVGTSAAYFYSIYEMVRWLNGSTTQPHLYFETSAVLITLILFGKYLEARAKSQTTNALGELLSLQAKEARILKDGNEVMIPLNEVHVGDTLIVKPGEKIPVDGKIIKGMTAIDESMLTGESIPVEKNVDDTVIGSTMNKNGTITMTATKVGGDTALANIIKVVEEAQSSKAPIQRLADIISGYFVPIVVGIALLTFIVWITLVTPGTFEPALVASISVLVIACPCALGLATPTSIMVGTGRAAENGILFKGGEFVERTHQIDTIVLDKTGTITNGRPVVTDYHGDNQTLQLLATAEKDSEHPLAEAIVNYAKEKQLILTETTTFKAVPGHGIEATIDHHHILVGNRKLMADNDISLPKHISDDLTHYERDGKTAMLIAVNYSLTGIIAVADTVKDHAKDAIKQLHDMGIEVAMLTGDNKNTAQAIAKQVGIDTVIADILPEEKAAQIAKLQQQGKKVAMVGDGVNDAPALVKADIGIAIGTGTEVAIEAADITILGGDLMLIPKAIYASKATIRNIRQNLFWAFGYNIAGIPIAALGLLAPWVAGAAMALSSVSVVTNALRLKKMRLEPRRKDA

SEQ ID NO: 55573 - DNA, 2175 bp, Saccharophagus degradans 2-40
  CDS (1)..(2175): transl_table=11
atgaaacctttaaccgaccatcaatcttttgaatttaaaatcgaggggatgtcctgtgcgtcctgtgtaagacgtattgagaaggcgctgctggcaaccgatggggtgagcagtgccagtgtgaattttgcgacggaaactggaaaagttgaagtcggtgctgacacctctcaagacactatttatgcagcggtcaaaaatgctggatatcaagcaatcgctatggaggacgcgtcgtcagtcaacgctacaaaccaaggtggtcgtttatttattttgtcagggatgttgaccatccctttgatgctgccaatggtaggggaatggttcggctttaactggttactgccaattgggttgcaattaatgttggcttctattgtgcagttttacttcggtttccgcttttatcgtggtgcctacgctgcgttaaaggcgcgcagtggcaatatggatagcctggtcgcacttggtacatccgcggcctatggcttgtccatttataacattcttatcggtcatgcaggacatttgtattttgaatcatccgcagtgatcatcacgctagttattctaggcaaatggatggaagccagagccaaaaatcaaaccaccaatgccattcgcgctcttcaagatcttcggcctgaaaacgctaatttaattgaaaacggtattgagaaaattgttcccgcaaacacattgcaaattgaaaatattattttaattaaagctggggagagggtggctgccgatggtgttatcctttctggtaacggttatctcaatgaagctttgattaccggtgaaagtctaccggttgaaaagcaggaaggcgataaagtgatcggcggctcaattaacatcgatggtttgcttactgtaaaagtcacatccagcaatgcggaaagtacactcgcaaaaatcattcatttagtggagtccgcacaggcaaaaaaatcccctttgcaaaaattagtcgaccgtatcagcgctgtttttgtgcctgttgttttagtgattgcactggtgactttgttgacttggggttttgttaccggcgattggacgcaagcgattatcagtgctgtagccgtgctggttattgcttgtccctgtgcactgggtctggcgacgccaaccgccattatggtagggacgggattggctgccaaaagaggtattcttattaaagatgctgaaattttggagtccacagaacatgttgatgtggtcgcttttgataaaaccggcaccttgacggagggtaaacccagagtcgaacagatcgatgcatttgttggagaaggaaaacagttgctgggttatttaaagggtctgcagcagggcagcgaacatccacttgcaaaggcactgctcgatcatgcaacaaaagaatccattatcgccgagcgcttcgagttgattcataccctgccaggccttggaatgcgcggtcagttagaagagggtaattactggtttggcaataaacgtttgatgttaaacgtcggtattgaagcgtctttactcgaagactatagcgaagaatttgcgataaaaggcaatacgctctcgtgggtcgcgagacaaataaaacccaatacgattgagctttgtggtcttgtgcaattccaggatacgcttaaatccagtgcaattgaagccgtcagtcgattgcacgaattggggatacaaacctgtctgctcactggcgacacacaagacagtgcggacgttatcgccgctaaattgggtattgattttgttagagcggaagtgatgccagaacacaaggccgacgtggtgagtcaatttcagttggagggtaaaaaagtggccatggtcggagacggcattaatgacactcccgcattagcaacggcccatgtaggcatagcgatgggggcgggtaccgatgttgcgatgcaaactgcgggtattactctaatgcaaagtgatccattgagggttgttgaagctattaccattgctaaaaaaactcaacagaaaattcgtcagaatctgttttgggcgtttatctacaacctggttggaattccgcttgctgcttttggattgcttaacccgatggtggcgggagctattatggctgttagtagtgtgagtgttgtgctcaatgcattgcttctcagacttgtcaaaatcacatga

SEQ ID NO: 55574 - protein, 724 aa, Saccharophagus degradans 2-40
MKPLTDHQSFEFKIEGMSCASCVRRIEKALLATDGVSSASVNFATETGKVEVGADTSQDTIYAAVKNAGYQAIAMEDASSVNATNQGGRLFILSGMLTIPLMLPMVGEWFGFNWLLPIGLQLMLASIVQFYFGFRFYRGAYAALKARSGNMDSLVALGTSAAYGLSIYNILIGHAGHLYFESSAVIITLVILGKWMEARAKNQTTNAIRALQDLRPENANLIENGIEKIVPANTLQIENIILIKAGERVAADGVILSGNGYLNEALITGESLPVEKQEGDKVIGGSINIDGLLTVKVTSSNAESTLAKIIHLVESAQAKKSPLQKLVDRISAVFVPVVLVIALVTLLTWGFVTGDWTQAIISAVAVLVIACPCALGLATPTAIMVGTGLAAKRGILIKDAEILESTEHVDVVAFDKTGTLTEGKPRVEQIDAFVGEGKQLLGYLKGLQQGSEHPLAKALLDHATKESIIAERFELIHTLPGLGMRGQLEEGNYWFGNKRLMLNVGIEASLLEDYSEEFAIKGNTLSWVARQIKPNTIELCGLVQFQDTLKSSAIEAVSRLHELGIQTCLLTGDTQDSADVIAAKLGIDFVRAEVMPEHKADVVSQFQLEGKKVAMVGDGINDTPALATAHVGIAMGAGTDVAMQTAGITLMQSDPLRVVEAITIAKKTQQKIRQNLFWAFIYNLVGIPLAAFGLLNPMVAGAIMAVSSVSVVLNALLLRLVKIT

SEQ ID NO: 55575 - DNA, 2193 bp, Methylobacillus flagellatus KT
  CDS (1)..(2193): transl_table=11
atgacaaagcagccaccattggaaaaactggatttcgccattaccggcatgacttgcgcggcttgtgccgggcgcatcgagaaatccttgaacaagttgccgggcgtgcagctggcgaatgtcaatctggcaaccgaaaaagcgcatgtggaagcggttggcgccgacctggcgcaacaggtcgagcaggcggtgtccaagctgggctaccaggcccgcctgatcaggccggacgcccccattgcgccggtcgaggatatccagggcggctggaaggtcggcatcgccgccttgctgaccttgccgctggtgctgccgatggtgggaatgctgctgggacagcactggatgctgcccggctgggtgcagtggttgctggcaacgccggtgcagttctggctgggtgctcggttttaccgtgccggctggaaggctgcaatccatctttcgggcaatatggacttgctggtcgccattgggacttctgcggcgtatggactttccgtatatctgctctggcagcattccccccatctgtatttcgaggccagcagtgccgtcatcaccctggttctgctggggaagtggctggaaagccgggccaagcgccagacgaccgaggccatacgcgcattgcaggcgctgcgcccggatactgcacgtgtccgacgcaatggcttagaacaggatgtgccgttggccgaagtcatggtgggtgatcaagtgctggtgcgcccgggcgagcgggtgcctgtggacggggtgatatgcgaaggtgacagccaccttgatgaatccatgcttaccggcgaaagcgcgccggtcaagaaaggcgtgggcggcaaggtggccggcggtgccgtgaacctggacggggtcttgctggtggaggtgacggcgattggcgccgagacgacattgtcccgcatcattcgcatggtggaggatgcacagatcgccaagccggccatccagcggctagtcgacaaggtgagtgccgtattcgtgccgctggtgttgctgattgctgtgctgacgttggcaagctgggcctggtataacggacagtgggaacaagccgtgctcaatgcggttgcagtgctggtgatcgcctgtccctgtgcgctcggtctggcgacgcctactgccatcatggccgggacaggcgtcgcagcacgttacggtatcctgatcaaggatgccgatgccctggagctggcgcacaggatcgatacggtggcattcgacaagaccggtacgctgacggtgggcaagccgcgtgtgatcaaggtcgccagcatgccagggcgggcgcttgaattgctcaggctggcggcggcactggagcgaggcagccatcaccccttggcggtagcggtactggagcatgcgcaagcagcaggggtggaggcggcctctgcggcagaggccatggcattgccgggcagcggactgatggccaaggttgatggccgtcgcgtctggctgggcaaccagcgtgccatggagcaggctggtgtagcggttgacagcatgcaaggcgaggtggagccattgatgaaccgcggatgcaccctgtcgtggctcgctgccgagaacgatgccggtcagcccgaattgctcggcctcatggcgtttggcgatgaactcagaccagaagccgtggcagcagtacagcatttgcatgcattgggcatcaaggtgttgatgctgaccggggacaaccacgccagcgcgcagcgcatcagccagcaattggggctggatgaggtgtatgcggaacaattgcccgattccaaggcagccgttgtggcggcgctgcgccggcagggcagggtggttgccatggtgggagacggcatcaatgatgcacctgcgctggctgcggcggatatcggctttgccatgtccagcggaacggatgtggcgatgcacactgcagccgtcaccttgatgcggagcagcccgctactggttgccgatacgattgcaatttcgcgtcgcacttatagcaagatacgacaaaacctcttctgggcgtttatatataacctggtggggatcccgttagcagccatgggaatgctgaacccgatagtggccggtgcggcaatggccttgagctctgcaagcgtggtcaccaatgccctgacgttgcggcgctggcggcctgcggcggaagagcggcattga

SEQ ID NO: 55576 - protein, 730 aa, Methylobacillus flagellatus KT
MTKQPPLEKLDFAITGMTCAACAGRIEKSLNKLPGVQLANVNLATEKAHVEAVGADLAQQVEQAVSKLGYQARLIRPDAPIAPVEDIQGGWKVGIAALLTLPLVLPMVGMLLGQHWMLPGWVQWLLATPVQFWLGARFYRAGWKAAIHLSGNMDLLVAIGTSAAYGLSVYLLWQHSPHLYFEASSAVITLVLLGKWLESRAKRQTTEAIRALQALRPDTARVRRNGLEQDVPLAEVMVGDQVLVRPGERVPVDGVICEGDSHLDESMLTGESAPVKKGVGGKVAGGAVNLDGVLLVEVTAIGAETTLSRIIRMVEDAQIAKPAIQRLVDKVSAVFVPLVLLIAVLTLASWAWYNGQWEQAVLNAVAVLVIACPCALGLATPTAIMAGTGVAARYGILIKDADALELAHRIDTVAFDKTGTLTVGKPRVIKVASMPGRALELLRLAAALERGSHHPLAVAVLEHAQAAGVEAASAAEAMALPGSGLMAKVDGRRVWLGNQRAMEQAGVAVDSMQGEVEPLMNRGCTLSWLAAENDAGQPELLGLMAFGDELRPEAVAAVQHLHALGIKVLMLTGDNHASAQRISQQLGLDEVYAEQLPDSKAAVVAALRRQGRVVAMVGDGINDAPALAAADIGFAMSSGTDVAMHTAAVTLMRSSPLLVADTIAISRRTYSKIRQNLFWAFIYNLVGIPLAAMGMLNPIVAGAAMALSSASVVTNALTLRRWRPAAEERH

SEQ ID NO: 55577 - DNA, 2388 bp, Burkholderia xenovorans LB400
  CDS (1)..(2388): transl_table=11
atgccgccacgagccctgcctgccatgaccgaacttgccaccgccccgcgccccgcgaacaccgccgatgccgcggacatttccgcccacaccgccgaactcgacatcggcggcatgacttgcgcctcgtgtgcgatgcgcgtcgaaaaggcgctcgccaaagtgccgggtgtcgtgagtgcttcggtgaatctcgcgaccgaaacggcgaccgtcgacctgaacggcgcggccgccggcccggatgcgctgatcgccgccgtcaggaaagcgggctatgaagcggccctggtcgcaccaccggacacgcccgcctctgccaacgagtcggcccccgccgaccgcaagcgcgaccagacccgccgcgaactggcggccgtgctcgcctccgccgtgctgacgctgccgctcatcggcccaatggtcggcgaatggttcggtttccacgcgatgctgtcgccgtggctgcaattcgcgctcgcttcggtcgtgcagttcgtattcggcgcgcgcttctatcgcgcggcctttcgtgccgtgcgggcgggcgccggcaacatggacttgctggtggcgctcggcacgtcggcggcgtatggcatcagcgtctatgaactggcgacccatcccggcgacatgatgcatctgtacttcgaagcgtcggcggtcgtgattacgctggtgcgcttcggcaagtggctcgaagcgcgcgccaagcgccagaccacggacgccatccgcgccctcaacgcgctgcgccccgaccgtgcgcgcattcgtgtcggcgccggcgagcgggacgtgccgctcgcgcaagtacgggtcggcacgatcgtgatcgtgcgccccggcgaacgcgtgccggtcgacggtacggtgctcgaagggcgcacgcatatcgacgaatccctgatcaccggcgaaagtctgccggtgccgaagcaggtagccgacgcagtcaccgccggctcgatcaacggcgaaggcgcgattgccgtgacgaccacggcgatcggcgcggagacgacacttgcgcgcatcatccgcctcgtggaaagcgcgcaggccgagaaggcgccgatccagcgcctggtggaccgggtcagcgaaatcttcgtgccggcgatcctcgccattgccgcgctcacgctggccggctggctgatcgccggcgcggccggtgaaacggcgattctcaacgcggtcgccgtgctggtgatcgcctgcccatgcgcgctcggactggccacgccggcggccatcatggccggcaccggtgtcgccgcgcggcgcggcgtgctgatcaaggacgccgaggcattggaaaccgcgcatcgggtaacgattgtcgcgttcgacaagaccggcacgctgacgctcggccagccgtcggtgacggcgttcgagccgatcggcggcatcagccgcgacgaagcgctagcacttgccgcggcggtgcagcgcaacagcgatcatccgctggcacgcgcagtggtcaaggcgtatgaagcggaagcggcagcgacagcggcggcggccgaggctgccgacatgcctgcggcaatcggtgaagccgtggcctcgcccactcgaacgcgcgcgctgcacgccagcgccgcgcgcgccgtggcgggccggggcgtcgaagcggacgtcgacggccgcaccctcgcgttgggcagcggacgctggctcggcgaactcgggattgaattgccgcccgaattcgccgcgcgcgcccgcgagctcgaagccgccggcaacacggtttcctggctcatgcagcgcgctccgctagcgccggtcgcactggcattgatcgctttcggcgataccgtcaaacccacggcgcgcgcggccgtcgaacggctggcgcagatgggcattacgagcgtgctggtcaccggcgacaaccggggcagcgcggcgagcgtcgcccgggcgctcggcatcgacgaattccatgcggacgtgctgcccgaagacaaagcccgtgtcatccgtgacctgaaaattcgcagcgccggcatcgtggcgatggcgggcgacggcatcaacgacgctcccgccctcgctgccgccgacatcggcatcgcgatggcgaccggcaccgacgtcgccatgcacgcggccggcatcacgctgatgcgcggcgatccggcgctggtggccgacgccatcgacatctcgcgcagaacgtggcgcaagatccggcagaacctgttctgggccttcgtctacaacctgatcggcattccgctggccgccttcggcttgctgaacccgatgctcgccggcgcggcgatggccttttcgagcgtcagcgtggtgaccaacgcgctgctgctgcgcacctggcgcggtgcgcagaatggttcggggcgctag

SEQ ID NO: 55578 - protein, 795 aa, Burkholderia xenovorans LB400
MPPRALPAMTELATAPRPANTADAADISAHTAELDIGGMTCASCAMRVEKALAKVPGVVSASVNLATETATVDLNGAAAGPDALIAAVRKAGYEAALVAPPDTPASANESAPADRKRDQTRRELAAVLASAVLTLPLIGPMVGEWFGFHAMLSPWLQFALASVVQFVFGARFYRAAFRAVRAGAGNMDLLVALGTSAAYGISVYELATHPGDMMHLYFEASAVVITLVRFGKWLEARAKRQTTDAIRALNALRPDRARIRVGAGERDVPLAQVRVGTIVIVRPGERVPVDGTVLEGRTHIDESLITGESLPVPKQVADAVTAGSINGEGAIAVTTTAIGAETTLARIIRLVESAQAEKAPIQRLVDRVSEIFVPAILAIAALTLAGWLIAGAAGETAILNAVAVLVIACPCALGLATPAAIMAGTGVAARRGVLIKDAEALETAHRVTIVAFDKTGTLTLGQPSVTAFEPIGGISRDEALALAAAVQRNSDHPLARAVVKAYEAEAAATAAAAEAADMPAAIGEAVASPTRTRALHASAARAVAGRGVEADVDGRTLALGSGRWLGELGIELPPEFAARARELEAAGNTVSWLMQRAPLAPVALALIAFGDTVKPTARAAVERLAQMGITSVLVTGDNRGSAASVARALGIDEFHADVLPEDKARVIRDLKIRSAGIVAMAGDGINDAPALAAADIGIAMATGTDVAMHAAGITLMRGDPALVADAIDISRRTWRKIRQNLFWAFVYNLIGIPLAAFGLLNPMLAGAAMAFSSVSVVTNALLLRTWRGAQNGSGR

SEQ ID NO: 55579 - DNA, 2445 bp, Silicibacter sp. TM1040
  CDS (1)..(2445): transl_table=11
atgacccaaccgatcaccgcccgcctctcgattgaaggaatgacctgcgccggatgcgtggggcgcgtcgaccgcacattggcggccctgccgggactgcgggacgtctcggtgaacctcgccaatgaaaccgcgcaaatcactgccgagagccccgaggccctgcaacaggccgacagcgccctgcgcgatcttggcaagcctgcgcgccatcagagcgtgcagctctcgatcgagggcatgacctgtggcggttgcgtcggtcgggtggagcgcgcgatcaaggcgctgccgggagtggtttcggccaatgtgaaccttgccgccgagagcgcgcaggtggagatcctgcaaggtgtggtgacgccctctgaggtggccgcggccagcacgcaggcgggctatcgtgcgcgccccgcagaggcaacagacaccgaggaccgcgccgcccgcaaggatcgtgaagcgcgcgacctgcgccgtcaggtcatgatcgccgccgcgctgacgctgcctgtatttttgctcgagatgggcggtcatgtggtgccagccgtgcatcactggattgcgcagaccatcggcatgcaaacctcttgggtgatgcaggccctgctgaccacggcggttctgttcctgcccggacgggcgttctttacactgggcctgcctgccttgcgcaagggcgcgccggatatgaacagtcttgtggcgcttggggcaggggcggcgtggatctattcccttgtggcgacctttgcgcccgcgctgttgcccgccgatgtgcgcgcggtctatttcgaggccgcggcgatgatcgtcaccctgatcctgatcgggcgctggcttgaggcgcgcgccaagggccgcaccggcgccgccatccaggcgcttgtgggtctccaggcccgccatgcgcggcgtctcaccaaggacggccagcctgaggatgtcgaggtcgaggaccttgcacccggcgaccgcatcttggtgcgccccggcgaacggatcccgaccgatggcacagtgctggagggcaccgcccacgtcgatgagagcatgatttccggcgagccgatcccggttgagaaaaccgaaggcgcgcctgtgaccggcggcaccgtgaacggcgagggcagtctgactgttgctgtgactcgcacaggcgctgagaccacgctggcccagatcatccgcatggtcgaagacgcccagggcgccaaactcccgatccagagcctcgtggacaaggtcaccctgcgctttgtgccggtggtgatggttctggcggtcctaacggtgggagtctggctcttggtggggccagagccaagattgaccaacgcccttgtggcgggcgtgtcggtgctcattattgcgtgcccctgtgccatggggctggcaacccccacctcgatcatggtggggacggggcgcgcggcagaacagggggtgctgtttcgcaagggggacgcgctgcaatcgcttcatgaggtcgatatcattgcctttgacaagacaggcacgctcaccgaggggcgtccgtcgctggtggcgctgcgtccgaccgaagggttcgaacgggcagaggtgctggcctcggtggcgacagtggaggcccgctcggagcatcccatcgcccgcgctttggtaacggcggcacaggacgagggcctgagccttggcgaggtcagcaatttccagagcctcacggcgcgtggcgtcacggctgaggtggcggggcgcgagatccggatcggcagcgcgcgcctgatgtctgaagccggcatcagcgtcgatgcgctggcctccgaggcgctggaacgcgccgggcgcggtgaaagcgtgctctatgccgccattggcgggcagttggcggcgctcctggcggttgccgaccctatcaaacccaccagcgccgaggcgatcaaggccctgcgcgccatgggcaaggatgtggcgatgatttccggcgacgcgcccgccacggcagaggccatcgcgcgcgatctcggcatcagccatgtggttgcgggcgtcgcgcccgaaggcaaagtatccgcactcagggatctggcctcgcgggggcgcaagctcggttttgtcggcgacgggatcaatgacgcaccagccctggcacaagcggatgtggggattgccattggcaccggcaccgatgtggccatcgaggcgggggatgtggtcctgatgtcgggcgacctgcgcggtgtcgcgacagcgatccagatctcgcacaagacgctggtgaatatccggcaaaatctcggctgggcctttgtttacaacgcagcgctgatcccgctggcggcaggggctctctatcctgcttttgggatcttgctctcaccggtctttgcagccggggcgatggcgctttcttcggtgtcggtgctcaccaatgcgctccggctcagacgcgcctga

SEQ ID NO: 55580 - protein, 814 aa, Silicibacter sp. TM1040
MTQPITARLSIEGMTCAGCVGRVDRTLAALPGLRDVSVNLANETAQITAESPEALQQADSALRDLGKPARHQSVQLSIEGMTCGGCVGRVERAIKALPGVVSANVNLAAESAQVEILQGVVTPSEVAAASTQAGYRARPAEATDTEDRAARKDREARDLRRQVMIAAALTLPVFLLEMGGHVVPAVHHWIAQTIGMQTSWVMQALLTTAVLFLPGRAFFTLGLPALRKGAPDMNSLVALGAGAAWIYSLVATFAPALLPADVRAVYFEAAAMIVTLILIGRWLEARAKGRTGAAIQALVGLQARHARRLTKDGQPEDVEVEDLAPGDRILVRPGERIPTDGTVLEGTAHVDESMISGEPIPVEKTEGAPVTGGTVNGEGSLTVAVTRTGAETTLAQIIRMVEDAQGAKLPIQSLVDKVTLRFVPVVMVLAVLTVGVWLLVGPEPRLTNALVAGVSVLIIACPCAMGLATPTSIMVGTGRAAEQGVLFRKGDALQSLHEVDIIAFDKTGTLTEGRPSLVALRPTEGFERAEVLASVATVEARSEHPIARALVTAAQDEGLSLGEVSNFQSLTARGVTAEVAGREIRIGSARLMSEAGISVDALASEALERAGRGESVLYAAIGGQLAALLAVADPIKPTSAEAIKALRAMGKDVAMISGDAPATAEAIARDLGISHVVAGVAPEGKVSALRDLASRGRKLGFVGDGINDAPALAQADVGIAIGTGTDVAIEAGDVVLMSGDLRGVATAIQISHKTLVNIRQNLGWAFVYNAALIPLAAGALYPAFGILLSPVFAAGAMALSSVSVLTNALRLRRA

SEQ ID NO: 55581 - DNA, 2286 bp, Myxococcus xanthus DK 1622
  CDS (1)..(2286): transl_table=11
atgaatgccgttgaagcagcctcgtcccggtctcccgcgggcgccctggagcggatggacctcgccgtgtcgggtatgacgtgcgccgcatgcgcgcgccgcgtggaacgcactctgagcgaggtggagggggtccaggagtgcagcgtcaacttcgccacccgccgtgccagcgtactcttcgatgctcgggctacgtccgtcagtgcactggccgatgcggtggccgacgccggctatcgcgctgaggtgccgcaggcttccaccgccgaagagacggacgccgcggaggagcgagggctccggcgccggctcgccgtggccgtgctcttcggcttgccggtggtcgtgctggccatgtcccacggagcgctcgacttcaccggttccatctgggtgcagctcggcctgacggtgccagtcatggcgtacagcggtggtcccatcttccgggcggcgtgggccgcgttgcggcacaggtcggccgacatgaacgtcctggtggcgctcgggaccggcgcggctttcattttctcggtggtggccaccgtgtggccgacattcatggtcaccggggaccacggaggtcatggtgggcacggagccgcaccccccatctacttcgaggcggcggccgcggtgattgccttcgtactgctcggccgcttcctggagtcgcgagcacgcacccgggcaggggatgccatccggcggcttcaggcgttggccccttccatcgccaccgtgctggagaatggcgtcgagcgagaggttcctctcgccgaggtgcgggtgggggaccgtgtggtggtgcgtccggggcagtccatccccgtcgatggctccgtcgtggacggggcctcctcggtggacgaatccatgctcacgggggaaagcctgccggtggagaaggccgcgggcgcggaggtcttcgccgggacgatgaacggcacgggccgcctggtcttccgcgcggccaaggtggggagtgacaccgcgctccagcagattgtccaggtggtggagcgggcccagggcaccaaggcgcccatcgcgcgcctcgcggacgtggtgagcggcgtcttcactccggtggtgctgctcatcgccatcgccacgttcgcggcctggttcgtcttggcccccgaggagacgcgcctgacgatggccctgctcaacgcggtggccgtgctggtcatcgcttgcccgtgcgccctgggcctggccacgcctgcggcgctcatggtggggatggggcggggtgcgcagctcggagtgctggtgaagagcgccgcttcgttggaaggcgcgagccgtatcgacaccgtggtgctcgacaagacgggcacgctgacccaggggcgcccggcggtggtccgcgtcctcaccgcgagcggcatgacggaggaggaagtgctgaccctcgccgccgccgccgaatcggcgagcgagcacccgctggcccgtgccgtcgtgtccgaggcctccaaccggggcctgaaggtcggaacgcccgagtcgttcaccgccactccgggacatggcgtggaagccgaggttggcgggcgcaaggtgctcgtgggcagtcgtcggatgctggacggacggggcgtgtccgggagcgaggacgccgagcgtgtgctcacgacggacgggcagacgcccgtgctcatcgcggtggacgggcgctgggtaggcgccatcggcatcgcggatccagagcgggaggaggccgccacggtggtccaatccctgcggagcatggggctgcacgtggtgatgctcacgggcgaccatgagggaccggccgcacgggtggcgcgcgcgctcggcatcgaccgggtcttcgccggtgtactgccgtccggcaaggcgcacgtggtgcgtacgctccaggcggagggacggcgcgtggccatggtgggggatggcatcaacgacgcgccggccctggcggaggcggacctcggagttgccatggggacggggacggacgtggcccgggatgccgcgggcgtcgcgctgcttcgctccgatttgcgaggactgccggccgcactcgggctggctcgcaccacgatgcgggtcatccgacagaacctgttctgggccttcctctacaacgtgcttggcatcccggtagcggcggggttgctctacggcctgacaggctggctgttgtcaccaatgctggcgagcgtggccatgtccctgtcgagtgtgtcggtgctgctcaacagcctgcgtctgcggcgcctgcgcctgccagcgccccaggcggcctga

SEQ ID NO: 55582 - protein, 761 aa, Myxococcus xanthus DK 1622
MNAVEAASSRSPAGALERMDLAVSGMTCAACARRVERTLSEVEGVQECSVNFATRRASVLFDARATSVSALADAVADAGYRAEVPQASTAEETDAAEERGLRRRLAVAVLFGLPVVVLAMSHGALDFTGSIWVQLGLTVPVMAYSGGPIFRAAWAALRHRSADMNVLVALGTGAAFIFSVVATVWPTFMVTGDHGGHGGHGAAPPIYFEAAAAVIAFVLLGRFLESRARTRAGDAIRRLQALAPSIATVLENGVEREVPLAEVRVGDRVVVRPGQSIPVDGSVVDGASSVDESMLTGESLPVEKAAGAEVFAGTMNGTGRLVFRAAKVGSDTALQQIVQVVERAQGTKAPIARLADVVSGVFTPVVLLIAIATFAAWFVLAPEETRLTMALLNAVAVLVIACPCALGLATPAALMVGMGRGAQLGVLVKSAASLEGASRIDTVVLDKTGTLTQGRPAVVRVLTASGMTEEEVLTLAAAAESASEHPLARAVVSEASNRGLKVGTPESFTATPGHGVEAEVGGRKVLVGSRRMLDGRGVSGSEDAERVLTTDGQTPVLIAVDGRWVGAIGIADPEREEAATVVQSLRSMGLHVVMLTGDHEGPAARVARALGIDRVFAGVLPSGKAHVVRTLQAEGRRVAMVGDGINDAPALAEADLGVAMGTGTDVARDAAGVALLRSDLRGLPAALGLARTTMRVIRQNLFWAFLYNVLGIPVAAGLLYGLTGWLLSPMLASVAMSLSSVSVLLNSLRLRRLRLPAPQAA

SEQ ID NO: 55583 - DNA, 2256 bp, Rubrobacter xylanophilus DSM 9941
  CDS (1)..(2256): transl_table=11
atgggcgagggcgcgagaaggacgtctttccgggtgaccggcatgagctgcgcggcctgcgcgagccgggtgcagaaggcgctcgggcgggtgccgggcgtggtggaggcgaacgtcaacctggcgaccgagcgggccacggtggagcacggtcccgaggcggggatggaggagctgcggcgggccgtggagaaggccgggtacggggtggcccttgaggaggataccggggaggggagggaacgggagtaccgggggctgaggcgggatcttctcgtggccggggcgttcacggcgctcatcgtgctcgggagcctgccgcacatgctcggcctcgcgccgccggtacccatgggggttctcaacctcgtgctgctcgctctggcgacgccggtgcagttctgggccgggcggcggttctaccggggggcctggagcgccctgaggcacggccaggccaacatgaacacgctggtcgcgctgggcaccagcgcggcctacctctacagcctcgcggcgacgctcgcgccgggcctgttcgcggggcgggccggggtgtacttcgacacctcggcgatcatcataacgctcgtcctcctgggcaggctgctcgaggcgcgggcgcgggggaggacgagcgaggccataaagaagctcgccgggatgcaggcccggaccgcccgcgtggtgcgcggcggggaggaagccgacatccccgtagaggaggtcgcggtcggggacaccgtggtggtcaggccgggggagaaggtgccggtggacggcgtggtgatcgcgggccgctccgcggtggacgaggccatgatcacgggggagagcgtaccggcggagaagggtccgggggacgaggtcatcgggggcaccatcaaccgcaccggctccttccgcttgcgggccaccagggtcggcagggacacggcgctcgcccggatcgtgcgcctggtcgaggaggcgcagggttccaaggcccccatccagcggctcgccgacaggatcagcggcgtcttcgtccccgtcgtgatggtcgtcgcggggctcaccttcctcatctggtgggccttcgggcccgagccggcgttcacccacgccctgctcaacatggtcgcggtgctcatcatcgcctgcccgtgcgccatggggctcgcgacccccacctccataatggtcggcaccggcaggggcgccgagcgcggcatcctcataaagggcggcgaggcgctggaggaggcgcacaggaccacgaccgtcgtgctggacaagaccggcaccctcaccaagggcgagccgcgcctcaccgacgtggtccccgccggcgggctcgccggggaggagcttttgcggctcgccgcggccgccgagagcgccagcgagcaccctctgggcgaggcggtggtggccggcgcgagggagcgcggcctcgccctcccctcccccgaggacttcgaggcccccaccgggctcggcgtgcgggccaccgtcgagggccggacggtgctcgtcgggagccgcagcctcatgcgggagagcggggtgcaggaggacgggctcgcgccgcgcgccgaggccctctcccgcgagggcaagacccccatcctcgtggcggtcgacggcgagccggccgggcttctggccgtcgccgacaccataagggaggaggccgaagaggccgtggagctgctccaccgcatggggctcgaggtcgtgatgatgaccggcgacaaccgcttcgcggcggaggccgtggccggaaggctcggcatagaccgggtgctcgccggggtgatgccccaggacaaggcgggcaaggtcagggagctgcaggaggagggcagaaaggtcgccatggtgggcgacggcatcaacgacgccccggcgctcgcgcaggcagacgtcggcatcgccataggcaccggtacggacgtggcgatggaggccgcggacataaccctcgtcgggggcgacgtacggggtgtggcgcgggctataaagctctccaaggccaccatcaggaacatccgccagaacctcttctgggccttcgcctacaacgtggccctcatcccggtagcggcgggcgcgctctaccccctcttctccggcggcacggtgccggaggcgctgcgccccatcctgggcgagtacgggttcctcaacccggcgctcgcagcggcggcgatggcgctctcgtcggtgacggtggtgagcaacgcgctcaggctccggcgggtgaggctctag

SEQ ID NO: 55584 - protein, 751 aa, Rubrobacter xylanophilus DSM 9941
MGEGARRTSFRVTGMSCAACASRVQKALGRVPGVVEANVNLATERATVEHGPEAGMEELRRAVEKAGYGVALEEDTGEGREREYRGLRRDLLVAGAFTALIVLGSLPHMLGLAPPVPMGVLNLVLLALATPVQFWAGRRFYRGAWSALRHGQANMNTLVALGTSAAYLYSLAATLAPGLFAGRAGVYFDTSAIIITLVLLGRLLEARARGRTSEAIKKLAGMQARTARVVRGGEEADIPVEEVAVGDTVVVRPGEKVPVDGVVIAGRSAVDEAMITGESVPAEKGPGDEVIGGTINRTGSFRLRATRVGRDTALARIVRLVEEAQGSKAPIQRLADRISGVFVPVVMVVAGLTFLIWWAFGPEPAFTHALLNMVAVLIIACPCAMGLATPTSIMVGTGRGAERGILIKGGEALEEAHRTTTVVLDKTGTLTKGEPRLTDVVPAGGLAGEELLRLAAAAESASEHPLGEAVVAGARERGLALPSPEDFEAPTGLGVRATVEGRTVLVGSRSLMRESGVQEDGLAPRAEALSREGKTPILVAVDGEPAGLLAVADTIREEAEEAVELLHRMGLEVVMMTGDNRFAAEAVAGRLGIDRVLAGVMPQDKAGKVRELQEEGRKVAMVGDGINDAPALAQADVGIAIGTGTDVAMEAADITLVGGDVRGVARAIKLSKATIRNIRQNLFWAFAYNVALIPVAAGALYPLFSGGTVPEALRPILGEYGFLNPALAAAAMALSSVTVVSNALRLRRVRL

SEQ ID NO: 55585 - DNA, 2415 bp, Cytophaga hutchinsonii ATCC 33406
  CDS (1)..(2415): transl_table=11
atggaaacgaaagacatatttgaaatacctttatcaggtgtacatagtgagcattgtgctcttttagtagacaagacatttgctcagaataccgacatttctactcataaggtagacttcaataatgaacgtgctttacttaattttaaatcattaactcctgattttacgaaggtggttaaagatatccgcagtatcggatatgatgtattaactgttaaaaaatcatttccggttcttggaatgtcttgtgcatcctgtgcaagcagttcacagagtattcttgaaacacaacctggtgtgataagtgttgctgtaaattatgcaaacacaacagcgcagatagaatatattccaacgattacaaatccaaaaaaacttaaagcttcattacaatctatcggttacgacttgatggttgatgaaagcgaagaagcaaaagacacgctagaggaaattcataaaaaaaattatacgattcttaggaataaaacaattgcagcaatcgtactctcattacctatcgttgtaatagggatgttttttatggacataccatatgcaaattatattatgtgggcattgtctacacctgtgattggctatatagggagttctttttttatcaatgcctggaaacaagccaaacataggtctgctaatatggatacactggttgcattaagcacaggtgtagcatatttctttagtgtatttaacactttgtttcctgaatactggcatcagaaaggccttcatgcacatgtatattttgaagcggcttcggtagttattgcttttattttactcggaaaattattagaagaaaaggctaaaggaaatacatcttctgcaattaaaaaattaattggtttgcagcctaaaacggttacggtcgttcatcaaggtggtcatcaggttgaaacgccgatagctaatgtaaagattggtgatgtactattagtgaagccgggagaaaagattgctgtagacggcaaacttgtttatggcaactcttttgtggatgaaagtatgataagtggcgaacctatccctattgaaaaaaatataaatgattctgtgcttgcaggcacgataaatcaaaagggaagttttcaattcgttgcagaaaaagtcggtggagatacgatgctggcacacataattaaaatggtgcaagatgcacaaggtagtaaagctccggttcaaaaacttgttgataaaatcgcaggtgtatttgtaccgatagttattgtaatagcaatcttaagtttaatagtgtgggtgttgtttggaggcgaaaacggtttcacgcaaggtatgctggcaatggttactgttcttgtaatagcgtgcccttgtgcgttaggattggccactcctacggcaataatggttggtgtcgggaaaggtgctgaagctggcatcttgataaaagatgctgaaagtcttgagactgcaaggaagataaatgcaattatcctcgataaaacaggaacgattacagaaggcaagcctgctgtgacggatgttatttggttgaatgaaaacgcagacaaaattaacgttttcgcatccattgaaaaacaatccgaacatccccttgcggaagctgttgttaactattttggagaaatgagttacctaaaagttgataattttgaaagcattaccggttctggagcaaaagcggttgtagataatacatcgtatttcataggtaatatgaaattgattgatgcacaaaaaatcaacatacatacaaatcttagaaataaatctaatctatggcttaaagaagctaagactgtcatttactttgctaataccacagaagttttagcagtattagctatttcggataaaatcaaaactacttccatagatgcaattaaacaactcaaaacgttgggcatagaagtatatatgcttacaggcgacaatacctttactgctgaagctatagccaagcaagtcggtataagtcaatttaaagcagaagtgttaccatctgataaagcgaattttgttaaggagctgcaggcacaaggtaaagttgttgcaatggtaggtgacggaatcaacgacagtaatgcattggcacaggctaatgttagtatagccatgggcaaaggaagtgatattgcaatggatgttgcaaaaatgactatcatttcatctgacctttctaaaatacctcaagcaataaaactatctacctatacggttaatgccatccgacaaaatttattctgggcatttatctataacataatcggtatccctttggcagctggtatcctctacccttttacaggttttttattaaacccaatgattgccggagcagctatggcactgagctctgtaagtgttgttagtaacagtttgagattaaaatttaaatccatttaa

SEQ ID NO: 55586 - protein, 804 aa, Cytophaga hutchinsonii ATCC 33406
METKDIFEIPLSGVHSEHCALLVDKTFAQNTDISTHKVDFNNERALLNFKSLTPDFTKVVKDIRSIGYDVLTVKKSFPVLGMSCASCASSSQSILETQPGVISVAVNYANTTAQIEYIPTITNPKKLKASLQSIGYDLMVDESEEAKDTLEEIHKKNYTILRNKTIAAIVLSLPIVVIGMFFMDIPYANYIMWALSTPVIGYIGSSFFINAWKQAKHRSANMDTLVALSTGVAYFFSVFNTLFPEYWHQKGLHAHVYFEAASVVIAFILLGKLLEEKAKGNTSSAIKKLIGLQPKTVTVVHQGGHQVETPIANVKIGDVLLVKPGEKIAVDGKLVYGNSFVDESMISGEPIPIEKNINDSVLAGTINQKGSFQFVAEKVGGDTMLAHIIKMVQDAQGSKAPVQKLVDKIAGVFVPIVIVIAILSLIVWVLFGGENGFTQGMLAMVTVLVIACPCALGLATPTAIMVGVGKGAEAGILIKDAESLETARKINAIILDKTGTITEGKPAVTDVIWLNENADKINVFASIEKQSEHPLAEAVVNYFGEMSYLKVDNFESITGSGAKAVVDNTSYFIGNMKLIDAQKINIHTNLRNKSNLWLKEAKTVIYFANTTEVLAVLAISDKIKTTSIDAIKQLKTLGIEVYMLTGDNTFTAEAIAKQVGISQFKAEVLPSDKANFVKELQAQGKVVAMVGDGINDSNALAQANVSIAMGKGSDIAMDVAKMTIISSDLSKIPQAIKLSTYTVNAIRQNLFWAFIYNIIGIPLAAGILYPFTGFLLNPMIAGAAMALSSVSVVSNSLRLKFKSI

SEQ ID NO: 55587 - DNA, 2271 bp, Rhodococcus sp. RHA1
  CDS (1)..(2271): transl_table=11
atgacccgcgggaccgacatcgcggcaccgcccgattcccagatcgaactggccatcggcggaatgacctgcgcgtcgtgcgccaaccgcatcgagcgcaagctgaacaaactggacggcgtcaccgcgaccgtcaactacgcgacggagaaggcccgcgtccattacgacgccgccgacgtctcgcccgaagacctcgtcgccacggtcgagcaggccgggtacacggcgcgactgcccgaggtgaagcccccggccccggaggaagaggacccggcggcggaactgcggcagcggctgctcgcgtcggcggtgctgacggtccccgtcatcgcgatggcgatgatcccggcgctgcagttcaccaactggcagtggctctcgctcaccctcgcggccccggtcgtggtctggggtgcgtggccgttccacaaggccgcctggacgaacctgcggcacggcaccgcgaccatggacaccctggtgtcgatgggcacactggccgcgttcggttggtcgctgtacgcactgttctggggcaccgccggcatgccggggatgacgcacccgttcgagctcacgatcgcgcgggtcgacggcaccggcaacatctatctggaggccgcggccggcgtcaccacgttcatcctcgccggccgcttcttcgaggcccgcgccaaacggcgggcgggagcggcgctgcgggcgctgctcgaactgggcgccaaggaagtgtcggtgctgcgtgatggcaccgaacagctgatcggcatcgaccagctcgacgtcggcgacctcttcgtggtccgtcccggcgagaagatcgccaccgacggcgtcgtcgtcgaaggttcgtcggcggtggacgcgtcgatgctgaccggtgaatccgtgccggtcgaggtgtcgccggactcccaggtggcgggtgcgacggtcaacgtcggcggccgaatcgtggttcgcgccagccggatcggagccgacacgcagctcgcgcagatggcgtggatggtcgaggacgcgcagaccggcaaggccgaggtgcaacgcctggccgaccggatctccggcatcttcgtcccgatcgtgatcgcgttgtcggtcgcgaccctcggtttctggatcggcaccggcggttcgatcgccgccgcgttcaccgcagcggtcgccgtcctgatcatcgcgtgcccgtgtgcgctcggactcgccaccccgaccgccctcatggtgggcacgggacgcggggcccagctgggcatcctgatcaagggacccgaggttctggaatcgacgcggcgggtcgacaccgtggtggtcgacaagaccggaaccgtcaccaccggcacgatgtcgctgcacgacgtggtcgccgcggacggtcaggacgaggagcaggtgctccggtacgccggcgcgctcgaggacgcgtccgagcaccccatcgcgcgggcgatcacccgcggcgcgaaggagcggctgacgacgctccccgcagtagaacagttcaccaacatcgccggtctcggcgtccagggcatgatcgacggacacgcggtggtcatcggccgcgcgaaactgctccgcgactggtcgctgcagctcaccacggaactccagcgcgtcgccgacgcggcggaatcggagggcaagaccgccgtcgggatcggctgggacggaaaggcgcgcggcgtgctcgtggtcgccgacaccgtgaagccgacgtcacgcgaggcggtggcgcagttccgcgaactgggcctcaccccgatcatgctcaccggcgacaacacttccgcggcccgggccatcgccgcccaggtcggcatcggcgaagtcgtcgcggaggtactgccccaggacaaggtcgacgtgatcaagcgtctgcaggccgacggcaaggtggtcgcgatggtcggcgacggggtcaatgacgccgccgccctcgcacaggccgacctcggtctcgccatgggaaccgggacggacgtggccatcgaggccagcgacctcacgctggtacgcggcgacctccgggccgcggccgacgcgatccggttgtcgcgcaggacgttgagcacgatcaagggcaacctgttctgggccttcgcctacaacgtcgcggcgttgccgctggccgcggcgggcctgctcaaccccatgttggcgggtgccgccatggcattctcatcggtgttcgtcgtgagcaacagcctgcgactgcgccgcttccagcccctgaccactcccacccgaggggaacactcatga

SEQ ID NO: 55588 - protein, 756 aa, Rhodococcus sp. RHA1
MTRGTDIAAPPDSQIELAIGGMTCASCANRIERKLNKLDGVTATVNYATEKARVHYDAADVSPEDLVATVEQAGYTARLPEVKPPAPEEEDPAAELRQRLLASAVLTVPVIAMAMIPALQFTNWQWLSLTLAAPVVVWGAWPFHKAAWTNLRHGTATMDTLVSMGTLAAFGWSLYALFWGTAGMPGMTHPFELTIARVDGTGNIYLEAAAGVTTFILAGRFFEARAKRRAGAALRALLELGAKEVSVLRDGTEQLIGIDQLDVGDLFVVRPGEKIATDGVVVEGSSAVDASMLTGESVPVEVSPDSQVAGATVNVGGRIVVRASRIGADTQLAQMAWMVEDAQTGKAEVQRLADRISGIFVPIVIALSVATLGFWIGTGGSIAAAFTAAVAVLIIACPCALGLATPTALMVGTGRGAQLGILIKGPEVLESTRRVDTVVVDKTGTVTTGTMSLHDVVAADGQDEEQVLRYAGALEDASEHPIARAITRGAKERLTTLPAVEQFTNIAGLGVQGMIDGHAVVIGRAKLLRDWSLQLTTELQRVADAAESEGKTAVGIGWDGKARGVLVVADTVKPTSREAVAQFRELGLTPIMLTGDNTSAARAIAAQVGIGEVVAEVLPQDKVDVIKRLQADGKVVAMVGDGVNDAAALAQADLGLAMGTGTDVAIEASDLTLVRGDLRAAADAIRLSRRTLSTIKGNLFWAFAYNVAALPLAAAGLLNPMLAGAAMAFSSVFVVSNSLRLRRFQPLTTPTRGEHS

SEQ ID NO: 55589 - DNA, 2277 bp, Trichodesmium erythraeum IMS101
  CDS (1)..(2277): transl_table=11
atggaaataagatatctagagttaaaaggcatgagttgtgctggctgtgctaataaaattcaaaaggcaattgaaaatgtaactggtgtagcagaatgccaagttaactttgcaataggacaagcaacagttaagtttaattcccagaaaacaaatttacataaaattcaagaatctgtaacaaatattggctttgaagcacaactacttcaggaaacaataaatttattagacaaagatagagaaaatcaccaaatagaacgaaaaatgatcaataaagttatatttggtggtactattagtgtaattttaattattggttctttaccaatgatgaccggattaaacttgtcttggataccttcatggttaggcaatcccttaatacaattaatattaacaacgctagttatgatttggtgtggcaaatcatttttttttgctgctattaaaggattaaaaaatcgttatgtagatatgaatactttagttgctataggtacaggtgcggcttatttgtattctctgttccccacattttccccaattttttttactagacaaggattaaatcctgatgtttattatgaagcagcagctactattattactttaattctattaggtaaattgctcgaacatcgcgcccgtaaacagacctcagcagctattcaaaaattgatgggtttgcaggcaaaaactgctagagttattcgagatggaaaagaaatagatattatgattgaaaaagtcaaaattggcgatttaattgttgttcgtcctggggaaaaaattccagttgatgggaaaataaaagaaggtttttctacagtagatgaatcgatggtaactggtgaaagtgtgcctgtagaaaaaaaacctggagatgaagttattggagtaacaattaatcaaactggtagttttaaatttgaggctgccagagtgggaaaagatacagtattagctcaaataattaagttagttcaacaggcacaagcttcaaaagcaccaattcaaaaattagcagatatggtaatttcctggtttgtacctgtagtgatgggggtagcgatcgctacttttcttatttggattaatttgactggcaatttaacaatgtcactaattacaacagttagtgtattaataattgcttgtccttgtgctttaggattagctacccctacttctgttatggtaggaacaggaaaaggtgcagaaaatgggatattaattaaaggtgcaaatagtttagaagttactcataaaattgaaacaattatcctagataaaacaggtactcttactaaaggtagacctacagttactgactacataactactcaaggaactaccaatgaaaacgaaataaaattgttaaaaatagcagcagcagttgagagaaaatctgaacatcctttagctacagcaattgtcgaatatgctaaaggtcaaggtataaaatttcccctaccagaaccagaaagatttgaggccatctctggtatgggtgttcaaggaatagtatttgatagattggtacaaattggtactgatcgctggatgaatgagttaggaattgagattactaatttcctaaattatcaagataaattagaagcagatagaaaaactactgcctggatagcaattgatggtgaaattgagggaatatttgccatagctgatactttaaaaccatcctcaaaaaatgtggttcaaacattacaaaaaatgggaatagaagttgtgatgctaacgggagataatcgccgaacagcagaagctattggtgctgaagttggtattagtaaaatatttgctgaagtacgcccagaccaaaaagctgaaactgtgaaaaatctccaattagaaaagaaaaaaagaaggaatgaccatcaaattgtagcaatggtgggagatgggattaatgatgctccagcattagctcaagcagatgtaggaatagctattggtacaggtacagatgtagcgatcgcctctagcgatattacattaatttctggagacttaactggcattattacagcaattaagctgagtcgtgcgactataaaaaatattcgtcaaaatctgttttttgccttcatttataatactttaggcattcctattgctgccggtattttatatcctttaactggttggttattgaaccccattattgcaggtggagcaatggcatttagttcggtttccgtagttactaatgctttgagattgcgtaattttaagccaaaagcaaaagtttag

SEQ ID NO: 55590 - protein, 758 aa, Trichodesmium erythraeum IMS101
MEIRYLELKGMSCAGCANKIQKAIENVTGVAECQVNFAIGQATVKFNSQKTNLHKIQESVTNIGFEAQLLQETINLLDKDRENHQIERKMINKVIFGGTISVILIIGSLPMMTGLNLSWIPSWLGNPLIQLILTTLVMIWCGKSFFFAAIKGLKNRYVDMNTLVAIGTGAAYLYSLFPTFSPIFFTRQGLNPDVYYEAAATIITLILLGKLLEHRARKQTSAAIQKLMGLQAKTARVIRDGKEIDIMIEKVKIGDLIVVRPGEKIPVDGKIKEGFSTVDESMVTGESVPVEKKPGDEVIGVTINQTGSFKFEAARVGKDTVLAQIIKLVQQAQASKAPIQKLADMVISWFVPVVMGVAIATFLIWINLTGNLTMSLITTVSVLIIACPCALGLATPTSVMVGTGKGAENGILIKGANSLEVTHKIETIILDKTGTLTKGRPTVTDYITTQGTTNENEIKLLKIAAAVERKSEHPLATAIVEYAKGQGIKFPLPEPERFEAISGMGVQGIVFDRLVQIGTDRWMNELGIEITNFLNYQDKLEADRKTTAWIAIDGEIEGIFAIADTLKPSSKNVVQTLQKMGIEVVMLTGDNRRTAEAIGAEVGISKIFAEVRPDQKAETVKNLQLEKKKRRNDHQIVAMVGDGINDAPALAQADVGIAIGTGTDVAIASSDITLISGDLTGIITAIKLSRATIKNIRQNLFFAFIYNTLGIPIAAGILYPLTGWLLNPIIAGGAMAFSSVSVVTNALRLRNFKPKAKV

SEQ ID NO: 55591 - DNA, 2238 bp, Alkalilimnicola ehrlichei MLHE-1
  CDS (1)..(2238): transl_table=11
atgggcagcgaccactgcgcaggaatcattgccacgtccctgcggaagctcgacggggtggtggacgtcaccaccaacatcgccgcgcaccgtgtgcaggtccgctacgagaccgacaagctggacagcagccgcatccgccgggcagtagaggacgccggctacgacgtcgcctcggtcagcgaggagggcagcagcgatgccgcggacgatgcggaaatcgaggaagcctacctgagccaggcatggaagcgactgtggattgccgccgtacccaccaccctcatcatgactctgatgatgccccacatgttctggcaacccatcccggggtatctcgtcctcatcgcggtgctggctttccccgtggtttttctggccggcggggcggccacccaccgctcggcgtggcggtcgctgaagtccgggcaactgaacatggacgtgctcatctccatgggcagtctgccgccctacttcatcggtctggtggggtttgtctacccgatgacctcgttcatcgagatggcggccacgatcatggccttccacatgctggggcgctatctggagtaccgcgccaaggggcaggcctcctcggccatacggaagttgctggacatgggcgcgaagaccgcccgcgtggagcgcgatggcgaggaagtggaggtgccggtcaagcagctcaatgcgggcgatgtgatgattgtgcgccctggcgagaaagtacccacagacggtgtggtgctcgagggtgagagcaccgtggacgagtccattgccaccggcgaatccgtgccggtggagaaggcggccggggccaccgtgctcggtgccaccatcaaccagcaggggttgctcaaggtgcgtgccacccgggtgggcaaggacaccttcctggcgcaagtcatccggctcgtggaagaggcccagggctcgcgggtaccggtgcaggaactggccgaccgcatcaccgcccgcttcgtgccggcagtgctggtgatcgcggggggcgcgttcatcgcctggctgtttttcagcggcccgctctcccccattctcgtctggggcgagggcttcctgccctgggtggattcgggccaaccgccgatcatcctggccatgctcgccgccattgcggtgctggtcatcgcctgcccctgcgccctgggcttggcgacccccacggcgctgatggtgggctcggggatgggggccgaaaggggggtgttgatccgctccggctcggcgatccagagcctcaaggacatcaaggccattgtcttggacaagaccggcaccatcaccaaaggcgagccggccctgaccgatgccctgccggcgcaggggttcactgagaaacaggtgctcgttgcggcggcggccgtggaagcgggctccgcccacccgctggcggacgcaatcgtccagggcgcgaaggcgcgcgggctgtccattggcagcgctaccggcttcaattcccacaccgcccgcggtgtggaggcgcagcttgacggcgagcgggtgctggtcggcagccgccgcctgctcaccgagcacggcgtggcgatcagcgcgttagaggagccgctcaccgcactcgagggcgcgggcaagaccgcaatgctggtggccatcggcgatcggccggccggcgtcgtggcggtggccgacaccatcaaggacgactcagccgcagcgattgaggccctgcatgggctcggcattgtctgcgtcatggtcaccggcgacaacgagcgcacggcccaagcggtcgccgagcaggtggggctggacgaggtgcaggccggtgtgctgcccgagggcaaggtggatgccatccggcaactccaggcacgctacggcgaacacgtggccatggtgggcgacggcatcaacgacgccccggcgctcaagcaggccaacgtgggcatcgccatcggcgccggggcggatgtcgccatcgaagcggccgacgttacgctggtcagcggcgaactcaccaaggtggtcgaggccgtggaactctcccggctgaccttccgcaagatcgtgcagaacctattctgggcctggggttacaacctcgccgccatccctatcgccgccatcggcctgctccacccgatgatcggcgtcattgccatgacggcgagttcactctcggtgatcggtaactcggtgctgctcaagcggagcagacccgcgggaaaatcggctgcaggatctcgggcctga

SEQ ID NO: 55592 - protein, 745 aa, Alkalilimnicola ehrlichei MLHE-1
MGSDHCAGIIATSLRKLDGVVDVTTNIAAHRVQVRYETDKLDSSRIRRAVEDAGYDVASVSEEGSSDAADDAEIEEAYLSQAWKRLWIAAVPTTLIMTLMMPHMFWQPIPGYLVLIAVLAFPVVFLAGGAATHRSAWRSLKSGQLNMDVLISMGSLPPYFIGLVGFVYPMTSFIEMAATIMAFHMLGRYLEYRAKGQASSAIRKLLDMGAKTARVERDGEEVEVPVKQLNAGDVMIVRPGEKVPTDGVVLEGESTVDESIATGESVPVEKAAGATVLGATINQQGLLKVRATRVGKDTFLAQVIRLVEEAQGSRVPVQELADRITARFVPAVLVIAGGAFIAWLFFSGPLSPILVWGEGFLPWVDSGQPPIILAMLAAIAVLVIACPCALGLATPTALMVGSGMGAERGVLIRSGSAIQSLKDIKAIVLDKTGTITKGEPALTDALPAQGFTEKQVLVAAAAVEAGSAHPLADAIVQGAKARGLSIGSATGFNSHTARGVEAQLDGERVLVGSRRLLTEHGVAISALEEPLTALEGAGKTAMLVAIGDRPAGVVAVADTIKDDSAAAIEALHGLGIVCVMVTGDNERTAQAVAEQVGLDEVQAGVLPEGKVDAIRQLQARYGEHVAMVGDGINDAPALKQANVGIAIGAGADVAIEAADVTLVSGELTKVVEAVELSRLTFRKIVQNLFWAWGYNLAAIPIAAIGLLHPMIGVIAMTASSLSVIGNSVLLKRSRPAGKSAAGSRA

SEQ ID NO: 55593 - DNA, 2379 bp, Pseudomonas aeruginosa UCBPP-PA14
  CDS (1)..(2379): transl_table=11
atgaacagcgccacgctaaccgagctcgatctgccggtcagcggcatgacttgcgcgtcctgcgccggccgtgtcgaacgagccctgaagaaagtgcccggggtcgcggccgcctcggtcaacctggccagcgagcaggcccgcgtacaggccccggcggacagcctgccggccctggtggcggcggtcgagcaggccggctaccaggttccggcgcgcagcctggaactgtccatcgagggcatgacctgcgccagttgcgtcggccgggtcgagcgggcgctgaagaaggtgcccggcgtacgcgaggtcagcgtcaacctggccagcgagcgcgcccacctcgacctgctcggcgccgtggacagccaggccttgctgcaggcggtggaacaggccggctacaaggcccgcctgctcgacgcggggcaaccacgccaggacgatgccgagcgccgcctgcgccgcgaacgctggtgggtgatcgccgcgctgttgctggcgttgccgctggtgctgccgatgctggtggaatgggccggcctgcactggatgctgccgccgtgggcgcagttcctcctggcgaccccggtgcagttcgtcatcggcgcgcgcttctatgtctccgcctggcgcgcggtgaaagccggtgccggcaacatggacctgctggtcgccctcggcaccagcgccggctacggcctcagcgtctacctctggctgaccgccccgcccggccacatgccgcacctctacttcgaagcctcgaccgtggtgatcgccctgatcctcctcggcaagtacctggaaagccgcgccaagcgccagaccgccagcgccatccgcgccctcgaggcgttgcgcccggagcgcgcggtgcgcctgcgcgacggtcgcgaggaagaggtggcgatcgccgagttgcgcctcggcgacgaggtggtggtgcgtcccggcgaacgcttcccggtggacggcgaggtgctcgacggcagcagccacgccgacgaggcgctgatcaccggcgagagcctgccggtgcccaaggctcccggcgacaaggtcaccggcggcgcgatcaacggcgaaggccgcctgctcctgcgcaccaccgcgctcggcggggaaacggtgctggcgaagatcatccgcctggtggaagacgcccaggccgccaaggcgccgatccagaagctggtggacaaggtcagccaggtcttcgtcccggtggtgatcctcatcgcactggtcaccctcggcgcctggctggtcgccggggtcggcctggagcaggccctggtgaacgccgtggcggtgctggtgatcgcctgcccctgcgccctcggcctggccaccccgaccgcgatcatggccggcaccggcgtggccgcacgccacggcatcctgatcaaggacgccgagtccctggaagtcgcccatgcggtcaccagcgtggccttcgacaagaccggcaccctgacctccgggcgaccgcagatcatccacctcggcggcgacgatcaggagcaactgctcaggctcgccggcgccctgcaacgcggcagcgagcacccgctggccaaggccgtgctcgagcgctgcgccgagcgcgacctggaggttccgccggtgaacgccagccaggccctcagcggtcgcggcatccagggcgaggtcgagggtcgccggctggccctaggcaaccgccgcctgctcgacgagcaggaactcaagcccggcgcgctggcgagtgccgccgcggactgggaggccgagggccgcaccctgtcctggctgctggaactggctccggagaaacgcgtgctcggcctgttcgccttcggcgacagcctcaaggacggcgccgccgaagcggtggaggccctgcgcgaacgggatatccacagccacctgatcaccggcgacaaccgcggcagcgcggcggtggtggccaaggccctgggcatcgacgacgtacacgcggaagtgctgccggcggacaaggccgccacggtcgccgagctgaaaggccggggccgggtggtggcgatggtcggcgacggcatcaacgacgccccggcgctggccgccgcagacgtcggcatcgccatgggtggcggcaccgacgtggccatgcacgccgccggcatcaccctgatgcgcggcgacccgcgcctggtgccggcggcgctggacatctcgcggcggacctacgcgaagatccgccagaacctgttctgggccttcatctacaacgtgatcggcatcccgctggcggccttcggcctgctcaacccgatggtggcgggcgcggcgatggccttctccagcgtcagcgtggtcggcaacgccctgctcctgcgacgctggaagccctga

SEQ ID NO: 55594 - protein, 792 aa, Pseudomonas aeruginosa UCBPP-PA14
MNSATLTELDLPVSGMTCASCAGRVERALKKVPGVAAASVNLASEQARVQAPADSLPALVAAVEQAGYQVPARSLELSIEGMTCASCVGRVERALKKVPGVREVSVNLASERAHLDLLGAVDSQALLQAVEQAGYKARLLDAGQPRQDDAERRLRRERWWVIAALLLALPLVLPMLVEWAGLHWMLPPWAQFLLATPVQFVIGARFYVSAWRAVKAGAGNMDLLVALGTSAGYGLSVYLWLTAPPGHMPHLYFEASTVVIALILLGKYLESRAKRQTASAIRALEALRPERAVRLRDGREEEVAIAELRLGDEVVVRPGERFPVDGEVLDGSSHADEALITGESLPVPKAPGDKVTGGAINGEGRLLLRTTALGGETVLAKIIRLVEDAQAAKAPIQKLVDKVSQVFVPVVILIALVTLGAWLVAGVGLEQALVNAVAVLVIACPCALGLATPTAIMAGTGVAARHGILIKDAESLEVAHAVTSVAFDKTGTLTSGRPQIIHLGGDDQEQLLRLAGALQRGSEHPLAKAVLERCAERDLEVPPVNASQALSGRGIQGEVEGRRLALGNRRLLDEQELKPGALASAAADWEAEGRTLSWLLELAPEKRVLGLFAFGDSLKDGAAEAVEALRERDIHSHLITGDNRGSAAVVAKALGIDDVHAEVLPADKAATVAELKGRGRVVAMVGDGINDAPALAAADVGIAMGGGTDVAMHAAGITLMRGDPRLVPAALDISRRTYAKIRQNLFWAFIYNVIGIPLAAFGLLNPMVAGAAMAFSSVSVVGNALLLRRWKP

SEQ ID NO: 55595 - DNA, 2337 bp, Shewanella sp. ANA-3
  CDS (1)..(2337): transl_table=11
atgagttctaaaaactcgggggctaccaacgttgcttctcgtgacggtggtaaatctacaaggtgtcatgagcatcatgcacacaaggcgtttcatcacgagcagactgatgttgtggaactcattattgagggggcaagctgcgccagttgtgtaggaaaaattgaatctgcactcaagaatgttccaggcgtgcaaaacgccgtgatgaatttcgcgcaaaggacggtaagtgtcacgggagcggctcaggctgatgtgttagtgaaagcggtggataaagcgggctaccacgctaagctcgcattggctgagcgcgaagatgacgtgctggtagaaaaggagcgagcagacagagcttactacaaacggctaatgcgtgagatgacgatagcgttatctataggggggcctttgatgatttatggcctcttcgtcggtgatatgacggtaagctcggctgaagagagatttgtgtggctagttgttggattactgacccttggcgtaatggtgttttctggtaaacacttttatatgggcgcttggcagtcttttaaaaatcattcagccaatatggacaccctgattgctttaggtacgggaaccgcatggatctactccatggtcgttgtattcatccctgatgttgtcccagagatggcgcgccatgtttattttgaagctaccgccatgattattggtttgattgacttagggctggcattggagttacgagctcgcggacgaacctctgaagcaattaaacgtctcattggtttgcaagccaagactgccagagtaattcgcaatgaaaaagaagtagatatcgccatcgaacaggtgttaatggatgatgttgtgcgtgttcgccccggagaaaaagtccctgttgatggtgaagttattgaaggctacacagccattgatgaatccatgttaacaggtgaacctatgccagtagaaaaagccgtcggcgacatggtggcggcaggtaccattaataaaaatggagccattttgtttaggaccacccgtattggaaaggacacggcattggcgcagattatcaatatggtcaaacgtgcacaaaattccaaaccgtctattggtcgtttggcggatgtaattgcagcttattttgtgcccgtggtgatgattgttgcagttagcagtgcattgatttggcttaactttggcccaaatccgacggtagcctatgccatcgtatctgctaccaccgtactcattatcgcttgcccttgtgccttgggactcgcaacgcctatgtcagttatggtgggcgttggaaaagctgccgaggtcggagtgttgatccgcaatggtgaggcgttgcaaaccgcttcgaaaatatcggcaatgattctggacaagactgggaccatcactttggggactcccaaggttacagatgtgttagttgcaggcaaacagagcgaggatgatattttgcaacttgctgcatccctagagtcaggatcagaacatccactggcattagctatcgtcgaatctgctcaagaaaaaggccttgagttgggaaaagtctctaatttcaatgcgatcgcaggtcatggagtgcaggcggaagtggatggaaatcaactgctgttcgggaatgaaaaactgatgcttgagtgcaatgtcgaactcggagatttcgttgaaagagcacaagctctcgccgcagaggcaaaaacaccgatgtattttgcagttaacaaccagcttgcagcgattatcgcggtggcagatcccattaaggaggactccatttccgcgatcaagcggttgcagcacaacggtattcgcgtcgttatgctgaccggcgataatcgtgcgacagcaaaggcggtagctgaaaaggcgggaattaacgaattttttgctgaagtattaccagaagataaatcgaaaaaggttaaggaactgcagatggcgggagagatcgtcggcatgacgggtgacggtatcaatgacgcaccagctctagcgattgctaatgtcggctttgctattggcacggggacggacgttgctatcgagagtgcggatattaccttaatgcgcggctctctgcatggacttgctgatgcgattgctgtgagcaaagccacgctgagaaacattaaacagaatttgctcggtgcatttatttacaacgtagcggggatccctttcgcagccggagcgctgtatccgttgtttggtttactgttaagtccggtaatagctggtgccgcaatggcattttcgtcattgactgtggtgacaaacgccaatcgtttgagactgtttagcgctcgggaacactga

SEQ ID NO: 55596 - protein, 778 aa, Shewanella sp. ANA-3
MSSKNSGATNVASRDGGKSTRCHEHHAHKAFHHEQTDVVELIIEGASCASCVGKIESALKNVPGVQNAVMNFAQRTVSVTGAAQADVLVKAVDKAGYHAKLALAEREDDVLVEKERADRAYYKRLMREMTIALSIGGPLMIYGLFVGDMTVSSAEERFVWLVVGLLTLGVMVFSGKHFYMGAWQSFKNHSANMDTLIALGTGTAWIYSMVVVFIPDVVPEMARHVYFEATAMIIGLIDLGLALELRARGRTSEAIKRLIGLQAKTARVIRNEKEVDIAIEQVLMDDVVRVRPGEKVPVDGEVIEGYTAIDESMLTGEPMPVEKAVGDMVAAGTINKNGAILFRTTRIGKDTALAQIINMVKRAQNSKPSIGRLADVIAAYFVPVVMIVAVSSALIWLNFGPNPTVAYAIVSATTVLIIACPCALGLATPMSVMVGVGKAAEVGVLIRNGEALQTASKISAMILDKTGTITLGTPKVTDVLVAGKQSEDDILQLAASLESGSEHPLALAIVESAQEKGLELGKVSNFNAIAGHGVQAEVDGNQLLFGNEKLMLECNVELGDFVERAQALAAEAKTPMYFAVNNQLAAIIAVADPIKEDSISAIKRLQHNGIRVVMLTGDNRATAKAVAEKAGINEFFAEVLPEDKSKKVKELQMAGEIVGMTGDGINDAPALAIANVGFAIGTGTDVAIESADITLMRGSLHGLADAIAVSKATLRNIKQNLLGAFIYNVAGIPFAAGALYPLFGLLLSPVIAGAAMAFSSLTVVTNANRLRLFSAREH

SEQ ID NO: 55597 - DNA, 2424 bp, Magnetococcus sp. MC-1
  CDS (1)..(2424): transl_table=11
atgtccttgtctccttctgttatgcaactccccatcgaaggcatgagttgtgcggcctgttccagccgcttgcagcgccgtttagagagcatgccgggtgtgacccaggccagtgttaatttggcgacagcctcagcccggattgagggcgtggtcaccctggaagggttggaaaagctggttaaacagaccggattttccgtgccgcgcatcacccaaacgtttcagttagaggggctctcctgtgcctcctgtgtaaccaaagtggagcaggcggtggccaaactgtccggggtggaacgggtggcggcaaaccttgccacgggggcgttgttggtcacgttgattcccgactatgtgagccagacaaccattcagcaggcggtgcagggggtgggttattcgctgctggccagccaagagggcgaggtcgaatcgcgtgcccaaaccatgcaacagcgggagatccgccagttgcagcaccgcttggtggtgggggcgctattggttttggtgaatatggcgatgatgcacggttggttgccaggggtagccacgctggatgaagggtggcgcaacctgttgcaaggggtctgcatgacaccggtggtgttatggtcgggctgggggtttcaccggggggcatggcaggtgctcaaacatggtagcgccaacatgaataccctggtgagtgtgggctcattgagcgcttatgtggcctctgtgggcatcgctctggttccccagtggtggagccaagccgggcagggtgggcacctctattttgataccgcaggcatgattattgtgctgattttgattggtcgatggttggaggcccgagccaaggggaaaaccgcaggggccattcaagccttgctggccctgaccccacaaaccgccctacgcgtgcaagaggatggtggtaccgaaaccatagccgcagcgcaggtgcgtgtgggagatcggttgctggtacatccaggtgcggcggtgcccagtgatggggtggtggaggtgggcgaaccctatctgcacgaggccatgctcaccggcgagccgctacccgtgcaaaaggggctgggggatgaggtgagtgggggcaccctaaatggggcggttccctttaccatgcgtgccagccgggtggggggagataccgcactggcacggattattgccatggtgcgtcaagcccagggggctaaaccgcccattgcccggttggccgaccgcattgccggggtgtttgtgcccattattttggcgttggcaaccctggtattgctggtgtggtggctgctgttgggggccccttttacccatagtctcacccattttattgcggtaatgattgtggcgtgcccctgtgcgttggggttggccacgccgacctcggtgatggttggcacgggccgggccgcgcggttgggtatgttgatgcgcggtggggatgtgctggagcgggcccagcaggtgaatgcggtgatctttgataaaaccggcacgctgacctgtggcacaccggtattggttaaccatcagggcgcggccgctttactcgccggggttatggcggtggaggcccagtcggagcaccccattgctcaggcgttggtgaaggggctgggcgaggcaggggtggtgccagccgcagccagcaaggttaaatcgttgaccggttatggtatgcagggccaagtgggagaagagacgcttttattggggcggagcatccttctggaacagcgtggggtggggctggatcccaccttgatggcgcaggctgccatgtgggccgagcagggacagagtgtgattcacgtggcttggcaggggcagcatgcgggtttgctgtcggtggcagatgccgttaaagcagagagtgcggcaggggtggcggcgctccaggcgcggggctgtgcggtctatatggtgacgggggataatgccaaggccgctcaggtggtggcggcccagttgggtattgcggcaagccatgtacgggccgataccctgccggatggtaaagcgcaggtggtggcagagttgcaggggcaggggttggtggtggcgatggtgggggatggtattaatgatgcccctgccttggccagggccgatgtgggtattgctctaggcagtggcaccgatgtggcgatggagagcgccgatattattctcatggggggggatgtgcaaggggtggcgcgcgccatcgctttgtcggcggcggtgctggttaatattcggcaaaatctgttttgggcctttggttataatgcgttgctcatccccatcgccgctggggtgttggtaccgtggggggtgatgttggagcccgcatgggcggcggcggccatggggctgtccagtgtgacggtggtgagcaacgctctgcgtttggggcgtttgcggttgtag

SEQ ID NO: 55598 - protein, 807 aa, Magnetococcus sp. MC-1
MSLSPSVMQLPIEGMSCAACSSRLQRRLESMPGVTQASVNLATASARIEGVVTLEGLEKLVKQTGFSVPRITQTFQLEGLSCASCVTKVEQAVAKLSGVERVAANLATGALLVTLIPDYVSQTTIQQAVQGVGYSLLASQEGEVESRAQTMQQREIRQLQHRLVVGALLVLVNMAMMHGWLPGVATLDEGWRNLLQGVCMTPVVLWSGWGFHRGAWQVLKHGSANMNTLVSVGSLSAYVASVGIALVPQWWSQAGQGGHLYFDTAGMIIVLILIGRWLEARAKGKTAGAIQALLALTPQTALRVQEDGGTETIAAAQVRVGDRLLVHPGAAVPSDGVVEVGEPYLHEAMLTGEPLPVQKGLGDEVSGGTLNGAVPFTMRASRVGGDTALARIIAMVRQAQGAKPPIARLADRIAGVFVPIILALATLVLLVWWLLLGAPFTHSLTHFIAVMIVACPCALGLATPTSVMVGTGRAARLGMLMRGGDVLERAQQVNAVIFDKTGTLTCGTPVLVNHQGAAALLAGVMAVEAQSEHPIAQALVKGLGEAGVVPAAASKVKSLTGYGMQGQVGEETLLLGRSILLEQRGVGLDPTLMAQAAMWAEQGQSVIHVAWQGQHAGLLSVADAVKAESAAGVAALQARGCAVYMVTGDNAKAAQVVAAQLGIAASHVRADTLPDGKAQVVAELQGQGLVVAMVGDGINDAPALARADVGIALGSGTDVAMESADIILMGGDVQGVARAIALSAAVLVNIRQNLFWAFGYNALLIPIAAGVLVPWGVMLEPAWAAAAMGLSSVTVVSNALRLGRLRL

SEQ ID NO: 55599 - DNA, 2232 bp, Mycobacterium smegmatis str. MC2 155
  CDS (1)..(2232): transl_table=11
gtgaccactgccaccgggcatgtcgagttgcagatcggtgggatgacgtgtgcctcgtgcgccgcacgcatcgaacgcaaactcaacaagctcgacggggtcacggcctcggtgaactacgcgaccgagaaggccagcgtcgaggtggccggcgaggtctcgcccgagacgctgatcgaggtcgtcgagaccgcgggctacaccgcgcacctgcccgcgccgccgcagccggaaaccggtggcacagaacaggatccagaggaccgggccaccgatgcgctgcgcacccgtctgctggtgtcggccgtgctcacggtgccggtgatcgcgatggcgatggtgcccgcgttgcagttcaccaactggcagtggctgtcgctgacgctggccgcgccggtcgtggtgtggggtgcgttgccgttccaccgcgcggcgtggctcaacctgcgtcacggcaccgcgaccatggacaccctgatctcgatgggcacgctggccgcgttcggctggtcgttgtacgcgctgttctggggcaccgccggtgtccccgggatgacgcatccgttctcactcgtgggttcgcgcaccgacggtgcgggcaacatctacctcgaggtcgccgccggggtcacgacgttcatcctggccggacgctacttcgaggccaagtcgaaacgacgcgcctcggccgccctgcgcgcactgatggaactcggcgccaaggacgtcgcgatactgaggaacggtgccgaacaacgcatcccgatcgaccagctgggggtcggcgacgagttcgtggtgcggccgggggagaagatcgccaccgacggtgtggtggtcgacgggtcctcggcggtcgacgcatcgatgctcacgggtgaatcggtgcccgtcgaggtcgggccgggcgatcaggtggtcggggccacggtcaacgtcggcggacgactggtggtgcgcgccaaccggatcgggtccgacacgcagctcgcgcagatggcccgcctcgtcgaggacgcgcagagcggcaaggcgcaggcgcaacgcctggccgaccgggtgtcggcggtgttcgtgccgatcgtcatcgcgctcgcggtggccaccctcggattctggctcggcacaggcggatcggtggcggcggcgttcaccgccgcggtcgccgtgctgatcatcgcgtgcccgtgtgcgctggggctggccacccccacggccctgctggtcggtacgggccgcggcgcgcagctcggcatcctcatcaaggggcccgaggtgctcgaatccacgcggcgcgtcgacaccatcgtgctcgacaagaccggcaccatcaccaccggatcgatgacgctgctcgacgtcgtggtcgccgacggcgaggaccgcgacgacgtgctgcgtgtggccgcggccgtcgaggacgcctcggagcatccgatcgcgcgtgccatcgccgcgggtgcgagggagcggacgggtgaactgcccgccgtcgagggtttcgccaacatcgagggcctgggcgtccagggcaccgtcgagggccgcgccgtcgtcgtcggcaggccccgcttgttcggggaccccgagaaatccctgccgcgcaagctcgccgacgcgatggaggccgcgcaggcgcagggacgcaccgcggtcgtcgtgggctgggacggcaccgcgcgcggtgtgctcgtggtcgccgacgcggtcaaggccacgtcggccgaggcgatcggacagctgaggaaactcggtctgcagcccatcatgctgaccggtgacaacggcgcggcggcacgcgccatcgccgatcaggtgggcatcgacgacgtctacgccgaggtgctgccgcaggacaaggccgacgtgatcaaacgactgcaggccgagggcagggtggtcgcgatggtcggcgacggtgtcaacgacgccgcggcgctcgcgcaggccgatctggggctgtcgatgggcacgggtaccgacgtcgcgatcgaggcaggcgacctgaccctggtgcgtggcgacctgcgtacggccgccgatgcgatccgcttgtcccgcaggacattggcgaccatcaagggcaacctgttctgggcgttcgcctacaacgtggcggcacttccgctcgctgccgcgggcctgctgaacccgatgctcgcgggtgcggccatggcgttctcgtcggtgttcgtggtcagcaacagcttgcggctgaagcgttttcgctga

SEQ ID NO: 55600 - protein, 743 aa, Mycobacterium smegmatis str. MC2 155
MTTATGHVELQIGGMTCASCAARIERKLNKLDGVTASVNYATEKASVEVAGEVSPETLIEVVETAGYTAHLPAPPQPETGGTEQDPEDRATDALRTRLLVSAVLTVPVIAMAMVPALQFTNWQWLSLTLAAPVVVWGALPFHRAAWLNLRHGTATMDTLISMGTLAAFGWSLYALFWGTAGVPGMTHPFSLVGSRTDGAGNIYLEVAAGVTTFILAGRYFEAKSKRRASAALRALMELGAKDVAILRNGAEQRIPIDQLGVGDEFVVRPGEKIATDGVVVDGSSAVDASMLTGESVPVEVGPGDQVVGATVNVGGRLVVRANRIGSDTQLAQMARLVEDAQSGKAQAQRLADRVSAVFVPIVIALAVATLGFWLGTGGSVAAAFTAAVAVLIIACPCALGLATPTALLVGTGRGAQLGILIKGPEVLESTRRVDTIVLDKTGTITTGSMTLLDVVVADGEDRDDVLRVAAAVEDASEHPIARAIAAGARERTGELPAVEGFANIEGLGVQGTVEGRAVVVGRPRLFGDPEKSLPRKLADAMEAAQAQGRTAVVVGWDGTARGVLVVADAVKATSAEAIGQLRKLGLQPIMLTGDNGAAARAIADQVGIDDVYAEVLPQDKADVIKRLQAEGRVVAMVGDGVNDAAALAQADLGLSMGTGTDVAIEAGDLTLVRGDLRTAADAIRLSRRTLATIKGNLFWAFAYNVAALPLAAAGLLNPMLAGAAMAFSSVFVVSNSLRLKRFR

SEQ ID NO: 55601 - DNA, 2358 bp, Nocardioides sp. JS614
  CDS (1)..(2358): transl_table=11
atgacgcagcagaccgaaccgatacccaccacggagagcgagtcgccgcagacggtcgagctcaccatcggcgggatgacctgcacctcctgcgccgcccggatcgagaagaagctggcgaagatcgacggcgtggtcgcctcggtcaactacgcgacggagaaggcccgggtcacgtacgtcgcaccggtgaccgtcgaccagctggtatcggtcgtcgaggccaccgggtacacggcagctcagcacgagtccgtcccgacggccccggagggcggcgccgggacggacagcaccgaggccgcgcccgatccagcgaccgccgcctggcaccgccggctgacgatctcggcggtgctgacgctccccgtcctcctgctggcgatggttcccgcgctgcagttcgacaactggcagtggatctccctcacgttggcatcgcctgtcgtcgcctggggggcctggccgttccaccgcgcggccgtcgtcaacgcccggcatgcgaccgcgaccatggacaccttgatctccgtgggcgtcacggccgcctacctgtggtccttgtgggcgctgctgttcaccgatgccgggatgaccggcatgcggatgcccttccggctgctcccggacgacgccggcggtgcgcacatctacctcgaggtcgcggccgccgtcacgacgttcatcatcgcggggcgctacttcgaggcgcgcgcgaagcggcagtccggcgcagccctccgcgcactcctcgacctgggcgccaaggacgtcgccgtgctgcgccactccagcgacggcgccgcccgggaggtcgagacccggatcccgatcggccagctggacgtgggagatcggttcgtggtccgcccgggcgagaagatcgccacggacggcgtcgtggaggaagggtcctccgcggtcgacgcctcgatgctcaccggtgagccggtcccggtcgaggtcggccccggtgaccctgtcgtcggagcgaccatcaacgccggcggccgcctggtcgtcagagccagccgggtgggttcggacacgcagctcgcccagatggcgagcctcgtcgaggcggcccagtccgggaaggcccaggtacagcggctcgcggatcgcgtctccggtgtcttcgtgccgatcgtgatcgcgatctcactggccaccctcatcacctggctggcgaccgggcacaccgccaccgcggccttcaccgcggcggtcgccgtgctggtcatcgcctgcccgtgcgcgctgggcctcgcaacgccgaccgcgctgctcgtcggcaccggacgcggcgcgcagatcggcatcctgatcaagggcccggaggtgctcgaatccacccgggtcgtcgacacgatcgtgctcgacaagaccggcaccgtcaccaccggcaagatgacgctcgtcggggcggtgccctctatcggaaccgacaccgatcagctgctcggcctcgcgggggcgctcgaggacgcgtccgaacaccccatcgggcgtgccatcgccgccggcgccgccagcctgaccggccgaccactcagcccggtccaggggttcagcgccacccaggggctcggcgtgtcgggagtcgtcgacggccacgaggtggtggcggggcggccgagctggctgcgcgaagcgtggggccaggccctggatgagccgctgctccgtgcggtggccgatgccgagggggtcggccggacggccgtcgccgtcggttgggacggcgcggctcgcggcgtggtcatcgtcgccgacaccctcaagccgacgagcgtgcaggcgatctccgagctcaaggcactcgggctcaccccggtgctgctgaccggcgacaaccagcgcgcggcgcacgcagtagcggccgaggtcggcatcgacgaggtcatcgccgaggtcctgccggcggacaaggtaggcgtggtcgagcggctcagggccgagggtcacacggtcgcgatggtcggcgacggcaccaacgacgctgccgcgctcgcagccgccgacctcggccttgcgatggggaccggcacggacgtcgcgatcgaggcctcggacctcaccctcgtccggggggacctgcgcaccacggtggacgcgatccgactgtcgcgccggaccctgcggacgatcaagacgaacctcttcgccgccttcgtctacaacgtcgccgccatcccattggcggcgctgggcctgctcaaccccgtgatcgcgggcgcggccatggcgctgtcgtcggtgtccgtggtgtccaacagcctgcgcctgcgccggttcgaggccatctccgtccagcggtccacgactggcgaagtcgagcccatgaccggcacctga

SEQ ID NO: 55602 - protein, 785 aa, Nocardioides sp. JS614
MTQQTEPIPTTESESPQTVELTIGGMTCTSCAARIEKKLAKIDGVVASVNYATEKARVTYVAPVTVDQLVSVVEATGYTAAQHESVPTAPEGGAGTDSTEAAPDPATAAWHRRLTISAVLTLPVLLLAMVPALQFDNWQWISLTLASPVVAWGAWPFHRAAVVNARHATATMDTLISVGVTAAYLWSLWALLFTDAGMTGMRMPFRLLPDDAGGAHIYLEVAAAVTTFIIAGRYFEARAKRQSGAALRALLDLGAKDVAVLRHSSDGAAREVETRIPIGQLDVGDRFVVRPGEKIATDGVVEEGSSAVDASMLTGEPVPVEVGPGDPVVGATINAGGRLVVRASRVGSDTQLAQMASLVEAAQSGKAQVQRLADRVSGVFVPIVIAISLATLITWLATGHTATAAFTAAVAVLVIACPCALGLATPTALLVGTGRGAQIGILIKGPEVLESTRVVDTIVLDKTGTVTTGKMTLVGAVPSIGTDTDQLLGLAGALEDASEHPIGRAIAAGAASLTGRPLSPVQGFSATQGLGVSGVVDGHEVVAGRPSWLREAWGQALDEPLLRAVADAEGVGRTAVAVGWDGAARGVVIVADTLKPTSVQAISELKALGLTPVLLTGDNQRAAHAVAAEVGIDEVIAEVLPADKVGVVERLRAEGHTVAMVGDGTNDAAALAAADLGLAMGTGTDVAIEASDLTLVRGDLRTTVDAIRLSRRTLRTIKTNLFAAFVYNVAAIPLAALGLLNPVIAGAAMALSSVSVVSNSLRLRRFEAISVQRSTTGEVEPMTGT

SEQ ID NO: 55603 - DNA, 2436 bp, Azoarcus sp. BH72
  CDS (1)..(2436): transl_table=11
atggcggatgcggtgctggatcagaggcggcccgaggacagcgcgttgcacgttgtggacctgccggtagcgggcatgacctgcgccgcctgcgcgacgcgcatcgaaaaggtgctgaaccggatggacggcgtcagcgccagcgtgaacctggcggcggaaaaggcgcacgtgcgcctggacggcgcgcgcattggcgccggcgaggtggtggctgcgatccgtaaggccgggttcgaggtgccggacgccagcctcgaactcgaaatctccggcatgacttgcgtcgcgtgcgcgcagcgcctggagaaggtgctcggccgccttcccggcgtttcagcggcggtcaatttcgccaccgagcgcgctaccgtgcgttataccccggggctgtcgaacgccgatgcgatcaaggcggcagtcgttcgggcaggtttcgaggtcgcggagaccggaccggcgcagcgcgagcagatacgtgcccgccagcaggcgcagtggcgccacgagcgcatccggttctggatcgccgccgcgctgacgctcccgctggcggcgcagatgccggcgatgttcggctgggtcggcgaggccggcatccacgacgtgattccgcgcggctttcagttgctgctcgcgaccccggtccagttctggatcggcgcgcggttctaccacggggcgtggtcggcgttgcgcgggcgaagcgcaaacatggacgtgctggtggcgctcggtaccaccatggcctacttctacagcctggtggtgacggcgctagggcgtcacgacctccacgtgtacttcgaagcctccacgatgatcatcaccctggtgctgctcggaaagctgctggaggcgcgtgcgaaggccaggaccacggcggcgctggacgccttggtgcggttgcagccccgtatggcgcgggtggagcggggcgggatgattgttgaggttccggtcgaacggctgcagccgggtgacaccttcctggtccggccgggcgacgcggtgccggtcgatggcgtcgtcgagagcggcgcctccgcggtgaatgaatccatgctgaccggcgaaagcctgccgatcgacaaggcgggtggcgacaaggtctatgcggccacggtgaacggcgagggcgtgctccgctgccgggcaaccggtgtgggaggcagcaccttgctcgcgggcatcatccggctggtcgagcaggcgcaggggtcgaaagcgcccgtgcagcgccgcgcggaccaggtttcggcgatcttcgtccccgtggtggtcacgctggcggttgtcacctttgccggctggtggctggtggccggcgacttccagcaagcgctggtcaacgcggtggcggtgctggtcatcgcctgtccatgcgcgctcgggctggctacgccgaccgccatcatggtggcgaccggacagggcgcgcgcgccggcatgctggtgaagaatgccgcggcgctcgaactcgccgagcagatcgcggtgctggcgctggacaagacgggcacactgaccgaggggcgtccggccgtcaccgagatccggcccggcgcgggggtaagccgcagcgaactgctgcggctcgccgccgccgttgagcaggcgagtgcccacccggtggccttggcggtggtcgaggcggcgcgcgccgagggctgtgtgttgccccctgcgagcgaactgcaggcggtgagcggtaaggggatggagggcgtggtggaggggcgcaagctgcgggtcggatcacccgacttcctggctgaggccggcgtcgcggtggccgaagccgacattgcagcccttgctgccggcgccaatacactggtggcgattgcgggggatggccattggctcggcgtcatcggcgtggcagatccgctgcggggcgattccgccgatgcagtgcggcgtttgcgcgccaagggcgtacatgtgctgatgctgaccggggatcatcccgccacggcggcggccatcgcggggcgggtcggcatcgacgaatggcaggcgggggtgctgcccgcgggcaaggcggaagcggtgtcctcgctggtcgcggagcggaacggaaaggcgcgggtcggcatggcgggcgatggcatcaatgacgcgcccgccctggcggcggcggatgtgtcgtttgcgatcggggtgggagcggacgtggccgtcgaggccgccgacatcacgctggtgcgcaattccctgcacggtgttgccgatgcgatcgacctctctcgtgcaaccctgtccaagatcaggcagaacctgttcttcgcgttcatctacaacgtgctcggcattccgcttgcggctgccggcatgctcaaccccgtggtggcgggcgccgcgatggcaatgagttcggtgtcggtggtgaccaactcgctgttgctgcgacgctggaagcccgggcgctga

SEQ ID NO: 55604 - protein, 811 aa, Azoarcus sp. BH72
MADAVLDQRRPEDSALHVVDLPVAGMTCAACATRIEKVLNRMDGVSASVNLAAEKAHVRLDGARIGAGEVVAAIRKAGFEVPDASLELEISGMTCVACAQRLEKVLGRLPGVSAAVNFATERATVRYTPGLSNADAIKAAVVRAGFEVAETGPAQREQIRARQQAQWRHERIRFWIAAALTLPLAAQMPAMFGWVGEAGIHDVIPRGFQLLLATPVQFWIGARFYHGAWSALRGRSANMDVLVALGTTMAYFYSLVVTALGRHDLHVYFEASTMIITLVLLGKLLEARAKARTTAALDALVRLQPRMARVERGGMIVEVPVERLQPGDTFLVRPGDAVPVDGVVESGASAVNESMLTGESLPIDKAGGDKVYAATVNGEGVLRCRATGVGGSTLLAGIIRLVEQAQGSKAPVQRRADQVSAIFVPVVVTLAVVTFAGWWLVAGDFQQALVNAVAVLVIACPCALGLATPTAIMVATGQGARAGMLVKNAAALELAEQIAVLALDKTGTLTEGRPAVTEIRPGAGVSRSELLRLAAAVEQASAHPVALAVVEAARAEGCVLPPASELQAVSGKGMEGVVEGRKLRVGSPDFLAEAGVAVAEADIAALAAGANTLVAIAGDGHWLGVIGVADPLRGDSADAVRRLRAKGVHVLMLTGDHPATAAAIAGRVGIDEWQAGVLPAGKAEAVSSLVAERNGKARVGMAGDGINDAPALAAADVSFAIGVGADVAVEAADITLVRNSLHGVADAIDLSRATLSKIRQNLFFAFIYNVLGIPLAAAGMLNPVVAGAAMAMSSVSVVTNSLLLRRWKPGR

SEQ ID NO: 55605 - DNA, 2349 bp, Mycobacterium sp. KMS
  CDS (1)..(2349): transl_table=11
atgagcctgccgaatcacgtcgtcggtgtcgatcaaccccacagcatcgagttgtcgatcggcgggatgacctgtgcatcgtgtgcagcccggatcgaaaagaaactgaacaagatcgatggggtcgaggccagcgtcaactacgcgaccgaaaaggccaaggtggactaccccaactccgtcgatccggcagtgttgatcgccgcggtggaagcgaccggctacaccgcaaccgcccccgcggcgccgaacgacgcggccccgaccgattccggccgggacgcgggcgaagccgactccttgcggagccgattgctgatctccctggtgctgacggtgcccgtgatcgcgatgtcgatgatccccgcgctgcaattcaccaactggcaatggctcgcgctgaccttggcctctcccgtcgtggtgtggggcgccctgccgtttcatcgcgcagcctgggccaacgcccgtcaccgcgccgccacgatggacaccctgatctcactgggcgtcagcgccgcgtacctgtggtcactgtgggcgctgttcatcggacacgccggcatgccggggatgaggatggccttcagtctgctacccgacgcgggttccgagaccgagcacatctacctcgaagtcgccgccgcggtgacggtgttcattctggccggccgctacttcgaggcgcgcgccaagacacgatccggtgccgcgctgcgggccctgctcgacatgggcgccaaagacgtcgccgtcgtgcgcaacggtaccgaaatccgcattccaacagcagaacttagcgtcggagacgtgttcgtggtgcgaccgggtgagaagatcgccaccgacggggtggtgaccgacggcgcatcagcggtcgacgcatcgatgctcaccggggaatccgtgcccgtcgaggtccgtcccggcgaccacgtcaccggtgccaccgtcaacgccggtgggcgactgctcgtccgcgccacccgaatcggcgccgacacccaactcgcgcagatggcgcgcctggtcgaagacgcccagaacggcaaggcatcggtacagcgcctggccgaccgggtctcggcggtcttcgtgcccatcgtcctggcgctgtcggtggcaacgctggctgtctggctgctcaccggccattcggcgacagtcgcgttcaccgcggcggtcgccgtcctgatcatcgcctgcccgtgcgcgctcggtctggccacccccacggccctcatggtcggcaccggccgcggcgcccaactgggcatcctgatcaaagggccgcaggtgctcgagtccacccgccgggtcgacaccatcgtgctcgacaagaccggaaccgtcaccaccggccgcatgagtctcgtgggggtgtacccgggcgcaggccagaactccgacgagctcctcgagttcgcgggagccttggagagcgcgtctcaacaccccatcgccgaggcgatcgccgcttcggcctccgccggcggcgcgttgccagcggtcgaagacttctccaaccacaacggctacggcgtcagcggcgtcgtcgccggccatgcggtcctggttggacggctcagctggcttaatgacgactggtcgctgacagcccccgacgacctcgcctccgccgccgaacacgctgagtcccagggccacaccccagtgtgggtggcgtgggacggggcggtgcgcggcgtgatcgtcgtggccgacacggtgaagcgcacctccgcggacgccatcggccaattccgcaagctcggcctacgtccgtttctgctgaccggcgacaatcggcgcgccgccctcgcagtcgccgcagaggtcggtatcgacgccgacgacgtgatcgccgaggtcctccctgccggcaaagtcgacaccatcaaaagcctgcaagcgcaggggcgaaccgtcgccatggtcggcgacggcgtcaacgatgccgccgcactggtacaggccgatctgggcctggcgatgggcaccggatccgacgtcgccatcgaggcatccgacctgacactggtacgtggtgatctgcgcgcagccgccgacgccattcgattggcccggtcaaccctgcggaccatcaagggaaacctgttctgggccttcgcctacaacgtcgccgcacttcccttagcggcgctgggcctactcaatccgctgatcgccggcgccgcaatggccttcagctcggtcttcgtggtcagcaacagcctgcggcttcgccggttcaccagcagcgcatcccctgggcagacggaagacgtccacgttgcgacagtgccgccagggggcgacgagtaccgcagggcccacaccgcaccataa

SEQ ID NO: 55606 - protein, 782 aa, Mycobacterium sp. KMS
MSLPNHVVGVDQPHSIELSIGGMTCASCAARIEKKLNKIDGVEASVNYATEKAKVDYPNSVDPAVLIAAVEATGYTATAPAAPNDAAPTDSGRDAGEADSLRSRLLISLVLTVPVIAMSMIPALQFTNWQWLALTLASPVVVWGALPFHRAAWANARHRAATMDTLISLGVSAAYLWSLWALFIGHAGMPGMRMAFSLLPDAGSETEHIYLEVAAAVTVFILAGRYFEARAKTRSGAALRALLDMGAKDVAVVRNGTEIRIPTAELSVGDVFVVRPGEKIATDGVVTDGASAVDASMLTGESVPVEVRPGDHVTGATVNAGGRLLVRATRIGADTQLAQMARLVEDAQNGKASVQRLADRVSAVFVPIVLALSVATLAVWLLTGHSATVAFTAAVAVLIIACPCALGLATPTALMVGTGRGAQLGILIKGPQVLESTRRVDTIVLDKTGTVTTGRMSLVGVYPGAGQNSDELLEFAGALESASQHPIAEAIAASASAGGALPAVEDFSNHNGYGVSGVVAGHAVLVGRLSWLNDDWSLTAPDDLASAAEHAESQGHTPVWVAWDGAVRGVIVVADTVKRTSADAIGQFRKLGLRPFLLTGDNRRAALAVAAEVGIDADDVIAEVLPAGKVDTIKSLQAQGRTVAMVGDGVNDAAALVQADLGLAMGTGSDVAIEASDLTLVRGDLRAAADAIRLARSTLRTIKGNLFWAFAYNVAALPLAALGLLNPLIAGAAMAFSSVFVVSNSLRLRRFTSSASPGQTEDVHVATVPPGGDEYRRAHTAP

SEQ ID NO: 55607 - DNA, 2283 bp, Mycobacterium sp. KMS
  CDS (1)..(2283): transl_table=11
atgacgacatcaacacccgtcaccgaggccagcgtggagttgcagatcggcggaatgacctgcgcctcctgcgcgaaccgcatcgagcggaagttgaacaaactcgacggggtggtcgcgacagtcaactacgcgaccgagaaagccaccgtcacggtccccgagggatacgacccggcccagctgatcgccgtggtggagaaaacggggtaccgcgcctcgctaccggcaccgcccacaccgccggcgaccgcatccgggcagccagagcccgcacgccagaccgatgaccccgagttggtgtcgctgcggcagcgtctgatcgcgtcaacggtgctgtcagtaccggtgatcgcgatggcgatgattccggttctgcagttcacctactggcaatgggcctccctcacgctggcagcgccggtcatcgtgtgggcggcctggccgttccaccgcgccgcgtggacgaatctgcggcacggcacggcgacgatggacaccctcatttcgctgggcaccgtgtcggcattcttgtggtcgctctacgcgctgttcttcggcactgccggcaccgccgggatgacgcacccctttgcgctcacactcgcgccttctcacggcgcggcaaacatttacctcgaagtcgccgccggtgtcaccacattcatcctggccgggcgctacttcgagaagcggtccaaacgacaggccggggcggcgctgcgagccctgctcgatttgggcgccaaggacgtttccgtgctgcgcgacggcgtcgaatccaagatcgcgatcgacgacctggtggtcggtgacgagttcgtcgtgcgcccgggggagaagatcgctactgacggcgaagtcgtgtcgggaacttcggctgtcgatgcatcgatgttgaccggcgaatcggtgccggtagaggtctcggccggggacacagtggtgggcgcgaccgtcaatgctggcggtcggctggtggtgcgggccagtcgtgtcggttccgacacccagctggcgcagatggcggccctggttgaacgcgcccaaaccggcaaggccgaagtccagcgtctggccgatcgcatctccggtgtcttcgtgccgatcgtgatcgccatcgcggtgatcaccctcggcgcctggctgggcgccggattctccgtcgccgccgcgttcaccgcggcggtcgcggtgctggtcatcgcgtgcccatgcgcccttgggttagccacgcccacagcactgctggtgggcaccggtcgcggcgcgcagatgggtgtattgatcaaaggcccggaagtgctcgaatccacccgcaaggtcgacaccgtcgtcctggataagaccggcaccgtgaccaccggcacgatgaccctcgtggacgtcatcaccacgccaggaaccgaacgtcgcgaattacttcgcctggccggcgccctggagaacgcctccgagcatccgatcgcccgagccgtcgcgacggcggccgccgaagaagtcggtaccctgccgacgccgcaagacttcgccaacgccgaaggcaaaggcgttcacggggtggtggacggacacgccgtcctcgtcggacgcgaatccatgctcaccgattgggcccaacacctcagtgcggagctggcccacgccaagactcgtgctgaagccgacggaaagaccgtggtcgccgtcggctgggacggccagccacgcggcctgctcatcatcgccgacaccgtaaaacccacgagcgcacaggcaatctcacagatgagagccctcggcctaaccccgattcttctgaccggcgacaacgccgccgccgcccggcacatcgccgcagaagtcggcatcgacacggtgatcgccgaggtcatgccccaagacaaggtcgacgtcatcgcccggctacaagcccaaggtaagaccgtggccatggtcggcgatggcgtcaacgacgcgcccgctctcgcacaagccgacctcggcctagccatgggaaccggaaccgacgtcgcaatcgaagcctccgacatcaccctggtacgcggcgacctgcgcagcgccgtcgacgcgatccgcctgtcccgccgaacattggcgacgatcaagacgaacctgttctgggcgttcgcctacaacgtcgccgccataccggtcgcagcgctgggcatgctcaaccccatgctcgccggcgcggccatggcgttctccagcgtcttcgtcgtgggcaacagccttcgcctgcgcggcttcacatccacatccttcaacacgacccactaa

SEQ ID NO: 55608 - protein, 760 aa, Mycobacterium sp. KMS
MTTSTPVTEASVELQIGGMTCASCANRIERKLNKLDGVVATVNYATEKATVTVPEGYDPAQLIAVVEKTGYRASLPAPPTPPATASGQPEPARQTDDPELVSLRQRLIASTVLSVPVIAMAMIPVLQFTYWQWASLTLAAPVIVWAAWPFHRAAWTNLRHGTATMDTLISLGTVSAFLWSLYALFFGTAGTAGMTHPFALTLAPSHGAANIYLEVAAGVTTFILAGRYFEKRSKRQAGAALRALLDLGAKDVSVLRDGVESKIAIDDLVVGDEFVVRPGEKIATDGEVVSGTSAVDASMLTGESVPVEVSAGDTVVGATVNAGGRLVVRASRVGSDTQLAQMAALVERAQTGKAEVQRLADRISGVFVPIVIAIAVITLGAWLGAGFSVAAAFTAAVAVLVIACPCALGLATPTALLVGTGRGAQMGVLIKGPEVLESTRKVDTVVLDKTGTVTTGTMTLVDVITTPGTERRELLRLAGALENASEHPIARAVATAAAEEVGTLPTPQDFANAEGKGVHGVVDGHAVLVGRESMLTDWAQHLSAELAHAKTRAEADGKTVVAVGWDGQPRGLLIIADTVKPTSAQAISQMRALGLTPILLTGDNAAAARHIAAEVGIDTVIAEVMPQDKVDVIARLQAQGKTVAMVGDGVNDAPALAQADLGLAMGTGTDVAIEASDITLVRGDLRSAVDAIRLSRRTLATIKTNLFWAFAYNVAAIPVAALGMLNPMLAGAAMAFSSVFVVGNSLRLRGFTSTSFNTTH

SEQ ID NO: 55609 - DNA, 2313 bp, Neisseria meningitidis FAM18
  CDS (1)..(2313): transl_table=11
gtgttgggacattgtttttcctttgctgtgtcaagttttcggattctactcgaattatcggcgcgtttgagaaatttcgaccataccggcgttcagacggcatcccgcagccttaactgccgtctgaatatcaaagcaggaatcacgcttatgcaacaaaaaatccgtttccaaatcgaaggcatgacctgccaggcctgcgcttcgcgcattgaaaaagtgttgaacaaaaaagattttgtcgaatcggcgggggtaaacttcgccagcgaagaggcgcaggtagtgtttgacgacagcaaaacctcagtagccgacattgccaaaatcattgagaaaaccggttacggcgcgaaggaaaaaacggaagatacattgccgcaagctgaagcagaacaccatatcggctggcggctgtggctgctgtccgccatcaatattccgttccttgtcggtatggcggggatgatgatcggtaggcacgattggatgattccgccgttgtggcagtttgcgctggcaagcattgtgcaactttggctggcaatcccgttttacaaaagcgcgtgggcgagcattaaaggcgggctggcgaatatggacgtgctggttactatcggcacggtgtcgatttacctgtattccgtttatatgttgtttttcagtccgcacgcggcacacggaatggcgcacgtgtattttgaagcgggcgtgatggtgattggttttgtgtcgctgggcaaatttttggaacaccgtaccaaaaaatccagcctgaacagcttgggcttgctgctcaaactcacgccgacccaagtcaacgtgcagcgcgatggcgaatggaaacagcttcccatcgaccaagtgcaaatcggcgaccttatccgcgccaaccacggcgaacgcattgccgccgacggcgttatcgaaagcggcagcggctgggcggacgagagccatcttaccggcgaatccaatcccgaagagaaaaaggcgggcggcaaagtgttggcgggcgcgctgatgaccgaaggcagcgtggtgtaccgcgccgcgcagctcggcagccaaaccctgctcggcgacatgatgaacgcactctctgaagcgcaaggcagtaaagcaccgattgcgcgcgtggcggacaaggcggcggcggtgttcgtgcctgccgtcgtgggcatcgcgttgttgacttttattgttacttggctgattaagggcgattggacggttgcgctgatgcacgccgtcgccgttttggtgattgcctgcccgtgtgcgctcggtctggctacacccgccgcgattatggtcggcatgggtaaagcagtgaaacacggcatttggtttaaagacgcagcggcaatggaagaagccgcccacgtcgatgccgttgtgttggacaaaactggcacgctgaccgaaggcaggccgcaggttgccgccgtttattgtgttcccgacagcggctttgacaaagacgatttgtaccgcatcgccgctgccgtcgaacaaaacgccgcccatccgcttgcccgagccatcgtttccgccacccaagcgcgcggtttggagattcccgccgcacaaaacgcgcaaaccgttgtcggcgcaggcattgccgccgaagtggaaggtgcgggattggtgaaagcgggcaaagccgaatttgccgaactgaccttgcccgagttttcagacggcgtttgggacattgcaagcattgttgcagtctcagtcgataacaaacctatcggtgcattcgcacttgccgacgcgttgaaagccgataccgccgaagccataggccgtctgaaaaaacacaatatcgatgtttacatcatgagcggcgacaaccaaggcacggtcgaatacgtcgcccaacaactgggtatcgctcacgccttcggcaatatgagtccgcgcgacaaagccgccgaagtgcagaaactcaaagccgccggcaaaaccgtggcgatggtcggcgacggcatcaacgacgcgcccgcgctcgccgccgcaaacgtcagcttcgccatgaaaggcggtgcggacgttgccgaacacaccgcgtccgccacgctgatgcagcattcggttaatcagctcgccgatgccctgctggtgtcgcaagccactttgaaaaacatcaagcaaaacctgtttttcgccttcttctacaatatcttgggcattccgctcgccgcgcttggctttttaaatcccgtcatcgcaggcgcggccatggcggcaagctcggtttccgtgttgagcaatgccttgcgcctgaaacgggtaaaaatcgattga

SEQ ID NO: 55610 - protein, 770 aa, Neisseria meningitidis FAM18
MLGHCFSFAVSSFRILLELSARLRNFDHTGVQTASRSLNCRLNIKAGITLMQQKIRFQIEGMTCQACASRIEKVLNKKDFVESAGVNFASEEAQVVFDDSKTSVADIAKIIEKTGYGAKEKTEDTLPQAEAEHHIGWRLWLLSAINIPFLVGMAGMMIGRHDWMIPPLWQFALASIVQLWLAIPFYKSAWASIKGGLANMDVLVTIGTVSIYLYSVYMLFFSPHAAHGMAHVYFEAGVMVIGFVSLGKFLEHRTKKSSLNSLGLLLKLTPTQVNVQRDGEWKQLPIDQVQIGDLIRANHGERIAADGVIESGSGWADESHLTGESNPEEKKAGGKVLAGALMTEGSVVYRAAQLGSQTLLGDMMNALSEAQGSKAPIARVADKAAAVFVPAVVGIALLTFIVTWLIKGDWTVALMHAVAVLVIACPCALGLATPAAIMVGMGKAVKHGIWFKDAAAMEEAAHVDAVVLDKTGTLTEGRPQVAAVYCVPDSGFDKDDLYRIAAAVEQNAAHPLARAIVSATQARGLEIPAAQNAQTVVGAGIAAEVEGAGLVKAGKAEFAELTLPEFSDGVWDIASIVAVSVDNKPIGAFALADALKADTAEAIGRLKKHNIDVYIMSGDNQGTVEYVAQQLGIAHAFGNMSPRDKAAEVQKLKAAGKTVAMVGDGINDAPALAAANVSFAMKGGADVAEHTASATLMQHSVNQLADALLVSQATLKNIKQNLFFAFFYNILGIPLAALGFLNPVIAGAAMAASSVSVLSNALRLKRVKID

SEQ ID NO: 55611 - DNA, 2175 bp, Magnetospirillum magnetotacticum MS-1
  CDS (1)..(2175): transl_table=11
atgaccagtcaaagcctgtcgcttcccgtcaagggcatgacctgcgccgcttgttccacccgtctggagcgggtgctgggcaaggtggccggtgtggaacaggccctggtcagtctggcggccgaacgggccgatatccgcttcgattccgacaaggcgggacctgaggatctggtctcggccatcgtcaaggcgggctttcaggccgatctcgcccagcaaggcgacgaggaccttgaccgtgaggaggccgagcacgccgccgaatccgcccatcacctgcgtttgctgctgctttcggccctgctgaccctgccgctgatcggccagatggttctcgacatggcggggctgcacgtcatgattccgccgctgatccaattggctttggccgcgccggtgcagttctggatcggggcgcgcttttatactggagcctgggcctccctcaaaggaggcgcgggcaatatggacatgctggtggtgctgggcacctctgccgccttcggcctgtcggcctggcatgtggtggcgggcgatgcccatcacggcaatctttatttcgagggcgcctcggtggtcatcaccctggtgctgctgggcaaactgctggaggggcgcgccaagcgctcggcggcgggcgccatccgcgccctgatgcggctcaagcccgatacggcgcgggtggagcgcgacggcgtggtcatggaggttcccgccgccctggtggcggtgggcgaagtggtgctgatccgccccggcgagcgcgcccccgtcgatggcacggtggtggatggtctctcccagatggacgaatcgctgatcaccggggaaagcctgccggtaccgcgtggccccggcgatgaggtggtggccggttcggtcaatggcgatggattgttgcgagtcgaagcgacgcgggtgggggctcaatccaccatcagccgcatcatccgcatggtccagggcgctcagtccgccaaggctccggtgcaaaagctggtggatcgcatttccaatgtcttcgtgccggtggtgacggtgatcgccgctctgtccttcatgggctggtggctgatggcgggcgatatgcagaccgccttcgtggcggcggtgtcggtgctggtcatcgcctgcccctgcgccctgggccttgccacccccacaggtatcatggtcggcaccggtctggcggcgcggcatggtattctgatcaaggacgccgaggcgctggaactggcccataaggtccaggtcatggtgttcgacaagaccggcaccttgaccgaaggccgcccggcggtggccgccatccgggccgccgatggtaacgaggcggaactgctgcgccttgccgcttcggcccagcaaggcagcgagcaccccctggcccgcgctctcctggccgccgttcaggaacccgtggcgccgctgtgtgccttccgcagcctgcccggtcggggtctggaggcggaggtggaagggcgcaatctgctgatcggcagccgccgtctgatggccgagcggggcatcgctgcgggtgccctggccctgcccgccgaggcggaggaagccctgggccgcaccctgatgtgggtgtccgaggggccgcgcatgctgggcttcgtcgccgtggccgatcccatcaagcccagtgccgcaggcgcggtggcgcggcttaaggccttgggcatcgagacggtgatgctgaccggcgacaatgcgcgtgcggcggatgccgtggcgcgggccgcaggcgtggaccgggtgctctccgaggtgctgcccgaggataaggaagcggaaatccgccgcatcaaggattcgggcaaggtggtggccatggtgggcgacggcatcaatgacgcgcccgccctggccgccgcccatattggcatcgccatggggaccggcaccgatgtggccatgcaggcggcggggatcaccctggtgaaaggcgatccggcccgcttggccgaagccatcgccatatcgcgcgccaccacctccaagatccgccagaacctgttctgggccttcgcctataatgtggtggccattccggccgccgccctggggttgctgaccccggtcatcgccggggcggccatggccatgtcctcggtctcggtggtctctaattccttgttgctgcgccgctggaggatgacatga

SEQ ID NO: 55612 - protein, 724 aa, Magnetospirillum magnetotacticum MS-1
MTSQSLSLPVKGMTCAACSTRLERVLGKVAGVEQALVSLAAERADIRFDSDKAGPEDLVSAIVKAGFQADLAQQGDEDLDREEAEHAAESAHHLRLLLLSALLTLPLIGQMVLDMAGLHVMIPPLIQLALAAPVQFWIGARFYTGAWASLKGGAGNMDMLVVLGTSAAFGLSAWHVVAGDAHHGNLYFEGASVVITLVLLGKLLEGRAKRSAAGAIRALMRLKPDTARVERDGVVMEVPAALVAVGEVVLIRPGERAPVDGTVVDGLSQMDESLITGESLPVPRGPGDEVVAGSVNGDGLLRVEATRVGAQSTISRIIRMVQGAQSAKAPVQKLVDRISNVFVPVVTVIAALSFMGWWLMAGDMQTAFVAAVSVLVIACPCALGLATPTGIMVGTGLAARHGILIKDAEALELAHKVQVMVFDKTGTLTEGRPAVAAIRAADGNEAELLRLAASAQQGSEHPLARALLAAVQEPVAPLCAFRSLPGRGLEAEVEGRNLLIGSRRLMAERGIAAGALALPAEAEEALGRTLMWVSEGPRMLGFVAVADPIKPSAAGAVARLKALGIETVMLTGDNARAADAVARAAGVDRVLSEVLPEDKEAEIRRIKDSGKVVAMVGDGINDAPALAAAHIGIAMGTGTDVAMQAAGITLVKGDPARLAEAIAISRATTSKIRQNLFWAFAYNVVAIPAAALGLLTPVIAGAAMAMSSVSVVSNSLLLRRWRMT

SEQ ID NO: 55613 - DNA, 2283 bp, Nostoc punctiforme PCC 73102
  CDS (1)..(2283): transl_table=11
atggatactctcacactcaaacttcgaggtatgagttgcgctggttgcgccaacaacatcgaaaaggcaattcgctctgtttctggggtgattgactgtaacgttaactttggagcagaacaagcggccattcggtacgatcgctctctagcaagtttagagaaaattcaaactgcgatcgcagctgcgggatactcttctgactcactccagtcagaattgctctctgaagaagatgatacagagattgcgagtaggcaagcattacaacgcgaacttttcctcaaggtaattgtgggaggtgtaatcagcattttcctctttttggggtcgttgcccatgatgactgggctaaacttccccttaattcccagctttttgcaaaatccttgggtacagttagcgctgacaacacctgtcattttctggtgtggtggatctttttaccgcaatggctggaaatccctcaagcgccatacggcgacgatggacacgttgattgctttgggtactagtgcagcgtatatatattctttgtttgtaactgttttcccgaatttttttattgttcagggcttgatacctcatgtttattatgaagttgcagccattgttattaccttaattttgctggggcggttattggaaaatcgcgctaggggacaaacttctgaagctatccgcaaactgatcggattgcaagccagagatgccagagttattcgtgatggtagagaaattgatgttcccattgccgaagtcagaatcaacgatgtaattttggtacgtcctggtgaaaagattccagtcgatggcgaggtgattgcaggcgattcgacagtagatgaagcgatggtgactggtgaaagtttgccagtcaaaaagcagccaggagatgaagtgattggggcgacgattaacggtgcgggtgcatttcagtttcgggtgacacgagtcggaaatgatacgtttttggctcaaatcgtcaaattagtgcaacaagcccaaggttctaaagcaccaattcagcgcttggcagatcgagttacaggatggtttgtaccagctgtgattgccgttgcgatcgccactttcgtcatttggtttaatttcacgggcaacctcaccctagcaacaatgacaacggtgggtgtactgattatcgcttgtccttgtgctttgggtttagccactcccacttctgtaatggtggggacgggcaaaggtgcagaaaatggcatcttgattaagggtgcggatagcttagaactagcacacaaaattcaaaccatcgttctagataaaactggcactttgactcagggtaaacccacggttacagactttgtgactgtcaacggtacagctaatggtaatgaaatcaagcttttacagttagcagcaacggtagaacgaaattctgagcatcctttagctgaagcggtggtaaaatacgcccagtctcaagaagtgagtttaatagaggtaaagaattttcaggctaatgcaggtagtggtgtccaagcagttgtttcaaatcagcttgtgcaaattggtacacaacgctggttaacagaacttggaattaacaccatgactcttcagcagtataaagatacctgggaaactgctggtaaaacagtcattttgattgctgtagatggcgaactacaaggaataatgggtattgccgatgccctgaaaccttcatcagcagcagtggtgaaagcattacagaagttaggtttagaagtagtaatgcttactggagacaatcgtaaaacggctgatgcgatcgcagcagaagttggcattgaacgaatctttgccgaagtgcgtccagatcaaaaggcggcgattatccaatctctacaaggggagataaaaaaatcccccaattcaaaatctaaaattgtggcgatggtaggcgatgggataaatgatgcgccagccctagcacaggctgatgtgggaattgctattggtacgggaacagatgttgcgatcgcagctagcgatatcaccctaatttctggagatttgcaaggaattgttacagcaattcaactcagccatgccaccatcaacaatatcaagcaaaatctcttctttgcctttatttacaacgtcattggtattcccattgcggctggaattttgttccctatatttggttggttactcaatccaattatcgccggagctgcgatggctctttcttcgctctctgttgttagcaatgctctcagattgcgtaaatttcaaccaaaagctacttcataa

SEQ ID NO: 55614 - protein, 760 aa, Nostoc punctiforme PCC 73102
MDTLTLKLRGMSCAGCANNIEKAIRSVSGVIDCNVNFGAEQAAIRYDRSLASLEKIQTAIAAAGYSSDSLQSELLSEEDDTEIASRQALQRELFLKVIVGGVISIFLFLGSLPMMTGLNFPLIPSFLQNPWVQLALTTPVIFWCGGSFYRNGWKSLKRHTATMDTLIALGTSAAYIYSLFVTVFPNFFIVQGLIPHVYYEVAAIVITLILLGRLLENRARGQTSEAIRKLIGLQARDARVIRDGREIDVPIAEVRINDVILVRPGEKIPVDGEVIAGDSTVDEAMVTGESLPVKKQPGDEVIGATINGAGAFQFRVTRVGNDTFLAQIVKLVQQAQGSKAPIQRLADRVTGWFVPAVIAVAIATFVIWFNFTGNLTLATMTTVGVLIIACPCALGLATPTSVMVGTGKGAENGILIKGADSLELAHKIQTIVLDKTGTLTQGKPTVTDFVTVNGTANGNEIKLLQLAATVERNSEHPLAEAVVKYAQSQEVSLIEVKNFQANAGSGVQAVVSNQLVQIGTQRWLTELGINTMTLQQYKDTWETAGKTVILIAVDGELQGIMGIADALKPSSAAVVKALQKLGLEVVMLTGDNRKTADAIAAEVGIERIFAEVRPDQKAAIIQSLQGEIKKSPNSKSKIVAMVGDGINDAPALAQADVGIAIGTGTDVAIAASDITLISGDLQGIVTAIQLSHATINNIKQNLFFAFIYNVIGIPIAAGILFPIFGWLLNPIIAGAAMALSSLSVVSNALRLRKFQPKATS

SEQ ID NO: 55615 - DNA, 2214 bp, Listeria monocytogenes str. 4b H7858
  CDS (1)..(2214): transl_table=11
atgagtgataaatatgtaagacaagatttaaacatttttggaatgacttgtgcggcctgttccacgagaattgaaaaatcgttaaataaagcggatggtgtagaaaaagcgaatgtcaacttagtaacggaaaatgcagccgtatattacgacccggaagttacatcgacagaagatttaattaaagttgttaaacatgcgggttatgacgcggcggaaaaaatgtctaaagaggaaaaagatgctgtgttagaaaagaatttcaaaaaagaagtgagacgttttattctttcggcggttctttccttaccattacttcttaccatggtgacacatattccgtacattcatgaaatggcgtttgcggaaacgattggtaactggattaatccaaccatccaattagtactcgcaacgattgttcagttttatattggttggcggttttatgatggggcttataaagcgcttcgaggtaaaagtgcaaatatggatgtattagtcgcacttgggacttctgctgcttatttctatagtgtagtggaatacattcgtcacatgattgatccgagcgtgatgccgcattactactttgaaacaagtgctgtgttaatcaccttaatcttgttaggtaaattacttgaatcatacgcaacatcgagaacaaccgaatctattgctggtttacttgaattacaagcaaaagaagcgaccgttattcgagaaggaaaagaatggttagtgccagtagattcattgaaaattggcgatattatccttgttcgtccgggtgaaaaagttccgatggatgccgaaattatttctggtgaaacgagtattgatgaagcgatgattactggggaacctgtaccagtagagaagaaaccaggcgattctgttattggcgcaacgattaactttgacggggctttccaagcaaaaattacgaaacgaatggaagaaaccgttttagaatccattattcgtttggtggaagaagcgcaaggtattaaagcgccaattcaacgtttggcagatagaatttccggcatatttgtaccaattgtacttgggattgctgctgtaacctttattatttggtatcttgttactggaacggtggatggttcacttgaagctgcgattgcggtattagttatcgcctgtccctgtgcgcttggtcttgcaacgccaaccgctatcatggctggaactggtaaaggcgccgaaagtgggatattatttaaaggtggcgaacatttagaacgtacttccaaagtggatactatcgtttttgacaaaactggtactttaacagaaggtaaactagaagtgagtgataaaaaagcagccaatgatcactttttcccttatttattcttaatggaacaacaatcagagcatccgattgcgaaagcgattattaagatgttagagccagagaatatagatgcttccgcagtgaaacaagggaaaatccgcgcgaaagctgggcacggcatgaccggtaatctggatgatagtaaagtggaactaggtgcttaccgctatgtttcttcccttacaacgattccaaaagaagatgatgaattaatcgaaagttggatgcatgcaggaaaaacagtcgtagcaatggcaattgatggtgtatacgcaggtgccctcgctttatctgacacaccacgaccagaagcaaaagaagctatccaaaaactaaaagcacaaggtattaaaacagcaatttgttctggggaccaatctgttgtcgtagaaaatatggctaaagatttaggtattgatatgttctttgccgaacaactaccaaatgataagagcgccttagtcgagaaattacagcaagacggtcatatcgttgcattcgttggtgatggcattaatgatgctccagctcttgcggcaagtgatattgggattagtatcggtactggaactgacattgcgattgaaacaggagatgtaacacttgtaagtcatcgtttaacactcattccagaaacaatcgaactttccaaagcaaccatgcgaaacatccgtcaaaactttttctgggcgctagcatataactgtgcgggtattccaattgcggcactaggcttacttgccccttgggtagcaggacttgcgatggcatttagttccgtttctgttgtcacaaacgcacttcgcttaaaaagatataaatttaaatcatag

SEQ ID NO: 55616 - protein, 737 aa, Listeria monocytogenes str. 4b H7858
MSDKYVRQDLNIFGMTCAACSTRIEKSLNKADGVEKANVNLVTENAAVYYDPEVTSTEDLIKVVKHAGYDAAEKMSKEEKDAVLEKNFKKEVRRFILSAVLSLPLLLTMVTHIPYIHEMAFAETIGNWINPTIQLVLATIVQFYIGWRFYDGAYKALRGKSANMDVLVALGTSAAYFYSVVEYIRHMIDPSVMPHYYFETSAVLITLILLGKLLESYATSRTTESIAGLLELQAKEATVIREGKEWLVPVDSLKIGDIILVRPGEKVPMDAEIISGETSIDEAMITGEPVPVEKKPGDSVIGATINFDGAFQAKITKRMEETVLESIIRLVEEAQGIKAPIQRLADRISGIFVPIVLGIAAVTFIIWYLVTGTVDGSLEAAIAVLVIACPCALGLATPTAIMAGTGKGAESGILFKGGEHLERTSKVDTIVFDKTGTLTEGKLEVSDKKAANDHFFPYLFLMEQQSEHPIAKAIIKMLEPENIDASAVKQGKIRAKAGHGMTGNLDDSKVELGAYRYVSSLTTIPKEDDELIESWMHAGKTVVAMAIDGVYAGALALSDTPRPEAKEAIQKLKAQGIKTAICSGDQSVVVENMAKDLGIDMFFAEQLPNDKSALVEKLQQDGHIVAFVGDGINDAPALAASDIGISIGTGTDIAIETGDVTLVSHRLTLIPETIELSKATMRNIRQNFFWALAYNCAGIPIAALGLLAPWVAGLAMAFSSVSVVTNALRLKRYKFKS

SEQ ID NO: 55617 - DNA, 2301 bp, Crocosphaera watsonii WH 8501
  CDS (1)..(2301): transl_table=11
atgaaaaattccctacaccctcaatcttctcctaaaaatagctcattaacccaggaaaatttacatttagaaggaatgggatgcgctgcttgtgcaatcaaagttgaaacagttcttaataaagttgctggtgttaaaaaatgtaacgtcaactttgccttagaaagagcaacggttgagtatgatagtcaagtcactaatttagggaatattcaagctgttattagtaaagcaggatacaaaagtcatgttttagaagaacaaaaaaataatcaaactgaggatagtgaacaggaaaaaagaaaagctaagcaacaagaattaactcaaaaagtgatcgttggtggagttatcagtcttatcttaatgtttggtggtttaccaatgatgacaggtttatctctgccttttattcctcattggttacataatgcttggttgcagttatttttaagtattcctgtggttttttggtgtggtaaggggttttatatgggagcattcaaagcttttaaaggtggcacatctgatatgaatagtttagttactttggggacaggtgcagcctttttatattctttgtttgctacattttttcctcaatttttcatctttcaaggattaaaagcggacgtttattatgaagctgctgtggtgattattaccttaattttattgggtaggttattagaaactagagcaagaagtaaaacatcagaagctattggcaacttaatgggattacaagctaaaacagctagggttattcgtcaaggagaaggggtagatattgctgttgaagatgtgattattggcgacatagttttagtacggccaggggaaaaaataccggttgatggagtaattattgaaggacaatctaccctagatgaatctatgattacgggggaatctattcccgtggaaaaacaaacaggagatgaggttattggggcaactattaataaaacaggtagttttaagtttgaagccagaaaagtagggaaagatactacattatcccaaattattaaattagtagaagaggcacaaaatagtaaagctcccattcaaaaaatagcggatcaagtgactgcttggtttgtccctgctgtcatgattattgcggttattagttttatttgttggttaatatttgctcaaaatttatccttagcaatggtgacaactatgagtgttttaattattgcttgtccctgtgctttagggttagcaactcccacatcgatcatggtaggaactggtaaaggagcagaaaatggcattttaatcaaaggagcagatagtttagaattggcacataaaataaaagcgatcgtcttagataaaacaggaactttaacccaaggcaaacccatagttacaaattatattactgtggatgggattgctgataataatgaattgaatattttagggatagcagcagctattgaagaaaattctgagcatcccctagctgaagccattgttaattatgctaagtcccaaggtattgttaataatttcccaaaagtagagaattttgaggctatgggggggcaaggagtacagggtaaaatagaaggaaaattagtgcaaataggcacacagaaatggctggaaaaattaggggttaatactaagcagttagtttctcaggcaagggaatgggaaaaccaagcaaaaactactccttggatagctattgatggggaaataaaaggtttatttgccattgctgatgcagtgaaaccttcttctattgaagcggttaagaagctcaaaaaaatgggcttagaagtgattatgttgacgggagataaccaacaaactgctcaggcgatcgccgatgaggtggggatatatcatgtctttgccgaggtacgtcccgatgaaaaagctaacaaaatcaaggaaatacagcaatctcagggcaagatcgttgccatggtaggtgatggtatcaacgacgcaccagcactggctcaagcggatgtaggaatggcgatcggtacgggtacggatgtggctatgtctgccagtgatattaccctcatttcaggagatttacagggtattgtaaccgctatagaattgagtcgtgcaaccatgaaaaatatccgtcaaaatctcttttttgccttcatttataatacgttaggtattcccattgctgctggtattttatatcctttctttggtatgttattaaaccccatgattgccggtgcagccatggcttttagttccgtttctgtggtttccaatgctttaaggttacgtaattttagtccataa

SEQ ID NO: 55618 - protein, 766 aa, Crocosphaera watsonii WH 8501
MKNSLHPQSSPKNSSLTQENLHLEGMGCAACAIKVETVLNKVAGVKKCNVNFALERATVEYDSQVTNLGNIQAVISKAGYKSHVLEEQKNNQTEDSEQEKRKAKQQELTQKVIVGGVISLILMFGGLPMMTGLSLPFIPHWLHNAWLQLFLSIPVVFWCGKGFYMGAFKAFKGGTSDMNSLVTLGTGAAFLYSLFATFFPQFFIFQGLKADVYYEAAVVIITLILLGRLLETRARSKTSEAIGNLMGLQAKTARVIRQGEGVDIAVEDVIIGDIVLVRPGEKIPVDGVIIEGQSTLDESMITGESIPVEKQTGDEVIGATINKTGSFKFEARKVGKDTTLSQIIKLVEEAQNSKAPIQKIADQVTAWFVPAVMIIAVISFICWLIFAQNLSLAMVTTMSVLIIACPCALGLATPTSIMVGTGKGAENGILIKGADSLELAHKIKAIVLDKTGTLTQGKPIVTNYITVDGIADNNELNILGIAAAIEENSEHPLAEAIVNYAKSQGIVNNFPKVENFEAMGGQGVQGKIEGKLVQIGTQKWLEKLGVNTKQLVSQAREWENQAKTTPWIAIDGEIKGLFAIADAVKPSSIEAVKKLKKMGLEVIMLTGDNQQTAQAIADEVGIYHVFAEVRPDEKANKIKEIQQSQGKIVAMVGDGINDAPALAQADVGMAIGTGTDVAMSASDITLISGDLQGIVTAIELSRATMKNIRQNLFFAFIYNTLGIPIAAGILYPFFGMLLNPMIAGAAMAFSSVSVVSNALRLRNFSP

SEQ ID NO: 55619 - DNA, 2133 bp, Exiguobacterium sibiricum 255-15
  CDS (1)..(2133): transl_table=11
atgtcgaaaacaatggaactgaatatcgaaggcatgacatgtgccgcctgttcggcccggatcgaaaaggtgttgaaccggatggacggagtcgaagccaccgtcaacctgccgctcgaaacagcacggattgctgttccggaagaaatggacgaacaactgattttagataagattaaaaaaatcggatacggtgccaccatcaagacgacaccacatgaacaggtccaaaaccgccggatgctctatcgcttttggatagcagctttcttgtccctgccgttactgctcagtatggtctcccacattccgaacagtccggtccatctgccttggctgatgaatccctggttccagttcgctttggcgacgccggtccagttcgtcatcggtgcccccttctatgtcggtgcctataaaagtcttcgcagtggaagtgccaacatggatgtcctggtcgtactcggaacgtccgcagcctatttctattccgttgcggaaatgatgattcacccattgatgccgaatctctacttcgagacgagtgccgtcctgattacgctcgtgctgctcgggaaagtactggaagatcgtgccaaacaacagacgaccggtgccatcaaaagcctcctttccttacaagcgacggatgccgtcgtgttggaacaaggtgtcgaacggacggtttcgctcgatcaggtccaacccggtatgcagttgatcgtcaaacccggtcaaaaaatcccggtcgacggcatcatcacaacgggtgatgcctatctcgatgaatccatgttgaccggcgaaccgcttccggctcataaaggaaccggtgacgtcgtgattggcggcaccttgaacacgaacggatacctgacgattgaagcgacgaaagtcggtcaggagacgatgcttgccggcatcatccgtgtcgtcgaacaagcgcagacggaaaaagctcctatccagcgtcaggcggaccggatttccggaatcttcgtcccaatcgtcgtcgccatcgcccttgtgacacttgctgtctggtggtggacgaccggctcgttcgccgaagcaattcgtccagccatcgccgttcttgtcatcgcctgtccttgtgctcttgggctcgccactccgacatcgatcatggtcggaaccggcaaaggtgcggaacacggtgttctgttcaagggcggtgcccaactcgaatcgttgcagcacgtcgatgcggttgtctttgacaaaacaggaacattgacgatcggacgtccggtcgtcatcgagacgttcggacaggaacaggcactggattttgcagcggctcttgaaaaaaaatcggaacatccactcgctcatgcaatcacggaagagcgcgacgtcgtctttgatatcgaacatttcaccgtcgatcccggacgcggtgtccgcgggtcgattatgggacacgatgtcatggtcggatcggtacggatgatgcaggagcacggtctttcccttcctgactggacatcaagcggtgcaacggtcgtctatgtcaccgtcaacggtataatcgaagccggatatgccatccgcgatgaattgaaaccgactaccaaacaggtcattcaggagattcagcagacaaaagcggtctacctgctgaccggagaccgtcgcgaagtcgccttacaactcgcgaccgagcttcagataccacacagccatgtgttttccgacgttttgccgattgaaaaagccgatcacatcaaaacgcttcaagcaaacggacagcgtgtcgcgatggtcggagacgggatcaatgatgcaccggctcttgcgacggcaaatgtcgggattgctctcggcagcgggaccgatgtcgcacttgaagcggcagacgtcacgttacttggacatgatttgcagcaagtcattacagccatccgtctcagcgaacaaacgatgaagaacatccggcagaacctgtttttcgccctcggttataatgcagtcgggattccggttgcctgcctcggactgcttgccccttgggtcgcaggtgccgcgatggcattcagctctgtctctgtcgtcacaaatgcgttacgcttaaaacgtattccactatccaaaggaggaaaccaatcatga

SEQ ID NO: 55620 - protein, 710 aa, Exiguobacterium sibiricum 255-15
MSKTMELNIEGMTCAACSARIEKVLNRMDGVEATVNLPLETARIAVPEEMDEQLILDKIKKIGYGATIKTTPHEQVQNRRMLYRFWIAAFLSLPLLLSMVSHIPNSPVHLPWLMNPWFQFALATPVQFVIGAPFYVGAYKSLRSGSANMDVLVVLGTSAAYFYSVAEMMIHPLMPNLYFETSAVLITLVLLGKVLEDRAKQQTTGAIKSLLSLQATDAVVLEQGVERTVSLDQVQPGMQLIVKPGQKIPVDGIITTGDAYLDESMLTGEPLPAHKGTGDVVIGGTLNTNGYLTIEATKVGQETMLAGIIRVVEQAQTEKAPIQRQADRISGIFVPIVVAIALVTLAVWWWTTGSFAEAIRPAIAVLVIACPCALGLATPTSIMVGTGKGAEHGVLFKGGAQLESLQHVDAVVFDKTGTLTIGRPVVIETFGQEQALDFAAALEKKSEHPLAHAITEERDVVFDIEHFTVDPGRGVRGSIMGHDVMVGSVRMMQEHGLSLPDWTSSGATVVYVTVNGIIEAGYAIRDELKPTTKQVIQEIQQTKAVYLLTGDRREVALQLATELQIPHSHVFSDVLPIEKADHIKTLQANGQRVAMVGDGINDAPALATANVGIALGSGTDVALEAADVTLLGHDLQQVITAIRLSEQTMKNIRQNLFFALGYNAVGIPVACLGLLAPWVAGAAMAFSSVSVVTNALRLKRIPLSKGGNQS

SEQ ID NO: 55621 - DNA, 2226 bp, Croceibacter atlanticus HTCC2559
  CDS (1)..(2226): transl_table=11
atggcaacaacaaatcaaaatacagttacgcagactttccctgttttgggaatgacctgtgcttcttgtgcgagtagtgcagaaagtatcgtaacacatcaagagggagtggtgagtgcttctgtaaattatgctacaggaaatcttatcgttgaatttctatccaacgtaaccaatgccgaaaagatacgaaaagcggtccaaggtgtaggatatgatttattaattgaagacgaatccaaacagcaggaaagccttgaggtcatccacgaaaagaagtttaaacaactcaaaaataaaaccttatgggcggtcattctttctttgccagtagttataataggtatgttctttatggatatgccttacggtaatgaaattatgtgggcattttcaacacctgttgtattgtggttgggaagagatttttttataaatgcgtggaaacaagccaaacaccgcaaagccaatatggataccttagtagcattgagtacaggcattgcatatatttttagtgtgttcaatatgttgtttgcaggtttttggcatcaaagaggattacacgctcacgtttattttgaagccgcagccgtcattatcgcctttatattgttgggaaaattattggaagaaaaagccaaaggcaatacatcttctgccattaaaaaactgatgggcttacaaccaaaaacggttattgtcattcaagcagacaacacagaaaaacagacagctattgaaaatgtaaaagttgatgatgtcattttagtaaaacccggtgaaaaaattgctgtggatggaatggtcatttcgggcagttcgtatgtggacgaaagtatgttgagcggagagcctgttcccatattaaaaaaggaaaacgaaaaagtatttgcaggaacgataaaccaaaaaggtggtttccaatttaaagctgtaaaagtcggtaaggaaacaatgcttgcccaaatcatcaaaatggtgcaagatgcacaagggagcaaagcaccagttcaaaaattggtggataaagtagcaggaatttttgtgcctgtggtaatgggcattgcattactttccttcattgtttggatgatttttggaggggataatgccatagttcaaggattattagcagccgttacagtcttggtaattgcttgtccgtgtgctttgggattggctacaccaacagccataatggtaggcgttggcaaaggtgcggagcaaggtactttaattaaagatgctgaaagtttggagttagccaaaaaggttaatgccatcattttagacaaaacaggaacaattacagaaggtcgtccacaagttacaggcattcaatggttgaataatgatgacagcaaaaaatacattttattcagtatagaaaaacaatccgaacatccattggcggaagccgtagtgaaatatttagataaagtgaactcaacttctcttactaatttcgacagcatcacaggaaaaggtgcaaaagccgaccagaataacgaaacctattttgtaggaaacaaaaagttattgtttgaaaacaacatcagtattcccgaagaattgcaacagcaagcaaatgaatggagtaagttatccaaaaccgttatttggttttccgacagtaaacaagccctttcggtaattgctatttccgataaaataaaaaaaacatctgcacaggcgattaaagaaatgcaggatatgggcattgatttgtatatgctcacaggcgataacgaagccacagcaagagccattgccgagcaaacaggcattaaacattacaaagccgaagtattgccacagcacaaagccgattttgtaaaagaactgcaagaggaaggcaaaacagtagcaatggttggtgacggcattaatgacagtacagctttggcaactgcagatgtaagtatcgctatgggcaaaggttcagacattgcaatggacgtagctaaaatgaccatcatttcatccgacttaaccaaaataccacaagccgtcaaactatccaagcaaacggtggcaactattaaacaaaacttgttttgggcatttatttataacctgattggtattccgattgcagcaggaattttatacccaattaatggttttttactcaatccaatgattgcaggagcagctatggcaatgagtagcgtaagtgttgtaagtaatagtttgcgattgaaatggaaaaaagtaatatag

SEQ ID NO: 55622 - protein, 741 aa, Croceibacter atlanticus HTCC2559
MATTNQNTVTQTFPVLGMTCASCASSAESIVTHQEGVVSASVNYATGNLIVEFLSNVTNAEKIRKAVQGVGYDLLIEDESKQQESLEVIHEKKFKQLKNKTLWAVILSLPVVIIGMFFMDMPYGNEIMWAFSTPVVLWLGRDFFINAWKQAKHRKANMDTLVALSTGIAYIFSVFNMLFAGFWHQRGLHAHVYFEAAAVIIAFILLGKLLEEKAKGNTSSAIKKLMGLQPKTVIVIQADNTEKQTAIENVKVDDVILVKPGEKIAVDGMVISGSSYVDESMLSGEPVPILKKENEKVFAGTINQKGGFQFKAVKVGKETMLAQIIKMVQDAQGSKAPVQKLVDKVAGIFVPVVMGIALLSFIVWMIFGGDNAIVQGLLAAVTVLVIACPCALGLATPTAIMVGVGKGAEQGTLIKDAESLELAKKVNAIILDKTGTITEGRPQVTGIQWLNNDDSKKYILFSIEKQSEHPLAEAVVKYLDKVNSTSLTNFDSITGKGAKADQNNETYFVGNKKLLFENNISIPEELQQQANEWSKLSKTVIWFSDSKQALSVIAISDKIKKTSAQAIKEMQDMGIDLYMLTGDNEATARAIAEQTGIKHYKAEVLPQHKADFVKELQEEGKTVAMVGDGINDSTALATADVSIAMGKGSDIAMDVAKMTIISSDLTKIPQAVKLSKQTVATIKQNLFWAFIYNLIGIPIAAGILYPINGFLLNPMIAGAAMAMSSVSVVSNSLRLKWKKVI

SEQ ID NO: 55623 - DNA, 2400 bp, Sulfitobacter sp. EE-36
  CDS (1)..(2400): transl_table=11
gtggggcgggtcgagaccgcgcttgggcgcgtggagggtgtgcaggacgcccgcgtgaacctcgcctcggaaacggcgtcgctgcaggtggcatcgggtttcgaccccaaggatgccgtcgccgcacttgcgaccgcaggctaccccgccaccgtacaaacgcggcgctatggcattgaaaacatgtcctgtgcatcctgcgtcgggcgggtcgaacgcgccttggcggccgtgccgggtgtggtcgatgtcagcgtcaacctcgcccgggaagaggccgtggtgcagtcgcttagcgcagagccggatgccgccattgtgcaggctgcgcaagccgcgggctaccccgccacccctgtgacggacaccgcatcttcccccgcgccagaccgcaaggttgaagaagccgcgcatcttaagcgtatgacgctgctggccgcggcgctgaccctgccggtgtttgtgctcgagatgggcggccatatgatccccgcgttccaccattgggtgatgtcgacgctgggacagcagctgagctggtcgatccagttcgtactgaccaccatcgttctggcatggcccgggcggcgcttttttgtcaccggcgtgccagcgctgttgaaacgcacgcctgacatgaactctctggtgtttctgggggccacggcggcatggggcttttccaccgtggcgctgttcttgccacagttgctgcccgccggtgcgcaagcggtctatttcgaagccgccgcgatgatcgtcacgctgatcctgctggggcgcacgctagaggcgcgggccaagggccaaaccgggcaagcgatccgcaaactggtcgggctgcgccccaaaaccgcgcgggtagagcgggacggcaaggtgtcagaggttgcgatcgacgcgatcaccgtcggcgatctgatccatgcgcgccccggtgaaaagatcgccgtagacgggaccgtgacacgtggcagttcctatgtcgatgaaagcatgatcaccggcgaacccgtgcccgtcgaaaagctgcccgacacgcgtgtggtcggggggacggtgaatggcaccggcgcgctggtctaccgcgcgacccatgtgggcgcggacacgaccctgtcgcagatcgtgcgcatggtcgaggatgcccaaggcgccaagctgcccgtacaggatatggtcaaccgcatcaccatgtggttcgtgcccgtcgtcatggcgattgccgcggccaccttccttgtctggctggcgttcgggccgcagccgtccctggggcacgctttggtggcaagcgtcgcggtgctgatcatcgcctgcccctgtgcgatggggctggccacgccgacctctatcatggtgggcacagggcgaggggccgagatgggcgtgctgttccgcaagggggacgcgctgcaggtcttggccgaggtcgataccatcgcgcttgataaaaccggcacgctgaccgccggtcggcctgaggtgacggatctggatgtcttcaacggctggtcgcaggccgatgcgttgcggctcgtcgcgtcggtcgaggcgcagtcagagcacccgattgccagcgccatcctgcgccatgccgaaaaacaggggctgtcgctgtcagcggtgacctcttttgcctcgcaaaccggccacggtgtgcgcgccgaggtcgagggacgtcgcgtgcttgtcggggcggaccgtttcatggaggccgaaggggtctctctcgccgcggcagaggggcggtcggcagcatggggggcagagggcaagacaccgcttttcgcggccgtggatggggcgcttgtcgcgatgatcggcgtcgccgacccgatcaaggaaacgacgccccaagcgctggaggcactgcatgaagcggggctgaaaatcgccatgatcaccggtgacaacaaggcgacggcgcaggcgattgccgaccgtttggggatcgataccgtggtcgccgaagtgctgcccgacggcaaggtcgccgcgctggaggacctgcaacaggcgggccacaaggtcgcctttgtcggggacgggatcaatgatgcgcccgcgctggcgggggtcgacgtgggtattgccatcggtaccggaacggatgtcgccatcgaagcggccgacgtggtgctgatgtcgggcgatctgcaaggggtggtgaacgccctgcacatcagccagcacaccatgcgcaatatccgccagaacctcttctgggcctttggctataacgcgctgctgatccctgttgcagccggtgtgctctatccgctgttcggcgtgctgttgtcgcccgtgcttgccgccgccgccatggcgttgtcgagcgtctttgtcctgttcaacgccctgcgcctgcggtggatcgccgccgcagcaaccgcctaa

SEQ ID NO: 55624 - protein, 799 aa, Sulfitobacter sp. EE-36
MGRVETALGRVEGVQDARVNLASETASLQVASGFDPKDAVAALATAGYPATVQTRRYGIENMSCASCVGRVERALAAVPGVVDVSVNLAREEAVVQSLSAEPDAAIVQAAQAAGYPATPVTDTASSPAPDRKVEEAAHLKRMTLLAAALTLPVFVLEMGGHMIPAFHHWVMSTLGQQLSWSIQFVLTTIVLAWPGRRFFVTGVPALLKRTPDMNSLVFLGATAAWGFSTVALFLPQLLPAGAQAVYFEAAAMIVTLILLGRTLEARAKGQTGQAIRKLVGLRPKTARVERDGKVSEVAIDAITVGDLIHARPGEKIAVDGTVTRGSSYVDESMITGEPVPVEKLPDTRVVGGTVNGTGALVYRATHVGADTTLSQIVRMVEDAQGAKLPVQDMVNRITMWFVPVVMAIAAATFLVWLAFGPQPSLGHALVASVAVLIIACPCAMGLATPTSIMVGTGRGAEMGVLFRKGDALQVLAEVDTIALDKTGTLTAGRPEVTDLDVFNGWSQADALRLVASVEAQSEHPIASAILRHAEKQGLSLSAVTSFASQTGHGVRAEVEGRRVLVGADRFMEAEGVSLAAAEGRSAAWGAEGKTPLFAAVDGALVAMIGVADPIKETTPQALEALHEAGLKIAMITGDNKATAQAIADRLGIDTVVAEVLPDGKVAALEDLQQAGHKVAFVGDGINDAPALAGVDVGIAIGTGTDVAIEAADVVLMSGDLQGVVNALHISQHTMRNIRQNLFWAFGYNALLIPVAAGVLYPLFGVLLSPVLAAAAMALSSVFVLFNALRLRWIAAAATA

SEQ ID NO: 55625 - DNA, 2559 bp, Roseovarius nubinhibens ISM
  CDS (1)..(2559): transl_table=11
atgaccacggcccagacatatcagctttcgctctcaaacctctcctgtgcctcctgcgtgggacgggccgaggcggcgctcaaatccgcccccggcgtctccgaggcccatgtgaacctcgccaatgaaagcgcccgcatcacaaccgacgccaccggcctcgccgccgccatcgcggcgcttgaggcggcaggctacccggcccgcacccaagagctgcggctcgacatcgccggcatgtcctgcgcctcctgcgtcggccgggtgcaaaaggcgctggccgccgcccccggcgtgatcgacgcccatgtgaaccttgccgctgaaagcgcctcggtcaccctcgccgagggcgcgggcgacgtgcaagccgtgctcaaagccgcccgcgacgcgggctacccggcgacattgcgctccggtggcccagatggcggcccggatggtggcggcaccgataacgccacaacgccccgcccgacgcaaagcgcgcgcaaggccgaagaggcccgccatctcgcccgccgcacctggtttgccgccgccctcgccctgccggtcttcgtgctggaaatgggcagccatgtgatccccggcatgcacgcgctgatcggccagagcatcggccatgagacgagctggatccttcagttcctcctcaccagcctcgtgctcttcatccccggccgcagcttctacaccaagggctttcccgcgctctttcgcggcgcgcccgacatgaacagcctcgtggcgctcggcaccggggccgcctatctctattcgctggtggcgctctttgcgcccgcgctgctgcccgcctccgcccgcgccgtctatttcgaggcggcggcggtgatcgtcgtgctcatcctgctgggccgctggatggaggcccgcgcccgcggccgcaccggggccgccatcgagaaacttctcggcctgcaggtcaaagaggcccgcgtccgcgtcgatggcgagatcaccacccgcgccgtcgacgatctgcagcccggtgacatcctcgtggtgcgccccggcgaacgcatccccgtcgatggcgagctgaccgaaggccgcgccaatatcgacgagagcatgatcaccggcgagccgctgcccgtggcgaaaacccccggcgatgcggtcaccggcggcaccgtcaacggcaccggcagcttcgagttccgcgccacccgcgtcggcgcggacaccaccctggcccagatcatccgcatggtcgaagaggcgcaaggcgcccgcctgccgatccagggtctggtggaccggatcaccctctggttcgtgcccgcggtgatcgccgtggcgctggccacgctcgccgcatggctcgccttcgggccgagcccggcgctctcgcacgcgctggtggcggcggtctcggtgctgatcatcgcctgcccctgtgccatggggctcgccacgccgacctcgatcatggtcggcaccggccgcgccgccgggctcggcgtgctctttcgcaagggcgacgcgctgcaacagctctccgagatcgacatcgtggcctttgacaagaccggcaccatcaccgaaggccgcccggagctcaccgatctgcatctggccgagggcgtgacccgcgccgatcttctcgccgccgtcgccgcggtcgaggcccgctcggaacaccccatcgccgaagccatcctgcgcgccgctcgcgcggaaggcgtggcaacgctcgaggccagcgatttcgaggccatcgcaggccatggcgtcacggccatggtggcgggcaaagaggtgctggttggtgccgcccggctgctcgcccgcgagggcgtcgacagctcccatcttgacccggtggccgaggccatggccgagcgcgggcgcaccgccttctacgtggcgctcgacggagaggccgccgccgtgatcggcgtctcggacccgatcaaaccggccagccgcgccgccatcgccgcgctgcatgaccggggcctgcgggtcgcgatgatcaccggcgacaaagaggccaccgcccgcgccatcgcccgcgaggccggcatcgacacggtggtcgccgatgtgctgcccgacggcaaggtggcggcgctcgaccatctgcgcacccatggcgaaaagctcgcctttgtcggcgacggcatcaatgacgcgcccgccctcgcccatgccgatgtcggcattgccatcggcaccggcaccgatgtggcgattgaaagcgccgatgtggtgctgatgtccggcgatctgcgcggcgtggtcaacgcgctgcatgtctcgggcgccacgctgcgcaacataaggcagaacctcgtttgggcctttggctataacgtggcgctgatcccggtggcggcgggcgtgctctacccggcctttggcctcctgctgtcgccgatgctggcggccggggccatggcgctgagctcggtcttcgtgctcagcaatgcgctgcgcctgcgcgggctcagcgccgcgctctcggaaacccccggcggcaccacccccgccgggcaggcccgcgccagacaggaggtcaccgcatga

SEQ ID NO: 55626 - protein, 852 aa, Roseovarius nubinhibens ISM
MTTAQTYQLSLSNLSCASCVGRAEAALKSAPGVSEAHVNLANESARITTDATGLAAAIAALEAAGYPARTQELRLDIAGMSCASCVGRVQKALAAAPGVIDAHVNLAAESASVTLAEGAGDVQAVLKAARDAGYPATLRSGGPDGGPDGGGTDNATTPRPTQSARKAEEARHLARRTWFAAALALPVFVLEMGSHVIPGMHALIGQSIGHETSWILQFLLTSLVLFIPGRSFYTKGFPALFRGAPDMNSLVALGTGAAYLYSLVALFAPALLPASARAVYFEAAAVIVVLILLGRWMEARARGRTGAAIEKLLGLQVKEARVRVDGEITTRAVDDLQPGDILVVRPGERIPVDGELTEGRANIDESMITGEPLPVAKTPGDAVTGGTVNGTGSFEFRATRVGADTTLAQIIRMVEEAQGARLPIQGLVDRITLWFVPAVIAVALATLAAWLAFGPSPALSHALVAAVSVLIIACPCAMGLATPTSIMVGTGRAAGLGVLFRKGDALQQLSEIDIVAFDKTGTITEGRPELTDLHLAEGVTRADLLAAVAAVEARSEHPIAEAILRAARAEGVATLEASDFEAIAGHGVTAMVAGKEVLVGAARLLAREGVDSSHLDPVAEAMAERGRTAFYVALDGEAAAVIGVSDPIKPASRAAIAALHDRGLRVAMITGDKEATARAIAREAGIDTVVADVLPDGKVAALDHLRTHGEKLAFVGDGINDAPALAHADVGIAIGTGTDVAIESADVVLMSGDLRGVVNALHVSGATLRNIRQNLVWAFGYNVALIPVAAGVLYPAFGLLLSPMLAAGAMALSSVFVLSNALRLRGLSAALSETPGGTTPAGQARARQEVTA

SEQ ID NO: 55627 - DNA, 2511 bp, Oceanicola batsensis HTCC2597
  CDS (1)..(2511): transl_table=11
atgcccgaacccaaacagatcagcctgccgatcgaaggcatgtcatgcgcgtcctgcgttggcagggtcgatcgcgcattgaatgcaatcgacggcgtagaggatgtgtcggtgaaccttgcctcggaaactgctcgcatgagcgtggacgcgctcaagcgcattcccgacatcatcgaatcccttcgcgagctgggctaccccgcgcggaaggccagggccgaactcacgattgcagcgatgtcctgtgcctcttgcgtcgggcgggtcgataaggcgcttgccgcggtgcccggggtggtcgaggtgaacgtcaacctcgcctcagagacggcgacggtcatttacgtcgaaggtcttgtcacgacatccgatctgatcgaatcaagcggcgcggcagggtatccagcaaccgtggcaacggcccaggccggtgacgacagagttgcgcgcaaggaggaagaggctcaggcgcttgccaaacgggtcacctttgcggccatcctcgccttgccggtcttcctgatcgaaatgggtggccacgtcattccggccgttcatatgctgatcgagaccacgattggccagcagacgagttggcttcttcagttcgtgctgacgacaatcgttctcttcggcccgggccggacgttttacaccaagggtttcccggccttgttccggggtgcccccgacatgaacagcctcgtcgcggtcggcaccggggcggcttacctttattccgtggttgcgacattcgtaccgtcggtcctgcctgacacgctgcgcaccgtctatttcgaggcggcagcggtcatcgtcgttctgatccttctggggcggtttcttgaagcgcgcgccaaggggagaacgggcgcggccatccagaagctattagggcttcaggcgcggactgcacgcgtgatgcgggacggagaaagcgtcgagatcgagatcgatgcgctggttcagggtgacatcgtcatcgtgcgccctggtgaacgcatcgcggtcgatggcgaggtcatcgaggggaccagccgcgtcgacgaaagcatgctgacaggcgagccgatccccgctgaaaaaggtgccggagatacggtgaccggcgggacggtcaacggcgccggaagcctacagttcctcgccacgcgggtcggcgccgacacgaccctggcgcagattattcgcatggtcgaagaggcccagggcgccaaactgccgatccagggattggtcgaccggatcaccttgtggttcgtgcctgccgtgatggcgatcgcggcggcgaccgtgctggtctggctgtttttcgggcctgatccggccctgacgatggcgctggtcgccggtgtgtcggtgctcatcatcgcgtgcccctgcgcgatggggcttgcgacgccgacctcgatcatggtcgggacgggacgtgctgcggaaatgggtgtcctgttccgtaaaggtgacgccttgcagcaacttgattccgttgatgtggtcgccctcgacaaaacaggcacggtgaccgaggggcgacccgcactgactgaccttgtgctggcggaagggttcgatcgcccaacaacgctctcgaagatcgctgccgtggagtcgctctccgagcatcctgtcgcggacgccatcgtgcgggccgcgcgggccgagggcgcacctcttgtggcggccgaaggctttcaatcggtcacaggttacggcgtgcgcgccgtggtcgaagacgtggaggtgttggttggggccgaccgctacatggcgcgcgaaggcattgacgtctcggcattggctccagaggaaacgaagatcgcaagcaagggtcgcacggcgctttacgctgccatagatgggcgtgtcgccgccgtgatcggcgtggccgatccggtcaaaccggcaagccgcgcagccatcgcagcgctgcacgaaaagggtcttgcggttgcgatgatcaccggcgacaaacgcgaaaccgccgaagccatcgcccgcgaaaccggtatcgaccacgtcatcgccggcgtcctgccggacggcaaggttgcggcgctcgacagtttgcgccaagggaacaagcgcatcgcctttgtcggcgacgggatcaacgacgccccggcgctggcgcatgccgatgtgggcatcgccattggaaccggcaccgatgtggccatcgaatctgcggatgtcgtcctgatgtcgggcgatttgcgcggcgtggtgaacgccttcgaagtatcgcggcggaccatgcgcaacatccggcagaacctgttctgggcctttgcctacaacgtggcacttattccggtcgctgccggggtgctttatcccgcctttgggttgctcctgtcaccaatccttgcggcgggtgcgatggcgttgtcctcggtgtttgtcctgaccaatgccctgcggctgcggcgcatcgcgcctgcgatggacgagcagcgcgcaatcccggcagagctggcagccgccactcctgctccagcagaataa

SEQ ID NO: 55628 - protein, 836 aa, Oceanicola batsensis HTCC2597
MPEPKQISLPIEGMSCASCVGRVDRALNAIDGVEDVSVNLASETARMSVDALKRIPDIIESLRELGYPARKARAELTIAAMSCASCVGRVDKALAAVPGVVEVNVNLASETATVIYVEGLVTTSDLIESSGAAGYPATVATAQAGDDRVARKEEEAQALAKRVTFAAILALPVFLIEMGGHVIPAVHMLIETTIGQQTSWLLQFVLTTIVLFGPGRTFYTKGFPALFRGAPDMNSLVAVGTGAAYLYSVVATFVPSVLPDTLRTVYFEAAAVIVVLILLGRFLEARAKGRTGAAIQKLLGLQARTARVMRDGESVEIEIDALVQGDIVIVRPGERIAVDGEVIEGTSRVDESMLTGEPIPAEKGAGDTVTGGTVNGAGSLQFLATRVGADTTLAQIIRMVEEAQGAKLPIQGLVDRITLWFVPAVMAIAAATVLVWLFFGPDPALTMALVAGVSVLIIACPCAMGLATPTSIMVGTGRAAEMGVLFRKGDALQQLDSVDVVALDKTGTVTEGRPALTDLVLAEGFDRPTTLSKIAAVESLSEHPVADAIVRAARAEGAPLVAAEGFQSVTGYGVRAVVEDVEVLVGADRYMAREGIDVSALAPEETKIASKGRTALYAAIDGRVAAVIGVADPVKPASRAAIAALHEKGLAVAMITGDKRETAEAIARETGIDHVIAGVLPDGKVAALDSLRQGNKRIAFVGDGINDAPALAHADVGIAIGTGTDVAIESADVVLMSGDLRGVVNAFEVSRRTMRNIRQNLFWAFAYNVALIPVAAGVLYPAFGLLLSPILAAGAMALSSVFVLTNALRLRRIAPAMDEQRAIPAELAAATPAPAE

SEQ ID NO: 55629 - DNA, 2331 bp, Erythrobacter sp. NAP1
  CDS (1)..(2331): transl_table=11
atgagcaagaacgagagcgtaatcgagggtactgcgatcgacccggtttgcggcatgagcgttgcaatcgacggggctcagcatatcgcgacgcatgatggcgcgaaacactatttctgttcgccgcgctgtcacgacaagttcgtcaccgatcccgagctctatctctcgggcgcgcatctcgacgcggtcgaggatgtgcccgaaggcacgatctacacctgcccgatgcaccctgaaatccgccagcccgggccaggttcatgcccgatttgcggcatggcgctcgaaccggaaacggtttcgctgggcgatggccccgaccccgaactggtcgacatgcggcgtaggttctggtggagcgcactgcttacgctgcctctgttcgtctacgcgatgagcgacatggcaccggggctcagtttcgacgggctgatcgaacctgcctgggcgcaatgggcgcagtttgcccttgccacaccggttgttctttggggagcctggccgttcttcgttcgggccatccagtcgctcaagacgcgcaatctcaacatgttcacgctgatcgggtttggcgttgccatcgcctatctgttcagcgtggtggcgacggtcgcgcccgatctgttccctgcagcgttccgcgaccattcgggacgggtcggggtctatttcgaggcggcagcggtcataaccacgcttgtcctgctcggacaggtcctcgagctcaaggccaggggctcgacctcgagcgccttgcgcgcattgctcgagctggcaccgcccagcgcggtcaagatcttcggctccggcgatgagcgcgaggtgccgctcgaccagctggccacaggcgatcgtctgcgcgtccgccccggcgataaggttccggtcgatggagaaatcgaggagggatcgagcgccatcgacgaatccatgatcagcggcgaaccgcttccggtcgccaaacaggctggcgacacagtcatcggcggcacagtcaaccagactggtgggttcattatgcgcgcaaccggcgtgggcaaggacacgatgctgtccaagatcgtccagatggtggccgaggcgcagcgcagccgcgcaccgatccagcgactggcggatcaggtggcgggctggtttgtgcctgcggtggtggtgatagccatcgccaccttcgtggtctggggaatctggggtcccgcacctgcgcttgcctacgcattggtcaatgccattgcggtcctgatcatcgcttgtccctgcgcgcttggtctcgctacgccgatgtcgatcatgaccggcacgggcaagggtgcccagcatggcatcctgatccgcaatgccgaggcgctggagacactcgagaagatcgatacgctagtggtcgacaagaccggcacgttgacgatgggcaagcccgatctggtggcggtgacgccagcagaaggaatcgacgaagccgatttcctggctgcggttgcaggcgtcgaaatggggagcgaacatccgctggcccacgccatcgtcgaaggtgcgcggacgcgcggggtctcgcccgccaatgccacggatctcgcttcgacgaccggggaaggtgttgaagccaatgtccagggccgccgggttgcgatcggcaatgagaagatgatgcggcgcgtcgggatcgatgacgaggcctggctcggcacggccgaaagtggccgcaggcagggtcaaacagtgatgttcgtggcattcgatggccgtccggcagggctcatcgcggtggccgatccgatcaagcctaccagtgcagcggtcattgcggcactgcacaagcgcgatatccgggtcgttatgctcacgggcgacagccgcggcactgccgaagcggtcgcccgtgaaatgggaatcgacgaagtgcatgcgaatgtctcgcccgaagacaagcaccgcaagatcgaagagctgaaagcgcaaggtcgccgggtcggcatggccggggacgggatcaacgatgctcctgcgctggctgccgccgatgttggtattgcgatgggcaccggcaccgatgtcgcaatcgaaagcgcaggcgtgacgctggttcgcggcgacctgacaggagtggtgcaggccatcgtgctgtcgcgtgggacgatgcgcaacatccggcagaacctgtttttcgccttcgcttacaacacactcggcattccggtcgcggcaggcgtgctgtatcccttcttcggagtgctgctcagcccgatgattgcggccgcagccatgagcctctcttccgtatcggtgataggcaatgcgctgcggctgcggggtctgcgcctcgaagtctga

SEQ ID NO: 55630 - protein, 776 aa, Erythrobacter sp. NAP1
MSKNESVIEGTAIDPVCGMSVAIDGAQHIATHDGAKHYFCSPRCHDKFVTDPELYLSGAHLDAVEDVPEGTIYTCPMHPEIRQPGPGSCPICGMALEPETVSLGDGPDPELVDMRRRFWWSALLTLPLFVYAMSDMAPGLSFDGLIEPAWAQWAQFALATPVVLWGAWPFFVRAIQSLKTRNLNMFTLIGFGVAIAYLFSVVATVAPDLFPAAFRDHSGRVGVYFEAAAVITTLVLLGQVLELKARGSTSSALRALLELAPPSAVKIFGSGDEREVPLDQLATGDRLRVRPGDKVPVDGEIEEGSSAIDESMISGEPLPVAKQAGDTVIGGTVNQTGGFIMRATGVGKDTMLSKIVQMVAEAQRSRAPIQRLADQVAGWFVPAVVVIAIATFVVWGIWGPAPALAYALVNAIAVLIIACPCALGLATPMSIMTGTGKGAQHGILIRNAEALETLEKIDTLVVDKTGTLTMGKPDLVAVTPAEGIDEADFLAAVAGVEMGSEHPLAHAIVEGARTRGVSPANATDLASTTGEGVEANVQGRRVAIGNEKMMRRVGIDDEAWLGTAESGRRQGQTVMFVAFDGRPAGLIAVADPIKPTSAAVIAALHKRDIRVVMLTGDSRGTAEAVAREMGIDEVHANVSPEDKHRKIEELKAQGRRVGMAGDGINDAPALAAADVGIAMGTGTDVAIESAGVTLVRGDLTGVVQAIVLSRGTMRNIRQNLFFAFAYNTLGIPVAAGVLYPFFGVLLSPMIAAAAMSLSSVSVIGNALRLRGLRLEV

SEQ ID NO: 55631 - DNA, 2217 bp, Oceanospirillum sp. MED92
  CDS (1)..(2217): transl_table=11
atggtctatcgtttatctctgcagggtgttaaatgcgcaggttgtgtccggtctctggagaaaggtttaaaacaatctgattgcatcgacgattattcggtaaattttgccgaccgcagtctgacggtatcttccgaaaccgatgtgtctgatgttattagcgcggttgaggcagctggatatggagcggttccgctggatgataatgatggtttagagcaggccgaagccgcggaattggcccattatcatctgacgattaagcgtagccttatagcgctgggctttggtttccttttgatggtgcagggctggctgggatttatgcctgatctgaccttagggactggtttacttcaaggtgctgtcattggcctgcttacccttgccatcatgtggttttgtgcgggtcacatctacaaaggtgctttgcagtctattcagcgtagaagtttcaacatggatacgctgataggattgggtactggggctgcatgggtttactcaacaggtcttattatctatgtcttggcgggtggacaactgatcgaacaagccagtcatctatattacgaagcttcagtgatgattctcggttttattcttcttggtcaggcgctggaggcgcgcgcgagaaagaacacgggcgaggcgattcgcagtctgatgaatcttcagcctgctacagcaattcgcttaagagagggtgaagagaaggaagtcccggtagcactattggctccgggtgatcaggtaagaattcgacctggtgagagtgtcccagtcgatggggtcgtgttaactggggaaagccatgttgatgaatcgatgctcaccggagagtctctgcctattcataagcaggcagatgatcaattggtcgggggcacgattaatggctctggtagtttggtcatgcaggtcgaacagatcggtgctcaaacggttttggctaaaattattgaatcggttcgggatgcgcagaactgcaaaccggaattgggcaagttggctgacagaattgccgcggtatttgtccctgtggtaatggttattgctctggtgacggcattagtttggtgggcgttcgggccagagcctcagcttacctattccgtcattacaatgatgacagtgcttatcatcgcttgcccttgtgcgctgggtttagctacaccgatgtcggttatggtttcagtaggaagagcggcgaagcaaggcattcttatccgtaatgcagatgctttgcagcaggcagagaaagtcactaccgtattgctcgataaaacgggaacggtgacgcagggtaagcctactgttgaaaaagtcgaattctttattagcgaagatgagcaggagcacattattcaggagctgctctcggtcgagagtctttcacagcatccactggccagggctatctgtgattcgtatgtgatgaaacagcaatttgaagtcgagcagtttcaagagttgcccggtttaggtgttatcgctgttcttcagggaaatgactggttcgtaggtaatcagcaactaatgctagagcagaacgtggatatatctccatttgtttcagcggccgatgatttgagccagcaggcgatgacgcctgtgtatgtgagccgtaatggttctgtttgtgcgttggtaggtattgcagaccctgtgaaagaggattcgcttatcgcaattaatgaaatgaaggaagcaggtctgcgtgtcattttattatcaggcgataaccagaaaacagctcagattattggtgacagggtcaacgttgatcgtgtcatagcagaggtgaagcctgaggataagcgtcaggttgtcgccgatctgcagagtgaaggtcatgtcgttgcaatggtcggtgatggtatcaatgatgcgcctgcactggctcaggccgatttggggtatgccattggtacgggcgctgatgtggctatcgctagtgcagatgtaacccttatttcaggctctttgcggggggttaataaagcaatgagcctttccaagcatacggtgagaaatattcgccagaatctgtttggcgcatttatctataacagccttgctattcctgtcgcggcggggctgttgttcccagtgtttggtgtgctgctaaacccagccatagccggggcggctatggctatgtcttcggttaccgtggtaagtaatgctaaccgattgagaaatgtgaaactgtag

SEQ ID NO: 55632 - protein, 738 aa, Oceanospirillum sp. MED92
MVYRLSLQGVKCAGCVRSLEKGLKQSDCIDDYSVNFADRSLTVSSETDVSDVISAVEAAGYGAVPLDDNDGLEQAEAAELAHYHLTIKRSLIALGFGFLLMVQGWLGFMPDLTLGTGLLQGAVIGLLTLAIMWFCAGHIYKGALQSIQRRSFNMDTLIGLGTGAAWVYSTGLIIYVLAGGQLIEQASHLYYEASVMILGFILLGQALEARARKNTGEAIRSLMNLQPATAIRLREGEEKEVPVALLAPGDQVRIRPGESVPVDGVVLTGESHVDESMLTGESLPIHKQADDQLVGGTINGSGSLVMQVEQIGAQTVLAKIIESVRDAQNCKPELGKLADRIAAVFVPVVMVIALVTALVWWAFGPEPQLTYSVITMMTVLIIACPCALGLATPMSVMVSVGRAAKQGILIRNADALQQAEKVTTVLLDKTGTVTQGKPTVEKVEFFISEDEQEHIIQELLSVESLSQHPLARAICDSYVMKQQFEVEQFQELPGLGVIAVLQGNDWFVGNQQLMLEQNVDISPFVSAADDLSQQAMTPVYVSRNGSVCALVGIADPVKEDSLIAINEMKEAGLRVILLSGDNQKTAQIIGDRVNVDRVIAEVKPEDKRQVVADLQSEGHVVAMVGDGINDAPALAQADLGYAIGTGADVAIASADVTLISGSLRGVNKAMSLSKHTVRNIRQNLFGAFIYNSLAIPVAAGLLFPVFGVLLNPAIAGAAMAMSSVTVVSNANRLRNVKL

SEQ ID NO: 55633 - DNA, 2391 bp, Xanthobacter autotrophicus Py2
  CDS (1)..(2391): transl_table=11
atgactgagcaggacgcccacgccggccatcaccaccaccatggcgcccatcctggcccgcaggcgggttcagcgccgggcgagacggtcaaggaccccgtctgcggcatggaggtgaacccggccaccgccccgttccgctcctcctacgccggcaagccgttcttcttctgctcggcgaaatgccacgacacgttcgaggcgaacccgtccgcctatgcgcccggcgcggcgcagccgcaggccacggggaaggcgccgccggcgggcgtgatctacacctgccccatgcacccgcagatccgccagctgggacccggcacctgccccatctgcggcatgaccttggagcccgaggtcgcgaccgccgagaccggccccagcgccgagctcgtggacatgacccggcgcttctgggtcggcctcatcctcgctttgccggtcctcgccctggagatgggcggccacctcaccaacctccacatgctgctcggcgcccaggccgccaactgggcccagctggtgctggcgacgccggtggtgctgtgggccggctggccgttcttcgtgcgggcgtggcagtcgctggtgacgcggcacctcaacatgttcaccctgatcgccatgggcacgggcgtcgcgtggctctacagcgtcgtcgccaccgccgcgccgcagatcttcccctcgaccttccgcgccgccgacggctcggtggccatctatttcgaggcggcggcggtcatcacggtgctggtgctgctcggccaggtgctggaattgcgcgctcgcgagcagaccggcggcgccatccgcgccttgctcgacctcgcccccaagtcggcgcggcgggtgcgcgccgatggcagcgatgaggacgtggcgctggaacaggtcgcggtgggggatcgcctgcgcgtgcggcccggcgagaaggtgccggtggatggcgagctggtcgaggggcgctcctcggtggacgaatccatgatcacgggcgagtccatgccggtcaccaaggaggtcggcgcgaaggtcatcggcggcaccctcaaccagagcggcggcttcatcatgcaggctggcaaggtcggccgggacaccatgctggcgcagatcgtccacatggtggcggaggcccagcgctcgcgcgcgccgatccagcgcctcgccgacgaggtgtccggctggctcgtgccggtggtgatcgccatcgccctcctcgccttcgcggcgtggggcatcttcggccccgagccgcgcttcgcccatggcctcatcgccgcggtggcggtgctcatcatcgcctgcccatgcgcgctggggctcgccacccccatgtccatcatggtgggggtgggacgcggcgcctccatgggcgtgctcatcaagaacgccgaggcgctggagcggttcgagaaggtggacacgctggtggtggacaagaccggcaccctcaccgagggcaagcccaaggtggtcgcgctcaaggcggcgggcgacctcgacgagggagagctgctgcggctcgccgcgaccctggagcgggcgagcgagcatccgcttgccgccgccatcgtggcggccgcgacggaacggaacctgccgctcggcgaggcccgggacttcgacagcccggtgggcaagggcgtgaccggcacggtggacgggcgcaagctcgtcatcggcagccaccgcatcatgggcgaagaaagcgtggacctctcgcccctctccgcgccggccgaggcgctgcgcgccgacggcgcgaccgtgatcttcgtcgccatcgacggacgcctcggcggcctcgtcgccatcgccgatccggtcaaggcgaccacccccgcggcggtcgccgcgcttcgcgaggccggcgtgcgcgtcgtcatgctcaccggcgacaaccggaccacggccgaggcggtggcccgccggctcggcatcgccgaggtcgaggccgaggtgctgccggaaaacaaggcgcaggtggtggcgcggctgcgcggggaaggccgcatcgtcgccatggccggcgacggcgtgaacgacgcgccggccctcgccgcggcggacgtgggggtggccatgggaacgggcacggacgtcgccatcgagagcgccggcgtgaccctgctgaagggcgacctccagggcatcgtgcgcgcccgccagctcagccacgccaccatgagcaacatccgccagaacctgttcttcgccttcatctacaatgcggcgggggtgccggtggcggccggcgtgctctatccgtggctcggcctgctgctctcgcccatcatcgccgcggcggccatggcgctgtcctcggtcagcgtcatcgccaacgcgctgcgcctgcgaagcgcctccgttggtgcgggcaagtaa

SEQ ID NO: 55634 - protein, 796 aa, Xanthobacter autotrophicus Py2
MTEQDAHAGHHHHHGAHPGPQAGSAPGETVKDPVCGMEVNPATAPFRSSYAGKPFFFCSAKCHDTFEANPSAYAPGAAQPQATGKAPPAGVIYTCPMHPQIRQLGPGTCPICGMTLEPEVATAETGPSAELVDMTRRFWVGLILALPVLALEMGGHLTNLHMLLGAQAANWAQLVLATPVVLWAGWPFFVRAWQSLVTRHLNMFTLIAMGTGVAWLYSVVATAAPQIFPSTFRAADGSVAIYFEAAAVITVLVLLGQVLELRAREQTGGAIRALLDLAPKSARRVRADGSDEDVALEQVAVGDRLRVRPGEKVPVDGELVEGRSSVDESMITGESMPVTKEVGAKVIGGTLNQSGGFIMQAGKVGRDTMLAQIVHMVAEAQRSRAPIQRLADEVSGWLVPVVIAIALLAFAAWGIFGPEPRFAHGLIAAVAVLIIACPCALGLATPMSIMVGVGRGASMGVLIKNAEALERFEKVDTLVVDKTGTLTEGKPKVVALKAAGDLDEGELLRLAATLERASEHPLAAAIVAAATERNLPLGEARDFDSPVGKGVTGTVDGRKLVIGSHRIMGEESVDLSPLSAPAEALRADGATVIFVAIDGRLGGLVAIADPVKATTPAAVAALREAGVRVVMLTGDNRTTAEAVARRLGIAEVEAEVLPENKAQVVARLRGEGRIVAMAGDGVNDAPALAAADVGVAMGTGTDVAIESAGVTLLKGDLQGIVRARQLSHATMSNIRQNLFFAFIYNAAGVPVAAGVLYPWLGLLLSPIIAAAAMALSSVSVIANALRLRSASVGAGK

SEQ ID NO: 55635 - DNA, 2550 bp, delta proteobacterium MLMS-1
  CDS (1)..(2550): transl_table=11
atgggtgatgaaaagcggcttgatctgaaggtgaccgggatgacctgtgcttcctgtgtggcccggatcgagaaaatcctggtccgccgggagggggtgagcgctgccgccgtcaacctggccgccgagaaggcccgggtggtttacgaccccgcccgggtcagccccgacgagttgatcgccgccatcgacgccctgggtttcaaagccgccccgacgacggatagcccggaggtggcggaccgggaacgccaggaacgggaacgggcctggcgacggctggccgctgactttgccctggccgccctgctgaccaccgtcgtgctctacggcagcctgccggagatggtcccggcgcgctatcatgactgggcgctgacggtggtgccggcctggctgggccaccccctgaccttgctgctgttgaccaccccggtgcagtttgtctccggctggcgtttctaccggggggcctgggccgccctgggccacggcagcagcgacatgaacgtgctggtggccatggggaccacttcggcctgggcctacagcgcggccatgaccttattccccgactttctgaccgccctgggtttcccctaccagctttattacgatgtcgccaccgtgatcaccaccctgatcctcctgggccggctgctggaggcccgggcccggggcaagacctccgaggccatgcgcaagttgatgggactgcgccccaagaccgcccgggtacgccttccccgtccggcttcctcgccggtggcggccgaccaggcctgccccgacgatggttccaccgccggggcctgtgagttgccggcggcgggcaacggggaggagggtggtggcggcggcggggagagctttgtcgacctgcccatcgaggaagtggtggtgggcgatatcatcctggtgcggcccggcgaaaagattccggtggatggtgagattctggaggggcgctcggcggtggatgagtccatgctcaccggtgagagcatcccggtgagcaagggtgagggtgatcaggtgatcggcgccaccatcaataagagcggcggtttccggatgcgggccaccaaggtgggccgtgataccatgctggcccggattatccgcctggtggaagaggcccagggctccaaggcgccggtgcagagactggtggaccggatcgccgccatcttcgtgccggcggtggtcattatcgccgtggccagtgctaccctctggtggcttttcggcccggagccgtcgctgatctttgccttgacggtctttatcgcggtgctgatcatcgcctgtccctgtgccctggggttggccacccccaccgcgatcatggtcggcaccggcaagggagcggagagcgggattctgatcaaaggggccgaggccctggaaaaggcccacacgctggatactgtggtcctggacaagaccggcaccatcaccaggggggagccggccttaaccgacctgctcaccaccggcgaactggcaggtgagccgcaaacggttccaagggaagcgcccgggcccggccaagggcgcggcagcacccccgccgggctgggggcagacgaaatcctggccctggtggcggcggtggagcactcttcggagcaccccctgggggaggccattgtccgggaggccgaaaagcgggggcttgcgctcctggaagcccgggagtttgccgccattcccggccatggcctgcgggcccgagttggggattatcacctgctggtgggcaaccggcaactgctggcccgggccgggttggcgctgccgccagcctgggagcaggccatgggccggctggccggcgagggtaaaaccccgatcctggcggccatggcgcctgccgccgagccagccccggttaacggtgggcaagcggtccaggacggccaaatcgattccgagcttccctggtcattggccgccctgctggcggtggccgataccgtcaagccctcttcggccgccgccatcgccgccatgaagcgcctgggcctggaggtggtgatgctcaccggtgacggccgggccaccgccgaggccattgccgcccaggtgggaatcgaccgggtgctggccgaggtactgccggagaacaaggcggccgagatccagaaactgcgcgataagggccgggtggtggccatggtcggagatgggatcaacgacgccccggccctggccggggccgatctcgggattgccatcggcaccggcaccgatgttgccatggaggccgccgatatcaccctggtctccggcgatctgcatggggtgcccaccgccatccggctctcccgggccaccatgcggatgatccgccagaacctgttctgggcttttttctacaatatcgtgctgatcccggtggccgccggggttctctatcctttttggggtatcatcctgaaccccatgctggccgccgccgccatggccttcagttccattagcgtggtgctcaacaccctgcgcctgcgttggttcaaacccctggataaacccgtagcggggtaa

SEQ ID NO: 55636 - protein, 849 aa, delta proteobacterium MLMS-1
MGDEKRLDLKVTGMTCASCVARIEKILVRREGVSAAAVNLAAEKARVVYDPARVSPDELIAAIDALGFKAAPTTDSPEVADRERQERERAWRRLAADFALAALLTTVVLYGSLPEMVPARYHDWALTVVPAWLGHPLTLLLLTTPVQFVSGWRFYRGAWAALGHGSSDMNVLVAMGTTSAWAYSAAMTLFPDFLTALGFPYQLYYDVATVITTLILLGRLLEARARGKTSEAMRKLMGLRPKTARVRLPRPASSPVAADQACPDDGSTAGACELPAAGNGEEGGGGGGESFVDLPIEEVVVGDIILVRPGEKIPVDGEILEGRSAVDESMLTGESIPVSKGEGDQVIGATINKSGGFRMRATKVGRDTMLARIIRLVEEAQGSKAPVQRLVDRIAAIFVPAVVIIAVASATLWWLFGPEPSLIFALTVFIAVLIIACPCALGLATPTAIMVGTGKGAESGILIKGAEALEKAHTLDTVVLDKTGTITRGEPALTDLLTTGELAGEPQTVPREAPGPGQGRGSTPAGLGADEILALVAAVEHSSEHPLGEAIVREAEKRGLALLEAREFAAIPGHGLRARVGDYHLLVGNRQLLARAGLALPPAWEQAMGRLAGEGKTPILAAMAPAAEPAPVNGGQAVQDGQIDSELPWSLAALLAVADTVKPSSAAAIAAMKRLGLEVVMLTGDGRATAEAIAAQVGIDRVLAEVLPENKAAEIQKLRDKGRVVAMVGDGINDAPALAGADLGIAIGTGTDVAMEAADITLVSGDLHGVPTAIRLSRATMRMIRQNLFWAFFYNIVLIPVAAGVLYPFWGIILNPMLAAAAMAFSSISVVLNTLRLRWFKPLDKPVAG

SEQ ID NO: 55637 - DNA, 2163 bp, Rickettsiella grylli
  CDS (1)..(2163): transl_table=11
atgtcgaaccctttaaacgcaaaaaatacgcacacaagtgatgcatttgagtatacatgccctatgcatccagaaattattcgtcatcaaccggggagctgtcccatttgtggtatgtctttagagcttcggtcaccctctccccaaatagccaaacccattcaaaccgaattaaacgatttaacacaacgattttggtggagcgtccttttcacactgcccattttatttttaacaatgggttcgcatatccctggaatcaaagacgttatcgccgctattccagtgccgttttctgcgggactccaatttgttttaaccacgatagtcatcgcctggtgcggttatccactgctaaaaaaagcatggctttctatcactcagcgtcatttgaatatgtttaccttgattggtttaagtgtcagcattgcttatggatatagcgtcattgctttgtttttccccaatctttttccgactacttttttggaaaatggctccattcatttctattttgaaacagccagtgtgatcataacgcttgtcctcatgggacaggttttagaaacaaaaggacgtgaacaaaccggcagtgcgttgcggtctttgcttgatttatccccaaaaaccgctcgacgaatacagggtcaaaccgaaactgaaattcctttcgatgaaattcacatcaatgacacactccgtgtacggcccggtgaaaaaatccctaccgatggtgaagtgattcaaggtcatagttcagttaacgaatcgatgattacgggtgaatccatcccgattgaaaagcaagcgggtgcatccgtcatcggtggcactttaaatttgtctggaagtcttattatgcgcgctaaacaggtgggaaaagaaacactgctcgctcaaattgtccaattagtttctgaagcacaacgatcaaaagcacccatttcaaagcttgttgatcgaatttccagttattttgtacctggtgtcttagtcattgcagcacttacttttatgatatggtcaatttggggtcccagcatgaccgatggtttaatcgcttccatttcggtattaattatcgcttgtccgtgcgccttaggtttagcaacaccgatgtctattacggttggaatgggacgaggcgcaaaagcaggaattttgattaaaaatgcggacagtctcgaacgttttgaaaaagttaatgtgctggtcgttgataaaacaggcacattaacccgtggaaaacccgcggtgaatcatattattccacataaaaattttactcacaatgaaatactacgactcgctgccagcttagaagtggccagtgaacatccgcttgccaatgcgttcattgacgctgcccaaaaaaatcagcttgatttagaagaaattgaacatttttccgctgaaatcggtcaaggtattcgagggatttggaaaggtaaacaacttgctttaggtaatgctacactttgtaatacactgaacgtctcaatagcacctttaaaagaaaaagcgttgcaattcgctaaaaaaggtgaaacggtcatgtatttcatcgttgaaaatcagctcgcaggacttatcagtgttgttgatcccattaaaaactcaactgcatccgcattaaaaaatttaaaaaatctgggtttaaagattgttatggtaaccggtgataatcaaacaaccgctcaggcggttgctaaaaaattagctatccaagacctaaaagcggaggtattgccttctgaaaaaggcaaaattgtgaaacaattacaaaaaaaagggaatatcgttgccatggcaggcgatggcatcaatgatgcacctgccctcgctcaagcagacattggtatcgccatgggcactggcacggatgtagccatccaaaatgcagatgttactttggtcaaaggtaatttaataggaatcgcccgcgcaaaacaactcagcagccatgtgatgaaaaacatccgtgaaaatttattcttagcatttatttacaatagtctttgtatccctatcgccgcaggcattttttacccctggaatggtcatttgcttgatcccatgttcagtgcgctcgccatgagtttaagctcgctttcagttgtcggaaattccctacggttacgcacatcaaaaatttatccgtaa

SEQ ID NO: 55638 - protein, 720 aa, Rickettsiella grylli
MSNPLNAKNTHTSDAFEYTCPMHPEIIRHQPGSCPICGMSLELRSPSPQIAKPIQTELNDLTQRFWWSVLFTLPILFLTMGSHIPGIKDVIAAIPVPFSAGLQFVLTTIVIAWCGYPLLKKAWLSITQRHLNMFTLIGLSVSIAYGYSVIALFFPNLFPTTFLENGSIHFYFETASVIITLVLMGQVLETKGREQTGSALRSLLDLSPKTARRIQGQTETEIPFDEIHINDTLRVRPGEKIPTDGEVIQGHSSVNESMITGESIPIEKQAGASVIGGTLNLSGSLIMRAKQVGKETLLAQIVQLVSEAQRSKAPISKLVDRISSYFVPGVLVIAALTFMIWSIWGPSMTDGLIASISVLIIACPCALGLATPMSITVGMGRGAKAGILIKNADSLERFEKVNVLVVDKTGTLTRGKPAVNHIIPHKNFTHNEILRLAASLEVASEHPLANAFIDAAQKNQLDLEEIEHFSAEIGQGIRGIWKGKQLALGNATLCNTLNVSIAPLKEKALQFAKKGETVMYFIVENQLAGLISVVDPIKNSTASALKNLKNLGLKIVMVTGDNQTTAQAVAKKLAIQDLKAEVLPSEKGKIVKQLQKKGNIVAMAGDGINDAPALAQADIGIAMGTGTDVAIQNADVTLVKGNLIGIARAKQLSSHVMKNIRENLFLAFIYNSLCIPIAAGIFYPWNGHLLDPMFSALAMSLSSLSVVGNSLRLRTSKIYP

SEQ ID NO: 55639 - DNA, 2247 bp, Candidatus Desulfococcus oleovorans Hxd3
  CDS (1)..(2247): transl_table=11
atgaccgaaaaaaccaccacccttgccgtcaccggcatgacctgcgccaactgcgcggccaacattgaacgggccttgaacaaaaagaccgccggcgtggccagcgcgtcggtgaattttgccaccgagcgggttgcggtgacctacgatccggacgtcctttctctggagggaattgtggccgccatcgaaaaggccggctacggggccctgccggtcaccgaaggcgaggagggagacgaccgggaacaggcggcacgggaggcggccatcgcacttcagacccggcacctggtggtgggcgcgattttcaccatccctctgtttgtgctttccatgggccgggatttcggcctgctgggcgcctggagccaccatcccctgatgaactggctctttctggccctggccacgccggtccagttttacaccgggtgggattattacaccggcgggctgaaaagcctgaagaacagaagcgccaacatggatgtgctggtggccatgggatcgtcggtggcctatttttattccacagcactgcttatttttccggtactgggggaccatgtctattttgaaaccgcggccgtgattatcaccctgatcaaactgggaaaactgctggaggtccggaccaagggccgcaccagcggcgccattaaaaaactgatcggcctgcggcccagaaccgccattgtgctcaaaaacggggtcgaaacccctgttgatatcggggacgtggtcgtcggagacctggtggtggtgcggccgggcgaacgcattccggccgacggcgtggtcagggatggacgatcttcggtggacgagtccatgctcaccggcgaacccattcccgtggaaaaagcgccgggcaacaaggtggtgggcggcaccatcaacaacgacggtgtgcttcactttgaggcaacagccgtgggaagccggaccgtgctggcccagatcattcgcgtggtccaggaggcccaggccggacgggcccccattcaggccatggccgaccgggtggcggcggtgtttgtgccggcggtaatagggatcgcgtttgtgacctttggcgtctggtgggccacgacaggcgagttcgtgcctgccatgatccggctggtggcggtgctggtgattgcctgcccctgcgccctgggtcttgccacgcccacggccatcatggccggcaccggccgggccgcggaaaccggcattctctttcgccggggcgaggccattgaaacatcggcacgcctcgacaccgtggtgctggacaagaccggcaccctgaccgaaggccggcccgtggtggtggacgtccttttcaacaagacctgttgcgataccgaaaaccggtttcttgccttggccgcggccgtggagaccgggtcagaacatccggtgggaaaggccgtggtctccgcggcccgggaccggtttctggagttgccggaaatgaaggactttcagtcggtcagcggcatgggggtgtctgcccgggtggagggccggaacgtgaaggtgggcaagcccgggtggtttgaaggcctgggtatggacctgggtggccttaaatccgacatggaaaaattaaggtcacagggcaagaccgtgatggcggtgtttattgatgaccgtcccatggggctgatcggcgtggccgacagactcaaaactgaatcggccggcgcggtgcagcagcttaaggagatgggcatgcacgtggtgatgctcaccggcgacaaccgggaaaccgctgaaaaaatcgcggctcaggccggcattgatcaggtgatggccgacgtaaaacctgaagaaaaagcaacggccattgcagaccttcagaagaaaggaagccgcgtggccatggtgggggacggcatcaatgacgcgccggcactggcaaaagcggatgtgggcattgccatcggcaccggcacggacgtggccattgaaaccgccgatattgttctttcctccggcaacctggagggggtgggccgggccctgtccattggccggcagaccctgcgcaccatccggcagaacctgttctgggcctttggctacaacgtgatcctgattcccgtggctgccggcgtgctgtatccctttgaatcccttcccggtctgctgcggcagctgcatcccatgctggcggccctggccatggcggccagcagtatctccgtggtctccaacagcctgcggctttataaacagcggatgcggatgtag

SEQ ID NO: 55640 - protein, 748 aa, Candidatus Desulfococcus oleovorans Hxd3
MTEKTTTLAVTGMTCANCAANIERALNKKTAGVASASVNFATERVAVTYDPDVLSLEGIVAAIEKAGYGALPVTEGEEGDDREQAAREAAIALQTRHLVVGAIFTIPLFVLSMGRDFGLLGAWSHHPLMNWLFLALATPVQFYTGWDYYTGGLKSLKNRSANMDVLVAMGSSVAYFYSTALLIFPVLGDHVYFETAAVIITLIKLGKLLEVRTKGRTSGAIKKLIGLRPRTAIVLKNGVETPVDIGDVVVGDLVVVRPGERIPADGVVRDGRSSVDESMLTGEPIPVEKAPGNKVVGGTINNDGVLHFEATAVGSRTVLAQIIRVVQEAQAGRAPIQAMADRVAAVFVPAVIGIAFVTFGVWWATTGEFVPAMIRLVAVLVIACPCALGLATPTAIMAGTGRAAETGILFRRGEAIETSARLDTVVLDKTGTLTEGRPVVVDVLFNKTCCDTENRFLALAAAVETGSEHPVGKAVVSAARDRFLELPEMKDFQSVSGMGVSARVEGRNVKVGKPGWFEGLGMDLGGLKSDMEKLRSQGKTVMAVFIDDRPMGLIGVADRLKTESAGAVQQLKEMGMHVVMLTGDNRETAEKIAAQAGIDQVMADVKPEEKATAIADLQKKGSRVAMVGDGINDAPALAKADVGIAIGTGTDVAIETADIVLSSGNLEGVGRALSIGRQTLRTIRQNLFWAFGYNVILIPVAAGVLYPFESLPGLLRQLHPMLAALAMAASSISVVSNSLRLYKQRMRM

SEQ ID NO: 55641 - DNA, 2349 bp, Escherichia coli B
  CDS (1)..(2349): transl_table=11
gtgtgcgggatggccatcctgcccgacagggcgcacagcagcattcgataccaggaccatcaactttatttctgctccgccagctgtgagagtaaatttaaagcccatcccgatcgttatcttaccgaagatgccagtgaacattcccatcaccatcaccacgatcatcacgaagtcagccctgatcagataaaacagcctcaccaccaggcggaaaaagagaattctgaaggtgtgtggacatgtccgatgcacccggagatacgccgcagtggtcccggaagctgtcctgtctgtggaatggcactggagccgctcgtagctacggcatccacggggccgagtgatgaacttcacgacatgacaagacgcttctggctggggttgttgctggcgtttccggttctggtactcgaaatgggatctcatctgtttcccgacttgaggaatacagtaccgccacagtacaacacatggctgcagttgcttctggcctcccctgtcgtgttgtggtgtggctggccattcttcgcccgggccggaatgtcgttacgtaaccgctccctgaatatgtttacccttgttgcaatggggaccggcgtagcctgggtttacagcgtcattgcaaccgtcttcccctcctggtttcctgcatcgttcagaaacatggatggcctggtggccgtttattttgaagccgcagcagttattacggtgcttgttctgctgggacaggttcttgagctgcgggcacgggaacaaacctcaggcgccattactgcgcttctgaaccttgcccccaaaaccgccagacggctggatcatgacggtcatgaaacggatattaatgcggaagatgtcctgcctggcgataagctccgcatcagacctggagagagtattccggtcgacggtatcgtgatcgaaggcaaaacaaccgttgatgaatcgatggtgaccggggagtctatgccggttaccaaaacgaagggtgaccctgtcattggggggacgattaatcagacaggtagtcttatcatccgtgcagagaaagtcggtgatgaaacgatgctctcacgaattgttcagatggtcgctgatgcacagcgttcgcgtgcccccatccagagaatggctgacagcgtttcaggctggtttgttcctctggtgatacttatcgcggttgttgctttcgtgatctggtctgtctgggggcccgagcccaggatggcgcacggtctgattgcggctgtgtcggtcctgattattgcctgcccctgcgcactggggctggccacaccgatgtcgataatggtgggggtaggcaaaggagcccaggccggggtgttaatcaggaatgccgaagcccttgaacgtcttgaaaaagtggacacgctggttgtcgacaaaacaggcacgctcacggaaggttcgcctacggtgacagggattatcagtctcaatccgggtggggaagcatctcttttacgtgtagcggccgcagtggaaaaaggctcgcagcatccgctgggtatggctgtagtccgggcagcccagcacagggggatcatgatacccgcagtcagtgatttcaatgctccgtcggggaaaggtgtttcaggcgatgttgaaggtcaacgggttgttattggtaatgaactggctatgcaggaaaacagtatcgttattgataatcaaaaggccgttgcggatacgttgcggatggaaggcgctaccgttatctatgtggccacagatgggtaccttgcaggcctgatagctatctcggatcccgtgaaagcaaccacgccggatgcgcttaaagctttgcgtcaggcggggatccgcattgttatgctcaccggggataaccagcttactgctgaagcagtcgcacggaaactgggaatagatgaggttgaagccggggttctgcctgacggcaaaaaagcagtgataacccgactgaaagcgtctggtcatgtggttgcgatggcgggggacggtgtaaatgatgccccggcgctggcagcggctgacgtgggcatagctatgggaacgggtacagatgtggcaattgaaagtgccggagtcacccttctcaaaggcgacttgatgatactgaacagggcccgtcatctgtcagagatcaccatgaaaaatatccgacagaatctgttttttgcatttatctacaacgcacttggcgtgcctgtggctgcaggtctgctttatcctgtgtatggaatactgctgtcgccagttattgcggcggcggccatggctctttcctccgtcagcgtcattgtgaatgcgttgcgtctgaaaagtgtcaggctcgggaaataa

SEQ ID NO: 55642 - protein, 782 aa, Escherichia coli B
MCGMAILPDRAHSSIRYQDHQLYFCSASCESKFKAHPDRYLTEDASEHSHHHHHDHHEVSPDQIKQPHHQAEKENSEGVWTCPMHPEIRRSGPGSCPVCGMALEPLVATASTGPSDELHDMTRRFWLGLLLAFPVLVLEMGSHLFPDLRNTVPPQYNTWLQLLLASPVVLWCGWPFFARAGMSLRNRSLNMFTLVAMGTGVAWVYSVIATVFPSWFPASFRNMDGLVAVYFEAAAVITVLVLLGQVLELRAREQTSGAITALLNLAPKTARRLDHDGHETDINAEDVLPGDKLRIRPGESIPVDGIVIEGKTTVDESMVTGESMPVTKTKGDPVIGGTINQTGSLIIRAEKVGDETMLSRIVQMVADAQRSRAPIQRMADSVSGWFVPLVILIAVVAFVIWSVWGPEPRMAHGLIAAVSVLIIACPCALGLATPMSIMVGVGKGAQAGVLIRNAEALERLEKVDTLVVDKTGTLTEGSPTVTGIISLNPGGEASLLRVAAAVEKGSQHPLGMAVVRAAQHRGIMIPAVSDFNAPSGKGVSGDVEGQRVVIGNELAMQENSIVIDNQKAVADTLRMEGATVIYVATDGYLAGLIAISDPVKATTPDALKALRQAGIRIVMLTGDNQLTAEAVARKLGIDEVEAGVLPDGKKAVITRLKASGHVVAMAGDGVNDAPALAAADVGIAMGTGTDVAIESAGVTLLKGDLMILNRARHLSEITMKNIRQNLFFAFIYNALGVPVAAGLLYPVYGILLSPVIAAAAMALSSVSVIVNALRLKSVRLGK

SEQ ID NO: 55643 - DNA, 2199 bp, Escherichia coli B
  CDS (1)..(2199): transl_table=11
atgtcgactcctgacaatcacggcaggaaagcccctcaatttgctgcgttcaaaccgctaaccacggtacagaacgccaacgactgttgctgcgacggcgcatgttccagctcgccaactctctctgaaaacgtctccggcacccgctatagctggaaagtcagtggcatggactgcgccgcctgtgcgcgcaaggtagaaaatgccgtgcgccagcttgcaggtgtgaatcaggtgcaggtgttgttcgccaccgaaaaactggtggttgatgccgacaatgacattcgtgcacaagttgaatctgcggtgcaaaaagcgggctattccctgcgcgatgaacaggccgccgacgaacaacaagaatcacgcctgaaagagaatctgccgctgattacgctaatcgtgatgatggcaatcagctggggtctggagcagttcaatcatccgttcgggcaacaggcatttatcgcgaccacgctggttgggctgtacccgattgctcgtcaggcattacggctgatcaaatccggcagctacttcgccattgaaaccttaatgagcgtagccgctattggtgcactgtttattggcgcaacggctgaagctgcgatggtgttgctgctgtttttgattggtgaacgactggaaggctgggccgccagccgcgcgcgtcagggcgttagcgcgttaatggcgctgaaaccagaaaccgccacgcgcctgcgtaacggtgagcgggaagaggtggcgattaacagcctgcgccctggcgatgtgattgaagtcgccgcaggtgggcgtttgcctgccgacggtaaattgctctcaccgtttgccagttttgatgaaagcgccctgaccggcgaatctattccggtggagcgcgcaacgggcgataaagttcctgcaggagccaccagcgtagaccgtctggtaacgctggaagtgctgtcagaaccgggtgccagcgccattgaccggattctgaaactgatcgaagaagccgaagagcgtcgcgcacccattgagcgttttatcgaccgtttcagccgtatctatacgcccgcgattatggccgtcgctctgctggtgacgctggtgccaccgctgctgtttgccgccaactggcaggagtggatttataaagggctgacgctgctgctgattggttgcccgtgtgcgttagttatctcaacgcctgcggcgattacctccgggctggcggcggcagcgcgtcgtggggcgttgattaaaggcggagcggcgctggaacagctgggtcgtgttactcaggtggcgtttgataaaaccggtacgctgaccgtcggtaaaccgcgcgttaccgcgattcatccggcaacgggtattagtgaatctgaactgctgacactggcggcggcggtcgagcaaggcgcgacgcatccactggcgcaagccatcgtacgcgaagcacaggttgctgaactcgccattcccaccgccgaatcacagcgggcgctggtcgggtctggcattgaagcgcaggttaacggtgagcgcgtattgatttgcgctgccgggaaacatcccgctgatgcatttgctggtttaattaacgaactggaaagcgccgggcaaacggtagtgctggtagtacgtaacgatgacgtgcttggtgtcattgcgttacaggataccctgcgcgccgatgctgcaactgccatcagtgaactgaacgcgctgggcgtcaaaggggtgatcctcaccggcgataatccacgcgcagcggcggcaattgccggggagctggggctggagtttaaagcgggcctgttgccggaagataaagtcaaagcggtgaccgagctgaatcaacatgcgccgctggcgatggtcggtgacggtattaacgacgcgccagcgatgaaagctgccgccatcgggattgcaatgggcagcggcacagacgtggcgctggaaaccgccgacgcagcattaacccataaccacctgcgcggtctggtgcaaatgattgaactggcacgcgccactcacgccaatatccgccagaacatcactattgcgctggggctgaaagggatcttcctcgtcaccacgctgttagggatgaccgggttgtggctggcggtgctggcagatacgggtgcgacggtgctggtgacagcgaatgcgttaagattgttgcgcaggagataa

SEQ ID NO: 55644 - protein, 732 aa, Escherichia coli B
MSTPDNHGRKAPQFAAFKPLTTVQNANDCCCDGACSSSPTLSENVSGTRYSWKVSGMDCAACARKVENAVRQLAGVNQVQVLFATEKLVVDADNDIRAQVESAVQKAGYSLRDEQAADEQQESRLKENLPLITLIVMMAISWGLEQFNHPFGQQAFIATTLVGLYPIARQALRLIKSGSYFAIETLMSVAAIGALFIGATAEAAMVLLLFLIGERLEGWAASRARQGVSALMALKPETATRLRNGEREEVAINSLRPGDVIEVAAGGRLPADGKLLSPFASFDESALTGESIPVERATGDKVPAGATSVDRLVTLEVLSEPGASAIDRILKLIEEAEERRAPIERFIDRFSRIYTPAIMAVALLVTLVPPLLFAANWQEWIYKGLTLLLIGCPCALVISTPAAITSGLAAAARRGALIKGGAALEQLGRVTQVAFDKTGTLTVGKPRVTAIHPATGISESELLTLAAAVEQGATHPLAQAIVREAQVAELAIPTAESQRALVGSGIEAQVNGERVLICAAGKHPADAFAGLINELESAGQTVVLVVRNDDVLGVIALQDTLRADAATAISELNALGVKGVILTGDNPRAAAAIAGELGLEFKAGLLPEDKVKAVTELNQHAPLAMVGDGINDAPAMKAAAIGIAMGSGTDVALETADAALTHNHLRGLVQMIELARATHANIRQNITIALGLKGIFLVTTLLGMTGLWLAVLADTGATVLVTANALRLLRRR

SEQ ID NO: 55645 - DNA, 2517 bp, Pseudomonas putida GB-1
  CDS (1)..(2517): transl_table=11
atggccacctgtcacaggcactacagttatttaattttgttgctctgtccgctgacgcaactcttcgggcacaaccatggcgggtattctcaccagaagggtgaaaactcgtccaaaccggacaacaaagggaactacttcatgcacaccgaatcgtgccagcatgaccatgaccatgaccactcgcacccgtatgagcaaccggatggtagtcagcgcgatttggtatgcggtatgacggtgccaccggatagtcgctacttcgagctatacgagggaaggacataccgcttctgcagtgaaaagtgcctgacgaaattccgcgcagcgcctgtgcattatcttagccctccccaggaccaagaacacgcgggccatctccactcggctgccccgcagccaagcaacgcggcggacgccgaatacacttgcccgatgcatccccaaatccgccagcgtgggccgggcagttgcccaatctgtggcatggccctagagccggtaataccggagcttgaggaagacgagaacccggaactcaaggacttctcccgccgcttctggtggaccttgcccctgacggtcatcgtgaccgtgttggccatgactgcccaccaactccaattgctgcatggtgccacacagaattgggtggagttgattctggccactcccgtgacactatgggctggctggccgtttttcgtgcgtggggtcgcatcgattcgtaatcgcagcccgaatatgtggaccctgataggtttgggaacggctgcggcgtacctatacagcgttgcggccacagtgttcccgcaggttttcccgacgactttcatgcaggatggccgcatcggtgtctacttcgaagcggctgcagtcatcatctcattaacgttgctcggccaaatgctcgagctcaaggcgcgctcacaaacctccgccgccatcaagtcgctcctgggtcttgcccccaagacggcccgtcgcatcggggccgatggtcaggaggaagatattccgctcacccacgtgcatacgggcgaccacctgcgcgttcgccctggcgagaaggtgccggtcgacggggtggtcctggaaggcgaaagtgctatcgatgaatccatgctgacaggcgagcccgtgccagtgatgaagaaagctggggatgcactcatcggtgccacgctgaatacccacggcagccttgtgatggcggcgcagaaggtcggcgccgagacagtgctctcgcaaatcgtgcagatggtcgcgcgggctcagcgctcgaaagccccgatgcagcggatggcggacaccgtggccggctatttcgtcatgggggtgattctggtcgcgctggtcacgctcttcggctgggggcttttcggaccggagcctggctgggtcttcggcctgatcaatgcggtcgcggtcctgatcattgcctgcccctgcgcgctcggcctagccactcccatgtcgatcatggtcgctaccgggaaggctgccagcagtggcgtgctcttccgagacgccagtgctatcgagaacctctgcaagatcgacacgctgatcgtcgacaagaccgggaccctcaccgagggccggccagtgtttcatagcgtggtcggtaccgggcagttcatgccacccgaagtcttgcgccttgccgccagcctggaccaaggcagcgagcatccgctggcacatgcgattgtcgatcatgcgcgagcgcatggacacagcttgtccaagccagaggcgtttgagtcgggctctgggatcggtgtacgtggccaggtgaacggcaaacggctgcagcttggcaacacgaccttgatggaagaggctggcctcgacaccagtccgttgcgagaccgcgccgagcagctgcgtctggaaggcatgagtatcatgtacttggccgtcgatggcgtgctcgctggcctgctagcggtgtccgatccggtcaaacccacctccaaggaggcggtaacccggctacaggcagaagatgtgaaggtcatcatggccaccggcgacggcctgactacggcacgtgcggtcgcgaaacaactcggcatcgaggaagtccacggagaagtgaaacccgaggacaaggagcaactggtggcgctcctgcagggcgataagcgccgggttgccatggcaggagatgggatcaacgatgcccctgcgctggcccgggctgatgtcgggatcgccatgggaactggcaccgatgttgccatgaacagctcccagttgacgctggtcaagggcgacctgatgggcatcctgcgggccagaacactatccgtggccacggtgaagaacatgcgtcaaaacttgggcttcgcattcttctacaacgctatgggcataccgctggcggcaggtttgttctacccgcttaccggccatctattgtcaccgatgattgcggcattggccatgagcgtaagttcggcttccgtggtattcaacgcactgcggctgaagcgcgtagtcacagactga

SEQ ID NO: 55646 - protein, 838 aa, Pseudomonas putida GB-1
MATCHRHYSYLILLLCPLTQLFGHNHGGYSHQKGENSSKPDNKGNYFMHTESCQHDHDHDHSHPYEQPDGSQRDLVCGMTVPPDSRYFELYEGRTYRFCSEKCLTKFRAAPVHYLSPPQDQEHAGHLHSAAPQPSNAADAEYTCPMHPQIRQRGPGSCPICGMALEPVIPELEEDENPELKDFSRRFWWTLPLTVIVTVLAMTAHQLQLLHGATQNWVELILATPVTLWAGWPFFVRGVASIRNRSPNMWTLIGLGTAAAYLYSVAATVFPQVFPTTFMQDGRIGVYFEAAAVIISLTLLGQMLELKARSQTSAAIKSLLGLAPKTARRIGADGQEEDIPLTHVHTGDHLRVRPGEKVPVDGVVLEGESAIDESMLTGEPVPVMKKAGDALIGATLNTHGSLVMAAQKVGAETVLSQIVQMVARAQRSKAPMQRMADTVAGYFVMGVILVALVTLFGWGLFGPEPGWVFGLINAVAVLIIACPCALGLATPMSIMVATGKAASSGVLFRDASAIENLCKIDTLIVDKTGTLTEGRPVFHSVVGTGQFMPPEVLRLAASLDQGSEHPLAHAIVDHARAHGHSLSKPEAFESGSGIGVRGQVNGKRLQLGNTTLMEEAGLDTSPLRDRAEQLRLEGMSIMYLAVDGVLAGLLAVSDPVKPTSKEAVTRLQAEDVKVIMATGDGLTTARAVAKQLGIEEVHGEVKPEDKEQLVALLQGDKRRVAMAGDGINDAPALARADVGIAMGTGTDVAMNSSQLTLVKGDLMGILRARTLSVATVKNMRQNLGFAFFYNAMGIPLAAGLFYPLTGHLLSPMIAALAMSVSSASVVFNALRLKRVVTD

SEQ ID NO: 55647 - DNA, 2253 bp, Pseudomonas putida GB-1
  CDS (1)..(2253): transl_table=11
atgaaccagcctgtcagccacgaccacaagcactcgcacgatcacgcccatggcgatgacgaccacggccatgctgcccacggccacagctgctgcggctccaaagccgcgccatcgctggtgcaactgagcgaaacggccagtgcccaggcgcagctcagccgttttcgcatcgacgccatggactgccccaccgagcagacgctgatccaggacaaactgggcaagctggccggaatcgagcagctggaattcaacctgatcaaccgcgtgcttggcgtgcgccataccttgaacggtacggctgaaatcgagcgggccatcgacagcctgggcatgaaggccgagccgattgctgccgaggacgacggcaccaccagcgtggcacaaccggccaagacccgctggtggccgctggcactgtcgggtattgctgcgattaccgccgaaatcgtgcacttcgctgcgctggccccggaatgggtggtagcggggctggcgctgttggcgatcctcggctgcggcctgggtacctacaagaagggctggatcgccctgaaaaaccgcaacctcaacatcaatgccttgatgagcattgccgtgaccggtgcggtgctgatcggccagtggccggaagcagccatggtgatggtgctgttcacggttgccgagctgatcgaagcgcgctcgctggaccgtgcgcgcaatgccatcggcgggttgatgcagttggccccggacatggccacggtgcagcaggccgatggcctgtggcgcgagctggacgtgcgtgaagtggccatcggtgcgttggtgcgggtgcgccccggcgaacgcatcggcctggacggtgaagtgaccagtgggcagtccagcgtcgatcaggcaccgatcaccggtgaaagcctgcctgtagagaaggcagtgggcgacaaactgttcgccggtaccatcaaccaggcgggagcattggagttccgcgttaccgctgctgccgggcagtctaccctggcgcggatcatcaaggccgtggaggaggcacaaggcgcgcgggcacctacccagcgcttcgtcgaccgtttttcgcgcatctataccccggtggtgttcgccattgccctggccgtggcggtgatcccgccgttgttcatggccggtgcctggttcgactgggtctaccgtgctctggtattgctggtggttgcgtgcccctgcgcattggtgatctcgaccccggtgaccatcgtcagcggcctggcggctgccgcgcgcaaaggcatcctgatcaagggcggcgtctatctggagggcggccgccacctggacttcctggccctggacaagaccggcaccatcacccacggcaaaccggtacagactgacgccgaagtgctggcgccgcagttcgaagcccgcgctcaagccctggccgccagcctgggcgagcgctcggaccacccggtgtcccgcgctatcgctcagttcggcaaggcgcaagggctggctctaagtgaagtggatgacttcgccgccctgggcgggcgcggtgtgcgtggcaccatcgacggtgaggtctaccacttgggcaaccaccgcctggtcgaagagctgggcctgtgctcgccagcgctggaagccaaactggatgcgctggagcgtcagggcaagaccgtggtgctgctgctcgaccgttccgggccattggcgctgtttgccgttgccgacaccgtgaaggacagcagccgccaggctatcgccgagctgcatgaactgggtatcaagactgtcatgctgaccggtgacaatccgcataccgcccaggccatcgccgctgtggtgggcatcgaccgcgccgagggtaacctgctgccagccgacaagctgaaaaccatcgaggccttgtacgcagaaggccaccgggtgggcatggtcggtgatggtatcaacgacgcgccagctctggcccgcgccgagatcggttttgccatggccgccgctggtaccgacaccgccatcgagaccgccgacgtagcgctgatggacgacgacttgcggaaaattccggccttcgtcaggctgtcgcgccaaagcgcggcgatcctcatgcagaacatcgttctggcgttgggcatcaaggcgatattcctggccatcacctttgctggcatggcgaccatgtggatggcggtgttcgccgacatgggcgtgagcctgctggtggtgttcaacggcttgcgcctgttgcgcaaatag

SEQ ID NO: 55648 - protein, 750 aa, Pseudomonas putida GB-1
MNQPVSHDHKHSHDHAHGDDDHGHAAHGHSCCGSKAAPSLVQLSETASAQAQLSRFRIDAMDCPTEQTLIQDKLGKLAGIEQLEFNLINRVLGVRHTLNGTAEIERAIDSLGMKAEPIAAEDDGTTSVAQPAKTRWWPLALSGIAAITAEIVHFAALAPEWVVAGLALLAILGCGLGTYKKGWIALKNRNLNINALMSIAVTGAVLIGQWPEAAMVMVLFTVAELIEARSLDRARNAIGGLMQLAPDMATVQQADGLWRELDVREVAIGALVRVRPGERIGLDGEVTSGQSSVDQAPITGESLPVEKAVGDKLFAGTINQAGALEFRVTAAAGQSTLARIIKAVEEAQGARAPTQRFVDRFSRIYTPVVFAIALAVAVIPPLFMAGAWFDWVYRALVLLVVACPCALVISTPVTIVSGLAAAARKGILIKGGVYLEGGRHLDFLALDKTGTITHGKPVQTDAEVLAPQFEARAQALAASLGERSDHPVSRAIAQFGKAQGLALSEVDDFAALGGRGVRGTIDGEVYHLGNHRLVEELGLCSPALEAKLDALERQGKTVVLLLDRSGPLALFAVADTVKDSSRQAIAELHELGIKTVMLTGDNPHTAQAIAAVVGIDRAEGNLLPADKLKTIEALYAEGHRVGMVGDGINDAPALARAEIGFAMAAAGTDTAIETADVALMDDDLRKIPAFVRLSRQSAAILMQNIVLALGIKAIFLAITFAGMATMWMAVFADMGVSLLVVFNGLRLLRK

SEQ ID NO: 55649 - DNA, 2403 bp, Pseudomonas putida GB-1
  CDS (1)..(2403): transl_table=11
atgcccgcatccaccacttacgacctgccgatcaccggcatgacctgtgccagctgtgctggccgggtcgaacgcgccctgcgcaaggtcacaggcgctgaacaggtcagcgtaaacctcaccactgaaaaagcccgggttctggccccggccgacagcctgccggcgttggtcgacgccgtgcgcgaagccggttacggcgtgcccacccgcaccctcgaactgcagatcggcggcatgacctgcgccagctgtgtcggccgtgtagagcgcgccctcggcaaattgcccggcgtcgagcaggtcagcgtgaacctggccagcgaacgcgcgcacctcgaagtgctcacagccctcgatgacaacctgctgatcgacgccgtacaaaaggccggctacagcgccagcctgccgcaatctgccagggacgagcaaagcgctgcccagcaccgcctgcgcaacgagcgcctggcggtcggcgcagccttgctgttggccctgccgctggtattgccaatgctggtacaaccgttcggcctgcactggatgctgcctgcctgggcgcaattcctgctggccacgccggtgcaattcattcttggggcacgcttctacgtagccgcctggaaggccgtgcgcgccggtgccggcaacatggacctgctggtggccctgggcaccagtgccggctatggccttagcctgtaccaatgggcgcaggcccccgccggcatggccccgcacctgtacttcgaagcctccgccgtggtgattgccctggtattgctgggcaagtacctggaaagccgcgccaaacgccaaaccgccagcgccatccgcgccctcgaagccttgcgcccggaacgcgccgtgcgcgtggtcgatggccaggaggaggacgtggcaatcgcccagttgcgcctgggcgacctggtcctggtaaagcccggcgagcgtttcccggtcgatggcgtggtcgaagatggcagcagccacgccgatgaggccctgatcagcggcgagagcctgccagtgcccaagcaacccggcgacagcgtcaccggtggcgctatcaacggcgaaggccggttgctggtccgtacccaggcactgggcaccgagaccgtgctggcacgcatcatccgcctggtggaagacgcccaggccgccaaagcgccaatccagaagctggtcgaccgggtcagccaggtattcgtcccggctgtactggtgctggcgctgatcaccctgatcggatggtggctggccggtgcaccactggaaaccgcgctgatcaacgccgttgccgtgctggtcatcgcctgcccctgcgccctcggcctggccacgcccgcagcgatcatggccggcaccggggtcgccgcccgccatggcatcttgatcaaggatgccgaagccctggagcgggcccatgcggtcaaccgcgtggtcttcgacaagaccggcacccttacctccggcagcccgcgggtggttcacagtcaggcacaggacggcagcagtaccgagctgcaccgcctggccggcgccctgcagcgcggcagtgaacacccgctggccaaggcggtactgcaggcgtgcgccgaacaggggctggacgtgcccgaggttgccgacagccaatcgctgaccgggcgcggcattgccgggcgtgtcgagggccgtgagctggcgctgggcaaccgccgcctgctagacgagagcgctctgcagcctggtgagctggcctccaaggcccaggcctgggaagccgaagggcgcaccctgtcatggctgatcgaacgcggcaggcaaccgcgcgtgctgggcctgttcgcctttggtgacagcctcaagcccggcgccgcgcaagccatcgacaccctgcatgcacagcacatcagcagccacctgctgaccggtgacaaccgtggcagcgccaaggtggtggccgatgccctgggcatcgacgatgtgcatgccgaagtgctgccggccgataaggccgcgacggtgacggcactcaagcgcgacggtgtggttgccatggtcggcgatggcatcaacgatgcacccgcgctggccgctgccgacatcggcatcgccatgggtggcggcaccgacgtggccatgcaggccgccggcatcaccctgatgcgtggcgacccgcgcctggtgcccgccgcgctggaaatcagccgcaagacctacgcgaagatccgccagaacctgttctgggctttcatctacaacttgatcggcatcccgctggccgcgctgggttacctcaacccggtactggccggtgccgccatggccctgtccagcgtcagcgtggtcagtaacgcgctgtggctcaaggcgtggaaacccaccagtagcagcacccaggaggcgccatga

SEQ ID NO: 55650 - protein, 800 aa, Pseudomonas putida GB-1
MPASTTYDLPITGMTCASCAGRVERALRKVTGAEQVSVNLTTEKARVLAPADSLPALVDAVREAGYGVPTRTLELQIGGMTCASCVGRVERALGKLPGVEQVSVNLASERAHLEVLTALDDNLLIDAVQKAGYSASLPQSARDEQSAAQHRLRNERLAVGAALLLALPLVLPMLVQPFGLHWMLPAWAQFLLATPVQFILGARFYVAAWKAVRAGAGNMDLLVALGTSAGYGLSLYQWAQAPAGMAPHLYFEASAVVIALVLLGKYLESRAKRQTASAIRALEALRPERAVRVVDGQEEDVAIAQLRLGDLVLVKPGERFPVDGVVEDGSSHADEALISGESLPVPKQPGDSVTGGAINGEGRLLVRTQALGTETVLARIIRLVEDAQAAKAPIQKLVDRVSQVFVPAVLVLALITLIGWWLAGAPLETALINAVAVLVIACPCALGLATPAAIMAGTGVAARHGILIKDAEALERAHAVNRVVFDKTGTLTSGSPRVVHSQAQDGSSTELHRLAGALQRGSEHPLAKAVLQACAEQGLDVPEVADSQSLTGRGIAGRVEGRELALGNRRLLDESALQPGELASKAQAWEAEGRTLSWLIERGRQPRVLGLFAFGDSLKPGAAQAIDTLHAQHISSHLLTGDNRGSAKVVADALGIDDVHAEVLPADKAATVTALKRDGVVAMVGDGINDAPALAAADIGIAMGGGTDVAMQAAGITLMRGDPRLVPAALEISRKTYAKIRQNLFWAFIYNLIGIPLAALGYLNPVLAGAAMALSSVSVVSNALWLKAWKPTSSSTQEAP

SEQ ID NO: 55651 - DNA, 2601 bp, Marinobacter sp. ELB17
  CDS (1)..(2601): transl_table=11
atggacaacacaaccgctaacaccgagaatcggctcagcattgccggtgccacctgccagggctgcgcccgtaaaatccgcgtggcattagaacctttggtcaccgacagtgccgcggtggatgtgaacatcgagcagaaaaccgtcaccttgcccgcaggcattgacgccaccgacgctgcccgcagaatcaccgaagcgggctatccgtcggagattctccatgccgagcccgccgccaaaaactgctgtgccagcaagataacgccatcctgtcgcagcgaaaaaagtaccactgatgaagcaaaggcccctgcgccagagacggccagcgccgccagcgacagcaacgacggcattcagctgacggtcaccggcgccacctgtgcgtcttgcgtcagcagcatcgaaaaagccttgaagtcggtcagcggcgttacccgcgcccacatgaacctggccgacaataccgccagtgccagcggtcaagtagctccgcaagcactgatcaaagccatcgaaagcgccggctacggcgccagcgtgattgaagatccagacactgcagacgaacgccgccagcagcaagatcgcaaacgctaccgcaccttgctggtaaaaatggcgatcagcctgtcattgggtttaggcctgatgatctggggcatgggtttcggctcaatgaccgtagatgccggtaaccagaccacctggatcaacctgggcattctgaccctgggcgtgatgattgccaccggcagccattttttcaccagcgccgggaaagcctttctccatcacaacgccaatatggacaccctggtagcgctgggtaccggcaccgcgtggatctattccatggtggtggcggtgttccccgcagccctgccagaaatggcgcgccacgtgtattttgaagcttcggcgatgatcatcggtctgatcaatctgggccaggcattagagctgcgcgccaaaggcaaaacctccgaagccgtgcgccggctgttggatctgcgcgctaaaaccgcccgcgtgatccgcgacggccaggaacaggacctgcccatagagcaggtgcgtaaaggcgaccagatccgcgttcggcccggtgaacagctgccggtggacggtgtagtgcgcgaaggcaacacccgcgttgacgaaagcatgctcaccggcgagcccatgccggtcagtaaaggcgaaggcgacgaagtgtctgccggcactttgaacacccgtggcagcattgtgtacgaagccacccgtgtaggcagcgacacggccctggcgcaaattatccgtctggtaaaaaaagcccaaggctcgaagccctcaataggccgcctggcggataaaatttcctcggtatttgtgcccagtgtgatgctgatcgccatagccgccgcgcttgcctggtacaacctggggccagacccggcagtagcgcacatgatggtggccgccaccaccgtactgatcatcgcctgtccctgcgccttgggccttgccacgcccatgtcggtgatggtcggcgtcggcaaagccgctgaatacggcgcgctgatccgccagggtgaagcgcttcaaaccgctggcaagatcaacctggtcattctggataagaccggcactatcactgccggcaaacccgtggttacccaagtgcatgtagtaaacggtgatgaaattcatctgctggccctggccgccggtcttgagcagtattcagagcacccgctggcctacgccattatggaaaaagtccggcaggacactattcaaccggccgacataaccggcttcgacagcctcaacggcaagggtgtagccgggcaacacaatggcgataccctgcgcctgggcaaccggcgttggctggtagatgaagggctggatgtaaccccgttggaccaggccgcccaaagtattaccgacaacgccggcaccccgctgtttgtggccctgggcacacgggtgctgggcgtcattggcgttgcagatgcgatcaaacctgactcccgggccgccattgaacggctgcatcaagccggcatcaaagtgatgatggtcaccggcgatgtggacgccaccgccaaagccatctgcgccagtgccggtattgacgattatcgtgccggagtgttgccggaagacaaagccgacgtagttaatgacatgcgtaaaaaaggctataccgtcgccatggtgggtgacggaattaacgatgccccggctctggccgccgccgatgttggctttgccattggcaccggcactgatgtagccattgaaagcgccgccattacactgatgcgcggttccctgcacggggttcccgacgccatcgaaatatcccgcgccacggtgaagaacattcaccagaatctgttcggcgcgtttatttataacagcctgggtatccccattgccgctggcttgctgtatccattgtggggcattctgttaagcccgatccttgccggtgcagccatgtcgatgtcgtcggttaccgtggttaccaacgctaaccggctgcgactgttcaaaaccagtcgcaaagtagacagctccgccaaacaggaacagaaccaatga

SEQ ID NO: 55652 - protein, 866 aa, Marinobacter sp. ELB17
MDNTTANTENRLSIAGATCQGCARKIRVALEPLVTDSAAVDVNIEQKTVTLPAGIDATDAARRITEAGYPSEILHAEPAAKNCCASKITPSCRSEKSTTDEAKAPAPETASAASDSNDGIQLTVTGATCASCVSSIEKALKSVSGVTRAHMNLADNTASASGQVAPQALIKAIESAGYGASVIEDPDTADERRQQQDRKRYRTLLVKMAISLSLGLGLMIWGMGFGSMTVDAGNQTTWINLGILTLGVMIATGSHFFTSAGKAFLHHNANMDTLVALGTGTAWIYSMVVAVFPAALPEMARHVYFEASAMIIGLINLGQALELRAKGKTSEAVRRLLDLRAKTARVIRDGQEQDLPIEQVRKGDQIRVRPGEQLPVDGVVREGNTRVDESMLTGEPMPVSKGEGDEVSAGTLNTRGSIVYEATRVGSDTALAQIIRLVKKAQGSKPSIGRLADKISSVFVPSVMLIAIAAALAWYNLGPDPAVAHMMVAATTVLIIACPCALGLATPMSVMVGVGKAAEYGALIRQGEALQTAGKINLVILDKTGTITAGKPVVTQVHVVNGDEIHLLALAAGLEQYSEHPLAYAIMEKVRQDTIQPADITGFDSLNGKGVAGQHNGDTLRLGNRRWLVDEGLDVTPLDQAAQSITDNAGTPLFVALGTRVLGVIGVADAIKPDSRAAIERLHQAGIKVMMVTGDVDATAKAICASAGIDDYRAGVLPEDKADVVNDMRKKGYTVAMVGDGINDAPALAAADVGFAIGTGTDVAIESAAITLMRGSLHGVPDAIEISRATVKNIHQNLFGAFIYNSLGIPIAAGLLYPLWGILLSPILAGAAMSMSSVTVVTNANRLRLFKTSRKVDSSAKQEQNQ

SEQ ID NO: 55653 - DNA, 2526 bp, Rhizobium leguminosarum bv
  CDS (1)..(2526): transl_table=11
atggatatcaagcacgaacacgatcaccatcacagccacgccgatggcgacgatcattgccattgcggccatgaacccgagaaggctgcaagcgtcatgacccgtgatcctgtctgcggcatgaccgtcgatccccaggctggcaaaccttcgctcgatcatgacggccgcacctatcatttctgctccgagggctgccggacgaagtttgcggcagcacctgaggattacctcaccgcgaaggatcccgtctgcggcatgaccgtcgatcgctccacagcgaaacatttcctaaagcgcgaaggtgagaaattctatttctgctccgccgcctgccaagcgaagttcgaagccgaccccgcagcctatcgcgacggcaagtgcccgccggcaaagccggcacccaagggcacgctctatacctgcccgatgcatcccgaagtcgtcagcgacagtcccggcgactgcccgaaatgcggcatggcactggagccgatgggcattccgcctgctgacgaaggtccgaaccaggaactcgtcgatttcgtcaggcggctctcagtcagcgccatccttgctgtgccgttgctggcgctgagcatggggccgatgttcggcctgccgcttcgcgaaacgatcggcgggccgcaggcgacctacatcgaactgctgctggcaacgccggtggtgctctgggcggccctgcccttcttccgccgcgcatgggcgtctgtcgtcaaccgcagcccgaatatgtggacgctgatcggtctcggtgtcggtaccgcctatgtctacagcgtcgtcgccacgcttgtaccaggcatcttcccgatgagcttccatggccacgtcgcggccgtgcccgtctatttcgaggccgcggccgttatcgtcgcgctcgtctttgtcggccaggtgctggaattgaaagcgcgcgaacgcaccggctcggcaatccgcgctttgctcgaccttgcgccgaagacggcgcggcgcatcgatgccggcggcagcgaaaatgatgtgccggtggacgatatccagaccggtgaccggctgcgcgttcgccctggcgagcgggtgccggtggatggctccgtcctcgaaggccagtcgaccgtcgacgaatcgatgatatcaggtgagcccttgcctctggagaagtcgaagggcgacccgctgaccggcggcacgatcaacaagaacggcaccttcgtcatgaccgcagagaaggtcggcgcagacacggtgctgtcgcgtatcgtcgacatggtcgccaaggcgcaacgctcgcgggcgccgatccagggcgcggtcgaccgggtgtcggctatcttcgtgccgacggtggtcgccgccgccgtcctcgccttcctcgtctgggccgcgatcggtccggagccgcgcatggcgaatggtctgcttgccgccgttgccgttctgatcatcgcctgcccttgtgcgctcggccttgcgacgccgatgtcgatcatgatcgccacggggcgcggggcgcaggaaggtgtgctgatcaaggacgccgaagcgctggagcgcttttccaaggtcgacacgctgatcgtcgacaagaccggcacgctgaccgaaggcaagccgaagcttaccgacgtcgtcgccttcggtgacgtcggggaagaccgactgctgtcgctggcggcaagcctggagcgcgggtcggaacatccgctagccgaagcgatcgtttccggcgccgaggagcgcggcgtctccttcgtcgaggtcaccggtttcgaggcaaagaccggcaagggcgttcagggccgtgccggcggcacgacggtagcgctcggcaatgcggcgatgcttaccgatctcggcatcgatccagcggtccttgccgagaagaccgaagccctgcgcggcgacggcaagacggtgatgttcgtggtgttcgacggtgcacttgccggtctcgtcgccgttgccgaccgcatcaagccgacaacggcagccgccatcaaggcactgcacgacagcggtctgaagatcatcatggcgacaggcgacaacgagcgcacggcacgtgcggtcgcaaaaagcctcggcatagacgaggtgcgcgccgatgtgcttccggaaggcaagaaggcgctgatcgacgagttgcgggccaagggcgccatcatcgccatggccggcgacggcgtcaacgatgcgccggcgctcgccgccgccgatgtcggcatcgccatggggaccggcgccgacgtcgcgatggaaagcgccggtatcacattggtgaagggcgatctgaacggcatcgtcagggcgcggcggctggcggaagcgacgatgcgaaacatccgccagaatctcggcttcgccttcggctataatgcgctcggcgtgccgatcgcggccggcgtgctctatccgatcttcgggctgctgctttcgccgatgatcgccgcggcggcaatgagcctgtcgtccgtttcggtcattgccaatgcgctgagactgcgctttgcaaaactatag

SEQ ID NO: 55654 - protein, 841 aa, Rhizobium leguminosarum bv
MDIKHEHDHHHSHADGDDHCHCGHEPEKAASVMTRDPVCGMTVDPQAGKPSLDHDGRTYHFCSEGCRTKFAAAPEDYLTAKDPVCGMTVDRSTAKHFLKREGEKFYFCSAACQAKFEADPAAYRDGKCPPAKPAPKGTLYTCPMHPEVVSDSPGDCPKCGMALEPMGIPPADEGPNQELVDFVRRLSVSAILAVPLLALSMGPMFGLPLRETIGGPQATYIELLLATPVVLWAALPFFRRAWASVVNRSPNMWTLIGLGVGTAYVYSVVATLVPGIFPMSFHGHVAAVPVYFEAAAVIVALVFVGQVLELKARERTGSAIRALLDLAPKTARRIDAGGSENDVPVDDIQTGDRLRVRPGERVPVDGSVLEGQSTVDESMISGEPLPLEKSKGDPLTGGTINKNGTFVMTAEKVGADTVLSRIVDMVAKAQRSRAPIQGAVDRVSAIFVPTVVAAAVLAFLVWAAIGPEPRMANGLLAAVAVLIIACPCALGLATPMSIMIATGRGAQEGVLIKDAEALERFSKVDTLIVDKTGTLTEGKPKLTDVVAFGDVGEDRLLSLAASLERGSEHPLAEAIVSGAEERGVSFVEVTGFEAKTGKGVQGRAGGTTVALGNAAMLTDLGIDPAVLAEKTEALRGDGKTVMFVVFDGALAGLVAVADRIKPTTAAAIKALHDSGLKIIMATGDNERTARAVAKSLGIDEVRADVLPEGKKALIDELRAKGAIIAMAGDGVNDAPALAAADVGIAMGTGADVAMESAGITLVKGDLNGIVRARRLAEATMRNIRQNLGFAFGYNALGVPIAAGVLYPIFGLLLSPMIAAAAMSLSSVSVIANALRLRFAKL

SEQ ID NO: 55655 - DNA, 2997 bp, Medicago truncatula
  CDS (1)..(2997)
atggcctccgctgtgagagacttacaactcactaatctacccgccggccggaagattgccgccgtcgataactccgatgacttggaaaacgtacggcttctagactccgacgacggtgttgacgatgaaatgagaagaattcaggtgagagtctccggtatgacatgcaccgcttgctctaattccatagaatcagctctgaaagccgttgacggtgttctcactgcttctgtcgcgctactacagaacaaagctgacgtcgttttcaatcctgctctcgtcaaggatgaagacataaaaaatgcaatcgaagatgcagggtttgaagcagatatattacctgaatccagtggaccaggaaaggttccacatgaaaccctggttggacagttcacaattggaggtatgacatgtgcagcttgtgtaaattctgttgaaggtattctgagaaatcttccaggggttaaaagggctgtggtagctttggctacttcgttaggcgaagttgaatatgatccaagtgtaattagtaaagatgatatagtcaatgcaattgaagattctggcttcgaagcctcatttgtacagagcaacgagcaggataaaattatttttggagttgttggtgtgtatagtttaacagacacacaggttttagaaggcatgcttagtaacatgaaaggagtaagacagtttcgttttgaccagttatcgagtgaattagatgttctgtttgatcctcaagttctcagtccaagatccttggttgatgggatccatggggaaagcaatggtaagtttgaattacatgttagaagcccttatacaagaatggcttctaaagatgttgaagagacctcgactatatttcggctctttatctccagcctgtgtcttagtgttcctctcttcctcatgaaggtagtttgtcctcatattccgtttatgtattccttgttactttggcgatgtgggccttttctcatgggtgattggttgaaatgggcattggtcagtgtaatccaatttggaattgggaaacgcttttacgttgcagctggcagggctcttagaaatggttcaacaaacatggatgtcctaattgctgtgggaactaccgcttcttacgtttactctgtctgtgcacttctatatggtgctcttactggattttggtccccaacttactttgaaacaagtgctatgcttataacatttgtattgttggggaagtatctggaagtccttgctaagggaaagacatccgatgccatcaagaaattagtagaacttgctcctgcaacagcaatattaattattaatgataaagatggtaaatcttttgaagaaagggaaattgattctttgcttgttcaacctggtgacacattgaaagttcttcctggtacgaagattcctgctgatggtattgttacttgtggctcaagtcatgtaaatgagagcatggtaactggtgaatctatacctgttttgaaggaggtgaatgcttctgttattgggggtacaataaatttgcatggcgtccttcacattaaagctaccaaagtaggatctgatacagttttgtgtcagataataagtttggttgaaacagcacagatgtccaaagctcccattcagaagtttgctgattatgtagcaagcatatttgtaccgacagttgtttctttggcattattgacatttttgggttggtatattgctggttctattggagcttacccagaagaatggcttccagaaaatggaaatcactttgtgtttgccctaatgttctcaatatctgtagtagtgattgcatgtccctgtgcacttggcttagcaacaccgacagctgtcatggtggcaacaggggttggggctaacaatggagtattaattaaaggaggagatgccttggaaacggctcagatggtgaagtatgtgatatttgataaaacaggcactctaactcagggaaaagccagtgttactactgccaaagtattcactggaatgcaacgtggggaatttcttacattggtggcttctgctgaggctagcagtgaacacccattggcaaaagcagtattagcatatgcacgccactttcatttctttgaggattcttcagacgctacgcagaatgatgcaaagtctggatggctttttgatgtctcagacttctccgctctcccgggaagaggtgttcaatgttctatagacgggaggcgtattttggttggcaacagaaagttgatggtggaaaatggcatagatatttcaacagaagtggaaaattttgtggttgagctggaacaaaatgcgcagacagggatactagtatcatatgatgatatattaatcggagttttgggggttgcagacccactaaagagagaagcttctgtggttatagagggcctccagaaaatgggtgtcatacctgttatggttacaggagataactggcgaacagctcgtgctgttgcaaaggaggttggaatccaagatgtaagggcagaggtgatgcctgcgggaaaagccgaaattgttcgttcattccaaaaggacggaagcatagttgcaatggtgggcgatggcatcaacgattctccagcattagctgctgctgatgttggcatggcaattggggctggaactgatgttgcaatagaagctgctaactttgtgttaatgagaaataacctggaagatgtgatcacagccattcatctttcccggaagacgttctctcgtatcagattgaattatgtattcgcaatgggatacaatgttgttgctataccagttgcagctggggctttatatccttcactgggtatcaagctgccaccatgggttgctggtgcatgcatggctctctcttctgtaagtgttgtatgctcttctttgcttcttaaaagatatagaagacccagactaagatatagtagacccagagttaccacaggacttgaaataattgtagaataa

SEQ ID NO: 55656 - protein, 998 aa, Medicago truncatula
MASAVRDLQLTNLPAGRKIAAVDNSDDLENVRLLDSDDGVDDEMRRIQVRVSGMTCTACSNSIESALKAVDGVLTASVALLQNKADVVFNPALVKDEDIKNAIEDAGFEADILPESSGPGKVPHETLVGQFTIGGMTCAACVNSVEGILRNLPGVKRAVVALATSLGEVEYDPSVISKDDIVNAIEDSGFEASFVQSNEQDKIIFGVVGVYSLTDTQVLEGMLSNMKGVRQFRFDQLSSELDVLFDPQVLSPRSLVDGIHGESNGKFELHVRSPYTRMASKDVEETSTIFRLFISSLCLSVPLFLMKVVCPHIPFMYSLLLWRCGPFLMGDWLKWALVSVIQFGIGKRFYVAAGRALRNGSTNMDVLIAVGTTASYVYSVCALLYGALTGFWSPTYFETSAMLITFVLLGKYLEVLAKGKTSDAIKKLVELAPATAILIINDKDGKSFEEREIDSLLVQPGDTLKVLPGTKIPADGIVTCGSSHVNESMVTGESIPVLKEVNASVIGGTINLHGVLHIKATKVGSDTVLCQIISLVETAQMSKAPIQKFADYVASIFVPTVVSLALLTFLGWYIAGSIGAYPEEWLPENGNHFVFALMFSISVVVIACPCALGLATPTAVMVATGVGANNGVLIKGGDALETAQMVKYVIFDKTGTLTQGKASVTTAKVFTGMQRGEFLTLVASAEASSEHPLAKAVLAYARHFHFFEDSSDATQNDAKSGWLFDVSDFSALPGRGVQCSIDGRRILVGNRKLMVENGIDISTEVENFVVELEQNAQTGILVSYDDILIGVLGVADPLKREASVVIEGLQKMGVIPVMVTGDNWRTARAVAKEVGIQDVRAEVMPAGKAEIVRSFQKDGSIVAMVGDGINDSPALAAADVGMAIGAGTDVAIEAANFVLMRNNLEDVITAIHLSRKTFSRIRLNYVFAMGYNVVAIPVAAGALYPSLGIKLPPWVAGACMALSSVSVVCSSLLLKRYRRPRLRYSRPRVTTGLEIIVE

SEQ ID NO: 55657 - DNA, 3504 bp, Glomerella lagenarium
  CDS (1)..(3504)
atggcccctccaaacatcaaagtcccgccacccaacgatggcagccgaaaggccctactggcgacacctactgcaacccacatggccacgaccaccctcaaggtcggcggcatgacgtgcggcgcatgtacctccgccgtcgagtccggcttcaaaggcgttgagggcgtgggcagtgtctccgtgtccttggtaatggagcgcgctgtcatcatgcacaatcccgaacatatttctgccgatcagatcgcagaaatcatcgaagaccgaggtttcgacgccgaagtactatccaccgacctcccctcgcccatgtttccgacagaacagaatctgttcgatgccgaggacgccagcggtctgctgacgacgacaatcgccatcgagggaatgacatgtggcgcctgcacatccgccgttgaaggaggattcaaggacgtcccaggcgtcaaaaatttcagcatttcactgctgtccgagcgagccgttatcgagcacgaccctgatctgttgacggctgagcaaatcgcggagatcatcgaggaccggggatttggcgcagaagtcgtcgacagcggcagtgcacaacaagagaagccaagatctagcagcaatcccactagcacagtagccacaacgactgttgccattgagggcatgacatgcggagcctgtacagccgctgttgaaggaggtttcaaggaggttgatggcgtcttgcgctttaacatcagtttgctggccgagcgcgccgttatcacgcacgacatggcagtactatccgcagaaaacatcgccgagattatcgaggacagaggctttggggctgagatcttgtcgacagcttccgagacatcaccccacggcggcagcgcatccaccgcgcaattcaagatttacggaaacccggacgccacccaagctttggcactggaagcaaagctggcgagtcttgcgggcatcaacagcgcgaagcttagcctggcgacctccaggttgacggttacacaccagccaaacattatcggcttgagaggtatcgtagaggctgtcgaagccgagggtcttaatgcgctggtgtccgacaacgatgataacaacgcccaactcgaatcactcgccaagaccagagaaatcaacgagtggaggaaagccttcaagctgtcgctatcatttgccatccccgtattctttatcagcatgatcttgcccatgtgcttctccgccatcgacttcggcagcttgcagattcttcccggtattttccttggcgacttgatttgcttggccctcacgatacccgtgcaactcggcattggaaagcgattctatatttctggttggaaatccatcaagcacggctcaccgacgatggacgtactggtcatcctgggcacatcgtgtgcgttcttcttcagcatcatggctatgcttgtatcgttcttcttcccgccacactcgcgacccaccaccctgttcgacaccagcaccatgctcatcaccttcgtcaccctcggccgctttttggagaaccgtgccaagggccaaacgtccaaggccttgtcgcgcctcatgtctctcgccccttcgatggccaccatctacgctgaccctatcgccgccgaaaaggctgccgagggctgggagaatgcaagcgtgtctggtgagccgaagacccccaatcgagacggccacgctgcggaggagaaggtcatcccgactgagctcctccaggttggtgatgtcgtcatccttcgtccaggtgacaaaattcctgccgatggtatcctcgtccgcggtgagacctacgtcgacgagagcatggttaccggagaagccatgccagtgcagaagaaaaagggcagctacttcattggtggtaccgtcaacggtcacgggcgcgtcgacttcagggtcaccagagctggtcgtgacacccagctcagccagattgtcaagctggtacaggatgctcagacaactcgcgcccccatccagcgtcttgccgacacccttgccgggtactttgtccccgccattctgatgcttggtttcctgacttttgttgtgtggatggtcctcagtcacgctctcacaaaccctcccaagatcttcacccaagaagctagtggcggtaagatcatggtttgcgtcaagttgtgtatttccgtcattgtctttgcttgcccttgcgcccttggtctggcaacgcccacagctgtcatggttggaactggcattggggcagagaacgggattttggtcaagggaggtgccgctttggagactaccaccagaatcacccagattgtccttgacaagacaggtaccatcacctacggaaagatgagcgtggccaagatgaatctgctcccagcttggcaggacagcgaatggagacgtcgtctgtggtggcatactgtcggtctcgccgagatgggcagcgagcatcccgttggaagagctgtacttcgtgctgccaaggccgaacttggattggacgaggaggcgacccttgaaggcagtgttggcgaattcaaggccgccgtcggcagaggcatcaacgccctcgtcgagcccgccgtcagcagcaagcgcacccgctaccgcgttcttctcggcaacgtccgcttccttcgcgagaacaacgtcgatgtccctgtcgaggccgtcgaagcctccgagcagctcaacgtcatggccaataacagtgctaagaacacttccgccggaaccaccaacattttcgtggccatcgacggtgcctacaccggtcacctctgcctctccgacacgatcaaggagggcgccgccgccgcgatcgccgtccttcaccgcatgaagatcaagaccgccattgtcaccggcgaccagcgctctaccgccgtcgcagtggcagccgctgtgggcatatcctccgacaatgttttcgccggcgtctcccccgaccagaagcaggccatcgtccagcagctccaagaccagggcgaggtcgtgggcatggtaggcgacggtatcaacgactcacccgctcttgccaccgccgatgtgggtattgccatggccagcggaactgatgtcgccatggaagcggccgatgtcgtcctcatgcgtccaacggacctcatggacattcccgccgctctgcacctcgcccgctccatcttcaaccgcatcaagctcaacctcgcctgggcgtgtttgtacaacgccatcggtttacccttcgccatgggcgtctttctccccttcggcttccacctgcatcccatggctgccggcgctgccatggcgtgtagcagcgtcagcgttgtcgccagcagtttgctgctgaagttctggacgcgcccgagttacatgactgacccgtcgacgcaaaccaagaggcgcgggttcggaatcgtagacagggtcaagcacgccatccgccgcgtcaggggtaagaggactcaggatcagggatacgtcccgctcgccaatatggcggatcgggaggaggactag

SEQ ID NO: 55658 - protein, 1167 aa, Glomerella lagenarium
MAPPNIKVPPPNDGSRKALLATPTATHMATTTLKVGGMTCGACTSAVESGFKGVEGVGSVSVSLVMERAVIMHNPEHISADQIAEIIEDRGFDAEVLSTDLPSPMFPTEQNLFDAEDASGLLTTTIAIEGMTCGACTSAVEGGFKDVPGVKNFSISLLSERAVIEHDPDLLTAEQIAEIIEDRGFGAEVVDSGSAQQEKPRSSSNPTSTVATTTVAIEGMTCGACTAAVEGGFKEVDGVLRFNISLLAERAVITHDMAVLSAENIAEIIEDRGFGAEILSTASETSPHGGSASTAQFKIYGNPDATQALALEAKLASLAGINSAKLSLATSRLTVTHQPNIIGLRGIVEAVEAEGLNALVSDNDDNNAQLESLAKTREINEWRKAFKLSLSFAIPVFFISMILPMCFSAIDFGSLQILPGIFLGDLICLALTIPVQLGIGKRFYISGWKSIKHGSPTMDVLVILGTSCAFFFSIMAMLVSFFFPPHSRPTTLFDTSTMLITFVTLGRFLENRAKGQTSKALSRLMSLAPSMATIYADPIAAEKAAEGWENASVSGEPKTPNRDGHAAEEKVIPTELLQVGDVVILRPGDKIPADGILVRGETYVDESMVTGEAMPVQKKKGSYFIGGTVNGHGRVDFRVTRAGRDTQLSQIVKLVQDAQTTRAPIQRLADTLAGYFVPAILMLGFLTFVVWMVLSHALTNPPKIFTQEASGGKIMVCVKLCISVIVFACPCALGLATPTAVMVGTGIGAENGILVKGGAALETTTRITQIVLDKTGTITYGKMSVAKMNLLPAWQDSEWRRRLWWHTVGLAEMGSEHPVGRAVLRAAKAELGLDEEATLEGSVGEFKAAVGRGINALVEPAVSSKRTRYRVLLGNVRFLRENNVDVPVEAVEASEQLNVMANNSAKNTSAGTTNIFVAIDGAYTGHLCLSDTIKEGAAAAIAVLHRMKIKTAIVTGDQRSTAVAVAAAVGISSDNVFAGVSPDQKQAIVQQLQDQGEVVGMVGDGINDSPALATADVGIAMASGTDVAMEAADVVLMRPTDLMDIPAALHLARSIFNRIKLNLAWACLYNAIGLPFAMGVFLPFGFHLHPMAAGAAMACSSVSVVASSLLLKFWTRPSYMTDPSTQTKRRGFGIVDRVKHAIRRVRGKRTQDQGYVPLANMADREED

SEQ ID NO: 55659 - DNA, 3789 bp, Ajellomyces capsulata
  CDS (1)..(3789)
atggcagacaatcagccaatcccgaagccggccgccgtggccaagcgcacctctctcccgctgctatctgcacggcccaaaaccaccacaaccgtcctcctcgtcaataatatccactgcgcatcatgtgtggcatatgcaaaggaagtcctcttccatatcccccacatcatcagcgttgatgtgacaatactcgcccacaaggtccacatccgccatggtccggaagtatcaaccacccacctcgtgaacgctctgattaatgctgctttcgaggtctaccatgcaagttctcgcgatgagtcgggagcagaaataagcaacatcgacgtttccctacccgcgagtccgttcatagaacgtcacctgttccgcacaggtgtccagggtgacaagaacgtccaggcaaggaatagaacgcatattgacaactgtgacgcttgtcgtgctgaagagctggctaggacccaagcagatgaaaagaaggacctgtcgagcttcccgcagcttcatgctgttggggacaaaacgccgatgggcaatgacctttccaagaagccggagaaggtagcagacgagtcttggatgattgaacgaagcgatgtccccgatctcgagaagggtcttgctctgactgacgaggaatacaatgcatccattagcatatccgggatgtcgtgttcctcgtgcgctggaactgtgacgagcgcggttgagcaacttagttttgtacaatccgtcaacgttgcttttttgacgcatagtgcgtcactcaccatccggggcccgaaagagaacatcgatgaagtcctctcggtaatcgatggcctcggttacgaaggggaacttcaagacatctctttgaaaagttctccatcgtcgcgccgggacatctacgctgccaccgccagcttaggagggatgacctgcggctcctgcgtaggaaccatcacacgcggaatccaggaactcccttttgttactaatgttgttgtcgaccttctgggctccggtgcaaagtttgaattcgaaggtcgtgagagactcgatgggattaagcaagttgttgagggtcttggatatgaatttgtggttacacagtgtgttccgctcaatcaaaatggaaccggaccggacgacaacggccccttgagacggacggttgaaattcaagttgatgggatgttttgccaccactgccctgaaaagatcttgagtgctttggaagcaatggacggcggtgaatcggtttcagtcgttgaaagcctcacgttcaagaagaatgtcgtgaaaatcacttaccaaccaaaccccccttccatgaccatccggaaaattattgctgttatcgaatctgccaacgacgcttttaaagcaagtatatatcatcctccaaccattgaggaccgttctcgtgcgatgcagctcctcgaaagacgccgcatactcctacgcttgctgttcgttttcatcgcggcaattccaaccttcctgataggcgtcgtctggatgtccctggtaccttcaactaacaggttaagaacatatttctacgaaccgatatgggcaggccaggtaacccgtctggaatgggcgttgttcatcatcaccacacccgtcatgtgctatggtgccgatgttttccatgtccgtgctttcaaggagatcagagcgttgtggagaccccgtagcaaggtaccaatcctacgaagattttaccgctttggaagtatgaacttgctcatttctgcgggtacttctgtggcctattttgcatcaattgcgctgctggctgtcgcagctggaatggaggaacaccaaccccacatgtcaccgtactttgacactgttgttttcctgaccctgttcattcttgccggacggttcttggaagcttacagcaaagcgaaagccggcgatgctctcgcatccctgggtaaacttcgtccatccgaggctcttctggtgcttgattctccgtcgacgaaccctgatgatgcgccgagttccaacctccaacgcgttaacgttgatctgctggaagttggcgatatcgtgaacatcccgcatggcgcatctccgcccgctgacggtattgtgaccagttccgatacttaccggtttgacgagagctcactgaccggggagtccaagccgattacgaaagttgctggagataaggtatactcagggtctgtgaacgttggacaaccagtatacatccgagtatccgatatcggtagcacgtctatgcttgatcaaatcgttgctgttgtccgagagggcctgaccaagcgtgcccctgttgagggggtagcggacatcatgacgagttatttcgtgccggtaatcaccctcatcgctatcctcacattcgtgatctggctcagcttgggactctccggcagtctccctactgactacctcgattcagctcagggcggatgggcattttggtcattaaagttcgctattgccgttttcgtggtcgcctgtccttgcggtttggctttggcagctcccactgctctttttgttggtggcggccttgctgccaaacgagggatccttgttaggggtggtggtgaagcctttcaggaagcgagtaagcttgagaccattgtctttgacaaaacggggacgttgactgaaggagggacgatgcgggtatctgatcatgaaatgcttgtcgcggacgaggaacagcaacaggttgcctgggaattggcgaggattttggaacagagcagcacacatccgattgcgaacgcgattgctgatttctgtgcagagcaatcctccgtctctgtcgtatcctcaacactaactgagataccaggacaaggaatgaaagggatgttctcgctaacggtcaacggtgtagaggttaaatatgaggcagctattggaagtcaacggctgttagactctctcgtcgacgaaaatggaactgatctttatttcctatccaacacactcgctaagtatcagtctgaggcaaagtccaccgccatcctcgctattcgccaaatctacgatgctccctccccattcgtccctgctattgtcttcgcaacttcggacccaattcgacccgaagcggcaagtgtgatatccagcctccaatccaaaaacatcgaagttttcatgtgtagcggagacaaccaagccacagcacacgccgtggcggccacaatcggaatccccgcctcaaatgtcctggccaacgtcctcccttctcaaaaggcagagtacatccgccagatccaagacaacaagctgcacaccagcagtagcagcagcagcagcatcagcaaggaaaagcccgacaagaaacgcatcaccgccttcgtcggagacggcaccaacgactcccccgccctcaccgccgcaaacgtgagtattgccatggcctccggctccgacgtcgccgttaactctgccggcttcatcctcctgaactcagacctgaccaccatcctcgaactgtgcacgctcagcaggcgcgtgttcaaccgcgtcaagtggaattttggctgggctgccatctacaacatgatcctggtgccggttgcggcgggcgtgcttttccccatagtcacgggcaagaaggtgaaggaagatggcacggtggtgaatgagcattggcgactcgatcctgtctgggcgagtttggcgatggcgctgagtagtatttcggtggtggttagtagtttggcgctgaggttcgagtggaggagggcttggccgtggattgtgcggaaggtgcgattttggacgaaggcgtga

SEQ ID NO: 55660 - protein, 1262 aa, Ajellomyces capsulata
MADNQPIPKPAAVAKRTSLPLLSARPKTTTTVLLVNNIHCASCVAYAKEVLFHIPHIISVDVTILAHKVHIRHGPEVSTTHLVNALINAAFEVYHASSRDESGAEISNIDVSLPASPFIERHLFRTGVQGDKNVQARNRTHIDNCDACRAEELARTQADEKKDLSSFPQLHAVGDKTPMGNDLSKKPEKVADESWMIERSDVPDLEKGLALTDEEYNASISISGMSCSSCAGTVTSAVEQLSFVQSVNVAFLTHSASLTIRGPKENIDEVLSVIDGLGYEGELQDISLKSSPSSRRDIYAATASLGGMTCGSCVGTITRGIQELPFVTNVVVDLLGSGAKFEFEGRERLDGIKQVVEGLGYEFVVTQCVPLNQNGTGPDDNGPLRRTVEIQVDGMFCHHCPEKILSALEAMDGGESVSVVESLTFKKNVVKITYQPNPPSMTIRKIIAVIESANDAFKASIYHPPTIEDRSRAMQLLERRRILLRLLFVFIAAIPTFLIGVVWMSLVPSTNRLRTYFYEPIWAGQVTRLEWALFIITTPVMCYGADVFHVRAFKEIRALWRPRSKVPILRRFYRFGSMNLLISAGTSVAYFASIALLAVAAGMEEHQPHMSPYFDTVVFLTLFILAGRFLEAYSKAKAGDALASLGKLRPSEALLVLDSPSTNPDDAPSSNLQRVNVDLLEVGDIVNIPHGASPPADGIVTSSDTYRFDESSLTGESKPITKVAGDKVYSGSVNVGQPVYIRVSDIGSTSMLDQIVAVVREGLTKRAPVEGVADIMTSYFVPVITLIAILTFVIWLSLGLSGSLPTDYLDSAQGGWAFWSLKFAIAVFVVACPCGLALAAPTALFVGGGLAAKRGILVRGGGEAFQEASKLETIVFDKTGTLTEGGTMRVSDHEMLVADEEQQQVAWELARILEQSSTHPIANAIADFCAEQSSVSVVSSTLTEIPGQGMKGMFSLTVNGVEVKYEAAIGSQRLLDSLVDENGTDLYFLSNTLAKYQSEAKSTAILAIRQIYDAPSPFVPAIVFATSDPIRPEAASVISSLQSKNIEVFMCSGDNQATAHAVAATIGIPASNVLANVLPSQKAEYIRQIQDNKLHTSSSSSSSISKEKPDKKRITAFVGDGTNDSPALTAANVSIAMASGSDVAVNSAGFILLNSDLTTILELCTLSRRVFNRVKWNFGWAAIYNMILVPVAAGVLFPIVTGKKVKEDGTVVNEHWRLDPVWASLAMALSSISVVVSSLALRFEWRRAWPWIVRKVRFWTKA

SEQ ID NO: 55661 - DNA, 2970 bp, Medicago truncatula
  CDS (1)..(2970)
atgggtcgtaaaaagtttgatggtgcttgggaatgcataaatggaggattgcacttgcggtgctgtgggaacctgtcacctgagtcacactatccgtcgatgacgacgtatccgaaaggaacgtcgtcgtcgatgggtgaaggctcagaggtggccataactgttgttttctgcgttatgggaatgacatgtgctgcctgtgctggatcagttgagaaagccatcaaacgtttacctggtattcgagaggctgttgttgatgtcttgaatgataaagcccaggttctatatcttcccaccattgttaacgaagagagcatacgtgacgccattgaagatgctggatttgaggccaaatccatggaagatgatagttccaacaacacttcatttcaaatatgtagagtacacatagggggcatgacttgtacttcttgctcctccaacgtgcaatcagttcttcaatcccttcgtggggtgcaaatagcacaagtggccttggcaactgaagaagcagaaattcgttatgatccaaagattataagctacactcaactaatggaaactatatcaaacacaggttttaatcccatattaataagcaaaggggaacacataagcaaaattgaacttaaaattgatggcataaaaaatgaacaatcaatgtatatcattgaacaatctcttaggacacttcaaggtgttgaaaccatagaaacatatttagacattaataaaattgtcttaacttataaaccttatatgactggtccaagaactttcattgaactcattgaatcttcaggatcagggtgttttagagccacaatatttccaaatgatggtggaagaaaagcacataaacaagaggaaattaatagatactttaaattattaatttggagtttggtttttactgttcctgtttttttaacatctatggttcttatgtatatacctggagttaaaaatgttttagaggtcaaaattgtcaatatgttgaatattggattgctcatacggtgggagttttcgacaccggtacagtttgtcataggaagaagattttatgttggagcctataaagctttgagcaaaggttatgcaaacatggatttgttgatagcattaggaacaaatgcagcttatttctattctgtttatgttgttggaagagctacattttcttcccatttcgaaggaagtgatttttttgaaacaagttctatgcttatttcttttattctacttggcaagtatttggaagtgttggctaaagggaaaacatcacaagctattgcgaaactcatggatttaacacctgatacagcaaccttactaactcttgatgatgataagggaaatgttctaggtgaaagagaaattgatagcaggttgatacagaagaatgatgtgatcaaagttgtgccgggcacgaaagtagcatcggatggttttgttgtttggggacaaagtcatgtaaatgagagtatgataactggtgaggcaaagcctgttgctaagatgaagggtgatatggtgattggtggtactgtgaatgaaaatggtgttttgcatgttaaggtaacaaggattggatcagaaactgcactttcacagattgttagacttgttgagtctgctcagatggctaaagctcctgtccagaaatatgctgaccagatttctaaatactttgttcctatagtgattgtgttatctctttcaacatggatatcatggtttgtagctggaaaattgcattcatacccaaaatcatggataccatcttctatgaatagttttgagcttgcacttcagtttggaatttcagtcatggtcatagcttgtccttgtgctctaggcctagccactcctacagcggtcatggttggtaccggagttggtgcaactcaaggtgtgttgatcaaaggtggccaagcattagaaagtgcacacaaggtgaattgcattgtgttcgataagacaggaactctcactattgggaagccagtggttgtaactacaaaactcttcaagaatatgccagttaaagatttctatgaacttgtgaatagtgaacatccaatagcaaagtccattgttgatcatgccaaaaatatcacacaagatgaacaaaataacccatcatggccacaagcaaaagaatttgtgtctattgcaggacatggagtgaaagcaattgttcaaaacaaggaaataatggttggaaataaaaaactgatgttagatcataacatagctatttcagtggaagctgaagaaatactagcagaagctgaaaacatggctcaaacaggaattttggtatcattggatggagaaattgttggagttttggctgtgtctgatccactgaaacctgatgcaaaagaagttatttctattcttaaatccatgaaaataaagagcataatggtgacaggtgataattggggaactgcaaattctatagctagacaagctggtattgaaactgtcatggctgaggctcaacctgagactaaagctattaaagtaaaagaattgcagaattctggatacacagtaggaatggtaggagatggtatcaatgattcaccagcactagtagcagctgatgttggaatggcaattggtgctggaacagacattgctattgaagcagctgacattgttcttatgaagagtaacttagaggatataataattgccattgaccttgcaaagaaaactttctcacgtatacgtctaaattatatttgggctttaggttataatattctagccattcctattgctgctggcatactttttccttctactaaatttaggttaccaccttggattgctggagctgcaatggctgcttcttctatcagtgttgtttgctcttctctcttgttgaagaaatacaagaaaccaaccaagcttaacaacttggagatgaatggtattcaaattgaatga

SEQ ID NO: 55662 - protein, 989 aa, Medicago truncatula
MGRKKFDGAWECINGGLHLRCCGNLSPESHYPSMTTYPKGTSSSMGEGSEVAITVVFCVMGMTCAACAGSVEKAIKRLPGIREAVVDVLNDKAQVLYLPTIVNEESIRDAIEDAGFEAKSMEDDSSNNTSFQICRVHIGGMTCTSCSSNVQSVLQSLRGVQIAQVALATEEAEIRYDPKIISYTQLMETISNTGFNPILISKGEHISKIELKIDGIKNEQSMYIIEQSLRTLQGVETIETYLDINKIVLTYKPYMTGPRTFIELIESSGSGCFRATIFPNDGGRKAHKQEEINRYFKLLIWSLVFTVPVFLTSMVLMYIPGVKNVLEVKIVNMLNIGLLIRWEFSTPVQFVIGRRFYVGAYKALSKGYANMDLLIALGTNAAYFYSVYVVGRATFSSHFEGSDFFETSSMLISFILLGKYLEVLAKGKTSQAIAKLMDLTPDTATLLTLDDDKGNVLGEREIDSRLIQKNDVIKVVPGTKVASDGFVVWGQSHVNESMITGEAKPVAKMKGDMVIGGTVNENGVLHVKVTRIGSETALSQIVRLVESAQMAKAPVQKYADQISKYFVPIVIVLSLSTWISWFVAGKLHSYPKSWIPSSMNSFELALQFGISVMVIACPCALGLATPTAVMVGTGVGATQGVLIKGGQALESAHKVNCIVFDKTGTLTIGKPVVVTTKLFKNMPVKDFYELVNSEHPIAKSIVDHAKNITQDEQNNPSWPQAKEFVSIAGHGVKAIVQNKEIMVGNKKLMLDHNIAISVEAEEILAEAENMAQTGILVSLDGEIVGVLAVSDPLKPDAKEVISILKSMKIKSIMVTGDNWGTANSIARQAGIETVMAEAQPETKAIKVKELQNSGYTVGMVGDGINDSPALVAADVGMAIGAGTDIAIEAADIVLMKSNLEDIIIAIDLAKKTFSRIRLNYIWALGYNILAIPIAAGILFPSTKFRLPPWIAGAAMAASSISVVCSSLLLKKYKKPTKLNNLEMNGIQIE

SEQ ID NO: 55663 - DNA, 2490 bp, Medicago truncatula
  CDS (1)..(2490)
atggttgagaatataaagagaagtaactttgaagtgttgggaatgtgttgtgccacagaagcaacactggttgaaagaattctgaagcctcttcatggagtcaaagctgtctctgtgattgttcctgctcgaacagttactgttgttcatgatgttctccttatttctgagtcaaaaatagctgatgcactgaatacagcaaggcttgaagctagttttagaccacaaggagagaccaataatgaaaagaaatgtccagacatacttacaatggcatgtggcttgttacttgcactttcatttttgaagtatatatatcctcctttgggatggttggctcttggttctgttgccattggattccctaaagttctatttagggctatagcttccattagagctcttactcttaatatcaacattttggttttattggcagtatgtggtactgctgctttacaagattttacagatggtggagtcatcatctttctgttctctattgctcagtggcttgagacaagagcaactcataaggcattggttgcgatgtcctctttaacaaacatggctcctcaaatggccattgttgccgagaccggggaacgtgttgatgtcaatgatgttaagatgaacaccatccttgcagtcaaggctggtgatgctattcctcttgatggaattgttgtggaaggaaagtgtgaagttgatgaaaaaatgttaactggagaatcattccctgttaccaaagaatcagattcacttgtgtgggctggaactattaatatgaatggatatataagtgtaagaactacagtgttggcaaaagacacagtagtggcaagaatgtcaagacttgttgaagaagcttctagcagaaagtcattagcacaaagattcatagataatttcgcaaagtactatattcctgtggttgtgttgatttcagctagcattgcagtggttccagctgcattaagtgttcctgatatggagccatggtttcatctagcacttgtggttttattgagtggatgcccttgtgctcttatcctctccacaccggttgcaatcttttgtgctctcacaaaagctgcaataagtggattactattgaaaggtggagattatcttgaaacactttctagaattaagacggtggcttttgataaaacaggcaccataacaagaggagagttctctgtaacagattttagtgctggagatgacatcaacaatgagaccttattgtactggatttcaagtattgagagtaaatcaagtcatccagtggcaggtgcactagtggattatgcaaggttgcactctatcaaaccagtcccagaaaatgtggagaattttcaaaattttccaggggaaggaatttttggtacgattgatggtagagatatctatataggaaacaagagagttggtgtcagagctatatgtaaaagagataactgcgaagtacaatttcaaagacctgagatttctaccaagaaaaataactgtgaagaaactctagttggagttttcagcctagttgatgcttgtagatcaggtgctttagaggcaatggaagagctaaagttattaggagtcagatcagtcatgctgacaggagatagctctcaggttgctatgtatgttcagagtcagttaaagaatgctatagacatagttcatgcagagcttctaccacatgaaaaggcaaaactcattgagaatttcaagaaagaagggccaatagccatgataggagatggcataaatgatgctcctgcattagctacagcagacatcggcatatcaatgggaatatctggttcagctcttgcaaatgagacaagcaacgcgattctcatgtcaaacgatatccgaaaagtacctgaagcgattcgtttagcaagaaaaacaactagaaagctcgttgagaatgtcattatttcagttggtttcaaatgtgccatacttgcattagcaattgcaggttatccattagtttggctagctgtattgaccgatgttggaacatgtttacttgtgattctcaatagcatgttaattttacaagagaatcacaaatatgaaaaaagagaatcaaccaaaggtagtaaatatggtaaatttttggaagataagaccaaaccattacttaacaagcaaagtaatattgatgaggaaaaaggacttcttagtggtgaagagtgtggtaaagattgttgtaaaaatgctactcattatgtggaaacttcaaaggaaagaaatgatgaatcttgtggagtttcaaagttgagtttactcaatggaaatgatcatggaatgtttatgtttgttgaagttcatgttgtgaagcattgtgttatgatacaagattctagcattcttactttggaatctcaaggccaaaaggacaaatctataactgtttcagagacaagtgggattagtgagtgctgcaagaatagatgctgtaatgacatttaa

SEQ ID NO: 55664 - protein, 829 aa, Medicago truncatula
MVENIKRSNFEVLGMCCATEATLVERILKPLHGVKAVSVIVPARTVTVVHDVLLISESKIADALNTARLEASFRPQGETNNEKKCPDILTMACGLLLALSFLKYIYPPLGWLALGSVAIGFPKVLFRAIASIRALTLNINILVLLAVCGTAALQDFTDGGVIIFLFSIAQWLETRATHKALVAMSSLTNMAPQMAIVAETGERVDVNDVKMNTILAVKAGDAIPLDGIVVEGKCEVDEKMLTGESFPVTKESDSLVWAGTINMNGYISVRTTVLAKDTVVARMSRLVEEASSRKSLAQRFIDNFAKYYIPVVVLISASIAVVPAALSVPDMEPWFHLALVVLLSGCPCALILSTPVAIFCALTKAAISGLLLKGGDYLETLSRIKTVAFDKTGTITRGEFSVTDFSAGDDINNETLLYWISSIESKSSHPVAGALVDYARLHSIKPVPENVENFQNFPGEGIFGTIDGRDIYIGNKRVGVRAICKRDNCEVQFQRPEISTKKNNCEETLVGVFSLVDACRSGALEAMEELKLLGVRSVMLTGDSSQVAMYVQSQLKNAIDIVHAELLPHEKAKLIENFKKEGPIAMIGDGINDAPALATADIGISMGISGSALANETSNAILMSNDIRKVPEAIRLARKTTRKLVENVIISVGFKCAILALAIAGYPLVWLAVLTDVGTCLLVILNSMLILQENHKYEKRESTKGSKYGKFLEDKTKPLLNKQSNIDEEKGLLSGEECGKDCCKNATHYVETSKERNDESCGVSKLSLLNGNDHGMFMFVEVHVVKHCVMIQDSSILTLESQGQKDKSITVSETSGISECCKNRCCNDI

SEQ ID NO: 55665 - DNA, 3417 bp, Aspergillus oryzae
  CDS (1)..(3417)
atggtttgtgaatcggatcctcgtaatacctgctcttctggttgctgcggcgagcaagacaaggggatcaagaccagggatgcatctgttccccacacttctgaccgagggcccaccgagagccgtggttccaccgagaaactacaggaagaagaccctaacaagccgagctgctgcaaagataagccatctccttgttgtgatgtctcttgccttgatcgtatcgccctccgcgaatgccacaaagagcagattctatcgtctaatgaggcatctccaactcccgactcccagctgccaaactcccgatggaaaaccatgcgagcagcaccgtctttcggcgcggaccaggaatcctgctgtgcaccgccaagacgcttctcccttggtaaagaccgtcgctccgccgactcttgctgcgcagggagtatcacgaggcccaagacacaccacagcgcaagtatagagggtagaggagaaagctgctcaagcgggtgttgcggtcctcctaaggctcccacagtggttaagcagtgtccttctactagcaaggggaaggccgccgattctggtagtagttgcagtaaacctgagacacctgaatctactggtgggcatacctccgttacgaatggcgagttcagaaacatcatcacgtattcgaagggttgttgcgataaaccaaatatgttcctggttccaactgccgaacaatgttcgtctcctgaaaagggaaattcttgccggcgggcctgctcgcctagttgccgcagtaagtccaaacaagcctccagtgcctggtctggcgagaagcccgataagccagcctgctcctctccgtgcggtagtaagcctgaagtgccctccaatacttttcctggagcaaagcctgttagacctgaacctggtacccgctcaactggctgctgcggcaagcccgtaacgtccccatgcacaagcaccgaagaaacgcctaccgacttcatcgaggtcatcccgggtaccgctactcctgaactcgaaaaaggatttactggccaggagcatgttgttctgagtatatctggaatgacatgtactggttgcgaaacaaagctcaagcgaactttgggcacacttcagtcggtccagagcctgaaaactagcttgctactctcccgagcagagcttgatctggacgtcagtgctcagtcattcgatgaagtgttgaagtatttggaaaggactaccgagttcaagtatgagcgagccacagatcgtggatttcgcctcgatgttatcgtccccaacgcctctgagttcatgaaacaagcctggccccgtggcgtgaccgagatgaccctcgtggacgatggaataatcggcgtctcttttgatgcgaggataattggagcacgagacctagttgaacatggctggggtagtcctctcagcctggcttcccctcggcctgacccgacgctccaggctggagtcaagcatgtacaccatatgggatatatgactattctgtccattatactaacaggaatcgcctatggctctgcatcgctggcactagcaacgattgtccaaaccgtcattgcgggcccgttctacccaaaagcattgaaagccttgatcttttctaggataattgagatggatctgctcattgtgctgagtacaagcgctgcctacgttttctcagtcgtgtcatttggatatgtcattgcggggcaacgactctccactggtgaattcttcgagaccagcacattgctggttactctgatcatggttggtcgatatttcgccgcactcgctcgtcagaaagccgtcgaatcgatttcacttcggtcactacaggcgcctactgctatcctcacggacgactcggcggccaatgaaaaagagattgatgtcagactgcttcaatatggggacatcttcaaggtcgctccagattctcagattcctaccgatggcacagtcatcggaggctcgtcagaggtcgatgagtcaatgattactggagagtctataccggtagacaaatcccttggatctgccgttgttgcaggatctgtgaatggttctgggatcttgattgtcaagttgacgcgtctccctgtggacaatacaatctctatcatcgcagggatggtagatcaagcaaagctttcaaaagcaaaggtgcaggatatcgcggaccgagtggcgagctattttgtacctgtgatagtcgctctgactatcatcaccttcgtgatatggatcgccgtaggcattgcagttcgaaaacagtccgggtctcgagcaactacggaggccataacgtacgctatcactgtcctgattgtatcttgtccttgcgcaatcggcctggcagtacctatggtaatcgttatagccagcggcgttgctgccgagcgaggcattattttcaagggcgcagacagcatagaactcgcctgcaaagcttcccacgtggtattcgacaagaccggaaccctcacccaaggcaaactgaccgtcgctattgagcacatagacaacgcgagcaataccatgtctctacttctcggtctagttgggagtaacaagcacccaatctccgccgccgttactgcacatctgaaagccaaaggcatatcaccgtctactgtccctgatacaaagctactaaccggcaaaggtgtagagggttttgcaccaggccttattctccgcgcaggaaactcacgatggctcaacctctcgtctgacccgctggtccgatccatacttgaaaaaggctatacagcattctgctttacaatcaacgacaacctcgccgccgtatttggcttagaagactcacttcgccctgatgcccgcgaaatcgtcaccaagctccaggaacgcggtatattcgttcaccttctctcaggtgacgacgacggcgccgtccgctctgtcgcaagacagctcggcatcccagctcaaaacatccgctcccggtgcactccaggcgataaacaagcctacatccaagccctccacaacccactcgaccaaggatctcacaagacgagaccaacaacaatcttcgttggcgacggcacaaacgacgctgtcgccctcgccacctccacaatcggtgtacatatgaaccaagaaaccggcaccgacgtcgccaaatccgctgcagatgtcgtgctcatgctgccgagcctactaagcatcctgacgatgatcaacatcagcaagaaagccgtgtggcggatcaagttcaattttggctggagctttgtgtataatctgtttgcgatcttacttggtgcgggcgcatttgtggacgctaggattccacctgagttcgcggggttgggagagttggttagtgtcttgcctgttgtttttgcggctgttctcttgaggtgggcgagggtttaa

SEQ ID NO: 55666 - protein, 1138 aa, Aspergillus oryzae
MVCESDPRNTCSSGCCGEQDKGIKTRDASVPHTSDRGPTESRGSTEKLQEEDPNKPSCCKDKPSPCCDVSCLDRIALRECHKEQILSSNEASPTPDSQLPNSRWKTMRAAPSFGADQESCCAPPRRFSLGKDRRSADSCCAGSITRPKTHHSASIEGRGESCSSGCCGPPKAPTVVKQCPSTSKGKAADSGSSCSKPETPESTGGHTSVTNGEFRNIITYSKGCCDKPNMFLVPTAEQCSSPEKGNSCRRACSPSCRSKSKQASSAWSGEKPDKPACSSPCGSKPEVPSNTFPGAKPVRPEPGTRSTGCCGKPVTSPCTSTEETPTDFIEVIPGTATPELEKGFTGQEHVVLSISGMTCTGCETKLKRTLGTLQSVQSLKTSLLLSRAELDLDVSAQSFDEVLKYLERTTEFKYERATDRGFRLDVIVPNASEFMKQAWPRGVTEMTLVDDGIIGVSFDARIIGARDLVEHGWGSPLSLASPRPDPTLQAGVKHVHHMGYMTILSIILTGIAYGSASLALATIVQTVIAGPFYPKALKALIFSRIIEMDLLIVLSTSAAYVFSVVSFGYVIAGQRLSTGEFFETSTLLVTLIMVGRYFAALARQKAVESISLRSLQAPTAILTDDSAANEKEIDVRLLQYGDIFKVAPDSQIPTDGTVIGGSSEVDESMITGESIPVDKSLGSAVVAGSVNGSGILIVKLTRLPVDNTISIIAGMVDQAKLSKAKVQDIADRVASYFVPVIVALTIITFVIWIAVGIAVRKQSGSRATTEAITYAITVLIVSCPCAIGLAVPMVIVIASGVAAERGIIFKGADSIELACKASHVVFDKTGTLTQGKLTVAIEHIDNASNTMSLLLGLVGSNKHPISAAVTAHLKAKGISPSTVPDTKLLTGKGVEGFAPGLILRAGNSRWLNLSSDPLVRSILEKGYTAFCFTINDNLAAVFGLEDSLRPDAREIVTKLQERGIFVHLLSGDDDGAVRSVARQLGIPAQNIRSRCTPGDKQAYIQALHNPLDQGSHKTRPTTIFVGDGTNDAVALATSTIGVHMNQETGTDVAKSAADVVLMLPSLLSILTMINISKKAVWRIKFNFGWSFVYNLFAILLGAGAFVDARIPPEFAGLGELVSVLPVVFAAVLLRWARV

SEQ ID NO: 55667 - DNA, 3816 bp, Aspergillus oryzae
  CDS (1)..(3816)
atggatgtccgtaccagtgctttgcagctctatacttctaaactgcccataatgtcgcctatatcagatcacgcgtctcgaaatcctgcggaccaggactcaaggcacttcaagagcactttcttcgtcagtaacgtgcattgttcttcctgcatcgcatatatcacggaagtcctctcagaactatctggcgtatttggtgttgatgtcactattctcactcacgaggtgcgagtctctcatgcggcagagaccagtccttctaccttagccaaggctttgattcaagctgctttcgaggttcatcatgtaacgacttgcgatgacaaaggcatggttgtatctgacatcagcacaacgtcgtggctttccaaagactctgtgccttttgcgacgcaacaggcttcatattctagctcgacaacgcagaacagacaccttgcgaactgtgatgcctgtcggaaagaggaactgcaaggaatatctgaggtgcgaaacctgtcagagacgactcctactcggttaagggatgagaagaatagtcaattattcggtgtcagtgatgaagtatcggacattgcgagtctggcaccccgaaagtctgcggaaaatgccaaatctctgcaaccacttggcgataatggaaagttcaatgcccgtataagcattgagggtatgagctgcgcatcatgtgtcaatacagttacaaacgaagttcagcagcttaacttcgttatggaaatcactgtcaatcttctcagcaatagtgcaacggtcctctataccggtccccagtcgaacatagagaaggtgattgagcatatcgaggacattggctttgaagcctctctcgatgaggtagaacaaatcggcgtgactccgccacagaaccggacttcatcctcgtacgtcgctgaaattgctattggcggcatgacgtgcgggtcgtgtgcagggagtgtcacgcgagggcttgaagaactccccttcgtgacaaaagtttccgtgaatcttttgtcccatagcggtacggtagagttcgatggacacgatcacattgataccattgtggagaaaatcgaagatttaggatacgacgcctctgtcacgagtgtccttccccaggctggtgaaggtcaggatgatggcaagatcgaaagaagaaccgtggcaattcgcgtggaggggatgttctgtcaccattgcccagagaaggtccttaactctttgaaggagctttctaatgttgaaattgatggcacactatctgtgaagaaccctattgttaaagtcacctatactccacgccctccttctctcaccatcagagccatacttcagcgcatcgacgatgttcatgatgctttcaatgccactgtctaccaccctccgagcatagaagaccgatcacgggcaatacagttacacgagaggcgtaggctactgtctcgtttcctcttcgttttgatagtggcaattccaactttcctgattggtatagttttcatgagtctcgtgtcgtcggacaatcagattcgaaagtatttggagcagccaatgtgggctgggagtgtctctcggatggaatggtctcttttcatcatgacaactcctgtcatgttctatggtactgacttgttccacgtgcgagctgcaaaggagatatattccctttggcgccccggaagccgtgtgcctattctgcggaggttttaccgatttggtagcatgaacctattgatttctgctggaactactgtagcctacgtctcttcattggctgtcctcattattgatgctgtcgtgggagcttcatcaatgagcaatagcacgacttacttcgactccgtggtatttcttacgttgtttattctggcgggtcgatttattgaagcatacagcaaagcgagaactggagatgcagttgcatctcttggaaagttgaagccttccgaggctttactcattgtcgataaccgtgctgccgagcaaaatgatgttggagctagttctggcgaagatgagatccacagaatcaatatcgagctgctggacgtcggtgatatcgttagcatacctcatggagcttcaccccctgccgatggtgtagttgtcgacaccaacacttatcagtttgacgaaagctcattgacaggagagtcgcgacctgtcaagaagtccgccggtgatcctgtttacacaggatctgtgaatgtcggtcagcccgtgaagatcaaagtatccgcagttggaggggcatcgatgctggaccaaatcatcgccgtggtgcgtgagggccagagcagacgtgctcccttggaaagggttgcggacttactcacatcccactttgttcccataataacacttatagccgtattgacattcattatctggcttgcgctgggtgcttctggtgccttgccagatgactaccttgatgttgcacatggtggctgggccttctggagcttggaatttgcaatcgcagtgttcgtggttgcttgcccctgtggcctggcgcttgctgctcctacagcgctctttgttgggggaggacttgctgcccgacatggtatactggtcaaaggtggaggggaagctttccaggaagcgagccgccttgacgccattgtattcgataaaaccggtaccctaacggaaggaggaagcttgacagtgtctgaccatgaactgctcattacagactctgaggagttgcaagtagtatggtcccttgcccgaaaactggaagaaagtagcaatcacccgattgctcatgcggtttcagccttctgcagtggcaaggagtcagccagtatactcagttctgatatcgaagagaggcccggacagggaatgaagggcaggttcaccgtgtctctggtggacaagaccgaccaatcgaaaaggacaacccagtacgaagcagcgatcggcaatcaacgtctactccaaagcttaacttcacctaatttcgatgactcccaactttctaaacttctttcaacctaccaaacagagggcaaatccaccgcgatattgtcattgcgtaaagtcggctcagggtcttcaaatgatccctactttaccccagcaatcatcttcgcaatctctgattcaatccgaccggacgccgctcaaataatctcacaacttcaaaagcgcaaggtcgacgtgtacatgtgcacaggggataaccagaccaccgcccacgccgtcgccgacatggtaggcatcccccgatccaacgtcatggccaacatcatgcccgcagggaaagcagaattcgtccgtcaagtccaggacggcgtatacccgccaagaaccgactcagaagccgagagccagagaaacgagcaaggtacacgatcaatcgtagccttcgtcggtgacggcgtaaatgactcgcctgctctcgcagccgcagatgtcagtatcgccatggcatccgggtcagacgtcgccatgaactctgcaagctttatcctcttaaactcggaactcaacactatccttcaactagttgtacttagccgtcgggtattcaaccgcgtcaggatgaacttcggttgggctgttgtttacaacctctgtcttgtaccggttgcagccggggtgttctaccccattgtcaatggtcatgaaatgaaaattatcgggggtgagacagttatggttgataagcactggaggctgagccccgtttgggctgcgttggcgatggctttgagtagtatctccgtggtttgcagcagtcttgctctggggattgaaaagaaaactatcaagagacttcttggtctggacaaatga

SEQ ID NO: 55668 - protein, 1271 aa, Aspergillus oryzae
MDVRTSALQLYTSKLPIMSPISDHASRNPADQDSRHFKSTFFVSNVHCSSCIAYITEVLSELSGVFGVDVTILTHEVRVSHAAETSPSTLAKALIQAAFEVHHVTTCDDKGMVVSDISTTSWLSKDSVPFATQQASYSSSTTQNRHLANCDACRKEELQGISEVRNLSETTPTRLRDEKNSQLFGVSDEVSDIASLAPRKSAENAKSLQPLGDNGKFNARISIEGMSCASCVNTVTNEVQQLNFVMEITVNLLSNSATVLYTGPQSNIEKVIEHIEDIGFEASLDEVEQIGVTPPQNRTSSSYVAEIAIGGMTCGSCAGSVTRGLEELPFVTKVSVNLLSHSGTVEFDGHDHIDTIVEKIEDLGYDASVTSVLPQAGEGQDDGKIERRTVAIRVEGMFCHHCPEKVLNSLKELSNVEIDGTLSVKNPIVKVTYTPRPPSLTIRAILQRIDDVHDAFNATVYHPPSIEDRSRAIQLHERRRLLSRFLFVLIVAIPTFLIGIVFMSLVSSDNQIRKYLEQPMWAGSVSRMEWSLFIMTTPVMFYGTDLFHVRAAKEIYSLWRPGSRVPILRRFYRFGSMNLLISAGTTVAYVSSLAVLIIDAVVGASSMSNSTTYFDSVVFLTLFILAGRFIEAYSKARTGDAVASLGKLKPSEALLIVDNRAAEQNDVGASSGEDEIHRINIELLDVGDIVSIPHGASPPADGVVVDTNTYQFDESSLTGESRPVKKSAGDPVYTGSVNVGQPVKIKVSAVGGASMLDQIIAVVREGQSRRAPLERVADLLTSHFVPIITLIAVLTFIIWLALGASGALPDDYLDVAHGGWAFWSLEFAIAVFVVACPCGLALAAPTALFVGGGLAARHGILVKGGGEAFQEASRLDAIVFDKTGTLTEGGSLTVSDHELLITDSEELQVVWSLARKLEESSNHPIAHAVSAFCSGKESASILSSDIEERPGQGMKGRFTVSLVDKTDQSKRTTQYEAAIGNQRLLQSLTSPNFDDSQLSKLLSTYQTEGKSTAILSLRKVGSGSSNDPYFTPAIIFAISDSIRPDAAQIISQLQKRKVDVYMCTGDNQTTAHAVADMVGIPRSNVMANIMPAGKAEFVRQVQDGVYPPRTDSEAESQRNEQGTRSIVAFVGDGVNDSPALAAADVSIAMASGSDVAMNSASFILLNSELNTILQLVVLSRRVFNRVRMNFGWAVVYNLCLVPVAAGVFYPIVNGHEMKIIGGETVMVDKHWRLSPVWAALAMALSSISVVCSSLALGIEKKTIKRLLGLDK

SEQ ID NO: 55669 - DNA, 3543 bp, Aspergillus oryzae
  CDS (1)..(3543)
atgttaggcgccgaggttgatggctcttccgccgcccgatcgccagcgcatatggcaaccaccacagtaaatgtggagggaatgacgtgcggcgcgtgcacgtccgccgtagagggcgcttttaaaggtgtggatggtgttggcgaagtgtcggtgagcttgatgatgggcagggctgtggtacaccatgatccaaacgtactatcgccggacaaagtcgccgaaataatcgaggatagcggctttgatgcgacgattatctctacagatagcccagcgggcccatcgggtgatacaactacagttaaagagaagggatcaatggtctcaactaccacattagcgattgaagggatgacatgtggtgcctgcacatcagcggtcgaggggggtttgaaggaggtagctggcgtgaaatcggtcaatgtttcattgctctcggagcgggcggttgtagaacacgatgcatctactgttacacccgatcagcttgcagaaatcattgaagaccgtggctttggcgctagggtgctggacaccgctgcgcctcagagcggagcttcgcaggagaccactgaaactacgtcgcgactgatggtcactactgtttctatagacggtatgacatgcggcgcatgcacgtcaagtatcgaaaacattttcagtggtgtggatggcttggtccaattcaatataagcttgctcgccgagcgcgctatcatcactcatgatcccgtggctttaccgtctaagagcatcgtaaatatgattgacgatgctggttttgaagcgaccattctgtcttctgaaccgcaagctcctgtctcgagtgccgtaggccgagtcatactgaaccttcatggcttacgagacgcactctcggcgggtgctctagaggaatctcttcttcagaagccaggtatatcctcagcatcggtagacatccctacctcgcggataacggtattatatgacagttcggtcatcggggttcgctcggttgtggtggcgattgaagctgccggatacaacgccctgcttgcggacacggatgacaccaatgcgcaactggaatccctggccaagacaaaggaggtccaggagtggaagcgctccttcttgttttctgtctcatttgctgtccctgtgtttgtcattaatatgctactgcctatgtaccttcgccctctcgactttggcaaagtacagttaattcctggcctctaccttggagatgttgcttgccttcttctcactatcccagtgcagtttggtgtcgggaaacgattctatacctccagctataaatctctaaaacatcgctcgccgaccatggatgtgctcgtcgtgttgggcacatccgccgcgtttttctacagtgtctttacaatggtgatggccttgattattgcgcctcataagcggcccagcacagtatttgatacgagcacgatgctgataacgttcataacacttggtcgctggttggagaacagagctaaaggacaaacttccgccgcgctctcccggctaatgtcgctggccccgtcgatgacgaccatctacgatgacccaatcgcggcggagaagatggcagaagaatgggaagcctccagaaccggtaacggcgagcagaagtcaacatctgataatgaaaggcctgggccaggacaccaaattatcccaactgaactgattgaggttggtgacattgtcgttcttcgccctggagataaagtttctgcagacggcatcgttattcgaggtgaaagctatgttgatgaaagcatgattactggtgaagctctgccaatccacaaggccaagggtagcgctgtgatcgctgggacagtgaacggcacgagttctgttgacttcaaggtcacacgagcaggcaaagatacacaattgagtcaaatcgtcaagcttgtccaggacgcccaaacaagccgggcacctattcaacgcatggctgataccgttgcaggatacttcgtcccagcaattattagccttggattgatcacgttctttggttggatggtaatgagccacttgttaccgcacccgcccaagattttcctcgcggacgataatggtggtaagctcatggtctgtctgaagttgtgcatatcggtcattgtcttcgcctgtccctgtgctctgggtcttagcaccccgacagcagttatggttggcaccggagttggtgctcagcaaggaattctcgtcaaaggcggtgctattcttgaagctgccacaaagattactcatgtggttttcgacaaaacaggaactttgactactgggaaaatgagcgtggctgaggctaagattgaacgtcactggacttcgaatgaatggcgccgaaaactctggtggctgatcgttggcctcgcagagatgaacagcgagcatcctattggcaaggcaatattctccgcggctaagacagagtccggccatcctgacgaaggtgggctgccgggtagcttgggcgattttgacgcgtgtgttggaaaaggcatatctgctttggtcgagcctgcatccagtgccgagcgcgctcggtaccgcgtcttaattggaaatgccacgtttttgaggtccagagacatttcagtaccggaatccgcccaggctgcggattctgatatggcgacgtcaaaggttcctgctggtattacaaggattcatgtggcaatcgatgaccagtacacgggaacgctcttgctccgagacactgtcaaggtaaccgcggtagcagcggttgcagctttgcaccgtatgggtatctccacatcgctcatcacaggtgatacgcacgctaccgctatatccatcgcgaacgctgttggcatctcgcccgaatctgtccacgcctctgtctctccctccgacaagcaatctataatctcatcactggaagcatcaggcgaacgggttgccatggtcggcgatggaatcaacgattctccagccttggccaccgcatctatcggtatcgcgcttgcttctggtacagacgtcgctatggaggcagccgacattgtcctgatgcgacccgacgatctcctatccgtacccgcaagtctgtcactttctcgagctgtcttcaaccgcatccgaatgaacctcgtatgggcctgcatgtacaacgtcattggtctgcctttcgccatgggcctattcctccccttcggtggatacatgctaccccccatggcggccggcgcagcaatggcagcatcaagcatctcggtcgtggtgagcagccttctccttaaattctggcgccgaccacgctggatggatgccgagaagctcgagaagcaggtcgaaatgggcaatctcagcttccgcggctcccgcaagagttggtgggaagcagccctctccgtcagtggatccagtggtcgtgttggaccgttacgatggatccaaggcacaaggttttggttctttgttactggtaaaccatcgggtcgtttggattcggacgaaggctacgtcccgttgcagaccgttgaacctgccgtctaa

SEQ ID NO: 55670 - protein, 1180 aa, Aspergillus oryzae
MLGAEVDGSSAARSPAHMATTTVNVEGMTCGACTSAVEGAFKGVDGVGEVSVSLMMGRAVVHHDPNVLSPDKVAEIIEDSGFDATIISTDSPAGPSGDTTTVKEKGSMVSTTTLAIEGMTCGACTSAVEGGLKEVAGVKSVNVSLLSERAVVEHDASTVTPDQLAEIIEDRGFGARVLDTAAPQSGASQETTETTSRLMVTTVSIDGMTCGACTSSIENIFSGVDGLVQFNISLLAERAIITHDPVALPSKSIVNMIDDAGFEATILSSEPQAPVSSAVGRVILNLHGLRDALSAGALEESLLQKPGISSASVDIPTSRITVLYDSSVIGVRSVVVAIEAAGYNALLADTDDTNAQLESLAKTKEVQEWKRSFLFSVSFAVPVFVINMLLPMYLRPLDFGKVQLIPGLYLGDVACLLLTIPVQFGVGKRFYTSSYKSLKHRSPTMDVLVVLGTSAAFFYSVFTMVMALIIAPHKRPSTVFDTSTMLITFITLGRWLENRAKGQTSAALSRLMSLAPSMTTIYDDPIAAEKMAEEWEASRTGNGEQKSTSDNERPGPGHQIIPTELIEVGDIVVLRPGDKVSADGIVIRGESYVDESMITGEALPIHKAKGSAVIAGTVNGTSSVDFKVTRAGKDTQLSQIVKLVQDAQTSRAPIQRMADTVAGYFVPAIISLGLITFFGWMVMSHLLPHPPKIFLADDNGGKLMVCLKLCISVIVFACPCALGLSTPTAVMVGTGVGAQQGILVKGGAILEAATKITHVVFDKTGTLTTGKMSVAEAKIERHWTSNEWRRKLWWLIVGLAEMNSEHPIGKAIFSAAKTESGHPDEGGLPGSLGDFDACVGKGISALVEPASSAERARYRVLIGNATFLRSRDISVPESAQAADSDMATSKVPAGITRIHVAIDDQYTGTLLLRDTVKVTAVAAVAALHRMGISTSLITGDTHATAISIANAVGISPESVHASVSPSDKQSIISSLEASGERVAMVGDGINDSPALATASIGIALASGTDVAMEAADIVLMRPDDLLSVPASLSLSRAVFNRIRMNLVWACMYNVIGLPFAMGLFLPFGGYMLPPMAAGAAMAASSISVVVSSLLLKFWRRPRWMDAEKLEKQVEMGNLSFRGSRKSWWEAALSVSGSSGRVGPLRWIQGTRFWFFVTGKPSGRLDSDEGYVPLQTVEPAV

SEQ ID NO: 55671 - DNA, 3570 bp, Aspergillus oryzae
  CDS (1)..(3570)
atggtcacagataatcagccatcgccgcctcaatcgaggctcaccaccatcttggtgaacaatcttcattgtccttcgtgtgtgaccaatgttgaagagactttgtcggctctcacaccctcccccttttccatctcgacctctatcttgtcccatgaaatcaaagtcgtacaccccattaccctcagcagctcccggatcgtacgcgccctcgaagaggttgcctttgaaattgacagtgtcattgcccatgactcggatgaaagcgatattgaagcccagcaaccccgaacccatcgccccgcgtctggaaagcatgatgttcattcccaatccaaaatacatattcaaaagtgcaatgaatgtgctacacagctcgcgtcatcaacatccaatagtagcgatgacgagggagccatgaaggagatcactgcgactgccgcgtccgtcagctctgcagagaacagcctcacatccgtcatggatgaccgacttaccggtagtcgaacacgcattacactatcaatcagtggaatgtcttgcagctcatgtgtcggaaagattacgggtgctttgcagaaccgaccgtggatcctatcggccgatgtcaatcttctgactagcagtgccgttataatgctcatggacaactcacatattgacgaagtgcttgagattatcagaagctcgggctacactgtggaattgatagacacggaagagctgcaacctcaaaagacatcgaagtcgtccggaatggcagatgcttggcgagcttcctatgtcatcggaggcatgacctgcagctcctgcgtgggcaaagtgactgacactctaaaccacctcgattggattaccaaagtggacgtgagcctggtctcgggcagtgcgaccgtggaattccaagggaaagcacacctcgacgagattgcaggaatcatcaagggtctcggttatacagccactcttagtgacctggagagtagggcaccggccgagcaacgtagctccaaacgatcggtgatgatccaggtggacggaatgcactgtgcacattgccctcagcgcattctggatgctctggatgtatactcagaccggctggatgtgaccgaaccgcctagcaaagctcagcacaggctcacggtaaactatcttcccgatgctcccaactttaccatccggcatatcatccgcacaatcgccgatgtggacaagtcattcactgtttctatctaccatccgcctagtctggaggaacgttcgcaggcaatgcatcgtcgacatcagtggcaaattgcgcgccgcctagccttatccgtgctcgttgccataccaacattcatcatcgggatcgtgtacatgtccctagtctcaaaagacaaccccggtcgcgagtacctcgaagaacccatgtgggcgggtcaggtctcacgcattgaatgggcgttgtttatcctagcgactcccgtctacttcttcgccgccgacctgttccaccgccgtatgatcaccgagctcagggccttatggagaccgggcagcaagactccgattttgcggcggctctaccgttttggaagtatggatatgctcatgtcactgggaacgtcgattgcctacttctcgtccatcgctatattggcaatcgatgccacagagccaaggaacggccacaaggcgtccagtgccggaacgtttttcgactcagtggtgttcctaacgatgtttcttttgatcggccgattgctagaggcttatagcaaagctaaggcaggagacgccgtgggtctccttggcaagctgcgccccaaggaagctatcctagttgagaggaatggggagggctcaacgacctctcgcgcggttccagccgatcagctagaattcggggacgtagtgcgtgtagcgaatggtgcctccccgccgtatgacggaactgtagtggaaggggaatctcagtttgacgaatccagtttgaccggagaatctcgaccggtcaccaaatcgattggagatgacgtcttctcaggcactatcaaccaggcacgcccagtctcggtgcgtatcacagggctttctggaaattcaatgttggatcagattattggcgccgttcgtgaaggacaaattcgccgggcacccattgagcgcacagccgaccaaatcactggagtctttgtgccgattattacgctgattgctattctggactggatcatatggctggctcttggcctctcaggccgattgcctgagtcatggatgaatggcaatcccggaggctgggagttctggtcgttgcagttcgctatatcggtgttcgttgtcgcttgcccctgtggaattggccttgctgctccaacagcgctgtttgttggtggtggactcgccgcccaaaatggtattttggtcaagggaggtggcgaagcgttccaggaagctagccaactcgattgtatcgtcttcgacaagacgggtactataactgaggggggtgaaccggctatcactgatcatgaaatagccaacagtgaggatgtcgacaaagtctggggtgcggtcttagatctggaaaagaatagtagtcacccaatcgctaaggcgatggtgtcttttgccaactcccaacaaccaccggccctgaaagctaccactgtggacgagataccaggaaaaggcatgaaaggttctttcttcccacagggccaagatggacctgcgctggaggtcattataggcaatgaagccttgataaaggatcataaggtggcaataagcccgaccaatgatgaaatgttgactacctggaagcgccaggcgaaatcggtcgttctagtcggcaccagaatctgttcgacaccaggaccaacggagcacattccttggaagctctcgttgatgctggcagtatctgaccccattcgacgagaggcgaagggcaccctccaagccttgcgaaatcgaggcgttgcggtctggatgctttccggagacaatccgacgactgctcacgcagtgggagagatggtgggcatccctccagacaacattattgctggtgtgctgcccgagcaaaaggccgaaaaagtacaatatctgcaaaaaactctacagaagccacctcgatcgagttggttcagacggggcaaggagccccagtccggccgcgcgatcgtcgctatggttggtgatggaattaatgactcacctgctttgacggtggctgatgtgggcatcgccatcggatctggctcggatatcgccatctcgtccgccgagtttgtcctggtctcctctggtcttacctctctcctcaccctgatcgacctcagccgcctcgtatttcgacggatcaagttcaactttggctgggctttggtgtataactgtgttgccgttccagtcgccgctggtgtgttctatcccattgtgagcaatggcacccatgtacggctggatcccatctgggccagtcttgcaatggcgttgagcagtgttagcgttatctgcagtagtcttctcatgaggacccgacttccattggttggtttcagagctaagaaataa

SEQ ID NO: 55672 - protein, 1189 aa, Aspergillus oryzae
MVTDNQPSPPQSRLTTILVNNLHCPSCVTNVEETLSALTPSPFSISTSILSHEIKVVHPITLSSSRIVRALEEVAFEIDSVIAHDSDESDIEAQQPRTHRPASGKHDVHSQSKIHIQKCNECATQLASSTSNSSDDEGAMKEITATAASVSSAENSLTSVMDDRLTGSRTRITLSISGMSCSSCVGKITGALQNRPWILSADVNLLTSSAVIMLMDNSHIDEVLEIIRSSGYTVELIDTEELQPQKTSKSSGMADAWRASYVIGGMTCSSCVGKVTDTLNHLDWITKVDVSLVSGSATVEFQGKAHLDEIAGIIKGLGYTATLSDLESRAPAEQRSSKRSVMIQVDGMHCAHCPQRILDALDVYSDRLDVTEPPSKAQHRLTVNYLPDAPNFTIRHIIRTIADVDKSFTVSIYHPPSLEERSQAMHRRHQWQIARRLALSVLVAIPTFIIGIVYMSLVSKDNPGREYLEEPMWAGQVSRIEWALFILATPVYFFAADLFHRRMITELRALWRPGSKTPILRRLYRFGSMDMLMSLGTSIAYFSSIAILAIDATEPRNGHKASSAGTFFDSVVFLTMFLLIGRLLEAYSKAKAGDAVGLLGKLRPKEAILVERNGEGSTTSRAVPADQLEFGDVVRVANGASPPYDGTVVEGESQFDESSLTGESRPVTKSIGDDVFSGTINQARPVSVRITGLSGNSMLDQIIGAVREGQIRRAPIERTADQITGVFVPIITLIAILDWIIWLALGLSGRLPESWMNGNPGGWEFWSLQFAISVFVVACPCGIGLAAPTALFVGGGLAAQNGILVKGGGEAFQEASQLDCIVFDKTGTITEGGEPAITDHEIANSEDVDKVWGAVLDLEKNSSHPIAKAMVSFANSQQPPALKATTVDEIPGKGMKGSFFPQGQDGPALEVIIGNEALIKDHKVAISPTNDEMLTTWKRQAKSVVLVGTRICSTPGPTEHIPWKLSLMLAVSDPIRREAKGTLQALRNRGVAVWMLSGDNPTTAHAVGEMVGIPPDNIIAGVLPEQKAEKVQYLQKTLQKPPRSSWFRRGKEPQSGRAIVAMVGDGINDSPALTVADVGIAIGSGSDIAISSAEFVLVSSGLTSLLTLIDLSRLVFRRIKFNFGWALVYNCVAVPVAAGVFYPIVSNGTHVRLDPIWASLAMALSSVSVICSSLLMRTRLPLVGFRAKK

SEQ ID NO: 55673 - DNA, 2436 bp, Enterococcus faecium
  CDS (1)..(2436): transl_table=11
atgacctgtgcgtcttgtgcgcagacagtagaaaaagcggcaaaaaaagtacgtggggtcacacaggcttccgtgaacctagcaacagagaagttaagtatagagtacgatgaaccaactttttcggtagaaaatctacaaaaagcggtggataattcagggtatgaactgattgcccaagaaggaacgacgcaaacctttgcaattgaagggatgacctgtgcatcctgtgcacagacaattgaaaaagctgtcggaaagttgtcgggcgtagataaagcttcagtcaatttagcgacagaaaaaatgcaagtttcttataacccgtcagcaatttcagtatctgatgtgactggtgctgtatccaatagtggttatgcagccgtattagaaacaactgagactcaagataattcacgagcagagaagcgtgagaaaaaagaaaaaagaatgaagcaactttcaaatcgttttgggatatccattatatttacaatccctttactaattatatccatgggtccaatggtcggtatgcctctaccaaatatcgttgacccaatgataaatgcatttaatttttctcttttacaacttattctgactttgccgataatggtagtaagctgggaatatttccagaagggattcaaaaccttatttaaaggtcacccaaatatggattccctgattgcccttggtaccgcggccgcttttgtatacagtctggcagcgacgatcggggctggcttaggttacgggaacttttcagatttactttactatgaagtgactggagttatcttaactcttcatacgttagggttatttttagaagagcgatcaaaggggcaaatgtcctcagcgattgaaaaattagtcaacttggttcctaaaacagctcgagtgatacgtaatggtgtggaacaagagattactgtggacgaagtcgctttaggagatgttattcgagttcgtccgggagaaagtatgcctgtagatggtgttgttgtcgagggacgcacttcagtcgatgaatcaatgctgacaggagaaagtatccccgtggaaaaggaaagtggagacgaggttattggggctagtatcaataaaaatggttccattgattaccgcgcgactcgagtgggaagtgatacaactctatctcaaatcataaaattagtagaagatgctcaagggtctaaagcacccattgctcgaatggccgatatcattaccagatatttcgtaccgattgttatagcattagccgttttagcagggattgcttggttaattgcaggtcaatctggaatatttattttatccgttatcataacaacccttgtcattgcttgtccatgtgccttaggtttggcgactccaacaagtattatggttggaaccggaaaaggggcagagcatggtgtcttgataaaaagtggtgaggcgttagaaaccactcataatttagacacgattgtatttgataaaacagggacactgacagaaggtaaacctatcgtgacggatattttggtaactcctcttattactaaagaaaatcttttatattatgcagcttctggtgaaacaggttctgaacacccattaggcgaagccatcgtacaaaaatcaaaagaagagaacatgacattagctaaaccagatcattttgaagcgattcctggacacgggattcgagttgaaattgagggcaaagatatgtacattggaaaccgtaaactgatgctagagcaaaagattgatttatcaagcatggaaaaagaatccaatcgtttagcagacgaaggaaaaacaccgatgtatctctctgttgatggagaactagctggaattatcgcagtagctgacacactcaaggaaaatagtatgaaggctgttaaagaacttagaagacgcggtgttgaagtaatcatgattactggagataacaaacgtacagccaaagcgattgctaagcaagtgggtatagacagtgtattaagtgaagtattacctgaagataaagcagaggaagtcaaaaaactacaagaggcaggcaagaaggtagcgatggttggagacggcattaacgatgcacccgcattagctcaagcagatatcggtattgcagttggatcaggtacagacgtggcgattgaatcggctgatattgtccttatgcgtaatgatttaaccgctgtattgactgcgattgatttaagtcatgcaacgctacgaaacattaaacaaaacttgttctgggcttttgcttacaaccttgtaggtattccagtcgcgatgggtctcttgtatatttttggcggaccattgatgaatccaatgtttgcggcagtcgccatgagtttcagctccgtatcggtcttgctcaatgctttacggttaagacgattcaaaccagcagttgtttag

SEQ ID NO: 55674 - protein, 811 aa, Enterococcus faecium
MTCASCAQTVEKAAKKVRGVTQASVNLATEKLSIEYDEPTFSVENLQKAVDNSGYELIAQEGTTQTFAIEGMTCASCAQTIEKAVGKLSGVDKASVNLATEKMQVSYNPSAISVSDVTGAVSNSGYAAVLETTETQDNSRAEKREKKEKRMKQLSNRFGISIIFTIPLLIISMGPMVGMPLPNIVDPMINAFNFSLLQLILTLPIMVVSWEYFQKGFKTLFKGHPNMDSLIALGTAAAFVYSLAATIGAGLGYGNFSDLLYYEVTGVILTLHTLGLFLEERSKGQMSSAIEKLVNLVPKTARVIRNGVEQEITVDEVALGDVIRVRPGESMPVDGVVVEGRTSVDESMLTGESIPVEKESGDEVIGASINKNGSIDYRATRVGSDTTLSQIIKLVEDAQGSKAPIARMADIITRYFVPIVIALAVLAGIAWLIAGQSGIFILSVIITTLVIACPCALGLATPTSIMVGTGKGAEHGVLIKSGEALETTHNLDTIVFDKTGTLTEGKPIVTDILVTPLITKENLLYYAASGETGSEHPLGEAIVQKSKEENMTLAKPDHFEAIPGHGIRVEIEGKDMYIGNRKLMLEQKIDLSSMEKESNRLADEGKTPMYLSVDGELAGIIAVADTLKENSMKAVKELRRRGVEVIMITGDNKRTAKAIAKQVGIDSVLSEVLPEDKAEEVKKLQEAGKKVAMVGDGINDAPALAQADIGIAVGSGTDVAIESADIVLMRNDLTAVLTAIDLSHATLRNIKQNLFWAFAYNLVGIPVAMGLLYIFGGPLMNPMFAAVAMSFSSVSVLLNALRLRRFKPAVV

SEQ ID NO: 55675 - DNA, 2289 bp, Streptomyces hygroscopicus
  CDS (1)..(2289): transl_table=11
atggccgacgaaccgacggccttggccgccatgaccgacctctccatcggcggcatgacctgcgcggcctgtgtgaagcgtgtcgagaagaagctggccaggctggacggggtcacggccaccgtgaacctcgccaccggccgggcccgggtgaaccacccgcccgaggtcggcccggaccagctcatcgccaccgtcgagcaggccggctacaccgccgcgctgcccgagccgcccaggaaggaacggagcgaggacagggacgcggcgcaggacgcccggcgggagcgcgaccggctggtggtcacggcgttgctcgcggtcccggtgctggtcgtgtcgatggttcccggtctccagttccgcaactggcagtggctgtgcttcgtgctcgccgcccccgtcgtcgtctggggagcctggcccttccacctgcgggcggcgcgcggcctgcgccactcggcggcgaccatggacactctggtgtcgctgggtgtcgtggcctccttcgcctggtcctcctacgcgctgttcttcggcggggccggcgaacccgggatgcggatgcccttcagcctggtgcccaccgcctcggacggcgtggcccatgtctatctggaagccgccgtcggcgtaccgctgttcgtcctcgccggccgcttcctggaaacgcgggcccggctggggaccggcgcggcactgcgcgccctggcccggctggccggcaaggaggtatcggtacgcgacggcgacggcgagcgcctggtcccgatcgaggaactgcgggtcggccaggtcttcgtcgcccggcccggcgagcgcctggccaccgatggcacggtggtggagggcagctcggccgtcgatctgtccctggtcaccggggagagcgagccggtggaagtcggccccggcacgcccgtgaccggcggtgccgtcaacgcggggggcctgctcctggtacgggccaccgcggtcggcgccgatacccaactgtcccggatcacccggctggtgaccgaggcccaggcgggcaaggcacgggcgcagcggctcgccgacaaggccgcgggcgtcttcgtcccggtcgtgctcaccctggccgtcaccgtcctcggattctggctcggggccggtgccgagccacaggccgcgatcaccgcgagcgtggccgtcctggtcgtggcgtgcccctgcgcgctgggcctggcgacccccaccgcgctgatggcggcgaccggccggggcgcccaactgggcgtcctggtcagcggaccgcaggcgctggaggggctgcggcacctggacgccgtcgtactggacaagaccggcaccctcacttccgggcagatgagtgtcgcccgggtcaccgccgtaccgggcgggctcggcgaggaggaactggtccggctggcgggcgcggtcgaacagggatcggaacacccgctggggcgtgccatcaccgcccatgcccggcgcaccgttcccggaaagtccctcccggccgtggccgacttcgtcgcgctgccgggcaagggcgtgcgcgggcgggtggcggaccggctggtcgaagtcctggccccggacgacgcgttgcccccggtattggctcaggcgctgtcggcctccgagaccgccgcccgtacaccggtcgtggtccgcgtcgacggcgagaccgaggcactgatcgaggtcggtgatgtgctgcgcccgggaagctaccgggccgtggagcggctccgccgcctgggcgtgcgaccggtgctcgccaccggcgaccgcgaggcgcccgcccgcgccgtcgccaccgacctccgcatcgaggaggtgcacgcccggtgcaccccggaggacaaggccgccctcgtccgggagctgcgggagcagggctaccgggtcgccgtcgtcggtgacggggtcaacgacgcggccgccctggccggcgccgacctcggcatcgccatgggcacgggcacggatgtggcgatcggggcggccgatgtgaccctggtacgcggtgacatcgagaccctggcggacgcggtccgcctcgcccgcagtgcgctcgccacgatccgcgtcaatctgctctgggcgttcggctacaacgccgtgaccgtaccgctggccatggtcggcctgctcaaccccatgctcgcggcggccgcgatgtcggtcagctcgctgctggtggtcggcaacagcctgcggctacgcgcctggcagccgtcgccggccggccaccgcccttcccggcccgccgcacctgccgcgcggaagccactgtga

SEQ ID NO: 55676 - protein, 762 aa, Streptomyces hygroscopicus
MADEPTALAAMTDLSIGGMTCAACVKRVEKKLARLDGVTATVNLATGRARVNHPPEVGPDQLIATVEQAGYTAALPEPPRKERSEDRDAAQDARRERDRLVVTALLAVPVLVVSMVPGLQFRNWQWLCFVLAAPVVVWGAWPFHLRAARGLRHSAATMDTLVSLGVVASFAWSSYALFFGGAGEPGMRMPFSLVPTASDGVAHVYLEAAVGVPLFVLAGRFLETRARLGTGAALRALARLAGKEVSVRDGDGERLVPIEELRVGQVFVARPGERLATDGTVVEGSSAVDLSLVTGESEPVEVGPGTPVTGGAVNAGGLLLVRATAVGADTQLSRITRLVTEAQAGKARAQRLADKAAGVFVPVVLTLAVTVLGFWLGAGAEPQAAITASVAVLVVACPCALGLATPTALMAATGRGAQLGVLVSGPQALEGLRHLDAVVLDKTGTLTSGQMSVARVTAVPGGLGEEELVRLAGAVEQGSEHPLGRAITAHARRTVPGKSLPAVADFVALPGKGVRGRVADRLVEVLAPDDALPPVLAQALSASETAARTPVVVRVDGETEALIEVGDVLRPGSYRAVERLRRLGVRPVLATGDREAPARAVATDLRIEEVHARCTPEDKAALVRELREQGYRVAVVGDGVNDAAALAGADLGIAMGTGTDVAIGAADVTLVRGDIETLADAVRLARSALATIRVNLLWAFGYNAVTVPLAMVGLLNPMLAAAAMSVSSLLVVGNSLRLRAWQPSPAGHRPSRPAAPAARKPL

SEQ ID NO: 55677 - DNA, 2166 bp, Escherichia coli
  CDS (1)..(2166): transl_table=11
gtgattgcttaccacatcaagaagaggagaagacaccccatgagagatgaacatgaacatcaacacgaccatgaacatcaccaacatcaagaccatacagcgatgtctggtcacaatatgcatcacgaacaccatgaaatggcgatgacccatgatgaccatgacgcatcacacacgatgcgccatgaccatgcagccatggcgcatcatcatatgcacatgtcagatgatcctggcatggcgcatatggatatgaccgatatgggccgccgcttttggtggtctttggcgttgatggtacccattattatcattacaccactgatgggcatgactttccccttcaccttgcaattcccaggtgatacttgggtcacggctattttagccacgatcttatatattgtcggcacaaagcccttttttgttggggctaaagccgagttaaaagctaaaagaccagcaatgatgagtttggtgagtctcagtctgctcgtgacattttggtactcgatttatgccttagtggtcaacactttttggccaacggcccatgtaatggactttttctgggaatttgcaaccctgaccgtcattatgttgttgggtcaccgcattgaaacggcggctacgatggaagctggtgatgccactgccaagttgcgcgccctattgcccaacaccgcacacgtgcagcacggggatcactttatggacatgccggtttcggcattgaagccagacatggtcgtgcaagtcttagccggtgaagctttccctgccgacggggttattttatcgggcgaaagtcaagtcgatgaatctctcatgactggtgaaagccgtttaattgataaaaagcctggcgtctcagttgttggtggcaccatcaacggtaacggtaccctgttagtgaaagtgacccatgttggcgcccaatcatttattggtaagctccagtcaacattagccgcctcacaaagtgccaagtcacgtgttgaaacgattgctgatcaagtggccagttatctcttttgggtcgccctcttaattgctggtctaagcttaatgatttggacacccacacacggtttgggctttgccattaatattgccgtgactgtattagtcattgcctgcccacacgcgcttggcttagcggtgccactcgttattcaacggactaaagccattgccgccacgcaagggattttaattaagaaccacaaagcactgagttcagctaaccacttgacttatgtcttgatggataaaactggtacgttaaccaccggtcaattcaaagttatgcaagttgtgaccgataactttgatcaaaaagaagccttgggcatcatggcagcgcttgatgcccaatcaacgcatccactagcccaagggattgtcagctatgctaagcaacaacaagcaccagtattatcagccactgatgttgaaaacatggcaggctacggtattgctgggatggtgaatgacaaacattacctactcgtttcagaacggtatttgaaggatcatcatatccattacacgccgttggttgctgatggcacaatttattatttgctccaacatgatcacgtcgtggcggccgtcgcccaaggtgatgaaattaaggccactacgccaacatttattaactatctgaaggcacaacatctcattccaattctggtgaccggtgataatgcccaagtggcccaagctgttgcggatcaactgggtattaccgaaatccacgcccaagtatcaccacaagaaaaaattgcccttgtcaaagattatcaaaaacaaggtcaggttatgatgattggtgatgggattaacgacgcgccggcgttagcccaagcggatctgtcagttgccattggcgctggaacacaagtggcgcaagcagcggcggacaccgtcttaattgctaatcaactcccaactattattgattttcttaagcttgctaagcgcgcagatcgcaagcaaattgaaaacctttggtggggggctggttataacatcatcgccttaccactggctgctggggcactggcaacctttggtatcatgttaaaccctatgatcggtgcgattttaatgtcgctatcaacggttattgtcgctttaaacgcgatgacgcgcaaagcttaa

SEQ ID NO: 55678 - protein, 721 aa, Escherichia coli
MIAYHIKKRRRHPMRDEHEHQHDHEHHQHQDHTAMSGHNMHHEHHEMAMTHDDHDASHTMRHDHAAMAHHHMHMSDDPGMAHMDMTDMGRRFWWSLALMVPIIIITPLMGMTFPFTLQFPGDTWVTAILATILYIVGTKPFFVGAKAELKAKRPAMMSLVSLSLLVTFWYSIYALVVNTFWPTAHVMDFFWEFATLTVIMLLGHRIETAATMEAGDATAKLRALLPNTAHVQHGDHFMDMPVSALKPDMVVQVLAGEAFPADGVILSGESQVDESLMTGESRLIDKKPGVSVVGGTINGNGTLLVKVTHVGAQSFIGKLQSTLAASQSAKSRVETIADQVASYLFWVALLIAGLSLMIWTPTHGLGFAINIAVTVLVIACPHALGLAVPLVIQRTKAIAATQGILIKNHKALSSANHLTYVLMDKTGTLTTGQFKVMQVVTDNFDQKEALGIMAALDAQSTHPLAQGIVSYAKQQQAPVLSATDVENMAGYGIAGMVNDKHYLLVSERYLKDHHIHYTPLVADGTIYYLLQHDHVVAAVAQGDEIKATTPTFINYLKAQHLIPILVTGDNAQVAQAVADQLGITEIHAQVSPQEKIALVKDYQKQGQVMMIGDGINDAPALAQADLSVAIGAGTQVAQAAADTVLIANQLPTIIDFLKLAKRADRKQIENLWWGAGYNIIALPLAAGALATFGIMLNPMIGAILMSLSTVIVALNAMTRKA

SEQ ID NO: 55679 - DNA, 2712 bp, Serratia marcescens
  CDS (1)..(2712): transl_table=11
atgtcacacaccactatgctggcattgcaggggctgtcctgcatgaactgcgcgcagcgggtgaaaaaagccctggaaagccgcagcgatgtcgaacaggcggaggttaacgtccattacgccaaagtgaccggcgacgcaccggacagcgcgctgatcgacagcgtgatcgccgccggttatcaggccgaagtcgcgccgcacgccgataccgaactgcagctgagcggcctgagctgcatgcactgcgtcggcaccacccgcaaggcgctggaggcggtgccgggcgtattcgccgccgacgtcgctatcgacagcgcgaaagtgtatggcgatgccgatccgcaaacgctgatcgccgcggtggaagatgccggttatcacgccagcgtagcgggcgccgccgccccaaaaactgagccgttgactgacgcaacaccttcgttgccggacgttcagccagcggcgcaaccttcccttccggcaaccgacagcgcggacgacagcgtacagctgctgctcagcggcatgacctgcgccagctgcgtcaataaagtgcagttggcgctgcaaagcgtacccggcgtagagcacgcgcgcgtcaacctggcggaacgcagcgcgctggtgaccggcgccgccgatgcgcaagcgctggtggcggcggtggaaaaagccggctacggcgccgagatgattcaggacgagaccgaacgccgcgagcgccagcagcagaccgcacgcgccaacatgaagcgctttagctggcaggcggcgctcggtctggcgttgggtatcccgctgatggcctgggggctgttcggcggcagcatgacgctgacgccggaaactcagcgcccctggctgctggtcggcgtcatcaccctggcggtgatggtgttcgccggcgggcacttctaccgcaacgcctggcgcgcgctgatgaacggcagcgctaccatggacaccctggtggcgctcggcaccggcgccgcctggctttattcgatcgccgtcaacatttggcccgatttcttcccgatggcggcgcgccacctctattacgaggccagcgcgatgatcatcggtttgatcaacctcggccatgcgctggagcaacgcgcccgtcagcgctcttcacaggcgctggagcggctgctggatctgacgccgcccaccgcgcgcctggtgaccgacgacggcgagcgcgatatcccgctggcggaggtgcagctcggcatgacgctgcggctgaccaccggcgatcgcgtgccggtcgacggtgaaatcgagcagggcgaagtctggctcgatgaagcgatgctgaccggcgaagcggtgccgcagcagaaaggccccggcgatacggtgcatgccgggacggtggtcgacgacggcagcgtgctgttccgcgccgccgccatcggcagccaaaccacgctggcgcgcatcatcaaactggtgcgtcaggcgcagagcagtaaaccggcgatcggccaactggccgaccgcgtctcggcggtgttcgtgccggcggtggtggcgatcgcgctgttcagcgcggcgatgtggtacttcttcggcccgcagccgcagctggtctatacgctggtgatcgccaccacggtgctgatcatcgcctgcccgtgcgcattgggcctggcaacgccgatgtcgatcatctccggcgtcggccgcgcggcggagttcggcgtgctggtgcgcgacgccgacgccctgcagcaggccagccagctggacaccctggtgttcgacaaaaccggcaccctgaccgaagggaaaccgcaggtggtggagatcctcaccttcaatcaggtcagcgaacagcaggcgatcggctgggccgccgcgctggaacaaggctccaaccacccgctggcgcgcgccatcatggaacgcgccgccgggcaaacgctgccgcaggtagcgcagttccgcaccctgcgcggcgccggcgtcagcggggagatcgacggcgttcaggtgctgctgggcaacgccgcgctgctggagcagcatcaggtcgcgaccgccgaactggaagcgccgatgcgcgcccaggccgaacgcggcgtgacgccggtgcttctggccgtggacggtaaaccggccgcgctgttcgccattcgcgatccgctgcacgaggacagcgtcgcggcgctgcagcgcctgcaccaacaggggtatcagttggtgatgctgaccggcgacaacccggtaaccgccaacgccatcgccaaagaggccggtatcgatcgggtgattgccggcgtgctgccggacggcaaagcggcggcgatcaagcagctgcaggcgcagggccagcgcgtggcgatggtcggcgacggcatcaacgacgccccggcgctggcgcaggccgacgtgggcatcgcgatgggcggcggcagcgacatcgccatcgagaccgccgccatcaccctgatgcgccacagcctgcacggcgtggcggatgcggtggaactgtcgaaggccacgctgcgcaacatgaagcagaacctgttcggcgcctttatctacaatacgctgggcatcccgatcgccgccggcgtgctctaccctctgaccggcacgctgctcagcccggtggtggcgggcgcggcgatggcgctgtcgtccattaccgtggtcagcaacgccaaccggctgctgcgttttaaacccaggaaatga

SEQ ID NO: 55680 - protein, 903 aa, Serratia marcescens
MSHTTMLALQGLSCMNCAQRVKKALESRSDVEQAEVNVHYAKVTGDAPDSALIDSVIAAGYQAEVAPHADTELQLSGLSCMHCVGTTRKALEAVPGVFAADVAIDSAKVYGDADPQTLIAAVEDAGYHASVAGAAAPKTEPLTDATPSLPDVQPAAQPSLPATDSADDSVQLLLSGMTCASCVNKVQLALQSVPGVEHARVNLAERSALVTGAADAQALVAAVEKAGYGAEMIQDETERRERQQQTARANMKRFSWQAALGLALGIPLMAWGLFGGSMTLTPETQRPWLLVGVITLAVMVFAGGHFYRNAWRALMNGSATMDTLVALGTGAAWLYSIAVNIWPDFFPMAARHLYYEASAMIIGLINLGHALEQRARQRSSQALERLLDLTPPTARLVTDDGERDIPLAEVQLGMTLRLTTGDRVPVDGEIEQGEVWLDEAMLTGEAVPQQKGPGDTVHAGTVVDDGSVLFRAAAIGSQTTLARIIKLVRQAQSSKPAIGQLADRVSAVFVPAVVAIALFSAAMWYFFGPQPQLVYTLVIATTVLIIACPCALGLATPMSIISGVGRAAEFGVLVRDADALQQASQLDTLVFDKTGTLTEGKPQVVEILTFNQVSEQQAIGWAAALEQGSNHPLARAIMERAAGQTLPQVAQFRTLRGAGVSGEIDGVQVLLGNAALLEQHQVATAELEAPMRAQAERGVTPVLLAVDGKPAALFAIRDPLHEDSVAALQRLHQQGYQLVMLTGDNPVTANAIAKEAGIDRVIAGVLPDGKAAAIKQLQAQGQRVAMVGDGINDAPALAQADVGIAMGGGSDIAIETAAITLMRHSLHGVADAVELSKATLRNMKQNLFGAFIYNTLGIPIAAGVLYPLTGTLLSPVVAGAAMALSSITVVSNANRLLRFKPRK

SEQ ID NO: 55681 - DNA, 3039 bp, Oryza sativa subsp
  CDS (1)..(3039)
atggcccatctccagctcacgccgctcgccgccggcggcggccgcggcggcgccgacgagatggaggaggtcgcgctgctcggccccgaatcctacgacgaggaggcggcggcggcgccggggccggaggaggaggaggggatgcggcgggtgcaggtgcgggtcacgggcatgacgtgctccgcctgcaccgccgccgtcgaggccgccgtctccgcccgccgtggcgtgggcggggtcgccgtctcgctcctccagagccgcgcccgcgtcgtcttcgaccccgcgctcgccaaggaagaagacatcatagaagcaatagaagatgctggattcgaggcagaactactcccggactctactgtttctcagcccaagctgcagaacactttatctggacaatttaggataggggggatgacatgcgctgcatgtgtgaattctgttgagggtatcttgaagaaattgcctggtgttaaaagagctgttgttgcattagcgacctcattaggggaagttgaatacgatccttctgtcatcagcaaagatgaaattgttcaggctattgaggatgctggttttgaagctgcactgttacaaagtagtgaacaagacaaggttttgctaggcttaatgggattgcatactgaggtagatgtagatatattgcatgatatcctaaaaaaaatggaaggcttgcgtcagttcaacgtaaatttggtactctcggaagctgaaattgtatttgatccagaagttgttggtttgaggtcaattgtggataccatcgagatggaaagcagtggcagactgaaagcccatgtacagaatccttacatacgggctgcttcaaatgatgcacaggaggcctccaaaatgcttcatcttctttgctctagcttattcctaagccatactgactctcctctggttcccttacaacagattcctgtattttttattcgcatggtatgccctcgcatacacttcactcgttccctcctactcatgcacttgggaccattttatataggagacttgttgaagtggatactggtgagtatagtacagtttggtgttggcaaacgattctatgttgcagcctatagggccctgagacatggctctacaaatatggatgtactagttgttcttggcaccactgcatcatacgtctactctgtatgtgcgcttctttatggtgcattcactggatttcatcccccgaaatattttgagacaagtgccatgataatcacatttgtgctatttgggaaatatcttgaggtgcttgctaaaggcagaacatcagacgctattaagaagcttgtagagctggtccctgctacagcacttttgcttctgaaagacaaagaaggaaagtatgctgcagagaaggagattgatgcatccttaatccaacctggagatgtcttgaaagtgctcccaggttccaaggtacctgctgatggtactgttgtttggggtacaagtcatgttgatgagagtatggtaactggtgaatctgcacctatctccaaggaagtatccagtatagtaattggaggcacaatgaatttacatggaatcctccatatacaagcaactaaagtaggatcagggacagtcttgagccagataatctctcttgttgaaactgcccagatgtctaaggctcctattcagaagttcgctgattatgtggctggcatttttgttccaatagttgtcaccttgtccttggttacgttcattgcatggtttctttgcggatcgttgggagcatacccaaattcatgggttgatgaaactagcaattgctttgtcttctctctcatgttctccatctctgttgtggtgatagcctgcccatgtgctcttggtctggcaacgccaactgctgtcatggtagcaactggagttggggctaatcatggggtacttgtaaagggtggagatgcactggagagggctcagaatgtgaaatatgttatatttgataaaactgggacactgacacaaggaaaggctaccgtaacatcgacgaaggtattctcaggaattgatcttggagacttccttactttggtagcatctgcagaggcaagcagtgaacatccacttgcaaaagctatattggattacgcatttcatttccatttctttggcaaactcccctcatcaaaagatgacatcaagaaaagaaaacaacagatattatcccagtggcttctggaagtagcagaattttctgccttgcctggcaaaggggttcagtgtttgatcaatgggaaaaaaatcttggtgggaaatcgtactttgataactgaaaatgggataaatattcctgaagaagctgaaagtttcttggtagacctcgaactgaacgcgaagacaggagttcttgtagcatatgacagcgaactcattggctcaattggaatgactgatcccttgaaaagggaggctgttgtagttgttgaaggcctaaaaaagatgggcatctatccagtaatggttacaggggacaactggaggactgcacaagcagttgcaaaggaggttggcattgaggatgttagagctgaggttatgcctgcgggaaaagctgatgtcgtacgttctctccaaaaggatgggagtgtcgttgcaatggttggggatggcatcaatgactccccagccctagcagcagctgacgtcggaatggccattggtgcaggaacagacattgcaattgaagcagcggactatgtgctggtgcgaaacaaccttgaagatgtcatcacagcaattgacctctcaaggaagacgttcagccgaatccgatggaactacttctttgccatggcgtacaacatcatcgctatcccggttgctgctggagcactcttcccattcaccggcctccaaatgccaccttggctggctggtgcttgcatggcgttctcatctgttagtgtagtatgttcctctctgtggttgaggagatacagaaaaccaaggctcacaaccctgttacaaataactgtagagtga

SEQ ID NO: 55682 - protein, 1012 aa, Oryza sativa subsp
MAHLQLTPLAAGGGRGGADEMEEVALLGPESYDEEAAAAPGPEEEEGMRRVQVRVTGMTCSACTAAVEAAVSARRGVGGVAVSLLQSRARVVFDPALAKEEDIIEAIEDAGFEAELLPDSTVSQPKLQNTLSGQFRIGGMTCAACVNSVEGILKKLPGVKRAVVALATSLGEVEYDPSVISKDEIVQAIEDAGFEAALLQSSEQDKVLLGLMGLHTEVDVDILHDILKKMEGLRQFNVNLVLSEAEIVFDPEVVGLRSIVDTIEMESSGRLKAHVQNPYIRAASNDAQEASKMLHLLCSSLFLSHTDSPLVPLQQIPVFFIRMVCPRIHFTRSLLLMHLGPFYIGDLLKWILVSIVQFGVGKRFYVAAYRALRHGSTNMDVLVVLGTTASYVYSVCALLYGAFTGFHPPKYFETSAMIITFVLFGKYLEVLAKGRTSDAIKKLVELVPATALLLLKDKEGKYAAEKEIDASLIQPGDVLKVLPGSKVPADGTVVWGTSHVDESMVTGESAPISKEVSSIVIGGTMNLHGILHIQATKVGSGTVLSQIISLVETAQMSKAPIQKFADYVAGIFVPIVVTLSLVTFIAWFLCGSLGAYPNSWVDETSNCFVFSLMFSISVVVIACPCALGLATPTAVMVATGVGANHGVLVKGGDALERAQNVKYVIFDKTGTLTQGKATVTSTKVFSGIDLGDFLTLVASAEASSEHPLAKAILDYAFHFHFFGKLPSSKDDIKKRKQQILSQWLLEVAEFSALPGKGVQCLINGKKILVGNRTLITENGINIPEEAESFLVDLELNAKTGVLVAYDSELIGSIGMTDPLKREAVVVVEGLKKMGIYPVMVTGDNWRTAQAVAKEVGIEDVRAEVMPAGKADVVRSLQKDGSVVAMVGDGINDSPALAAADVGMAIGAGTDIAIEAADYVLVRNNLEDVITAIDLSRKTFSRIRWNYFFAMAYNIIAIPVAAGALFPFTGLQMPPWLAGACMAFSSVSVVCSSLWLRRYRKPRLTTLLQITVE

SEQ ID NO: 55683 - DNA, 3765 bp, Drosophila melanogaster
  CDS (1)..(3765)
atgccaagtgacgagagagtagaagcgacgatgtccacggtgcgcctgcccattgtgggcatgacttgccagtcgtgtgtgcgcaatatcacagagcacattggccagaaatcgggaatccttggcgtgcgcgtcattctcgaggagaatgcgggctatttcgactacgatccccgacagacggatcccgcccggatagccagcgatatcgacgacatgggcttcgagtgcagctatccaggggatgcagcagatcctcccgaaactcccgccagcgcatggaccaacatacgggtggtgggcatgacctgccagtcgtgcgtgcgcaacatcgaaggcaatatcggcaccaagccgggcatccattccattgaggtgcaactggcggccaagaatgcccgcgttcagtacgatcccgcccagtatgatcccgcccagatagccgagctcatcgatgacatgggttttgaggctagtgtgcaggaacctcgatcgccatcccaatcgccgtcgcccgcccccacctcatcacccaaaaagagggcaactcctactcctccacctccttcatatgctcaaaatggttcggcagtggccatacccgtcgaacaggagctactgaccaaatgctttctgcacatccgaggcatgacgtgcgccagctgtgtggccgccatcgagaagcactgcaagaagatctacggcctggacagcatcctggtagccctgctggccgccaaggcggaggtcaagttcaatgccaatgttgtgacggccgagaatatagcgaaatcaatcacggagctgggcttccccaccgaactcatcgatgagccggacaacggcgaggcggaggtggagttggagattatgggcatgacttgcgcctcctgcgtcaacaagatcgagagtcatgtgcttaaaataaggggcgtgaccaccgcctccgtcacactgctaacaaagaggggcaaattccggtacatcacggaggagacgggtccccggagcatctgcgaggcgatcgaggcgctgggattcgaggccaaactgatgaccggccgagacaagatggcccacaattatctggagcacaaggaggagatacggaagtggcgcaatgccttcctcgtctcgctaattttcggtggaccctgcatggtggccatgatatacttcatgctggagatgagcgacaagggacatgccaacatgtgctgcctcgtgcccggcctgtcgatggagaatctggtgatgttcctgctatcgacaccagtgcagttcttcggtggctttcacttctatgtgcaatcctatcgtgcgatcaaacacggcaccacgaacatggatgtactgatctcgatggtcacgaccatctcgtatgtgtactcagtggccgtggtgatcgccgccgtgctgctagagcagaatagctccccactgaccttcttcgatacgccgcccatgctgttgatcttcatatcgctgggtcgctggctggagcacatagccaagggaaagacctcggaggccttgtccaagctgctgtcgctcaaggcggccgatgccctgctggtcgagatatcaccggactttgatatcatcagcgagaaggtgatatctgtggattatgtacagcgtggcgatatcctaaaggtgataccgggagccaaagttccagtggacggcaaagttctgtacggtcactccagttgcgatgaatcactaatcaccggggagtctatgccggtggccaagcgaaagggatccgtcgtaatcggcggttccattaaccaaaacggtgtgctcctcgtagaggcaacgcacacgggtgagaatacgacgctcgcgcagattgtgcgattagtggaggaggcccagacgagtaaggcgcccatccagcaactggccgatcggattgccggctactttgtgcccttcgttgttgtagtgtccagtataacgctgattgcttggatcatcattggtttttccaatccaaacttggtgcccgtggccatggagcataagatgcacatggaccagaataccatcatcgttagttatgcatttaaatgtgccttgagcgtgctggccattgcgtgtccatgtgctttgggcttggccacgcccaccgctgtaatggtggccactggaacgggtgcgatcaatggcgtgctggtgaaaggagccactgccctagagaatgcccacaaggtaaagactgtggtcttcgacaagaccggcaccataacccatggcactccgatgaccagtaaggttaccctcttcgtcacagcccaggtctgcagcctggcgcgtgctctgacgatcgtgggagccgccgagcaaaacagcgagcatccgatcgcctccgccattgtgcacttcgccaaggatatgctgaacgtgggcgccacacctcaggccggcagctttggcaagagcagtcacttccaggccgtgcccggctgtggcatccgcgtcaccgtctccaattacgagcagactctgcgacaggcgtgcaacgccgatcggatcattaactacgagaacctgcatcgcactcatccacagggttcggtgccggtggacaatggagccagtatcgaacacttgctgccgcagcgcagcgtacgcaagtccatggagctgaacaatcagcagttgctatccgacttggtattggaaccggaggaagagctccttacggatcagaaaatcatcgattcacccgagattctggtgctgatcggcaatcgcgaatggatggaacgcaatgccatcgaagtgccgctggagattagcgattgtatgacgcatgaagaacgaaagggacacacagctgtgctatgcgccctcaacgggcagctggtgtgcatgtttgcggtgtccgacatggtcaagccagaggcccatcttgccgtctatacactaaagcgaatgggcatcgatgtggtgctgctcacgggggataacaagaacacggcagccagcattgcccgagaggttggcatccgaaccgtgtacgcggaggttttgccctcgcataaagtggccaaaatccagcggatacaggccaacggtatacgcgtggccatggtgggcgatggagtcaacgacagtccggcgctagcgcaggcagatgtgggaattacgattgcagcgggcacggatgttgccgccgaggcatcggacattgtcctgatgcgcaacgatctgctggatgtggtggcttgcctggacttgtcccgctgcacggtgcgtcgcattcggtacaacttcttctttgccagcatgtacaatctgctgggcataccgctggccagtggcttgttcgcaccgtacggcttcaccctgctgccatggatggcgtccgtggccatggccgccagctccgtgagcgtggtatgctcatcgctgctgctcaagatgtatcgcaagcccacggcgaagacgttgcgcacggcagagtacgaggcgcagctggcggcggaacgcgcaagtgggtccgaagacgagctggacaagctgtccctccatcgtggccttgacgatttgcccgaaaagggtaggatgccattcaagcggtccagcacatcactgatttcgcgcattttcatgcacgactacgggaacatcacttcgccggatgccaaatacggggagggactgctggatcccgaggagcagtatgatggccgcaccaagatcgtgaggagtcgcttccatgccaatgacagcaccgaactgcaaaagctgtga

SEQ ID NO: 55684 - protein, 1254 aa, Drosophila melanogaster
MPSDERVEATMSTVRLPIVGMTCQSCVRNITEHIGQKSGILGVRVILEENAGYFDYDPRQTDPARIASDIDDMGFECSYPGDAADPPETPASAWTNIRVVGMTCQSCVRNIEGNIGTKPGIHSIEVQLAAKNARVQYDPAQYDPAQIAELIDDMGFEASVQEPRSPSQSPSPAPTSSPKKRATPTPPPPSYAQNGSAVAIPVEQELLTKCFLHIRGMTCASCVAAIEKHCKKIYGLDSILVALLAAKAEVKFNANVVTAENIAKSITELGFPTELIDEPDNGEAEVELEIMGMTCASCVNKIESHVLKIRGVTTASVTLLTKRGKFRYITEETGPRSICEAIEALGFEAKLMTGRDKMAHNYLEHKEEIRKWRNAFLVSLIFGGPCMVAMIYFMLEMSDKGHANMCCLVPGLSMENLVMFLLSTPVQFFGGFHFYVQSYRAIKHGTTNMDVLISMVTTISYVYSVAVVIAAVLLEQNSSPLTFFDTPPMLLIFISLGRWLEHIAKGKTSEALSKLLSLKAADALLVEISPDFDIISEKVISVDYVQRGDILKVIPGAKVPVDGKVLYGHSSCDESLITGESMPVAKRKGSVVIGGSINQNGVLLVEATHTGENTTLAQIVRLVEEAQTSKAPIQQLADRIAGYFVPFVVVVSSITLIAWIIIGFSNPNLVPVAMEHKMHMDQNTIIVSYAFKCALSVLAIACPCALGLATPTAVMVATGTGAINGVLVKGATALENAHKVKTVVFDKTGTITHGTPMTSKVTLFVTAQVCSLARALTIVGAAEQNSEHPIASAIVHFAKDMLNVGATPQAGSFGKSSHFQAVPGCGIRVTVSNYEQTLRQACNADRIINYENLHRTHPQGSVPVDNGASIEHLLPQRSVRKSMELNNQQLLSDLVLEPEEELLTDQKIIDSPEILVLIGNREWMERNAIEVPLEISDCMTHEERKGHTAVLCALNGQLVCMFAVSDMVKPEAHLAVYTLKRMGIDVVLLTGDNKNTAASIAREVGIRTVYAEVLPSHKVAKIQRIQANGIRVAMVGDGVNDSPALAQADVGITIAAGTDVAAEASDIVLMRNDLLDVVACLDLSRCTVRRIRYNFFFASMYNLLGIPLASGLFAPYGFTLLPWMASVAMAASSVSVVCSSLLLKMYRKPTAKTLRTAEYEAQLAAERASGSEDELDKLSLHRGLDDLPEKGRMPFKRSSTSLISRIFMHDYGNITSPDAKYGEGLLDPEEQYDGRTKIVRSRFHANDSTELQKL

SEQ ID NO: 55685 - DNA, 3009 bp, Sorghum bicolor
  CDS (1)..(3009)
atggcgagcactcgaaccctctttctctcctgcttccacggcggcggcgccgaggtgagccgccacctcgcgctgcgcccgcggtacccgtccaatccgcgtcgccctagtaggtcggccgcggttgccggcgaaggaagtgaaggcggaggaagcggcggtactaccggtgacctggaggccgcgaaggggacggcggagaaggaggacgaggaggagaaagtgtcggtgttcgcggtgacgggaatgacgtgtgccgcctgcgcggggtcggtggagaaggccgtgaagcggctcccgggcatccatgacgccgccgtcgacgtcctcggcggccgcgcgcaggtcgtcttctaccccgccttcgtctcggaggagaaaattagggaagcaatcgaggatgctggttttgaagctaagctgattaacgaggaggtcagggaaaagaacattctagtatgcaggttacatataaaaggaatgacctgcacgtcctgcacaagcacagtagaatctgccttgcaagttcttcctggtgttcaaagagcttcagttgcgttggctactgaagaggcagagatccattatgatcgcaggattattgctgccagccaactaatccatgcagcggaagaaactggctttgaagcaatactaatcactacaggagaagataggagcaggatagacctcaagctagatggccttctgaccgagaggctaacaatgatactgaaaagctctatccaagctcttcctggcgtggaagacgtaaaggtcgacactgaactccacaagatcactgtctcgtacaagcctgaccagacaggtcccagggacctcattgaagtcatcgagtcagccacttctggtgatgttactgcatcaatatatgcagaagcagaaggaagggagcatcacaggcatgtggaaatcaagcgatacaggcagtctttcttgtggagcttaatattcactattccggtgtttctcacttccatggtgttcatgtacatccctgtgctgaaggatggactcgaaaaaaaggttgtcaacatgatgagcattggtgaactattgcggtggattttatcgacaccagtgcaatttgtaattggccgcaagttttatactggtgcttacaaggcaatacgccatggctcaccaaacatggatgtccttattgctctggggacgaacacggcatacttctactcagtttactcagttcttcgagcagctacctctgagaattacatgtcaactgatttttttgagactagttctatgctcatatcttttatccttcttggaaagtaccttgagatcttggcaaaaggaaaaacctccgaggctattgccaagctgatggatcttgcaccagaaactgcaacactgttaatgtatgacaatgaaggaaatgtggtaggagagaaggagattgacagcaggctaattcagaaaaatgatgtgatcaaagtagttccgggtggaaaagttgcttctgatggatttgttatttggggccagagccatgtgaatgaaagcatgattactggagaatcacggccagtagcaaagaggaagggtgacactgtaattggagggacagtgaatgaaaatggtgtgctccatgtccgggcaacatttgtcggatcagagactgcactggcacagattgtaaggctagttgagtcagcacaaatggcaaaagcacctgtccagaagttcgctgataagatatctagagtctttgtcccattggttattgttctctctttgcttacttggcttgtatggttcttagctgggagattccatggttacccttactcatggataccatcctccatggatagctttcagcttgctcttcagtttggaatatcagttatggtgattgcctgtccttgtgccttagggctggcaactccaactgccgtgatggttgcaactggagttggtgcctcgcaaggcgttttgatcaagggcgggcaagctctcgagagtgcacaaaaggtagactgcatcgtctttgataagacaggaacgctaactgttgggaagccagtcgttgtcaacaccagacttttcaaaaacatggtcttgcgtgaattctttgactatgttgcagcagcagaggacaacagtgagcaccctctggcaaaggcaatagtggagcatgcaaagaagttccattcagaagagaaccacatctggccggaagcaagagatttcatttcggttcccggtcatggtgtcaaggccaaagtttttgataagagtgtcattgtcgggaataagagctttatgttgtcattaagcattgatatccccatggaagcttcagagattctcatagaagaagaggaaaatgcacatacatgcattattgtggctatggatcaagaagttgtgggcatagtttctgtatctgacccgataaaaccaaatgcccatgaagttatatcttacctcaagtccatgaatgtggagagcataatggtaactggggacaactgggggactgctaacgccatcggcaaagaggttggcattgaaaagattattgccgaagcaaaacctgaccagaaggctgaaaaggtgaaagaacttcagctgtcaggaaaaactgtggcgatggttggtgatggaataaacgactccccagcactcgtttcagctaatttaggtctcgccattggtgctggaacagatgtcgccattgaagcagccgacatcgtcctcatgaagagcaacttggaggatgtgatcactgctatcgatctctccaggaaaacctttttccgcatacggatgaattacgtgtgggcactcggctacaacatcatcggcataccgattgctgcaggggcgctcttcccatcaacccgatttcgcttgccaccatgggttgcaggcgccgcgatggcggcttcatctgtcagtgtcgtctgttggtcccttctgttgaggtactacaagagtccaaagaagtttgacaactga

SEQ ID NO: 55686 - protein, 1002 aa, Sorghum bicolor
MASTRTLFLSCFHGGGAEVSRHLALRPRYPSNPRRPSRSAAVAGEGSEGGGSGGTTGDLEAAKGTAEKEDEEEKVSVFAVTGMTCAACAGSVEKAVKRLPGIHDAAVDVLGGRAQVVFYPAFVSEEKIREAIEDAGFEAKLINEEVREKNILVCRLHIKGMTCTSCTSTVESALQVLPGVQRASVALATEEAEIHYDRRIIAASQLIHAAEETGFEAILITTGEDRSRIDLKLDGLLTERLTMILKSSIQALPGVEDVKVDTELHKITVSYKPDQTGPRDLIEVIESATSGDVTASIYAEAEGREHHRHVEIKRYRQSFLWSLIFTIPVFLTSMVFMYIPVLKDGLEKKVVNMMSIGELLRWILSTPVQFVIGRKFYTGAYKAIRHGSPNMDVLIALGTNTAYFYSVYSVLRAATSENYMSTDFFETSSMLISFILLGKYLEILAKGKTSEAIAKLMDLAPETATLLMYDNEGNVVGEKEIDSRLIQKNDVIKVVPGGKVASDGFVIWGQSHVNESMITGESRPVAKRKGDTVIGGTVNENGVLHVRATFVGSETALAQIVRLVESAQMAKAPVQKFADKISRVFVPLVIVLSLLTWLVWFLAGRFHGYPYSWIPSSMDSFQLALQFGISVMVIACPCALGLATPTAVMVATGVGASQGVLIKGGQALESAQKVDCIVFDKTGTLTVGKPVVVNTRLFKNMVLREFFDYVAAAEDNSEHPLAKAIVEHAKKFHSEENHIWPEARDFISVPGHGVKAKVFDKSVIVGNKSFMLSLSIDIPMEASEILIEEEENAHTCIIVAMDQEVVGIVSVSDPIKPNAHEVISYLKSMNVESIMVTGDNWGTANAIGKEVGIEKIIAEAKPDQKAEKVKELQLSGKTVAMVGDGINDSPALVSANLGLAIGAGTDVAIEAADIVLMKSNLEDVITAIDLSRKTFFRIRMNYVWALGYNIIGIPIAAGALFPSTRFRLPPWVAGAAMAASSVSVVCWSLLLRYYKSPKKFDN

SEQ ID NO: 55687 - DNA, 2880 bp, Oryza sativa subsp
  CDS (1)..(2880)
atggaccccgccgcgcccctcctcgctctctccaaggccatctcctcctcctcccgctccaagccctccctcctcgcctccccgcaccacttcctcctctcccgcggccgcggcagcggcgcgtgcgggtgcctccctccggcgccgcccccgccccgccgcactcccttcgcggcctcctccgcctcggcgtcagcggcgcggcgcctcgccgtacccggcgatctcctgctcctctcgctcgcgcgcctcgcgctccgtggcccggccccgcgcgcggaggcgcgccgatggttcgcgagcctctcggcggcgtcgaacggtccaccgcgcggcggtggaggcgggggaggcggtgatgggggcggtggagggggaggcggcggcgggtggaagcgcccgcgagcttcgcagggaacggcggtggcggaggaagcctccgggcaggaggctgacgtcataatccttgatgttggggggatgtcgtgtggtggatgtgcagcaagtgtcaagcgcattttggagagtgagccccaagtgcggtctgcaaatgttaatcttgccactgagatggcagtcgtgtgggcggtgccagaagatgaagatgcgaaaaactggaagctgcagttgggtgagaagcttgccaaccagttgacaacatgtggttacaaatccaaccttcgagactcttcaaaagcaagttcacagacggtttttgaaagaaagatggatgaaaaacttcaacaactgaaacaaagtggtcgagaacttgctgtatcttgggcattatgtgctgtttgcctgcttgggcacatttctcacctctttggagttaatgcaccattgatgcacctgctgcattccactgggtttcatttgtctctctcaatatttacatttattggtcctggtcgaagattaattcttgacggattaaatagtctattcaaggggtctcccaatatgaatacattggtcggtttgggtgctctttcatcctttgcagtcagctcaattgcagccttcgttccaaagctggggtggaagacattttttgaggagccggttatgttagtagcttttgttcttcttgggaagaaccttgagcagagggcgaagctaaaagctactagtgatatgactggattgctcaatattcttccatcaaaagcacgcctaatggtggacaatgatcctgagcaatcatcatttactgaggtcccatgcgataccctttctgttggagactatattgtagtgctgcctggggatcgtgttccagcagacggtgttgtcaaatctggacggagtacagttgatgaatcaagtttgacaggtgaacctatgcctgtaacaaagatagcagggacagaagtatcagcaggaagcattaacttaaatggtaaaatcactgttgaagttagaagacctggtggtgagactgccatgtctgacatactccgtttagtggaagaagcacagacgagggaggccccagttcaacgattagctgacaaggttgctgggaactttacatatggagttatggctctttctgctgctacttatacattctggagtatttttggttcacaacttgtacctgctgctatccagcatggaagtgcaatggctttggcattgcaactttcttgtagcgttctggtaattgcttgcccatgtgcccttgggctcgccacacccactgctgtgctggtcgggacttcattaggtgcaacaagaggactccttttgcgtggtggggatattttagagaaattctcagaagttgatgccattgtgtttgacaagactggaactttaacaattgggaaacctgtagtgactaaagtaatagcttctcacagagagggagatgaaaatacaaaggattcctgtaacaatgaatggactggtgagattctgagtttggcagcaggtgtagaatcaaatacaacccacccgcttggaaaagccatcatggaagctgctcaggctgccaattgcctctatctgcaggcaaaagatggatccttcatggaagaacctgggtctggtgctgtggcgaccattggcgagaaacaggtttcagttggaacacttgattggatcaggaggcatggagttcttcacaatccatttgctgatggagaaaattttggtcagtctgttgcatatgtagctgtggatggtactctagctggacttatttgttttgaggataagctgagagaagattctcatcaaattattgatatcctatctaagcaagggattagtgtgtatatgttgtctggggacaagaaaagtgctgctatgaatgtagcttcacttgttggtatccaggcagacaaggtcattgctgaagttaaaccacatgagaagaagagtttcatatctgaacttcaaaaagagcacaagctagttgccatggtcggtgatggcatcaatgatgctgcagcactagcttcagctgatgttggcattgctatgggtggaggtgttggtgcggctagtgatgtgtcttcagttgtgcttatgggcaatagattatctcagcttgttgatgctttagagttgagtaaagagaccatgaggacagtgaagcaaaatctttggtgggcttttctgtacaacattgttggactacccatcgctgctggggcattgctgccagttacaggtacggtgctgaccccgtcgatagctggagctctaatgggttttagttctgtcggcgtaatggccaactcactgttcttgagaatgaggttgagttcaaggcagcaaccaatccataagccacaggcgaccatttctgatgtattacccaacgcagccgagtcagagaaaagttatccatcaaaatggagtgcctag

SEQ ID NO: 55688 - protein, 959 aa, Oryza sativa subsp
MDPAAPLLALSKAISSSSRSKPSLLASPHHFLLSRGRGSGACGCLPPAPPPPRRTPFAASSASASAARRLAVPGDLLLLSLARLALRGPAPRAEARRWFASLSAASNGPPRGGGGGGGGDGGGGGGGGGGWKRPRASQGTAVAEEASGQEADVIILDVGGMSCGGCAASVKRILESEPQVRSANVNLATEMAVVWAVPEDEDAKNWKLQLGEKLANQLTTCGYKSNLRDSSKASSQTVFERKMDEKLQQLKQSGRELAVSWALCAVCLLGHISHLFGVNAPLMHLLHSTGFHLSLSIFTFIGPGRRLILDGLNSLFKGSPNMNTLVGLGALSSFAVSSIAAFVPKLGWKTFFEEPVMLVAFVLLGKNLEQRAKLKATSDMTGLLNILPSKARLMVDNDPEQSSFTEVPCDTLSVGDYIVVLPGDRVPADGVVKSGRSTVDESSLTGEPMPVTKIAGTEVSAGSINLNGKITVEVRRPGGETAMSDILRLVEEAQTREAPVQRLADKVAGNFTYGVMALSAATYTFWSIFGSQLVPAAIQHGSAMALALQLSCSVLVIACPCALGLATPTAVLVGTSLGATRGLLLRGGDILEKFSEVDAIVFDKTGTLTIGKPVVTKVIASHREGDENTKDSCNNEWTGEILSLAAGVESNTTHPLGKAIMEAAQAANCLYLQAKDGSFMEEPGSGAVATIGEKQVSVGTLDWIRRHGVLHNPFADGENFGQSVAYVAVDGTLAGLICFEDKLREDSHQIIDILSKQGISVYMLSGDKKSAAMNVASLVGIQADKVIAEVKPHEKKSFISELQKEHKLVAMVGDGINDAAALASADVGIAMGGGVGAASDVSSVVLMGNRLSQLVDALELSKETMRTVKQNLWWAFLYNIVGLPIAAGALLPVTGTVLTPSIAGALMGFSSVGVMANSLFLRMRLSSRQQPIHKPQATISDVLPNAAESEKSYPSKWSA

SEQ ID NO: 55689 - DNA, 2952 bp, Trametes versicolor
  CDS (1)..(2952)
atggcgggcctttctgccgcattcaacggcctccttgggactcctcgcacgcccacctctggcaaactggagctccctgtgggcgaacacgaacctctggctgctgcgggcgggcctgcgtcagagaaatgcgagctgagaatcgaaggcatgacttgcggagcatgcgtcgagtctatagagggtatgctgcgtacacaacccggcatacagtcggtcaaggtcgcgctactcgcggaacggggcgtagtggaatacgatccagccgtttgggatgcagacaagatcatcggggaaatatctgacataggtttcgatgctactctcatacccccaacacgcgcggatgccatcacccttcgcatatacgggatgacatgttcatcatgcacatcaacggtagagacgcaactgggggcaatgcccggagtcaccagcgtcgccgtctcgctcgctacagagacctgcaaagtagagttcgacaggacaatggtcgggcctcgggagctggtagaacggatagaagagatgggattcgacgccatggtctccgatcaagaagacgcgactcagctgcgatcgctcacccggacgaaggagatccaggaatggcggtcacgcttccagtggagtcttgccttcgcgattccggtcttcttcgtcactatgatcgcgccgaagatccccttccttgcgccgattgtcgagtaccagctgtgccgcggcatctacgtcagtgacgtcgtggcgttcattcttacgaccccggctctgttctggcttggacagaagttctaccggaacgcgtacaagtcgctgaagcacgggagcgccaccatggacgtgctcatcgccattgggacgtcgtccgcgtacatatactccatcggcgccatgtgctttgcggcgtacaaccgggagctggactatcaccccatggtcttcttcgacactagcacgatgctgatcatgttcgtgtcgctcggccgatacctggagaaccgggcgaagggcaagacgagcgccgcgctgactgatctcatggcgcttgctccgtctatggcgacaatctacaccgacgctccggcgtgcacgcaggagaagaagatccccacggagctggtctcggtcggcgacacggtgaaactcgtgcctggcgacaaggtccccgcggacggcactgtcttgcgtgggacctccaccgtggacgagagcgcagtcacgggcgagccagtccctgtgctcaagcagatcggagacagcgtcattggaggcaccgtcaacgggctcgggacgttcgacatggtcgtcacgcgcgccgggaaggacaccgcgctcgcgcagatcgtgaagctggtcgaggacgcgcagacgtcgaaggcgccgatccaggagttcgcggacaaggtcgcgggctacttcgtgccgatggtcatctcgctctcgctcatcaccttcgcggtgtggatggtgatctcgcacgtcgtcgacgagaacgcgctccccgcgctgttccacaagcacggtgcgtcgaagctcgcgatctgcttgcagctgtgcatctccgtcgtcgtggtcgcgtgcccgtgtgcgcttgggctgagcacgccgaccgcgattatggtcgggaccgggatgggcgcgaagaacgggatcctgatcaagggcgggcgcgcgctcgaggcgagtcgatttatcaagcggatcgctctcgacaagacgggcacggtcaccgagggcaagctcactgtcgcggcgctcacgtgggcgccctcgagcgaccacagcgacctgcacagctacgcgactgacggtgacgtcccgctgaccacgaagtgtgtcgggaacgccacgcgcgcggacgtcatcgcaatggtcgcggcgactgaggcacgctcagagcacccgctcgcgaaggcggtcgcggtgcacggcaaggagctgctgaacaagtcgatggtgcccatcccggaggtcgtgattcacacgttcgagagcgtcaccggcgcgggtgtgaaagccgagatcgggctcccgggcggcaagggccagtgcacgctattcgtcggaaatgcacgcttcatcctgcagaccggcgacgcgcagctcccgtccgcgctcgcggcgttcgactcggaggagtcgcaccgcggccgcacgtccatcttcgtctcgatctcgacgtctggcaagccgccggtgcccattctagcgatcgcgctcgcggacgcgccgaggccgtcgtcgatacatgcgatcagggcgctgcagaacatgggtattgaggtgaacatgctcacgggcgacgcaaaggcgacggcgctcgctgttgcgaagcaggtcgggatcaagccggagaacgtgtgggcgagcatgagcccgaagggcaaggcgtcggtcgtgactgagctcatggagaagtacggtggcggcgtggctatggtcggagacggcatcaacgactccccatccctcgtcgccgcatccgtcggtattgctctgtcatccggcacctccgtggcgatcgaggcggcggacatcgtgctcatgcgctccgacctgctcgacgtcgtcgccgccctgcacctctcgcgcgcgatcttcacgacgatccggcgcaacctcgtctgggcgtgtctctacaacgtgctcggcatcccgctcgcgatgggcttcttcctcccgcttggcgtgagcctgcccccgatgggcgccgcggccgcgatggcgttctcgtccgtgagcgtcgtgacgagctcgctcgcgctgaagtggtgggtgcgcccggcggagagtctgatgcccggggagagcgtgcagcacgagacgatgttcgacagcgcgcgggaggcggttcgcgatgcgtgggaatcggtgcgcggcctggtgggctcgcggcgggatgtgtcggggtacagccagctgccggtggagatgagcgaggctgtatga

SEQ ID NO: 55690 - protein, 983 aa, Trametes versicolor
MAGLSAAFNGLLGTPRTPTSGKLELPVGEHEPLAAAGGPASEKCELRIEGMTCGACVESIEGMLRTQPGIQSVKVALLAERGVVEYDPAVWDADKIIGEISDIGFDATLIPPTRADAITLRIYGMTCSSCTSTVETQLGAMPGVTSVAVSLATETCKVEFDRTMVGPRELVERIEEMGFDAMVSDQEDATQLRSLTRTKEIQEWRSRFQWSLAFAIPVFFVTMIAPKIPFLAPIVEYQLCRGIYVSDVVAFILTTPALFWLGQKFYRNAYKSLKHGSATMDVLIAIGTSSAYIYSIGAMCFAAYNRELDYHPMVFFDTSTMLIMFVSLGRYLENRAKGKTSAALTDLMALAPSMATIYTDAPACTQEKKIPTELVSVGDTVKLVPGDKVPADGTVLRGTSTVDESAVTGEPVPVLKQIGDSVIGGTVNGLGTFDMVVTRAGKDTALAQIVKLVEDAQTSKAPIQEFADKVAGYFVPMVISLSLITFAVWMVISHVVDENALPALFHKHGASKLAICLQLCISVVVVACPCALGLSTPTAIMVGTGMGAKNGILIKGGRALEASRFIKRIALDKTGTVTEGKLTVAALTWAPSSDHSDLHSYATDGDVPLTTKCVGNATRADVIAMVAATEARSEHPLAKAVAVHGKELLNKSMVPIPEVVIHTFESVTGAGVKAEIGLPGGKGQCTLFVGNARFILQTGDAQLPSALAAFDSEESHRGRTSIFVSISTSGKPPVPILAIALADAPRPSSIHAIRALQNMGIEVNMLTGDAKATALAVAKQVGIKPENVWASMSPKGKASVVTELMEKYGGGVAMVGDGINDSPSLVAASVGIALSSGTSVAIEAADIVLMRSDLLDVVAALHLSRAIFTTIRRNLVWACLYNVLGIPLAMGFFLPLGVSLPPMGAAAAMAFSSVSVVTSSLALKWWVRPAESLMPGESVQHETMFDSAREAVRDAWESVRGLVGSRRDVSGYSQLPVEMSEAV

SEQ ID NO: 55691 - DNA, 3015 bp, Oryza sativa subsp
  CDS (1)..(3015)
atggccggaaaggatgaggcggaagggctcgaggcgaggctgctgctgctgccgcctgaggcggcggcggaggagccgacgaggtgtggcggcggcgacggcggcggcggcgggaggaagcggaagaagacgtaccttgatgtccttggcgtgtgctgctccgcggaggtcgcgctggtggagcggctgctcgcgccgctcgacggcgtccgcgtggtgtccgtcgtcgtggcgtcccgcaccgtcgtcgtcgagcacgaccccgccgccgccccggagtccgccatcgtgaaggcgctgaacaaggccggcctcgaggcgtcggtgcgagcctacggcagcagcggcgtggtcagccggtggccgagcccgtacatcgtcgcctccggcgtcctcctcacggcgtccttcttcgagtggctcttccctcccctgcagtgcctggccgtggcggccgtcgtcgccggcgcgccgccgatggtgcgccgtgggttcgccgcggcgagccggctgtcgctcgacatcaacgtcctcatgctcatcgccgtcgccggcgcgctctgcctcggcgactacacggaggccggcgccatcgtcttcctcttcaccaccgcagaatggctcgagacgctggcctgcacaaaggcgagcgccgggatgtcgtcgttgatgggcatgctgccggtgaaggcggtcatcgcgacgacgggcgaggttgtcagcgtgcgcgacgtccgcgtgggcgacgtcgtcgcggtcagggccggcgagatcgtccccgtcgacggcgtggtggtcgacggccagagcgaggtcgacgagaggagcctcaccggcgagtccttcccggtgccgaagcagccgcactccgaggtctgggccggcacaatgaactttgacggttacattgctgtgagaactacggctctcgccgagaactcgacggtggcgaagatggagaggctggtggaggcggcgcagaacagcaggtcgaagacgcagcggctgatcgattcgtgcgcaaagtactacacgccggccgtggtggttgttgcagcaggagtggccctgatcccggctctgctcggagcagatggccttgagcaatggtggaagctggctctggtgatgcttgtgagcgcgtgcccctgcgcattagtgctgtcgacaccggtggcatccttctgcgcaatgctgcgcgctgcgaggatggggatcttcatcaagggtggagatgttcttgaatcacttggggagatcagggccgtcgcgttcgacaagaccgggacgatcaccagaggagagttcagcatcgactcgttccatctggttggggatcacaaggttgagatggatcatcttctttactggattgcaagcattgagagcaagtcaagccacccaatggcagctgcacttgtggagtatgctcaatccaaatccatccaaccaaacccggaaaatgtgggcgattttcggatatatcccggggaggggatctatggagagatccatggaaagcacatctacattgggaacagaaggacattggcaagagcgtcatcacctcagtcaactcaagaaatgggtgagatgatcaagggcgtgtcgatcggctacgtgatctgcgacggcgagctcgccggcgtcttctcgctctccgacgactgccggaccggcgcggcggaggcgatccgggagcttggatcgctgggcatcaagtcggttatgctgaccggggacagcagcgcggcggcgacgcacgcgcagggccagctcggcggcgtcatggaggagctccactccgagctcctcccggaggacaaggtccggctcgtcagcggcctcaaggcgaggttcggcccgacgatgatggtcggggacgggatgaacgacgcggcggcgctggcggcggcggacgtgggcgtgtccatgggcatctccgggtcggcggcggcgatggagaccagccacgcgacgctcatgtcgagcgacgtgctcagggtccccgaggccgtcaggctcggccggtgcgcccgccggaccatcgccgtcaacgtggccggctcggtggccgtgaaggccgccgtgctcgcgctggccgcggcgtggcgccccgtgctctgggccgccgtgctcgccgacgtcgggacgtgcctcctcgtcgtgctcaacagcatgacgctgctcagggaggagtggaagggcggcgccaaggaggacggcgcgtgccgcgccacggcgaggtcgctggtgatgaggtcccagctcgccgccgactcccaagcacccaacgccgcagacgctggcgccgccggccgtgagcaaacgaacggctgccgttgctgtccgaagccgggcatgtcgcccgagcactcggttgtcatcgacatccgagccgacggcgagcgtcaagaagagcggccggccgaggcggccgtcgttgccaaatgttgcggcggaggcggcggcgagggcatccgctgcggagcctccaagaagccaactgcaacggtcgttgttgccaaatgttgcgggggcggcggcggcggcgagggcaccaggtgcggcgcgtccaagaatccggcaacggcggccgtcgttgccaaatgttgcagcggaggcggcggcgagggcatcggctgcggagcctccaagaagccaactgcaacggccgttgttgccaaatgttgcggcggcggcggcgagggcaccaggtgcgccgcgtccaagaagccggcaacggcggccgtcgttgccaaatgttgcggtggcgatggcggcgagggcaccggatgtggtgcctccaagaggtcgccgccggctgagggaagctgcagcggcggtgaaggcggtaccaatggtgttggtcgttgctgcacgagcgtgaagaggccaacctgttgcgacatgggagcggcggaggtgtccgattcttcgccggagacggcgaaagactgcagaaatgggaggtgttgcgcgaagacgatgaactccggtgaagtgaaaggatga

SEQ ID NO: 55692 - protein, 1004 aa, Oryza sativa subsp
MAGKDEAEGLEARLLLLPPEAAAEEPTRCGGGDGGGGGRKRKKTYLDVLGVCCSAEVALVERLLAPLDGVRVVSVVVASRTVVVEHDPAAAPESAIVKALNKAGLEASVRAYGSSGVVSRWPSPYIVASGVLLTASFFEWLFPPLQCLAVAAVVAGAPPMVRRGFAAASRLSLDINVLMLIAVAGALCLGDYTEAGAIVFLFTTAEWLETLACTKASAGMSSLMGMLPVKAVIATTGEVVSVRDVRVGDVVAVRAGEIVPVDGVVVDGQSEVDERSLTGESFPVPKQPHSEVWAGTMNFDGYIAVRTTALAENSTVAKMERLVEAAQNSRSKTQRLIDSCAKYYTPAVVVVAAGVALIPALLGADGLEQWWKLALVMLVSACPCALVLSTPVASFCAMLRAARMGIFIKGGDVLESLGEIRAVAFDKTGTITRGEFSIDSFHLVGDHKVEMDHLLYWIASIESKSSHPMAAALVEYAQSKSIQPNPENVGDFRIYPGEGIYGEIHGKHIYIGNRRTLARASSPQSTQEMGEMIKGVSIGYVICDGELAGVFSLSDDCRTGAAEAIRELGSLGIKSVMLTGDSSAAATHAQGQLGGVMEELHSELLPEDKVRLVSGLKARFGPTMMVGDGMNDAAALAAADVGVSMGISGSAAAMETSHATLMSSDVLRVPEAVRLGRCARRTIAVNVAGSVAVKAAVLALAAAWRPVLWAAVLADVGTCLLVVLNSMTLLREEWKGGAKEDGACRATARSLVMRSQLAADSQAPNAADAGAAGREQTNGCRCCPKPGMSPEHSVVIDIRADGERQEERPAEAAVVAKCCGGGGGEGIRCGASKKPTATVVVAKCCGGGGGGEGTRCGASKNPATAAVVAKCCSGGGGEGIGCGASKKPTATAVVAKCCGGGGEGTRCAASKKPATAAVVAKCCGGDGGEGTGCGASKRSPPAEGSCSGGEGGTNGVGRCCTSVKRPTCCDMGAAEVSDSSPETAKDCRNGRCCAKTMNSGEVKG

SEQ ID NO: 55693 - DNA, 2283 bp, Rhizobium loti
  CDS (1)..(2283): transl_table=11
atgagctgttgtgcacccagcgcggaactggcgctggatctgaccggtaccacatcggtcctgccgtctagccaggagatcaggttggcgagccggtcgcttggcgacaatctttggcagaccgacctttcagtgccgacggttcactgcgcggcctgcatccagacgatcgagacggcgctggcaaagctcgacaatgtcgaaggcgcgcgtgtcaacctgtcgacgaaacgggtcgcgatccggtggcgtggcgacgaggtgccacccttcgtcgccgcgctgggaaggctgggctatcaggcgcaccttttcgccgccgagatcgatgaaaaggacaagacgcttgccgagctgatccgcgcggtcgcggtcgccggcttcgccgccggcaacatcatgctgctttcggtctcggtctggtccggcgccgaaggcgcaacgcgggacctgtttcattgggtctcggcgctgattgcgatcccggcactggccttcgccggcggcatcttcttccgctcggcctggaacgcgctgcgtcacggccgcatgaacatggatgttccgatcgcggtcggagtgtccctcgcctatgccatgagcctctatgagacgatcaaccacggcgatcacgcctatttcgacgcgtcggtttcgctgctgtttttcctgttgatcggtcgcacgttggatcacgtgatgcgcgagcgggcccggaccgccgtgaaaggcctgtcccagttggccgcacgtggcgccatggtgctgcgcggcgacggcgcgcgcgactatctgccggttggcgagatcgaacccggcatgctgctgttgatcggggccggcgaaagaatccccgtcgacggcaagatcattcaaggggcctcggatctcgactgctcgctggtttccggcgagagcacgcctcgaaacgtggcggcaggtgaagccgtgcaggccggtgtcctcaacctgaccggctcgctgacgattgaggccacagccgccgcgaaagattcgtttctggcggaaatggttcggctcatggaagccgcagagggcggccgcgcgcattatcgccggatcgccgatcgcgtttcagggctctatgccccggtggttcatctcacagccttcgcgacgttccttggctggatggcggcgaccggcgactggcaccgggcgataaccatcgccatcgccgttctcatcatcacatgcccatgcgcactcggcctcgccgtgccgatcgtgcaggtagtcgccgcgcggcgcctgttcgaaaacggcatcatggtcaaggatggttcggccatggagcgcctggcgacgattgatacagcggtgttcgacaagaccggaacgctcacgctcggccagccccgactggtcaatgcgtcgtcgatcgatccgacgatgctggcgatcgcagccgacatggccgcgcactcccgccacccgttctcaaaggccatagccggtttcgcgaattttgtcggtcaaccgaaattggaggccgtcagcgagcaccccggtttcgggatcgaagccacaaccgcggacagcacctggcggctcggtcgacgcggatgggctggatggaaggctcgaaccggcggcgaaggcaaacatggctacggcacggttctgacgaagaacaggatgattgtcgcttccttcgctttcgaggatgcgttgcaggccgatgccgggagcgtcatggcgcaattgaacgatgcaggggtcgcggtcgaaatgctgtcgggcgataccgcggacgcctgtggcgatgtcgcaagaatattgggcatcgaccgttttgttccggcgctgctgccgtccgggaaggttgagcggatcgaagtgctgaccaaagccggccacaaggtcctgatggtgggcgacgggctcaacgacacgccagcgctgggcgctgcgcacgtctcgatcgctccagccaccgccgccgatattggtcgcaacgcggctgatttcgtgttcctgcgtgaaagcctttcggcagtaacccttgcgctggacgtctcgcggaaggcagggcggcttatccgccagaacatagccatcgcgatcatctacaacgccgttgccgtgccgatcgccatcttcggcaacgtcacgccgttggtcgcggcggtcgcgatgtccgcctcatcgctgctggtgatcggaaacgggctgcggctgcagggctttatgctcgccgagctgacgagggcttcttcggcaacacattccggcattcacccatcagcgcggtcatcatga

SEQ ID NO: 55694 - protein, 760 aa, Rhizobium loti
MSCCAPSAELALDLTGTTSVLPSSQEIRLASRSLGDNLWQTDLSVPTVHCAACIQTIETALAKLDNVEGARVNLSTKRVAIRWRGDEVPPFVAALGRLGYQAHLFAAEIDEKDKTLAELIRAVAVAGFAAGNIMLLSVSVWSGAEGATRDLFHWVSALIAIPALAFAGGIFFRSAWNALRHGRMNMDVPIAVGVSLAYAMSLYETINHGDHAYFDASVSLLFFLLIGRTLDHVMRERARTAVKGLSQLAARGAMVLRGDGARDYLPVGEIEPGMLLLIGAGERIPVDGKIIQGASDLDCSLVSGESTPRNVAAGEAVQAGVLNLTGSLTIEATAAAKDSFLAEMVRLMEAAEGGRAHYRRIADRVSGLYAPVVHLTAFATFLGWMAATGDWHRAITIAIAVLIITCPCALGLAVPIVQVVAARRLFENGIMVKDGSAMERLATIDTAVFDKTGTLTLGQPRLVNASSIDPTMLAIAADMAAHSRHPFSKAIAGFANFVGQPKLEAVSEHPGFGIEATTADSTWRLGRRGWAGWKARTGGEGKHGYGTVLTKNRMIVASFAFEDALQADAGSVMAQLNDAGVAVEMLSGDTADACGDVARILGIDRFVPALLPSGKVERIEVLTKAGHKVLMVGDGLNDTPALGAAHVSIAPATAADIGRNAADFVFLRESLSAVTLALDVSRKAGRLIRQNIAIAIIYNAVAVPIAIFGNVTPLVAAVAMSASSLLVIGNGLRLQGFMLAELTRASSATHSGIHPSARSS

SEQ ID NO: 55695 - DNA, 2394 bp, Pseudomonas putida
  CDS (1)..(2394): transl_table=11
atgtccgaatccaccactttcgatctgccgattgccggcatgacctgcgccagttgcgccgggcgtgtcgagcgggcgctgcgcaaggtcagcggcgccagtgccgtcagtgtcaacctggccaccgaacaggcccgggtgcaggcacccggcgaccgcctgccggcgctgatgcaagccgtggagcgcgccggttacagcgtgccccggcaaaccgtcgaattgagcatcgacggcatgacctgcgcgtcctgcgtcggtcgcgtcgaacgcgccctgagcaaagtcccaggcgtgagcagcgtcagtgtcaatctggccaacgaacgtgcgcacatcgaattgctcggccaggtcgatacgcaaaccctgctcgacgcagtgagcaaggccggttactcggccagtgtctggcaagctgaacggccacagtccgatgaccagcaaaaacgcctgcaccgcgagcgctgggcattgatctgtgcgatcgccctcgctctgccgctggtgctgcctatgttactgcagccgttcggcattcactggatgctcccggcctgggcgcaattcgccctcgccacccccgtgcaattcatcttcggcgcacgcttttatgtcgcggcgtggaaagccgtgcgcgccggcgccggtaacatggacctgctcgtcgccctcggcaccagcgccggttatggcctgagtgtctatgaatgggccagcgccgccggacgcatgccgcatctgtatttcgaggcctcggcggtggtcatcgccttggtgttgctcggcaaatatctcgaaagccgcgccaaacgccagaccgccagcgccattcgcgctctcgaagcgttgcggccggagcgtgcgattcaagtcatcgacgggcgtgagcaggacgtcgcgatcagcgccctgcgcctcgacgatctggtgctggtcaaacccggcgaacgcttcccggtggatggcgaagtcgtcgaaggccagagccacgccgacgaagcgctgatcagtggcgaaagcctgccagtgccgaaacaaccgggcgacaaagtcaccggcggcgcgatcaacggcgaaggtcgtttgctggtgcgcactcaggcgctcggcgcggaaaccgtgctggcgcggatcattcgtctggtcgaggacgcgcaagcggcgaaagcgccgatccagaaattggtggacaaggtcagccagattttcgtgccgaccgtgttgctgatcgccctggccacgctgatcggctggtggctgtacggcgcgccgctggaaactgcggtgatcaatgccgtcgccgtgctggtgattgcctgcccgtgcgccctcggcctcgccaccccgacggcgatcatggccggcaccggcgtcgccgcacgccacggcattctgatcaaggacgccgaagcgctggagcgcgcccatgaagtcagcagcgtggtgttcgacaagaccggcacgctgacctcgggcacgccgcgtatcgcgcacttcagcgcggtcgatggtgacgagaataatctgctgaccttggccggtgcattgcagcgcggcagcgagcatccgttggccaaagcggtgctggatgccgccgccgaacgcggcttgaacgtgcccgatgtcagcgacagccaggcgctgaccggacgcggcatcgccggcacgctggatggccggcgcctggcactgggcaatcggcggatgctcgacgaaagcgctttgagtaccggtgaattgagcgcatccgccgaagcctgggaacgcgaaggccgcacattgtcgtggctgatcgaacaaagtcctcagccgaaggtgctgggtctgttcgccttcggtgacacgctgaaacccggcgctctgcaagcggtgcaacaactcgccgcacgggatatccagagccacctgctgaccggcgacaatagtggcagcgcacgggtggtggccgaggctctgggcatccaaaatgtccacgccgaagtgctgcctgccgacaaggccgcgaccgtcgccgagctgaagaaaaccagcgtagtcgccatggtcggcgatggcatcaacgacgccccggccctcgccgctgccgacatcggcatcgccatgggcggcggcaccgacgtcgccatgcacgcggccggtatcaccctgatgcgcggcgatccgcgactggtgccggcggcgctggagatcagtcgcaagacctacgcaaagattcgccagaacctgttctgggcctttgtctacaacctgatcggcattccgctggcggtattcggtttcctcaatccggtgctggccggcgcggcgatggcgctgtcgagcgtcagcgtggtgagcaatgcgctactgttgaaaacctggaaacccaaggacctggaggaacaccgatga

SEQ ID NO: 55696 - protein, 797 aa, Pseudomonas putida
MSESTTFDLPIAGMTCASCAGRVERALRKVSGASAVSVNLATEQARVQAPGDRLPALMQAVERAGYSVPRQTVELSIDGMTCASCVGRVERALSKVPGVSSVSVNLANERAHIELLGQVDTQTLLDAVSKAGYSASVWQAERPQSDDQQKRLHRERWALICAIALALPLVLPMLLQPFGIHWMLPAWAQFALATPVQFIFGARFYVAAWKAVRAGAGNMDLLVALGTSAGYGLSVYEWASAAGRMPHLYFEASAVVIALVLLGKYLESRAKRQTASAIRALEALRPERAIQVIDGREQDVAISALRLDDLVLVKPGERFPVDGEVVEGQSHADEALISGESLPVPKQPGDKVTGGAINGEGRLLVRTQALGAETVLARIIRLVEDAQAAKAPIQKLVDKVSQIFVPTVLLIALATLIGWWLYGAPLETAVINAVAVLVIACPCALGLATPTAIMAGTGVAARHGILIKDAEALERAHEVSSVVFDKTGTLTSGTPRIAHFSAVDGDENNLLTLAGALQRGSEHPLAKAVLDAAAERGLNVPDVSDSQALTGRGIAGTLDGRRLALGNRRMLDESALSTGELSASAEAWEREGRTLSWLIEQSPQPKVLGLFAFGDTLKPGALQAVQQLAARDIQSHLLTGDNSGSARVVAEALGIQNVHAEVLPADKAATVAELKKTSVVAMVGDGINDAPALAAADIGIAMGGGTDVAMHAAGITLMRGDPRLVPAALEISRKTYAKIRQNLFWAFVYNLIGIPLAVFGFLNPVLAGAAMALSSVSVVSNALLLKTWKPKDLEEHR

SEQ ID NO: 55697 - DNA, 2214 bp, Pseudomonas putida
  CDS (1)..(2214): transl_table=11
atgaaccagcctgtcagccacgaacacaagcacgatcaccacgcccacagctgctgtggcagcgctgctgcgccagcgttggtccagctgagcgaaaaggccagcagccacgcccagttcagccgtttccgcatcgaggccatggactgccctaccgagcagaccctgatccaggacaagctgggcaagctggccggtatcgagcagctggagttcaacctgatcaaccgtgtgcttggcgtgcgccacaccctgggtggcactgctgaaatcgagcaggccatcgacagcctgggcatgaaagccgagccgcttggcgccgaagacgatagcactgccagcgcaccgcaagtggccaagacccgctggtggcccctggcgctgtccggtattgccgcgatcgccgccgaaatcgtgcactttgccgcactggccccggagtgggtggtggcggcgctggcgctggcagcgatcctcggctgtggcctgggtacctacaagaagggctggatcgccctgaaaaaccgcaacctcaacatcaacgcgctgatgagcattgccgtgactggcgcggtgctgatcggccagtggccggaagcggccatggtgatggtgttgttcaccgtcgccgagctgatcgaagcccgctcgctggaccgcgcgcgcaacgccattggcggcctgatgcagctcaccccggacatggctaccgtgcgccaggccgatggccagtggcgggaagtagaggtgcgggaggtggccatcggggccctggtgcgggtacgccccggcgaacgcattggcctggacggtgaagtgaccagcgggcaatccaccgtcgatcaggcaccgatcaccggcgaaagcctgcctgtggagaagaccgtgggcgacaagttgttcgccggcaccatcaaccaggcaggggcgctggagttccgcgttaccgctgctgccgggcaatcgaccctggcgcggatcatcaaggccgtcgaggaagcgcaaggcgcgcgggcgcctacccagcgtttcgtcgaccgcttctcgcgcatctacaccccagtggtgtttgccattgccctggccgttgcggtgataccgccgctgttcatggccggtgcctggttcgactgggtctatcgcgccctggtgctgctggtggtggcctgcccgtgtgccctggtgatctcgaccccggtgaccatcgtcagcggcctggctgccgccgcgcgcaagggcatcctgatcaagggtggcgtgtacctggaaggcgggcgccagttggacttcctggccctggacaagaccggcactatcacccacggcaagccggtgcaaaccgatgccaagatactggagccgctgttcgaaggccgcgcgcaagccctggccgccagccttggcgagcgttcggatcacccggtttcccgcgccattgcccagttcggcaaggagcaaggcctggctttgagcgaggtcgatgacttcgccgccctggccgggcgcggcgtgcgcggtaccatcgcgggtgaggtttaccacttgggtaaccaccgtctggtcgaggagctggggctgtgttcgcccgagctcgaggcccagctggatgcgctggagcgccagggcaagaccgtggtgctgctgctcgaccgctccggcccgttggcgctgttcgcggtggccgacacggtcaaggaaagcagtcgccaggccatcgccgagctgcacgagctgggcatcaagactgtcatgctgaccggtgacaatccgcataccgcccaggccatcgccaccgtggtgggcatcgaccgtgccgaaggcaacctgctgcctggcgacaagctcaagagcatcgaaaccctgtacgcccagggccatcgggtgggcatggtcggtgacggcatcaacgacgccccggcactggctcgtgccgagatcggttttgcaatggcggcggccggtaccgacaccgccatcgagaccgccgatgtggcgctgatggacgacgacttgcggaaaatcccggccttcgtcaggctgtcgcgccaaagtgcggcgatcctcatgcagaacatcgttctggcgttgggcatcaaggcgatattcctggcgatcacctttgccggcatggccaccatgtggatggcggtgtttgccgacatgggcgtgagcctgctggtggtgttcaacggcttgcgcctgttgcgcaaatag

SEQ ID NO: 55698 - protein, 737 aa, Pseudomonas putida
MNQPVSHEHKHDHHAHSCCGSAAAPALVQLSEKASSHAQFSRFRIEAMDCPTEQTLIQDKLGKLAGIEQLEFNLINRVLGVRHTLGGTAEIEQAIDSLGMKAEPLGAEDDSTASAPQVAKTRWWPLALSGIAAIAAEIVHFAALAPEWVVAALALAAILGCGLGTYKKGWIALKNRNLNINALMSIAVTGAVLIGQWPEAAMVMVLFTVAELIEARSLDRARNAIGGLMQLTPDMATVRQADGQWREVEVREVAIGALVRVRPGERIGLDGEVTSGQSTVDQAPITGESLPVEKTVGDKLFAGTINQAGALEFRVTAAAGQSTLARIIKAVEEAQGARAPTQRFVDRFSRIYTPVVFAIALAVAVIPPLFMAGAWFDWVYRALVLLVVACPCALVISTPVTIVSGLAAAARKGILIKGGVYLEGGRQLDFLALDKTGTITHGKPVQTDAKILEPLFEGRAQALAASLGERSDHPVSRAIAQFGKEQGLALSEVDDFAALAGRGVRGTIAGEVYHLGNHRLVEELGLCSPELEAQLDALERQGKTVVLLLDRSGPLALFAVADTVKESSRQAIAELHELGIKTVMLTGDNPHTAQAIATVVGIDRAEGNLLPGDKLKSIETLYAQGHRVGMVGDGINDAPALARAEIGFAMAAAGTDTAIETADVALMDDDLRKIPAFVRLSRQSAAILMQNIVLALGIKAIFLAITFAGMATMWMAVFADMGVSLLVVFNGLRLLRK

SEQ ID NO: 55699 - DNA, 3172 bp, Brassica napus
  CDS (1)..(3000)
atggcgccgagtagacgggatttacagcttactcccctctccggagacactgctgcggagatcggtgccatggaggaagttcgtctcctcgattcctatgacgacgacgacaacgacgattctctgagtaagatcgaggaaggaagcggcggttccggtttacggaagattcaggtgggaataaccggtatgacttgcgccgcttgttctaattccgtcgaaggtgctttgataagcgttaacggcgtcttcaaagcctccgtcgctttattacagaacagagccgatgtcctcttcgaccctaacttagtcaaggaagaggacattaaagaggctatagaggacgctggatttgaagccgagattttggctgagcctgttacttctgggaccaagacgcaagctactttggtgggtcagttcactattggaggcatgacttgtgctgcttgtgttaactctgttgaaggcattctaagagatctccctggagtgaaacgagctgttgtggctttagctacttcgttgggagaagttgagtatgatcctaacgtgatcagtaaagatgatattgtgactgcgattgaagatgctggctttgagagttctcttgtgcagagtaatcagcaggataagctccttttgagggttgatggtgtgttgaacgagcttgatgctcaggttcttgaaggtatacttactagattgaatggggttaggcagtttcgtcttgacaggataacgggggagcttgaggttgtgtttgatcctgaggttgtgagttcgagatctttggttgatgggattgaaggagaagggtatgggaagttcaagttgcgtgtcatgagtccttacgagaggctgacttctaaagatactggagaggcctcaaacatgtttcgtcgttttatctcaagtctttctctcagtattccactcttcttcattcaagtgatctgcccccacattgctctttttgacaccgtgctggtatggagatgtggacccttcatggttggtggttggttgaagtgggccttggtaagtgtgattcagtttgttattggcaagcgtttctatgttgctgcatggagagctcttcgaaatggttcaactaacatggatgtgctggtcgctctgggcacgtctgcgtcttacttctactctgttggggctcttttatatggggcagtcactgggttttggtcaccaacttactttgatgcaagtgctatgttgataacatttgtcttgctgggtaaatatttggaatctcttgcaaaggggaaaacctcagatgctatgaagaaactagtacaacttactccagcaacagcgattctaatcgaaggcaaaggagaaagagagatagatgcattactgatccatcctggtgattcattaaaagttctacctggtgggaagatccctgcagatggtgttgtggtgtggggttcaagttacgtcaacgaaagtatggtgactggtgaatctgttcctgtatctaaagaggttgattcaccagtgatcggtggtaccatcaatatgcatggtgttcttcacatcaaagctacaaaagtgggatctgatgcagttctgagccagattattagtttggtggagacagcccaaatgtccaaagctcctatccagaaatttgcagactatgttgcgagtatatttgttccggtggtgatcactttggcattgttcactttagtaggctggtcaattggtggagctgttggagcttacccagacgaatggctaccccaaaacggaactcactttgttttctcgcttatgttctcaatatccgttgtggtaattgcttgcccttgtgcactcggcttggcaacaccgaccgctgtcatggtggcaacaggagttggagcaaccaatggtgtattgatcaaaggaggtgatgcattggagaaagctcacaaagtgaaatatgtaattttcgacaagacaggcaccttaacgcaagggaaagctaccgtgacaaccgctaaagtcttctcggagatggaccgtggagagttcctcacacttgttgcttccgctgaggctagtagtgaacacccgttggcaaaagctatagttgagtacgctcgtcatttccacttctttgatgaatctgccgaggacggcgacacaagtaacaaagtctctcaaaacgctggatggttactggacacatcagacttctctgcccttcctgggaaaggcattcagtgcttagtagacaacaagctgattctggtgggaaaccgtaaacttatgtcagaaaactccataaccatcccagaccacgtcgagaagtttgttgaggagcttgaagaaagcgcaaagacaggagtcattgtagcctatagcggccaattagtaggggtgatgggagtagctgatccgctaaagcgagaagctgctgtagtcgtggaaggtctccttagaatgggggttcgacccattatggttacaggtgataactggagaacagcaagagcagtcgccaaagaggttggtatcgaagacgtgagagcggaagtaatgccagcaggaaaagctgaagtgatccgttcactgcaaaaagacggaagcacggtggcgatggttggagatggaatcaatgactcgccggctctagccgctgcagacgtgggaatggccattggtgcagggaccgatgtagcaatagaagcagctgattacgttctgatgagaaacaacttagaagatgttattacagccatcgatctctctcgcaaaaccttaacacgaatcaggttgaactacgttttcgccatggcttacaacgtggtgtcgataccgatagcagcaggagtgttcttcccggtcctgagggtgcaactgccgccgtgggccgcaggagcgtgcatggcactctcttcggtgagtgttgtttgctcgtctttgcttcttagaagatacaagaagccgagacttaccactattttggagatcaccaaggagtaaaagtctttttctttttttttctttcttaatttgagtgatttacttttgttttggtttgttgtttgtaatcatgtaacgacgataaaaatgggtcttgcgatgtttctcggccttcgttgtaaaaaatggcgtcctttcttgtgaaaaaaaaaaaaaaaaaaaaaaaaaaaaa

SEQ ID NO: 55700 - protein, 999 aa, Brassica napus
MAPSRRDLQLTPLSGDTAAEIGAMEEVRLLDSYDDDDNDDSLSKIEEGSGGSGLRKIQVGITGMTCAACSNSVEGALISVNGVFKASVALLQNRADVLFDPNLVKEEDIKEAIEDAGFEAEILAEPVTSGTKTQATLVGQFTIGGMTCAACVNSVEGILRDLPGVKRAVVALATSLGEVEYDPNVISKDDIVTAIEDAGFESSLVQSNQQDKLLLRVDGVLNELDAQVLEGILTRLNGVRQFRLDRITGELEVVFDPEVVSSRSLVDGIEGEGYGKFKLRVMSPYERLTSKDTGEASNMFRRFISSLSLSIPLFFIQVICPHIALFDTVLVWRCGPFMVGGWLKWALVSVIQFVIGKRFYVAAWRALRNGSTNMDVLVALGTSASYFYSVGALLYGAVTGFWSPTYFDASAMLITFVLLGKYLESLAKGKTSDAMKKLVQLTPATAILIEGKGEREIDALLIHPGDSLKVLPGGKIPADGVVVWGSSYVNESMVTGESVPVSKEVDSPVIGGTINMHGVLHIKATKVGSDAVLSQIISLVETAQMSKAPIQKFADYVASIFVPVVITLALFTLVGWSIGGAVGAYPDEWLPQNGTHFVFSLMFSISVVVIACPCALGLATPTAVMVATGVGATNGVLIKGGDALEKAHKVKYVIFDKTGTLTQGKATVTTAKVFSEMDRGEFLTLVASAEASSEHPLAKAIVEYARHFHFFDESAEDGDTSNKVSQNAGWLLDTSDFSALPGKGIQCLVDNKLILVGNRKLMSENSITIPDHVEKFVEELEESAKTGVIVAYSGQLVGVMGVADPLKREAAVVVEGLLRMGVRPIMVTGDNWRTARAVAKEVGIEDVRAEVMPAGKAEVIRSLQKDGSTVAMVGDGINDSPALAAADVGMAIGAGTDVAIEAADYVLMRNNLEDVITAIDLSRKTLTRIRLNYVFAMAYNVVSIPIAAGVFFPVLRVQLPPWAAGACMALSSVSVVCSSLLLRRYKKPRLTTILEITKE

SEQ ID NO: 55701 - DNA, 3400 bp, Arabidopsis thaliana
  CDS (172)..(3177)
aaaatttttttttcttcaaaaattcctccattgttattacataaaggaaaaaagaaaggtctctgagattttcaaatcaccatcatcatcatcgttgaagaagacgaagaagataccttcctctttatcttctccgatttctcaaccttcccgtctgcttgtcgtaaagaaatggcgccgagtagacgggatttacagcttactccggtcaccggaggttcttcttcccagatcagtgatatggaagaagttggtcttctcgattcgtatcacaacgaagcgaacgccgatgatattttgactaaaatcgaagaaggaagagatgtttccggtttaaggaagattcaggtcggagtcaccggtatgacttgtgctgcttgttctaattccgttgaagcagctttgatggacgttaatggcgtcttcaaagcctctgttgctttgttacagaatcgagccgatgtcgtcttcgaccctaatttagtcaaggaagaggatattaaagaagctatagaggatgctggatttgaggctgagatattggctgaagaacagacacaagctactttggtgggtcaatttacaattggaggtatgacttgtgcagcttgtgttaactctgttgaaggtattctaagagatcttcctggagtgaaaagagcagtggtagctttgtctacatcattaggagaagttgagtatgatccaaatgttattaacaaggatgatattgttaatgcgattgaagatgctgggtttgaaggttcgcttgtgcagagtaatcagcaggataagcttgttttaagggtggatgggattttgaatgagcttgatgctcaggttttagaagggatacttactagattgaatggggttagacagtttcgtcttgacaggatatctggagagcttgaggttgtgtttgatccggaagttgttagttcgagatctttggttgatgggattgaagaagatggatttgggaagtttaagttgcgtgttatgagcccttatgaaaggttgtcttcgaaagatactggagaggcctcaaatatgtttcggcgttttatctccagtcttgttcttagtattcctctcttcttcatccaagtaatctgcccccacattgctctttttgatgccttactggtatggagatgtggacccttcatgatgggtgattggttgaaatgggccttggtaagtgttattcagtttgttatcggcaagcgattctatgttgcagcatggagagctctacgaaatggttcaactaacatggatgtgctcgtcgctctgggcacgtctgcttcttacttctactctgttggggctcttttatatggagcagtcactggattttggtctccaacatactttgatgcaagcgccatgctgataacttttgtcttactgggaaaatatttagagtctcttgcaaaggggaaaacctcggatgctatgaagaaactagtacaacttacgccagcaacagcgattttactaactgaaggcaaaggaggaaagcttgtaggggaaagggagatagatgcattattgattcagcctggtgatacattaaaagttcatcccggtgcaaagatccctgcagatggtgttgtggtgtggggttcaagttacgttaatgaaagtatggtgactggtgaatcagttcctgtatcaaaagaggttgattcaccagtaatcgggggtactattaatatgcatggtgctcttcacatgaaagctacaaaggtgggatctgatgcagttctgagccagattattagtttggtcgagaccgcccaaatgtcaaaagctcctattcagaaatttgcggattatgttgcaagtatttttgttccggtagtgattactttggcattgttcaccttagtaggctggtcaattggtggagctgttggagcttacccagacgaatggcttccggagaacgggactcactttgttttctcgcttatgttctcaatatccgttgtggtaattgcttgtccttgtgcacttggcttggcaacaccgactgctgttatggtggcaacaggagttggagcaaccaatggtgtattgatcaaaggaggtgatgcattagagaaagctcacaaagtgaagtatgtaatctttgacaaaacaggcaccttaactcaaggaaaagctactgtgacaaccacaaaggtcttctcagagatggaccgtggagaattccttacacttgttgcgtctgctgaggctagcagtgaacacccattggcaaaagctatagttgcgtacgctcggcatttccacttctttgatgaatccactgaagatggcgaaacaaataacaaagatttgcaaaactctggatggttacttgatacctcggatttctctgctcttcccggaaaagggattcagtgcttagtcaatgagaagatgattctggtgggaaaccgtaaacttatgtcagaaaatgccataaacatcccagaccatgtcgagaaatttgtggaagatcttgaagaaagcggaaagacgggagtcattgtagcctataatgggaaattagttggtgtgatgggaatcgcggatcctctaaagcgagaagccgctttggttgtggaaggtctccttagaatgggtgttcgacccataatggttacaggtgataactggagaacagcaagagcagtcgccaaagaggttggtatcgaagatgtgagagcagaagtaatgccagctggtaaagctgacgttatacgttcgctgcaaaaggacggaagcacagtagccatggtaggagacggaatcaatgactctcccgctctagccgctgcagatgtgggaatggcaattggtgcaggaacagatgtagcaatagaagcagcagattacgttctgatgagaaacaacttagaagacgttataacagccatcgatctctctcgaaaaaccttaacacgaatccgattaaattacgtcttcgcaatggcgtacaatgtagtgtcaatcccgatagcagcaggagtgtttttcccggttctgcgggtgcaattaccgccttgggcagccggagcatgtatggcactctcttcggttagtgttgtttgctcttctttgcttcttagaagatacaagaagccaagacttaccactgttttgaaaatcaccacggagtaaaaagtcctttgttttcttacattggagtgactcgactacttttgttctgaaaataatttgtatttacttttcttttgtgctgttgttgttgtaatcatgtaacaacgatattggtcttggagaggtttctttttttctgtaagaaatgtgtcctctcggcctttgttgtaaaaaaatggtttcgatgctttgtgctcgattattaatgtaaaatggtgaaagt

SEQ ID NO: 55702 - protein, 1001 aa, Arabidopsis thaliana
MAPSRRDLQLTPVTGGSSSQISDMEEVGLLDSYHNEANADDILTKIEEGRDVSGLRKIQVGVTGMTCAACSNSVEAALMDVNGVFKASVALLQNRADVVFDPNLVKEEDIKEAIEDAGFEAEILAEEQTQATLVGQFTIGGMTCAACVNSVEGILRDLPGVKRAVVALSTSLGEVEYDPNVINKDDIVNAIEDAGFEGSLVQSNQQDKLVLRVDGILNELDAQVLEGILTRLNGVRQFRLDRISGELEVVFDPEVVSSRSLVDGIEEDGFGKFKLRVMSPYERLSSKDTGEASNMFRRFISSLVLSIPLFFIQVICPHIALFDALLVWRCGPFMMGDWLKWALVSVIQFVIGKRFYVAAWRALRNGSTNMDVLVALGTSASYFYSVGALLYGAVTGFWSPTYFDASAMLITFVLLGKYLESLAKGKTSDAMKKLVQLTPATAILLTEGKGGKLVGEREIDALLIQPGDTLKVHPGAKIPADGVVVWGSSYVNESMVTGESVPVSKEVDSPVIGGTINMHGALHMKATKVGSDAVLSQIISLVETAQMSKAPIQKFADYVASIFVPVVITLALFTLVGWSIGGAVGAYPDEWLPENGTHFVFSLMFSISVVVIACPCALGLATPTAVMVATGVGATNGVLIKGGDALEKAHKVKYVIFDKTGTLTQGKATVTTTKVFSEMDRGEFLTLVASAEASSEHPLAKAIVAYARHFHFFDESTEDGETNNKDLQNSGWLLDTSDFSALPGKGIQCLVNEKMILVGNRKLMSENAINIPDHVEKFVEDLEESGKTGVIVAYNGKLVGVMGIADPLKREAALVVEGLLRMGVRPIMVTGDNWRTARAVAKEVGIEDVRAEVMPAGKADVIRSLQKDGSTVAMVGDGINDSPALAAADVGMAIGAGTDVAIEAADYVLMRNNLEDVITAIDLSRKTLTRIRLNYVFAMAYNVVSIPIAAGVFFPVLRVQLPPWAAGACMALSSVSVVCSSLLLRRYKKPRLTTVLKITTE

SEQ ID NO: 55703 - DNA, 2256 bp, Cupriavidus metallidurans
  CDS (1)..(2256): transl_table=11
atggccgtatcgacggagtcaaaattccgagccgaacacgatggcaagcagtattacttttgcagcaactcctgccatcagaagtttctgcaggagccggcgaagtatgtgggggtgaagacctctgataccacggaaccggttgccgcgccggaagggaccatctacacgtgcccaatgcacccggagattcgtcgggatcgtcccgggaactgcccgaagtgcgggatggcgctggagccgctgttgccggatatcgaggacggcgaaaatccagagctgacggattttcgacgccgcttctggtggacgctgccgctgaccgcagtcgtctttgtactcgcgatgttcgggtctcggctgggcttgatgtcacccgacatgcaaagctggatggagtttgttctggcgacgccggtcgtcctgtgggcgggctggccatttttcgaacgctgcctgcaatcgttcgtcaatcgcagtccgaacatgtggaccctgattgggctgggaactggtgctgcctatatctatagcgtggtggcgacgattgcgccgggcgttttcccgcccgcgttcgccgcgcatgggcgtattggcgtgtattttgaggccgccgcggtcatcatctcgctcaccctgctcgggcagcttcttgagctcaaggcgcgctcgcagacctccgccgcaatcaaatctctgctcggcctggcaccaaaaactgcccgccgcattggcaccgacggacaagaggaggatgtggccctgaaccacgttcacgtgggagacctgttgcgggtccggcccggcgaaaaagtacccgtggacggcgtcgtcacggaaggtagcagctccatcgacgaatcgatgattacgggcgagccgatgccggtttcaaagcgcgcgggtgaccacgtcattggcgcgacgatcaacacttcgggcagcctgatcattcggtcggagaaggtcggtgcgcagaccatgttgtcccagatcgtccagatggttgcccaggcacagcggtcgaaggcgccgatgcagcgcatggcggatcgcgttgctggggtattcgtgctcgcagtcattggtgtggcggcggccacgtttctcgcgtggggactcttcgccccgagccgagttgggtatttggccctgatcaacgcggtcgccgtgctgattatcgcgtgcccatgcgcgcttggattggccacgccgatgtccatcatggtcgcaagcggtaagggtgctgcgaacggcgtgctatttcgggatgcggcggcgatcgaaaaccttcgcaaggttaccgcactgattgtggacaagaccggtacattgaccgagggccgacccgcctttgcgcgatctgtggggatcaacggctatggcgacgaagaggtgctgtggctcgccgcaagtcttgaccaagggagcgagcatccgctagccgccgcgctggtttccgccgcacgggatgcagggttgaccctggagaaggcagaaaattttgaatcaagcacagggattggcgttcgaggcaaagtggggggggaaaggctggccattggcaacacggcgctcatggaggaggagcgtgtccaggttgagccgttgcgtgcgcaagccgaggacctgcgcgcacagggagcgagcgtcatgtatctgtccgttgacggcacgctggctgggctacttgccgtgtcggaccctatcaagcactcgacaccagaagcgttgcagagtctgcgggacgagggtatccgcgtgatcatggccaccggtgatggcctcgccacagcgaaagcggtggccaccaatctgaacattgacgagttccgtggggaagtgaagcccgccgacaagcttgcgttggtgacgcaactgcaggacgctggcgacgtggtggccatggcgggtgacgggatcaatgacgcacctgcactggccaaggccgatgtgggtatcgccatgggcaccgggaccgatgttgcaatgaacagcgcccaggttaccctggtcaagggcgatttgcgcggcatcgcccgggcccgaaacctctcggaagcgacgatccgtaacatgaagcaaaacctggcatttgcctttgtctataacgcgcttggcgtgcccttggccgctggcgtcctgtacccgtttaccgggttgctgctgtcccccatgattgcggcgctcgcgatgagcctgagttccgcatcggtgatttccaacgcgctgaggctcaggcggacggctgtctga

SEQ ID NO: 55704 - protein, 751 aa, Cupriavidus metallidurans
MAVSTESKFRAEHDGKQYYFCSNSCHQKFLQEPAKYVGVKTSDTTEPVAAPEGTIYTCPMHPEIRRDRPGNCPKCGMALEPLLPDIEDGENPELTDFRRRFWWTLPLTAVVFVLAMFGSRLGLMSPDMQSWMEFVLATPVVLWAGWPFFERCLQSFVNRSPNMWTLIGLGTGAAYIYSVVATIAPGVFPPAFAAHGRIGVYFEAAAVIISLTLLGQLLELKARSQTSAAIKSLLGLAPKTARRIGTDGQEEDVALNHVHVGDLLRVRPGEKVPVDGVVTEGSSSIDESMITGEPMPVSKRAGDHVIGATINTSGSLIIRSEKVGAQTMLSQIVQMVAQAQRSKAPMQRMADRVAGVFVLAVIGVAAATFLAWGLFAPSRVGYLALINAVAVLIIACPCALGLATPMSIMVASGKGAANGVLFRDAAAIENLRKVTALIVDKTGTLTEGRPAFARSVGINGYGDEEVLWLAASLDQGSEHPLAAALVSAARDAGLTLEKAENFESSTGIGVRGKVGGERLAIGNTALMEEERVQVEPLRAQAEDLRAQGASVMYLSVDGTLAGLLAVSDPIKHSTPEALQSLRDEGIRVIMATGDGLATAKAVATNLNIDEFRGEVKPADKLALVTQLQDAGDVVAMAGDGINDAPALAKADVGIAMGTGTDVAMNSAQVTLVKGDLRGIARARNLSEATIRNMKQNLAFAFVYNALGVPLAAGVLYPFTGLLLSPMIAALAMSLSSASVISNALRLRRTAV

SEQ ID NO: 55705 - DNA, 2229 bp, Streptococcus mutans
  CDS (1)..(2229): transl_table=11
atgagtgaagaagtatttttgatagatggcatgacctgtgcctcttgtgccatcaatgttgaaaatgccgttaaaaaactagacggtattgaaagcgcagtagtcaatttgacaactgaaaaaatgacgatagattacgatgccgctaaggttagtgaagcagatgttactaaggcagttgctggtgcaggctatggcgctaaagtttatgacccaacgacggctgaaagtcaaaaggatcgtgaagaacataagttagcaggtattaaaaaacgtcttttgtggacttctatttttaccattcccctcttttatattgctatgggaagtatggttggcttgcccttacctaactttttagcaccaagcagcgctccgctcacttatgcgatggttttgcttcttttgacaattccggttatcgtgttaagttggagcttctatgacaatggttttagatcgctttttaaaggtcatcctaatatggactcattagtgtccttagcaacaacagcggcgtttctttacagtctttatggaacttaccatgtttacttgggacatacacatcatgctcaccatctctattatgaatcggtagctgttattttaactctcattactttagggaaatactttgaaaccctatcgaaaggtcgaacctcagatgcgataaaaaaattaatgcatttgtctgctaaagaggctactctgatacgtgatggcgaggagattaaggttcctattgagcaagtgcaaatcagagatcaaattttagtcaaacccggtgaaaaaatacctgtggatggtcgagtcctgtcagggcattctgctattgatgaatccatgttaacaggagaatctattcctattgaaaaaatggcggatagccctgtttatgccgggtcaatcaatggtcagggaagtctgacttttgaggctgaaaaagttggcaatgaaaccttgctttcacaaattattaaattggttgagaacgctcagcaaactaaggcacccattgccaagattgctgataaggtatctgctgtctttgtacctgttattataacgattgctattttgactggtctcttctggtattttgtcatgggacaagactttaccttttcaatgacaatcagtgtcgctgttcttgtcattgcctgcccttgtgctttgggtcttgcaacgccaacggctattatggttggtacaggtcgtgctgctgaaaatggaatcctttataaacgtggtgatgtcttggaattggcacatcagattaatactattgttttcgataaaacaggcactattactcaaggtaaaccagaagttgttcatcaattttcttatcatgatcgaactgatttagtgcaagtgacagctgccttagaagcattatctgaacatccccttagtcaggccattgttgattatgctaaaaaagaagggactcatttacttgcagtggatgactttacttctctaacagggctaggactgaaaggttgtgttgctgatgaaactttgcttgttggtaatgaaaaattgatgcgtcaagctaatatctctctagaacaggctcaagcagattttaaggcagcaacagctcagggacaaacacccatttttgttgccagtgatggtcaattgttaggactgattacgattgcggacaaggtaaagaatgacagtgcagcaacagttaaagctttacagaatatgggggttgaagtggccatgctgacgggtgataatgaagaaactgcgcaggctattgccaaagaagtggggattacttttgttatcagtcaagttttctcgcaggaaaaaacacaggccattcttgatttgcaggcggaaggcaagaaagttgccatggttggagacggtattaatgacgctccggcacttgcgacagcagatattggcatttccatgggctctggaacagatattgccatggagtccgcggatattgtcttgatgaaacctgcaatgcttgatattattaaggcactgaaaattagtcgtgttactattattaatattaaagaaaatcttttctgggcatttatttataatgttctgtcagttcctattgctatgggagtactttatctctttggcggacctttgctggatccaatgattgctggtctagccatgagctttagctctgtttctgttgttctaaatgccctgcgtcttaaagttgtaaaattataa

SEQ ID NO: 55706 - protein, 742 aa, Streptococcus mutans
MSEEVFLIDGMTCASCAINVENAVKKLDGIESAVVNLTTEKMTIDYDAAKVSEADVTKAVAGAGYGAKVYDPTTAESQKDREEHKLAGIKKRLLWTSIFTIPLFYIAMGSMVGLPLPNFLAPSSAPLTYAMVLLLLTIPVIVLSWSFYDNGFRSLFKGHPNMDSLVSLATTAAFLYSLYGTYHVYLGHTHHAHHLYYESVAVILTLITLGKYFETLSKGRTSDAIKKLMHLSAKEATLIRDGEEIKVPIEQVQIRDQILVKPGEKIPVDGRVLSGHSAIDESMLTGESIPIEKMADSPVYAGSINGQGSLTFEAEKVGNETLLSQIIKLVENAQQTKAPIAKIADKVSAVFVPVIITIAILTGLFWYFVMGQDFTFSMTISVAVLVIACPCALGLATPTAIMVGTGRAAENGILYKRGDVLELAHQINTIVFDKTGTITQGKPEVVHQFSYHDRTDLVQVTAALEALSEHPLSQAIVDYAKKEGTHLLAVDDFTSLTGLGLKGCVADETLLVGNEKLMRQANISLEQAQADFKAATAQGQTPIFVASDGQLLGLITIADKVKNDSAATVKALQNMGVEVAMLTGDNEETAQAIAKEVGITFVISQVFSQEKTQAILDLQAEGKKVAMVGDGINDAPALATADIGISMGSGTDIAMESADIVLMKPAMLDIIKALKISRVTIINIKENLFWAFIYNVLSVPIAMGVLYLFGGPLLDPMIAGLAMSFSSVSVVLNALRLKVVKL

SEQ ID NO: 55707 - DNA, 2184 bp, Xanthomonas maltophilia
  CDS (1)..(2184): transl_table=11
atgtctgaacaaaaggttaaactaatggaagaagaaatgaacgtctatcgggtccaaggatttacatgtgcaaattgtgcaggaaagtttgagaaaaatgttaaaaagattccaggcgttcaagacgcaaaagtaaactttggcgcttctaaaattgatgtatatggaaatgcatcggttgaagaacttgaaaaagcaggtgcttttgagaatctaaaagtatctcctgaaaaactagcgaatcaaacgatacaaagggttaaagatgacactaaggctcataaagaagagaaaacaccattttataaaaaacatagtacattgctgtttgccacactactaattgcttttggttacctttctcactttgtaaatggagaagataacctcgtaacttccatgttatttgtaggttctattgtaattggcggatattcattatttaaagtcggttttccaaatttgatacgctttgatttcgacatgaaaaccttgataaccgttgctgttattggagctaccattattggtaaatgggcagaggcatctattgttgttattctctttgcaatcagtgaagcacttgaacgcttctctatggacagagcaagacaatccatacgttcattgatggatatcgccccaaaagaagcactagttagacgaaatggtcaggaaataataatccatgtggacgatatcgctgtgggtgatatcatgattgtcaaaccaggggagaaaattgccatggatggaatcattgtgaatggcttgtcggttgtcaatgaggcagctataacaggagaatctgttcccgtctccaaagcggtagatgacgaagtatttgcaggtacgcttaacgaagagggactaattgaagtaaaaatcaccaaatacgtagaagatacaaccattgccaagattattcatcttgttgaagaagcacaaggggagcgtgctccagcccaagcattcgttgataaatttgcgaaatactacactccgatcattatggttattgcagccttggttgcagtcgttccacccctattctttggtggcagttgggatacatgggtttatcaaggattagcagttcttgtagttggatgtccttgtgcattagttatttctactccaatctcgattgtctcggcaattggaaatgcagcgaaaaaaggtgtgttggttaaaggtggtgtctatctcgagaaattaggagacattaagacagtcgcatttgataaaacaggaacactgacaaaaggtgtaccagtggtaacagattttgaagtattaaatgaccaagtggaagaaaaagagctattctctaccattacagctttagaatatcgttcacaacatccacttgcttcagcaataatgaaaaaggcagagcaagataatatcccttattctaatgtacaagtggaagaattcacttcgattactgggcgaggtataaaagggattgtaaacggaactacttactatattggaagcccaaaacttttcaaggaattaaatgtttccgattttagccttgggtttgaaaacaatgtgaaaatcctacaaaaccaaggaaaaacagccatgattattggaacggaaaaaacaattctcggcgtaattgccgttgcagatgaggttcgtgaaacaagtaaaaatgtgattcaaaaacttcatcagttaggtatcaagcaaacaattatgctgacaggtgataatcaaggtactgcaaatgcaatcggtacacatgtaggcgtttctgatattcagtctgaattgatgccacaggataaattagattatattaaaaaaatgcaatcagagtatgataatgtagctatgattggcgatggcgttaatgatgctccagcacttgctgcatctactgttggaattgcaatgggcggtgctggaacggatactgcaattgaaacagctgatattgcattaatgggagatgatttaagtaagcttccatttgcagtaagactcagtcgaaaaactttaaatatcattaaagctaacatcacttttgctatcggaattaaaataattgccttactattagttatcccgggatggttaactctttggatagcgattctttccgatatgggagctactattttggtagcattaaatagtttacgactgatgagagtgaaggataaatag

SEQ ID NO: 55708 - protein, 727 aa, Xanthomonas maltophilia
MSEQKVKLMEEEMNVYRVQGFTCANCAGKFEKNVKKIPGVQDAKVNFGASKIDVYGNASVEELEKAGAFENLKVSPEKLANQTIQRVKDDTKAHKEEKTPFYKKHSTLLFATLLIAFGYLSHFVNGEDNLVTSMLFVGSIVIGGYSLFKVGFPNLIRFDFDMKTLITVAVIGATIIGKWAEASIVVILFAISEALERFSMDRARQSIRSLMDIAPKEALVRRNGQEIIIHVDDIAVGDIMIVKPGEKIAMDGIIVNGLSVVNEAAITGESVPVSKAVDDEVFAGTLNEEGLIEVKITKYVEDTTIAKIIHLVEEAQGERAPAQAFVDKFAKYYTPIIMVIAALVAVVPPLFFGGSWDTWVYQGLAVLVVGCPCALVISTPISIVSAIGNAAKKGVLVKGGVYLEKLGDIKTVAFDKTGTLTKGVPVVTDFEVLNDQVEEKELFSTITALEYRSQHPLASAIMKKAEQDNIPYSNVQVEEFTSITGRGIKGIVNGTTYYIGSPKLFKELNVSDFSLGFENNVKILQNQGKTAMIIGTEKTILGVIAVADEVRETSKNVIQKLHQLGIKQTIMLTGDNQGTANAIGTHVGVSDIQSELMPQDKLDYIKKMQSEYDNVAMIGDGVNDAPALAASTVGIAMGGAGTDTAIETADIALMGDDLSKLPFAVRLSRKTLNIIKANITFAIGIKIIALLLVIPGWLTLWIAILSDMGATILVALNSLRLMRVKDK

SEQ ID NO: 55709 - DNA, 3594 bp, Candida albicans
  CDS (1)..(3594): transl_table=12
atgcagaaatttattattaattttgcaaatatccattgcgataaatgtgaaggaatcataagaaacgttgtgagtcgctattacaaaattagtgatgagaccgatttaaatgcaaacataaagccatctgaggttattttcaaactcgaaaacaatgaagttacgttgtatggtaatgatttaattgatttccatggcgatatcaagagtatcattaaaagtttggggaaatctgggtttgatattttgtcctgggatttacacaatggtgacgaaaccgtgagttcatcacaaattgtcaatactaatatccaaggagccaatgaacctgacggttttatagatattgttggaatgtaccacaaatttattaactcaagaaacaaaaagaagcatatgaaatactgtaaagtgtgtcaagagtcagaacaacacaagaagaagtcgacggattcagatttttcctcgagcagtgaggatacagtggttgaaataccacaccaagagtttagagcttcatttttggttacgggaatgacatgtgcgtcatgtgcacaatccatcactgacaacttaagatcgattttaggtgaatcaaaaaatgaagatgaacccaatttttctgtcaatgtgattcagcaatcagtggttgtgattattcctaacaaacagattattaacaaaatagttgatgcgatcaatgacatggggtttgattgtaaattaattgaagttctaccagtgcaaagatcggttaatactaaagttacagcattgattggaggaatgacatgtgctgcttgtgcaaattcgattgacagtgctgtcaaagaattaccttttattttggaaagtggaattaatgtggtgactaaagctgctcaatttgttttagaggatgacggcggtctgaatatcgccaaattaaaggagacaattgaagattgtggatttgattttgaattgttaagcaccgagaaagtcaattatacatcggggaaacaaaaaccaagatctatcaatttaaaagtaaatggaatgttttgtaaccattgtccagatattataacacaatatttaaccaattacggtgatgctgttgtcattaatgatccaatatctcttgaccacccagtgatcaagtttacatatgtgccactgcaaaccttaaaaacgaggaaaatcttgtttgatttgaaccacctcaaagatgatggtaatggtgggtatactataactcctaatgaaaaaggcgcttttgaatgtgaaattattaaaccagtgacagtcgatgagcacgttagaaagttggctcacagagaagttttaggcttagcaataaggttggccatagcaactttgtttgcaattcccacatttatatttggtattgttgctatgtcgttgttgcctaaacatcaccctttccgagtttgggtcgaagatccattatgggtaggaaatgtttcacggaactcatggatcttgtttattttagcaacaccggtttatttttttgcagctgatactttccatcgtaaggcaattaaagagataaaatctttatggtttcataaaaattcttttaaatctagattactcaagtttgggtctatgaatttattgatgagtttgggaacaactgtggcttattttgctagcattgttttgattgggttaagtgcaacacagaaacccatgacccatcatggattgcacacgacatattttgattctgttgtgtttttgtcattctttttgttaattggtaaattattacaaagttattctaaaagcaaaactgcggacgctatttcggagttatcaaagttgaaacaaacggaagctacattaatcgaggatgacaaagatacacgtgttgatattcagtcgcttgaaattggtgatcagataagaattggtacaggggagtctccaccggtagattgtgtcttagtggaaggaagcactgagtttgatgaaagtgcattgaccggtgaatcgactccagttaaacatcaggagggccaccagatcttttccggtaccgttaatattggtaatagttcagttgttggaaaagtcactagtctcgaaggagattcattgttaaatcaaattgtgaatacggtaagagatggtcaaatgcgcaaagcacctatggagcgcacagctgatttgattactggttattttgttccattgattattgcttgtgccgttattacatgggttatatggttggctttgggctattcaggagccttacctcaaagctatttggacattgatgttggtggatggactgtgtggtcacttgaatttgccattgcagtgtttgttgttgcatgtccttgtggaattggtcttgctgcgccaacagctctttttgttggttctggattggcagcaaagaatggtattttagctaaaggtggtggggttgcattccaggatggagccaatgtcaacatcgtgtgttttgataaaactggaacattgactaaaggagaattaacaattactgatttccatttccctgataaaagctctattgctaaaacgtttgctttgcaagcagctcgtgatttagaggttccatctcatcatccattgggcaaagcagtgaaatcgtttgtgacatcgtacgatggaaaatcattgactgcaaataagattcctcaagttgagactgttccaggaaaaggattgagaggacaaataatctacgacgagggcgatgatatatggaatgagtacaagccaacacaagcaattcttggtaacgaaaaattaatggaagaaaatgatattgaattcacagaaaaggaaagacaatggttaaagaaatggaagggagaatgtaaatcagttattttagttggtttacagtgcgaatcatattttaaagactccaagtttcatttggcacttataatggctgctagagaccagcttagaccagaaactaaaaaagttattgagtttttgaaacataaagacatcgaatgttggatgattactggtgataacaagcttacagcggatgctatcgctaaggagataggaattgagaatgttgtcagtgaggtgttaccagatgaaaaagaagcacaaattaaaaagattcgacaattgaacctgggtggtaaaaaagaaccagtgattgccatgattggtgatggaatcaatgatgctccagctttagcctcggcggatgttggaattgctttatcttcaggtgcagatttggcagttacttccagtgattttattttacttaataaaatccatcctttagtgagtcttgcaacacttttagatatttgttccaaagttttccaaagagttaagttgaattttggatggagtttagtgtacaatttgatagctcttcctattgctgctggggtgatctacccttataaaaattccagattggatcctgtgtgggccagtgctgctatggctttgtcttctgtcagtgtggtcttgagtagtttggctttgaaattgtataaatcactgctcaaagctgaagattttggtgttgatgatagtaccgagagtgagctttcaccaaacgaagtataa

SEQ ID NO: 55710 - protein, 1197 aa, Candida albicans
MQKFIINFANIHCDKCEGIIRNVVSRYYKISDETDLNANIKPSEVIFKLENNEVTLYGNDLIDFHGDIKSIIKSLGKSGFDILSWDLHNGDETVSSSQIVNTNIQGANEPDGFIDIVGMYHKFINSRNKKKHMKYCKVCQESEQHKKKSTDSDFSSSSEDTVVEIPHQEFRASFLVTGMTCASCAQSITDNLRSILGESKNEDEPNFSVNVIQQSVVVIIPNKQIINKIVDAINDMGFDCKLIEVLPVQRSVNTKVTALIGGMTCAACANSIDSAVKELPFILESGINVVTKAAQFVLEDDGGSNIAKLKETIEDCGFDFELLSTEKVNYTSGKQKPRSINLKVNGMFCNHCPDIITQYLTNYGDAVVINDPISLDHPVIKFTYVPSQTLKTRKILFDLNHLKDDGNGGYTITPNEKGAFECEIIKPVTVDEHVRKLAHREVLGLAIRLAIATLFAIPTFIFGIVAMSLLPKHHPFRVWVEDPLWVGNVSRNSWILFILATPVYFFAADTFHRKAIKEIKSLWFHKNSFKSRLLKFGSMNLLMSLGTTVAYFASIVLIGLSATQKPMTHHGLHTTYFDSVVFLSFFLLIGKLLQSYSKSKTADAISELSKLKQTEATLIEDDKDTRVDIQSLEIGDQIRIGTGESPPVDCVLVEGSTEFDESALTGESTPVKHQEGHQIFSGTVNIGNSSVVGKVTSLEGDSLLNQIVNTVRDGQMRKAPMERTADLITGYFVPLIIACAVITWVIWLALGYSGALPQSYLDIDVGGWTVWSLEFAIAVFVVACPCGIGLAAPTALFVGSGLAAKNGILAKGGGVAFQDGANVNIVCFDKTGTLTKGELTITDFHFPDKSSIAKTFALQAARDLEVPSHHPLGKAVKSFVTSYDGKSLTANKIPQVETVPGKGLRGQIIYDEGDDIWNEYKPTQAILGNEKLMEENDIEFTEKERQWLKKWKGECKSVILVGLQCESYFKDSKFHLALIMAARDQLRPETKKVIEFLKHKDIECWMITGDNKLTADAIAKEIGIENVVSEVLPDEKEAQIKKIRQLNSGGKKEPVIAMIGDGINDAPALASADVGIALSSGADLAVTSSDFILLNKIHPLVSLATLLDICSKVFQRVKLNFGWSLVYNLIALPIAAGVIYPYKNSRLDPVWASAAMALSSVSVVLSSLALKLYKSSLKAEDFGVDDSTESELSPNEV

SEQ ID NO: 55711 - DNA, 3651 bp, Saccharomyces cerevisiae
  CDS (1)..(3651)
atgaagccggaaaaactcttctccggtttaggtaccagcgatggcgagtatggagtggtaaatagcgagaacatatcaatagatgctatgcaagataatagaggcgagtgtcatcttaggtccatagaaaggcatgctaatgacaatctgggattggtctcccagcgagactgtaccaatcggcccaaaattactcctcaggaatgtttgagtgagactgagcagatatgccatcatggcgagaataggactaaggctgggttagatgtagacgatgctgaaaccggtggtgaccacaccaatgaatcccgtgtagatgaatgttgtgctgagaaagtgaacgacactgagactggcttggatgtggacagctgttgcggcgatgctcaaaccggtggggaccacaccaatgaatcctgtgttgatgaatgctgcgttagagattcttcagtgatggtcgaggaaggtacaggcagctgcgaagctgtatcttctaaagaacaattgctgaccagctttgaagttgttccaagcaaatctgaaggtctgcaatctattcatgatattagagagacaactcgctgcaataccaattccaaccaacacacagggaagggtaggctttgccttgaatccagtgactctacactcaagaaaagacgttgtaaagttagcagacagaaaattgaagtttccagtaagcctgagtgctgcaacatttcatgtgttgagcggattgcatctcgtagctgtgaaaagaggacttttaaaggtaccaccaatgttggaatttctgggagtagctctaccgacagtttaagcgagaagttcttcagcgaacagtactctagaatgtacaatcgttactcctcaattttgaaaaatttaggttgtatctgtaactatttgcgtactttgggaaaggaatcttgttgtctcccaaaggtgcgtttttgtagcggggagggtgcttctaaaaagacaaaatactcctaccgcaacagttctggatgtttaacaaagaaaaagacctatggagacaaagaaaggttgagcaatgacaatggccatgctgattttgtttgttctaaaagttgttgcactaaaatgaaggattgtgctgttacttcaactatttctggacactcttcgagtgaaatttcaagaatcgtatcaatggaaccaattggaaatcatcttaatcttgaggcaggatctaccggtactgagcacattgttcttagtgtttcaggaatgacctgtactggttgtgaaacaaaacttaagaaatcatttggcgcgctcaaatgtgttcacggtttgaagaccagtttaatattatcgcaagctgaatttaatctggatcttgctcagggatctgtcaaggacgttatcaagcacttgagcaaaactactgaattcaagtacgaacagatttcaaatcatgcttcaactatagatgttgttgctccttatgcagcaaaagattttattaatgaggaatggccacaaggtgtcacagagctgaaaattgttgagagaaatgtcattcgtatttactttgacccaaaggttataggtgccagagatcttgtcaatgaaggatggagcgtgcctgttagtattgctccattcagttgtcatccaaccattgaagtgggaaggaagcatttagttcgtgtaggctgcacgaccgctttatccataatattgacgatcccgattctcgtgatggcttgggctccacagcttcgtgaaaaaatttcaactatgtccgtgtcaatggtgctagcaactattatccaatttgttattgcaggaccgttttacttaaatgccttgaagagtttgatattttccaggctcattgaaatggatctactaatagttttaagcactagcgctgcctacatattttcgattgtatcatttggatatttcgttgctggacacccgttatctacggagcagttttttgagaccagctctttgcttgtaactctcatcatggttggtcgctttgtgagtgaactagctagacatagggctgtaaagtcaatatcagtacgttctttacaggcctcttctgctattctggtagataaaactggtaaagagacggaaattgatattagacttctccaatatggcgatatttttaagattttacctgattcaagaatcccgactgatggaacagtcatttctgggtcttctgaagtcgacgaagcgttaatcacaggtgaatctatgccagtcccgaaaaagtgtcaatcaattgttgttgcaggatcggtaaatggcactggtaccttgtttgtaaagctgagcaagcttccagggaacaatactattagtaccatagccacgatggtcgatgaagcaaaattaactaagccaaagatccaaaatatcgctgataaaattgcaagttatttcgtgccaactatcattggaatcactgtcgtcaccttttgcgtttggatagcggttggaatccgtgtgcaaaagcaatcccgctccgatgccgtaattcaggccattatatatgccattacggtacttatcgtgtcatgtccctgcgcgattggacttgccgttcctatcgtatttgttattgcaagtggcgtcgctgcgaaaagaggggtaatcttcaaatcagcagagagtatagaagttgctcacaacacttcgcatgttgtcttcgataaaacgggtaccctaactgaaggaaaacttactgtagtacatgaaactgttaggggtgatcgtcataattctcaatctttgttgcttggattaactgaaggaataaaacacccagtttccatggcaatagcatcatatctcaaagaaaaaggtgtttctgctcaaaatgtttctaatacaaaagctgtgactggtaagggggtagaaggaacatcatactctggtttgaagttacaaggagggaactgtcgttggcttggtcataacaatgatcctgacgttcgaaaagcccttgaacaaggatattctgtgttctgttttagtgttaatggttcagtcactgcagtttatgcattagaggactctttacgggcagatgctgtctccactattaacttgttacgccaaagagggatttcactacacattttatcaggggatgacgatggagccgttcgttctatggcagcccgtcttggaattgaaagctccaatattcgttctcacgcaacgcctgcagaaaagagtgaatatattaaggatattgtcgaaggaagaaattgcgatagttcttcgcagtcaaaaagaccggttgttgttttttgcggtgacggaacaaacgacgcaattgctttgactcaagcaacgattggagttcatatcaatgagggaagtgaggttgccaagctagctgctgatgtagttatgttaaagccaaagctcaacaatattttgaccatgataactgtaagtcaaaaggccatgtttagggtcaaattgaatttcttatggagttttacttacaacttatttgctatccttttggcggctggtgcctttgttgactttcatattccaccagagtatgcgggtttaggggaactagttagtatcctccctgtaatttttgtagctacacttctgcgttatgcaaaggtttag

SEQ ID NO: 55712 - protein, 1216 aa, Saccharomyces cerevisiae
MKPEKLFSGLGTSDGEYGVVNSENISIDAMQDNRGECHLRSIERHANDNLGLVSQRDCTNRPKITPQECLSETEQICHHGENRTKAGLDVDDAETGGDHTNESRVDECCAEKVNDTETGLDVDSCCGDAQTGGDHTNESCVDECCVRDSSVMVEEGTGSCEAVSSKEQLLTSFEVVPSKSEGLQSIHDIRETTRCNTNSNQHTGKGRLCLESSDSTLKKRRCKVSRQKIEVSSKPECCNISCVERIASRSCEKRTFKGTTNVGISGSSSTDSLSEKFFSEQYSRMYNRYSSILKNLGCICNYLRTLGKESCCLPKVRFCSGEGASKKTKYSYRNSSGCLTKKKTYGDKERLSNDNGHADFVCSKSCCTKMKDCAVTSTISGHSSSEISRIVSMEPIGNHLNLEAGSTGTEHIVLSVSGMTCTGCETKLKKSFGALKCVHGLKTSLILSQAEFNLDLAQGSVKDVIKHLSKTTEFKYEQISNHASTIDVVAPYAAKDFINEEWPQGVTELKIVERNVIRIYFDPKVIGARDLVNEGWSVPVSIAPFSCHPTIEVGRKHLVRVGCTTALSIILTIPILVMAWAPQLREKISTMSVSMVLATIIQFVIAGPFYLNALKSLIFSRLIEMDLLIVLSTSAAYIFSIVSFGYFVAGHPLSTEQFFETSSLLVTLIMVGRFVSELARHRAVKSISVRSLQASSAILVDKTGKETEIDIRLLQYGDIFKILPDSRIPTDGTVISGSSEVDEALITGESMPVPKKCQSIVVAGSVNGTGTLFVKLSKLPGNNTISTIATMVDEAKLTKPKIQNIADKIASYFVPTIIGITVVTFCVWIAVGIRVQKQSRSDAVIQAIIYAITVLIVSCPCAIGLAVPIVFVIASGVAAKRGVIFKSAESIEVAHNTSHVVFDKTGTLTEGKLTVVHETVRGDRHNSQSLLLGLTEGIKHPVSMAIASYLKEKGVSAQNVSNTKAVTGKGVEGTSYSGLKLQGGNCRWLGHNNDPDVRKALEQGYSVFCFSVNGSVTAVYALEDSLRADAVSTINLLRQRGISLHILSGDDDGAVRSMAARLGIESSNIRSHATPAEKSEYIKDIVEGRNCDSSSQSKRPVVVFCGDGTNDAIALTQATIGVHINEGSEVAKLAADVVMLKPKLNNILTMITVSQKAMFRVKLNFLWSFTYNLFAILLAAGAFVDFHIPPEYAGLGELVSILPVIFVATLLRYAKV

SEQ ID NO: 55713 - DNA, 3594 bp, Candida albicans
  CDS (1)..(3594): transl_table=12
atgcagaaatttattattaattttgcaaatatccattgcgataaatgtgaaggaatcataagaaacgttgtgagtcgctattacaaaattagtgatgagaccgatttaaatgcaaacataaagccatctgaggttattttcaaactcgaaaacaatgaagttacgttgtatggtaatgatttaattgatttccatggcgatatcaagagtatcattaaaagtttggggaaatctgggtttgatattttgtcctgggatttacacaatggtgacgaaaccgtgagttcatcacaaattgtcaatactaatatccaaggagccaatgaacctgatggttttatagatattgttggaatgtaccacaaattcattaactcaagaaacaaaaagaagcatatgaaatactgtaaagtgtgtcaagagtcacaacaacacaagaagaagtcgacggattcagatttttcctcgagcagtgaggatacagtggttgaaataccacaccaagagtttagagcttcatttttggttacgggaatgacatgtgcgtcatgtgcacaatccattactgacaacttaagatcgattttaggtgaatcaaaaaatgaagatgaacccaatttttctgtcaatgtgattcagcaatcagtggttgtgattattcctaacaaacagattattaacaaaatagttgatgcgatcaatgacatggggtttgattgtaaattaattgaagttctaccagtgcaaagatcggttaatactaaagttacagcattgattggaggaatgacatgtgctgcttgtgcaaattcgattgacagtgctgtcaaagaattaccttttattttggaaagtggaattaatgtggtgactaaagctgctcaatttgttttagaggatgacggcggtctgaatatcgccaaattaaaggagacaattgaagattgtggatttgattttgaattgttaagcaccgagaaagtcaattatacatcggggaaacaaaaaccaagatctatcaatttaaaagtaaatggaatgttttgtaaccattgtccagatattataacacaatatttaaccaattacggtgatgctgttgtcattaatgatccaatatctcttgaccacccagtgatcaagtttacatatgtgccactgcaaaccttaaaaacgaggaaaatcttgtttgatttgaaccacctcaaagatgatggtaatggtgggtatactataactcctgatgaaaaaggcgcttttgaatgtgaaattattaaaccagtgacagtcgatgagcacgttagaaagttggctcacagagaagttttaggcttagcaataaggttggccatagcaactttgtttgcaattcccacatttatatttggtattgttgctatgtcgttgttgcctaaacatcaccctttccgaatttgggtcgaagatccattatgggtaggaaatgtttcacggaactcatggatcttgtttattttagcaacaccggtttatttttttgcagctgatactttccatcgtaaggcaattaaagagataaaatctttatggtttcataaaaattcttttaaatctagattactcaagtttgggtctatgaatttattgatgagtttgggaacaactgtggcttattttgctagcattgttttaattgggttaagtgcaacacagaaacccatgacccatcatggattgcacacgacatattttgattctgttgtgtttttgtcattctttttgttaattggtaaattactacaaagttattctaaaagcaaaactgcggacgctatttcggagttatcaaagttgaaacaaacggaagctacattgatcgaggataacaaagatacacgtgttgatattcagttgcttgaaattggtgatcagataagaattggtacaggggagtctccaccggtagattgtgtcttagtggaaggaagcactgagtttgatgaaagtgcattgaccggtgaatcgactccagttaaacaccaggagggccaccagatcttttccggtaccgttaatattggtaatagttcagttgttggaaaagttactagtctcgaaggagattcattgttaaatcaaattgtgaatacggtaagagatggtcaaatgcgcaaagcacctatggagcgcacagctgatttgattactggttattttgttccattgattattgcttgtgctgttattacatgggttatatggttggctttgggctattcaggagccttacctcaaagctatttggacattgatgttggtggatggactgtgtggtcacttgaatttgccattgcagtgtttgttgttgcatgtccttgtggaattggtcttgctgcgccaacagctctttttgttggttctggattggcagcaaagaatggtattttagctaaaggtggtggggttgcattccaggatggagccaatgtcaacatcgtgtgctttgataaaactggaacattgactaaaggagaattaacaattactgatttccatttccctgataaaagctctattgctaaaacgtttgccttgcaagtagctcgtgatttagaggttccatctcaccatccattgggcaaagcagtgaaatcgtttgtgacatcgtacgatggaaaatcattgactgcaaataagattcctcaagttgagactgttccaggaaaaggattgagaggacaaataatctacgacgagggtgatgatatatggaatgagtacaagccaacacaagcaattcttggtaacgaaaaattaatggaagaaaatgatattgaattcacagaaaaggaaagacaatgcttaaagaaatggaagggagaatgtaaatcagttattttagttggtttacagtgcgaatcatattttaaagactccaagtttcatttggcacttataatggctgctagagaccagcttagaccagaaactaaaaaagttattgagtttttgaaacataaagacatcgaatgttggatgattactggtgataacaagcttacagctgatgctatcgctaaggagataggaattgagaatgttgttagtgaggtgttaccagatgaaaaagaagcacaaattaaaaagattcgacaattgaacctgggtggtaaaaaagaaccagtgattgccatgattggtgatggaatcaatgatgctccagctttagcctcggcggatgttggaattgctttatcttcaggtgcagatttggcagtcacttccagtgattttattttacttaacaaaatgcatcctttagtgagtcttgcaacacttttagatatttgttccaaagttttccaaagagttaagttgaattttggatggagtttagtgtacaatttgatagctcttcctattgctgctggggtgatctacccttataaaaattccagattggatcctgtgtgggccagtgctgctatggctttgtcttctgtcagtgtggtcttgagtagtttggctttgaaattgtataaaccactgctcaaagctgaagattttggtgttgatgatagtaccgagagtgagctttcaccaaacgaagtataa

SEQ ID NO: 55714 - protein, 1197 aa, Candida albicans
MQKFIINFANIHCDKCEGIIRNVVSRYYKISDETDLNANIKPSEVIFKLENNEVTLYGNDLIDFHGDIKSIIKSLGKSGFDILSWDLHNGDETVSSSQIVNTNIQGANEPDGFIDIVGMYHKFINSRNKKKHMKYCKVCQESQQHKKKSTDSDFSSSSEDTVVEIPHQEFRASFLVTGMTCASCAQSITDNLRSILGESKNEDEPNFSVNVIQQSVVVIIPNKQIINKIVDAINDMGFDCKLIEVLPVQRSVNTKVTALIGGMTCAACANSIDSAVKELPFILESGINVVTKAAQFVLEDDGGSNIAKLKETIEDCGFDFELLSTEKVNYTSGKQKPRSINLKVNGMFCNHCPDIITQYLTNYGDAVVINDPISLDHPVIKFTYVPSQTLKTRKILFDLNHLKDDGNGGYTITPDEKGAFECEIIKPVTVDEHVRKLAHREVLGLAIRLAIATLFAIPTFIFGIVAMSLLPKHHPFRIWVEDPLWVGNVSRNSWILFILATPVYFFAADTFHRKAIKEIKSLWFHKNSFKSRLLKFGSMNLLMSLGTTVAYFASIVLIGLSATQKPMTHHGLHTTYFDSVVFLSFFLLIGKLLQSYSKSKTADAISELSKLKQTEATLIEDNKDTRVDIQLLEIGDQIRIGTGESPPVDCVLVEGSTEFDESALTGESTPVKHQEGHQIFSGTVNIGNSSVVGKVTSLEGDSLLNQIVNTVRDGQMRKAPMERTADLITGYFVPLIIACAVITWVIWLALGYSGALPQSYLDIDVGGWTVWSLEFAIAVFVVACPCGIGLAAPTALFVGSGLAAKNGILAKGGGVAFQDGANVNIVCFDKTGTLTKGELTITDFHFPDKSSIAKTFALQVARDLEVPSHHPLGKAVKSFVTSYDGKSLTANKIPQVETVPGKGLRGQIIYDEGDDIWNEYKPTQAILGNEKLMEENDIEFTEKERQCLKKWKGECKSVILVGLQCESYFKDSKFHLALIMAARDQLRPETKKVIEFLKHKDIECWMITGDNKLTADAIAKEIGIENVVSEVLPDEKEAQIKKIRQLNSGGKKEPVIAMIGDGINDAPALASADVGIALSSGADLAVTSSDFILLNKMHPLVSLATLLDICSKVFQRVKLNFGWSLVYNLIALPIAAGVIYPYKNSRLDPVWASAAMALSSVSVVLSSLALKLYKPSLKAEDFGVDDSTESELSPNEV

SEQ ID NO: 55715 - DNA, 3006 bp, Arabidopsis thaliana
  CDS (1)..(3006)
atggcgccgagtagacgggatttacagcttactccggtcaccggaggttcttcttcccagatcagtgatatggaagaagttggtcttctcgattcgtatcacaacgaagcgaacgccgatgatattttgactaaaatcgaagaaggaagagatgtttccggtttaaggaagattcaggtcggagtcaccggtatgacttgtgctgcttgttctaattccgttgaagcagctttgatgaacgttaatggcgtcttcaaagcctctgttgctttgttacagaatcgagccgatgtcgtcttcgaccctaatttagtcaaggaagaggatattaaagaagctatagaggatgctggatttgaggctgagatattggctgaagaacagacacaagctactttggtgggtcaatttacaattggaggtatgacttgtgcagcttgtgttaactctgttgaaggtattctaagagatcttcctggagtgaaaagagcagtggtagctttgtctacatcattaggagaagttgagtatgatccaaatgttattaacaaggatgatattgttaatgcgattgaagatgctgggtttgaaggttcgcttgtgcagagtaatcagcaggataagcttgttttaagggtggatgggattttgaatgagcttgatgctcaggttttagaagggatacttactagattgaatggggttagacagtttcgtcttgacaggatatctggagagcttgaggttgtgtttgatccggaagttgttagttcgagatctttggttgatgggattgaagaagatggatttgggaagtttaagttgcgtgttatgagcccttatgaaaggttgtcttcgaaagatactggagaggcctcaaatatgtttcggcgttttatctccagtcttgttcttagtattcctctcttcttcatccaagtaatctgcccccacattgctctttttgatgccttactggtatggagatgtggacccttcatgatgggtgattggttgaaatgggccttggtaagtgttattcagtttgttatcggcaagcgattctatgttgcagcatggagagctctacgaaatggttcaactaacatggatgtgctcgtcgctctgggcacgtctgcttcttacttctactctgttggggctcttttatatggagcagtcactggattttggtctccaacatactttgatgcaagcgccatgctgataacttttgtcttactgggaaaatatttagagtctcttgcaaaggggaaaacctcggatgctatgaagaaactagtacaacttacgccagcaacagcgattttactaactgaaggcaaaggaggaaagcttgtaggggaaagggagatagatgcattattgattcagcctggtgatacattaaaagttcatcccggtgcaaagatccctgcagatggtgttgtggtgtggggttcaagttacgttaatgaaagtatggtgactggtgaatcagttcctgtatcaaaagaggttgattcaccagtaatcgggggtactattaatatgcatggtgctcttcacatgaaagctacaaaggtgggatctgatgcagttctgagccagattattagtttggtcgagaccgcccaaatgtcaaaagctcctattcagaaatttgcggattatgttgcaagtatttttgttccggtagtgattactttggcattgttcaccttagtaggctggtcaattggtggagctgttggagcttacccagacgaatggcttccggagaacgggactcactttgttttctcgcttatgttctcaatatccgttgtggtaattgcttgtccttgtgcacttggcttggcaacaccgactgctgttatggtggcaacaggagttggagcaaccaatggtgtattgatcaaaggaggtgatgcattagagaaagctcacaaagtgaagtatgtaatctttgacaaaacaggcaccttaactcaaggaaaagctactgtgacaaccacaaaggtcttctcagagatggaccgtggagaattccttacacttgttgcgtctgctgaggctagcagtgaacacccattggcaaaagctatagttgcgtacgctcggcatttccacttctttgatgaatccactgaagatggcgaaacaaataacaaagatttgcaaaactctggatggttacttgatacctcggatttctctgctcttcccggaaaagggattcagtgcttagtcaatgagaagatgattctggtgggaaaccgtaaacttatgtcagaaaatgccataaacatcccagaccatgtcgagaaatttgtggaagatcttgaagaaagcggaaagacgggagtcattgtagcctataatgggaaattagttggtgtgatgggaatcgcggatcctctaaagcgagaagccgctttggttgtggaaggtctccttagaatgggtgttcgacccataatggttacaggtgataactggagaacagcaagagcagtcgccaaagaggttggtatcgaagatgtgagagcagaagtaatgccagctggtaaagctgacgttatacgttcgctgcaaaaggacggaagcacagtagccatggtaggagacggaatcaatgactctcccgctctagccgctgcagatgtgggaatggcaattggtgcaggaacagatgtagcaatagaagcagcagattacgttctgatgagaaacaacttagaagacgttataacagccatcgatctctctcgaaaaaccttaacacgaatccgattaaattacgtcttcgcaatggcgtacaatgtagtgtcaatcccgatagcagcaggagtgtttttcccggttctgcgggtgcaattaccgccttgggcagccggagcatgtatggcactctcttcggttagtgttgtttgctcttctttgcttcttagaagatacaagaagccaagacttaccactgttttgaaaatcaccacggagtaa

SEQ ID NO: 55716 - protein, 1001 aa, Arabidopsis thaliana
MAPSRRDLQLTPVTGGSSSQISDMEEVGLLDSYHNEANADDILTKIEEGRDVSGLRKIQVGVTGMTCAACSNSVEAALMNVNGVFKASVALLQNRADVVFDPNLVKEEDIKEAIEDAGFEAEILAEEQTQATLVGQFTIGGMTCAACVNSVEGILRDLPGVKRAVVALSTSLGEVEYDPNVINKDDIVNAIEDAGFEGSLVQSNQQDKLVLRVDGILNELDAQVLEGILTRLNGVRQFRLDRISGELEVVFDPEVVSSRSLVDGIEEDGFGKFKLRVMSPYERLSSKDTGEASNMFRRFISSLVLSIPLFFIQVICPHIALFDALLVWRCGPFMMGDWLKWALVSVIQFVIGKRFYVAAWRALRNGSTNMDVLVALGTSASYFYSVGALLYGAVTGFWSPTYFDASAMLITFVLLGKYLESLAKGKTSDAMKKLVQLTPATAILLTEGKGGKLVGEREIDALLIQPGDTLKVHPGAKIPADGVVVWGSSYVNESMVTGESVPVSKEVDSPVIGGTINMHGALHMKATKVGSDAVLSQIISLVETAQMSKAPIQKFADYVASIFVPVVITLALFTLVGWSIGGAVGAYPDEWLPENGTHFVFSLMFSISVVVIACPCALGLATPTAVMVATGVGATNGVLIKGGDALEKAHKVKYVIFDKTGTLTQGKATVTTTKVFSEMDRGEFLTLVASAEASSEHPLAKAIVAYARHFHFFDESTEDGETNNKDLQNSGWLLDTSDFSALPGKGIQCLVNEKMILVGNRKLMSENAINIPDHVEKFVEDLEESGKTGVIVAYNGKLVGVMGIADPLKREAALVVEGLLRMGVRPIMVTGDNWRTARAVAKEVGIEDVRAEVMPAGKADVIRSLQKDGSTVAMVGDGINDSPALAAADVGMAIGAGTDVAIEAADYVLMRNNLEDVITAIDLSRKTLTRIRLNYVFAMAYNVVSIPIAAGVFFPVLRVQLPPWAAGACMALSSVSVVCSSLLLRRYKKPRLTTVLKITTE

SEQ ID NO: 55717 - DNA, 2850 bp, Arabidopsis thaliana
  CDS (1)..(2850)
atggagtctacactctcagctttctcaaccgtcaaggcaacagcgatggctcgaagtagtggtggtccttcattacctctcctcactatttctaaagcacttaaccgccactttaccggcgccagacacctccatcctttattgctcgctcgctgttctccctccgtgcgacgtcttggtgggtttcatggcagtcgatttacttcgtcgaattcagctttgagaagcttgggagctgctgttttgccggtaatccgacaccgtttagagtgtttgtcgagctcatcgccgtctttcaggagtatctcaagtggcggcggttctggatttggggggtataatggtggaagcggcggtggtggtggcggaggatcggagagtggtgattccaagtcaaaactgggtgctaatgcaagtgatggtgtctctgttccgtcgtcagatatcattattctcgatgttggagggatgacatgtggagggtgttcagcaagtgtgaagaagatactggaaagccaacctcaagttgcttcagctagtgttaatctcaccaccgagacggcaattgtgtggcctgtaccggaagctaaaagtgtacctgattggcaaaagagtttaggcgagacgcttgcaaaccatctgaccaattgcgggtttcagtctactcctcgagatttggtgacagagaatttcttcaaagttttcgaaacaaagacaaaagacaagcaggctcgcttaaaagagagtggccgcgagcttgctgtttcatgggccctatgtgctgtatgcttggttggccatttaactcactttctaggggttaatgctccctggattcatgcgatccattcaacggggtttcatgtgtctttatgtttgattacgttgcttggtcctggacgcaagctagtacttgatggtatcaagagtcttttaaaaggttccccaaacatgaacacgctagttggtcttggtgctttgtcatcattttctgttagctcactggcagccatgattccaaaattgggctggaagacattttttgaggaaccagttatgttaatagcttttgtattgctgggaaggaatcttgaacagagagctaaaataaaagccaccagtgatatgactggccttctgagtgttttgccttcaaaagctcgccttctgcttgatggtgatctgcagaattcaactgttgaggttccttgtaatagtctctctgttggtgatctagtcgtcatactaccaggagatcgagttccagcagatggtgtggtcaagtcaggtagaagcaccattgatgagtcaagtttcacaggtgaaccattgccagtgacaaaagagtcagggagtcaagtcgcagcaggatctataaacctgaacggaactcttactgtcgaagtgcatagatcagggggtgaaactgcagttggggacattattcgtctggttgaagaggctcagagtagagaagcaccagtacagcagttggttgacaaggtcgcagggcgcttcacgtatggagtgatggcactctctgcagctacatttacattctggaatctatttggtgcacatgttcttccttctgccttgcataatgggagcccaatgtctttggcccttcaactatcttgcagcgttctggttgtggcttgtccttgcgcccttgggttggctactccaacggcaatgctggttggtacatcattaggagcaagaagaggattacttcttcgtggtggtgatattcttgaaaagttttccttggttgatactgttgtcttcgacaaaactgggacactgacgaagggacaccctgttgtgactgaagttattattcctgaaaatccaagacacaatttgaatgatacttggtcagaagtagaggttttgatgttagcagctgctgttgagtcaaacactactcaccctgttgggaaagcgattgtaaaagcagcccgggctcgtaattgtcaaacaatgaaggcagaggatggaacatttactgaagaaccagggtctggtgctgttgctattgtcaacaacaaaagggttacagttgggactctagaatgggtcaagagacatggagccaccgggaactcattgcttgcattagaagagcatgaaattaacaaccagtctgttgtgtatattggggtggataatacacttgctgcagtcatccgttttgaagataaagtcagggaggatgctgctcaagttgttgagaatttgactcgccagggaattgatgtgtacatgctgtctggtgacaagaggaatgctgccaattatgtagcttctgtcgtaggaattaatcatgaacgggttatagcaggagttaaaccagctgagaaaaagaattttatcaatgaacttcaaaaaaataagaagattgttgcaatggtgggggatggaataaacgatgctgctgctctggcatcatctaatgttggagtggccatgggtggtggtgcaggagcggccagtgaggtgtctcctgttgtcttgatgggcaatcggttaacacagttgcttgatgcgatggagctaagtcggcaaaccatgaagaccgtgaagcaaaacctttggtgggcgttcggatacaacattgtaggaatcccaattgcggctggagtgttgctaccattgactggaaccatgttgactccatcaatggcgggggctctcatgggtgtaagctctctcggtgtcatgactaattccttacttctaaggtacagattcttctcgaaccgaaacgacaaaaatgtcaaaccggaaccaaaagagggaacaaaacagccacatgagaacacaagatggaagcaaagctcttag

SEQ ID NO: 55718 - protein, 949 aa, Arabidopsis thaliana
MESTLSAFSTVKATAMARSSGGPSLPLLTISKALNRHFTGARHLHPLLLARCSPSVRRLGGFHGSRFTSSNSALRSLGAAVLPVIRHRLECLSSSSPSFRSISSGGGSGFGGYNGGSGGGGGGGSESGDSKSKLGANASDGVSVPSSDIIILDVGGMTCGGCSASVKKILESQPQVASASVNLTTETAIVWPVPEAKSVPDWQKSLGETLANHLTNCGFQSTPRDLVTENFFKVFETKTKDKQARLKESGRELAVSWALCAVCLVGHLTHFLGVNAPWIHAIHSTGFHVSLCLITLLGPGRKLVLDGIKSLLKGSPNMNTLVGLGALSSFSVSSLAAMIPKLGWKTFFEEPVMLIAFVLLGRNLEQRAKIKATSDMTGLLSVLPSKARLLLDGDLQNSTVEVPCNSLSVGDLVVILPGDRVPADGVVKSGRSTIDESSFTGEPLPVTKESGSQVAAGSINLNGTLTVEVHRSGGETAVGDIIRLVEEAQSREAPVQQLVDKVAGRFTYGVMALSAATFTFWNLFGAHVLPSALHNGSPMSLALQLSCSVLVVACPCALGLATPTAMLVGTSLGARRGLLLRGGDILEKFSLVDTVVFDKTGTLTKGHPVVTEVIIPENPRHNLNDTWSEVEVLMLAAAVESNTTHPVGKAIVKAARARNCQTMKAEDGTFTEEPGSGAVAIVNNKRVTVGTLEWVKRHGATGNSLLALEEHEINNQSVVYIGVDNTLAAVIRFEDKVREDAAQVVENLTRQGIDVYMLSGDKRNAANYVASVVGINHERVIAGVKPAEKKNFINELQKNKKIVAMVGDGINDAAALASSNVGVAMGGGAGAASEVSPVVLMGNRLTQLLDAMELSRQTMKTVKQNLWWAFGYNIVGIPIAAGVLLPLTGTMLTPSMAGALMGVSSLGVMTNSLLLRYRFFSNRNDKNVKPEPKEGTKQPHENTRWKQSS

SEQ ID NO: 55719 - DNA, 2988 bp, Arabidopsis thaliana
  CDS (1)..(2988)
atggcgacgaagcttttgtcgcttacatgcataaggaaagagagattcagcgagcgttaccctctggtgcggaagcaccttaccaggtctcgcgacggcggcggaggatcatcgtcggagacggcggcttttgagatcgatgatccgatttccagggcggtttttcaagtgttaggaatgacttgctctgcttgcgctggatctgttgaaaaggctatcaagcgtctccctggaattcacgatgctgtcatcgatgctctgaataatcgtgctcagattctgttttaccctaactctgtcgatgtggagacaattcgtgagactattgaggatgctggatttgaagcatcgttgatcgaaaatgaagcgaatgagaggtcgagacaagtttgtagaataagaattaatggtatgacttgtacttcgtgttcttcaacaatcgaaagagttttgcaatcggttaatggtgtacaaagagcacatgtggctttagcaattgaagaagctgagattcattatgatcctagactctcgagctatgatagactattggaggagatagaaaatgctggttttgaagctgtgcttataagtacaggcgaggatgtgagcaagattgatttgaagattgatggtgagcttactgatgaatccatgaaggttattgaaaggtcgcttgaagcacttcctggtgttcaaagtgttgagatcagccatggaactgataagatatctgtattgtacaaacctgatgtgacggggccgaggaatttcattcaggtgattgagtctactgtctttggtcatagtggtcacatcaaggcaacaatattctcagagggaggggtaggcagagaatctcaaaagcaaggggagattaagcagtattataagtcgtttctctggagtttggtttttacagtaccggtgtttttgacagccatggtctttatgtatatccctggaattaaagatttgctcatgtttaaggtcatcaatatgctcaccgttggagaaatcataaggtgtgttttggctactcctgtccagtttgtcattggttggagattttatactggctcttacaaggctttacgccgaggatcggctaatatggatgttctgattgctctggggacaaatgcagcttatttctattcattatacacagtgttgagagctgcaacatctcctgatttcaagggagtagatttctttgagactagtgccatgctcatttcctttatcatactaggaaaatatttggaggttatggctaaaggaaaaacatctcaagcgatcgcaaagcttatgaacttggcacccgacactgcgatattgttgagtttggacaaggaagggaatgtgactggtgaagaggagattgatggtcgattgatacagaagaatgacgtgatcaaaattgttcctggtgctaaagtagcttcagatggttatgtcatatggggacaaagtcatgtgaatgaaagtatgatcactggagaggctaggccagtggcaaagagaaagggtgatacagttataggaggcactttgaacgagaatggtgttctgcatgttaaggttacaagggttggttcagagagtgctcttgctcagattgttcgacttgttgagtccgcacaactggccaaagctccagtacagaagttggctgatcggatttccaagttctttgttcctcttgtaattttcctctcgttctcaacttggcttgcctggttcttagctgggaaactgcattggtaccctgaatcctggataccttcttcgatggatagctttgagctagctcttcagttcgggatctctgtcatggtcatagcttgtccatgtgctcttgggctggctactccaactgctgttatggttggtactggggttggtgcatcccaaggtgtgctgataaagggtggccaagccctagaaagagcacacaaggtaaattgcattgtctttgacaagacaggaactctcacgatggggaagcccgttgttgtgaaaacaaagctcctgaaaaacatggtacttcgagagttctatgaacttgttgctgcaactgaggtaaacagtgagcatccgttagcaaaggccattgtcgagtacgcgaagaaattcagagacgacgaagagaaccctgcctggccagaagcctgtgattttgtgtccatcactggaaagggagtgaaagccaccgttaaaggtagagagattatggtggggaacaagaatctgatgaatgatcataaagttattattccagatgatgctgaagagttgctagctgactctgaagatatggcccagaccggaattcttgtctccataaacagtgaactgattggagttttgtctgtttcggatcctctaaaaccgagtgctcgagaagccatctccattctaaaatccatgaatatcaaaagcatcatggtaactggtgacaactggggaacagcaaactcaattgctagagaagtcggtatcgactctgttatcgcagaagctaaacctgagcaaaaagcagagaaagtcaaggaattacaggctgcgggacatgttgtggcaatggtaggtgacggaatcaatgactcaccggctctcgtggcagcggatgtaggtatggcgataggtgcaggaacagacattgctatagaagcagcggatatagttctgatgaaaagcaacttagaagatgtgatcacagccattgatctttcaaggaaaacgttctcaagaatccgtctcaactacgtatgggctctcgggtataacctcatggggataccgatcgctgcgggagtgcttttcccagggacacgtttcaggttgcctccatggattgcaggtgctgcaatggctgcttcttctgttagtgttgtgtgttgctctctcttgcttaagaactacaagcgacctaagaagcttgatcatctggagattcgggagattcaggtggagcgagtttaa

SEQ ID NO: 55720 - protein, 995 aa, Arabidopsis thaliana
MATKLLSLTCIRKERFSERYPLVRKHLTRSRDGGGGSSSETAAFEIDDPISRAVFQVLGMTCSACAGSVEKAIKRLPGIHDAVIDALNNRAQILFYPNSVDVETIRETIEDAGFEASLIENEANERSRQVCRIRINGMTCTSCSSTIERVLQSVNGVQRAHVALAIEEAEIHYDPRLSSYDRLLEEIENAGFEAVLISTGEDVSKIDLKIDGELTDESMKVIERSLEALPGVQSVEISHGTDKISVLYKPDVTGPRNFIQVIESTVFGHSGHIKATIFSEGGVGRESQKQGEIKQYYKSFLWSLVFTVPVFLTAMVFMYIPGIKDLLMFKVINMLTVGEIIRCVLATPVQFVIGWRFYTGSYKALRRGSANMDVLIALGTNAAYFYSLYTVLRAATSPDFKGVDFFETSAMLISFIILGKYLEVMAKGKTSQAIAKLMNLAPDTAILLSLDKEGNVTGEEEIDGRLIQKNDVIKIVPGAKVASDGYVIWGQSHVNESMITGEARPVAKRKGDTVIGGTLNENGVLHVKVTRVGSESALAQIVRLVESAQLAKAPVQKLADRISKFFVPLVIFLSFSTWLAWFLAGKLHWYPESWIPSSMDSFELALQFGISVMVIACPCALGLATPTAVMVGTGVGASQGVLIKGGQALERAHKVNCIVFDKTGTLTMGKPVVVKTKLLKNMVLREFYELVAATEVNSEHPLAKAIVEYAKKFRDDEENPAWPEACDFVSITGKGVKATVKGREIMVGNKNLMNDHKVIIPDDAEELLADSEDMAQTGILVSINSELIGVLSVSDPLKPSAREAISILKSMNIKSIMVTGDNWGTANSIAREVGIDSVIAEAKPEQKAEKVKELQAAGHVVAMVGDGINDSPALVAADVGMAIGAGTDIAIEAADIVLMKSNLEDVITAIDLSRKTFSRIRLNYVWALGYNLMGIPIAAGVLFPGTRFRLPPWIAGAAMAASSVSVVCCSLLLKNYKRPKKLDHLEIREIQVERV

SEQ ID NO: 55721 - DNA, 2481 bp, Rhizobium meliloti
  CDS (1)..(2481): transl_table=11
atgactgcattcacacagatcgaaaagtccgctgccgtcccggcccctaccgacttcggcatcgagggaatgacctgcgcctcctgcgtgcggcgggtggagaaggccatctcggcagtgcccggcgtcgcctcggcaaccgtcaatctcgccaccgagcgggcaagcgtgcaattcaccggagcaccggacacgggcggcgttcttcttgctatcgagaaggccggctacgaacccaaggtcatcattcaggaattcggcatcgaaggcatgacctgcgcttcctgtgtgtcccgggtggagaaggcgctgaggactgtccccggcgtcgcggatgcctccgtgaacctggcgaccgagaagggcaccgtccggttcgtttcgggcgtagatgtcgccgcgatcgaagcagccgtaagagatgcgggatacgacgtcagaaaggcgaaggcttccggcgcaactgctgagccggaggaccgccgggaactggaaacccgcacgctgaagcgcctggtgatcctctcggccgtgcttacgctgcccctcttcctcgtcgaaatgggttcccacttcatgccgggcgtacacgaatggatcatggagaatatcggcatgcgccataatctctatatccagttcgcgctcgccaccgctgtcctgttcggacccggcctgcggttcttccggaagggcgtgccgaatctgctgcgctggacgccagacatgaattcccttgtcgtgcttggcaccaccgccgcctggggctattccgtcgtcgcgacattcgcatccggactgctgccctccgggacggcaaacgtgtactacgaggcggccgcggtcattgtcacgctgatcctgctcggccgttatctggaagcgcgcgccaagggtcgcaccagccaggcaatcaagcggcttctgggcttgcagccgaaaaccgctttcgttgcgcacggcgacgagttcgttgaaatccagatcagcgatgttgtcgtcggcgatgtcatcaggatcagaccgggcgagaagattccggtcgacggcacggttctcgatggcaactcctatgtagacgaatcgatgatcaccggagagcctgtgccggtccagaaagcggccggagccgaggtcgtcggcggcacgatcaacaagaatggctcgttcacgttcagggcgaccaaggtcggcggcgataccctgctcgcgcagatcatcaagatggtcgagacggcacaaggttcgaaactgccaatccaggcgctggtcgacaaggtgaccgcatggttcgtccccgccgtcatcctggtggccgtcctgaccttcgctgcctggtacgtcttcggcccgtcgcccgcgctgacattcgcgctcgtgaacgccgtcgccgttttgataatagcctgcccctgcgccatgggtctcgcgaccccgacctcgatcatggtcggcacgggacgcgctgccgaactcggcatcctcttccgcaagggcgaggcgctgcagagcctgcgggaggccgatgtgatcgcgctggacaagaccggaacacttacgaaaggacgtcccgagctgacggacatcgttccggccgatggcttcgaagccgacgaggtgttgtccttcgtcgccagcctagaagctctgtcggagcatccaatcgcggaagcaatcgtgtcggcggcaaagtccaggggcatcgccttggtccctgccaccgacttcgaagcaacacccggttttggcgttcgcggagccgtatccggcctgcctgtgcaggttggcgcggatcgtgcgttcagcggggtcgggattgatgtgagcccgtttgttgtggaggccgaacgccttggtaacagcgggaagtcaccgctctatgcggccatcgacgggcggctcgcggcgatcatcgcggtctccgatccgatcaaggacacgacgccgcaggccatcaaggctctgcacgacctcggcctcaaggtggcgatgatcaccggagacaaccgccgtaccgccgatgccatagccaggcagcttggcattgacgaggtcgttgccgaagtcctgcccgatggcaaggtcgacgcggtgaagaggctgcgcgaaggcggacgcaaggtcgcgttcatcggcgacggcatcaacgatgcgcccgcgctgactgaagccgacgtcggcatcgccgttggcactggcaccgacatcgcaatcgagagcgccgatgtggttctgatgtccggcgacttgatcggggtgccgaaagcgatcgccctcagcaaggcgacgatccggaacatcaagcagaacctgttctgggccttcgcctacaacgtcagcctggttccggtcgccgcgggcgttctctacccgctgaacggcacgctgctttcgcctatcctcgcggctgccgcgatggcgatgtcgagcgtcttcgttcttggtaacgccctgcggctgcgctccgtcaaccccgcctga

SEQ ID NO: 55722 - protein, 826 aa, Rhizobium meliloti
MTAFTQIEKSAAVPAPTDFGIEGMTCASCVRRVEKAISAVPGVASATVNLATERASVQFTGAPDTGGVLLAIEKAGYEPKVIIQEFGIEGMTCASCVSRVEKALRTVPGVADASVNLATEKGTVRFVSGVDVAAIEAAVRDAGYDVRKAKASGATAEPEDRRELETRTLKRLVILSAVLTLPLFLVEMGSHFMPGVHEWIMENIGMRHNLYIQFALATAVLFGPGLRFFRKGVPNLLRWTPDMNSLVVLGTTAAWGYSVVATFASGLLPSGTANVYYEAAAVIVTLILLGRYLEARAKGRTSQAIKRLLGLQPKTAFVAHGDEFVEIQISDVVVGDVIRIRPGEKIPVDGTVLDGNSYVDESMITGEPVPVQKAAGAEVVGGTINKNGSFTFRATKVGGDTLLAQIIKMVETAQGSKLPIQALVDKVTAWFVPAVILVAVLTFAAWYVFGPSPALTFALVNAVAVLIIACPCAMGLATPTSIMVGTGRAAELGILFRKGEALQSLREADVIALDKTGTLTKGRPELTDIVPADGFEADEVLSFVASLEALSEHPIAEAIVSAAKSRGIALVPATDFEATPGFGVRGAVSGLPVQVGADRAFSGVGIDVSPFVVEAERLGNSGKSPLYAAIDGRLAAIIAVSDPIKDTTPQAIKALHDLGLKVAMITGDNRRTADAIARQLGIDEVVAEVLPDGKVDAVKRLREGGRKVAFIGDGINDAPALTEADVGIAVGTGTDIAIESADVVLMSGDLIGVPKAIALSKATIRNIKQNLFWAFAYNVSLVPVAAGVLYPLNGTLLSPILAAAAMAMSSVFVLGNALRLRSVNPA

SEQ ID NO: 55723 - DNA, 2484 bp, Rhizobium meliloti
  CDS (1)..(2484): transl_table=11
atgactgcactgaaaaagatcgaaaaagccgctccgcttccggtttccaccaacttcggaatcgagggcatgacctgtgcctcctgcgtccggcgcgtcgaaaaggcgatcaccgcggtgccgggcgtcgcgtccgcgaatgtcaatctggcgacggaacgggcaacggttcaattcgatggagaaccggacacgcttgcggtgctccacgcgatcgagaaagccggctacgcgccgaggatcgccactgaggaactccagatcgagggcatgacctgcgcctcctgtgtttctcgcgtagagaaggcgctgaaggccgttcccggcgttgcggatgcagccgttaatcttgcgacggagaaggcgaccgtgagcctgatttccggaaccgccgatctgtccgccctcgaagctgcggtccggggtgccggatacgagcttcgcaagaccaagcctgccgaggcttcggcaggagacgaggaccatcgcgcggccgagcttggctctctcaaatccgcggtgacgatctcggtgctgatgacccttccgctcttcctgatggagatggggtcacacttcatttcaggcgtccatgagctgatcatgggcacgatcggcatgcgaaacaatctgtacctacagtttgcgctcgccacgctcgtcctcttcggaccggggctgcggttcttccggaagggcgtgccgaatcttctgcgctggacgcccgacatgaactcgcttgtcgtcctcgggaccacggccgcatggggctattcggtcgttgcgaccttcgttccccgagttctgccttcgggaacggcgaatgtctattacgaggcggccgccgtcatcgtcaccctggttctcctcggccgctatctggaatcacgggcgaagggtcgcacgagccaggcgatcaagcggctcgtcggcctgcagccgaagacggctttcgtcttgcgcggcggcgaattcgtcgaggcgcaaatcagcgaggtcgttgccggtgacgtcatccgcatccggccgggtgagaagatccctgtggacggtacggtcatcgacggcagctcctatgtcgatgaagcgatgatcaccggtgaaccccttcccgtccagaagacggccgacagcgcggtggtcggcggcacgatcaacaagaccgggtccattaccttcaaggccaccaaggtcggcagcgacacgctgcttgcgcagatcatcaaattggtcgaaaccgcccaaggctcgaagctgccgatccaggccctggtcgacagggttaccggatggttcgttccggccgtgattctcgcagcggtgctgacttttgccgcctggtacactttcggcccctcgcctgcgctctcattcgccctcgtgaatgccgtagcggtgctgatcatcgcctgcccctgtgcgatgggcctggcgacgccgacctcgatcatggtcggtaccggccgcgccgccgaactcggcatcctgttccgcaagggagaggctctccagaggctgcgcgacgccgatgtggtcgcgctcgacaagaccgggactttgacgaagggccgcccggaactgaccgacctcgtcgctgcagagggcttcgaggccgacgaagtgcttttcctcgtcgcaagtctcgaaacgctttccgagcacccgatcgcggaggccatcgtgtcggcggcaaagtccaaagggatcgcgacggccgcggtcaacggcttcgaagcgacgcccggctttggcgtaagcggatcggtgtccgggcggcaggtgctggtcggtgcggaccgcgcgctcgccaccaacgggatcgacgtttccggtttctcaaccgaggccgagctgctcggcgccagcggcaagtcgccgctctatgcggccatcgagggtcggctggcggcgatcgtcgcagtgtcggatccggtcaaggaaacgacgcctcaggcgatcaggtccctgcacgagctcggcctcaaggtggcgatgatcaccggggacaaccgccgcaccgccgaggcgatcgccagaaagctcggcatcgacgaggtcgtcgccgaggtcttgccggaaggcaaggtcgaggcgatcagaaagcttcggcagggcggccggtcggtcgcgttcatcggcgacggcatcaatgatgcgccggctctcgccgaagcggatgtcggcatcgcagtcgggacgggaaccgacatcgcgatagaaagcgccgacgtcgtgctgatgtccggcgacttgaacggcgttgcgaaggcgatcgcgctcagcaaggcgacgatcctgaacatcaagcaaaatctgttctgggcattcgcctataacgtcagtctgatacccgtcgcagccggcgtcctttacccggtgactggcattctgctttcgccgattttcgcggcagcggccatggcgatgtcgagcgttttcgtcctcggcaatgcgctgcggctgaaatcggtcaacccggcctga

SEQ ID NO: 55724 - protein, 827 aa, Rhizobium meliloti
MTALKKIEKAAPLPVSTNFGIEGMTCASCVRRVEKAITAVPGVASANVNLATERATVQFDGEPDTLAVLHAIEKAGYAPRIATEELQIEGMTCASCVSRVEKALKAVPGVADAAVNLATEKATVSLISGTADLSALEAAVRGAGYELRKTKPAEASAGDEDHRAAELGSLKSAVTISVLMTLPLFLMEMGSHFISGVHELIMGTIGMRNNLYLQFALATLVLFGPGLRFFRKGVPNLLRWTPDMNSLVVLGTTAAWGYSVVATFVPRVLPSGTANVYYEAAAVIVTLVLLGRYLESRAKGRTSQAIKRLVGLQPKTAFVLRGGEFVEAQISEVVAGDVIRIRPGEKIPVDGTVIDGSSYVDEAMITGEPLPVQKTADSAVVGGTINKTGSITFKATKVGSDTLLAQIIKLVETAQGSKLPIQALVDRVTGWFVPAVILAAVLTFAAWYTFGPSPALSFALVNAVAVLIIACPCAMGLATPTSIMVGTGRAAELGILFRKGEALQRLRDADVVALDKTGTLTKGRPELTDLVAAEGFEADEVLFLVASLETLSEHPIAEAIVSAAKSKGIATAAVNGFEATPGFGVSGSVSGRQVLVGADRALATNGIDVSGFSTEAELLGASGKSPLYAAIEGRLAAIVAVSDPVKETTPQAIRSLHELGLKVAMITGDNRRTAEAIARKLGIDEVVAEVLPEGKVEAIRKLRQGGRSVAFIGDGINDAPALAEADVGIAVGTGTDIAIESADVVLMSGDLNGVAKAIALSKATILNIKQNLFWAFAYNVSLIPVAAGVLYPVTGILLSPIFAAAAMAMSSVFVLGNALRLKSVNPA

SEQ ID NO: 55725 - DNA, 2505 bp, Escherichia coli O157
  CDS (1)..(2505): transl_table=11
atgtcacaaactatcgacctgaccctggacggcctgtcctgcggtcactgcgttaaacgcgtgaaagaaagtctcgaacagcgcccggatgtggaacaagcggatgtgtctatcactgaagcgcacgttaccgggactgccagtgcagaacagctgatcgaaaccatcaaacaagcgggttatgacgcatctgtaagccacccaaaggctaaaccgctggcggagtcatcaatcccgtcggaagcactgacagcggtttctgaggcgcttccggcagcgaccgccgatgacgatgacagccagcagttgctgctgagcggcatgagctgcgccagctgtgtcacccgcgtacaaaatgcgctgcaaagcgtaccgggcgtcactcaggcacgggtaaacctggcggagcgtactgcgctggtgatgggcagtgcctccccacaagatttagtgcaggcggtggaaaaagcgggctacggcgcggaagcgattgaagatgacgcgaaacgccgcgagcgccagcaagaaaccgccgtcgctacgatgaagcgcttccgctggcaggcaattgttgcactggctgtgggtatcccggtaatggtctgggggatgatcggcgataacatgatggtcaccgctgacaaccgcagcctgtggttggttatcggcctgataaccctggcagtgatggttttcgccggcggccatttttaccgcagtgcatggaaaagcctgctgaacggtgcggcgacgatggatacgctggtggcgctgggtacgggtgtggcgtggctctattcgatgagcgtcaacctgtggccgcagtggttcccgatggaagcgcggcatctttactatgaagccagtgcgatgattatcggtctgattaatctcggtcatatgctggaagcgcgcgcacgtcagcgttcttcaaaggcgctggagaaattactcgatttaactccgccgacggcgcgcctggttactgacgaaggtgaaaaaagcgtgccgctggcggaagttcagccaggcatgctactgcgcctgacgacgggcgaccgcgtgccagtagatggcgagattacccagggcgaagcatggctggatgaagcgatgctgacgggcgaacctatcccgcagcaaaaaggcgaaggcgatagcgtccatgccgggacagtggtacaggacggtagcgttctgtttcgcgccagtgcggttggcagccataccacgctatcaaggattattcgtatggtgcgccaggcccagagcagcaagccagaaatcggtcagctggcggataaaatctcagccgtatttgtgccggtagtagtggttattgcgcttgtcagtgcggcaatctggtatttctttggtccggcaccgcagattgtctataccctggtgattgccaccacggtgctgattattgcctgtccgtgtgcgctggggctggcgacgccgatgtcgattatttccggcgtcgggcgggcggctgagtttggcgtgctggtgcgggacgccgacgcgctgcaacgcgctagtacactcgataccgtagtgttcgataaaaccgggacgctgaccgaagggaagccgcaggttgtcgcagtgaaaacatttgctgattttgacgaagcgcaggcgctgcgtctggcggcggcactggaacaaggttccagccatccgctggcgcgggcgatcctcgataaagcaagcgatatgcagctgccgcaggtcaacggtttccgcacattgcgcgggctgggcgtgagcggtgaagctgaaggtcatgcgttattgctgggcaatcaggcgctgttaaatgaccagcaagttgatactaaagcgattgaagcagatatttcagctcaggcatcgcaaggggcaacgcctgtgctgctggcggttgacgggaaagcggtagccctgctggctgtacgcgatccgttgcgtagtgatagcgtggcggcgctgcaacgtctgcataaagcgggatatcgtctggtgatgttgaccggggataacccaaccaccgccaatgcgatcgccaaagaagcagggattgatgaggtgatcgccggggtgctgccggacggtaaagccgaagcgattaaacgcctgcaaagtgaaggacgtcaggtggcaatggtgggcgacggcattaacgatgcgccagcgctggcccaggcggatgtcggcattgcaatgggcggcggcagtgatgttgccattgaaaccgcggcgattaccctgatgcgccatagcctgatgggcgttgcggatgcgctcgctatttcccgcgcaacgctgcgcaacatgaagcagaacctgctcggcgcgtttatctacaacagtatcggtattccggtcgccgccggtattttgtggccgtttactggaacactgcttaacccggtagttgccggagcggcaatggcgctctcgtcgattaccgtagtgagtaacgccaaccggttgctgcggtttaaaccgaaggaataa

SEQ ID NO: 55726 - protein, 834 aa, Escherichia coli O157
MSQTIDLTLDGLSCGHCVKRVKESLEQRPDVEQADVSITEAHVTGTASAEQLIETIKQAGYDASVSHPKAKPLAESSIPSEALTAVSEALPAATADDDDSQQLLLSGMSCASCVTRVQNALQSVPGVTQARVNLAERTALVMGSASPQDLVQAVEKAGYGAEAIEDDAKRRERQQETAVATMKRFRWQAIVALAVGIPVMVWGMIGDNMMVTADNRSLWLVIGLITLAVMVFAGGHFYRSAWKSLLNGAATMDTLVALGTGVAWLYSMSVNLWPQWFPMEARHLYYEASAMIIGLINLGHMLEARARQRSSKALEKLLDLTPPTARLVTDEGEKSVPLAEVQPGMLLRLTTGDRVPVDGEITQGEAWLDEAMLTGEPIPQQKGEGDSVHAGTVVQDGSVLFRASAVGSHTTLSRIIRMVRQAQSSKPEIGQLADKISAVFVPVVVVIALVSAAIWYFFGPAPQIVYTLVIATTVLIIACPCALGLATPMSIISGVGRAAEFGVLVRDADALQRASTLDTVVFDKTGTLTEGKPQVVAVKTFADFDEAQALRLAAALEQGSSHPLARAILDKASDMQLPQVNGFRTLRGLGVSGEAEGHALLLGNQALLNDQQVDTKAIEADISAQASQGATPVLLAVDGKAVALLAVRDPLRSDSVAALQRLHKAGYRLVMLTGDNPTTANAIAKEAGIDEVIAGVLPDGKAEAIKRLQSEGRQVAMVGDGINDAPALAQADVGIAMGGGSDVAIETAAITLMRHSLMGVADALAISRATLRNMKQNLLGAFIYNSIGIPVAAGILWPFTGTLLNPVVAGAAMALSSITVVSNANRLLRFKPKE

SEQ ID NO: 55727 - DNA, 2505 bp, Escherichia coli
  CDS (1)..(2505): transl_table=11
atgtcacaaactatcgacctgaccctggacggcctgtcctgcggtcactgcgttaaacgcgtgaaagaaagtcttgaacagcgtccggatgttgagcaggcggatgtgtctatcactgaagcgcacgttaccgggactgccagtgcagaacagctgatcgaaaccatcaaacaagcgggttatgacgcatctgtaagccacccaaaggctaaaccgctggcggagtcatcaatcccgtcggaagcactgacagcggtttctgaggcgcttccggcagcgaccgccgatgacgatgacagccagcagttgctgctgagcggcatgagctgcgccagctgtgtcacccgcgtacaaaatgcgctgcaaagcgtaccgggcgtcactcaggcacgggtaaacctggcggagcgtactgcgctggtgatgggcagtgcctccccacaagatttagtgcaggcggtggaaaaagcgggctacggcgcggaagcgattgaagatgacgctaaacgccgcgagcgccagcaagaaaccgccgtcgctacgatgaagcgcttccgctggcaggcaattgtcgcactggcggtgggtatcccggtgatggtctgggggatgatcggcgataacatgatggtcaccgctgacaaccgcagcctgtggttggttatcggcctgataaccctggcagtgatggttttcgccggcggccatttttaccgcagtgcatggaaaagcctgctgaacggtgcggcgacgatggatacgctggtggcgctgggtactggcgtggcgtggctctattcgatgagcgtcaacctgtggccgcagtggttcccgatggaagcgcgacatctttattacgaagccagcgcgatgattatcggtctgatcaatctcggccatatgctggaagcgcgcgcacgccagcgttcttctaaggcgctggaaaagttactcgatttaaccccgccgacggcacgcctggttactgacgaaggtgaaaaaagcgtgcctctggcagaagtgcagccaggtatgttgctgcgcctgacgaccggcgatcgcgtgccggtagatggcgagattacccagggcgaagcatggctggatgaagcgatgctgacgggcgaaccaatcccgcagcaaaaaggcgaaggcgatagcgtccatgccgggacagtggtacaggacggcagtgtgctgtttcgtgccagtgcggttggcagccatactacgctgtcacgaatcattcgcatggtgcgccaggcccagagcagcaagccagaaatcggtcagctggcggataaaatctcagccgtatttgtgccggtagtggtggttattgcgcttgtcagtgcggcaatctggtatttctttggtccggcaccgcagattgtctataccctggtgattgccaccacggtactgattattgcctgtccgtgtgcgctggggctggcgacgccgatgtcgattatttccggcgtcgggcgggcggctgagtttggcgtgctggtgcgggacgctgacgcgctgcaacgcgccagtacactcgacactgtagtgttcgataaaaccgggacgctgactgaagggaagccgcaggttgtcgcagtgaaaacatttgctgatgttgatgaagcgcaggcattgcgtctggcggcggcactggagcaaggttccagccatccgctggcacgagcgatcctcgataaagcaggtgatatgcagctaccgcaggtcaacggtttccgcacattgcgcgggctgggcgtgagcggtgaagctgaaggtcatgcgttattgctgggcaatcaggcgctgttaaatgagcaacaggttggtaccaaagctatcgaagcggagattactgctcaggcatcgcaaggggcaacgcctgtgctgctggcggttgacgggaaagcggtagccctgctggcagtacgcgatccgttgcgtagtgatagcgtggcggcgctgcaacgcctgcataaagcgggatatcgtctggtgatgttgaccggggataacccaaccaccgccaatgcgatcgccaaagaagcagggattgatgaggtgatcgccggggtgctgccggacggtaaagccgaagcgatcaaacatctgcaaagtgaaggacgtcaggtggcaatggtgggcgacggcattaacgacgcgccagcgctggctcaggcggatgtcggcattgcgatgggtggcggcagtgatgttgccattgaaaccgcggcgattaccctgatgcgccatagcctgatgggcgttgcggatgcgctcgctatttcccgcgcaacgctgcacaacatgaagcagaacctgctcggtgcgtttatctacaacagtatcggtattccggtcgccgccggtattttgtggccgttcactggaacactgcttaacccggtagttgccggagcggcaatggcgctctcgtcgattaccgtagtgagtaacgccaaccggttgctgcggtttaaaccgaaggaataa

SEQ ID NO: 55728 - protein, 834 aa, Escherichia coli
MSQTIDLTLDGLSCGHCVKRVKESLEQRPDVEQADVSITEAHVTGTASAEQLIETIKQAGYDASVSHPKAKPLAESSIPSEALTAVSEALPAATADDDDSQQLLLSGMSCASCVTRVQNALQSVPGVTQARVNLAERTALVMGSASPQDLVQAVEKAGYGAEAIEDDAKRRERQQETAVATMKRFRWQAIVALAVGIPVMVWGMIGDNMMVTADNRSLWLVIGLITLAVMVFAGGHFYRSAWKSLLNGAATMDTLVALGTGVAWLYSMSVNLWPQWFPMEARHLYYEASAMIIGLINLGHMLEARARQRSSKALEKLLDLTPPTARLVTDEGEKSVPLAEVQPGMLLRLTTGDRVPVDGEITQGEAWLDEAMLTGEPIPQQKGEGDSVHAGTVVQDGSVLFRASAVGSHTTLSRIIRMVRQAQSSKPEIGQLADKISAVFVPVVVVIALVSAAIWYFFGPAPQIVYTLVIATTVLIIACPCALGLATPMSIISGVGRAAEFGVLVRDADALQRASTLDTVVFDKTGTLTEGKPQVVAVKTFADVDEAQALRLAAALEQGSSHPLARAILDKAGDMQLPQVNGFRTLRGLGVSGEAEGHALLLGNQALLNEQQVGTKAIEAEITAQASQGATPVLLAVDGKAVALLAVRDPLRSDSVAALQRLHKAGYRLVMLTGDNPTTANAIAKEAGIDEVIAGVLPDGKAEAIKHLQSEGRQVAMVGDGINDAPALAQADVGIAMGGGSDVAIETAAITLMRHSLMGVADALAISRATLHNMKQNLLGAFIYNSIGIPVAAGILWPFTGTLLNPVVAGAAMALSSITVVSNANRLLRFKPKE

SEQ ID NO: 55729 - DNA, 2526 bp, Rhizobium leguminosarum bv
  CDS (1)..(2526): transl_table=11
atgaatatcaagcaagaagatgatcaccatcacagccacgcccatggcgacaatcattgccattgcggccatgatcaggagaaggctgccgacgccattgtccgtgatcccatctgcggcatgaccgtcgatccgcaggccggcaagccctcactcggccatggcggccgcatctatcatttctgttccgagcattgccgaacgaaatttgcggctgcacccgaggattacctgacggcgaaggaccccgtctgcggcatgagcgtcgatcgctcgacggcgagatatttcctgaaagccgagggcgagaaattctatttctgctcggccgcgtgccaggcgaagttcgaagccgaccctgcagcctaccgcgatggccagcgcccgacggcaaaaccggcgccgaagggtacgctctatacctgcccgatgcatcctgaagtcgtcagcgatcgccccggcgactgcccgaaatgcggcatggcgctggagccgatgggcatccccccaaccgacgaaggcccgaacccggaactcgtcgatttcgtcaggcggctctgggtcagcgccatccttgccctgccgctgctggcgctcggcatggggccgatgctcggcctgccgctccgcgaagcgatcggcgagccgcaggcgaccttcatcgaactgctgctggcaaccccggtggtgctctgggccgccctgcccttcttccgccgcgcatgggcgtccgttgtcaaccgcagcccgaatatgtggaccttgatcggtctcggtgtcggcacagcctatctctacagcgtcgtcgccacgcttgcgcccggcatcttcccgatgagttttcgtggccatggcgcggccgtgccggtctatttcgaggcagcggccgtcatcgtcgcgctcgtcttcgttggccaagtgctggaattgaaagcgcgcgaacgcaccggctcggcaatccgcgctttgctggaccttgcgccgaagacggcacggcgcatcgatgccgaaggcaacgaaagtgacgtgccggtggacgatatcaatgtcgccgaccggctgcgcgttcgccccggcgagcgggtgccggtggacggttccgtcctcgagggccagtcgaccgtcgatgaatcgatgatatcgggcgagcccctgcccgtagagaaatcgaaaggcgatccgctgaccggcggcacgatcaacaagaacggcaccttcgtgatgtccgccgagaaggtcggcgcagacacggtgctgtcgcgcatcgtcgacatggtcgccaaggcacagcgctcgcgggcgccgatccagggggcggtcgatagagtatcggccgtcttcgtgccggcggtcgtcgcggtcgccctccttgccttcctcgcctgggccgcgatcggaccggagccgcgcatggcgaacggcctgcttgccgccgtcgccgttctgatcatcgcctgcccctgtgcgctcggtcttgcgacgccgatgtcgatcatgatcgcaacggggcgcggcgctggggaaggcgtgctgatcaaggatgccgaggcgcttgagcgcttctccaagggcgatacgctgatcgtcgacaagacaggcacgctgactgaaggaaagccgaagcttaccgatatcgcagccttcggcagggtcggggaagaccggcttctgtcgctggcggcaagcctggagcgcggctccgaacatccgctggccgaagcgatcgtttccggcgccgaggagcgcggtgtacccttcgtcgaggtcaccggcttcgaggcaaagaccggcaagggcgttcagggcattgccgacggcacgatggtcgcgctcggcaattcggcgatgcttgccgatctcggcatcgatccggcagcacttagcgagaagaccgaagctctgcggggcgacggcaagacggtgatgttcgtggtgttcgacggcgcacttgccggtcttgtcgccgttgccgaccggatcaagccgacgacggctgccgccatccaggctctgcatgacagtgggttgaagatcatcatggcgacgggcgacaatgagcgcacggcgcgggcggtggcaaaaagcctcggcatcgacgaggtgcgcgccgatgtgcttccggaaggcaagaaggcgctgatcgatgaactgcgtagcaaaggcgctatcatcgccatggccggcgacggcgtcaatgacgcgccggcgcttgccgccgccgatgtcggcatcgccatgggcaccggcgccgacgtcgcgatggaaagcgccggcatcacattggtgaagggcgatctcaccggcatcgtcagggcgcggcggctggcggaggcgacgatgcgcaacatccgccagaatctcggcttcgccttcggctataatgcgctcggcgtgccggtcgccgccggcgtgctctatccgatcctcgggctgctgctttcgccgatgatcgccgcggcagcgatgagcctgtcatccgtctcggtgatttcaaatgcgctgagactgcgctttgcaaaactatag

SEQ ID NO: 55730 - protein, 841 aa, Rhizobium leguminosarum bv
MNIKQEDDHHHSHAHGDNHCHCGHDQEKAADAIVRDPICGMTVDPQAGKPSLGHGGRIYHFCSEHCRTKFAAAPEDYLTAKDPVCGMSVDRSTARYFLKAEGEKFYFCSAACQAKFEADPAAYRDGQRPTAKPAPKGTLYTCPMHPEVVSDRPGDCPKCGMALEPMGIPPTDEGPNPELVDFVRRLWVSAILALPLLALGMGPMLGLPLREAIGEPQATFIELLLATPVVLWAALPFFRRAWASVVNRSPNMWTLIGLGVGTAYLYSVVATLAPGIFPMSFRGHGAAVPVYFEAAAVIVALVFVGQVLELKARERTGSAIRALLDLAPKTARRIDAEGNESDVPVDDINVADRLRVRPGERVPVDGSVLEGQSTVDESMISGEPLPVEKSKGDPLTGGTINKNGTFVMSAEKVGADTVLSRIVDMVAKAQRSRAPIQGAVDRVSAVFVPAVVAVALLAFLAWAAIGPEPRMANGLLAAVAVLIIACPCALGLATPMSIMIATGRGAGEGVLIKDAEALERFSKGDTLIVDKTGTLTEGKPKLTDIAAFGRVGEDRLLSLAASLERGSEHPLAEAIVSGAEERGVPFVEVTGFEAKTGKGVQGIADGTMVALGNSAMLADLGIDPAALSEKTEALRGDGKTVMFVVFDGALAGLVAVADRIKPTTAAAIQALHDSGLKIIMATGDNERTARAVAKSLGIDEVRADVLPEGKKALIDELRSKGAIIAMAGDGVNDAPALAAADVGIAMGTGADVAMESAGITLVKGDLTGIVRARRLAEATMRNIRQNLGFAFGYNALGVPVAAGVLYPILGLLLSPMIAAAAMSLSSVSVISNALRLRFAKL

SEQ ID NO: 55731 - DNA, 2484 bp, Rhizobium meliloti
  CDS (1)..(2484): transl_table=11
atgactgcactgaaacagaccgaaaaatccacatcgcttccgatgtccttcgatttcgacatcgaaggtatgacgtgtgcctcatgtgtacgacgcgtcgaaaaggccatcgccgcggtgccgggcgtcgcttctgcgaacgtcaacctggccacggagcgcgcgacggttcagttcaatggagtgcccgaaacgacatccgtgctccgcgcggtcgagaaagccggctacgcgccgaggatcgtaaccgaggaaatccagatcgaaggcatgacttgcgcttcgtgtgtttcccgcgtcgagaaggcgctgaaggccgttcccggcgttgccgatgcatccgtgaaccttgccacggagaaggcgaccgtgcggctggtttccggaagcgccgaaatttcggccctcgcggccgcggtcaaaggggcgggctacggtattcggaaggcgacgcctgccgaagccatgaaggaagatgtggatcaccgcacagccgagctccgctctctgaaatccgcagtgacgatttcgtcgctgatgacccttccgcttttcctgctcgaaatgggatcgcacttcattcccggcgtccatgacttcatcatgggcacgatcggtatgcgcaacaatctctatcttcaatttgcgctcgccacgctcgtcctgttcggaccggggctgcgcttcttcaggaagggcgtgccgaacttgctgcgctggacacccgacatgaactcgctggtcgttctcgggacgaccgcagcctggggctattccgtcgtgacgactttcgttcccgcgatactgccctccgggacggcgaacgtctattacgaggctgccgccgtgatcgtcaccttgattctcgtcggccgctatctcgagtcgcgggcaaaaggccgcaccagtcaggccatcaagcgtctcgtcgggctgcagccgaagacggccttcgttttgcatagcggcgaattcgtcgagactgagatcactgaggtcgtaaccggtgacgtgatccggatccggccgggtgagaagatccccgtggacggcacagtcacggacggcagctcctatgtggatgagtcgatgattaccggtgagcctgttcccgttcaaaaagccacggacagtgctgtgatcggcggtacgatcaacaagaccggctccatcaccttcaaggccaccaaggtcggcagcgacacactgctggcgcagatcatcagactggtcgaagccgctcagggctcgaagctgccgatccaagcgctggtggacagagttaccgcatggttcgtcccggtggtaatcctggcggcattgctgacctttgctgcctggtacgtgcttggcccctcccctgcgctctcgttcgccctcgtgaatgccgtagcggtcctcatcatcgcctgcccatgtgccatgggcctggcgacgccgacctcgatcatggtcggcaccggccgcgcggcggaactcggcatccttttccgcaaaggggaggctctacagagccttcgcgacgccgacgtcgtcgcggtcgataagacagggacgttgacgaagggccgtcccgagctgaccgatctcgtcgccgctgagggttttgagccggacgaagtgctctgccttgtcgcaagcctcgaaacgctttcggaacacccgatcgcggaggcaatcgtgtcggcggcgaagtccagggggatagcaacggttgccgtcagcgcctttgaagcgacgccgggatttggcgtaagcgggactgtttccggacggcgggtgctcgtcggcgccgaccgcgcgctcgtcaagaacggaatagatattaccggcttcgcagatgaagcggaacgcctcggcagcggcggcaaatcaccgctctatgcggccatcgacgggcggctggcggcgatcgtcgcggtttcggacccggtcaaggaaagcacacctcaggcaatcaaatccctgcatgcactcggcttgaaagtggcgatggtcaccggagacaaccgccgcactgccgaggcgattgccaaaaagctcggcatcgatgaggtcgtcgccgaggtgctgccggaaggcaaggtggacgcggtgagaaagctccgtcagggcggccgctcggtcgccttcatcggcgacggcatcaatgatgcgccggctctggccgaagcggatgttggcatcgccgtgggcaccggaaccgatatcgccattgaaagcgccgatgtcgtgctgatgtcaggagacttgaacggcgttgcgaaggcgctcgcgctcagcaaggcaacgatccgcaacatcaagcagaacctgttctgggccttcgtctataacatcagtctggtgcccgtcgcggccggcgttctttaccccgtgaacggcaccctgctctcgccgatctttgcggcggcggccatggcgatgtcgagcgtctttgttcttggcaatgcgctgcggctgaaatcgttcgatccggcctag

SEQ ID NO: 55732 - protein, 827 aa, Rhizobium meliloti
MTALKQTEKSTSLPMSFDFDIEGMTCASCVRRVEKAIAAVPGVASANVNLATERATVQFNGVPETTSVLRAVEKAGYAPRIVTEEIQIEGMTCASCVSRVEKALKAVPGVADASVNLATEKATVRLVSGSAEISALAAAVKGAGYGIRKATPAEAMKEDVDHRTAELRSLKSAVTISSLMTLPLFLLEMGSHFIPGVHDFIMGTIGMRNNLYLQFALATLVLFGPGLRFFRKGVPNLLRWTPDMNSLVVLGTTAAWGYSVVTTFVPAILPSGTANVYYEAAAVIVTLILVGRYLESRAKGRTSQAIKRLVGLQPKTAFVLHSGEFVETEITEVVTGDVIRIRPGEKIPVDGTVTDGSSYVDESMITGEPVPVQKATDSAVIGGTINKTGSITFKATKVGSDTLLAQIIRLVEAAQGSKLPIQALVDRVTAWFVPVVILAALLTFAAWYVLGPSPALSFALVNAVAVLIIACPCAMGLATPTSIMVGTGRAAELGILFRKGEALQSLRDADVVAVDKTGTLTKGRPELTDLVAAEGFEPDEVLCLVASLETLSEHPIAEAIVSAAKSRGIATVAVSAFEATPGFGVSGTVSGRRVLVGADRALVKNGIDITGFADEAERLGSGGKSPLYAAIDGRLAAIVAVSDPVKESTPQAIKSLHALGLKVAMVTGDNRRTAEAIAKKLGIDEVVAEVLPEGKVDAVRKLRQGGRSVAFIGDGINDAPALAEADVGIAVGTGTDIAIESADVVLMSGDLNGVAKALALSKATIRNIKQNLFWAFVYNISLVPVAAGVLYPVNGTLLSPIFAAAAMAMSSVFVLGNALRLKSFDPA

SEQ ID NO: 55733 - DNA, 2502 bp, Salmonella typhimurium
  CDS (1)..(2502): transl_table=11
atgtctcaaactatcgacctgaccctggacggtttgtcctgcggtcattgcgttaaacgcgtgaaagaaagtcttgaacaacgtccggatgttgagctggcggacgtcaccgtaaccgaagcgcacgttaccggtaccgccagtgcggacgcgttaattgaaaccatcaaacaagccgggtatggcgcgacgttaagccacccaaaggctaaaccgctgacggagtcatcaatcccgtcggaagcactggcagcggttcctcatgagcttccggtagcgacggccgatgaagaaagccaacagttgctgttaagcggcatgagctgcgccagttgtgtcacccgcgtacaacatgcgctacaaagcgtaccgggcgtcacgcaggcacgggtaaacctggcggaacgcactgcgctggtgatgggcagcgcgtccgccgctgatttagtgcaggcggtggaaaaagccggctacggcgcagaagcgattgaagatgacatcaaacgccgcgagcgccagcaggaaaccgccatcgccaccatgaaacgttttcgttggcaggcaatcgtcgcccttgcggtcggtataccggtcatggtctgggggatgatcggcgataacatgatggtgaccgacgacaaccgcagcctgtggctggctattggcctgatcacgcttgcggtgatggtctttgcgggcggtcacttttaccgtaacgcgtggaaaagcctgctgaacggcacggcgacgatggatacgctggtggcgctcggcaccggggttgcctggctctactccatgagcgtcaacctgtggccgcagtggttcccgatggaagcgcggcacctctattacgaagccagcgcgatgattatcggtttgattaatctcggacacatgctggaagcgcgcgcccgtcagcgttcctcaaaagcgctggaaaaattactcgatctcaccccgcccaccgcacgcgtcgtgacagaagacggcgaaaaaagcgtcccgctggcggacgttcagccagggatgctgctgcggctcactaccggcgatcgcgtgccggtggatggcgaaattacccaaggcgaagcgtggcttgatgaagccatgctgaccggcgaacctattccgcagcaaaaaggcgaaggcgacagcgttcatgccggcaccgtcgtccaggacggcagcgtcctgttccgcgccagcgcggtgggcagccataccacgctgtcacgcattattcgcatggtacgccaggcgcaaagcagtaaaccggaaattggccaactggccgataaaatctccgcggtattcgttcccgtcgtcgtggccattgcgctgttcagcgccgctatctggtatttcttcgggccggcgccgcaaattgtttatacgctggtcatcgccaccaccgtactgattatcgcctgcccttgcgcattaggcctggcgacgccaatgtcgattatttccggcgtaggccgcgctgccgaattcggcgtgctggtacgcgacgccgatgccctgcaacgcgccagtacgttggataccctcgtttttgataaaaccgggacgctgacggaaggcaagccgcaagtggtggcgataaaaacctttaacggcgttgaggaagctcaggcattacgtctggctgccgcgctcgaacaaggctccagccacccgctggcccatgcgattctggaaaaagccggcgatgataaactgccgcaggtgaacggtttcagaacgctgcgcggactgggcgtcagcggtgaagcggaaggtcatcaactgcttctggggaaccaggcgttgctgaacgaacagcacgtcgccacggatgacatgacggcggaaatcaccgcgcaggcctcgcaaggctcgactccggtcctgctggcgattgacggtaaagcggcggcgttactggcggtacgcgatccattgcgcagcgatagtattgccgcgcttgaacgcctgcacaacgccggataccgtctggtaatgctcaccggggataacccaacgacggctaacgcgattgccaaagaagcgggtattgacgaagtcattgcgggcgttctgccggatggcaaagccgatgcgattaaacgcctgcaaagccagggtcgtcaggttgcgatggtcggcgatggtatcaacgatgcgcccgcgctggcgcaggcggacgtcggtatcgcgatgggcggcggcagcgatgtggcgattgaaaccgcggcgattacgctgatgcgccatagtctgatgggcgtggcggatgcgctggccatttcgcgcgcgacgttgcgcaatatgaaacaaaacctgcttggcgcatttatctacaacagcattggtatcccggtggccgccggtattctgtggccgtttaccggtaccttgttaaacccggtagtagcaggcgcggcaatggcgctgtcttccattaccgtcgtcagcaatgccaaccggctattgcgttttaaaccgaaagcgtaa

SEQ ID NO: 55734 - protein, 833 aa, Salmonella typhimurium
MSQTIDLTLDGLSCGHCVKRVKESLEQRPDVELADVTVTEAHVTGTASADALIETIKQAGYGATLSHPKAKPLTESSIPSEALAAVPHELPVATADEESQQLLLSGMSCASCVTRVQHALQSVPGVTQARVNLAERTALVMGSASAADLVQAVEKAGYGAEAIEDDIKRRERQQETAIATMKRFRWQAIVALAVGIPVMVWGMIGDNMMVTDDNRSLWLAIGLITLAVMVFAGGHFYRNAWKSLLNGTATMDTLVALGTGVAWLYSMSVNLWPQWFPMEARHLYYEASAMIIGLINLGHMLEARARQRSSKALEKLLDLTPPTARVVTEDGEKSVPLADVQPGMLLRLTTGDRVPVDGEITQGEAWLDEAMLTGEPIPQQKGEGDSVHAGTVVQDGSVLFRASAVGSHTTLSRIIRMVRQAQSSKPEIGQLADKISAVFVPVVVAIALFSAAIWYFFGPAPQIVYTLVIATTVLIIACPCALGLATPMSIISGVGRAAEFGVLVRDADALQRASTLDTLVFDKTGTLTEGKPQVVAIKTFNGVEEAQALRLAAALEQGSSHPLAHAILEKAGDDKLPQVNGFRTLRGLGVSGEAEGHQLLLGNQALLNEQHVATDDMTAEITAQASQGSTPVLLAIDGKAAALLAVRDPLRSDSIAALERLHNAGYRLVMLTGDNPTTANAIAKEAGIDEVIAGVLPDGKADAIKRLQSQGRQVAMVGDGINDAPALAQADVGIAMGGGSDVAIETAAITLMRHSLMGVADALAISRATLRNMKQNLLGAFIYNSIGIPVAAGILWPFTGTLLNPVVAGAAMALSSITVVSNANRLLRFKPKA

SEQ ID NO: 55735 - DNA, 3015 bp, Saccharomyces cerevisiae
  CDS (1)..(3015)
atgagagaagtgatacttgctgtacatggaatgacatgcagcgcctgtactaatacaatcaatacgcagttacgagctttaaagggtgtaacaaaatgtgatattagtttagtgactaatgagtgccaggtgacatacgataacgaggttaccgccgattctattaaggaaattatagaggattgtggatttgactgtgagatactaagagattctgaaattacagccataagtacgaaggaaggactactgagtgtacaaggtatgacctgtgggtcttgtgtttctacagtcaccaaacaagtggaaggcattgagggtgttgaatcggtagtcgtttccttggtaacggaagagtgccatgttatttatgaaccgtccaagacaacgctagaaaccgccagagaaatgattgaagactgtggatttgactcaaatattattatggatggcaacgggaatgcagacatgaccgaaaaaacggtgatcttgaaagtaactaaggctttcgaggacgaatccccactcatactttcttcagtaagcgaaaggtttcaatttttgttagacctaggtgtaaaatcgatagaaatttctgatgatatgcacacactcaccataaaatactgttgtaacgaactcggcattagagatttattgaggcaccttgagaggaccggatataaattcactgtattttccaatttagataatactacccagttaaggcttctctctaaagaggacgagataagattctggaaaaaaaacagcataaaatccacccttttggctataatatgtatgctattgtatatgattgtccctatgatgtggccaacaattgttcaggaccgcatattcccttacaaagaaacctcctttgttagaggtctgttctacagagatattttgggtgtaatattggcaagctatattcagttcagcgttggtttttacttttacaaggcagcatgggcatctttaaagcacggttcaggaaccatggatacactagtttgtgtttccactacttgtgcatacacattttctgtgttttctttagttcacaatatgttccatccctcaagtactggcaaactcccaaggatcgttttcgacacatcaatcatgatcatttcatatatttccatcgggaaatatttggaaactttagctaaatcacaaacatcaaccgcactttctaaattaattcagctcactccatcggtgtgttcaattatatctgacgtggagcggaatgaaaccaaggaaattcccatagaattattgcaagtgaacgatatagtggagattaaaccagggatgaaaattcctgctgatggcatcataacaagaggtgaatctgaaattgacgagtcgttaatgacaggcgaatccattttggtgcccaagaaaactggttttccggttattgctggttctgttaatggacctggacatttctacttcagaactactaccgttggggaggaaactaaattagcaaatattatcaaggtaatgaaagaagcacaattgagtaaagctcccattcaggggtatgcagattatttagcctctatttttgttccggggatcctaattttggcagtattgactttctttatttggtgttttattttaaacatctcggctaatcctcccgtcgctttcaccgcaaatactaaggctgataatttttttatttgcttacaaactgctacttctgttgtcatcgtcgcatgcccatgtgcattgggacttgccacgccgactgctataatggtgggtacaggggttggagctcagaatggtgtcttaataaagggcggagaagtattggaaaaattcaatagtattactacttttgtttttgataaaacaggtaccttaactacaggttttatggttgtgaaaaagttccttaaagattcaaattgggttggaaacgtggatgaagacgaagttctcgcctgtataaaagcaacggaatccattagtgaccatccagtttcgaaagcaattatacgttattgtgatggtttgaactgtaataaggctttaaatgccgttgttttagaaagcgaatacgtgcttggaaagggaatagtctcaaagtgtcaagttaatggaaatacttatgatatttgtattgggaacgaggcgctgattttggaggatgcattaaaaaaatccggatttattaacagtaatgtcgaccaaggaaacactgtatcatacgtatcagtaaacgggcatgtgtttggcttgttcgagattaatgatgaagttaaacatgattcttacgcaacagttcagtatctacaaagaaatggatatgaaacgtatatgattactggcgataataactcagcagcaaaaagagtcgctagagaagtaggtataagcttcgaaaatgtttacagcgatgtgtcacccacaggcaaatgtgatctcgtgaaaaaaattcaagataaagaaggtaataacaaggttgctgttgttggcgatggcattaacgacgctcccgctttagcactgagtgatctaggtattgccatttcaacaggtacggagattgctattgaagcagctgatattgttatactgtgcggtaatgatctgaatactaatagtttgagaggactggccaacgccatcgatatttcactaaaaacgttcaaaagaataaagctgaatttgttctgggcactttgctataatatattcatgattccgattgctatgggtgtgctcattccttggggcataactcttcctccaatgctcgccggtttagcgatggcattcagctcggtcagtgtcgttctaagttcattgatgttgaagaagtggactccaccggatattgaatcacatgggatttcagatttcaagtccaaattttcgattgggaatttttggtcaaggcttttttctacgcgggctattgcaggtgagcaagacatagaatcacaggccggactaatgtcaaacgaagaagtcttgtaa

SEQ ID NO: 55736 - protein, 1004 aa, Saccharomyces cerevisiae
MREVILAVHGMTCSACTNTINTQLRALKGVTKCDISLVTNECQVTYDNEVTADSIKEIIEDCGFDCEILRDSEITAISTKEGLLSVQGMTCGSCVSTVTKQVEGIEGVESVVVSLVTEECHVIYEPSKTTLETAREMIEDCGFDSNIIMDGNGNADMTEKTVILKVTKAFEDESPLILSSVSERFQFLLDLGVKSIEISDDMHTLTIKYCCNELGIRDLLRHLERTGYKFTVFSNLDNTTQLRLLSKEDEIRFWKKNSIKSTLLAIICMLLYMIVPMMWPTIVQDRIFPYKETSFVRGLFYRDILGVILASYIQFSVGFYFYKAAWASLKHGSGTMDTLVCVSTTCAYTFSVFSLVHNMFHPSSTGKLPRIVFDTSIMIISYISIGKYLETLAKSQTSTALSKLIQLTPSVCSIISDVERNETKEIPIELLQVNDIVEIKPGMKIPADGIITRGESEIDESLMTGESILVPKKTGFPVIAGSVNGPGHFYFRTTTVGEETKLANIIKVMKEAQLSKAPIQGYADYLASIFVPGILILAVLTFFIWCFILNISANPPVAFTANTKADNFFICLQTATSVVIVACPCALGLATPTAIMVGTGVGAQNGVLIKGGEVLEKFNSITTFVFDKTGTLTTGFMVVKKFLKDSNWVGNVDEDEVLACIKATESISDHPVSKAIIRYCDGLNCNKALNAVVLESEYVLGKGIVSKCQVNGNTYDICIGNEALILEDALKKSGFINSNVDQGNTVSYVSVNGHVFGLFEINDEVKHDSYATVQYLQRNGYETYMITGDNNSAAKRVAREVGISFENVYSDVSPTGKCDLVKKIQDKEGNNKVAVVGDGINDAPALALSDLGIAISTGTEIAIEAADIVILCGNDLNTNSLRGLANAIDISLKTFKRIKLNLFWALCYNIFMIPIAMGVLIPWGITLPPMLAGLAMAFSSVSVVLSSLMLKKWTPPDIESHGISDFKSKFSIGNFWSRLFSTRAIAGEQDIESQAGLMSNEEVL

SEQ ID NO: 55737 - DNA, 2226 bp, Helicobacter pylori
  CDS (1)..(2226): transl_table=11
atgaaagaatctttttacatagagggaatgacttgcacggcgtgttctagcgggattgaacgctctttagggcgtaagagttttgtgaaaaaaatagaagtgagccttttaaataagagcgctaacattgaatttaacgaaaatgaaaccaatttagacgagatttttaaactcattgaaaaactgggttatagccctaaaaaaactctagcagaagaaaaaaaagaattttttagccctaatgttaaattagcgttggcggttattttcacgctttttgtggtgtatctttctatgggggcgatgcttagtcctagccttttacctgaaagcttgcttacgattaacaaccatagtaattttttaaacgcatgcttacagcttataggcacgctcattgtcatgcatttagggagggatttttacattcaagggtttaaagccttatggcacagacaacccaacatgagtagccttatcgccataggcacaagcgctgccttaatctcaagcttgtggcaattgtatttcgtttatacaagccagtggtcttatgggcattattattttgaaagcgtgtgcgtgattttaatgtttgtaatggtgggcaaacgcattgaaaatgtttctaaagacaaagctttagacgctatgcaagccttgatgaaaaacgccccaaaaaccgcccttaaaatgcacaataaccaacagattgaagttttagtggatagcattgtggtgggggatattctaaaggttctccctggaagcgcgattgcggtggatggcgaaatcatagagggcgaaggggaattagatgaaagcatgttaagcggcgaagcgttgccggtttataaaaaagtcggcgataaagtcttttcagggacattcaatagccacacgagttttttaatgaaagccacgcaagataacaaaaacagcaccttgtctcaaattgtagaaatgatccataacgctcaaagctcaaaggcagagatttctcgcttagcggataaggtttcaagcgtgtttgtgccaagcgtgatcgctatcgctattttagcgtttgtggtgtggctcatcatcgcgcctaaacccgatttttggtggaattttggaatcgctttagaagtgtttgtatcggttttagtgatttcttgcccttgcgctttaggattggctacacctatgagtattttagtagcgaaccaaaaagcgagttctttaggtttattttttaaagacgctaaaagtttagaaaaagcaaggctagtcaatacgatcgtttttgataaaaccggcacgctcactaacggcaagcctgtcgttaaaagcgttcattctaacatagaattattagagttattgagtttagcgggcagtattgaaaagagcagcgaacatgtcattgctaaagggattgtagaatacgccaaagagcataacgctcccttaaaagaaatgagtgaagttaaagtgaaaacgggttttggcatcagcgctaaaacagattatcaaggcgctaaagaggttatcaaagtcggtaatagcgaattttttaaccctattaacgcactagaaattcaagaaaacgggattttagtgtttgtgggtagagtgatcagtgaaaaagaagacgagcttttaggggcgtttgttttagaagatttgcccaaaaaaggcgtgaaagagcatatcgctcaaatcaaaaaattaggcattaacacttttcttttaagcggggacaatagagagaatgtcaaaaaatgcgcgcttgaattagggattgatggttatatcagcaacgctaaaccacaagacaagctcaacaagatcaaagagcttaaggaaaaagggcagatcgttatgatggtaggcgatggcttgaatgacgctcctagccttgctatgagcgatgtggcagtggtgatggctaaagggagcgatgtgagcgtgcaagcagcggatattgtgagctttaataacgacattaaatcggtttatagcgcgattaaattgagccaagcgaccatcaaaaatatcaaagaaaatttgttttgggctttttgttataatagcgtgtttatccctttagcttgtggggttctttataaagctaatatcatgttaagcccggcgattgcgggtttagcgatgagtttaagctctgtgagtgtggtcttaaactcccaaaggctaaggaattttaaaattaaggatcattga

SEQ ID NO: 55738 - protein, 741 aa, Helicobacter pylori
MKESFYIEGMTCTACSSGIERSLGRKSFVKKIEVSLLNKSANIEFNENETNLDEIFKLIEKLGYSPKKTLAEEKKEFFSPNVKLALAVIFTLFVVYLSMGAMLSPSLLPESLLTINNHSNFLNACLQLIGTLIVMHLGRDFYIQGFKALWHRQPNMSSLIAIGTSAALISSLWQLYFVYTSQWSYGHYYFESVCVILMFVMVGKRIENVSKDKALDAMQALMKNAPKTALKMHNNQQIEVLVDSIVVGDILKVLPGSAIAVDGEIIEGEGELDESMLSGEALPVYKKVGDKVFSGTFNSHTSFLMKATQDNKNSTLSQIVEMIHNAQSSKAEISRLADKVSSVFVPSVIAIAILAFVVWLIIAPKPDFWWNFGIALEVFVSVLVISCPCALGLATPMSILVANQKASSLGLFFKDAKSLEKARLVNTIVFDKTGTLTNGKPVVKSVHSNIELLELLSLAGSIEKSSEHVIAKGIVEYAKEHNAPLKEMSEVKVKTGFGISAKTDYQGAKEVIKVGNSEFFNPINALEIQENGILVFVGRVISEKEDELLGAFVLEDLPKKGVKEHIAQIKKLGINTFLLSGDNRENVKKCALELGIDGYISNAKPQDKLNKIKELKEKGQIVMMVGDGLNDAPSLAMSDVAVVMAKGSDVSVQAADIVSFNNDIKSVYSAIKLSQATIKNIKENLFWAFCYNSVFIPLACGVLYKANIMLSPAIAGLAMSLSSVSVVLNSQRLRNFKIKDH

SEQ ID NO: 55739 - DNA, 2412 bp, Bacillus subtilis
  CDS (1)..(2412): transl_table=11
atgttgagtgaacaaaaggaaatcgcgatgcaggtctctggtatgacctgtgcggcatgtgctgccagaattgaaaaaggcctgaagcggatgcccggtgtcacggatgcaaatgttaatctggcaacggaaacatcaaatgtaatctacgatcctgctgaaacagggactgcagcgattcaggaaaaaatagagaagctgggctatcacgtcgttacagaaaaagctgaattcgatattgagggcatgacctgtgcggcttgcgccaatcggattgaaaaacggcttaacaaaatagaaggcgtcgcaaatgcaccagtaaacttcgctttagaaacagttacggtcgaatacaatccaaaagaagcgtctgtcagcgatttgaaagaagcggtagataagcttggatataagctaaagttgaagggtgaacaggacagtgaggctgctgctaaaaagaaagaagaacggaagcaaacggcgagactgattttttcagctgtcctgtcatttccattgctttgggcgatggtgagccattttacatttacatcattcatttgggtaccggatatatttctcaatccgtggatgcagtttgcgctggcgacaccagtccagtttctgatcggctggccgttttatgtgggtgcgtataaggcgcttagaaataaaagcgccaatatggatgtattggtcgccctcggtacgacggctgcttacgcttatagtctttatctaacttttcaaagcattggctctcacgggcatacagacggcctttattatgaaacaagcgcgattttgctgacgctgattttattaggcaagttgtttgaaacaaaagcaaaaggccgttcctcggatgcgattaaaaagctgatgaagcttcaagcgaaaacagctactgttgtaagagacggacaggagcaaatcatcccgatcgacgaagtgcttgttaatgacattgtttacgtcaaacctggcgaacgaattcctgtcgacggagaagtggttgaaggccgttcagcggttgacgaatcgatgattacaggagaaagtcttcctgttgacaaaaatcctggtgacagcgtgacaggttcaaccgttaacgcaaacggctttctgaaaattaaagctgtcaacgtcggaaaggatactgcgctttctcatatcatcaaaattgttgaggaagcacaagggtcaaaagcgccgatccagcgtctcgctgaccagatttcaggcatttttgtacccattgtattggggattgcggttctcacttttctcatttggtatctttgggcggctcctggcgattttgccgaagcgatcagcaagttcattgcggttcttgtcattgcctgtccttgcgccctcggtcttgccactccgacgagcataatggctggatctggacgcgctgctgaattcgggattttatttaaaggcggcgagcatttagaaaaaacacatcgtctcgatacaattgttcttgataaaaccggaaccgtgacaaacgggaagccgcgtctgacggatgccattccattcggccgttttgaagaaaaagatttgcttcaatttgcagcggcagcggaaacgggatcagagcatccgcttggcgaagcgattattgctggcgtgaaagataaagggcttgagataccgaaacttacccgctttgaagcaaaagtcggcgcaggcattttggctgaagccggaggaaaaagcattctcgtcggcacaagaaaattaatggagagcgaacaggttgagcatggggctcttctcgcccaaatggaagagctagaggccgaagggaaaacagttatgcttgtatccattgatggagaagcagcggggctagtagcagttgcagatacgattaaggatacgtcgcggaaggctgttgcccgtctgaaagagttgggtcttgatgtcatcatgatgacaggagacaatcgcagaaccgcagaagccatcgcgaaggaagcgggaattgcgaatatcattgcggaagttcttcctgaacaaaaggcggcggaaatcgcccgcttgcaaaaagaaggccgccagacagcaatggtaggcgacggaattaacgatgcgccggcgcttgccacagctgacatcggcatggcgattggaactggcacggacattgccatggaaacagcagacattacacttattcgcggcgatctgaacagcattgccgacgcaatccgcatgagcagattgacaatgaaaaacattaaacaaaacttattctgggcgcttggctataacagcctcggcatcccaatcgcagcacttggatttttagcaccgtggatagcaggagcagcaatggcattcagctccgtttccgttgttctgaatgctcttcgtctgcaaaaagtaaaatga

SEQ ID NO: 55740 - protein, 803 aa, Bacillus subtilis
MLSEQKEIAMQVSGMTCAACAARIEKGLKRMPGVTDANVNLATETSNVIYDPAETGTAAIQEKIEKLGYHVVTEKAEFDIEGMTCAACANRIEKRLNKIEGVANAPVNFALETVTVEYNPKEASVSDLKEAVDKLGYKLKLKGEQDSEAAAKKKEERKQTARLIFSAVLSFPLLWAMVSHFTFTSFIWVPDIFLNPWMQFALATPVQFLIGWPFYVGAYKALRNKSANMDVLVALGTTAAYAYSLYLTFQSIGSHGHTDGLYYETSAILLTLILLGKLFETKAKGRSSDAIKKLMKLQAKTATVVRDGQEQIIPIDEVLVNDIVYVKPGERIPVDGEVVEGRSAVDESMITGESLPVDKNPGDSVTGSTVNANGFLKIKAVNVGKDTALSHIIKIVEEAQGSKAPIQRLADQISGIFVPIVLGIAVLTFLIWYLWAAPGDFAEAISKFIAVLVIACPCALGLATPTSIMAGSGRAAEFGILFKGGEHLEKTHRLDTIVLDKTGTVTNGKPRLTDAIPFGRFEEKDLLQFAAAAETGSEHPLGEAIIAGVKDKGLEIPKLTRFEAKVGAGILAEAGGKSILVGTRKLMESEQVEHGALLAQMEELEAEGKTVMLVSIDGEAAGLVAVADTIKDTSRKAVARLKELGLDVIMMTGDNRRTAEAIAKEAGIANIIAEVLPEQKAAEIARLQKEGRQTAMVGDGINDAPALATADIGMAIGTGTDIAMETADITLIRGDLNSIADAIRMSRLTMKNIKQNLFWALGYNSLGIPIAALGFLAPWIAGAAMAFSSVSVVLNALRLQKVK

SEQ ID NO: 55741 - DNA, 2184 bp, Enterococcus hirae
  CDS (1)..(2184): transl_table=11
atggcaacgaataccaaaatggaaacatttgtcattactggaatgacatgtgcgaattgttctgctcgaatcgaaaaagaactaaatgaacaacctggtgtcatgtctgctactgtcaatttagccactgaaaaggcaagtgtgaaatataccgacactactacagaaagattgatcaaaagtgtcgaaaatatcggctatggggcaattttatatgacgaagcgcataaacaaaaaattgctgaggagaaacaaacctatttaagaaaaatgaagtttgatcttatctttagtgcgatcttgactctacccttgatgttagcaatgattgccatgatgcttggaagtcatggaccaattgtgtcgttcttccatctgtctcttgtgcagttgctctttgctttgcctgtgcaattttatgtaggttggcgcttttataaaggagcctatcatgcattaaaaactaaagcgccgaatatggatgtcttagttgcgattggaacatctgcagccttcgcattaagcatttataatggttttttccctagccattcccatgatctttattttgaaagtagcagtatgatcattaccttgattttacttggaaagtatttagaacatacagcaaaaagtaaaacaggcgatgccatcaaacagatgatgtcccttcagacaaaaacagcacaagttttaagagatggcaaagaagagacgattgcaattgatgaggtcatgatcgatgacatcttagtgattcgtcctggtgaacaagtacctacagatggacggatcattgctggcactagtgcattggatgaaagcatgttgacaggagaaagtgtacctgttgagaaaaaagaaaaagatatggtttttggtggaacgatcaataccaatggattgatccaaatacaagtttctcagataggaaaagatacggtgttggcacaaatcatccaaatggtggaagatgctcaaggaagtaaagcaccgatccaacaaattgctgacaagatttcagggattttcgtaccgatcgttttgtttttagcattggtgacactattagttacaggatggctcacgaaggattggcagttagcattgcttcatagtgtgtccgttttagtcattgcttgcccatgtgcgcttggtttagcaacaccaactgccatcatggtaggaacaggggtcggtgctcataatgggatattgatcaaaggtggcgaagcgttagaaggagccgctcatctaaatagtattattttggataaaactggaacgattacacaaggccgaccagaagtaacagatgtcatcggtcccaaagagatcatttcccttttctattcccttgaacatgcttctgaacatcctttaggaaaagctattgttgcttatggtgcaaaagtcggtgcaaaaactcagccaatcactgattttgttgctcatcctggtgcaggaatcagtggaacgatcaacggtgttcattattttgctgggactagaaagagactagctgaaatgaacctttcatttgatgaatttcaagaacaggcgttagaattagaacaggcagggaaaacagtgatgtttttagccaacgaagaacaggttcttggaatgattgccgttgctgatcaaatcaaagaagatgcaaaacaagcaatcgagcaactacaacaaaaaggtgtcgatgtgtttatggttacgggagataatcaacgagccgctcaagcaatcggcaaacaagtaggaattgattccgaccatatctttgcagaagttttacctgaagaaaaagccaactatgtagaaaaactacagaaagctggaaagaaagttggcatggtcggtgatggaatcaatgatgccccagcgctacgtttagcagatgttgggattgcaatgggaagtggaaccgatattgcgatggaaacagctgatgtgacattaatgaatagtcatttaacttctatcaatcaaatgatttctttatcagctgccacattaaaaaaaatcaaacaaaatttgttttgggcattcatttataatacgatcgggattccttttgctgcctttggttttttaaacccaatcattgctggtggcgcaatggcctttagttcaatcagtgtattattgaattctttaagcttaaatcgaaaaacgatcaaataa

SEQ ID NO: 55742 - protein, 727 aa, Enterococcus hirae
MATNTKMETFVITGMTCANCSARIEKELNEQPGVMSATVNLATEKASVKYTDTTTERLIKSVENIGYGAILYDEAHKQKIAEEKQTYLRKMKFDLIFSAILTLPLMLAMIAMMLGSHGPIVSFFHLSLVQLLFALPVQFYVGWRFYKGAYHALKTKAPNMDVLVAIGTSAAFALSIYNGFFPSHSHDLYFESSSMIITLILLGKYLEHTAKSKTGDAIKQMMSLQTKTAQVLRDGKEETIAIDEVMIDDILVIRPGEQVPTDGRIIAGTSALDESMLTGESVPVEKKEKDMVFGGTINTNGLIQIQVSQIGKDTVLAQIIQMVEDAQGSKAPIQQIADKISGIFVPIVLFLALVTLLVTGWLTKDWQLALLHSVSVLVIACPCALGLATPTAIMVGTGVGAHNGILIKGGEALEGAAHLNSIILDKTGTITQGRPEVTDVIGPKEIISLFYSLEHASEHPLGKAIVAYGAKVGAKTQPITDFVAHPGAGISGTINGVHYFAGTRKRLAEMNLSFDEFQEQALELEQAGKTVMFLANEEQVLGMIAVADQIKEDAKQAIEQLQQKGVDVFMVTGDNQRAAQAIGKQVGIDSDHIFAEVLPEEKANYVEKLQKAGKKVGMVGDGINDAPALRLADVGIAMGSGTDIAMETADVTLMNSHLTSINQMISLSAATLKKIKQNLFWAFIYNTIGIPFAAFGFLNPIIAGGAMAFSSISVLLNSLSLNRKTIK

SEQ ID NO: 55743 - DNA, 2238 bp, Helicobacter pylori
  CDS (1)..(2238): transl_table=11
atgaaagaatctttttacatagagggaatgacttgcacggcgtgttctagcgggattgaacgctctttggggcgtaagagttttgtgaaaaaaatagaagtgagccttttaaataagagcgctaacattgaatttgacgaaaaccaaaccaatttagacgaaatttttaaactcattgaaaagctaggctatagccctaaaaaagctctgacaaaagaaaaaaaagaattttttagccctaatgttaaattagcgttagcggttattttcacgctttttgtggtgtatctttctatgggggcgatgcttagccctagccttttacctgaaagcttgcttgcaattgataatcatagtaattttttaaacgcttgcttacagcttataggcgcactcattgtcatgcatttggggagggatttttacattcaagggtttaaagccttatggcacagacaacccaacatgagcagccttatcgccataggcacaagcgctgccttaatttcaagcctgtggcaattgtatttggtctataccaatcattataccgatcagtggtcttatgggcattattattttgaaagcgtgtgcgtgattttaatgtttgtgatggtgggcaaacgcattgaaaatgtttctaaagacaaagctttagacgctatgcaagccttgatgaaaaacgccccaaaaaccgcccttaaaatgcaaaataaccaacagattgaagttttagtggatagcattgtggtgggggatattctaaaagtcctccctggaagcgcgattgcggtggatggtgaaatcatagagggcgaaggggaattagatgagagcatgttgagcggcgaagcgttgccggtttataaaaaagtcggcgataaagtcttttcagggacattcaatagccacacgagttttttaatgaaagccacgcaaaacaacaaaaacagcaccttgtctcaaattatagaaatgatttataacgctcaaagttcaaaggcagagatttctcgcttagcggataaggtttcaagcgtgtttgtgccaagcgtgatcgctatttctattttagcgtttgtggtgtggctcatcattgcacctaagcccgatttttggtggaattttggaatcgctttagaagtgtttgtatcggttttagtgatttcttgcccttgcgctttaggattggctacgcctatgagcattttagtagcgaaccagaaagcgagttctttagggttattttttaaagacgctaaaagtttagaaaaagcaaggctagtcaatacgatcgtttttgataaaaccggcacgctcactaacggcaagcctgtcgttaaaagcgttcattctaagatagaattattagagttattgagtttagcgctcagtattgaaaagagtagcgaacatgtcatcgctaaagggattgtagaatacgcaaaagagcataacgctcccttaaaagaaatgagcggggttaaagtgaaaacgggttttggcattagtgctaaaacagattatcaaggcactaaagagattattaaagtaggcaacagcgagttttttaaccctattaacacgctagaaattaaagaaaacgggattttagtgtttgttggtagagcgatcagtgaaaaagaagacgagcttttaggggcgtttgttttagaagatttgcccaaaaaaggcgtgaaagagcatatcgctcaaatcaaaaatttaggcattaacacctttcttttaagcggagacaatagggagaatgtccaaaaatgcgcgtttgaattagggattgatggttatatcagcaacgctaaaccacaagacaagctcaataagatcaaagagcttaaggaaaaagggcagatcgttatgatggtgggcgatggcttgaatgacgctcctagtcttgctatgagcgatgtggcggtggtgatggctaaagggagcgatgtgagcgtgcaagcagcggacattgtgagttttaataacgatattaaatcggtttatagcgcgattaaattaagccaggcgacaattaaaaatatcaaagaaaatttgttttgggctttttgttataatagcgtgttcatccctttagcttgtggggttctttataaggctaatctcatgttaagcccggcgattgcgggtttagcgatgagtttaagctctgtgagtgtggtcttaaactcccaaaggctaaggaattttaaaattaaggatcattga

SEQ ID NO: 55744 - protein, 745 aa, Helicobacter pylori
MKESFYIEGMTCTACSSGIERSLGRKSFVKKIEVSLLNKSANIEFDENQTNLDEIFKLIEKLGYSPKKALTKEKKEFFSPNVKLALAVIFTLFVVYLSMGAMLSPSLLPESLLAIDNHSNFLNACLQLIGALIVMHLGRDFYIQGFKALWHRQPNMSSLIAIGTSAALISSLWQLYLVYTNHYTDQWSYGHYYFESVCVILMFVMVGKRIENVSKDKALDAMQALMKNAPKTALKMQNNQQIEVLVDSIVVGDILKVLPGSAIAVDGEIIEGEGELDESMLSGEALPVYKKVGDKVFSGTFNSHTSFLMKATQNNKNSTLSQIIEMIYNAQSSKAEISRLADKVSSVFVPSVIAISILAFVVWLIIAPKPDFWWNFGIALEVFVSVLVISCPCALGLATPMSILVANQKASSLGLFFKDAKSLEKARLVNTIVFDKTGTLTNGKPVVKSVHSKIELLELLSLALSIEKSSEHVIAKGIVEYAKEHNAPLKEMSGVKVKTGFGISAKTDYQGTKEIIKVGNSEFFNPINTLEIKENGILVFVGRAISEKEDELLGAFVLEDLPKKGVKEHIAQIKNLGINTFLLSGDNRENVQKCAFELGIDGYISNAKPQDKLNKIKELKEKGQIVMMVGDGLNDAPSLAMSDVAVVMAKGSDVSVQAADIVSFNNDIKSVYSAIKLSQATIKNIKENLFWAFCYNSVFIPLACGVLYKANLMLSPAIAGLAMSLSSVSVVLNSQRLRNFKIKDH

SEQ ID NO: 55745 - DNA, 2286 bp, Rhizobium leguminosarum bv
  CDS (1)..(2286): transl_table=11
gtgagctgctgtaccatggacgcagaaagcgtgcttgccctcagcacgacatcattcagtgccgaagaggtccgccttgccagccagccgctcggcgaaggattgcgccagttggacctgagcgtttccgacgtccactgcggcggctgcatttcgaccatcgaaagggcgttgttgacgcttcccttcgtcaagacagcgcgagtcaatctcacggctcgaagggtcacctgcgtctaccaggaggaaatcgaggcgcgcgcaaccgatccgtccaagatcctcggagagatcaactcggccggatatcgcgcgcatctcttcaccccctcagctcccgagagcgacaagaccagaaatcagcttctcctcgcgatcggcgtttccggttttgcggctcccaacattatgttgctctcggtatcggtctggtcgggcgcagatgccgcgacgcgcgacatgtttcattggatctcggcgatgatagcagcgcccgcgctggtttatgcggggcgcttcttcttcaaatcggcctggaatgcgctgcggcacgggcgcaccaacatggacgttccgatctcggtcaccgtgtcgctctcctatgccgtttcattgtgggagaccgtccatcacggcgagcatgcgtggttcgacgcttcggtctcgctgctcttcttcctgctgatcggcagaaccctcgatcatatcatgcgggaaaaggctcgggcagcgatcaacggactggcacggctggccccgcgcggagcattgctgatcaatccggacgggtcgcgacgctacattgcggtagaagagatcgcggcgggggatgaaatctcgatagccgcaggcgaacgggttcccgtcgatggcatagtcgtcagcggagaaagcgacctggacctctccatcgtcaccggcgagagcagccccgtcaccgtcgccagcgacagcgaagtgagttccggggcgatgaatctgaccggctcgctcgtgttgcgggcgacgagaattgccaagaattcacttctctcggagatcatcggcctcatggaagccgccgagggcggaagagctcgctatcgcaggatcgccgatcgcgctgcgacactctattcgccggtcgtgcatctgctggcgctggtctccttccttgcctggggcttcctgggcggagactggaaacaggccatgctggtcgccgtagcggtcctgatcatcacctgcccatgcgcattgggtcttgccgtgcccgtggtccaagtcgtcgccgcgggggagcttttccggaagggcatcatggtgaaggacggctcagcactcgaaagactggccgagaccgacaccgtggcctttgacaagacgggcaccttgacgatgggcagttcgcgccttgtcagagtggacgccatggacgagagcgccgccgcaatcgcccgtggattggcagcgcattcacggcatcctctttctcgggctctggtgcgggacaccgaaactgcccccatctccttcgacagggtcacggaaatccccggcgggggactggaagccaggaacggagcggatatctatcgcttgggcaacgcggcgtttgcctgcggaaccagcttcgtgccccgcaccgccgacagtccgttctcggaagtggtcctgtcgaagaatggcgtcgatcttgcccgcttcttcttcgatgacacgcttcgtccgggtgcgtgcgaggccatcgaccggctcgatgcagccggccttgaaacgctgatcgtgtcgggcgacaggcagaccgtcgtcgacaatacggcgcatgccctgggtatcgacagggctttgggctctctgacgccgaagcagaaggtcgaggaatgccagaggctgaatggcgaaggtcgtcgcgtgctcatggttggcgacgggatcaacgacgccccggcacttgctgcggcgcatgtctcgatggcgccggccacggcctccgatatcggcagacaggcggccgacctcgttttcttcatcgatcgccttgacgctgttccggaagcgatcgccgttgcgcgacgatccgccagcctcatccggcagaacttcgctcttgccattggttacaacgttctggcggtgccgatcgccatcgccggattggcgacgccgctgatagcggcggtggcaatgtcgacatcatcgatcatcgtcgtgacgaacgcactgcgcttgaacggcttcggcaagcgtccggatatgcacattcgacgggggatcggcaggagtgcggaggtcaaagccgcatga

SEQ ID NO: 55746 - protein, 761 aa, Rhizobium leguminosarum bv
MSCCTMDAESVLALSTTSFSAEEVRLASQPLGEGLRQLDLSVSDVHCGGCISTIERALLTLPFVKTARVNLTARRVTCVYQEEIEARATDPSKILGEINSAGYRAHLFTPSAPESDKTRNQLLLAIGVSGFAAPNIMLLSVSVWSGADAATRDMFHWISAMIAAPALVYAGRFFFKSAWNALRHGRTNMDVPISVTVSLSYAVSLWETVHHGEHAWFDASVSLLFFLLIGRTLDHIMREKARAAINGLARLAPRGALLINPDGSRRYIAVEEIAAGDEISIAAGERVPVDGIVVSGESDLDLSIVTGESSPVTVASDSEVSSGAMNLTGSLVLRATRIAKNSLLSEIIGLMEAAEGGRARYRRIADRAATLYSPVVHLLALVSFLAWGFLGGDWKQAMLVAVAVLIITCPCALGLAVPVVQVVAAGELFRKGIMVKDGSALERLAETDTVAFDKTGTLTMGSSRLVRVDAMDESAAAIARGLAAHSRHPLSRALVRDTETAPISFDRVTEIPGGGLEARNGADIYRLGNAAFACGTSFVPRTADSPFSEVVLSKNGVDLARFFFDDTLRPGACEAIDRLDAAGLETLIVSGDRQTVVDNTAHALGIDRALGSLTPKQKVEECQRLNGEGRRVLMVGDGINDAPALAAAHVSMAPATASDIGRQAADLVFFIDRLDAVPEAIAVARRSASLIRQNFALAIGYNVLAVPIAIAGLATPLIAAVAMSTSSIIVVTNALRLNGFGKRPDMHIRRGIGRSAEVKAA

SEQ ID NO: 55747 - DNA, 2274 bp, Rhizobium meliloti
  CDS (1)..(2274): transl_table=11
atgagctgctgcgcctctagtgcggcaatcatggttgccgaaggagggcaggcgtcgcccgcctccgaggaactttggcttgcgagccgggacctcggaggcgggttgcgtcagacggagctaagcgtccccaacgcctattgcggcacctgcatcgccacaatcgaaggagcgctgcgcgccaagcccgaagtcgaacgcgcccgcgtcaatctctcctcccgtcgcgtttcaatcgtctggaaggaggaggttggcggtcgtcgtaccaatccctgtgatttcttgcatgccatcgctgagcgtggctatcagacacatctcttttcgcccggcgaggaggaaggcgacgaccttttgaagcagttgatcctcgcggttgccgtttccggcttcgccgcaaccaatatcatgctgctctccgtgtcagtctggtccggtgccgatgcggccacccgcgatctcttccactggatttcggcactgatcgccggaccagcgctgatttatgctggccgcttcttctacaagtcggcttggaacgccattcgccacggccgaaccaacatggatgtgccgatcgcgctcgccgtcagcctttcctatggcatgtcgctccacgagacgattggtcatggcgaacatgcctggttcgatgcatccgtgaccttgctgttcttcctgctgatcggccgtacgctcgatcacatgatgcgcggccgcgcacgaacggcgatcagcggtctcgcacgcctgtcgccgcgcggggccacggtcgtccatccggatggctcgcgcgagtaccgcgcggtcgacgagataaacccgggcgaccgcctgatcgttgcggctggcgagcgtgttccggtcgatggacgggtgctgtcagggacgagcgacctcgatcgctccgtagtcaacggcgagagctcgcccaccgtggtcaccacgggggacacggttcaggccggcacgctcaacttaacgggtccgctcacgctggaggcgacggccgcggcgcgcgactcgttcatcgccgagattatcggattgatggaggctgccgaaggggggagggcgcgctaccgacgcattgccgaccgcgccgctcgctattactcgccggccgttcatctcctggcgctcctgaccttcgtcggctggatgctggtagagggagatgtccgccatgccatgttggtcgcggtggcggtgctcatcatcacgtgcccctgcgcactcggtcttgccgttccggtcgtccaggtcgttgcggctgggcggcttttccaaggcggtgtcatggtcaaggatggctcggcgatggagcgtctcgctgagatcgacacggtgctcttggacaagacgggcacgctgaccatcggcaagccacggctcgtgaacgcgcacgaaatctcaccgggtcggctcgcgacggcggctgctattgcggtgcattcgcgccatccgatcgcagtagcaattcagaattcggcaggggcagcctcgccgattgccggcgatatccgggaaattcccggcgccggcatcgaagtgaagaccgaggatggggtctatcggctcgggagccgcgactttgcggtcggcggttcaggacctgacggcaggcaatctgaggcaatcctgtcgttggactttcgtgagcttgcctgcttccggttcgaggaccagccgcggcccgcatcacgcgaatcgatcgaagcccttggccgcctgggcattgcgaccggaatcctgtccggcgaccgggcgcctgtggtagcggctctcgccagcagtttggggatttcgaactggtatgccgaactctcgccacgcgaaaaggtccaggtatgcgccgctgccgccgaggcaggtcacaaggccctggtagtgggggacggcataaacgacgcgcccgttctgcgtgcggcgcacgtttccatggctccggcgactgctgccgatgtcggacgccaggctgccgacttcgtcttcatgcatgagcgcctttcggcagttcccttcgccatcgagacttcgcggcatgccggccaacttatccggcagaacttcgcgctggcgatcggctacaacgtcatcgccgtgccgatcgcaattcttggctacgcgactccgctcgttgccgctgtcgcgatgtccagctcgtcgctcgtcgtagtcttcaatgctctgagactgaagcgcagccttgccgccggtaggggagcgacgccaggcacactgatacattcaggcgcggtgacctcatga

SEQ ID NO: 55748 - protein, 757 aa, Rhizobium meliloti
MSCCASSAAIMVAEGGQASPASEELWLASRDLGGGLRQTELSVPNAYCGTCIATIEGALRAKPEVERARVNLSSRRVSIVWKEEVGGRRTNPCDFLHAIAERGYQTHLFSPGEEEGDDLLKQLILAVAVSGFAATNIMLLSVSVWSGADAATRDLFHWISALIAGPALIYAGRFFYKSAWNAIRHGRTNMDVPIALAVSLSYGMSLHETIGHGEHAWFDASVTLLFFLLIGRTLDHMMRGRARTAISGLARLSPRGATVVHPDGSREYRAVDEINPGDRLIVAAGERVPVDGRVLSGTSDLDRSVVNGESSPTVVTTGDTVQAGTLNLTGPLTLEATAAARDSFIAEIIGLMEAAEGGRARYRRIADRAARYYSPAVHLLALLTFVGWMLVEGDVRHAMLVAVAVLIITCPCALGLAVPVVQVVAAGRLFQGGVMVKDGSAMERLAEIDTVLLDKTGTLTIGKPRLVNAHEISPGRLATAAAIAVHSRHPIAVAIQNSAGAASPIAGDIREIPGAGIEVKTEDGVYRLGSRDFAVGGSGPDGRQSEAILSLDFRELACFRFEDQPRPASRESIEALGRLGIATGILSGDRAPVVAALASSLGISNWYAELSPREKVQVCAAAAEAGHKALVVGDGINDAPVLRAAHVSMAPATAADVGRQAADFVFMHERLSAVPFAIETSRHAGQLIRQNFALAIGYNVIAVPIAILGYATPLVAAVAMSSSSLVVVFNALRLKRSLAAGRGATPGTLIHSGAVTS

SEQ ID NO: 55749 - DNA, 2475 bp, Salmonella typhimurium
  CDS (1)..(2475): transl_table=11
atgcttcagatatgcataaggagagttactgtgaaaaatgacaatgcagtggaacataacaaccaggactgcttcttgagcagaacatcatcccgggacgagagtcacgcattgcataaggtgagagaatccgtgtgcgggatggtcatcctgcctgacaaggcgcacagcagcattcgataccaggaccatcagctttatttctgctccgccagctgtgagagcaaatttaaagcccatcccgatcattattttaccgaagatgccagtgaacatcaccatcaccacgaccaccatgaagtcagccctgataagataaaacagtctcaccgccaggcggagaaagagatttctgaaggtgtgtggacatgtccgatgcatccggagatacgccgtagtggtcccggaagctgtcctgtctgtggaatggcactggagccgctcgtagctacggcatccacggggacgagtgatgaacttcgcgacatgacaagacgcttctggctggggttgttgctggcgtttccggttctgatactcgaaatgggttctcatctgtttcccgctttgaggaatacagtaccgccacagtacaacacatggctgcagttacttctggcctctcctgtcgttttgtggtgtggctggccattcttcgcccgggccggaatgtcgttacgtaaccgctccctgaatatgtttacccttgttgcaatggggaccggcgtagcctgggtttacagcgtcattgcaaccgtcttcccctcctggtttcctgcatcgttcagaaacatggatggcctggtggccatttattttgaagccgcagctgttattacggtgcttgttctgctgggacaggtccttgaattgcgggcaagggaacaaacctcaggtgccattactgcgcttcttaaccttgcccccaaaaccgccaggcggctggatcaagacggtcatgaaacggatattaatgcggaagatgtcctgcctggcgataagctccgcatcagacctggagagagtattccggtcgacggtatcgtggtcgaaggcaaaacaaccgtggatgaatcgatggtgaccggggagtctatgccggttaccaaaacggagggtgaacccgtcattggggggacgattaatcagacaggtagtcttatcatccgtgcagagaaagtcggtgatgaaacgatgctctcacgaattgttcagatggtcgctgatgcacagcgttcgcgggcccccatccagagaatggctgacagcgtttcaggctggtttgttcctctggtgatacttatcgcggttgttgctttcatgatctggtctgtctgggggcccgagcccaggatggcgcacggtctcattgcggctgtgtcggtcctgattattgcctgtccctgcgcgctggggctggccacgccgatgtcgataatggtgggggtgggcaaaggagcccaggccggggtgttaattaagaatgccgaagcccttgagcgtcttgaaaaagtggacacgctggttgtcgacaaaacaggcacgctcacggaaggttcgccgacggtgacagggattatcagtctcaatccgggtggggaaacatctcttttgcgtgtaacggccgcagtggataaaggctcgcagcatccgctgggtatggcagtagttaaagcagcacaggaaaaggggatcgcaatacccgcagtcactcatttcaatgcgccgtcgggtaaaggtgtctcaggcgatgtcgaaggtcaacgggttgttattggtaatgaactggctatgcaggaaaacagtatcgttattgataatcaaaaggccgttgcggatacgttgcggatggaaggtactaccgttatctatgtggccacagacgggcaccttgcaggcctgatagctatctcggatcccgtgaaagcaaccacgccggatgcgcttaaagctttgcgtcaggcggggatccgcatcgttatgctcaccggggataaccagcttaccgctgaagcagtcgcacggaaactgggaatagatgaggttgaagccgggattctgccggatggcaaaaaagcagtgataacccgactgaaagcgtctggccatgtggttgcgatggccggagacggtgtgaatgatgccccggcgctggcagcggctgacgtgggaatagccatgggaacgggtacagatgtggcaattgaaagtgccggagtcacccttctcaaaggcgacctgatgatactgaacagggcccgtcatctgtcagagatcaccatgaaaaatatccgacagaatctgttttttgcatttatctacaacgcacttggcgtgcctgtggctgcaggcctgctttatcctgtgtatggaatactgctgtcgccagttattgcggcggcggccatggctctttcctccgtcagcgtcattgtgaatgcgttgcgtctgaaaagtgtcaggctcgggaaataa

SEQ ID NO: 55750 - protein, 824 aa, Salmonella typhimurium
MLQICIRRVTVKNDNAVEHNNQDCFLSRTSSRDESHALHKVRESVCGMVILPDKAHSSIRYQDHQLYFCSASCESKFKAHPDHYFTEDASEHHHHHDHHEVSPDKIKQSHRQAEKEISEGVWTCPMHPEIRRSGPGSCPVCGMALEPLVATASTGTSDELRDMTRRFWLGLLLAFPVLILEMGSHLFPALRNTVPPQYNTWLQLLLASPVVLWCGWPFFARAGMSLRNRSLNMFTLVAMGTGVAWVYSVIATVFPSWFPASFRNMDGLVAIYFEAAAVITVLVLLGQVLELRAREQTSGAITALLNLAPKTARRLDQDGHETDINAEDVLPGDKLRIRPGESIPVDGIVVEGKTTVDESMVTGESMPVTKTEGEPVIGGTINQTGSLIIRAEKVGDETMLSRIVQMVADAQRSRAPIQRMADSVSGWFVPLVILIAVVAFMIWSVWGPEPRMAHGLIAAVSVLIIACPCALGLATPMSIMVGVGKGAQAGVLIKNAEALERLEKVDTLVVDKTGTLTEGSPTVTGIISLNPGGETSLLRVTAAVDKGSQHPLGMAVVKAAQEKGIAIPAVTHFNAPSGKGVSGDVEGQRVVIGNELAMQENSIVIDNQKAVADTLRMEGTTVIYVATDGHLAGLIAISDPVKATTPDALKALRQAGIRIVMLTGDNQLTAEAVARKLGIDEVEAGILPDGKKAVITRLKASGHVVAMAGDGVNDAPALAAADVGIAMGTGTDVAIESAGVTLLKGDLMILNRARHLSEITMKNIRQNLFFAFIYNALGVPVAAGLLYPVYGILLSPVIAAAAMALSSVSVIVNALRLKSVRLGK

SEQ ID NO: 55751 - DNA, 2982 bp, Oryza sativa
  CDS (1)..(2982)
atggcccatctccagctcacgccgctcgccgccggcggcggccgcggcggcgccgacgagatggaggaggtcgcgctgctcggccccgaatcctacgacgaggaggcggcggcggcgccggggccggaggaggaggaggggatgcggcgggtgcaggtgcgggtcacgggcatgacgtgctccgcctgcaccgccgccgtcgaggccgccgtctccgcccgccgtggcgtgggcggggtcgccgtctcgctcctccagagccgcgcccgcgtcgtcttcgaccccgcgctcgccaaggaagaagacatcatagaagcaatagaagatgctggattcgaggcagaactactcccggactctactgtttctcagcccaagctgcagaacactttatctggacaatttaggataggggggatgacatgcgctgcatgtgtgaattctgttgagggtatcttgaagaaattgcctggtgttaaaagagctgttgttgcattagcgacctcattaggggaagttgaatacgatccttctgtcatcagcaaagatgaaattgttcaggctattgaggatgctggttttgaagctgcactgttacaaagtagtgaacaagacaaggttttgctaggcttaatgggattgcatactgaggtagatgtagatatattgcatgatatcctaaaaaaaatggaaggcttgcgtcagttcaacgtaaatttggtactctcggaagctgaaattgtatttgatccagaagttgttggtttgaggtcaattgtggataccatcgagatggaaagcagtggcagactgaaagcccatgtacagaatccttacatacgggctgcttcaaatgatgcacaggaggcctccaaaatgcttcatcttctttgctctagcttattcctaagccatactgactctcctctggttcccttacaacagattcctgtattttttattcgcatggtatgccctcgcatacacttcactcgttccctcctactcatgcacttgggaccattttatataggagacttgttgaagtggatactggtgagtatagtacagtttggtgttggcaaacgattctatgttgcagcctatagggccctgagacatggctctacaaatatggatgtactagttgttcttggcaccactgcatcatacgtctactctgtatgtgcgcttctttatggtgcattcactggatttcatcccccgaaatattttgagacaagtgccatgataatcacatttgtgctatttgggaaatatcttgaggtgcttgctaaaggcagaacatcagacgctattaagaagcttgtagagctggtccctgctacagcacttttgcttctgaaagacaaagaaggaaagtatgctgcagagaaggagattgatgcatccttaatccaacctggagatgtcttgaaagtgctcccaggttccaaggtacctgctgatggtactgttgtttggggtacaagtcatgttgatgagagtatggtaactggtgaatctgcacctatctccaaggaagtatccagtatagtaattggaggcacaatgaatttacatggaatcctccatatacaagcaactaaagtaggatcagggacagtcttgagccagataatctctcttgttgaaactgcccagatgtctaaggctcctattcagaagttcgctgattatgtggctggcatttttgttccaatagttgtcaccttgtccttggttacgttcattgcatggtttctttgcggatcgttgggagcatacccaaattcatgggttgatgaaactagcaattgctttgtcttctctctcatgttctccatctctgttgtggtgatagcctgcccatgtgctcttggtctggcaacgccaactgctgtcatggtagcaactggagttggggctaatcatggggtacttgtaaagggtggagatgcactggagagggctcagaatgtgaaatatgttatatttgataaaactgggacactgacacaaggaaaggctaccgtaacatcgacgaaggtattctcaggaattgatcttggagacttccttactttggtagcatctgcagaggcaagcagtgaacatccacttgcaaaagctatattggattacgcatttcatttccatttctttggcaaactcccctcatcaaaagatgacatcaagaaaagaaaacaacagatattatcccagtggcttctggaagtagcagaattttctgccttgcctggcaaaggggttcagtgtttgatcaatgggaaaaaaatcttggtgggaaatcgtactttgataactgaaaatgggataaatattcctgaagaagctgaaagtttcttggtagacctcgaactgaacgcgaagacaggagttcttgtagcatatgacagcgaactcattggctcaattggaatgactgatcccttgaaaagggaggctgttgtagttgttgaaggcctaaaaaagatgggcatctatccagtaatggttacaggggacaactggaggactgcacaagcagttgcaaaggaggttggcattgaggatgttagagctgaggttatgcctgcgggaaaagctgatgtcgtacgttctctccaaaaggatgggagtgtcgttgcaatggttggggatggcatcaatgactccccagccctagcagcagctgacgtcggaatggccattggtgcaggaacagacattgcaattgaagcagcggactatgtgctggtgcgaaacaaccttgaagatgtcatcacagcaattgacctctcaaggaagacgttcagccgaatccgatggaactacttctttgccatggcgtacaacatcatcgctatcccggttgctgctggagcactcttcccattcaccggcctccaaatgccaccttggctggctggtgcttgcatggcgttctcatctgttagtgtagattttgttgacagatag

SEQ ID NO: 55752 - protein, 993 aa, Oryza sativa
MAHLQLTPLAAGGGRGGADEMEEVALLGPESYDEEAAAAPGPEEEEGMRRVQVRVTGMTCSACTAAVEAAVSARRGVGGVAVSLLQSRARVVFDPALAKEEDIIEAIEDAGFEAELLPDSTVSQPKLQNTLSGQFRIGGMTCAACVNSVEGILKKLPGVKRAVVALATSLGEVEYDPSVISKDEIVQAIEDAGFEAALLQSSEQDKVLLGLMGLHTEVDVDILHDILKKMEGLRQFNVNLVLSEAEIVFDPEVVGLRSIVDTIEMESSGRLKAHVQNPYIRAASNDAQEASKMLHLLCSSLFLSHTDSPLVPLQQIPVFFIRMVCPRIHFTRSLLLMHLGPFYIGDLLKWILVSIVQFGVGKRFYVAAYRALRHGSTNMDVLVVLGTTASYVYSVCALLYGAFTGFHPPKYFETSAMIITFVLFGKYLEVLAKGRTSDAIKKLVELVPATALLLLKDKEGKYAAEKEIDASLIQPGDVLKVLPGSKVPADGTVVWGTSHVDESMVTGESAPISKEVSSIVIGGTMNLHGILHIQATKVGSGTVLSQIISLVETAQMSKAPIQKFADYVAGIFVPIVVTLSLVTFIAWFLCGSLGAYPNSWVDETSNCFVFSLMFSISVVVIACPCALGLATPTAVMVATGVGANHGVLVKGGDALERAQNVKYVIFDKTGTLTQGKATVTSTKVFSGIDLGDFLTLVASAEASSEHPLAKAILDYAFHFHFFGKLPSSKDDIKKRKQQILSQWLLEVAEFSALPGKGVQCLINGKKILVGNRTLITENGINIPEEAESFLVDLELNAKTGVLVAYDSELIGSIGMTDPLKREAVVVVEGLKKMGIYPVMVTGDNWRTAQAVAKEVGIEDVRAEVMPAGKADVVRSLQKDGSVVAMVGDGINDSPALAAADVGMAIGAGTDIAIEAADYVLVRNNLEDVITAIDLSRKTFSRIRWNYFFAMAYNIIAIPVAAGALFPFTGLQMPPWLAGACMAFSSVSVDFVDR

SEQ ID NO: 55753 - DNA, 3000 bp, Brassica napus
  CDS (1)..(3000)
atggcgccgagtagacgggatttacagcttactcccctctccggagacactgctgcggagatcggtgccatggaggaagttcgtctcctcgattcctatgacgacgacgacaacgacgattctctcagtaagatcgaggaaggaagcggccattccggtttacggaagattcaagtcggaataaccggtatgacttgcgccgcttgttctaattccgtcgaaggtgctttgataagcgttaacggcgtcttcaaagcctccgtcgctttattacagaacagagccgatgtcctcttcgaccctaacttagtcaaggaagaggacattaaagaggctatagaggacgctggatttgaagccgagatttgggctgagcctgttacttctgggaccaagacacaagctacttgggtgggtcagttcactattggaggcatgacttgtgctgctggtgttaactctgttgaaggcattctaagagatctccctggagtgaaacgagctgtgggggctttagctacgtccttaggagaagttgagtatgatcctaacgtgatcagtaaagatgatattgtgactgcgattgaagatgctggctttgagagttctcttgtgcagagtaatcagcaggataagctccttttgagggttgatggtgtgttgaacgagcttgatgctcaggttcttgaaggtatacttactagattgaatggggttaggcagtttcgtcttgacaggataacgggggagcttgaggttgtgtttgatcctgaggttgtgagttcgagatctttggttgatgggattgaaggagaagggtatgggaagttcaagttgcgtgtcatgagtccttacgagaggctgacttctaaagatactggagaggcctcaaacatgtttcgtcgttttatctcaagtctttctctcagtattccactcttcttcattcaagtgatctgcccccacattgctctttttgacaccgtgctggtatggagatgtggacccttcatggttggtggttggttgaagtgggccttggtaagtgtgattcagtttgttattggcaagcgtttctatgttgctgcatggagagctcttcgaaatggttcaactaacatggatgtgctggtcgctctgggcacgtctgcgtcttacttctactctgttggggctcttttatatggggcagtcactgggttttggtcaccaacttactttgatgcaagtgctatgttgataacatttgtcttgctgggtaaatatttggaatctcttgcaaaggggaaaacctcagatgctatgaagaaactagtacaacttactccagcaacagcgattctaatcgaaggcaaaggagaaagagagatagatgcattactgatccatcctggtgattcattaaaagttctacctggtgggaagatccctgcagatggtgttgtggtgtggggttcaagttacgtcaacgaaagtatggtgactggtgaatctgttcctgtatctaaagaggttgattcaccagtgatcggtggtaccatcaatatgcatggtgttcttcacatcaaagctacaaaagtgggatctgatgcagttctgagccagattatcagtttggtcgagacagcacaaatgtccaaagctcctatccagaaatttgcagactatgttgcaagtatatttgttccggtggtgatcactttggcattgttcactttagtaggctggtcaattggtggagctgttggagcttacccagacgaatggctaccccaaaacggaactcactttgtattctcgcttatgttctcaatatccgttgtggtaattgcttgcccttgtgcactcggcttggcaacaccgaccgctgtcatggtggcaacaggagttggagcaaccaatggtgtattgatcaaaggaggtgatgcattggagaaagctcacaaagtgaaatatgtaattttcgacaagacaggcaccttaacgcaagggaaagctaccgtgacaaccgctaaagtcttctcggagatggaccgtggagagttcctcacacttgttgcttccgctgaggctagtagtgaacacccgttggcaaaagctatagttgagtacgctcgtcatttccacttctttgatgaatctgccgaggacggcgacacaagtaacaaagtctctcaaaacgctggatggttactggacacatcagacttctctgcccttcctgggaaaggcattcagtgcttagtagacaacaagctgattctggtgggaaaccgtaaacttatgtcagaaaactccataaccatcccagaccacgtcgagaagtttgttgaggagcttgaagaaagcgcaaagacaggagtcattgtagcctatagcggccaattagtaggcgtgatgggagtagctgatccgctaaagcgagaagctgctgtagtcgtggaaggtctccttagaatgggcgttcgacccataatggttacaggtgataactggagaacagcaagagcagtcgccaaagaggttggtattgaagacgtgagagcggaagtaatgccagcaggaaaagctgaagtgatccgttcactgcaaaaagacggaagcacagtggcgatggttggagatggaatcaatgactcgccggctctagccgctgcagacgtgggaatggccattggtgcagggaccgatgtagcaatagaagcagctgattacgttctgatgagaaacaacttagaagatgttataacagccatcgatctctctcgcaaaaccttaacacgaatcaggttgaactacgttttcgccatggcttacaacgtggtgtcgataccgatagcagcaggagtgttcttcccggtcctgagggtgcaactgccgccgtgggccgcaggagcgtgcatggcactctcttcggtgagtgttgtttgctcgtctttgcttcttagaagatacaagaagccgagacttaccactattttggagatcaccaaggagtaa

SEQ ID NO: 55754 - protein, 999 aa, Brassica napus
MAPSRRDLQLTPLSGDTAAEIGAMEEVRLLDSYDDDDNDDSLSKIEEGSGHSGLRKIQVGITGMTCAACSNSVEGALISVNGVFKASVALLQNRADVLFDPNLVKEEDIKEAIEDAGFEAEIWAEPVTSGTKTQATWVGQFTIGGMTCAAGVNSVEGILRDLPGVKRAVGALATSLGEVEYDPNVISKDDIVTAIEDAGFESSLVQSNQQDKLLLRVDGVLNELDAQVLEGILTRLNGVRQFRLDRITGELEVVFDPEVVSSRSLVDGIEGEGYGKFKLRVMSPYERLTSKDTGEASNMFRRFISSLSLSIPLFFIQVICPHIALFDTVLVWRCGPFMVGGWLKWALVSVIQFVIGKRFYVAAWRALRNGSTNMDVLVALGTSASYFYSVGALLYGAVTGFWSPTYFDASAMLITFVLLGKYLESLAKGKTSDAMKKLVQLTPATAILIEGKGEREIDALLIHPGDSLKVLPGGKIPADGVVVWGSSYVNESMVTGESVPVSKEVDSPVIGGTINMHGVLHIKATKVGSDAVLSQIISLVETAQMSKAPIQKFADYVASIFVPVVITLALFTLVGWSIGGAVGAYPDEWLPQNGTHFVFSLMFSISVVVIACPCALGLATPTAVMVATGVGATNGVLIKGGDALEKAHKVKYVIFDKTGTLTQGKATVTTAKVFSEMDRGEFLTLVASAEASSEHPLAKAIVEYARHFHFFDESAEDGDTSNKVSQNAGWLLDTSDFSALPGKGIQCLVDNKLILVGNRKLMSENSITIPDHVEKFVEELEESAKTGVIVAYSGQLVGVMGVADPLKREAAVVVEGLLRMGVRPIMVTGDNWRTARAVAKEVGIEDVRAEVMPAGKAEVIRSLQKDGSTVAMVGDGINDSPALAAADVGMAIGAGTDVAIEAADYVLMRNNLEDVITAIDLSRKTLTRIRLNYVFAMAYNVVSIPIAAGVFFPVLRVQLPPWAAGACMALSSVSVVCSSLLLRRYKKPRLTTILEITKE

SEQ ID NO: 55755 - DNA, 3000 bp, Brassica napus
  CDS (1)..(3000)
atggcgccgagtagacgggatttacagcttactcccctctccggagacactgctgcggagatcggtgccatggaggaagttcgtctcctcgattcctatgacgacgacgacaacgacgattctctgagtaagatcgaggaaggaagcggcggttccggtttacggaagattcaggtgggaataaccggtatgacttgcgccgcttgttctaattccgtcgaaggtgctttgataagcgttaacggcgtcttcaaagcctccgtcgctttattacagaacagagccgatgtcctcttcgaccctaacttagtcaaggaagaggacattaaagaggctatagaggacgctggatttgaagccgagattttggctgagcctgttacttctgggaccaagacgcaagctactttggtgggtcagttcactattggaggcatgacttgtgctgcttgtgttaactctgttgaaggcattctaagagatctccctggagtgaaacgagctgttgtggctttagctacttcgttgggagaagttgagtatgatcctaacgtgatcagtaaagatgatattgtgactgcgattgaagatgctggctttgagagttctcttgtgcagagtaatcagcaggataagctccttttgagggttgatggtgtgttgaacgagcttgatgctcaggttcttgaaggtatacttactagattgaatggggttaggcagtttcgtcttgacaggataacgggggagcttgaggttgtgtttgatcctgaggttgtgagttcgagatctttggttgatgggattgaaggagaagggtatgggaagttcaagttgcgtgtcatgagtccttacgagaggctgacttctaaagatactggagaggcctcaaacatgtttcgtcgttttatctcaagtctttctctcagtattccactcttcttcattcaagtgatctgcccccacattgctctttttgacaccgtgctggtatggagatgtggacccttcatggttggtggttggttgaagtgggccttggtaagtgtgattcagtttgttattggcaagcgtttctatgttgctgcatggagagctcttcgaaatggttcaactaacatggatgtgctggtcgctctgggcacgtctgcgtcttacttctactctgttggggctcttttatatggggcagtcactgggttttggtcaccaacttactttgatgcaagtgctatgttgataacatttgtcttgctgggtaaatatttggaatctcttgcaaaggggaaaacctcagatgctatgaagaaactagtacaacttactccagcaacagcgattctaatcgaaggcaaaggagaaagagagatagatgcattactgatccatcctggtgattcattaaaagttctacctggtgggaagatccctgcagatggtgttgtggtgtggggttcaagttacgtcaacgaaagtatggtgactggtgaatctgttcctgtatctaaagaggttgattcaccagtgatcggtggtaccatcaatatgcatggtgttcttcacatcaaagctacaaaagtgggatctgatgcagttctgagccagattattagtttggtggagacagcccaaatgtccaaagctcctatccagaaatttgcagactatgttgcgagtatatttgttccggtggtgatcactttggcattgttcactttagtaggctggtcaattggtggagctgttggagcttacccagacgaatggctaccccaaaacggaactcactttgttttctcgcttatgttctcaatatccgttgtggtaattgcttgcccttgtgcactcggcttggcaacaccgaccgctgtcatggtggcaacaggagttggagcaaccaatggtgtattgatcaaaggaggtgatgcattggagaaagctcacaaagtgaaatatgtaattttcgacaagacaggcaccttaacgcaagggaaagctaccgtgacaaccgctaaagtcttctcggagatggaccgtggagagttcctcacacttgttgcttccgctgaggctagtagtgaacacccgttggcaaaagctatagttgagtacgctcgtcatttccacttctttgatgaatctgccgaggacggcgacacaagtaacaaagtctctcaaaacgctggatggttactggacacatcagacttctctgcccttcctgggaaaggcattcagtgcttagtaaacaacaagctgattctggtgggaaaccgtaaacttatgtcagaaaactccataaccatcccagaccacgtcgagaagtttgttgaggagcttgaagaaagcgcaaagacaggagtcattgtagcctatagcggccaattagtaggcgtgatgggagtagctgatccgctaaagcgagaagctgctgtagtcgtggaaggtctccttagaatgggggttcgacccattatggttacaggtgataactggagaacagcaagagcagtcgccaaagaggttggtatcgaagacgtgagagcggaagtaatgccagcaggaaaagctgaagtgatccgttcactgcaaaaagacggaagcacggtggcgatggttggagatggaatcaatgactcgccggctctagccgctgcagacgtgggaatggccattggtgcagggaccgatgtagcaatagaagcagctgattacgttctgatgagaaacaacttagaagatgttattacagccatcgatctctctcgcaaaaccttaacacgaatcaggttgaactacgttttcgccatggcttacaacgtggtgtcgataccgatagcagcaggagtgttcttcccggtcctgagggtgcaactgccgccgtgggccgcaggagcgtgcatggcactctcttcggtgagtgttgtttgctcgtctttgcttcttagaagatacaagaagccgagacttaccactattttggagatcaccaaggagtaa

SEQ ID NO: 55756 - protein, 999 aa, Brassica napus
MAPSRRDLQLTPLSGDTAAEIGAMEEVRLLDSYDDDDNDDSLSKIEEGSGGSGLRKIQVGITGMTCAACSNSVEGALISVNGVFKASVALLQNRADVLFDPNLVKEEDIKEAIEDAGFEAEILAEPVTSGTKTQATLVGQFTIGGMTCAACVNSVEGILRDLPGVKRAVVALATSLGEVEYDPNVISKDDIVTAIEDAGFESSLVQSNQQDKLLLRVDGVLNELDAQVLEGILTRLNGVRQFRLDRITGELEVVFDPEVVSSRSLVDGIEGEGYGKFKLRVMSPYERLTSKDTGEASNMFRRFISSLSLSIPLFFIQVICPHIALFDTVLVWRCGPFMVGGWLKWALVSVIQFVIGKRFYVAAWRALRNGSTNMDVLVALGTSASYFYSVGALLYGAVTGFWSPTYFDASAMLITFVLLGKYLESLAKGKTSDAMKKLVQLTPATAILIEGKGEREIDALLIHPGDSLKVLPGGKIPADGVVVWGSSYVNESMVTGESVPVSKEVDSPVIGGTINMHGVLHIKATKVGSDAVLSQIISLVETAQMSKAPIQKFADYVASIFVPVVITLALFTLVGWSIGGAVGAYPDEWLPQNGTHFVFSLMFSISVVVIACPCALGLATPTAVMVATGVGATNGVLIKGGDALEKAHKVKYVIFDKTGTLTQGKATVTTAKVFSEMDRGEFLTLVASAEASSEHPLAKAIVEYARHFHFFDESAEDGDTSNKVSQNAGWLLDTSDFSALPGKGIQCLVNNKLILVGNRKLMSENSITIPDHVEKFVEELEESAKTGVIVAYSGQLVGVMGVADPLKREAAVVVEGLLRMGVRPIMVTGDNWRTARAVAKEVGIEDVRAEVMPAGKAEVIRSLQKDGSTVAMVGDGINDSPALAAADVGMAIGAGTDVAIEAADYVLMRNNLEDVITAIDLSRKTLTRIRLNYVFAMAYNVVSIPIAAGVFFPVLRVQLPPWAAGACMALSSVSVVCSSLLLRRYKKPRLTTILEITKE

SEQ ID NO: 55757 - DNA, 2991 bp, Zea mays
  CDS (1)..(2991)
atggtggcgactactcgtcgagctctgttcctctcctgcttccacggcggctcagagatgagcccccgcctctccctgcgcccgcggtacccgtcaatgccgcggcggccgaagggagtggcggctgctggcggcggaggaaacggcgacctggaggccgcagtcggtacgggggacgacgaggaggagaaggtggcggtgttctccgtgtcggggatgacctgcgctgcgtgcgcggggtcggtggagaaggccgtgaagcggctccccggcatccacgacgccgccgtcgacgtcctctggggccgcgcgcaggtcgtcttctacccagccttcgtctcggagaacaaaattaccgaagccattgaggatgttggttttgaagcaaaattgattgatgaggaggtcaaggaaaagaacattctactatgcaggctacatataaaaggaatggcctgcaagtattgcacaagcacagttgaatttgccttgcaagcttctcctggggttcaaagagcttcagttgcattggctactgaagaggctgagatccgttacgatcgcaggataatttctgctagccagctaatccaagcagtggaagaaactggctttgaagctttactagtgaccgcaggagaagaccagagcaggatagacctcaaaatggatggtgttctcgatgagaggttgataatgatcttgaaaagctctatacaggcccttcctggtgtggaaaacgttaaattcaactctgaactacacaaggtcaccgtctcatacaatcctgaccacacaggcccccgggacctcattgaagtcatcaaggcagccacatttggtcatgtcaatgcatcaatatatctggaagcagatggaagggaccagcataggtatggggaaataaaacaatacagacagtcgttcttgtggagcttaatattcaccattccagtttttctcacctccatggtgttcatgtatatcccttggctgaaggatgggctggaaaaaaaagttgtcaacatgatgagcattggtgaactacttcggtggattttgtcaacaccggtccaatttgttatcggtcgcaaattttatactggtgcttacaaggcaatgtgccgtggctcaccaaacatggatgtccttattgctctagggacaaacacggcttacttgtactcggtttactcagttcttcgagcagctacctccgggaattacatgtcaactgatttttttgagactagttccatgctcatttcatttattcttcttggaaagtaccttgagatcttggcaaaaggaaaaacatctgaggctattgccaagctgatggatcttgcgccagaaactgcaacactgttagtgtatgactatgaaggaaatgtggtaggagaaaaggagattgacagcaggctaattcagaaaaatgatgtgatcaaagtagtcccaggtggaaaagttgcttctgatggatttgttatttggggccagagccatgtgaatgaaagcatgattactggcgaatcacagccagtagcaaagagaaagggtgacactgtaattggaggtacagtgaatgagaatggtgtgcttcatgtccgggctacatttgtgggatcagagggtgcactggcacagattgtaaggctagttgagtcggcgcaaatggcaaaggctcctgtccagaagttcgctgatcatatatctagagtctttgttcccctggtgattctgctttcaatggttacttggctcgcatggtttgtcgcggggaggctccatagctaccctcagtcatggataccacgattcatggatagcttccagctcgctcttcagtttgggatatcagttatggtgattgcctgtccttgcgccctagggctggctaccccaactgctgtgatggttgcgactggagttggtgcctcacatggtgttctgatcaagggtgggcaagctctggagagtgcacagaaggtcgactgcatcgtttttgacaagacagggacgctaactattgggaagcctgtcgttgttgacacaaggcttctcaaaaatatggtcttgcgtgaattctatgactatgctgctgctgcagaagtcaacagtgagcaccccctggcaaaagcgatagtggagcatgccaaaaagttgcgtccagaaggaaaccacatgtggccggaagcaagggaatttatttcagtaaccgggcaaggcgtcaaggcggaggttagtggcaagagtgtcatcgtggggaacaaaggcctcatgctgtcctctggcattggtatccccttggaagcttcagaaatcctcgtggaagaggaggggaaggcaaggacagggattatcgtggcagtggaccgagaagtggcgggcgtaatctctgtatccgatccgacaaaaccaaacgccctccaagtgatatcgtacctcaagtccatgaacgtggagagcataatggtgaccggcgacaactgggggacggctaatgctatcggcagagaggttggcatcgagaagataatcgctgaagcgaaaccggagcagaaggccgagagggtgaaggaactccagctgtctggaaggaccgtggcgatggttggcgacgggatcaacgactcccccgcgctcgtctcggccgacgtggggctggcgataggcgcggggacggacgtcgccatcgaggctgcggacatcgtgctcatgaagagcaacctggaggacgtggtgaccgccatcgacctgtccaggaaggccttcttccgcatacggatgaactacgtctgggcgctcgggtacaacgtcgtcggcatcccgatcgctgcgggggtgctcttcccgtccaccgggttccgcctgccgccgtgggtcgccggcgctgcgatggcggcctcgtccgtcagcgtcgtctgctggtccctgctgctgaggtactacaaggctccgaagattgccggcacagctaaagaaatttga

SEQ ID NO: 55758 - protein, 996 aa, Zea mays
MVATTRRALFLSCFHGGSEMSPRLSLRPRYPSMPRRPKGVAAAGGGGNGDLEAAVGTGDDEEEKVAVFSVSGMTCAACAGSVEKAVKRLPGIHDAAVDVLWGRAQVVFYPAFVSENKITEAIEDVGFEAKLIDEEVKEKNILLCRLHIKGMACKYCTSTVEFALQASPGVQRASVALATEEAEIRYDRRIISASQLIQAVEETGFEALLVTAGEDQSRIDLKMDGVLDERLIMILKSSIQALPGVENVKFNSELHKVTVSYNPDHTGPRDLIEVIKAATFGHVNASIYLEADGRDQHRYGEIKQYRQSFLWSLIFTIPVFLTSMVFMYIPWLKDGLEKKVVNMMSIGELLRWILSTPVQFVIGRKFYTGAYKAMCRGSPNMDVLIALGTNTAYLYSVYSVLRAATSGNYMSTDFFETSSMLISFILLGKYLEILAKGKTSEAIAKLMDLAPETATLLVYDYEGNVVGEKEIDSRLIQKNDVIKVVPGGKVASDGFVIWGQSHVNESMITGESQPVAKRKGDTVIGGTVNENGVLHVRATFVGSEGALAQIVRLVESAQMAKAPVQKFADHISRVFVPLVILLSMVTWLAWFVAGRLHSYPQSWIPRFMDSFQLALQFGISVMVIACPCALGLATPTAVMVATGVGASHGVLIKGGQALESAQKVDCIVFDKTGTLTIGKPVVVDTRLLKNMVLREFYDYAAAAEVNSEHPLAKAIVEHAKKLRPEGNHMWPEAREFISVTGQGVKAEVSGKSVIVGNKGLMLSSGIGIPLEASEILVEEEGKARTGIIVAVDREVAGVISVSDPTKPNALQVISYLKSMNVESIMVTGDNWGTANAIGREVGIEKIIAEAKPEQKAERVKELQLSGRTVAMVGDGINDSPALVSADVGLAIGAGTDVAIEAADIVLMKSNLEDVVTAIDLSRKAFFRIRMNYVWALGYNVVGIPIAAGVLFPSTGFRLPPWVAGAAMAASSVSVVCWSLLLRYYKAPKIAGTAKEI

SEQ ID NO: 55759 - DNA, 3000 bp, Zea mays
  CDS (1)..(3000)
atggcggcgagcactcgagccctctttctctcctgtttccacggcggcggcggcgccgaggtgagccgccacctcgcgctgcggccgcggtacccgtccaatccgcggcgccctaggtcggccgtggtagccggcgaaggaggtgaaggcggaggaagcggtggtgatctggaggccgcgaaagggacggcggatagggacgaggaggagaaagtgtcggtgttcgcggtgacgggaatgacgtgtgccgcctgcgcggggtcggtggagaaggccgtgaagcggctcccgggcatccatgacgccgccgtcgacgtcctcgggggacgcgcgcaggtcgtcttctatcccgccttcgtgtcggagggaaaaattagggaagcgatcgaggatgttggttttgaagctaagctgattaacgaggaggtcagagcaaaaaacattctagtatgcaggtttcatataaaagggatgacctgcacgtcctgcacaaacacagtagaatctgccttgcaagcttttcctggtgttcaaagagcttcagttgcgttggctactgaagaggcagagatccattatgatcgcaggattgttactgccagccaactcatccatgcagtggaagaaactggctttgaagcaatactaattactacaggagaagatcggagcaggatagacctcaaactagatggcgttttgagcgagaggctaacaatgatactgaaaagctctatccaagctcttcctggcgtggaagacataaagatcgatactgaactccacaaggtcaccgtctcgtacaagcctgaccagacaggtcccagggacctcattgaagtcatcgagtcagccacttctggtggtgttactgcatcaatatatgcagaagcaggaggaagggagcatcacaggtatggagaaatcaaacgatacaggcaatctttcttgtggagcttaatattcactattccagtgtttctcacttccatggtgttcatgtacatccctgggctgaaggatgggctcgaaaaaaaggttatcaatatgatgagcattggcgaactattgcggtggattttatcaacaccagtgcaatttgtaattggtcgaaagttttatactggtgcttacaaggcaatatgccatggctcaccaaatatggatgtccttattgctctagggacgaacacggcttacttctactcagtttactcagttcttcgggcagctacttctgagaattacatgtcaactgatttttttgagactagctccatgctcatttcgtttatccttcttggaaagtaccttgagatcttggcaaaaggaaaaacctccgaggctattgccaagctgatggatcttgcaccggaaactgcaacactgttaatgtatgactatgaaggaaatgtggtaggagaaaaggagattgacagcaggctaattcagaaaaatgatgtgatcaaagtagtcccaggtggaaaagttgcttctgatggatttgttatttggggccagagccatgtgaatgaaagcatgattactggagaatcacggccagtagcgaagaggaagggcgatactgtaattggaggaacagtgaatgagaatggtgtgctgcatgtccgggcaacatttgtcggatcagagactgcactggcacagatcgtaagactagttgagtccgcacaaatggcaaaagctcctgtccagaagttcgctgatcagatatctagagtctttgtcccactggttatcgttctctctttgcttacttggcttgtgtggttcttagctgggagattccatggttacccatactcatggataccatcttccatggatagctttcagcttgctcttcagtttggaatatcagttatggtgattgcctgtccttgtgccttagggctggcaactccaactgccgtgatggttgcaactggagttggtgcgtcacaaggcgttctgatcaagggtggacaagctcttgagagtgcacaaaaggtaaactgcatcgtctttgataagacaggaacgctgactgtcgggaagccagtcgttgtcaacaccaggcttctcaaaaacatggtcttgcgtgaattctttgattatgttgcagctgcagaggacaacagtgagcacccactggcaaaggcgatagtggaacatgcaaagaagttctactcagaagaaaaccacatctggccagaagcaagagatttcatttcggtccccggacatggtgtgagggccaaggtttgcgataggagtgtcattgttgggaacaagagcttcatgctgtcatcaagcattgatatcccagtggaagcttcagaaattctcatggaagaagaggaaaaggcgcaaacaggcattattgtggctatggatcaagaagttgtgggcataatttctgtatctgacccgataaaaccaaacgcccgtgaagttatatcttacctcaagtccatgaatgtggagagcattatggtgactggggacaactgggggactgctaacgccattggcaaagaggttggaatagaaaagatcatcgccgaagcaaaacccgagcagaaggctgaaaaggtgaaggaacttcagctgttaggaaaaactgtggcgatggttggtgacggaataaacgactccccggcactagtttcagctaatgtaggcctggccattggcgctggaacagatgtcgccattgaagcagccgacatcgtcctcatgaagagcaacttggaggatgtgatcactgctatcgatctctccaggaaaacgtttttccgcatacggatgaactacgtgtgggcgctcggctacaacgtcattggcataccaattgctgcaggggtgctcttcccatcgacccggtttcgcttgccaccatgggttgccggcgccgcgatggcagcttcgtccgtcagtgttgtctgttggtccctcctcttgaggtactacaagagtccaaagaagtttgacaactga

SEQ ID NO: 55760 - protein, 999 aa, Zea mays
MAASTRALFLSCFHGGGGAEVSRHLALRPRYPSNPRRPRSAVVAGEGGEGGGSGGDLEAAKGTADRDEEEKVSVFAVTGMTCAACAGSVEKAVKRLPGIHDAAVDVLGGRAQVVFYPAFVSEGKIREAIEDVGFEAKLINEEVRAKNILVCRFHIKGMTCTSCTNTVESALQAFPGVQRASVALATEEAEIHYDRRIVTASQLIHAVEETGFEAILITTGEDRSRIDLKLDGVLSERLTMILKSSIQALPGVEDIKIDTELHKVTVSYKPDQTGPRDLIEVIESATSGGVTASIYAEAGGREHHRYGEIKRYRQSFLWSLIFTIPVFLTSMVFMYIPGLKDGLEKKVINMMSIGELLRWILSTPVQFVIGRKFYTGAYKAICHGSPNMDVLIALGTNTAYFYSVYSVLRAATSENYMSTDFFETSSMLISFILLGKYLEILAKGKTSEAIAKLMDLAPETATLLMYDYEGNVVGEKEIDSRLIQKNDVIKVVPGGKVASDGFVIWGQSHVNESMITGESRPVAKRKGDTVIGGTVNENGVLHVRATFVGSETALAQIVRLVESAQMAKAPVQKFADQISRVFVPLVIVLSLLTWLVWFLAGRFHGYPYSWIPSSMDSFQLALQFGISVMVIACPCALGLATPTAVMVATGVGASQGVLIKGGQALESAQKVNCIVFDKTGTLTVGKPVVVNTRLLKNMVLREFFDYVAAAEDNSEHPLAKAIVEHAKKFYSEENHIWPEARDFISVPGHGVRAKVCDRSVIVGNKSFMLSSSIDIPVEASEILMEEEEKAQTGIIVAMDQEVVGIISVSDPIKPNAREVISYLKSMNVESIMVTGDNWGTANAIGKEVGIEKIIAEAKPEQKAEKVKELQLLGKTVAMVGDGINDSPALVSANVGLAIGAGTDVAIEAADIVLMKSNLEDVITAIDLSRKTFFRIRMNYVWALGYNVIGIPIAAGVLFPSTRFRLPPWVAGAAMAASSVSVVCWSLLLRYYKSPKKFDN

SEQ ID NO: 55761 - DNA, 21 bp, Artificial sequence
  primer
atggcccaaaccatcaatctg

SEQ ID NO: 55762 - DNA, 21 bp, Artificial sequence
  primer
ttaaggacagaattttttcag

SEQ ID NO: 55763 - protein, 889 aa, Artificial sequence
  consensus sequence
  Variant (2)..(3): Xaa in position 2 to 3 is any amino acid
  Variant (5)..(12): Xaa in position 5 to 12 is any amino acid
  Variant (13)..(15): Xaa in position 13 to 15 is any or no amino acid
  Variant (17)..(30): Xaa in position 17 to 30 is any amino acid
  Variant (31)..(75): Xaa in position 31 to 75 is any or no amino acid
  Variant (77)..(79): Xaa in position 77 to 79 is any amino acid
  Variant (81)..(89): Xaa in position 81 to 89 is any amino acid
  Variant (91)..(93): Xaa in position 91 to 93 is any amino acid
  Variant (95)..(96): Xaa in position 95 to 96 is any amino acid
  Variant (98)..(101): Xaa in position 98 to 101 is any amino acid
  Variant (103)..(118): Xaa in position 103 to 118 is any amino acid
  Variant (119)..(159): Xaa in position 119 to 159 is any or no amino acid
  Variant (162)..(166): Xaa in position 162 to 166 is any amino acid
  Variant (169)..(173): Xaa in position 169 to 173 is any amino acid
  Variant (176)..(179): Xaa in position 176 to 179 is any amino acid
  Variant (181)..(184): Xaa in position 181 to 184 is any amino acid
  Variant (185)..(185): Xaa in position 185 is any or no amino acid
  Variant (189)..(190): Xaa in position 189 to 190 is any amino acid
  Variant (194)..(195): Xaa in position 194 to 195 is any amino acid
  Variant (198)..(198): Xaa in position 198 is any amino acid
  Variant (200)..(204): Xaa in position 200 to 204 is any amino acid
  Variant (205)..(206): Xaa in position 205 to 206 is any or no amino acid
  Variant (208)..(212): Xaa in position 208 to 212 is any amino acid
  Variant (214)..(215): Xaa in position 214 to 215 is any amino acid
  Variant (216)..(216): Xaa in position 216 is any or no amino acid
  Variant (218)..(225): Xaa in position 218 to 225 is any amino acid
  Variant (226)..(226): Xaa in position 226 is any or no amino acid
  Variant (228)..(231): Xaa in position 228 to 231 is any amino acid
  Variant (233)..(234): Xaa in position 233 to 234 is any amino acid
  Variant (236)..(238): Xaa in position 236 to 238 is any amino acid
  Variant (240)..(241): Xaa in position 240 to 241 is any amino acid
  Variant (244)..(253): Xaa in position 244 to 253 is any amino acid
  Variant (255)..(259): Xaa in position 255 to 259 is any amino acid
  Variant (263)..(263): Xaa in position 263 is any amino acid
  Variant (265)..(274): Xaa in position 265 to 274 is any amino acid
  Variant (276)..(290): Xaa in position 276 to 290 is any amino acid
  Variant (291)..(319): Xaa in position 291 to 319 is any or no amino acid
  Variant (321)..(322): Xaa in position 321 to 322 is any amino acid
  Variant (335)..(341): Xaa in position 335 to 341 is any amino acid
  Variant (343)..(344): Xaa in position 343 to 344 is any amino acid
  Variant (346)..(347): Xaa in position 346 to 347 is any amino acid
  Variant (349)..(349): Xaa in position 349 is any amino acid
  Variant (351)..(356): Xaa in position 351 to 356 is any amino acid
  Variant (357)..(357): Xaa in position 357 is any or no amino acid
  Variant (360)..(369): Xaa in position 360 to 369 is any amino acid
  Variant (375)..(375): Xaa in position 375 is any amino acid
  Variant (377)..(377): Xaa in position 377 is any amino acid
  Variant (379)..(398): Xaa in position 379 to 398 is any amino acid
  Variant (399)..(428): Xaa in position 399 to 428 is any or no amino acid
  Variant (430)..(430): Xaa in position 430 is any amino acid
  Variant (431)..(431): Xaa in position 431 is any or no amino acid
  Variant (433)..(433): Xaa in position 433 is any amino acid
  Variant (436)..(438): Xaa in position 436 to 438 is any amino acid
  Variant (440)..(454): Xaa in position 440 to 454 is any amino acid
  Variant (455)..(486): Xaa in position 455 to 486 is any or no amino acid
  Variant (488)..(488): Xaa in position 488 is any amino acid
  Variant (490)..(495): Xaa in position 490 to 495 is any amino acid
  Variant (496)..(581): Xaa in position 496 to 581 is any or no amino acid
  Variant (583)..(614): Xaa in position 583 to 614 is any amino acid
  Variant (615)..(652): Xaa in position 615 to 652 is any or no amino acid
  Variant (654)..(659): Xaa in position 654 to 659 is any amino acid
  Variant (660)..(665): Xaa in position 660 to 665 is any or no amino acid
  Variant (667)..(668): Xaa in position 667 to 668 is any amino acid
  Variant (669)..(669): Xaa in position 669 is any or no amino acid
  Variant (671)..(676): Xaa in position 671 to 676 is any amino acid
  Variant (677)..(677): Xaa in position 677 is any or no amino acid
  Variant (680)..(683): Xaa in position 680 to 683 is any amino acid
  Variant (685)..(699): Xaa in position 685 to 699 is any amino acid
  Variant (700)..(704): Xaa in position 700 to 704 is any or no amino acid
  Variant (706)..(707): Xaa in position 706 to 707 is any amino acid
  Variant (709)..(714): Xaa in position 709 to 714 is any amino acid
  Variant (716)..(717): Xaa in position 716 to 717 is any amino acid
  Variant (718)..(743): Xaa in position 718 to 743 is any or no amino acid
  Variant (751)..(751): Xaa in position 751 is any amino acid
  Variant (754)..(754): Xaa in position 754 is any amino acid
  Variant (759)..(759): Xaa in position 759 is any amino acid
  Variant (762)..(762): Xaa in position 762 is any amino acid
  Variant (764)..(764): Xaa in position 764 is any amino acid
  Variant (766)..(768): Xaa in position 766 to 768 is any amino acid
  Variant (769)..(770): Xaa in position 769 to 770 is any or no amino acid
  Variant (772)..(772): Xaa in position 772 is any amino acid
  Variant (774)..(774): Xaa in position 774 is any amino acid
  Variant (776)..(782): Xaa in position 776 to 782 is any amino acid
  Variant (784)..(793): Xaa in position 784 to 793 is any amino acid
  Variant (794)..(799): Xaa in position 794 to 799 is any or no amino acid
  Variant (801)..(803): Xaa in position 801 to 803 is any amino acid
  Variant (805)..(806): Xaa in position 805 to 806 is any amino acid
  Variant (808)..(810): Xaa in position 808 to 810 is any amino acid
  Variant (812)..(813): Xaa in position 812 to 813 is any amino acid
  Variant (815)..(817): Xaa in position 815 to 817 is any amino acid
  Variant (819)..(820): Xaa in position 819 to 820 is any amino acid
  Variant (823)..(826): Xaa in position 823 to 826 is any amino acid
  Variant (828)..(828): Xaa in position 828 is any amino acid
  Variant (830)..(833): Xaa in position 830 to 833 is any amino acid
  Variant (834)..(857): Xaa in position 834 to 857 is any or no amino acid
  Variant (859)..(859): Xaa in position 859 is any amino acid
  Variant (861)..(862): Xaa in position 861 to 862 is any amino acid
  Variant (864)..(865): Xaa in position 864 to 865 is any amino acid
  Variant (868)..(869): Xaa in position 868 to 869 is any amino acid
  Variant (872)..(873): Xaa in position 872 to 873 is any amino acid
  Variant (874)..(881): Xaa in position 874 to 881 is any or no amino acid
  Variant (883)..(886): Xaa in position 883 to 886 is any amino acid
  Variant (888)..(888): Xaa in position 888 is any amino acid
MXXLXXXXXXXXXXXSXXXXXXXXXXXXXXXXXXXXXXXXXXXXXXXXXXXXXXXXXXXXXXXXXXXXXXXXXXXGXXXEXXXXXXXXXAXXXLXXLXXXXAXXXXXXXXXXXXXXXXXXXXXXXXXXXXXXXXXXXXXXXXXXXXXXXXXXXXXXXXXGDXXXXXPGXXXXXDGXXXXGXXXXXDESXXTGEXXPVXKXXXXXXXVXXXXXNXXXGXXXXXXXXXGXXXXLXXIXXXVXXAQXXXXXXXXXXDXXXXXFVPXVXXXXXXXXXXWXXXXXXXXXXXXXXXXXXXXXXXXXXXXXXXXXXXXXXXXXXXXVXXIACPCALGLATPXXXXXXXGXXAXXGXLXXXXXXXLEXXXXXXXXXXDKTGTXTXGXXXXXXXXXXXXXXXXXXXXXXXXXXXXXXXXXXXXXXXXXXXXXXXXXXEXXSXHPXXXAXXXXXXXXXXXXXXXXXXXXXXXXXXXXXXXXXXXXXXXXXXXXXXXGXGXXXXXXXXXXXXXXXXXXXXXXXXXXXXXXXXXXXXXXXXXXXXXXXXXXXXXXXXXXXXXXXXXXXXXXXXXXXXXXXXXXXXXXXXXXXXGXXXXXXXXXXXXXXXXXXXXXXXXXXXXXXXXXXXXXXXXXXXXXXXXXXXXXXXXXXXXXXXXXXXXXXDXXXXXXXXXXXXLXXXGXXXXXXXGDXXXXAXXXXXXXXXXXXXXXXXXXXPXXKXXXXXXLXXXXXXXXXXXXXXXXXXXXXXXXXXXXVAMVGDGXNDXPALAXADXGXAXXXXXGXDXAXXXXXXXLXXXXXXXXXXXXXXXXAXXXSXXTXXXIXXNXXXAXXYNXXXXPXAXXXXXXXXXXXXXXXXXXXXXXXXXXXXLXPXXAXXAMXXSSXXXXXXXXXXVXXXXLXL

SEQ ID NO: 55764 - protein, 41 aa, Artificial sequence
  protein pattern
  Variant (2)..(2): Xaa in position 2 is Leu, Met or Val
  Variant (3)..(3): Xaa in position 3 is Ala, Ile or Val
  Variant (4)..(4): Xaa in position 4 is Ile or Val
  Variant (5)..(5): Xaa in position 5 is Ala, Ser or Thr
  Variant (10)..(11): Xaa in position 10 to 11 is any or no amino acid
  Variant (13)..(14): Xaa in position 13 to 14 is any or no amino acid
  Variant (16)..(16): Xaa in position 16 is Thr or Val
  Variant (18)..(18): Xaa in position 18 is any amino acid
  Variant (19)..(19): Xaa in position 19 is Ala, Gly, Ser or Val
  Variant (20)..(22): Xaa in position 20 to 22 is any amino acid
  Variant (23)..(23): Xaa in position 23 is Ala, Gly or Ser
  Variant (24)..(26): Xaa in position 24 to 26 is any amino acid
  Variant (27)..(27): Xaa in position 27 is Ala, Gly or Leu
  Variant (28)..(30): Xaa in position 28 to 30 is any amino acid
  Variant (32)..(36): Xaa in position 32 to 36 is any amino acid
  Variant (37)..(37): Xaa in position 37 is Ala, Gly or Pro
  Variant (38)..(39): Xaa in position 38 to 39 is any amino acid
  Variant (40)..(40): Xaa in position 40 is Ile, Leu, Met or Val
  Variant (41)..(41): Xaa in position 41 is Glu or Gln
VXXXXCPCAXXLXXAXPXXXXXXXXXXXXXGXXXXXXXXXX

SEQ ID NO: 55765 - protein, 29 aa, Artificial sequence
  protein pattern
  Variant (2)..(2): Xaa in position 2 is Ala, Gly, Ser or Val
  Variant (3)..(3): Xaa in position 3 is Phe, Met or Val
  Variant (4)..(4): Xaa in position 4 is any amino acid
  Variant (8)..(8): Xaa in position 8 is any amino acid
  Variant (11)..(11): Xaa in position 11 is Ala, Gly, Ser or Thr
  Variant (12)..(12): Xaa in position 12 is any amino acid
  Variant (15)..(16): Xaa in position 15 to 16 is any or no amino acid
  Variant (18)..(25): Xaa in position 18 to 25 is any amino acid
  Variant (26)..(27): Xaa in position 26 to 27 is any or no amino acid
  Variant (29)..(29): Xaa in position 29 is Ala, Ser or Thr
VXXXGDGXNDXXALXXAXXXXXXXXXXGX

SEQ ID NO: 55766 - protein, 19 aa, Artificial sequence
  protein pattern
  Variant (2)..(2): Xaa in position 2 is Ala or Ser
  Variant (3)..(3): Xaa in position 3 is any amino acid
  Variant (4)..(4): Xaa in position 4 is Ile, Leu or Val
  Variant (5)..(5): Xaa in position 5 is Ser or Thr
  Variant (8)..(8): Xaa in position 8 is Ala, Pro or Ser
  Variant (9)..(9): Xaa in position 9 is any amino acid
  Variant (11)..(18): Xaa in position 11 to 18 is any or no amino acid
EXXXXGEXXPXXXXXXXXV

SEQ ID NO: 55767 - protein, 30 aa, Artificial sequence
  protein pattern
  Variant (2)..(4): Xaa in position 2 to 4 is any amino acid
  Variant (5)..(5): Xaa in position 5 is Ala, Gly or Ser
  Variant (6)..(11): Xaa in position 6 to 11 is any amino acid
  Variant (12)..(12): Xaa in position 12 is Ile, Met or Val
  Variant (13)..(14): Xaa in position 13 to 14 is any amino acid
  Variant (16)..(18): Xaa in position 16 to 18 is any amino acid
  Variant (20)..(21): Xaa in position 20 to 21 is any amino acid
  Variant (24)..(26): Xaa in position 24 to 26 is any amino acid
  Variant (27)..(27): Xaa in position 27 is Ile, Leu, Met or Val
  Variant (29)..(29): Xaa in position 29 is any amino acid
AXXXXXXXXXXXXXNXXXAXXYNXXXXPXA

SEQ ID NO: 55768 - protein, 16 aa, Artificial sequence
  protein pattern
  Variant (2)..(2): Xaa in position 2 is any amino acid
  Variant (3)..(3): Xaa in position 3 is any or no amino acid
  Variant (9)..(9): Xaa in position 9 is Ile, Leu or Val
  Variant (11)..(11): Xaa in position 11 is any amino acid
  Variant (13)..(15): Xaa in position 13 to 15 is any amino acid
  Variant (16)..(16): Xaa in position 16 is Ala, Ile, Leu or Val
VXXDKTGTXTXGXXXX

SEQ ID NO: 55769 - protein, 16 aa, Artificial sequence
  protein pattern
  Variant (2)..(3): Xaa in position 2 to 3 is any or no amino acid
  Variant (5)..(5): Xaa in position 5 is any or no amino acid
  Variant (7)..(8): Xaa in position 7 to 8 is any amino acid
  Variant (10)..(10): Xaa in position 10 is Ile, Leu or Val
  Variant (11)..(11): Xaa in position 11 is any amino acid
  Variant (12)..(12): Xaa in position 12 is Asn or Ser
  Variant (13)..(13): Xaa in position 13 is Ala or Ser
  Variant (14)..(15): Xaa in position 14 to 15 is any amino acid
MXXSXSXXVXXXXXXL

SEQ ID NO: 55770 - protein, 12 aa, Artificial sequence
  protein pattern
  Variant (2)..(3): Xaa in position 2 to 3 is any amino acid
  Variant (4)..(4): Xaa in position 4 is Ala, Ser or Thr
  Variant (5)..(5): Xaa in position 5 is any amino acid
  Variant (8)..(8): Xaa in position 8 is Ile, Leu or Val
  Variant (9)..(9): Xaa in position 9 is Ala, Gly or Ser
  Variant (10)..(10): Xaa in position 10 is any amino acid
  Variant (12)..(12): Xaa in position 12 is Phe, Ile, Leu or Val
EXXXXHPXXXAX

SEQ ID NO: 55771 - DNA, 2241 bp, Synechocystis sp.
  CDS (1)..(2241): transl_table=11
atgccacagttgatatctgttcccaacctgtccaccgatgtccaccttggccaaacgtttcccttaggggcaacggtctacgccgatggggttaatttctgcttgttttccaaacatgcggaaagggtcacgctattgttgtttgatcgccctaatgatccggccccggcccgcaccattgagcttcatcgaggacggaaccgcaccttctactactggcatgtttttgtgaagggtttaaaggcggggcaggtttatgcttaccgtgttgatgggccccacgaaccggaaaagggccatcggtttgacccggacaaagttttgctcgacccctacgccaaggcgatcgtcgggaaggatatttacgaccgcaaagcagccatggccctcggagataactgcgcccaggccctacgcagcgtggtggtggacaccagtgtgtacgactgggaggatgaccatgccccccgcacgccctacgccgccagcattatctacgaactccacgtcgggggctttacccgcaaccccaattcgggcttaagcgaaaacaaacggggcacctatgcaggattaattgaaaaaattccctacctcaaggaattgggcattacagcggtggaattattaccggtgcattattttgaccctgaagatgcccaaccaggactgaccaactattggggttatagtaccatcggcttttttgcgccccaccaaggctacagtgctgccgatgatcccctggaagtggtagacgaatttcgggacatggtcaaagccctgcacaaagcgggcatagaagtgattttagatgtggtctttaaccacactgcggagggcaacgaaaaaggccccaccctttccttccggggcattgataacagaacctattacatcctcgatgaagataaaagttcctacagcaactacagcggttgcggtaatagcgttaaggctaatcaccccgtggtggggggtctaatccttgattccctgcgctactgggtatcggaaatgcatgtggatggctttcgctttgatttggcttccgtactggtgcgagataccaaaggagtgcccctccatggtagtgaaattgccaccgccaacatcatctgggcgatcgaatccgacccgattttagccggtactaaattgatcgccgaagcttgggatgcggcgggactgtacagcgtcggtaaatttgtggagttggcagactggtttgcggaatggaacggtccttttcgggacgatgtgcgtcgctttgtcaaaggggataatggcgcagtgccagcattggctagccgcctactaggtagccccgacatttactatcgccaagatacggatattaaccgcagtatcaactttgtcacctgccatgatggttttaccctggtagacctggtttcctacaacgaaaaacacaacgaagccaacggagaaaagaaccgagacgggaccaatgataatttcagttggaactgtggcgtggaaggggaaaccgatgaccccaaaattaatcaactgcgactgcggcaaattaaaaactttctaactattttattcttttcccagggtacgccgatgttgctgatgggagatccggtgggcagaacccagcagggcaataataacggctattgccaagataacgaactaagttggttcgactggagtggggaagaaacccacagcgatgaaactcactttttgcggggcattattgctttgacccaaagcctatccctatttcttgaggaaagtttattgccggtgctaaattttgctctaccccgctttcccgatgaaaatgacggctctgagggggatggccaggacggggaagaacccgtttataaacccctccctccagtggacgaagcagctctgcgggaaatgtatcttaaagcaactaaggatttaccgggctcctgcgtggtttggcatggagtgaaactagcccagcccgattggtcttacacttcccatactttagcggtcaccctattccatccaggagcggaggaaattctccatctgatctttaatgcctattgggaaccgctgaattttgaattgccccctctaaacgatggtttgatttggcatcgactggtggatacctatttaccaactccgttggacttccaggagccggcgatcgcctctccggttgagggagaaacatattgggttcagccccgttcttctgtggtgttaatggcaaaataa

SEQ ID NO: 55772 - protein, 746 aa, Synechocystis sp.
MPQLISVPNLSTDVHLGQTFPLGATVYADGVNFCLFSKHAERVTLLLFDRPNDPAPARTIELHRGRNRTFYYWHVFVKGLKAGQVYAYRVDGPHEPEKGHRFDPDKVLLDPYAKAIVGKDIYDRKAAMALGDNCAQALRSVVVDTSVYDWEDDHAPRTPYAASIIYELHVGGFTRNPNSGLSENKRGTYAGLIEKIPYLKELGITAVELLPVHYFDPEDAQPGLTNYWGYSTIGFFAPHQGYSAADDPLEVVDEFRDMVKALHKAGIEVILDVVFNHTAEGNEKGPTLSFRGIDNRTYYILDEDKSSYSNYSGCGNSVKANHPVVGGLILDSLRYWVSEMHVDGFRFDLASVLVRDTKGVPLHGSEIATANIIWAIESDPILAGTKLIAEAWDAAGLYSVGKFVELADWFAEWNGPFRDDVRRFVKGDNGAVPALASRLLGSPDIYYRQDTDINRSINFVTCHDGFTLVDLVSYNEKHNEANGEKNRDGTNDNFSWNCGVEGETDDPKINQLRLRQIKNFLTILFFSQGTPMLLMGDPVGRTQQGNNNGYCQDNELSWFDWSGEETHSDETHFLRGIIALTQSLSLFLEESLLPVLNFALPRFPDENDGSEGDGQDGEEPVYKPLPPVDEAALREMYLKATKDLPGSCVVWHGVKLAQPDWSYTSHTLAVTLFHPGAEEILHLIFNAYWEPLNFELPPLNDGLIWHRLVDTYLPTPLDFQEPAIASPVEGETYWVQPRSSVVLMAK

SEQ ID NO: 55773 - DNA, 2729 bp, Oryza sativa
  CDS (1)..(2289)
atgggcacggcccatttatcgcacctccagtacatgggccgcctccgtgggaaagtgtgggtgtggcgacgatcggcttcggggacgcgtctgggctcagagcgtgttctgagaaggcaggttaggcgatttgattctgtacgaagcaccacggcgagagctcagaacgggaacgctgggagaagcatgaccgaggaaagaggatgtacaatgtctgatactgaaatgccatttaaatattcctctggtaaagccttcccattaggagtgtctcaagttgaaggcgggctgaacttcgcacttttctctcagcatgcttcttctgtcattctctgcttaaagcttcctgggaggggaactgaagatgagaaaggtgcagatgttgtcgagtttgttttagaccagcagaagaacaaaactggggatatatggcatgtgatagtggagggcttgcctgcttctggtgttctttatgggtatcgtgttggtggccctcaaggatgggaccaaggccatagatttgatagcagcactgttcttctggacccttatgcaaaattagtttctggtcgaaagtactttggggttgctgaagagaagtcaagccagcattttggaacatatgattttgatagctctccttttgattggggtgatgactacaggcttccgaatttgcctgaggcagatctagtcatatatgaaatgaacgtccgtgctttcaccgcggatgagtcaagtggccttgattcgacttctcgtggaagctatcttggtctcattgataaaatccctcatttgctggaacttggcgttaatgcagtggaactacttcctgtttttgagtatgatgagctggaattcaagaggtaccccaacccaagggaccacatggtcaatacatggggctattctacgataaacttttttgcacccatgagccgttatgctagtgccggtggtggaccagtggctgcttccaaagagctcaagcagatggtcaaagaattgcataaagctggcatagaggttattctggatgttgtttacaaccatacaaatgaggcggatgatgctcacccgtatatgacttctttccgtggcattgataacaaggtctattacatgttagacctgaacaaaaatgctgaactactgaacttctcaggctgcgggaatacactgaactgcaaccatcctgttgtcaaggagctcattcttgacagcttgagacactgggttgaggagtatcacatagatggatttcgatttgaccttgcaagtgttctttgtcgtggaccagatggttgtcctcttgatgcacctccactcatcaaggaaattgccaaagatgctgtattatctagatgtaagatcattgctgaaccttgggattgcggcggcctttatctcgtagggcgtttccctaactgggacaggtgggctgaatggaacggcaaatacagagatgatcttcgaagatttattaagggtgaccctggtatgaagggggtgtttgcgactcgtgtgtctggatctgctgatctctatcaggtgaacgagcggaagccttaccatggtgtaaattttgtgattgcacatgatggatttactttatgtgaccttgtttcttacaacttaaagcacaatgatgctaatggagaaggtggctgtgatggatgcaatgacaactttagctggaactgtggtgttgaaggagaaacaaatgatctgaatgtgttaagtctgcgttcaagacaaatgaaaaacttccatgtagctttaatgatttctcagggcaccccaatgatgttgatgggcgatgaatatggtcatacacgttatgggaacaacaatagctatggacatgatacttgcattaataatttccaatgggaacagttggaacaaagaagagatggccatttcaggtttttctcagagatgataaagtttcgtcacagcaacccaatattaagacgagacaggtttcttaataaaaacgatgtcacctggcacgaggattgttgggagaaccaggaaagcaaatttttggcattcacagtacatgatcacaactctggtggagatatctatttggcattcaatgcacatgactattttgtggacgctgtaattcccccaccaccacaccataaatgttggaaccgtgtggtggataccaacctggaatcaccaaatgatattgtaccagaaggggtgccatttacaggaccaaaatacagaattgctccatactcttccattctgctcaaggcaaagccttagaaaagttagtagttgagagcataaaaataatgccaccaatgctggcttggttggttaataacaggttgatcacattagcagtctgcacttcaaaaaggcaacaggtatagagaatgtctaataacaactgccgaatcatagttggctttggcagatgaggccacttttggcattcaggaatttcttccagttattactgtaggaatgaatgggctagggcttagggccctctgggggcagcaaagctcgaggtgtcgtctcggtttcatgtgagcgtgacctggctatggtcaccctatcatttatcaaggtcctgtttcgtaataatgtgtcatcaaacactcaactcccatgagaatgtatgccagcatctattttgctggaaattcatgaaaaaaaggaacaatgctattagtcccatgactcacccccagattatt

SEQ ID NO: 55774 - protein, 762 aa, Oryza sativa
MGTAHLSHLQYMGRLRGKVWVWRRSASGTRLGSERVLRRQVRRFDSVRSTTARAQNGNAGRSMTEERGCTMSDTEMPFKYSSGKAFPLGVSQVEGGLNFALFSQHASSVILCLKLPGRGTEDEKGADVVEFVLDQQKNKTGDIWHVIVEGLPASGVLYGYRVGGPQGWDQGHRFDSSTVLLDPYAKLVSGRKYFGVAEEKSSQHFGTYDFDSSPFDWGDDYRLPNLPEADLVIYEMNVRAFTADESSGLDSTSRGSYLGLIDKIPHLLELGVNAVELLPVFEYDELEFKRYPNPRDHMVNTWGYSTINFFAPMSRYASAGGGPVAASKELKQMVKELHKAGIEVILDVVYNHTNEADDAHPYMTSFRGIDNKVYYMLDLNKNAELLNFSGCGNTLNCNHPVVKELILDSLRHWVEEYHIDGFRFDLASVLCRGPDGCPLDAPPLIKEIAKDAVLSRCKIIAEPWDCGGLYLVGRFPNWDRWAEWNGKYRDDLRRFIKGDPGMKGVFATRVSGSADLYQVNERKPYHGVNFVIAHDGFTLCDLVSYNLKHNDANGEGGCDGCNDNFSWNCGVEGETNDLNVLSLRSRQMKNFHVALMISQGTPMMLMGDEYGHTRYGNNNSYGHDTCINNFQWEQLEQRRDGHFRFFSEMIKFRHSNPILRRDRFLNKNDVTWHEDCWENQESKFLAFTVHDHNSGGDIYLAFNAHDYFVDAVIPPPPHHKCWNRVVDTNLESPNDIVPEGVPFTGPKYRIAPYSSILLKAKP

SEQ ID NO: 55775 - DNA, 2758 bp, Zea mays subsp. mays
  CDS (391)..(2475)
tccctttccgcgcgcgctccccaaggtgagatcagcatctccgtctcttccccgccgctcctcactcccctaccgccacccctaaaactagccccattcccttaccagcgtccgatcacactcctcggtcccacgcttggatggattccgtcggtacaaatcggcccccgctgcgccccgttgccgccgcagctactcgacgcggcgcgcttcctgccccccctagccacctcgggctcggctaatcgttttgcggagactaagcttgggatcgcgtcagggtgtggaggagggggagggtattttggaaaggtacagggatttgatgccttgcggagtaccacgacgaaagttcagagcgggaaggcggggaggagtgtgaccaaggaaatgggacacacttcatctggcaatgaagtgcccttgaaatattcttcaggcaaagccttccccctaggagtgtcacaagttgacgatgggttaaattttgcaatattctcacaacatgcttcttctgtcaccctttgcttgaattttcctgagagaggcaaccaagatgatgtggacattgtagagtttgctttagaccgccagaggaataaaactggagatatatggcatgtgtcagtggagggtttgcctgcttctggtgttctttatgggtatcgcattaatggtcctcaagggtggcaacaaggtcatagatttgatgacagcgttattcttctggacccctatgcaaaattagtttatggtcgaaagcactttgctgttgaaaaagagaagccaagccagcttttcggaacatatgatttcgatagctcaccttttgactggggtgacaattataagcttcctaatttgcctgagacagatcttgttatatatgaaatgaatgtccgtgccttcactgccgacgagtcaagcaggcttgctccagctattcgtggaagttaccttggtgtcattgataaaattcctcatttgctggaacttggcgttaatgcagtggaactacttcctgtttttgagttcgatgagctggagttgaagaggttccctaacccaagggaccacatggtaaatacatggggatattctacaatcaacctttttgcgcccatgagtcgttatgctagtgctggtggtggacctgtggctgcttccaaagagctcaaacagatggtcaaggcatttcataattctggaattgaggttattttggatgtagtttacaaccatacaaatgaagctgatgatgttaacccttacatgacttcctttcgtggtattgataacaaggtctattacatgttagatctcaacaacagtgcacagctgctgaacttctcgggttgcgggaatacactaaactgcaaccatcctgttgtcaaggagcttgtacttgacagtttaagacattgggttaaggagtatcacatagatggatttcggtttgaccttgcgagtgttctttgtcgtggaccagatggcagtcctcttgatgcacctccacttattaaggaaattgccaaagactctgtattgtctagatgtaagatcattgctgaaccttgggactgtggtggcctttatctagtagggaggttccctaattgggacaggtgggctgaatggaacgggaagtacagagatgatattcgaagatttattaagggagatcctggtatgaagggggtgtttgcaactcgcgtttctggttctgcagatctctaccaggtgaacaatcggaagccttaccatagtgtgaactttgtaattgctcatgatggatttactttatgcgaccttgtttcgtataactccaagcacaatgatgcaaatggagaaggtggtcgtgatgggtgcaatgacaactacagctggaactgtggcattgaaggagaaacaaatgatttgaatgtgctaagtcttcgttcaaggcaaatgaagaacttccatgtggcattaatgatttcccagggtactccaatgatgctgatgggagatgaatatggtcacacacgttatggaaacaacaatagctatggacatgatactcacataaataattttcagtggggccagttggaagaaaggaaggatggccatttcaggtttttctcagagatgatcaagtttcggcataaccatcctatattgagacgagacaggtttctcaacaaaaatgatgtcacctggcatgaaaatcgttgggagaaccaggacagcaaatttttggcatttacgatacatgatcacagttctggtggagacatctatttggcattcaatgctcatgagtattttgtggatgctgtaattcccccaccaccacaccataaatcttggagtcgtgtggtggataccaacctggaatcaccaaaggatattgtcccagaaggggtgccattcacaggttcagggtacaggattgctccttactcttccatcttgcttaaggcaaagccttagaaagttagaatggctgagacaagtcattctcaagagaagccatggttgcaacaagtatactcatccagatattgtccataagacaataacaacatggcaaacacaagtaatttccacacatcgtagccagaagagcctttcattaggggaagctagtattcacagtctccttaatattttagcattcctttgttccatatttgtgttgtacttagattctattaagctatttctttcatcgaacatatgttggacaatggatgccccagaaccttttgctttc

SEQ ID NO: 55776 - protein, 694 aa, Zea mays subsp. mays
MGHTSSGNEVPLKYSSGKAFPLGVSQVDDGLNFAIFSQHASSVTLCLNFPERGNQDDVDIVEFALDRQRNKTGDIWHVSVEGLPASGVLYGYRINGPQGWQQGHRFDDSVILLDPYAKLVYGRKHFAVEKEKPSQLFGTYDFDSSPFDWGDNYKLPNLPETDLVIYEMNVRAFTADESSRLAPAIRGSYLGVIDKIPHLLELGVNAVELLPVFEFDELELKRFPNPRDHMVNTWGYSTINLFAPMSRYASAGGGPVAASKELKQMVKAFHNSGIEVILDVVYNHTNEADDVNPYMTSFRGIDNKVYYMLDLNNSAQLLNFSGCGNTLNCNHPVVKELVLDSLRHWVKEYHIDGFRFDLASVLCRGPDGSPLDAPPLIKEIAKDSVLSRCKIIAEPWDCGGLYLVGRFPNWDRWAEWNGKYRDDIRRFIKGDPGMKGVFATRVSGSADLYQVNNRKPYHSVNFVIAHDGFTLCDLVSYNSKHNDANGEGGRDGCNDNYSWNCGIEGETNDLNVLSLRSRQMKNFHVALMISQGTPMMLMGDEYGHTRYGNNNSYGHDTHINNFQWGQLEERKDGHFRFFSEMIKFRHNHPILRRDRFLNKNDVTWHENRWENQDSKFLAFTIHDHSSGGDIYLAFNAHEYFVDAVIPPPPHHKSWSRVVDTNLESPKDIVPEGVPFTGSGYRIAPYSSILLKAKP

SEQ ID NO: 55777 - DNA, 2019 bp, Mesorhizobium loti MAFF303099
  CDS (1)..(2019): transl_table=11
atgaccccgctcggcgcaaccgtcacccccgaaggcatccgctttgccgtgtggtcctcatcggcccgccgcctctgggtctcgctcttcgatgggcagggaaaccgcgaactcgaccggttggagttgcagtcggaaggcgaggggatgcatgcgctcttcgttccccgccttgccgcgggcacgcggtatggctttcgcgccgatggcgactacgcgcccgaccgcgggttgtggttcgacccggacaagctgctcaccgatccctacgccgtcgaaatcgaccgcccgtatgcctatcactggcggctcgccgcgcggcgcaatgagggggccgacaccgcgccgctgatgcccaagacggtggcgaaaaccttgcccaaaacggtgcctgcgctgccgccgctgtttcgtccgggcggcctgatctacgaggtaccggtgcgtgccttcaccaagttgcatcccgacattcccgaagcgcagcgcggtacgatcgcggcgcttgctcatcctgtcatcatcgaacatctgcaaaggctcggcgtgtcggccgtcgaactgatgccggtgacggcgtcgatcgacgaacggcacctgccgccgctgggcctcagcaacgcctggtgctacaatcccgtcaccttcatggcgctcgacccgcgtctcgcgcccggcggcctcgaggaattgcgcgacaccgtggcggcgctgcgcaaggccagcatcggcaccatcctcgacctcgtcttcaaccacacgggcgaaagcgaccggctggggccgacgctgtcgctgcgcgggctcgacaaccaggcctactaccggcaccagcctgatggcaggctggtcaatgacaccggcaccggcaacacagtcgcctgcgatcatccggtggtgcgggacatggtgctcgacacgctccgtcacttcgtccgccataccggcgtcgatggcttccgcttcgatctggcgccggttctgggccgcgtcgatggcgcattcgatcccacggcgcccttgctcgaggcgatcaccggcgatcctgtgcttgccgatcgcgtgctgatcgcggagccgtgggatatcggccctgacggctatcagctcggcaacttcccgccgcgcttcctcgaatggaacgatcgctatcgcgacgatgccaggcgcttctggcgcggcgatgccggtgcggtgggagcactggcgacgcggcttgccggttcgtccgatatttttggcaaggccggccaggcggccagccgcacggtcaatttcatcgctgcccatgacggcatgactttggccgacatcgtcgcctatgagcgcaagcacaacgaggccaatggcgagcagaaccgcgacggtcacaacgacaatctgtcctggaacaatggcgccgagggcgagacggatagcgcggcgatcgccaatgcgcgcttcgacgaccagtgcgcgctgctcgccacgctttttgcctcgcgcggcaccatcatgctgacggcgggcgacgagttcggccgctcccagaagggcaacaacaacgcctatgcgcaggacaatgccatcacctggctcgactgggccggccgcgaccatgcgctggagcgctacgcatcggtgctcggcatgctgcgccgtgccgtcccggccctgtcggctacagatttcctcacaggacaatcggccgatgcgacaggcacccccgacgtcgcctggttgaccgagaccggcatgccgcttgccgagacggactggaacgaccccgcccggcaccgcctcgtcatgctgcttggcgatgcaggcggcgatcgccttgccgtcatgatcaacggcgatcgtcgccaatgcgtcttcaccttgcccgaacgggaaggcttccgatggcagccggcgatcgagacgcaggcgattgagcttgcgcggccgctgccgggccgaagcgtccatttcatggcagagcatcggaccgaaaagtggcagtcggttttcgggcaatccgatgcgagcaaaaaatag

SEQ ID NO: 55778 - protein, 672 aa, Mesorhizobium loti MAFF303099
MTPLGATVTPEGIRFAVWSSSARRLWVSLFDGQGNRELDRLELQSEGEGMHALFVPRLAAGTRYGFRADGDYAPDRGLWFDPDKLLTDPYAVEIDRPYAYHWRLAARRNEGADTAPLMPKTVAKTLPKTVPALPPLFRPGGLIYEVPVRAFTKLHPDIPEAQRGTIAALAHPVIIEHLQRLGVSAVELMPVTASIDERHLPPLGLSNAWCYNPVTFMALDPRLAPGGLEELRDTVAALRKASIGTILDLVFNHTGESDRLGPTLSLRGLDNQAYYRHQPDGRLVNDTGTGNTVACDHPVVRDMVLDTLRHFVRHTGVDGFRFDLAPVLGRVDGAFDPTAPLLEAITGDPVLADRVLIAEPWDIGPDGYQLGNFPPRFLEWNDRYRDDARRFWRGDAGAVGALATRLAGSSDIFGKAGQAASRTVNFIAAHDGMTLADIVAYERKHNEANGEQNRDGHNDNLSWNNGAEGETDSAAIANARFDDQCALLATLFASRGTIMLTAGDEFGRSQKGNNNAYAQDNAITWLDWAGRDHALERYASVLGMLRRAVPALSATDFLTGQSADATGTPDVAWLTETGMPLAETDWNDPARHRLVMLLGDAGGDRLAVMINGDRRQCVFTLPEREGFRWQPAIETQAIELARPLPGRSVHFMAEHRTEKWQSVFGQSDASKK

SEQ ID NO: 55779 - DNA, 2352 bp, Arabidopsis thaliana
  CDS (1)..(2352)
atggatgcaatcaaatgcagttccagtttcctccatcacaccaagctcaacactctcttctctaatcacacctttcctaaaatctccgctcccaatttcaagcccctcttccgtccgatttcgatttccgcaaaggacagaagaagcaacgaagctgaaaatatcgccgtagtagagaaacctcttaaatcagatagattttttatctccgatggacttccttctccattcggacccaccgtcagagacgacggcgtcaatttctctgtttactctacaaactccgtttccgctaccatctgcttgatttctctctccgatctccgtcagaacaaagtgacggaggagattcagcttgatccatcaaggaatagaactggccatgtttggcatgtgttcttgagaggagatttcaaagatatgttgtatggttatagatttgatggcaagttttctcctgaagaaggtcattattatgattcctccaacattttattggatccttacgcaaaggcaattataagcagagatgagtttggagttttgggacctgatgataattgttggcctcaaatggcgtgtatggtacccactcgtgaggaagagtttgattgggaaggggatatgcatctgaagcttccacagaaagatcttgttatatatgaaatgcatgtgcgaggttttacaaggcatgagtctagtaaaattgaattccctggcacataccagggtgttgcagagaagcttgaccatttgaaggagcttgggataaattgtatagaattaatgccatgtcacgagtttaatgagctggagtattacagctacaatacgattttgggagaccacagggtaaatttttggggttactctaccattgggttcttctcgcccatgatcagatacgcatcagcaagctctaacaattttgctggacgagccataaatgaattcaaaattcttgttaaggaggcacataaacgaggaattgaggtaatcatggatgtcgtcttgaaccacacagccgaagggaatgaaaaagggcccattttctcatttagaggagttgataacagtgtctattacatgcttgctccaaagggcgagttctataattattcaggctgtggtaatacattcaactgcaatcatcctgtggtgcgtcaattcatattggattgcctgagatattgggttacagaaatgcatgttgacggcttccgctttgatcttggttcaatcatgtcaaggagcagcagcctttgggatgcagccaatgtttacggggctgatgtagaaggtgacttgctcacaactggtactcctattagctgccctccagtaattgacatgataagtaatgatccaatactccgcggtgttaagctaatagctgaagcatgggatgcgggtgggctgtaccaagttggcatgtttccacactggggtatttggtctgagtggaatggaaagtttcgggatgttgtgagacagttcataaaaggcaccgatggcttttctggtgcttttgctgaatgtctctgtggaagcccaaatctgtaccagggaggtaggaaaccttggcacagcatcaattttatatgtgcgcatgatggttttacgttggcagatttagtaacttacaacaataagaataacttggcaaatggagaagagaataatgatggagagaatcacaattacagctggaactgtggagaggagggagactttgcgagtatctcggtgaagagactaaggaaacgacagatgcggaatttctttgtttccctcatggtttcccaaggtgtcccaatgatttacatgggagatgaatatggccatactaaagggggaaacaacaacacgtattgccatgacaactatatgaactattttcggtgggataaaaaggaagaagcacattctgacttcttcagattctgccgtattcttatcaagtttcgtgatgaatgtgaatcacttggcttgaatgatttcccaacagcaaagcgtctgcagtggcatggtcttgctcctgagatcccaaattggtctgaaacaagtcgatttgttgcattttcactggtcgattctgtgaagaaagaaatctatgtggccttcaacaccagtcatttagccacacttgtttcgctaccgaataggccaggataccgatgggagccatttgtagacacgagcaaaccgagcccttacgactgcataacaccggatctcccagagagagaaacggcgatgaagcagtataggcacttcttagatgcaaatgtgtacccaatgctcagttactcatccatcattctccttctttcaccaattaaagacccctga

SEQ ID NO: 55780 - protein, 783 aa, Arabidopsis thaliana
MDAIKCSSSFLHHTKLNTLFSNHTFPKISAPNFKPLFRPISISAKDRRSNEAENIAVVEKPLKSDRFFISDGLPSPFGPTVRDDGVNFSVYSTNSVSATICLISLSDLRQNKVTEEIQLDPSRNRTGHVWHVFLRGDFKDMLYGYRFDGKFSPEEGHYYDSSNILLDPYAKAIISRDEFGVLGPDDNCWPQMACMVPTREEEFDWEGDMHLKLPQKDLVIYEMHVRGFTRHESSKIEFPGTYQGVAEKLDHLKELGINCIELMPCHEFNELEYYSYNTILGDHRVNFWGYSTIGFFSPMIRYASASSNNFAGRAINEFKILVKEAHKRGIEVIMDVVLNHTAEGNEKGPIFSFRGVDNSVYYMLAPKGEFYNYSGCGNTFNCNHPVVRQFILDCLRYWVTEMHVDGFRFDLGSIMSRSSSLWDAANVYGADVEGDLLTTGTPISCPPVIDMISNDPILRGVKLIAEAWDAGGLYQVGMFPHWGIWSEWNGKFRDVVRQFIKGTDGFSGAFAECLCGSPNLYQGGRKPWHSINFICAHDGFTLADLVTYNNKNNLANGEENNDGENHNYSWNCGEEGDFASISVKRLRKRQMRNFFVSLMVSQGVPMIYMGDEYGHTKGGNNNTYCHDNYMNYFRWDKKEEAHSDFFRFCRILIKFRDECESLGLNDFPTAKRLQWHGLAPEIPNWSETSRFVAFSLVDSVKKEIYVAFNTSHLATLVSLPNRPGYRWEPFVDTSKPSPYDCITPDLPERETAMKQYRHFLDANVYPMLSYSSIILLLSPIKDP

SEQ ID NO: 55781 - DNA, 2295 bp, Arabidopsis thaliana
  CDS (1)..(2295)
atgcttacttcaccttcttcttcttctacatatgatccattctcttccaatttctctccgtcgctcactaatgccttctctagtagcttcaccattcccatgggattgaaattgagtaggagagtcaccagagctcggatcttctctcgtaagattaaggatcgttcaacacttaaggtcacttgtcgtcgcgcacacgaacgtgtggttgaggaagaagcatctacaatgacggagacgaaattgtttaaagtttcttctggtgaggtatctcctcttggtgtgtcacaagtcgataagggaatcaattttgctttgttttctcagaatgctacttctgtcacactctgcttatcactatcccagagtggtaaggatgatacggatgatgatggtatgatagagttggttttggatcccagtgtaaacaagactggagatacttggcacatttgtgttgaggatttgcctctcaataatgttctctatggttaccgtgttgatggtcctggagaatggcaacaagggcatcggtttgatcgtagtattttgcttttggatccctatgctaagctagttaaaggtcatagttcttttggagatagtagtcagaagtttgctcaattttatggaacttatgactttgagagctcgccatttgactggggagatgactacaagtttcctaacatacctgagaaggatcttgttatttatgaaatgaatgttcgtgcttttactgctgatgaatccagtgggatggacccagctataggaggcagttacctcggtttcattgagaagatcccacaccttcaagatctgggtataaatgcagtggaattattgccagtgtttgagtttgatgaactggagcttcagaggcgttctaaccctagggatcacatggttaacacatggggttactcgacagttaacttttttgctccgatgagccgatatgctagtggtgagggagaccctattaaagcttcgaaagagtttaaagaaatggtcaaagccttgcattctgctggtatagaggtcattttggacgtagtttataatcacaccaacgaagcagatgacaaatacccttataccacttcatttcgtggcatagacaacaaggtttattacatgcttgatccaaacaaccaactgcttaacttttctggctgtgggaatacactgaactgtaaccatccagttgttatggaactcatacttgatagcttaaggcactgggtcactgaatatcacgtggatggtttccggtttgatcttgctagtgtgctttgccgagcaacagatggatctccactcagtgctcccccactgataagggcaattgccaaggattctgttctgtcaagatgtaaaataattgcagagccttgggattgtggaggattatatctagtcgggaagtttccaaattgggataggtgggctgagtggaatgggatgtaccgggatgatgttagaagatttatcaagggtgacagtggcatgaaaggaagctttgctactcgggtttctggatcttccgatctttaccaggttaaccagaggaagccttaccatggtgtaaattttgtgatcgcacatgatggattcacattgcgagatcttgtatcgtacaactttaagcacaatgaggccaatggagaaggaggaaatgatggatgtaatgacaatcatagctggaactgtggttttgaaggggaaactggtgatgctcacatcaaatctttacgtactcggcaaatgaagaactttcatttagctttgatgatttctcagggaacaccaatgatgctaatgggagacgaatatggacatacacggtatggtaacaacaatagctacggacatgatacctcccttaacaatttccagtggaaagagctcgacgcaaagaagcagaaccatttcaggtttttctcggaggtgatcaagttccgacattcacaccatgtactcaagcatgaaaatttcctcacccaaggtgagattacatggcatgaagataattgggacaacagtgagagcaagttcctagctttcactctccatgacggtataggtggccgtgacatctatgtggcattcaacgcccacgactactttgtcaaggctctgattccacagccaccaccgggaaaacaatggttccgtgtggctgacacaaacctcgagtcgccggatgattttgtgagggaaggtgtggccggtgtggctgatacctacaatgtggccccattctcttcaatccttctccagtccaagtaa

SEQ ID NO: 55782 - protein, 764 aa, Arabidopsis thaliana
MLTSPSSSSTYDPFSSNFSPSLTNAFSSSFTIPMGLKLSRRVTRARIFSRKIKDRSTLKVTCRRAHERVVEEEASTMTETKLFKVSSGEVSPLGVSQVDKGINFALFSQNATSVTLCLSLSQSGKDDTDDDGMIELVLDPSVNKTGDTWHICVEDLPLNNVLYGYRVDGPGEWQQGHRFDRSILLLDPYAKLVKGHSSFGDSSQKFAQFYGTYDFESSPFDWGDDYKFPNIPEKDLVIYEMNVRAFTADESSGMDPAIGGSYLGFIEKIPHLQDLGINAVELLPVFEFDELELQRRSNPRDHMVNTWGYSTVNFFAPMSRYASGEGDPIKASKEFKEMVKALHSAGIEVILDVVYNHTNEADDKYPYTTSFRGIDNKVYYMLDPNNQLLNFSGCGNTLNCNHPVVMELILDSLRHWVTEYHVDGFRFDLASVLCRATDGSPLSAPPLIRAIAKDSVLSRCKIIAEPWDCGGLYLVGKFPNWDRWAEWNGMYRDDVRRFIKGDSGMKGSFATRVSGSSDLYQVNQRKPYHGVNFVIAHDGFTLRDLVSYNFKHNEANGEGGNDGCNDNHSWNCGFEGETGDAHIKSLRTRQMKNFHLALMISQGTPMMLMGDEYGHTRYGNNNSYGHDTSLNNFQWKELDAKKQNHFRFFSEVIKFRHSHHVLKHENFLTQGEITWHEDNWDNSESKFLAFTLHDGIGGRDIYVAFNAHDYFVKALIPQPPPGKQWFRVADTNLESPDDFVREGVAGVADTYNVAPFSSILLQSK

SEQ ID NO: 55783 - DNA, 2151 bp, Pseudomonas aeruginosa PAO1
  CDS (1)..(2151): transl_table=11
atgagcagaaagcgtagccccgctccttcgcggatcagcgaagggcaccccttcccccttggcgccacctgggacggtctcggcgtcaatttcgcgctgttctcggcccacgcgaccaaggtcgagctgtgcctgttcgacgcgcgcggggaaaaggagatcgagcgcatcgaattgcccgagtacaccgacgagatctggcacggctacctgcccgacgcccacccggggcagatctacggctaccgggtgcacggtccctacgagccggatgccggccaccgcttcaatcccaacaaattgctcctcgatccctacgccaagcagttggtcggccgcctgcgctggtccgaggcgctgttcggctacaccatcggctcggccgacgccgacctcagcttcgacgagcgcgacagcgcgcccttcgtgcccaagtcgaaggtcatcgatccggccttcacctgggccgagcgtccgccggtacgcgtcccctgggaccgcacggtgatctacgaagcccacctgcgcggcctcagcatgcgccatccacaggtcccggaggcggttcgcgggaccttcgccgggctgatgaacgccgacctgctggcgcacatccgccggctcggggtgaccagcgtcgagctgctgccgatccacggtttcgtcgacgacaagcacctgctggaaaacggtatgagcaattactggggctacaacagcatcgccttcttcgccccgcacccggcctacctcgccagcggccaggtcaacgagttcaaggagatggtcgcgcacctccacgacgccggactggagctgatcctcgacgtggtctacaaccacaccgcggaaggcaacgagctgggtccgaccctgtgcatgcgcggcatcgacaacgcctcgtactaccgcctgatgcccgaccagcgccgctactacatcaacgattccggcaccggcaacaccctcgacctcagccacccctgcgtgttgcagatggtcaccgactcgctgcgctactgggccacggagatgcgcgtggacggcttccgcttcgacctggcgaccatcctcggccgccatccggacggtttcgacgagcgccacggcttcctcgtcgcctgccgccaggacccggtgctgagcaagtgcaagctgatcgccgaaccctgggattgcggccccggcggctaccaggtaggcggcttcccgcccggctgggcggaatggaacgaccgtttccgcgattgcgtgcgcgcctactggcgcggcgacgacggcatgctgccggaactggcgcggcgcctaaccgcctccggcgatctctacgaccagcgtggacggcggccctacgcgtcggtgaacttcgtcaccgcccacgacggcttcaccctgcgcgacgtggtttcctacgatcacaagcacaacgaggccaacggcgagaacaacgccgacggcagcgaccacaacctgtcctggaaccacggctgcgagggccccaccgacgacccggagatccgcgccctgcgcctgcgccagatgcgcaacctgctgtccaccctgctgctgtcccagggcaccccgatgctggtcgccggcgacgagttcagccgcacccagcagggcaacaacaatgtctattgccaggacaacgaactgggctggatcgactggcggctggacgacgagggccgttcgctgctggccttcacccagcgcctgctggccctgcgccaacgctatccgatcctgcgcagggggcgcttcctggtcggcgagtacaacgaggcgctgggtgtcaaggacgtcacctggctggcgcccggcggcgaggagatgaccgaggaacactggcacgacgagcatgcccgctgtctcggcgtgctcctcgatggccgcgcgcaacccaccgggatcctgcgcagcggtgaggatgccaccctgctgctgatcctcaatgcctaccacgacgcggtgtccttccgtcttcccgaggtggccgaaggcagcggctggacctgcctgctggatacccagcggccggaggacccgctcggcgaacgctacccgttcgccagcgagttcctggtcggcggccgcagtttcctgctgttcgagctacaaccgccgggcgccggagcggaaggatga

SEQ ID NO: 55784 - protein, 716 aa, Pseudomonas aeruginosa PAO1
MSRKRSPAPSRISEGHPFPLGATWDGLGVNFALFSAHATKVELCLFDARGEKEIERIELPEYTDEIWHGYLPDAHPGQIYGYRVHGPYEPDAGHRFNPNKLLLDPYAKQLVGRLRWSEALFGYTIGSADADLSFDERDSAPFVPKSKVIDPAFTWAERPPVRVPWDRTVIYEAHLRGLSMRHPQVPEAVRGTFAGLMNADLLAHIRRLGVTSVELLPIHGFVDDKHLLENGMSNYWGYNSIAFFAPHPAYLASGQVNEFKEMVAHLHDAGLELILDVVYNHTAEGNELGPTLCMRGIDNASYYRLMPDQRRYYINDSGTGNTLDLSHPCVLQMVTDSLRYWATEMRVDGFRFDLATILGRHPDGFDERHGFLVACRQDPVLSKCKLIAEPWDCGPGGYQVGGFPPGWAEWNDRFRDCVRAYWRGDDGMLPELARRLTASGDLYDQRGRRPYASVNFVTAHDGFTLRDVVSYDHKHNEANGENNADGSDHNLSWNHGCEGPTDDPEIRALRLRQMRNLLSTLLLSQGTPMLVAGDEFSRTQQGNNNVYCQDNELGWIDWRLDDEGRSLLAFTQRLLALRQRYPILRRGRFLVGEYNEALGVKDVTWLAPGGEEMTEEHWHDEHARCLGVLLDGRAQPTGILRSGEDATLLLILNAYHDAVSFRLPEVAEGSGWTCLLDTQRPEDPLGERYPFASEFLVGGRSFLLFELQPPGAGAEG

SEQ ID NO: 55785 - DNA, 2124 bp, Synechocystis sp. PCC 6803
  CDS (1)..(2124): transl_table=11
atggaacgcatagatattcatcccacccacaccgctaacggttacaaactccgctgtggccagccctttccctttggggccaccattgtgccggggggagttaatttttccatttactctagccatagcaccgcttgcaccctagtactgttcgagaagcgggctccccagccctttgtggagattccctttccagaatcttttcgcattggtaatgtctattgcatggtggtgtttgacctggattttgagaatctggaatacggctatcgcatggaaggccccaataacttccagcagggccattggtttgaccccagtaaagtccttcttgatccctacgccaaagtggtcagtggccgggatgtttggggcacccaacccaattgggacgatatttatcaacaccggggccgcctcagctttgacgattttgattgggaaaacgattcccccctggatgttcccctcgaagacatggtcatttatgaaatgcatgtgcggggtttcaccaaagatccttcctccggagtaaaggaaaatcaccggggcaccttcgccggcattctcagcaaaattccctatctacaggaattgggtgttaataccatcgaattaatgccgatattcgagtttgatgagtttgaacatagtcgttaccacccagaaacgggggaatttttagttaactactggggttatagcaccgttaacttttttgcacctaaagcgggttacgctgccaccggtaaattcggcatgcagattgacgagttgaaaaacttagtcaaggaactgcataaagtaggtatttccgtcattttggatgtggtttttaaccatacggcggagggcaatgaacggggccccaccatttcctttcgaggattggataacaaaacctattacatgctcaccccggagggttactatttcaactttagtggcactggcaataccttaaactgcaataatcccattgtgcggggcatggtgctggactgtctgcgatactggacagcggaatttcatattgatggttttcgctttgatttagcctctattttgggaagggatccctggggctaccccttggccaatccccctcttttggaaaccctggcctttgatcccattttggcccgttccaaacttattgctgaagcctgggatgccggtgggctataccaagtaggatcttttcccagttatggccgctgggccgaatggaatgggaaataccgagatacggtgcgaaaatttattaaaggagatgcgggggtaattggggaaatggcccaaaggctacagggttcccccgacctttatcaaggagccggacgacctccctccacttcgatcaattttgtgacggcccacgacggctttaccctggcggatttggtggcctataacggcaaacataattacgctaacggggaaaatggcaatgatggagccaacgacaattacagttggaactgcggggtagaaggtcccaccgataaccctgatatcctcagactccgggcccggcaaatgcggaatgcgatcgccattttgttggtgagtcagggggtgcccatgctgttgatgggagacgaaatgggcaaaacccaagacggcaacaataatacctattgccacgattcccctttcaattggctcaattggcatttacttgaacaaaaccaggcttggtttcggtttgtcaaacactgcattgctttccgtctagcccaccctgtattacgcaacagtgaacatttccaaaactgcgattaccttggtgtgggatttcccgatattagttggcacggagtcaagccctggcacgctgactggtccgccgatagccgagttttagcttttatgctttgtggtcgccatgccaaaggtggccgagttaaggataatcaaatttatgtggccatgaatatgcattacgaaagtctttggtttgaactgccagctcccccggtgggcaccacttggcacgttttcgccaacacaggggcccagcctccagaagatatccatccccctgggcaggagccccccctctcttcccaatcatccctactcattggcgatcggagtgttgttattttactggctaaataa

SEQ ID NO: 55786 - protein, 707 aa, Synechocystis sp. PCC 6803
MERIDIHPTHTANGYKLRCGQPFPFGATIVPGGVNFSIYSSHSTACTLVLFEKRAPQPFVEIPFPESFRIGNVYCMVVFDLDFENLEYGYRMEGPNNFQQGHWFDPSKVLLDPYAKVVSGRDVWGTQPNWDDIYQHRGRLSFDDFDWENDSPLDVPLEDMVIYEMHVRGFTKDPSSGVKENHRGTFAGILSKIPYLQELGVNTIELMPIFEFDEFEHSRYHPETGEFLVNYWGYSTVNFFAPKAGYAATGKFGMQIDELKNLVKELHKVGISVILDVVFNHTAEGNERGPTISFRGLDNKTYYMLTPEGYYFNFSGTGNTLNCNNPIVRGMVLDCLRYWTAEFHIDGFRFDLASILGRDPWGYPLANPPLLETLAFDPILARSKLIAEAWDAGGLYQVGSFPSYGRWAEWNGKYRDTVRKFIKGDAGVIGEMAQRLQGSPDLYQGAGRPPSTSINFVTAHDGFTLADLVAYNGKHNYANGENGNDGANDNYSWNCGVEGPTDNPDILRLRARQMRNAIAILLVSQGVPMLLMGDEMGKTQDGNNNTYCHDSPFNWLNWHLLEQNQAWFRFVKHCIAFRLAHPVLRNSEHFQNCDYLGVGFPDISWHGVKPWHADWSADSRVLAFMLCGRHAKGGRVKDNQIYVAMNMHYESLWFELPAPPVGTTWHVFANTGAQPPEDIHPPGQEPPLSSQSSLLIGDRSVVILLAK

SEQ ID NO: 55787 - DNA, 2076 bp, Salmonella typhimurium LT2
  CDS (1)..(2076): transl_table=11
atgacaacaaacagggcttttgaaatcagatcaggatacagccatacgcttggcgcaaattatgacggcgaaggcgtgaatttcgctattttttccgcccatgcggaacgcgtcgagctttgcctttacgatccgagcggggagcatgaaatcgctcgtctggagttaccggaatatactgacgaaatatggcacggctatgtcccgaagttgcagcccggcgcgctgtatgggtaccgcgtttacggtccttatgacccggaaaatggtcatcgttttaaccccaacaagctgcttattgacccttatgcccgtgagctggtgggcgatattcagtggaacgatgcgcatttcgcgtatcaattacttcatgacgataaagatttgacctttgatgaccaggatagcgcgccatttacgcctaaatgccgggtgattgatccggatgaggctaactgggaggatagacaacggccttccataccgtggtcgaacgccattatttatgaaacgcatgtaaaaggctttacccagcttaattccgcgatccctgagcctctacgcggtacgtttgaaggcatggggcataaagccagcgtggattacattaaaagtctggggattacctccgtcgagcttttacccgttcactggttcccggacgatcagcatctgctcgataaaggactgaaaaatttctggggatacaactcgctgggcttttttgcgccggcgacgcgctactatggtccaaaaggtattcagggattccgcgatatggtgcgcgctttccatgatgccggcatcgaagtgatactggatgtggtctataaccatacggcagaagggaatgaacttggccccacgctgtcatttaaaggtatcgataacttctcttactatcgcacgatgcccgatcagcatcgctattacattaacgatacagggacaggtaataccgtcaatacctctcatccacgggtactgcaaatggtgatggattcccttcgctattgggcggagtcaatgcatgtcgacggctttcgttttgatttgggcaccattcttggtcgtgagccggaaggctttgatcagagaggcggtttttttgatgcggtaacgcaagacccggtgctggcaaaactgaaactgattggcgaaccctgggatatcggaccgggcggctatcaggttggcggctttccaccagggtggggcgaatggaatgataaataccgcgatacggtacgcgaatactggaaaggtgacaacgtcacaaatgatttcgccgcacgcctgctgggttccggcgatctctatgatttgcgcggccgtcgcccctggtcaagcgttaactttattactgcccatgacggcttcacgctgaacgatctggtgtcttataacgacaaacataatgaagccaatggcgaagataataatgacgggcataatgataaccgctcctgtaactatggcgcagaagggccaaccgacgacgagggcatcaatgcgatacgcgagcgacagaaacgtaatttcctgaccaccttgcttttctcgcacggcacgccgatgttattagcgggcgatgagtttggccgcagtcagatgggcaataacaatggctactgtcaggacagtgaaatatcgtgggtccactgggataatttgccggaaaccgccaatgcgctacgggagtttacccgtcatctgattcaactgcgcgccacgcaaccgttgctgcgccgggagagctggcgtgacggtctggagatccgctggtttaacgccggcggaggggcgcagcaatccgaacaatgggatgagggatcgaccataggcgtatgtattagtcgtcccgatcttcagccggaagcggggatctggcatgacgccttactgcttttcaatccgtttgaaggcagcgtaccgttccgtattccgatgtggggagaaggcggctgggtacttgaactgacgactgccgataacgcgcagcagggaatgcggattaccgaagaaatggatttcgatctggccgggcgcagtatcgtgttattcagacgcccctga

SEQ ID NO: 55788 - protein, 691 aa, Salmonella typhimurium LT2
MTTNRAFEIRSGYSHTLGANYDGEGVNFAIFSAHAERVELCLYDPSGEHEIARLELPEYTDEIWHGYVPKLQPGALYGYRVYGPYDPENGHRFNPNKLLIDPYARELVGDIQWNDAHFAYQLLHDDKDLTFDDQDSAPFTPKCRVIDPDEANWEDRQRPSIPWSNAIIYETHVKGFTQLNSAIPEPLRGTFEGMGHKASVDYIKSLGITSVELLPVHWFPDDQHLLDKGLKNFWGYNSLGFFAPATRYYGPKGIQGFRDMVRAFHDAGIEVILDVVYNHTAEGNELGPTLSFKGIDNFSYYRTMPDQHRYYINDTGTGNTVNTSHPRVLQMVMDSLRYWAESMHVDGFRFDLGTILGREPEGFDQRGGFFDAVTQDPVLAKLKLIGEPWDIGPGGYQVGGFPPGWGEWNDKYRDTVREYWKGDNVTNDFAARLLGSGDLYDLRGRRPWSSVNFITAHDGFTLNDLVSYNDKHNEANGEDNNDGHNDNRSCNYGAEGPTDDEGINAIRERQKRNFLTTLLFSHGTPMLLAGDEFGRSQMGNNNGYCQDSEISWVHWDNLPETANALREFTRHLIQLRATQPLLRRESWRDGLEIRWFNAGGGAQQSEQWDEGSTIGVCISRPDLQPEAGIWHDALLLFNPFEGSVPFRIPMWGEGGWVLELTTADNAQQGMRITEEMDFDLAGRSIVLFRRP

SEQ ID NO: 55789 - DNA, 2511 bp, Corynebacterium glutamicum ATCC 13032
  CDS (1)..(2511): transl_table=11
atgacatcaacgattgagcactcgtaccaagtttggcctggacatgcttatcctctgggttcaacctatgacggtgctggaacgaacttcgcactcttctccgacgttgcagagcgtgttgagctgtgtctattagatgcagataacaacgagactcgaattccactcgaagagcgcgatgcccacatttggcattgctaccttcctggcgttcaacctggacagcgctacggattccgagttcatggcccgtggaacccagatgagggtaagcggtgcgacgcgaacaaacttctagttgatccctatgctcgtgctttcgatggagattttgatggacatccgtcactattttcttacgacatcaccaatccaaatgaccccaacggtcgcaataccgaagacagcattgatcacacaatgaagtctgtcgtggtgaacccattcttcgactggggcaacgatcgtgcaccgcgtattccttacaacgaaacagtcatttacgaagcccacgtcaagggcatgacgatgacccacccggatgttcctgaagaactccgtggcacctacgcgggccttgcccacccaaccatcattcaatacttgagtgatctgggagtgactgccattgaattgatgccggtccaccagttcctgcaggatgatcgtctccgcgacctaggaatgcgcaactactggggctacaactctttcggcttctttgcgccctacaacgattacgctgccaacaagaaccccggtggcgccgtggccgagttcaaaggcttggtgcgcagctaccacgaagcgggcctcgaagtaattttggatgtggtctacaaccacaccgccgagggcaaccacatgggccccaccatcgcgttccgaggcattgacaacgaggcgtactaccgactggttgagggcgatcgccgtcattacatggactacaccggtactggtaactccctcaatgtccgcgacccgcactcactgcagctgattatggattcgctgcgctactgggtcaccgagatgcatgtcgacggcttccgcttcgaccttgcctctacccttgctcgtgaatttgatgatgttgaccgcctggcaaccttcttcgacctggtccaacaagacccggtggtctcccaggtcaagctcattgctgagccgtgggatgttggcgaaggcggataccaagtgggtaacttcccaccactgtggactgagtggaacggtaaataccgcgacactgtccgtgatttctggcgtggtgagccagcaaccttgggtgaattcgcttcccgactaactggttcctctgatttgtatgcaaacaacggccgtcgccccactgcatcgatcaactttgtgactgctcacgacggcttcaccctcaatgacttggtcagttacaacgagaagcacaacatggccaacggtgaagacggtcgggacggtgaatcacacaaccgttcctggaactgtggcgtcgaaggaccaactgacgatcctgagattatgcagctgcgtgctcagcaacgacgcaacttcctcaccaccttgttgctgtcccagggcacccctatgttgtcccacggtgatgaaatggcccgtacccaaaacggcaacaacaacgtctactgccaagacaatgaactggcgtgggtgaattgggatcaggctgaagaaaacgctgacttggtgagcttcaccaggcgtttgctgcgtatccgagcaaaccacccagtatttaggcgcaggcagttccttgccggtggccctttgggcgccgatgttcgtgaccgcgatatcgcatggctggtaccaaatggaaccttgatgactcaagatgactgggacttcgctttcggtaaatcactgcaggtgttcttcaacggcgatgccatcgaagagcctgattatcgaggacagaaaatccacgatgactccttcatcttgatgttcaacgctcacttcgaacctatcgatttcaatctccctcctgagcatttcggtatgaagtggaagcttttggtcgataccaccgaagcggtgggccacccgctggaggatctcaccatcgaagctggcggaaccatcactgttcctgcccgttccacgatgctgctgcgccaggtggaggctccggactacaccaagcttgaggaaaagatcgctgctgaaaagcgtgagcaagaacttgcggcagagaaggaagctgctgagaagcgcgaattggaactggcggcagcaaaggaagctgaagatgctgctgaggctctccaccttgcggcagaacgtgcttcgactcaggaagctgaattggcccatcaacacggtgctgatgcgattgccgatgaggtagcggaagaaccacaagagctgccacaagatgaagtagcggcagaggtcgagactgagcccgacaccgagcctgacactgaatctgactccgagcaggctgaggtagcttcagaggagcctgaagcggacgaagaagagaagtag

SEQ ID NO: 55790 - protein, 836 aa, Corynebacterium glutamicum ATCC 13032
MTSTIEHSYQVWPGHAYPLGSTYDGAGTNFALFSDVAERVELCLLDADNNETRIPLEERDAHIWHCYLPGVQPGQRYGFRVHGPWNPDEGKRCDANKLLVDPYARAFDGDFDGHPSLFSYDITNPNDPNGRNTEDSIDHTMKSVVVNPFFDWGNDRAPRIPYNETVIYEAHVKGMTMTHPDVPEELRGTYAGLAHPTIIQYLSDLGVTAIELMPVHQFLQDDRLRDLGMRNYWGYNSFGFFAPYNDYAANKNPGGAVAEFKGLVRSYHEAGLEVILDVVYNHTAEGNHMGPTIAFRGIDNEAYYRLVEGDRRHYMDYTGTGNSLNVRDPHSLQLIMDSLRYWVTEMHVDGFRFDLASTLAREFDDVDRLATFFDLVQQDPVVSQVKLIAEPWDVGEGGYQVGNFPPLWTEWNGKYRDTVRDFWRGEPATLGEFASRLTGSSDLYANNGRRPTASINFVTAHDGFTLNDLVSYNEKHNMANGEDGRDGESHNRSWNCGVEGPTDDPEIMQLRAQQRRNFLTTLLLSQGTPMLSHGDEMARTQNGNNNVYCQDNELAWVNWDQAEENADLVSFTRRLLRIRANHPVFRRRQFLAGGPLGADVRDRDIAWLVPNGTLMTQDDWDFAFGKSLQVFFNGDAIEEPDYRGQKIHDDSFILMFNAHFEPIDFNLPPEHFGMKWKLLVDTTEAVGHPLEDLTIEAGGTITVPARSTMLLRQVEAPDYTKLEEKIAAEKREQELAAEKEAAEKRELELAAAKEAEDAAEALHLAAERASTQEAELAHQHGADAIADEVAEEPQELPQDEVAAEVETEPDTEPDTESDSEQAEVASEEPEADEEEK

SEQ ID NO: 55791 - DNA, 1938 bp, Fusobacterium nucleatum subsp. nucleatum ATCC 25586
  CDS (1)..(1938): transl_table=11
atgtattataattttaatcactatataaatttaggagctaatttagaaaaagatggttgtagttttgctatttatgcaaaaaatgttaatagcctttctttaaatatttttcattcttcagaagatactgttccttatgaaaagcatatattaagtccttctgagcacaaactaggagatatttggagtatatttttagaaaatataaaagaaggtacattatataattgggagattaatggaatggctatactagacccttatgcccttgcatatactggaaatgaaaccattgaaaataaaaaatctattgttcttgcaagagtaggaactgaaacaaagcatattttaattcctaaaaaagacatgataatttatgaaagccatattggattatttacaaaatcttcaagttcaaatactttaaatggagcaacttattctgcttttgaagaaaaaataccttatttaaaaaatttaggtattaatgttgtagaatttttaccaatttttgaatgggatgattttactggaaatcttgatagagaatcttttttcttaaaaaatgtctggggatataatcctatcaatttttttgctttgacaaaaaaatattcatcttcaaaagatgaaaattctgccaatgaaattaatgaatttaaaaaattaattttctctctacataaaaatggtatagaagtaatattagatgttgtctataaccatacagcagaaggtggaacaggtggaaaagtatataattttaaagctatgggagaaaatattttctatactaaagatagagaaaattattttactaacttttcaggctgtggaaatactttaaattgtaatcataaagttgtaaaagatatgattattcagtctttactctattggtatttagaagttggagttgatggatttcgttttgatttagcacctgtcttaggtagagattctaataaccaatgggcaagacattccttattacatgaactaattgaacaccctattttatctcatgcaaaattaattgcagaaagttgggatttaggaggatattttgtaggggctatgccaagtggttggtgtgaatggaatggagcatatagagatactgttaggcaatttataagaggagattttgggcaagttccagaacttattaaaagaatatttggaagtgtggatattttccatgccaataaaaatggataccagtcaagtattaattttatttgttgtcatgatggcttcactatgtgggatttggttagttataacttaaaacataacattttaaatggtgaaaataaccaagatggagaaaataataatcattcatataatcatggtgaagagggatttactgaaaatcctcatattatttctctgagaaaacagcaaattaaaaatatgattcttattttatatatttcccaaggtatcccaatgttacttatgggagatgaaatgggaagaactcaactaggtaataataatgcctattgtcaagataatcctacaacctgggtcgattgggatagaaaaaaagattttgaagatgtttttcttttcactaagaatatgataaatttaagaaaatcttattcaatttttaaaaaagaaacaccattaattgaaggagaagaagttattttacatggtattaaattatatcaaccagatttaagtttccactctctttctattgcttttcaattaaaagatataaagagtaatactgatttttatatagcatttaactcttatactgaacaactttgttttgaattgcctatacttgaaaataaatcttggtatatactaactgacacttcaaaagttgatacttgtaattttcaagaaactaaatgccaagatactcattgttgtgttttaccaaaatcatcagtaattttaatatctaaatag

SEQ ID NO: 55792 - protein, 645 aa, Fusobacterium nucleatum subsp. nucleatum ATCC 25586
MYYNFNHYINLGANLEKDGCSFAIYAKNVNSLSLNIFHSSEDTVPYEKHILSPSEHKLGDIWSIFLENIKEGTLYNWEINGMAILDPYALAYTGNETIENKKSIVLARVGTETKHILIPKKDMIIYESHIGLFTKSSSSNTLNGATYSAFEEKIPYLKNLGINVVEFLPIFEWDDFTGNLDRESFFLKNVWGYNPINFFALTKKYSSSKDENSANEINEFKKLIFSLHKNGIEVILDVVYNHTAEGGTGGKVYNFKAMGENIFYTKDRENYFTNFSGCGNTLNCNHKVVKDMIIQSLLYWYLEVGVDGFRFDLAPVLGRDSNNQWARHSLLHELIEHPILSHAKLIAESWDLGGYFVGAMPSGWCEWNGAYRDTVRQFIRGDFGQVPELIKRIFGSVDIFHANKNGYQSSINFICCHDGFTMWDLVSYNLKHNILNGENNQDGENNNHSYNHGEEGFTENPHIISLRKQQIKNMILILYISQGIPMLLMGDEMGRTQLGNNNAYCQDNPTTWVDWDRKKDFEDVFLFTKNMINLRKSYSIFKKETPLIEGEEVILHGIKLYQPDLSFHSLSIAFQLKDIKSNTDFYIAFNSYTEQLCFELPILENKSWYILTDTSKVDTCNFQETKCQDTHCCVLPKSSVILISK

SEQ ID NO: 55793 - DNA, 2259 bp, Methanosarcina acetivorans C2A
  CDS (1)..(2259): transl_table=11
ttgaagacgcgcagttacaaaattgaaaaaggataccctcaccctcctggagcgacttgtgacgaagaaggagttaatttttcaatttattctgaacatgccgattatgttgagctcctgcttttcgataaacatgatgatctggagcctgtacttgtcctttcaacaaatagagtcgaagaacttacccgccccggaaaagttgagagtttagtggaagcctcaaaggaaattgggacctcaaaggaaattgggacctcaaaggaaattaaaacctcacagaaaatcgaaaccgctgagactccaggtattgcccttaacaaaactttccacttctggcatgtgtacatacgcggtcttaagcccggagtccactatgcctacaggataggcggcccttttgatccatccggagggtatcgttttgatggggggaaagtcctgatagatccttactcgcgggggaacaataaaaccctctgggacagagaaaaagccagcgtgccaggagacaacctttctacatccatgcgtagcgtggtgatagatccctccaggtacaggtgggaaaataacagtcacatcacggcggaaaaagtatatgagatgcccggaaaatgggaggatctcttcggcaaaagcaggctgcaagagctgaacgagaccatcatctatgagctgcatgtgggcggattcacgagatctccaagctcaggggttaagactccaggtacattttcagggattatagaaaaaattccatatctcaaggagcttggcatcactgcggtagagctgatgcctgtctttgattttgatgatactataagcccggaggggaaaaggcactactggggatatgatcctatatgtttttttgctcctcacagcggctattgcaaaaaccctgaacgcggagaccatacgaaagaattccgggatatggtcaaagccctgcacaaagccggaatagaggtaatccttgatgtggttttcaaccataccgctgaaggggaccatctgggtccggttttttctttcaaaggtatagacaacagcatttactatcatctggagcctgacaggcaatattacagcaattactcggggtgtggaaacactgtaaactgcaaccatccgatttcccagaagctgatcgtagacagcctgaaatactggacagaagaaatgcatgttgatggttttcgttttgaccagggctctattctttcacttgataccgatggaaaagttatgaaatatccccctgtgatatggcagattgaactggacgattccctcggatacataaaggtgattgcggaagcctgggacgcggctgcactcaaccaggtcggatacttcccgggacccaggtgggcggaatggaacggttattatcgggacgagatccgccgctttgtccgaggagaccccgggcttgtagggagggttgcaagccggattgccgggagccccgatctctaccagtccgaatcaaggcttccgatcaatagtgttaattttgtgacctgccacgatgggtttacacttaacgaccttgtttcttacaattacaaacacaacgaggctaatggggaaaataatagggatgggactgataacaacctgagctggaactgtggggttgaaggagagaccgaagacccggagatcgaagctttgcgggaacggcagatcaaaaatttcgcctctatccttctgctttccataggggttccgatgatttccatgggggatgaagtcaggcggacccaaaaaggcaacaacaacgcttactgccaggacaatgggaccggctggtttgactggaaccttgtgggaagaaatcgggatatgttccgcttctggaaactgatgatcgattttcggaaacgccataccactattcttcgcccccgttactttacgggtaaggaaaacgagcgggggctaaaagatatttcctggtacggctgcaagctcaacagtccgggctgggacgacccttatgcccgagccctttcctttaccatgggagaacccggtgatgaagaagacatccatgttatgatgaatatgtactgggaacctctggagttcgagattccaggactcagagagcgaaactggcacagggcagtcgacaccttcctgcctcctcctcaggatattgccggagccggagaagaagtccaggtaaatggaagcagctgcactgttcagggaagaagtgtagttgtgctgatttcaaaatga

SEQ ID NO: 55794 - protein, 752 aa, Methanosarcina acetivorans C2A
MKTRSYKIEKGYPHPPGATCDEEGVNFSIYSEHADYVELLLFDKHDDLEPVLVLSTNRVEELTRPGKVESLVEASKEIGTSKEIGTSKEIKTSQKIETAETPGIALNKTFHFWHVYIRGLKPGVHYAYRIGGPFDPSGGYRFDGGKVLIDPYSRGNNKTLWDREKASVPGDNLSTSMRSVVIDPSRYRWENNSHITAEKVYEMPGKWEDLFGKSRLQELNETIIYELHVGGFTRSPSSGVKTPGTFSGIIEKIPYLKELGITAVELMPVFDFDDTISPEGKRHYWGYDPICFFAPHSGYCKNPERGDHTKEFRDMVKALHKAGIEVILDVVFNHTAEGDHLGPVFSFKGIDNSIYYHLEPDRQYYSNYSGCGNTVNCNHPISQKLIVDSLKYWTEEMHVDGFRFDQGSILSLDTDGKVMKYPPVIWQIELDDSLGYIKVIAEAWDAAALNQVGYFPGPRWAEWNGYYRDEIRRFVRGDPGLVGRVASRIAGSPDLYQSESRLPINSVNFVTCHDGFTLNDLVSYNYKHNEANGENNRDGTDNNLSWNCGVEGETEDPEIEALRERQIKNFASILLLSIGVPMISMGDEVRRTQKGNNNAYCQDNGTGWFDWNLVGRNRDMFRFWKLMIDFRKRHTTILRPRYFTGKENERGLKDISWYGCKLNSPGWDDPYARALSFTMGEPGDEEDIHVMMNMYWEPLEFEIPGLRERNWHRAVDTFLPPPQDIAGAGEEVQVNGSSCTVQGRSVVVLISK

SEQ ID NO: 55795 - DNA, 2109 bp, Streptomyces coelicolor A3(2)
  CDS (1)..(2109): transl_table=11
atgcaggtctggcctggagaggcgtatccactgggtgccacgtacgacggcgccggcaccaacttcgcggtcttcacggaggccgccgaccgagtagagctgtgtctgctgcacgacgacggttcggagacggcggtcgagctgcgggagagcgatgccttcgtgcggcacgcgtacgtgccgggcgtgatgccggggcagcggtacggctaccgcgtgcacggcccgtacgccccggagcgcggactgcgctgcaacagcgccaagctgctcctcgatccgtacgcgcgtgcgatcagcggggaggtccagtggggcgaggaggtgtacggctaccacttcggcgcacccgaacggcgcaacgacctcgactcggccccgcacacgatgacgtcggtcgtggtcaacccgtacttcgactggggcgacgaccggcgcccccgtacggagtaccaccacacggtgatctacgaggcccacgtgaagggcctgaccatgcgccacccgggcctgcccgaggagctgcggggcacctacgcggccctcgcgcacccggcgctcatcgagcacctcacggggctcggggtgaccgcgctggagctgatgccggtccatcagttcgtcaacgaccaccggctggtggacatgggcctcaacaactactggggctacaacacggtcgggttcttcgccccgcacaacgcctacgcctcctggggcgaccgcggccagcaggtgctggagttcaagtccgcggtcaaggcgctgcacgaggcggggatcgaggtgatcctggacgtggtctacaaccacaccgcggagggcaaccacctgggcccgacgctgtccttcaaggggctggacaacccctcgtactaccggctggccgacgacccccgctactacatggacaccacggggaccgggaactcgctgctcatgcggtccccgcacgtactccagatgatcatggactcgctgcggtactgggtcaccgagatgcacgtggacgggttccgtttcgacctcgcggccacgctggcccggcagttccacgaggtggaccggctgtcgtcgttcttcgacctggtgcagcaggaccccgtggtctcgcaggtgaagctgatcgccgagccgtgggacgtgggcgagggcggctaccaggtgggcaacttcccgccgctgtggaccgagtggaacggcaagtaccgggacacggtgcgggacctgtggcgcggcgagccgcgcacgctggcggagttcgcgtcccggctgaccggttcctccgacctctaccaggacgacgggcgccgcccgctggcctcgatcaacttcgtgacctgccacgacggcttcacgctgcacgacatggtggcctacaacgacaagcacaaccacgccaacggcgaggacaaccgggacggcgagagccacaaccgttcctggaactgcggtgtcgagggcgacaccgacgatccggcggtgctggagctgcgggcgcggcagatgcgcaacttcatcgccacgctgctgctctcccagggcgtcccgatgctcagccacggcgacgagttcgcccgcacccagcggggcaacaacaacgcctactgccaggacaacgagctggcgtgggtggcgtggcccgaggacggccacgacctcctggagttcacccgcgcgatggtgtggctgcgcaaggaccacccggtcctgcgcaggcgccgcttcttccacgggcgcccggtgcagggcacccacgacgagctgtcggacatcgcctggttcacgccggagggcgcggagatggcccagcgggactggaactcggcacgggcctccgcgctcacggtcttcctgaacggcaacgcgatctccgagcccggcacccgcggggagcgcatcgccgacgattcgttcctgctgatgttcaacgccgcgccgaggccgctggacttcgtggtgccggtcgatcacggccggcagtgggaggtggtcgtcgacaccgttctgacggccggggtgcccgcgggcacgggcccgaaggtgcaggccggggaccggctgaccctcctggaccggagcctgacggtgttgcagcggccggtgtag

SEQ ID NO: 55796 - protein, 702 aa, Streptomyces coelicolor A3(2)
MQVWPGEAYPLGATYDGAGTNFAVFTEAADRVELCLLHDDGSETAVELRESDAFVRHAYVPGVMPGQRYGYRVHGPYAPERGLRCNSAKLLLDPYARAISGEVQWGEEVYGYHFGAPERRNDLDSAPHTMTSVVVNPYFDWGDDRRPRTEYHHTVIYEAHVKGLTMRHPGLPEELRGTYAALAHPALIEHLTGLGVTALELMPVHQFVNDHRLVDMGLNNYWGYNTVGFFAPHNAYASWGDRGQQVLEFKSAVKALHEAGIEVILDVVYNHTAEGNHLGPTLSFKGLDNPSYYRLADDPRYYMDTTGTGNSLLMRSPHVLQMIMDSLRYWVTEMHVDGFRFDLAATLARQFHEVDRLSSFFDLVQQDPVVSQVKLIAEPWDVGEGGYQVGNFPPLWTEWNGKYRDTVRDLWRGEPRTLAEFASRLTGSSDLYQDDGRRPLASINFVTCHDGFTLHDMVAYNDKHNHANGEDNRDGESHNRSWNCGVEGDTDDPAVLELRARQMRNFIATLLLSQGVPMLSHGDEFARTQRGNNNAYCQDNELAWVAWPEDGHDLLEFTRAMVWLRKDHPVLRRRRFFHGRPVQGTHDELSDIAWFTPEGAEMAQRDWNSARASALTVFLNGNAISEPGTRGERIADDSFLLMFNAAPRPLDFVVPVDHGRQWEVVVDTVLTAGVPAGTGPKVQAGDRLTLLDRSLTVLQRPV

SEQ ID NO: 55797 - DNA, 2148 bp, Streptomyces coelicolor A3(2)
  CDS (1)..(2148): transl_table=11
gtgacccgcgccaggccgaactggaaggggtcgcccgtgtggagcgggcacccctatcccctgggggccgcgtacgacgggcagggcaccaacttcgccctgttcagcgaggtcgccgagcgggtcgacctcgtgctcgtcgacgacgacggcaaccacagcaccgtcccgctgcccgacgtcgacggcttcgtgtggcactgctacctgcccggcgtcggcccggggcagcgctacggctaccgggtccacggcccgtgggccccggccgtcggccaccgctgcaacccggcgaagctgctcctcgacccctatacgcgggccgtggacgggctggtggacaaccacgcctccctcttcgagcgggccaggggcaaggccgacccgggcgacagcgccgggcacaccatgctcggcgtcgtcaccgaccccttcttcgactggggcgacgaccggccgccccggcgcccgtactcggagagcgtcatctacgaggcccacgtccgcggcctcagccgcacccaccccgacgtgcccgaggaactgcgcggcacctacgcggggctcgcgcacccggcggtcgtggaccacctgacgtccctcggcgtgacggccgtggagctgatgccggtgcaccagttcgtccacgacggggtgctcctggaccgggggctgtccaactactggggctacaacaccatcggcttcttcgcgccgcacaacggctacgccgccctcggcacccgcggccagcaggtcagcgagttcaagtcgatggtcaagaccctgcacgaggccggcctcgaagtgatcctcgacgtggtctacaaccacaccgccgagggcaacgagcggggccccaccctctccttccgcggcatcgacaacgcctcgtactaccgcctggtggacggcgactggcagcactactacgacaccaccggtaccggcaacagcctgctgatgcgccacccctacgtgctccagctcatcatggactcgctgcggtactgggtcaccgagatgcacgtcgacggcttccgcttcgacctcgcggccaccctggcccggcagttccacgaggtggaccggctgtccgcgttcttcgacctcatccagcaggacccggtgatcagccgggtcaagctgatcgccgaaccctgggacgtcggcgagggcggctaccaggtgggcaacttcccgcagctgtggtcggagtggaacggcaagtaccgagacgccgtacgggacttctggcgcgccgaggaccactcgctcggcgagttcgcctcccggctgaccggctcctccgacctgtaccagcacagccgccgccgcccccgcgccagcgtcaacttcgtcaccgcgcacgacggcttcacgctgcgcgacctcgtctcgtacaacgacaagcacaacgaggccaacggcgaggacaaccgggacggcgagagccacaaccggtcctggaactgcggcgcggagggcggcaccaaggacccggccgtccgggagctgcgcggccgccagcagcgcaacttcctggccaccctcctgctctcccagggcatcccgatgatctgccacggcgacgaactgggccgcacccagcggggcaacaacaacgcctactgccaggacaacgagatctcctggatcgactggcggctcgacggggagcagcgcgcgctgctggacttcgcccggcgcctgatcgcgctgcgcgccgaccatcccgtactgcgccggcgccgcttcttccacggggagaccctcacccacgccgaccagccgctgcccgacctggtctggctgctgcccgacgcgcgggagatgaccgacgacgactggcagcgctccgacgcgcacaccgtcggcgtcttcctcaacggcgacgccatcgccgagcccgacccccgcggccggcccgtggtcgacgactccttcctgctgctgctcaacagccactgggagccggccgacttccggctgcccgacgccggctacggcgaacgctggacggccctggtcgacaccgccgacccggacggcgtccccgacgaggccgagcacaaggcgggcacccggctgaccgtggagcagcgcagcctcgtgctgctctcccggccctcccgcaccggccggtga

SEQ ID NO: 55798 - protein, 715 aa, Streptomyces coelicolor A3(2)
MTRARPNWKGSPVWSGHPYPLGAAYDGQGTNFALFSEVAERVDLVLVDDDGNHSTVPLPDVDGFVWHCYLPGVGPGQRYGYRVHGPWAPAVGHRCNPAKLLLDPYTRAVDGLVDNHASLFERARGKADPGDSAGHTMLGVVTDPFFDWGDDRPPRRPYSESVIYEAHVRGLSRTHPDVPEELRGTYAGLAHPAVVDHLTSLGVTAVELMPVHQFVHDGVLLDRGLSNYWGYNTIGFFAPHNGYAALGTRGQQVSEFKSMVKTLHEAGLEVILDVVYNHTAEGNERGPTLSFRGIDNASYYRLVDGDWQHYYDTTGTGNSLLMRHPYVLQLIMDSLRYWVTEMHVDGFRFDLAATLARQFHEVDRLSAFFDLIQQDPVISRVKLIAEPWDVGEGGYQVGNFPQLWSEWNGKYRDAVRDFWRAEDHSLGEFASRLTGSSDLYQHSRRRPRASVNFVTAHDGFTLRDLVSYNDKHNEANGEDNRDGESHNRSWNCGAEGGTKDPAVRELRGRQQRNFLATLLLSQGIPMICHGDELGRTQRGNNNAYCQDNEISWIDWRLDGEQRALLDFARRLIALRADHPVLRRRRFFHGETLTHADQPLPDLVWLLPDAREMTDDDWQRSDAHTVGVFLNGDAIAEPDPRGRPVVDDSFLLLLNSHWEPADFRLPDAGYGERWTALVDTADPDGVPDEAEHKAGTRLTVEQRSLVLLSRPSRTGR

SEQ ID NO: 55799 - DNA, 2133 bp, Xanthomonas axonopodis pv. citri str. 306
  CDS (1)..(2133): transl_table=11
atgcgacgtccagcaagcgcggcctatgccaacccctcccgcatccgtcaggggcgcccgttcccacgcggtgccgtcttcgacggcaagggcaccaatttcgcgctgttttccgcgcatgccacgcgtgtcgagctgtgcctgttcgacgaacagggcaacgaaacccgcgtcgacctgcccgagtacaccaacgagatctggcacgggtatcttcccgatgccaagccgggccagcgctatggctaccgtgttcacggcccctatgcgccgaccgaaggccatcgctttaatcacaacaagctgctattggatccgtatgcgcgcgagctcgacggcgatctgatctggtccgatgagctctacggctacaccgtgggccaccccgacggcgacctgagcttcgacgagcgcgatagcgcgcccttcatgcccaagtgcgtggtggtcgaagacacctacgactggggagacgacacccgcctgctcaagccgtggaatgaaacggtcatctacgaaacccatgtgcgcggctacacgatgcgcaatccacaggtacccgaagcggtgcgcggcactttcgccggcctggcccagccgcaggtactccagtacatcaaggacctgggcatcaccgcggtggagcttttgccggtacacgcgtacctggacgaccagcatctgctcgacaaggggctacgtaattactggggctacaacaccatcggctttttcgcgctgaagtcgcgctacctgtccagcggacatcgcgatgagttccgcgacatggtcaaggccatgcacaaacagggtctggaagtgattctggacgtggtctacaaccacaccgccgaaggcagcgagctggggccgaccttgtcgttcaagggcatcgacaacgccagctattaccgcctggccgatgacaagcgctactacatcaacgataccggtaccggaaatacgctgaacctgagcaattcgcgggtgatccagttcgtcaacgattcgctgcgctactgggccggcgaaatgcatgtggatggctttcgcttcgatctggccaccattcttggccgcgagccgagtggcttcgatcaacgtggcggcttcctggatgcctgcaaccaggacccgctgctgtcggaagtcaagctgattgccgagccgtgggactgcggcccaggcggttatcaggtaggccacttcccgccgggttggtcggagtggaacgacaagttccgtgacaatgcgcgcgaattctggaaaggcgaagacggcaagctggcggaattcgcgacccgcttcaccggttcggccgatctattcgatcgccgcggccggcgcccgtgggcgtcggtgaacttcatcaccgcccacgatggcttcaccttgcgcgatctggtcagctacaacgaaaagcacaatatcgataacggcgaggacaaccgcgacggttcgtcgaacgatggctcctgcaactacggcgaagaaggcgacaccgataacgccgaggtgctgcagatccgcgagcggcagatgaagaacctgcttgccacgctgctgctatcgcaaggcacgccgatgatgctcagcggcgacgagcgtgcgcagacacaggggggcaacaacaatacctattgccaggacaacgaaatcacctggctggactgggaaaacgatccgaccgacggccgcctgaccgagttcgtgaaggcactgacccgtctgcgcaagcgttatccgatcctgtcgcggggccgctttctcaacggccagtacaacgaagaagccggcctgcgcgatctcacctggctcaatccaggcggcatcgaaatggacgatgcgcactggaccgaccccgccgcgcgctcggtgggcctgttgctggaaggcaaggcgcagacctcgggggtcaaggaactggccaacgacgacaccttgctcatcgtcatcaacgcctatcacgagggcgtgacctttaccctgccctcctccgatgagcccgtgcactggaagctggtgctctccaccgacgaagcgctggaggtggacatgatgccggccggtgccagcgaattcctggccccgccgcgtagcgtgtcggtcttcgagtgcaagagcgaccagtaa

SEQ ID NO: 55800 - protein, 710 aa, Xanthomonas axonopodis pv. citri str. 306
MRRPASAAYANPSRIRQGRPFPRGAVFDGKGTNFALFSAHATRVELCLFDEQGNETRVDLPEYTNEIWHGYLPDAKPGQRYGYRVHGPYAPTEGHRFNHNKLLLDPYARELDGDLIWSDELYGYTVGHPDGDLSFDERDSAPFMPKCVVVEDTYDWGDDTRLLKPWNETVIYETHVRGYTMRNPQVPEAVRGTFAGLAQPQVLQYIKDLGITAVELLPVHAYLDDQHLLDKGLRNYWGYNTIGFFALKSRYLSSGHRDEFRDMVKAMHKQGLEVILDVVYNHTAEGSELGPTLSFKGIDNASYYRLADDKRYYINDTGTGNTLNLSNSRVIQFVNDSLRYWAGEMHVDGFRFDLATILGREPSGFDQRGGFLDACNQDPLLSEVKLIAEPWDCGPGGYQVGHFPPGWSEWNDKFRDNAREFWKGEDGKLAEFATRFTGSADLFDRRGRRPWASVNFITAHDGFTLRDLVSYNEKHNIDNGEDNRDGSSNDGSCNYGEEGDTDNAEVLQIRERQMKNLLATLLLSQGTPMMLSGDERAQTQGGNNNTYCQDNEITWLDWENDPTDGRLTEFVKALTRLRKRYPILSRGRFLNGQYNEEAGLRDLTWLNPGGIEMDDAHWTDPAARSVGLLLEGKAQTSGVKELANDDTLLIVINAYHEGVTFTLPSSDEPVHWKLVLSTDEALEVDMMPAGASEFLAPPRSVSVFECKSDQ

SEQ ID NO: 55801 - DNA, 2142 bp, Bifidobacterium longum NCC2705
  CDS (1)..(2142): transl_table=11
atgcagatcagacctggatcaatgtatccgttgggcgccagctatgacggcgccggtgtgaacttcgcgctgtactcacaggttgcgcagaaagtcgagctatgcctgttcgacgagcacgatgtggaaacacgcatcgaaatgaccgaacggaactcgtacgtatggcataactacattcccggcctccatcctggccagcgttacggctaccgcgtctacggtccctatgacccggtgcacggcctcagatgcaaccccaacaaactgctgcttgacccgtatgccaaggccattgaaggtaatatcgacggcgacgaaagcctgttctcatactggttcaagagcccggacgacaactcggcgatgaacgaccttgactcggccgcccacaccatgaagtcggccgtcatcaacccctacttcgattggggcaacgaccagcacccctacatctcgtaccacgattcggtgatctacgaggcgcacgtgcgcggcatgaccaacctcaacatggacgtgccgccggacatccgcggcacctacgccggcctggcctatccgagcgtcatcgaatacctgaagaagctcggcatcaccgccatcgaactcatgccgatccaccagttcgtcaacgactccttcctgcaggagaagggcctgtcgaactactggggctacaacaccatcggcttcttcgcaccgcacaacgcctactcctcctccggggaacgcggcgagcaggtcaacgaattcaagtccatggtcaaggcctaccatcgcgccggcatggaggtcatcctcgacgtggtgtacaaccacaccgccgaaggcaaccatatgggccccaccctgagcttcaagggcatcgacaacgcctcctactaccgactggtggaaggcgaccagcagcactacttcgacaccaccggcactggcaactcgctgctcatgcgctcgccgcacgcgctgcagttgattaccgattcgctgcgctactgggttactgaaatgcacgtcgacggcttccgcttcgatctggccgccacgctggcacgccagttccaggaggtcgacaagctgtccgcgttcttcgacatcgtggagcaggacccgatcatctcgcgcgtcaagctcatcgccgaaccgtgggatctgggctccggcggctatcaggtgggcggcttcccgtccagctggtccgaatggaatggccgctaccgcgacaccgtgcgcgacttctggcgctcgcagccctccacgttgcccgaattcgcctcgcgcttgatgggcagctccgacctgtatcaggtcaacggccgccgaccggtggcgtccgtgaacttcatcaccgcgcatgatggtttcacaatgaacgacctggtcagctacaacgaaaagcacaacgaagccaatggcgagggcaatcgcgacggcgagagcaacaatcgctcttggaattgcggcgttgaaggcccgaccaatattccggacgtcaacgacttgcgtcagcgtcagatgcgcaacatgttcgccacgttgctgttcagccagggtatcccgatgatttgcggtggcgacgaagtggcccgcacccagcagggcaacaacaacgcctactgtcaggacaacgagatctcttggaccaactggcatcttgacaaaggacgcaaggaactgctcgccttcgtttccaaactcattcatctgcgtttggatcatccggtgttgcaccgccgtcgcttcttcaccggccgtgagcccggcgacgattcgaacacgattccgcaggtcgaatggttcgaccacaccggctcgatcatggatatggacgactggcagaacacgcatgcgttctccatgatgatctatctgaacggttcggatatcccggaggtcgactggtacggcaaccggatggtcgacaatgacttcatcctgatcttcaacgcgcattacgagccgattatgttcaccctgccggatgagcgatacggccgcaaatggcagctggtcgtggatacgcacaacccgaatgagccggcgctgagctatgaggcgggcttcatgatcaccgcccagtcccgcagcttcctcatgctcatgagcgccaaaaagcccaagaagcccatgggcctataa

SEQ ID NO: 55802 - protein, 713 aa, Bifidobacterium longum NCC2705
MQIRPGSMYPLGASYDGAGVNFALYSQVAQKVELCLFDEHDVETRIEMTERNSYVWHNYIPGLHPGQRYGYRVYGPYDPVHGLRCNPNKLLLDPYAKAIEGNIDGDESLFSYWFKSPDDNSAMNDLDSAAHTMKSAVINPYFDWGNDQHPYISYHDSVIYEAHVRGMTNLNMDVPPDIRGTYAGLAYPSVIEYLKKLGITAIELMPIHQFVNDSFLQEKGLSNYWGYNTIGFFAPHNAYSSSGERGEQVNEFKSMVKAYHRAGMEVILDVVYNHTAEGNHMGPTLSFKGIDNASYYRLVEGDQQHYFDTTGTGNSLLMRSPHALQLITDSLRYWVTEMHVDGFRFDLAATLARQFQEVDKLSAFFDIVEQDPIISRVKLIAEPWDLGSGGYQVGGFPSSWSEWNGRYRDTVRDFWRSQPSTLPEFASRLMGSSDLYQVNGRRPVASVNFITAHDGFTMNDLVSYNEKHNEANGEGNRDGESNNRSWNCGVEGPTNIPDVNDLRQRQMRNMFATLLFSQGIPMICGGDEVARTQQGNNNAYCQDNEISWTNWHLDKGRKELLAFVSKLIHLRLDHPVLHRRRFFTGREPGDDSNTIPQVEWFDHTGSIMDMDDWQNTHAFSMMIYLNGSDIPEVDWYGNRMVDNDFILIFNAHYEPIMFTLPDERYGRKWQLVVDTHNPNEPALSYEAGFMITAQSRSFLMLMSAKKPKKPMGL

SEQ ID NO: 55803 - DNA, 2655 bp, Corynebacterium efficiens YS-314
  CDS (1)..(2655): transl_table=11
atgacatcaagcagtgaacacagctactccgtatggccgggtgatgcctacccgctcggctcgaaatacgacggtgcaggcaccaactttgcactgttttcagacgttgccgaaagcgtcgagctctgcctcgtcgatgagaatgacaatgagaccaggatcaagctggaggaaaaagacaacaacgtctggcactgctaccttccgggcatcctgcccggccagcggtacggttaccgcgtgcacggcccctgggacccggacaacggcaagcgctgcgatgccagcaagttcctggtggatccctacgcccgcgccttcgtcggcgaatatgacggccacccctcattgttcagctacgacatcatggacccggagaacccccacggccgcaacaccgaggacagcctcccccactccatgaagtccgtggttgtcagcccgttcttcgactggggcaatgaccagccaccgcgcaccccgtaccacgagaccgtgatctacgaggcgcatgtcaagggtatgaccatgacccacccggacatccccgagaacctccggggcacctatgccggtctggcacaccccaagatcatcgagtacctggtggatctgggcatcaccgccatcgagctcatgcccgtgcaccagttcatgcaggacgaccgcctgcgtgaactcggcctgcgcaactactggggatacaacaccttcgggttcttcgccccccagaatgactactcctcggcgagcaccccgggtgcggccgtcgccgagttcaaggccatggtgcgatccttccacgaggcgggcatcgaggtcatcctcgatgtggtgtacaaccacaccgccgagggcaaccacatgggcccgaccatctccttccgcggtattgacaacgaggcctactaccgcctcgtggacggcgatgaacgtcactacatggactacaccggtaccggcaactccctcaacgtgcgcgacccgcactccctgcagctgatcatggactccctgcggtactgggtcaccgagatgcatgtcgacggtttccgcttcgatctcgcctccaccctggcccgcgagctgcacgatgtggaccgcctggcgaccttcttcgacctggtccaacaggacccggtggtctcccaggtcaaactcatcgccgaaccatgggacatcggcgaaggcggctaccaggtcggtaacttcccaccactgtggaccgagtggaacggcaagtaccgcgacaccgtccgtgacttctggcgtggtgagccggccaccctcggtgagttcgcctcccgcctgaccggctcctcggacctgtacgcccacaatggtcgccgccccaccgcctcgatcaacttcgtcaccgcccacgacggtttcaccctcaacgacctggtcagctacaacgagaagcacaacatggccaacggtgaggacaaccgtgacggtgaatcccacaaccgttcctggaactgtggtgtcgagggccccaccgatgatccggagatcctgcagctgcgcgcccagcagcgtcgcaacttcctgaccaccctgttactctcccagggcacaccgatgatctcccacggtgatgagatggccaggacccagaacggcaacaacaatgtctactgccaggacaacgaattggcgtggatcaactgggatcaagccattgagcacaaggacctgctgagcttcacccgacgtctgctgcggatccgggccgagcacccggtgttccgtcgccgccggttcctcgccggtggcccgctgggctccgacgtccgcaaacgtgacatcgcctggttggtgccggacggacagctgatgacccaggacgactgggacttcgccttcggtaaatccctcatggtcttcctcaacggtgatgccatcgtcgaaccggattaccggggtcagaagatcgaggatgattccttcatcctcatgttcaacgcccaccatgaggccatcgacttcaccctccccccggagcatttcggtatgaaatggaagctgctggtggacaccaccgaggcgatcggttatccgctggaggagctcaccatcgaggctggcggaaccctcacggtgcccgcccgctccagcatgctgctgcgccagatcgaggcaccggattacaccaagctggatgagcgcatcgcacgtgaggcccgggaagtggaagaggcgcgcaagcgtgaatccaccgatgccgaggctgcgctgcgtgcctccgtaggtgccgccctgaaagccgaggaggaggctgtccagcacttcaccgagcgcaccaaggccagtgtcggtaccgagggagaggaatccgaggctgcggataccatccctggggaacttccggaggagaacaccggggaagacaccgctgaagagtccggcgacgcggacaaggtttccccggaggttgctgtggaagcagacgccgaggacgacagcgaggatgacgcggagtctgacacctcgacggacctcggggccgatgacaaggtcgtccacgcctcccgcgcggacaagcctgccgaggagacggagactctggatgaggacgaggagctgatgcgcaaacgtcaggctgctgcacaggaggatgactacgactcagccgaggatgagtactag

SEQ ID NO: 55804 - protein, 884 aa, Corynebacterium efficiens YS-314
MTSSSEHSYSVWPGDAYPLGSKYDGAGTNFALFSDVAESVELCLVDENDNETRIKLEEKDNNVWHCYLPGILPGQRYGYRVHGPWDPDNGKRCDASKFLVDPYARAFVGEYDGHPSLFSYDIMDPENPHGRNTEDSLPHSMKSVVVSPFFDWGNDQPPRTPYHETVIYEAHVKGMTMTHPDIPENLRGTYAGLAHPKIIEYLVDLGITAIELMPVHQFMQDDRLRELGLRNYWGYNTFGFFAPQNDYSSASTPGAAVAEFKAMVRSFHEAGIEVILDVVYNHTAEGNHMGPTISFRGIDNEAYYRLVDGDERHYMDYTGTGNSLNVRDPHSLQLIMDSLRYWVTEMHVDGFRFDLASTLARELHDVDRLATFFDLVQQDPVVSQVKLIAEPWDIGEGGYQVGNFPPLWTEWNGKYRDTVRDFWRGEPATLGEFASRLTGSSDLYAHNGRRPTASINFVTAHDGFTLNDLVSYNEKHNMANGEDNRDGESHNRSWNCGVEGPTDDPEILQLRAQQRRNFLTTLLLSQGTPMISHGDEMARTQNGNNNVYCQDNELAWINWDQAIEHKDLLSFTRRLLRIRAEHPVFRRRRFLAGGPLGSDVRKRDIAWLVPDGQLMTQDDWDFAFGKSLMVFLNGDAIVEPDYRGQKIEDDSFILMFNAHHEAIDFTLPPEHFGMKWKLLVDTTEAIGYPLEELTIEAGGTLTVPARSSMLLRQIEAPDYTKLDERIAREAREVEEARKRESTDAEAALRASVGAALKAEEEAVQHFTERTKASVGTEGEESEAADTIPGELPEENTGEDTAEESGDADKVSPEVAVEADAEDDSEDDAESDTSTDLGADDKVVHASRADKPAEETETLDEDEELMRKRQAAAQEDDYDSAEDEY

SEQ ID NO: 55805 - DNA, 2154 bp, Pseudomonas putida KT2440
  CDS (1)..(2154): transl_table=11
atgagcccccgcaccccaaagaaaacccgctcggtcgcaccatcgcgcattcgcgaaggcatgcccttccccctcggcgccacctgggatggccttggggtcaacttcgctctcttctcggccaacgccaccaaggtcgagctgtgcctgttcgactccaccggcgagcaggaactcgagcgcatagagctgcccgaatacaccgatgagatctaccatggctacctcccggacgctcaccccggcctggtctatggctaccgggtgtatggcccctacgagccggaaaacggccaccgcttcaaccccaacaaactgctgatcgacccgtatgccaagcaactggtcggcagcctgaaatggtccgaggcactgttcggctacaccatcggccaccccgatggtgacctgtcgttcgacgagcgcgacagcgcgcctttcgtgcccaaatgcaaggttatcgacccggcgttcacctggggccgcgaccagcgcgtgcagatcccatgggagcgcacgatcatctatgaagcgcatgcccgcggcatcagcatgcgccacccggctgtgcctgaagaactgcgcggcaccttcgccggcctggccaacgacgagttgctcaaacacatcaaggaccttggtgtgtcgagcatcgagctgttgccgattcacgccttcgtcaacgaccagcacctgctggacaagggcctgaacaactactggggctacaacagcatcgcctttttcgccccgcacccgcgctacctggccagcggcaagatcgccgagttcaaggagatggtcgcgcacctgcacgacgcggggcttgaggtgatcctggacgtggtctacaaccacaccgccgaaggcaacgagcgcggcccgaccctgtcgatgcgcggcatcgacaacgcctcgtactaccgcctgatgccggacgacaagcgctactacatcaacgactccggcaccggcaacaccctggacctgagccacccctgcgtgctgcagttggtcaccgactcgcttcgctactgggccggcgaaatgcacgtggacggttttcgcttcgacctggcgaccatccttggccgttaccacgatggctacagcgagcgtcatggcttcctggtcgcctgccgccaggacccgatgctgagccaggtcaagctgattgccgaaccgtgggattgcggccccggcggctaccaggtgggcaacttcgccccgggctgggcggaatggaacgaccgcttccgcgataccgcacgcgccttctggaaaggcgacgaaggccagctggccgattttgccgcgcgcttgaccgcctcgggcgacatgttcaacaaccgcgggcgccggccctattcctcggtcaacttcatcaccgcccacgacggtttcaccctgcgcgacctggtgtcctacaaccacaagcacaacgaagacaacgacgaaaacaaccaggacggcaccgacaacaacctgtcgtggaactgcggcgtcgaagggccgaccgacgacccggcgatcaatgccctgcgcatgcgccagatgcgcaactacttcgccaccttgctgctggcccagggcacgccaatgatcgttgccggcgacgagttcagccgcacccagcacggcaacaacaacgcttactgccaggacagcgagatcggctgggtgaactgggacctggacgaggaaggccaagagctgctggccttcgtcaagcgcctgacgcgcctgcgcctggcctacccggtgctgcgccgctcgcgctttctggtgggtgactacaatgaggcaattggggtcaaggacgtgacctggctggcacccgatggcagcgagatgagcgttgagcaatgggaagacccacacgggcgttgcctgggcatgctgatagatggccgggcgcaggtcagcggtatcgcccggccaggtgccgaggccaccgtgttgctgatcgtcaatgcccaccatgacatcgtgccattcaagctaccggccgtgcccgaaggcgattactggagctgcctggtcgataccgaccggccggagttgcgcaaggggcagcacctgcaattcgatagtacgttcgaggtgaagggtcggtcgatgctgctgatggtgttgcagtacgacgaggagtga

SEQ ID NO: 55806 - protein, 717 aa, Pseudomonas putida KT2440
MSPRTPKKTRSVAPSRIREGMPFPLGATWDGLGVNFALFSANATKVELCLFDSTGEQELERIELPEYTDEIYHGYLPDAHPGLVYGYRVYGPYEPENGHRFNPNKLLIDPYAKQLVGSLKWSEALFGYTIGHPDGDLSFDERDSAPFVPKCKVIDPAFTWGRDQRVQIPWERTIIYEAHARGISMRHPAVPEELRGTFAGLANDELLKHIKDLGVSSIELLPIHAFVNDQHLLDKGLNNYWGYNSIAFFAPHPRYLASGKIAEFKEMVAHLHDAGLEVILDVVYNHTAEGNERGPTLSMRGIDNASYYRLMPDDKRYYINDSGTGNTLDLSHPCVLQLVTDSLRYWAGEMHVDGFRFDLATILGRYHDGYSERHGFLVACRQDPMLSQVKLIAEPWDCGPGGYQVGNFAPGWAEWNDRFRDTARAFWKGDEGQLADFAARLTASGDMFNNRGRRPYSSVNFITAHDGFTLRDLVSYNHKHNEDNDENNQDGTDNNLSWNCGVEGPTDDPAINALRMRQMRNYFATLLLAQGTPMIVAGDEFSRTQHGNNNAYCQDSEIGWVNWDLDEEGQELLAFVKRLTRLRLAYPVLRRSRFLVGDYNEAIGVKDVTWLAPDGSEMSVEQWEDPHGRCLGMLIDGRAQVSGIARPGAEATVLLIVNAHHDIVPFKLPAVPEGDYWSCLVDTDRPELRKGQHLQFDSTFEVKGRSMLLMVLQYDEE

SEQ ID NO: 55807 - DNA, 2079 bp, Bradyrhizobium japonicum USDA 110
  CDS (1)..(2079): transl_table=11
atgcgcctgactgccggatcgcccgcacgcctcggcgcaagctgggacggacgcggcaccaacttcgcgctgttctcggccaacgcgcagaaggtcgagctctgcctgttcgacacgcaaggccgccgcgagctcgagcgcgtcgaattgccggaacggaccgaggacgtctggcacggctatctcaacgacgtctcgccgggccagctctatggctatcgcgtacacggcccctacgagcccgagcacggccaccgcttcaacgccaacaagctgctgctcgatccctatgccaagcggctctccggacgactggtctggagcgatgcgcatttcgcctaccgcaccggcagcccgcgcgaggacctgtccttcgaccggcgcgacaatgcgcgcggcatgcccaaagccgtcgtggtcgacgagaccttcaactggggccggcgcgagatccgccccaacatcgcctgggaagacacgatcatctacgaggcccacgtcaagggcctgacgcagaagcgcgacgacgtcccgccgaacttgcgcggcacctatggcggcctgtcgtcgccggcgatgatcgagcatctgaagaagcttggcgtcaccacgatcgagctgctgccgatccacagtttcgtcgacgaccgcatattggtcgagaagaagctcgccaattactggggctacaacacgctgtccttcttcgcgcccgagccccgctacgcccaggacaacgcgctcgattccttccgcaccacggtcgcgcgcctgcacgatgccggcatcgaggtgatgctcgacgtcgtctacaaccacaccgccgaaggcaaccacctcggcccgacgctgtgctaccgcggcatcgacaacgcctcctattactggctgaaccgcgagaacccgcgctattacgacgatttcaccggctgcggctcgtcggtgaacctcacccatccgcgcgtgctgcagatggtgatggattccctgcgctactgggtcgaggtatgccatgtcgacggcttccgcttcgacctcgccacgaccctcgcgcgcgggcccaacggttttgatcgcggcagctcgctcctgaccgcgatccggcaggatccggtgctggccgccgtcaagctcgtcgccgagccgtgggacctcgggcttggcggctaccaggtcggggcgttcccctcgcaatggtcggagtggaatgaccgctatcgcagcgccatgcgccgctactggagcggcgaaggcagcctgatcggcgacatctccagccgcatgacggcatcgtccgacctgttcaaccacgacggacgtcggccgcgcgccagcatcaaccacatcaccgtgcatgatggcttcacgctggccgacctgttcagctacaacgagaagcacaacgaggccaatggcgaggacaatcgcgacggctccaacgacaaccacagcaacaattgcggtgtcgaagggccgaccgacgatcccgggattctcggtctgcgccgccagcttcgcaagaacgtgctggcctgcctgatgctggcgcagggcgttcccctgcttctcgccggcgacgaggtcggcaattcgcaatccggcaacaacaacgcctattgccaggacaacgaggtcggctgggtcggctggggcaatctcggcaaggacggcgacgacatggtcgatttcgtcgccggtctcgccgacatccgccgccgcttctcgcagcttcgcagccatcgctggctcgacgggcgccccaaagacggcctctcctacggcgcgctgtggctgacgcctgccggagaggagatgacggagaacgactggaaattcccggaagggcggttcctctcctatgtgatggggccgatggaaccgggcggggccgcgatctttatcgtcctgaacgccgctcccgaagagatcgcattcaaattgcccaagatgaccgaatataagagctggcagcagatcctcaacacgaccgatgccaagctgaacacgatcgacttccagcctggaagcgacagcaaggcgccgccgcgctccgtgctcgccttcgcgggggcgctatga

SEQ ID NO: 55808 - protein, 692 aa, Bradyrhizobium japonicum USDA 110
MRLTAGSPARLGASWDGRGTNFALFSANAQKVELCLFDTQGRRELERVELPERTEDVWHGYLNDVSPGQLYGYRVHGPYEPEHGHRFNANKLLLDPYAKRLSGRLVWSDAHFAYRTGSPREDLSFDRRDNARGMPKAVVVDETFNWGRREIRPNIAWEDTIIYEAHVKGLTQKRDDVPPNLRGTYGGLSSPAMIEHLKKLGVTTIELLPIHSFVDDRILVEKKLANYWGYNTLSFFAPEPRYAQDNALDSFRTTVARLHDAGIEVMLDVVYNHTAEGNHLGPTLCYRGIDNASYYWLNRENPRYYDDFTGCGSSVNLTHPRVLQMVMDSLRYWVEVCHVDGFRFDLATTLARGPNGFDRGSSLLTAIRQDPVLAAVKLVAEPWDLGLGGYQVGAFPSQWSEWNDRYRSAMRRYWSGEGSLIGDISSRMTASSDLFNHDGRRPRASINHITVHDGFTLADLFSYNEKHNEANGEDNRDGSNDNHSNNCGVEGPTDDPGILGLRRQLRKNVLACLMLAQGVPLLLAGDEVGNSQSGNNNAYCQDNEVGWVGWGNLGKDGDDMVDFVAGLADIRRRFSQLRSHRWLDGRPKDGLSYGALWLTPAGEEMTENDWKFPEGRFLSYVMGPMEPGGAAIFIVLNAAPEEIAFKLPKMTEYKSWQQILNTTDAKLNTIDFQPGSDSKAPPRSVLAFAGAL

SEQ ID NO: 55809 - DNA, 2184 bp, Pseudomonas syringae pv. tomato str. DC3000
  CDS (1)..(2184): transl_table=11
atgaatacgaagtcaactccagcggcagatgaaagctccgcttcgcacgacagttctgccagcaccccgacgcgcattcgtgaagggcttcccttccctctcggtgccagctgggatggtctgggtgtaaacttcgccctgttctcggccaacgccaccaaagtcgaactctgcctgttcgattcgaccggtgaagtagagctggagcgtatcgagcttccggaatacaccgacgagatctaccacggctatctgcccgacgctcaccctgggctgatttacggctaccgtgtttatggtccttacgatccgaagaacggccatcgcttcaaccacaacaaattgctgatcgacccgtacgccaagcagttggtcggtgagctcaaatggtcggaagcgttgttcggctacaccatcggccatgctgacggcgacctgagcttcgacgagcgcgacagcgcgccgttcgtgccaaaaagcaaggtgattgacgaggcctacacttggggccgcgatcagcgcgtcggtacgccgtgggacaagaccattttctatgagacccacgtgcgcggcatcaccatgcgccaccctgaggtcgcggaagagttacgcggtacgtttgcaggcctgggatcagcgcccgtcgtcgatcacatccgcaagctgggcgtgacgtctgtcgagctgctgccgatccatgcgttcgtcaacgatcagcatttgttgcaaaaaggcatgaccaactactggggctataacagcatcgcgttcttcgccccggacccgcgctacctggccagcggcaagatcgccgagttcaaggaaatggtcgcacacctgcaccatgcaggcctggaggtcattctcgacgtggtctacaaccacaccgccgaaggcaacgagctgggtccgaccctgtcgatgcgcggtatcgacaacgcctcatattaccggctgatgccggacgacaaacgctattacatcaacgattccggtaccggcaacaccctcgacctgagccacccttgcgtattgcagatggtcaccgactcgctgcgttattgggcgtcggaaatgcacgtcgacggcttccgtttcgacctggcaaccattctcggtcgttaccacgatggtttcgatgagcgtcacagcttcctggttgcgtgccgtcaggacccggtcctgcgtcaggtcaaactggtcgccgagccttgggattgcggcccgggtggctatcaagtgggcggcttcccgccgggctggatggaatggaacgacaagttccgtgacaccgtgcgggccttctggaaaggcgacgaaggccaactggccgacttcgctgcacgcatgaccgcttcgggcaacatgttcaaccagcgcggtcgccgccctcaggcgtcggtgaacttcatcactgcgcacgatggcttcacgctgcacgacctggtgtcgtacaacgacaagcacaacgaggccaacgacgaaaacaaccaggacggcagcaataacaacgtgtcctggaaccacggcgtcgaaggtccgaccgaagacccggaaatcaacaccctgcgtctgcgccagatgcgtaacttcttcgccacattgctgctggctcaaggcacgccgatgatcgttgccggtgatgaattcgcgcgcactcagcacggcaacaacaatgcctattgccaggacagtgaaattggctggatcaactgggacctggacgaagacggcgaagcgctgctcaagttcgtcacccgtgtgatcaagttgcgtcagagctaccctatcctgcgtcgtagccgctttttggtcggcgactacaacgaagaaatcggcgtcaaggacgtaacctggcttgcgccaagtggcgaagaaatgagtgtcgagcagtggcacgatgccaacggccgctgcctgggcatgctgatggatggccgcgcgcaggaaaccggcattcgtcgtccgggtgccgacgccacgctgctgttggtggtcaactcgcaccatgacggcgtcaacttcaccttgccgcaagtaccggaaggcacccattacgagtgcctgatcgacactaatcaggacgatgcacgcagcaaggagcagtttgcgttcggttcgcattacaccgtcaccccacgttcgctgctgctgtttgaagtcaagcgtgaagatcagcaatga

SEQ ID NO: 55810 - protein, 727 aa, Pseudomonas syringae pv. tomato str. DC3000
MNTKSTPAADESSASHDSSASTPTRIREGLPFPLGASWDGLGVNFALFSANATKVELCLFDSTGEVELERIELPEYTDEIYHGYLPDAHPGLIYGYRVYGPYDPKNGHRFNHNKLLIDPYAKQLVGELKWSEALFGYTIGHADGDLSFDERDSAPFVPKSKVIDEAYTWGRDQRVGTPWDKTIFYETHVRGITMRHPEVAEELRGTFAGLGSAPVVDHIRKLGVTSVELLPIHAFVNDQHLLQKGMTNYWGYNSIAFFAPDPRYLASGKIAEFKEMVAHLHHAGLEVILDVVYNHTAEGNELGPTLSMRGIDNASYYRLMPDDKRYYINDSGTGNTLDLSHPCVLQMVTDSLRYWASEMHVDGFRFDLATILGRYHDGFDERHSFLVACRQDPVLRQVKLVAEPWDCGPGGYQVGGFPPGWMEWNDKFRDTVRAFWKGDEGQLADFAARMTASGNMFNQRGRRPQASVNFITAHDGFTLHDLVSYNDKHNEANDENNQDGSNNNVSWNHGVEGPTEDPEINTLRLRQMRNFFATLLLAQGTPMIVAGDEFARTQHGNNNAYCQDSEIGWINWDLDEDGEALLKFVTRVIKLRQSYPILRRSRFLVGDYNEEIGVKDVTWLAPSGEEMSVEQWHDANGRCLGMLMDGRAQETGIRRPGADATLLLVVNSHHDGVNFTLPQVPEGTHYECLIDTNQDDARSKEQFAFGSHYTVTPRSLLLFEVKREDQQ

SEQ ID NO: 55811 - DNA, 2202 bp, Rhodopirellula baltica SH 1
  CDS (1)..(2202): transl_table=11
atgcctgaccggttcgtcacatgtgggttcagcgaacttcgccgagcacacgatggtctcgaaggaccacgacagccgaatcaggccagcgactcaaggagcgatctctacatgctgatgcgacaaccgtgccccgatcttcagttcgcctactccccgccattcggagcgacgctcacggagaagggagtgcagttttcggtcttcagccgttccgcaaccgaaatgcggttgttgctgtacaacaaggtgaccgatcgcgaaccagctcaagtcattgacttcgatcggggaaccgaccgttggggtgacgtttggagcttgcacgtaccgggcctcgaagcaggccaactttatcatttccaagccagcggaccctgggaacctgaaaatggtcaccggttcgattccacggctcggttgatcgatccttatgctcaggcgttggcgggaacctaccaaaagcaaaccgatggtgtcgtgcgtccgccaaagtgcgtggtcgtcgatggcacgtttgattgggaaggcgatcgtcacgttcgtcgtgacgtcagcgaatcgatcatttatgaaatgcacgttcgtggtttcaccaagagcaagaccgccaaagtcaaagctcctggcagttacctcggtgtgattgaaaagattccatatctgaagtcattgggcgtcacttcggttgaattgatgccggtgcacgagttccccattcgggacccgcagggcaaaaagctctcgcgaccaaactattgggggtatgacccgatggcgttcttcgcgcctcatcgcggttatgcacacgactcggctcctggtgctcaggtcaacgagttcaagcagatggtcaaggctctgcactccgcggggatcgaagtcattcttgacgttgtgttcaaccacacctgcgaaggcaacgaacaaggtccgacgctgtcattcaaaggacttgaaaaccaagtctattacatcctttcggaaggccagcattactgcaactacagcggttgcggcaacacgatcaatgggaatcaccccgtcgttcgcgagatgatttttcattgcttgcgacactgggtccacaactaccacatcgatggcttccggttcgacctggccagtattttgagccgcgataggagcgggaacttgattcccaacccaccgatggtggaactgatcgcggaagatccgatgttggccgacaccaagatcattgctgaagcctgggacgcagcgggtgcctaccaagtcggtagctttggcaatcaccgctgggcggaatggaacggtcgataccgtgacgatgtgcgaggtttttggcgtggtgatgctggaactctcggcccgctggcaactcgattggcaggcagcagcgatttgtatcaacacgccggacgtccgccgtcttgcagtgtgaacttggtgaccacgcatgatggtttcaccatgaacgatttggtttcgtacaaggacaagcacaacgaagccaacggtgaagacaacaacgacggtgacaaccacaacatcagtgacaactatggtgtggaaggcccgacgcgaaagaaggcgatcagcacgatccgcagccagcaagttcgcaacatgttggcgacgttgttgaccagccaaggcgtgccaatgatcgtcagcggtgacgaggctcgccgaacgcagaagggtaacaacaacgcctactgccaagacactgatatctcgtggttcgattggcgactcgtcgaaaagaacgctgacttggtccgctttgtcagtgcattgattgatttccgaaagaaccaaccaacgatccgtcgtcgcgaatacttgactggtcaaccggttgatggtcggaaggtgccggacgtgtcttggtacggtccatcgggcgacccgttgaattgggatcaaggtgaattggcgatggcggcatacattgctgccccgagccgaatcgatgatccggaaggtttgggacgagacgtgatcttgatgttcaacagcaccggcgatcaccgcgaattccacttcccggcgattgctcgtggaactcagtggaatctgtttgtcgacaccgcggcagcaccgccagaagacatctaccctgatgtcgatggtccaatgcctccgaacaatcgaatcgtcgaagttgggcgtcattcaatgcggatctatgtctgtaacgcgccgccaaagtaa

SEQ ID NO: 55812 - protein, 733 aa, Rhodopirellula baltica SH 1
MPDRFVTCGFSELRRAHDGLEGPRQPNQASDSRSDLYMLMRQPCPDLQFAYSPPFGATLTEKGVQFSVFSRSATEMRLLLYNKVTDREPAQVIDFDRGTDRWGDVWSLHVPGLEAGQLYHFQASGPWEPENGHRFDSTARLIDPYAQALAGTYQKQTDGVVRPPKCVVVDGTFDWEGDRHVRRDVSESIIYEMHVRGFTKSKTAKVKAPGSYLGVIEKIPYLKSLGVTSVELMPVHEFPIRDPQGKKLSRPNYWGYDPMAFFAPHRGYAHDSAPGAQVNEFKQMVKALHSAGIEVILDVVFNHTCEGNEQGPTLSFKGLENQVYYILSEGQHYCNYSGCGNTINGNHPVVREMIFHCLRHWVHNYHIDGFRFDLASILSRDRSGNLIPNPPMVELIAEDPMLADTKIIAEAWDAAGAYQVGSFGNHRWAEWNGRYRDDVRGFWRGDAGTLGPLATRLAGSSDLYQHAGRPPSCSVNLVTTHDGFTMNDLVSYKDKHNEANGEDNNDGDNHNISDNYGVEGPTRKKAISTIRSQQVRNMLATLLTSQGVPMIVSGDEARRTQKGNNNAYCQDTDISWFDWRLVEKNADLVRFVSALIDFRKNQPTIRRREYLTGQPVDGRKVPDVSWYGPSGDPLNWDQGELAMAAYIAAPSRIDDPEGLGRDVILMFNSTGDHREFHFPAIARGTQWNLFVDTAAAPPEDIYPDVDGPMPPNNRIVEVGRHSMRIYVCNAPPK

SEQ ID NO: 55813 - DNA, 2115 bp, Prochlorococcus marinus str. MIT 9313
  CDS (1)..(2115): transl_table=11
gtgcccaatgctttctgcctcgccgcagacacagctgtaagcaagatgcatctcggcacgccttggcccctgggcagcacgatcacaacacgaggcgtcaatttctctgtggccgccccaactgcaaagcgcgtggagctgctgctgtttgccgatgcaaatgccacgcagccagaacacatcctcaagctccagccttgccatcgatccggcgactactggcatgttgaggtggaaggattgcaaactggctgctgttatggctatcggatcttcggcccccacaaccctggcagcgatagctttcacccctccaaggtgctgcttgatccctgcacaagagccatcagtggctgggacatctatcaaagagaacaggccaagggatcgtcgcccaatatccaagcctgcctaaagggagtggtgtgcgaacgagaacattttgacttcgcatcccatccacgccccaggaccccatgggaccggagcgtgatctacgaactgcatgtaggggggttcagcagtggcccgaagtcagaggtaacacctcagcgccaaggcaccttcctgggactcattgacaaacttccctatctgcgaaaactgggtatcacggccatagagctgctacctatttttgctttcgatccctctgatgcgccaacggggcgggacaactactggggctacagccctctgaactggttcactccccatcccaaatatgtgcatggtgacgatccactgcaggctcgccaacaagtccgcgagctggttgcggcctgtcatgacgagggtattgaagtcatccttgacgtggtctacaaccacaccacagaaggcagcattgatggccccacactcagctggcgaggcttcagcgatgctctctattaccaccaaaacgacagtggcgaatacctggatgtaagtggttgcggcaacagcatcgccgccaatcgtccaatcgtgaggcagctgattctcgagtcgatgcgttgctgggccatcgaactaggagtcgatggcttccgcttcgatctagggatcgccctgagccgaggcgaaggcctaaagccgctcgaacaacctcccctatttgaagagattgaagctgatccagagctcagcgatttaaaactgtttagcgaaccatgggattgcggtggcctctatcgactcagcgatttcccagcacaccgaatcggaacatggaatggccattaccgagatgacctacgtgccttctggaaaggagacgaagacagcgcctggaggatgggacaacgcctaagcggaagtgctgatctctacaaaggtgagccagctccgctgggacgttccctgaacttcatcactgcacacgatggcttcacactcaatgacctggtgagtttcaaccgcaaacacaatctcgccaatggagagtgcaaccgcgacggtgaaaatcacaacaacagctggaacaacggcattgaaggcccctgcagtgaccatgccgtgcaggccctccgccatcgccagatgcgcaatctgatcgccaccctgttgctttcaagaggagtgccaatgcttttgatgggagatgaagtgggccgcagccagggggggaacaacaacagctggtgtcaggacaacccgctcggctggatgctctggaaccctgaacaatgcgatatggatttgcacctcttcgtcagcaggctgctcatgattcgccaccaactttcggaactcttctctcccgtcaatcacccccctgaggagatgcccgtacgtctgcagcagagtccagacgatctctggatgcaatggcatggtgttgagatcgacaagcccgattggggcagctggtcccataccatctgctacagcctgaatcgaggctccagcggtgcggtgatgtggatgggcttcaacgcctacagcaaagccatgcactttgatctgcctgaaccgacttctgcgtggcaccgcatcctggacacagcacgtcctagccctgatgacctacccgcaaggcctaatgcatggacttcagaggacattgatctgcagaaccacagcatgttgatcttgctggcagaggaatacgcctcaaaactcaagctctaa

SEQ ID NO: 55814 - protein, 704 aa, Prochlorococcus marinus str. MIT 9313
MPNAFCLAADTAVSKMHLGTPWPLGSTITTRGVNFSVAAPTAKRVELLLFADANATQPEHILKLQPCHRSGDYWHVEVEGLQTGCCYGYRIFGPHNPGSDSFHPSKVLLDPCTRAISGWDIYQREQAKGSSPNIQACLKGVVCEREHFDFASHPRPRTPWDRSVIYELHVGGFSSGPKSEVTPQRQGTFLGLIDKLPYLRKLGITAIELLPIFAFDPSDAPTGRDNYWGYSPLNWFTPHPKYVHGDDPLQARQQVRELVAACHDEGIEVILDVVYNHTTEGSIDGPTLSWRGFSDALYYHQNDSGEYLDVSGCGNSIAANRPIVRQLILESMRCWAIELGVDGFRFDLGIALSRGEGLKPLEQPPLFEEIEADPELSDLKLFSEPWDCGGLYRLSDFPAHRIGTWNGHYRDDLRAFWKGDEDSAWRMGQRLSGSADLYKGEPAPLGRSLNFITAHDGFTLNDLVSFNRKHNLANGECNRDGENHNNSWNNGIEGPCSDHAVQALRHRQMRNLIATLLLSRGVPMLLMGDEVGRSQGGNNNSWCQDNPLGWMLWNPEQCDMDLHLFVSRLLMIRHQLSELFSPVNHPPEEMPVRLQQSPDDLWMQWHGVEIDKPDWGSWSHTICYSLNRGSSGAVMWMGFNAYSKAMHFDLPEPTSAWHRILDTARPSPDDLPARPNAWTSEDIDLQNHSMLILLAEEYASKLKL

SEQ ID NO: 55815 - DNA, 2208 bp, Corynebacterium diphtheriae NCTC 13129
  CDS (1)..(2208): transl_table=11
atgaacgactcccctgtgacgtccgatcgtcaaatctggcccggacaaagctacccactgggctctaaatacgacggagcaggtacgaactttgctatcttctctgacgttgccgaaaaagttgagctctgcctcatcgacgcagagtgcaatgaggaaagaatcctcctcgacgaagttgatgcccacatctggcactgctacctcccaggcgtcaaacctggccaacgctatggcttccgcgtccatggcccctataaccctgctgaaggcaaacgttgcgatcccagcaaactactagtcgatccatatgcacgcgcttttgacggtgaattcgatggacatccatcgctgtttagttatgacatcaacgatccagaaaatcccgagggtcgcaatactgaagatagtctcgagcacaccatgaagtcggttgtagtgaatcctttctttgactggggttcagaccgcagcccaaacacgccgtacaacgagacagtaatctacgaagctcatgtcaagggcatgacgatgcgccacccagacgtacccgaatccctccgtggtacttatgctggtctagcgcatccttcgatcatcgaacatctcaaagaccttggcatcactgcaatcgagctcatgccagtgcatcagttcctgcaagatgaccgcctccgcgacttgggattacgtaactattggggctataacacctttggtttctttgcacctcaacaagattatgcggcggcccaagagccaggtggggctgtctccgagttcaaaggaatggtgcgcgctttccacgaagcaggcatcgaggtcatcctcgacgtggtctataaccacaccgcggagggaaaccacatgggtcccacgatcgcattccgcggcatcgacaatgaggcatactaccgcctcgttgacggagataaagcccactacatggactacacgggcaccggaaattcactcaacgtccgagatccgcatccattgcaaatgatcatggattccctgcgttactgggtctcagagatgcacgttgatggtttccgattcgacttagcttccactttggctcgtgaactacacgacgtggataagctcgctacattcttcgatcttgtccaacaagatccgattgtttctcaagtcaaactcatcgccgagccttgggatgtgggcgagggcggttaccaagtgggtaatttcccgcctctttggactgagtggaatggaaaataccgcgatactgtccgtgatttctggcgtggtgagccgtcgacactcggcgaatttgcttctcgtcttactggctcttcagacctatacgccaataatggtcgccgccctacggcttctatcaacttcatcacggctcacgacggcttcacgctcaatgacctagtcagctacaaccacaagcacaacgatgcaaatggagaagacggtcgggatggggaaagccacaatcgttcatggaactgcggcgaagaaggccccaccgaagatcctaggatcaacaaattacgtgcacgtcaacgacgtaatttcctcacaacgcttttgctcagccaaggcacccccatgattgcccatggcgatgaaatggcgcgtactcaagatggcaataacaatgtttactgccaagacaatgagacgtcgtggatggattgggagctagcagacaaaaacgctgcgttgatggagttcaccaaacggctcattacgatccgccgtaaccatcctgtgtttagacgccggcgcttcttggctgggggtccgttgggatcagaagtaggcgaccgcgatattgcgtggctggttccttctggcaagttgatgggtcaaagcgactgggatttcgcctttggcaagtccctcatggtctacttcaatggcaaggccatccaagaacccgatgcgcgcggccaacgcattgaaggtgactccttcatcatgatgttcaatgcctatcatgagccgatcgactttactcttcctgacaccgagttcggtccagcgtggaaacttatcgtcgataccaatgttgatactggctaccctgacgaagcaaagacgcttcgcgcaggcgactcgattaccgtcgaagcacgcagcacgctgatccttcgactcgtcgacaccacacataagtcccagactgtggaaaaggatcgtcgagacgacgactacagtgactag

SEQ ID NO: 55816 - protein, 735 aa, Corynebacterium diphtheriae NCTC 13129
MNDSPVTSDRQIWPGQSYPLGSKYDGAGTNFAIFSDVAEKVELCLIDAECNEERILLDEVDAHIWHCYLPGVKPGQRYGFRVHGPYNPAEGKRCDPSKLLVDPYARAFDGEFDGHPSLFSYDINDPENPEGRNTEDSLEHTMKSVVVNPFFDWGSDRSPNTPYNETVIYEAHVKGMTMRHPDVPESLRGTYAGLAHPSIIEHLKDLGITAIELMPVHQFLQDDRLRDLGLRNYWGYNTFGFFAPQQDYAAAQEPGGAVSEFKGMVRAFHEAGIEVILDVVYNHTAEGNHMGPTIAFRGIDNEAYYRLVDGDKAHYMDYTGTGNSLNVRDPHPLQMIMDSLRYWVSEMHVDGFRFDLASTLARELHDVDKLATFFDLVQQDPIVSQVKLIAEPWDVGEGGYQVGNFPPLWTEWNGKYRDTVRDFWRGEPSTLGEFASRLTGSSDLYANNGRRPTASINFITAHDGFTLNDLVSYNHKHNDANGEDGRDGESHNRSWNCGEEGPTEDPRINKLRARQRRNFLTTLLLSQGTPMIAHGDEMARTQDGNNNVYCQDNETSWMDWELADKNAALMEFTKRLITIRRNHPVFRRRRFLAGGPLGSEVGDRDIAWLVPSGKLMGQSDWDFAFGKSLMVYFNGKAIQEPDARGQRIEGDSFIMMFNAYHEPIDFTLPDTEFGPAWKLIVDTNVDTGYPDEAKTLRAGDSITVEARSTLILRLVDTTHKSQTVEKDRRDDDYSD

SEQ ID NO: 55817 - DNA, 2082 bp, Rhodopseudomonas palustris CGA009
  CDS (1)..(2082): transl_table=11
atgcgcctcaccgccggaaccgactcccgtctcggagcgacctgggacgggcgcggcaccaacttcgccctgttctccgccaacgctcacaaggtggagctctgcctgttcgacgcccagggccggcgcgagctggaacggatcgaactgccggagcgcaccgaagacgtctggcacggctacctcaacgacgtctcgcccgggcagctctacggctatcgggtgcatggcccgtacgatcccgatcgcggccatcgcttcaacgctcacaagctgctgctcgacccctatgcgaagcggctgaacggacggctggtgtggagcgaggcgcacttcgcctatcgcaccggctcgccacgcgaggacctgtcgttcgaccgccgcgacaacgcgcgcggcatgccgaaggtcgtcgtggtcgacgagaccgtcggcagcggccgccgcgagacgcggcccggtgtgcgctgggaagacaccatcgtgtacgaggcccacgtcaaaggcctgacccagcttcgcgacgatgtaccgcccggactgcgcggcaccttcggcggcctcgcctgcccgaccatgatcgcacatttgaagcggctcggcgtcaccacgattgaacttttgccggtccaaggctttgtcgatgaccgcgtcctggtcgagaagaagcttgtgaactactggggatacaacaccatctcgttcttcgcgccggaggcccgttacgcgccggacaaagacaatccactggactcgttccgcaccaccgtggcgcggctgcacgatgccggcatcgaggtgctgctcgatgtggtctacaaccacaccgccgagggcaatcatctcgggcccacgctgtcgttccgaggcatcgacaacgcctcgtactactggctgaagcccgacaacccgcgctactacgacgacttcaccggctgcggcaattcgatgaacctcacccatccgcgggtactgcagatggtgatggacagcctgcgctactgggtcgaagtctgccacgtcgacggctttcggttcgatctcgccaccacgctggcacgcggctcgaacggcttcgatcgcaactcgggtttcttcaccgcgatccgtcaggatccaatcctggcaggcgtcaagcttgtcgccgagccgtgggatctcggcatggggggctatcaggtcggtgcgttcccgtcacaatggtcggagtggaacgaccgctatcgcagcgtgatgcgacgttactggagcggcgaaggcagcctgatcggcgaagtgtcgcggcgcatgacgggctcgtccgatatgttcaatcgcgacggccggatgccgcgcgcaagcatcaaccacgtcaccgtgcacgacggcttcacgcttgccgacctgttcagctacgagcgcaagcacaacgttgccaacggtgaggacaaccgcgacggctccaacgacaatcacagcatcaactgcggcgtcgaaggtccgaccgacgatccgaagctcctcgggatgcgtcgccagctccgcaagaaccagctcgcctgcctgttcctggcgcagggcgtgccgctgctgctcgccggcgacgaggtcggcaattctcaggccggcaacaacaacgcctattgccaggacaacgagatcggctgggtcggctgggacgggaccaacaccgaagacgacatggtggaattcgtcggactgatgaccgatatccgccgccgcttcccgcagctacgctcgcggcgctggctcgacggacgccgcgccgacggctcctacggcgtgctgtggctaacgccgtccgccgccgaaatgaccgatcaggattgggcgttcccggatggccgcttcctggcttacgtgctcagcccgagcgagccgggcggcagcgcgatcttcatcgtgctgaattcgggcgtgcaggagatcgaattccacctgccgaagctgccggaatatcagacctggaaagaactgttcgacaccaccaagaacaccgtgcaggtggcgacgctgggctgcggcaatccgatgatcgcgccgccccgctccgtgttggcgttctccgggacgacggaatga

SEQ ID NO: 55818 - protein, 693 aa, Rhodopseudomonas palustris CGA009
MRLTAGTDSRLGATWDGRGTNFALFSANAHKVELCLFDAQGRRELERIELPERTEDVWHGYLNDVSPGQLYGYRVHGPYDPDRGHRFNAHKLLLDPYAKRLNGRLVWSEAHFAYRTGSPREDLSFDRRDNARGMPKVVVVDETVGSGRRETRPGVRWEDTIVYEAHVKGLTQLRDDVPPGLRGTFGGLACPTMIAHLKRLGVTTIELLPVQGFVDDRVLVEKKLVNYWGYNTISFFAPEARYAPDKDNPLDSFRTTVARLHDAGIEVLLDVVYNHTAEGNHLGPTLSFRGIDNASYYWLKPDNPRYYDDFTGCGNSMNLTHPRVLQMVMDSLRYWVEVCHVDGFRFDLATTLARGSNGFDRNSGFFTAIRQDPILAGVKLVAEPWDLGMGGYQVGAFPSQWSEWNDRYRSVMRRYWSGEGSLIGEVSRRMTGSSDMFNRDGRMPRASINHVTVHDGFTLADLFSYERKHNVANGEDNRDGSNDNHSINCGVEGPTDDPKLLGMRRQLRKNQLACLFLAQGVPLLLAGDEVGNSQAGNNNAYCQDNEIGWVGWDGTNTEDDMVEFVGLMTDIRRRFPQLRSRRWLDGRRADGSYGVLWLTPSAAEMTDQDWAFPDGRFLAYVLSPSEPGGSAIFIVLNSGVQEIEFHLPKLPEYQTWKELFDTTKNTVQVATLGCGNPMIAPPRSVLAFSGTTE

SEQ ID NO: 55819 - DNA, 2151 bp, Mycobacterium avium subsp. paratuberculosis K-10
  CDS (1)..(2151): transl_table=11
atgacctctgcaaaggctgccgctcccacgcccaccggagaggtgtggcctggcaaggcctacccgctgggcgccagctacgacggcgccggcaccaacttcgccgtgttcagcgaggtggccgagcgggtcgagttgtgcctgttcgacggcgacggcaccgagagccgggtggcgctgcccgaggtcgacggcttcgtctggcacgcctacatccccggcatcgaaccggggcagcgctacgggtatcgggtacacggcccctacgacccggcggccgggcagcggtgcaacccgaacaagctgctgctggacccgtattcgaaggcggtcgacggcaccttcgagtggaaccagtcgctgttcggctacaacttcggtgacccggacagccgcaacgacgacgactcggcgcccagcatgcccaagtccgtggtgatcaacccgtacttcgactggggcaacgaccgcccgccggaccaccactacgccgacaccgtcgtctacgaggcgcacgtcaagggcctcacccagacccaccccgacatccccgaacagatgcgcggcagctacggcgcggtggcgcacccggtgatcatcgagcacctgcagagcatcggggtcaccgcgatcgaactgatgccggtgcatcacttcgccaacgactccaccctgatcgagaagggcctgtccaactactggggctacaacaccatcggcttcttcgccccggacacgaaatactccagcgccgccacgccgggcgggcaggtgcaggagttcaaggccatggtgcgctcgctgcacgaggccggcatcgaggtcatcctcgacgtggtctacaaccacaccgccgagggcaatcacctgggccccaccctgtcgatgcgcggcatcgacaacgccgcctactaccggctggtcgacgacgacaagcggtactacatggactacaccggcaccggcaacagcctcaacgtcgggcacccgcacgccctgcagctgatcatggactcgctgcgctactgggtgaccgagatgcatgtcgacggattccgcttcgacctggccgccaccctggcccgcgagttctacgacgtcgaccggctggcgacgtttttcgaactggtgcaacaggatccgacggtcagccaggtcaagctgatcgccgaaccgtgggacgtcgggccgggcggctaccaggtgggcaacttcccgccgcagtggacggagtggaacggcaagtaccgcgacaccgtccgcgacttctggcgcggcgaacccgccaccctcgacgagttcgcctaccggctgtccggttcggccgacctgtacgaacacaccgggcgccggccggtcgcctcgatcaacttcgtcaccgcccacgacgggttcacgctgcgtgacctggtgtcctacaacgagaagcacaacgaggccaacggcgaggacaacaacgacggcgagagccacaaccggtcctggaactgcggcgccgagggaccgaccgacgacgagcaggtcaacgccctgcgggcccgccagcagcgcaatttcctgaccacgctgttgctgtcgcagggcgtgccgatgatctgtcacggcgacgagctgggccgcacccagaacggcaacaacaacggctactgccaggacaacgagctcacctggatcgactgggccaacgcggacgtggacctgctggccttcacccgggtggtgtcggcgctgcgcgccgagcacgcggtgttccgccggcgccggttcttctccggcaagccggtgggacggcgcggccaggacgggctgcgcgacatcgcctggttcacccccgacggcaccgagatgaccgacgaggactggggcgccaatttcgccaagtccgtcacggtgttcctcaacggccacggcatccccgaccgcgacgcccgcggtcaacggctgctggacgactcgttcctgctgtgcttcaacgcccaccacgagtccatcgaattcacccttcccccaaaggaattcggtgcatcatggcaggtcgtggtgtacaccgggccggaggagaccacgccagccgacgaggtgcccggtgccggcgtactcaacgtcgacgcccacaccgcggtggtgctgcgggcacccgacggcggctga

SEQ ID NO: 55820 - protein, 716 aa, Mycobacterium avium subsp. paratuberculosis K-10
MTSAKAAAPTPTGEVWPGKAYPLGASYDGAGTNFAVFSEVAERVELCLFDGDGTESRVALPEVDGFVWHAYIPGIEPGQRYGYRVHGPYDPAAGQRCNPNKLLLDPYSKAVDGTFEWNQSLFGYNFGDPDSRNDDDSAPSMPKSVVINPYFDWGNDRPPDHHYADTVVYEAHVKGLTQTHPDIPEQMRGSYGAVAHPVIIEHLQSIGVTAIELMPVHHFANDSTLIEKGLSNYWGYNTIGFFAPDTKYSSAATPGGQVQEFKAMVRSLHEAGIEVILDVVYNHTAEGNHLGPTLSMRGIDNAAYYRLVDDDKRYYMDYTGTGNSLNVGHPHALQLIMDSLRYWVTEMHVDGFRFDLAATLAREFYDVDRLATFFELVQQDPTVSQVKLIAEPWDVGPGGYQVGNFPPQWTEWNGKYRDTVRDFWRGEPATLDEFAYRLSGSADLYEHTGRRPVASINFVTAHDGFTLRDLVSYNEKHNEANGEDNNDGESHNRSWNCGAEGPTDDEQVNALRARQQRNFLTTLLLSQGVPMICHGDELGRTQNGNNNGYCQDNELTWIDWANADVDLLAFTRVVSALRAEHAVFRRRRFFSGKPVGRRGQDGLRDIAWFTPDGTEMTDEDWGANFAKSVTVFLNGHGIPDRDARGQRLLDDSFLLCFNAHHESIEFTLPPKEFGASWQVVVYTGPEETTPADEVPGAGVLNVDAHTAVVLRAPDGG

SEQ ID NO: 55821 - DNA, 2145 bp, Treponema denticola ATCC 35405
  CDS (1)..(2145): transl_table=11
atgatgaatatgaacgatttatctttttttcagggaaaagcttctccattaggcgcaaaattaagctgtgatggagtgaatttcagcgtcttttcacgaaatgcaaaggaaatagttctacacttatttgaaaatgtagaggattccgagccgataatctcatataaactggatcctcaaataaataaaaccggtgatgtttggcatgtgtttgtttccggtttaaaaagttgggcattttatttgtatacggctgacggagagttttctccttccgcgggttttttattcgatgaaaataattacttgcttgacccttacgcaagacttataagttctcattcggtatttaattcggaacaaacttttaaccaaaaggacagtaaagcttcaggcggtaaaaatcaacataaaagaacggcaaagggattcccaaaatgtgtagttatcgatgatagggaattcgattggcagggagataaacccttaaatattccgctccaaaaatgtgtgatatatgaagctcatgtaaagggcttttcttttttaaacgataaaataagtcctacaaaacggggtaaatattcaggtcttgtggagctgattccgtatttaaaggatttgggaattacttctcttgagctcctgcccgtttttgattttgatgaaaatgaaaatatgaatataaatcctaaaaccggcgttaggctaaaaaactattggggatacagcacaattgctttttttgcacctaaggctctctatgccgaagacccgggcaatgccgtaaacgagtttaaatttatggtcagggaatttcataaagcgggcatcgaaataatcttggatgtggtgtttaaccatactgcggaaggaaacgaaaacggccccgttttttcttttaaaggatttgataattccatttactatcatcttgaagataataagttttattataaaaacttttcgggctgcggtaacagtctaaaaacctcggagattcctgttataaaatttatattggattgcctgcggtattgggtaactgaaatgcatgtagacggattccgttttgatttggctcccgttctggcacgcgataaaaccggaagtatagatttaaattcttttatgatacaggctatcgcagatgattccgtgcttcgttctacaaagattatagctgaagcatgggatgctgccggtgcatacatggtaggaaaatttcccgggcgttgggcggaatggaatgacttattccgtaactccgtcagagagttttggctgcagcccaatccggatataagacacttggcaaccagagtaaccggttctgcggatttatattctcaaaaaggcagaaggccttatcagtcaataaattttgtctgctgtcatgacggctttaccctttgcgatttgctaagttattccgaaaaacataacgaagaaaacggggaaaataaccgagacggctcaaatgaaaatttaagctataatcatggaatagaaggatccgcatctgtcgaaattgaaagaatgcgtatgaggtctgcaaaaaatattttgacaacgcttattctttcagccggcacgcccatgattaatatgggagatgaggtattccgtacacaaaacggaaataataatgcctattgtcaggataatgaaatgtcttggtttgattgggaacttttaaatgaaaataaggacttgctcgaatttaccaaaaagcttatcaatttaaggaagactcatttttcttttttaagaaaacatttttttaccggagcctcgaagattaacggcactccaagcgatataacttggtttgattataatgcgcagaaacccaactggaatgtaccttcaaattttttagcctttttaatagacggcaacaaaattaatttggaaagcgatgaagatgataacgatttttatgttatgaccaatagttacaataacgatataaccgtgagacttccccctccgtcttcgggcgggaagatatggcatcgtctgatagacacctcgtacaccgacggaaaagattttttagatgaagaacataccgagcagattatgaatcagcaaatatatgtagtgctttcccgcacaactgtagttttaattgcaaaataa

SEQ ID NO: 55822 - protein, 714 aa, Treponema denticola ATCC 35405
MMNMNDLSFFQGKASPLGAKLSCDGVNFSVFSRNAKEIVLHLFENVEDSEPIISYKLDPQINKTGDVWHVFVSGLKSWAFYLYTADGEFSPSAGFLFDENNYLLDPYARLISSHSVFNSEQTFNQKDSKASGGKNQHKRTAKGFPKCVVIDDREFDWQGDKPLNIPLQKCVIYEAHVKGFSFLNDKISPTKRGKYSGLVELIPYLKDLGITSLELLPVFDFDENENMNINPKTGVRLKNYWGYSTIAFFAPKALYAEDPGNAVNEFKFMVREFHKAGIEIILDVVFNHTAEGNENGPVFSFKGFDNSIYYHLEDNKFYYKNFSGCGNSLKTSEIPVIKFILDCLRYWVTEMHVDGFRFDLAPVLARDKTGSIDLNSFMIQAIADDSVLRSTKIIAEAWDAAGAYMVGKFPGRWAEWNDLFRNSVREFWLQPNPDIRHLATRVTGSADLYSQKGRRPYQSINFVCCHDGFTLCDLLSYSEKHNEENGENNRDGSNENLSYNHGIEGSASVEIERMRMRSAKNILTTLILSAGTPMINMGDEVFRTQNGNNNAYCQDNEMSWFDWELLNENKDLLEFTKKLINLRKTHFSFLRKHFFTGASKINGTPSDITWFDYNAQKPNWNVPSNFLAFLIDGNKINLESDEDDNDFYVMTNSYNNDITVRLPPPSSGGKIWHRLIDTSYTDGKDFLDEEHTEQIMNQQIYVVLSRTTVVLIAK

SEQ ID NO: 55823 - DNA, 2115 bp, Prochlorococcus marinus str. MIT 9303
  CDS (1)..(2115): transl_table=11
gtgcccaatgctttctgcctcgccgcagacacagctgtaagcaagatgcatctcggcactccttggcccctgggcagcacgatcacaacacgaggcgtcaatttctctgtggccgccccaactgcaaagcgcgtggagctgctgctgtttgccgatgcaaatgccacgcagccagagcacatcctcgagctccagccttgccatcgatccggcgactactggcatgttgaggtggaaggattgcgaactggctgctgttatggctatcggatcttcggcccccacaacactggcagcgatagctttcacccctccaaggtgttgcttgatccctgcacaagagccatcactggctgggatatctatcaaagagaacaggccaagggatcgtcgcccaatatccaagcctgcctaaagggagtggtgtgcgaacgagaacattttgacttcgcatcccatccacgccccaggaccccatggaaccgcagcgtgatctacgaactgcatgtaggggggttcagcagcggcccgaagtcagaggtaacacctcagcgccaaggcaccttcctgggactcattgacaaacttccctatctgcgacaactgggtatcacggccatagagctgctacctatttttgctttcgatccctctgatgcgccaacggggcgggacaactactggggctacagccctctgaactggttcactccccatcccaaatatgttcatggtgacgatccattgcaggctcgccaacaagtccgcgagctggttgcggcctgtcatgacgagggtattgaagtcatccttgacgtggtctacaaccacaccactgaaggcagccttgatggccccacactcagctggcgaggcttcagcgatgctctctattaccaccaaaacgacagtggcgaatacctggatgtaagtggttgcggcaacagcatcgccgccaatcgtccaatcgtgaggcagctgattctcgaatcgatgcgttgctgggccatcgaactaggagtcgatggcttccgcttcgatctagggatcgccctgagccgaggcgaaggcctaaagccgctcgaacaccctcccctatttgaagagattgaagctgatccagagctcagcgatttaaaactgtttagcgaaccatgggattgcggtggcctctatcgactcagcgatttcccagcacaacgaatcggaacatggaatggccattaccgagatgatctacgtgccttctggaaaggagacgaagacagcgcctggaggatgggacaacgcctaagcggaagtgctgatctctacaaaggtgaaccagctccactgggacgttccctgaacttcatcactgcacacgatggcttcaccctcaatgacctggtgagtttcaaccgcaaacacaacctcgccaatggagagagcaaccgcgacggtgaaaatcacaacaacagctggaacaacggcattgaaggcccctgcagtgaccatgccgtgcaagccctccgccatcgccagatgcgcaatctgatcgccaccctgttgctttcaagaggagtgccaatgctgttgatgggagatgaagtgggccgcagccaggggggtaacaacaacagctggtgtcaggacaacccgctcggctggatgctctggaaccctgaacaatgcgatatggatttgcacctcttcgtcagcaggctgctgatgattcgccagcaactttcggaactcttctgtcccatcaatcccccccctgaagagatgcccgtaagtcttcagcagagtcctgacgatctatggctgcaatggcatggtgttgagatcgacaagcccgattggggcagctggtcccataccatctgctacagcctgaatcgaggctccagcggtgcggtgatgtggatgggcttcaacgcctacagcaaagccatgcattttgacctgcctaaaccgacttctgcgtggcatctcctcctggacacagcatgtcccagcccagatgatctacccgcaagacctaatgcatggacttcagtggacattgatctgcagaaccgcagcatgttgatcttgatggcagaggaatacgcctcaaaactcaagctctaa

SEQ ID NO: 55824 - protein, 704 aa, Prochlorococcus marinus str. MIT 9303
MPNAFCLAADTAVSKMHLGTPWPLGSTITTRGVNFSVAAPTAKRVELLLFADANATQPEHILELQPCHRSGDYWHVEVEGLRTGCCYGYRIFGPHNTGSDSFHPSKVLLDPCTRAITGWDIYQREQAKGSSPNIQACLKGVVCEREHFDFASHPRPRTPWNRSVIYELHVGGFSSGPKSEVTPQRQGTFLGLIDKLPYLRQLGITAIELLPIFAFDPSDAPTGRDNYWGYSPLNWFTPHPKYVHGDDPLQARQQVRELVAACHDEGIEVILDVVYNHTTEGSLDGPTLSWRGFSDALYYHQNDSGEYLDVSGCGNSIAANRPIVRQLILESMRCWAIELGVDGFRFDLGIALSRGEGLKPLEHPPLFEEIEADPELSDLKLFSEPWDCGGLYRLSDFPAQRIGTWNGHYRDDLRAFWKGDEDSAWRMGQRLSGSADLYKGEPAPLGRSLNFITAHDGFTLNDLVSFNRKHNLANGESNRDGENHNNSWNNGIEGPCSDHAVQALRHRQMRNLIATLLLSRGVPMLLMGDEVGRSQGGNNNSWCQDNPLGWMLWNPEQCDMDLHLFVSRLLMIRQQLSELFCPINPPPEEMPVSLQQSPDDLWLQWHGVEIDKPDWGSWSHTICYSLNRGSSGAVMWMGFNAYSKAMHFDLPKPTSAWHLLLDTACPSPDDLPARPNAWTSVDIDLQNRSMLILMAEEYASKLKL

SEQ ID NO: 55825 - DNA, 2013 bp, Candidatus Protochlamydia amoebophila UWE25
  CDS (1)..(2013): transl_table=11
atgaatatacaaataacacctggatccccctttccttttggtgcaaatatacaagaaggaaaggttaattttgctctttatgctaaaaatattgagaaaatttctctctgtttattcaacgaaaatgatcctttaaatccttttaaagaaatagaattggagccttcattaaataaaacaggaaacgtttggcatatagcaattgaatcgcttcctccttacacattgtatgcttttagagtacctgtagaaaactcaaattatttattaatagacccttacgcaaaatctatttatagctctcctgattggggaaatgcgaaaccgtactcccctcttggtagaattattccgttaacaacttttgattgggaaggcataccatctcctaaacttccttcaaaagatttaattatttatgaaatgcatatacgggggctaacacaggatcagtcgagtcaagtctcccacccaggaacttatttgggagtgattgagaaaatcccttatcttaaagagttaggaataaatgctgttgaattaatgcctatttacgaatttaacgaatcagaagccttacaaattaatccaaaaactcagcaaaaattagtgaattactttggatattctacagtaaattttttttctccgatgaataggtatgcaagtgaaatccaagaaaacaaaacgttagttgaatttaaaacaatggttaaagaacttcaccgtcatggaattgaagtcattttagatgtagtttataaccatacatttgaaggaaatcaaatgggacccatccaatcctttcgagggttagataaacatgcttattatatgatcgatgaacaaggaaattatttaaacttttcaggttgtggaaatacttttaatgccaatcatccgatcgtcaaagaatttattatccaatcgcttcgctactgggtgacagaaatgcgagtggatggatttcgttttgatttagcttccatcttatgccggtctgaaaatggcacgccactcaatccatccccactcatcgaagcaatttcacacgatcccattttatcacaaaccaaattgatcgctgaagcctgggacgcaggtggcttataccaagtcggtggattttatcccggccaacgttgggcagagtggaacggtcattatcgagatatcgtgaggcgttttattaaaggaacttcaggccataaaacagcttttgcgacagcattaagcggatcacaagatctttatggttggcgaggaactccttgttgtagcattaatttcatcacagctcatgatggatttagcctggcagatttagtaacatacaatgacaagcacaatttagataatggcgaagagaatagagacggatttgatcacaatgatagctggaactgtggaatagaggggcattctaataataaaaaaattgtcgctttacgagaaagacaaattcgtaatttcttattagccttattggtttcgcaaggaatccccatgatattaatgggtgatgaatacgcgcatacaagagatggaaataataacacctggtgtcaagacaataaattgaattggtttttatgggataaacttctggagaaacaaagtgttttccgattttttaaatcattaatcacgtttagaaaaaattatcctctccttaaacgtgatacatttttagaagaaacggatgtcacttggcatgggcaagtgcctttcaaccccgattgggaaaatgacaataaattcattgctttttcacttaatattccacatgaaggccctgatctctatgttgctttcaatgcctctcacgttgttttaacagttactattcctcctgcaaggcaaggaatgcattgggtttggttagtcaatacccataacgtggctccaggagatttttttgaagaaagttgtcgtaaacgtgtcaattcaaacacacttaaaattccttcatacacttctattgcgctaaaagcagaagtagataggtcgtaa

SEQ ID NO: 55826 - protein, 670 aa, Candidatus Protochlamydia amoebophila UWE25
MNIQITPGSPFPFGANIQEGKVNFALYAKNIEKISLCLFNENDPLNPFKEIELEPSLNKTGNVWHIAIESLPPYTLYAFRVPVENSNYLLIDPYAKSIYSSPDWGNAKPYSPLGRIIPLTTFDWEGIPSPKLPSKDLIIYEMHIRGLTQDQSSQVSHPGTYLGVIEKIPYLKELGINAVELMPIYEFNESEALQINPKTQQKLVNYFGYSTVNFFSPMNRYASEIQENKTLVEFKTMVKELHRHGIEVILDVVYNHTFEGNQMGPIQSFRGLDKHAYYMIDEQGNYLNFSGCGNTFNANHPIVKEFIIQSLRYWVTEMRVDGFRFDLASILCRSENGTPLNPSPLIEAISHDPILSQTKLIAEAWDAGGLYQVGGFYPGQRWAEWNGHYRDIVRRFIKGTSGHKTAFATALSGSQDLYGWRGTPCCSINFITAHDGFSLADLVTYNDKHNLDNGEENRDGFDHNDSWNCGIEGHSNNKKIVALRERQIRNFLLALLVSQGIPMILMGDEYAHTRDGNNNTWCQDNKLNWFLWDKLLEKQSVFRFFKSLITFRKNYPLLKRDTFLEETDVTWHGQVPFNPDWENDNKFIAFSLNIPHEGPDLYVAFNASHVVLTVTIPPARQGMHWVWLVNTHNVAPGDFFEESCRKRVNSNTLKIPSYTSIALKAEVDRS

SEQ ID NO: 55827 - DNA, 1977 bp, Erwinia carotovora subsp. atroseptica SCRI1043
  CDS (1)..(1977): transl_table=11
atggcggaattgcagacgggcaagccgacgccgctgggggcaagttttgacggcaatggcgtgaatttcgcgctgttttcggcggatgccgagcgggtagaactgtgtgtgtttgatgagcgccagcaggaacagcggatcgtgctaaccgcgcgcagtggcgatatctggcatggctatcttcccgatgcgcagcctggcttacgctacggtttccgagttgatgggccattcgagccgtcacagggtttacgtttcaacccgcataagctgctgttagacccgtgcgcccgtcagcttgatggctgggtggtggatgatgctagcttgcaaggcggaattgaccagcgggatgaacgcgatagtgctgagattatggcgaagtgcgtcgtcacggcagaggattacgactggcaggatgaccaacatccgcaaacgccttggaaccagacggtaatttatgaggcgcacgttcgcgggctgacgcaactgcaccctgatattcccgaagatattcgtggcagctatgccgccttgggtcatccggtgatgattgattatctgacatcgctgggcatcaccgcgctggaactgcttccggtgcagcagcatgccgatgaaccccggcttcaacagattgggctgcgtaattactggggctataacgtactgctgccgtttgcggtggataacagtctggccgcaggcgacgacgcgctgaatgaattccgggatgcggtgaaggccctgcataacgcgggtattgaggtcattctggatgtggtgttcaaccatagcgccgaactggacgttgaaggccctacgctctgccagcgcggcatcgacaaccgcagttattactggctgggcgacagcggtgaataccacaactggaccggctgcggcaatgtgctgcgcctgaatcaccctgcggtgatggactgggtgatggactgcctgcgcttctggcgcgaggtttgccacgttgacggtttccgtttcgatctggcaacggtgttgggtcgtactcccgattttaccgccgctgcaccgctgctgtctgccatgaaaaacgataaccgcttacagggctgcaagctgatcgccgaaccgtgggatatcgggcatggcggctatcagctgggtcaatttccgacgccgttcgccgagtggagcgaccgttatcgtgacgacatgcgccgcttttggctgcatggtgatatttctctcggcgcatttgcccgccgttttgccgcctccagcgacatcttccagcagcgcgaccgcctgccttacgcctctatcaacaaactgacggcccatgacggctttacgctgcgcgatctggtgagtttcaaccataagcacaacgacgccaacggcgagggtaaccgcgacggcacagacagtaacttcagcaataaccacggcacggaaggtctggaagccgatgacgacatccatcaacgccgacaggctagccagaaggcgctgctgacgacgctgatactgtcgcagggaacaccgatgctactggcgggcgatgaactggggcacagccagcagggcaacaacaacgcctactgtcaggacaatgaattgacttggctgcattgggatcatgcggatcgtggcttacgggaatttgtcgccggattgatccaacttcgtcgcacgatcccggcgttacagcaggaaacgtggtggcaagaaggggacggtgcagtgcagtggctgaacagagaagggcagcctttgacgccgccgcagtgggaacagggggagcatcagctacagattttactttccggtcgttggcttgtgctggtcaacgccagcctgcatgccggcgcgttcatgttgccagaaggccactggcaggtttcaccgccgtttgatgagacgaacccgcctgagggcggaatgtggcacggacaagcgcaggcggtatgcgtcttgataaaacagaccgcctaa

SEQ ID NO: 55828 - protein, 658 aa, Erwinia carotovora subsp. atroseptica SCRI1043
MAELQTGKPTPLGASFDGNGVNFALFSADAERVELCVFDERQQEQRIVLTARSGDIWHGYLPDAQPGLRYGFRVDGPFEPSQGLRFNPHKLLLDPCARQLDGWVVDDASLQGGIDQRDERDSAEIMAKCVVTAEDYDWQDDQHPQTPWNQTVIYEAHVRGLTQLHPDIPEDIRGSYAALGHPVMIDYLTSLGITALELLPVQQHADEPRLQQIGLRNYWGYNVLLPFAVDNSLAAGDDALNEFRDAVKALHNAGIEVILDVVFNHSAELDVEGPTLCQRGIDNRSYYWLGDSGEYHNWTGCGNVLRLNHPAVMDWVMDCLRFWREVCHVDGFRFDLATVLGRTPDFTAAAPLLSAMKNDNRLQGCKLIAEPWDIGHGGYQLGQFPTPFAEWSDRYRDDMRRFWLHGDISLGAFARRFAASSDIFQQRDRLPYASINKLTAHDGFTLRDLVSFNHKHNDANGEGNRDGTDSNFSNNHGTEGLEADDDIHQRRQASQKALLTTLILSQGTPMLLAGDELGHSQQGNNNAYCQDNELTWLHWDHADRGLREFVAGLIQLRRTIPALQQETWWQEGDGAVQWLNREGQPLTPPQWEQGEHQLQILLSGRWLVLVNASLHAGAFMLPEGHWQVSPPFDETNPPEGGMWHGQAQAVCVLIKQTA

SEQ ID NO: 55829 - DNA, 2121 bp, Propionibacterium acnes KPA171202
  CDS (1)..(2121): transl_table=11
gtgaccgacaccaacacggcgccattcgacaccagcgccttgggctcgaccctcattgacggcggctgccgctttgggttgtgggcgcctcgcgcggagcgtgtcgagttggccctcgtggcggatgacgggtcacaggttaaccacgacatgaccagggacgagcacggtgtctggactgttgaggtctccgacgtccaggccggtcagcgctatgggtaccgagtccacgggccgtgggatcctgaccgcggcatgaggttcaaccctgccaagctattgctcgacccttatgccagggccatcacggcaggagtcgattatcacggcccgattatggaccacacgccggaatccaactacgagcctgacctgaccgacgatgcgacgtcggtcccgctcgccgtcgtcattgacgatcccggcccgcctacgcctattgcgcgccgccacgacatcagcgaatcggtcatctatgagacccatgtcaagggctacacccgcctgcaccccctcgttcctgaacacctgcgcggcacctatgccgggcttgcctatccggctgttatcgaacacctcaagtcaatcggagtaacagccatcgaactactacccgtccagcagttcatctccgagccattcatcgttgggcgcggcttatccaattactggggttacaacaccctgggtttctttgcgccgcatgctgcctactgctccgtcggctcgatgggaacccaggtgcgcgagttcaaggacatggtgacgtctttccacgaggccggcatcgaggttttcctcgatgtcgtctacaaccacactggtgagggcggccatgaaggaccgactctgtctttccgcggcatcgatcacgagtcttattaccgcctcaccaacgatcaccgcaatgactatgacgttaccggctgtggcaattctgtggacacctctcatccggaggtcctcgccatggtcctcgactctttgcgctactgggtcaccgagatgggtgttgacgggttccgttacgaccttgccaccaccctcatccgcgataagtcccatggggtcgatcagaaccacctatttaaacaagctctggtcgaagatccgattctcaacaaggtcaagcacattgctgagccctgggacctcggcccatatggctatcaggtaggtgcctgggggccacattggagcgagtggaacgaccgtttccgcaattatgtccgtgacttttggcgtggggccgttcgcggagtcgaggagctggcaaccaggctctgtgggtcaccggacctgtatggtcagccgacctccagcgtcaacttcattaccgctcacgacggcttcacgatgcgtgacctggtcacctacaacatgaagcataaccaaggcaacggcgaggataaccacgacgggtctaatgacaaccgggcctggaactgtggttgggagggcgagactaccgatcagtccatcgtcatgttgcggcatcgtcaggtgcgcaacctggtcgctactttgctattagctaccggtgtaccaatgatcaccgccggtgacgaaatgggacgcacccagcagggcaataacaatgcatactgccaggattcccctatctcgtggatagattgggaggatgccgaagcatggtccgatgtgaccgacctcgtcaagataattacggcactgcgtcgcgagcaccccgctcttcgtccatcaaggtatcgtcatcacgatccggtcggggacgcgaacgattcgtacccgcgccgtgctgatctagcgtggttctccggccacggcggggaaatggtaaacaacgactggcatgacgaaagccgacgcaccctcggtatgtacaccagtgacgacaatgaggccttcctcatctggtttcacgccggtgaccgcccgatcgagatcatcttgccgagcgttcgatggggcgaatcgtggcacgttgtggcctcaacagctctgcctggggagattcccgacgaagccgtaccagcaggactatcggttactctgccgagcagatgcgtcgtcgtcatgcaagcctcccctttcggcctgactgcaccgttacgcgccaagcgcacacttggcgggtga

SEQ ID NO: 55830 - protein, 706 aa, Propionibacterium acnes KPA171202
MTDTNTAPFDTSALGSTLIDGGCRFGLWAPRAERVELALVADDGSQVNHDMTRDEHGVWTVEVSDVQAGQRYGYRVHGPWDPDRGMRFNPAKLLLDPYARAITAGVDYHGPIMDHTPESNYEPDLTDDATSVPLAVVIDDPGPPTPIARRHDISESVIYETHVKGYTRLHPLVPEHLRGTYAGLAYPAVIEHLKSIGVTAIELLPVQQFISEPFIVGRGLSNYWGYNTLGFFAPHAAYCSVGSMGTQVREFKDMVTSFHEAGIEVFLDVVYNHTGEGGHEGPTLSFRGIDHESYYRLTNDHRNDYDVTGCGNSVDTSHPEVLAMVLDSLRYWVTEMGVDGFRYDLATTLIRDKSHGVDQNHLFKQALVEDPILNKVKHIAEPWDLGPYGYQVGAWGPHWSEWNDRFRNYVRDFWRGAVRGVEELATRLCGSPDLYGQPTSSVNFITAHDGFTMRDLVTYNMKHNQGNGEDNHDGSNDNRAWNCGWEGETTDQSIVMLRHRQVRNLVATLLLATGVPMITAGDEMGRTQQGNNNAYCQDSPISWIDWEDAEAWSDVTDLVKIITALRREHPALRPSRYRHHDPVGDANDSYPRRADLAWFSGHGGEMVNNDWHDESRRTLGMYTSDDNEAFLIWFHAGDRPIEIILPSVRWGESWHVVASTALPGEIPDEAVPAGLSVTLPSRCVVVMQASPFGLTAPLRAKRTLGG

SEQ ID NO: 55831 - DNA, 2046 bp, Leifsonia xyli subsp. xyli str. CTCB07
  CDS (1)..(2046): transl_table=11
gtgaccgaccccgtatcgtcgccgtacccgctcggcgtcacccttctctccggcggcgcgaatgtcgccgtctacagcgagcgcgccgaccgcgtcaccgtgtgcgtgttcggagaggacggcgctgagacgagaaccgagctcaccgaccgcaccgggcacgtcttccacggcgttgtgcccggtatggccaccggcgcgcgctacgggttgcgcgtcgacggtccgtgggaccccaccggtggtcagcgcttctcccccgccaaggtgctgctggacccgcacgcgcgcgcggtcgtgggcgcatgggacctgagccaggccgacttcgggcaccagcttcggcatccccaccgccgcgatgacacggacggttcgggtcacgttgcgctcggcgtcgccaccggcccgggtttcgattggggcgatgacaggcccccgcgcatcccgctgggagagacggtcatctacgaaatgcacgtcaaaggcttcacccagcggatgcccggcgttcccgaggaactccgcggcacgtacgcgggactggccaacgaggccgcgatcgactacctcaaggggctcggcgtcaccgctgtcgaactcctgcccgtccaccagttcgtgcaagacttgcacctgctcgagaaggggctccgcaactactggggctacaactcgatcggcttcttcgccccccacaacgagtacgcggcgacaggcgcgatcgggcagcaggtcgacgagttcaaaggaatggtgaaagccctgcacgccgcgggcatcgaagtgatcctggatgtcgtgtacaaccacaccgcggagggcaaccacctcggcccgacactgagcttcaaaggcatcgacaacccctcctactaccggctggtcgagggcgacgagcggcactacttcgacaccaccggcaccggaaacagtgtcaatgtgagccatcccgccgcccttcagctcatcttggactccctccgctactgggtggaggaggtgcatatcgacggcttccgcttcgacctcgccaccgcgctcacccggcagggcggcgacgccagcctgcacagcgcgttcctgacgctggtgcaacaggacccgacgctcaagcccgtcaagctcatcgccgagccgtgggatgtcgccggctaccagctgggcggtttcccggcggactggtcggaatggaacggccggttccgcgacgacgtccgcgatttctggcgcgggacggaggggatgctggccacgctctcgcagcgcgtgctcggcagccccgacatctatgaggactcccgccgcaccccgctgtccagcgtcaacttcgtcaccgcgcacgacggcttcacgctcgccgacctcacctcctacgagcagaagcgcaacgaggacaacggcgaagacaaccaggacggcgaatccgacaaccgctcagccaactacggcgccgaggggccgacggacgcccccggcatcctggcggtcaggctgcggcagcgcaagaacttcctcgctaccgtgctcctttcggccggtgtgcccatgatcctcggcggcgacgagattgggcgcacgcagcggggcaacaacaacgcctactgccaggacggcgaaatctcctggttcgactgggcggcggccgacgaggagctgcgcgccttcaccgagcgcctcatccgcctccgccgcgccgagcccgcactccggccggagtggtatcggcgggcgccggaagcgggcgggcgggatgtcgtgcgcatcctgcgcgccgacggcgaaccgttcgccgccgaagactgggaggagcccgacgcccgctcgatcgccttcgagctgcgtcatgagggcgccgacaccttcctgctgctgctcaacgccgccgcgaacggtgtggagttcacgcttccggcgaccgtcgacgggccctggtcgctcgaactctccagcgaccctgggctggagctgggcgacggcgagagcgtcatcgccggcgagatctcgttcgccctcctccgctcggcgctgagggagggactctga

SEQ ID NO: 55832 - protein, 681 aa, Leifsonia xyli subsp. xyli str. CTCB07
MTDPVSSPYPLGVTLLSGGANVAVYSERADRVTVCVFGEDGAETRTELTDRTGHVFHGVVPGMATGARYGLRVDGPWDPTGGQRFSPAKVLLDPHARAVVGAWDLSQADFGHQLRHPHRRDDTDGSGHVALGVATGPGFDWGDDRPPRIPLGETVIYEMHVKGFTQRMPGVPEELRGTYAGLANEAAIDYLKGLGVTAVELLPVHQFVQDLHLLEKGLRNYWGYNSIGFFAPHNEYAATGAIGQQVDEFKGMVKALHAAGIEVILDVVYNHTAEGNHLGPTLSFKGIDNPSYYRLVEGDERHYFDTTGTGNSVNVSHPAALQLILDSLRYWVEEVHIDGFRFDLATALTRQGGDASLHSAFLTLVQQDPTLKPVKLIAEPWDVAGYQLGGFPADWSEWNGRFRDDVRDFWRGTEGMLATLSQRVLGSPDIYEDSRRTPLSSVNFVTAHDGFTLADLTSYEQKRNEDNGEDNQDGESDNRSANYGAEGPTDAPGILAVRLRQRKNFLATVLLSAGVPMILGGDEIGRTQRGNNNAYCQDGEISWFDWAAADEELRAFTERLIRLRRAEPALRPEWYRRAPEAGGRDVVRILRADGEPFAAEDWEEPDARSIAFELRHEGADTFLLLLNAAANGVEFTLPATVDGPWSLELSSDPGLELGDGESVIAGEISFALLRSALREGL

SEQ ID NO: 55833 - DNA, 2175 bp, Methylococcus capsulatus str. Bath
  CDS (1)..(2175): transl_table=11
atgcggaaggttgatgatacacttccagctcgccgcgtattccttggtgttttgagaatcggtccgggtcgaggtccggctgcgatgacggtgccagcaaaattcgattattcaacgggatcgcccttgcccttgggtgttcatttccaggggacggatgccaatttcgccctgttcagccggcatggttcccgggtccgcctgttattgtttgccgaccccagccacacccggcctcaccaagtcatcgatctcgatccccatcaccaccgtaccggtgatatctggcacgtggcggtacacggcgcacaccgcgggctggcttacgcctttcaggtcgacgggccgcatgagccgcatctgggacatcgtttcgatccccaggcggtactgctcgacccctatgccacggctctggtgacaccggagcattgggagttttcgggggctgcggtcggcgggccggagggagtggtcgcaaaggcgctggtcacggcagaccatttcgactgggggcatgaccgtccgctcaagcatcactggtcggagctggtcatctatgaggcccatgtgcgggggctgagcattcatccttcgtcggcagtgcggcatcccggcacctacctcggcgtcatcgacaagattccctacttcaaacggctcggaatcaccgccctcgaactgatgccgctgcaggcgttcaatccttacgaagtgacccgctacaaccccgtcaccggcgagcggctccggaactactggggctacaacaccatcgccttccaggcgccgcatgccggttatggaaccggcgcctaccccggctgccaggtggaagagttcaagcgcatggtcaaggctctgcacgaggccgacatcgaggttctcctcgatgtcgtgttcaaccacaccgcggaaggcgatgagaccggccccatcctgaacttccgcggtctggacaacagcatttactacctgctggaagaagaccgccggcattaccgcaactattcgggctgcggtaacaccgtcaactgcaatcacccggtagtgcgcagctacattctggactgcctgcggtactgggtggtcgagatgcacgtggatgggttccggttcgatctggcctcgatcctggggcgcgaccgcaacggccatctggtgcccaatccaccgctgctggagctgatcgccgaggatcccatcctgcgcgacgtcaagctcatcgccgaggcctgggatgccggcggcgcctatctggtcgggcgtttcccgggcgagcgctggtgcgaatggaacggcgtgtaccgggacgacgtgcgccgctactggcgcggcgatccgggtatggcgggggcctttgccagccgcctgtgcggtagtgccgacatttacgagcattccggcaaggcgcctgtgaacagcatcaacttcgtgacttgccacgacggcttcacgctcaacgatctggtcagctatgcatgcaaacacaattccgccaacggggaggacaaccgcgacggttcggaccacaacttcagcgccaattatggctgtgaggggccgaccggcgatcacgggatcaacgccgtccgccgccgccagatgaagaacttgatggcctcgctgctgctgtcaaggggagtgcccatgatcctgggcggcgacgagttctgccggacccagcgggggaacaataacgcctactgtcaggacaacgagatctcctggttcgactggcgtttgctggacgagaaccgctcgttcttcgagttcgtccgcaagatgatcgcattccgggcccgccatccggtgctgtcgcgggagcagttctaccggccggaagatattctctggttcagcccggccggtggccagccggactggcaggcggacgctgcgctgggttgctgcattcgggcggtggggggcgaggagcaaccgctgtgtctgctgttcaatccgacggcggaggggctctgcttccggctgccggatacgcttcgcggcggggtgtggatcaaggccgtcgataccgccgtggaatcgccttgtgacatctgcgaactcgaaggggggagtccgctgccggatcagcggcggctgttcctccccgaccgcagcctggtggtgctggtggaaggggccgcgacggctgccgcggcccgtgcctga

SEQ ID NO: 55834 - protein, 724 aa, Methylococcus capsulatus str. Bath
MRKVDDTLPARRVFLGVLRIGPGRGPAAMTVPAKFDYSTGSPLPLGVHFQGTDANFALFSRHGSRVRLLLFADPSHTRPHQVIDLDPHHHRTGDIWHVAVHGAHRGLAYAFQVDGPHEPHLGHRFDPQAVLLDPYATALVTPEHWEFSGAAVGGPEGVVAKALVTADHFDWGHDRPLKHHWSELVIYEAHVRGLSIHPSSAVRHPGTYLGVIDKIPYFKRLGITALELMPLQAFNPYEVTRYNPVTGERLRNYWGYNTIAFQAPHAGYGTGAYPGCQVEEFKRMVKALHEADIEVLLDVVFNHTAEGDETGPILNFRGLDNSIYYLLEEDRRHYRNYSGCGNTVNCNHPVVRSYILDCLRYWVVEMHVDGFRFDLASILGRDRNGHLVPNPPLLELIAEDPILRDVKLIAEAWDAGGAYLVGRFPGERWCEWNGVYRDDVRRYWRGDPGMAGAFASRLCGSADIYEHSGKAPVNSINFVTCHDGFTLNDLVSYACKHNSANGEDNRDGSDHNFSANYGCEGPTGDHGINAVRRRQMKNLMASLLLSRGVPMILGGDEFCRTQRGNNNAYCQDNEISWFDWRLLDENRSFFEFVRKMIAFRARHPVLSREQFYRPEDILWFSPAGGQPDWQADAALGCCIRAVGGEEQPLCLLFNPTAEGLCFRLPDTLRGGVWIKAVDTAVESPCDICELEGGSPLPDQRRLFLPDRSLVVLVEGAATAAAARA

SEQ ID NO: 55835 - DNA, 2304 bp, Azoarcus sp. EbN1
  CDS (1)..(2304): transl_table=11
atgatgggcggactgatgcacggctttctcgcttcgatgaaggaggggttgccgtatccgctcggcgccacctgggatggggaaggcgtcaacttcgcgctgttttccgcgcacgcgacgcgcgtcgagctgtgcctgttcgacgacagcgggcgcatcgaagtcacgcgcgtcgatctgcccgagttcaccgacgaaatctggcacggttaccttcccggcgccgggccgggtctcgtctacggctaccgcgtgcacggaccgtacgtgcccgagcagggacaccgcttcaacccgcacaagctgctgctcgacccgtacgcgcgcgaagtcgtcggccggctcaggtgggggtcggcgctgttcgcatacgagttgcgcggcaagaaaccgggccacggcttcgacaagcgcgacagcgcccccttcatgctcaaggcgcgcgtcgtggcccccgccccggaattgccgctgccggggcgcccgcgcgtgccgtgggagcgcaccgtcttctacgaagcgcacgtgcgcggcctgacacggctgcatccggcggtgctagcgcggctgcgcggcagcttcgccgggctcgggtcgccggtgatcatcgagcacctgaagtcgctcggcgtgacctcggtcgagctgctgccgatccacctgttcgtcgacgacacgcatctcaccgaaaaagggctgcgcaactactggggctacaactcgctcggcttcttcacgcccgatccgcgctatctcgccggacgtgcggtcgtcgagttccgcgacatggtcgcccgcctgcacgacgccgacctcgaggtgattctcgatgtcgtctacaaccacactgccgaaggcaacgagctcggcccgacattctcgttcaagggtctcgacaatgtgtcgtactaccgcctgaacccggacgagccgtgctactacatcaacgacaccggcactggcaacacgttggacgtgaaccatccgcgcgtgctgcagatggtgctcgacagcctgcgctactgggtgctgcagatgggcgtcgacggctttcgcttcgacctggcgacgatcctcggccgcgaggcgcacggcttcgatcccggcagcggtttcttcgatgcctgccgccaggacccggtgctgaaccgcatcaagctgatcggcgaaccgtgggactgcggccccggcggttaccagctcggcgctttcccgccgggctggggcgagtggaacgacagcttccgcgacgccgtgcgctcgttctggaaaggcgacgaggggcgcgcgccggaactggcgacgcggctgtcggcctcggcggaccgcttcaaccgccgtggccggcggccgtgggcgagcatcaacttcatcaccgcgcacgacggtttcacgctgcacgacctggtttcctacaacgacaagcacaacgaggccaacggcgaggacaacaacgacggccacgacgacaaccgttcgtggaactgcggcgccgaagggccgaccgacgatccggacatcattgagctgcgcgagcggcaaaagcgcaacctcctcgccacgctgctgttcgcgcacggcacgccgatgctgctcgccggcgacgagttcggccgcacgcagcgcggcaacaacaacgcttactgccaggacaacgacatcagctgggcgaactgggaggagatcgacgcgcgaggcgagcgcctgttggcgttcgcgcgccacctgctggtgctgcgcgatgccctgccggtgctgcgccccgggcgtttctcgaccggcgagatgcatccggtgcatgaggtgcgcgacgtcgcgtggctgaccccggccggcgccgagctggaagaaaaggagtgggccgatccgcagatgcgctgcttcggcatgctcgcggacggccgcgcccagcacacggtggtgccgcatccgggcagcgacgtcatcgtgttgctggtcgtcaacgccggacacgaggcggtcgaatggacgctgccgcacgtgcgcggcgccgggcactggacgcgcctcgtcaacaccgaatctccggacgatccggcgtttcccgcgttcgtcgccggccaccgtgtcccgctcggtgcgcgctcgctgctgctgttcgcggccgcggcggacaagccttcggcgatcttcatcgacgggctgctcgtcggcctgacggcacgcggcacgaggtcacgcctgcaggtcgatgagaccgacggggacggggcaggggacgggcaagggggcggtcaagggggcggtcaagggcaagggggcggcgatgcccaaccggactga

SEQ ID NO: 55836 - protein, 767 aa, Azoarcus sp. EbN1
MMGGLMHGFLASMKEGLPYPLGATWDGEGVNFALFSAHATRVELCLFDDSGRIEVTRVDLPEFTDEIWHGYLPGAGPGLVYGYRVHGPYVPEQGHRFNPHKLLLDPYAREVVGRLRWGSALFAYELRGKKPGHGFDKRDSAPFMLKARVVAPAPELPLPGRPRVPWERTVFYEAHVRGLTRLHPAVLARLRGSFAGLGSPVIIEHLKSLGVTSVELLPIHLFVDDTHLTEKGLRNYWGYNSLGFFTPDPRYLAGRAVVEFRDMVARLHDADLEVILDVVYNHTAEGNELGPTFSFKGLDNVSYYRLNPDEPCYYINDTGTGNTLDVNHPRVLQMVLDSLRYWVLQMGVDGFRFDLATILGREAHGFDPGSGFFDACRQDPVLNRIKLIGEPWDCGPGGYQLGAFPPGWGEWNDSFRDAVRSFWKGDEGRAPELATRLSASADRFNRRGRRPWASINFITAHDGFTLHDLVSYNDKHNEANGEDNNDGHDDNRSWNCGAEGPTDDPDIIELRERQKRNLLATLLFAHGTPMLLAGDEFGRTQRGNNNAYCQDNDISWANWEEIDARGERLLAFARHLLVLRDALPVLRPGRFSTGEMHPVHEVRDVAWLTPAGAELEEKEWADPQMRCFGMLADGRAQHTVVPHPGSDVIVLLVVNAGHEAVEWTLPHVRGAGHWTRLVNTESPDDPAFPAFVAGHRVPLGARSLLLFAAAADKPSAIFIDGLLVGLTARGTRSRLQVDETDGDGAGDGQGGGQGGGQGQGGGDAQPD

SEQ ID NO: 55837 - DNA, 2184 bp, Pseudomonas syringae pv. syringae B728a
  CDS (1)..(2184): transl_table=11
atgaatacgaagtccactacaccggcagaagataattcagccccgctagacaaccctggcagtaccccgtctcgcattcgtgaaggacttccctttcctctcggtgcaagctgggatggcctgggcgtcaacttcgccctgttctcggcaaacgccaccaaggtagagctgtgcctgttcgactccactggcgaaatcgaactggaacgcatcgaacttccggaatacaccgacgagatttaccacggctatctgccggatgcgcacccgggccagatctacggctatcgcgtgtacggcccgtacgatccgaagaatggtcatcgtttcaaccacaacaagctgctgatcgacccgtacgccaagcaactggtcggcgaactgaagtggtcggaagcgctgttcggttacaccatcggccatcctgacggcgacctgagcttcgacgagcgcgacagcgcccctttcgtaccgaaaagcaaggtgatcgatgaggcctacacctggggccgtgatcagcgcgttggcacgccttgggataaaacgattttctacgaaacccacgtacgcggcatcaccatgcgtcaccctgaggtggccgaagagctgcgcggcacgttcgccggtctcggatcagcgccggtcgtcgagcacattcgcaagctgggtgtgacctccgtcgagctgctgccgattcatgccttcgtcaacgaccagcatttgctgcaaaagggcatgaccaactactggggctacaacagcatcgcgttcttcgccccggacccgcgttacctggcaagcggcaagattgccgagttcaaggaaatggttgcgcacctgcaccacgccggtctcgaggtcatcctcgatgtggtctacaaccacaccgccgaaggcaacgagctgggccctaccctgtcgatgcgtggtatcgacaacgcctcgtactaccgcctgatgccggacgacaagcgctactacatcaacgactcgggcactggcaacaccctcgacctgagccacccttgcgtattgcaaatggtcaccgactcgctgcgctactgggcttcggaaatgcacgtcgacggcttccgcttcgacctggcgaccattctgggccgctaccacgatggtttcgacgagcgccacagcttcctggtcgcctgccgtcaggatccggtgctgcgtcaggtcaaactggtcgccgagccgtgggactgcggtccgggcggctaccaggtgggcggtttcccaccaggctggatggaatggaacgacaagttccgcgacacggttcgtgccttctggaaaggcgacgaagctcaactggccgacttcgctgcgcgcatgactgcctcgggcaacatgttcaaccagcgcggtcgtcgtccgcaggcatccgtgaacttcatcactgctcacgatggtttcacgctgcatgacctggtgtcgtacaacgacaagcacaacgaagccaacgacgaaaacaaccaggatggcagcaacaacaacctgtcctggaaccatggcgtcgaaggtccgaccgaagatccggaaatcaacagcctgcgtctgcgccagatgcgtaacttcttcgccaccctgctgctggcacaaggcacgccgatgattgttgcgggcgacgagttcgcgcgcactcagcacggcaacaacaatgcctactgccaggacagcgagattggctggatcaactgggatctggacgaagatggcgaagcgctgctcaagttcgtcacccgcgtgatcaagctgcgtcagacctacccgatcctgcgtcgcagccgcttcctggtaggcgactacaacgaagagatcggcgtcaaggacgtcacctggcttgctccggatggcaacgagatgagtgtcgagcagtggcacgatgccaatggccgttgcctgggcatgctgatggatggtcgcgcacaggaaaccggtatccgtcgcgcgggtgccgacgccacgctgttgctggtggtcaacgcgcatcacgacggcgtcaacttcaccctgccggaagtgcctgaaggtacccattacgagtgcctgatcgacaccaatcaggatgatgcacgcagcaaggagcactttgcgttcggttcgcaatacaccgtaacgccgcgttccctgctgctgttcgaactgaagcgtgaagaccagcaatga

SEQ ID NO: 55838 - protein, 727 aa, Pseudomonas syringae pv. syringae B728a
MNTKSTTPAEDNSAPLDNPGSTPSRIREGLPFPLGASWDGLGVNFALFSANATKVELCLFDSTGEIELERIELPEYTDEIYHGYLPDAHPGQIYGYRVYGPYDPKNGHRFNHNKLLIDPYAKQLVGELKWSEALFGYTIGHPDGDLSFDERDSAPFVPKSKVIDEAYTWGRDQRVGTPWDKTIFYETHVRGITMRHPEVAEELRGTFAGLGSAPVVEHIRKLGVTSVELLPIHAFVNDQHLLQKGMTNYWGYNSIAFFAPDPRYLASGKIAEFKEMVAHLHHAGLEVILDVVYNHTAEGNELGPTLSMRGIDNASYYRLMPDDKRYYINDSGTGNTLDLSHPCVLQMVTDSLRYWASEMHVDGFRFDLATILGRYHDGFDERHSFLVACRQDPVLRQVKLVAEPWDCGPGGYQVGGFPPGWMEWNDKFRDTVRAFWKGDEAQLADFAARMTASGNMFNQRGRRPQASVNFITAHDGFTLHDLVSYNDKHNEANDENNQDGSNNNLSWNHGVEGPTEDPEINSLRLRQMRNFFATLLLAQGTPMIVAGDEFARTQHGNNNAYCQDSEIGWINWDLDEDGEALLKFVTRVIKLRQTYPILRRSRFLVGDYNEEIGVKDVTWLAPDGNEMSVEQWHDANGRCLGMLMDGRAQETGIRRAGADATLLLVVNAHHDGVNFTLPEVPEGTHYECLIDTNQDDARSKEHFAFGSQYTVTPRSLLLFELKREDQQ

SEQ ID NO: 55839 - DNA, 2184 bp, Pseudomonas syringae pv. phaseolicola 1448A
  CDS (1)..(2184): transl_table=11
atgaatacgaagtccactccaacggcagaagataattcagccccgcaagacaatccaggcagcaccccgtctcgcattcgtgaaggacttccctttcctctcggcgccagctgggacggcctgggtgtcaactttgccctgttttcggccaacgccaccaaagtagagttgtgcctgtttgactcgaccggtgaaatcgaactggaacgcatcgaacttccggaatacaccgatgagacgtatcacggctacctgcccgatgcgcacccgggcctgatctatggctatcgcgtctacggcccttatgaccctaaaaacggtcatcgcttcaaccacaacaaactgttgatcgacccgtatgccaagcaactggtcggcgaattgaagtggtctgaagcattgttcggttacaccattggtcatcctgacggcgacctgagcttcgatgaacgtgacagcgcgccctttgtaccgaagagcaaggtgatcgacgaggcttacacctggggccgcgatcagcgagtcggtacgccttgggacaagaccattttttatgaaacccacgtgcgcggcatcaccatgcgccacccggaagttgccgaagagctgcgcggcacgtttgccggtctgggatcagctcccgttgtcgaccacatccgcaagctgggtgtgacatccgtcgagctgctgccgatacacgccttcgtcaacgatcagcatctgctgcaaaaaggaatgaccaactactggggctacaacagtattgcgttctttgcgccagacccgcgttatctggcgagtggcaagattgccgagttcaaggaaatggttgcgcacctgcatcatgccgggctggaggtcattcttgatgtggtctacaaccacacggccgaaggcaacgagcttggccctaccctgtccatgcgcggtatcgacaacgcctcctattacaggctgatgccggacgacaagcgttattacatcaatgactcaggcaccggcaacaccctcgacctgagccacccgtgcgtactgcagatggtcactgactccctgcgttactgggcttcggaaatgcatgtcgacgggttccgcttcgacttggcaaccattctgggtcgctaccacgatggtttcgacgaacgtcacagcttcctggtcgcctgccgtcaggacccggtgctgcgtcaggtcaaactggtcgccgagccttgggactgtggcccaggtggctatcaggtcggcggtttcccaccaggctggatggagtggaacgacaagtttcgtgacaccgtacgtgccttctggaaaggcgacgaaggccaattggcagacttcgcggcacgcatgaccgcctccggcaacatgttcaaccagcgcggtcggcgtccacaggcgtcggtgaacttcatcaccgcgcacgatggtttcacgctgcacgatctggtgtcgtacaacgacaagcacaacgaagccaacgacgaaaacaaccaggacggcagcaacaacaacctgtcctggaaccacggcgtcgaaggcccgaccgaagacgcggaaatcaacaccctgcgtctgcgtcaaatgcgtaacttcttcgctactttgctgctggcgcaaggtacgccgatgatcgtcgccggtgatgagttcgcccgtacccagcacggcaataacaatgcctactgtcaggacagcgaaattggctggatcaactgggatctggacgaggacggcgcagcattgctcaagttcgtgacccgcgtgatcaagctgcgtcagacctacccgatcctgcgccgcagtcgcttcctggtgggcgattacaacgaagaaatcggcgtcaaggacgtaacctggctcgctccggatggcaacgagatgagtgtcgagcaatggcacgatgccaatggccgttgcctgggcatgttgatggatggccgtgcacaggaaaccggtatccgtcgtccaggtgccgacgctacgctgctgctggtcgtcaacgcgcaccacgacggggtcaacttcaccctgccggaagtgcctgaaggcacccattatgagtgcctgatcgacaccaatcaggatgatgcacgcagcaaggagcactttgcgttcggttcgcaatataccgtcacgccgcgctcgctgctgctgttcgaactgaagcgcgaagaccagcaatga

SEQ ID NO: 55840 - protein, 727 aa, Pseudomonas syringae pv. phaseolicola 1448A
MNTKSTPTAEDNSAPQDNPGSTPSRIREGLPFPLGASWDGLGVNFALFSANATKVELCLFDSTGEIELERIELPEYTDETYHGYLPDAHPGLIYGYRVYGPYDPKNGHRFNHNKLLIDPYAKQLVGELKWSEALFGYTIGHPDGDLSFDERDSAPFVPKSKVIDEAYTWGRDQRVGTPWDKTIFYETHVRGITMRHPEVAEELRGTFAGLGSAPVVDHIRKLGVTSVELLPIHAFVNDQHLLQKGMTNYWGYNSIAFFAPDPRYLASGKIAEFKEMVAHLHHAGLEVILDVVYNHTAEGNELGPTLSMRGIDNASYYRLMPDDKRYYINDSGTGNTLDLSHPCVLQMVTDSLRYWASEMHVDGFRFDLATILGRYHDGFDERHSFLVACRQDPVLRQVKLVAEPWDCGPGGYQVGGFPPGWMEWNDKFRDTVRAFWKGDEGQLADFAARMTASGNMFNQRGRRPQASVNFITAHDGFTLHDLVSYNDKHNEANDENNQDGSNNNLSWNHGVEGPTEDAEINTLRLRQMRNFFATLLLAQGTPMIVAGDEFARTQHGNNNAYCQDSEIGWINWDLDEDGAALLKFVTRVIKLRQTYPILRRSRFLVGDYNEEIGVKDVTWLAPDGNEMSVEQWHDANGRCLGMLMDGRAQETGIRRPGADATLLLVVNAHHDGVNFTLPEVPEGTHYECLIDTNQDDARSKEHFAFGSQYTVTPRSLLLFELKREDQQ

SEQ ID NO: 55841 - DNA, 2061 bp, Prochlorococcus marinus str. NATL2A
  CDS (1)..(2061): transl_table=11
ttgggaaaagtaaaagttggttcagcatggcctttgggtagctccgttactcttgatggggttaatttctctatcgcagcaccacatgcaacaaatttagaattattaatcttccagaatgaagatgacgagtatgcaaaagaaacaatatccttagatcagaaaaataggtctggagattattggcacgttgaaatagagggtctagctgaaggaactttatatggatataaagtatcaattgatgggcaaaaagctgccgaggaccatcttgttttagatccatgtgccagagcaattacagggtggaagaattacataaggaatcataaagaaaaagtgaatagaggttatgctcattgcctcaagggagtagtaactaaaagagattattttgatttcaaatctcaccctaggcctaaacattcatggaataaaactattatttatgaattacatgttggtggatttacgaaaagtaatgattcaagtgttagtgaaagaaagaaaggtacatttttaggattaattgaaaagataccttatcttaaaagtcttggcattacaactattgaattacttccggtattcgcttttgattctaacgatgcccctgaaggacttgttaactattggggatatagtcctattaattggttcacgccacatcaagattttgtagatagttgtaatccattagaagctaggagacaattcaaaaaattagtagaagtttgccatgataatgagctagaagtattaatagatgttgtttataatcacacaacagaagggaatcaaaatggtccaaatataagttggaaaaattttggtcctaaaacttactatcatcaagacgataaagaaaattaccaagatgtgagtggatgtggaaatagtattgccgctaatcgtcctttagttagaaaattaatattggaatcattgcgttgttgggcaattgagttaggtgttgatggatttcgttttgacttaggtattgctttgagtagaggcgaaaatttaattcctttagataaacctcccttatttgaagaaatagaagcagatcctaaacttagcgatgtgaaattaatcagtgagccttgggattgtggtggactttacaaactaggtgattttccagcgaaacaattcagaacttggaatggtcattttagagatgatattagacgattttggaaaggagataaaggcacaatctggccacttaaagatagattaataggtagtaagtccctatataaagataataatttagcaaatatatttagtattaatttcataacttctcatgatggattcacattaaaagatctagtaagttttaacaaaaagcataaccttgcaaatggggaaaataatagagatggggagaacaataataatagttataattatggagttgaaggaccaactactgataaagaaataaataatttaaggcaaaaacaacaaagaaatcttcttgcaacacttcttttatctcctggagtaccaatgattttaatgggagacgaattaggtagaagccaaggggggaataacaacacatggtgtcaagacaacccacttggttggatggattggaatcacaacaattgggatcatgacttaaaagaatttgtattaaagctgatatctctaaggaaacaactatctgaatttttcagtcctgatagtatttatgattgtcaaaaagataataccaaggtcaaaacatcttatttttggattcagtggcatggcattaaagttaataaacctgactggggtgactggtcacatactcttggatttagcattaacaaaaacaatgatggctcagcaatttggcttggcttcaatgcttacaaagaatcaatgctttttgacttaccaaccccaatttctccttggaaaaaatatattgatacgtctatcttgaaaactaaaaatgtctccaaaaaaaccctagcgaatcaatcaaatgttcggattgaaagtaacagtcttgttcttatggtctccagcgagtattcaaaaaaaattaagctatga

SEQ ID NO: 55842 - protein, 686 aa, Prochlorococcus marinus str. NATL2A
MGKVKVGSAWPLGSSVTLDGVNFSIAAPHATNLELLIFQNEDDEYAKETISLDQKNRSGDYWHVEIEGLAEGTLYGYKVSIDGQKAAEDHLVLDPCARAITGWKNYIRNHKEKVNRGYAHCLKGVVTKRDYFDFKSHPRPKHSWNKTIIYELHVGGFTKSNDSSVSERKKGTFLGLIEKIPYLKSLGITTIELLPVFAFDSNDAPEGLVNYWGYSPINWFTPHQDFVDSCNPLEARRQFKKLVEVCHDNELEVLIDVVYNHTTEGNQNGPNISWKNFGPKTYYHQDDKENYQDVSGCGNSIAANRPLVRKLILESLRCWAIELGVDGFRFDLGIALSRGENLIPLDKPPLFEEIEADPKLSDVKLISEPWDCGGLYKLGDFPAKQFRTWNGHFRDDIRRFWKGDKGTIWPLKDRLIGSKSLYKDNNLANIFSINFITSHDGFTLKDLVSFNKKHNLANGENNRDGENNNNSYNYGVEGPTTDKEINNLRQKQQRNLLATLLLSPGVPMILMGDELGRSQGGNNNTWCQDNPLGWMDWNHNNWDHDLKEFVLKLISLRKQLSEFFSPDSIYDCQKDNTKVKTSYFWIQWHGIKVNKPDWGDWSHTLGFSINKNNDGSAIWLGFNAYKESMLFDLPTPISPWKKYIDTSILKTKNVSKKTLANQSNVRIESNSLVLMVSSEYSKKIKL

SEQ ID NO: 55843 - DNA, 2232 bp, Ralstonia eutropha JMP134
  CDS (1)..(2232): transl_table=11
atgaacatagcgcttcaggttccggaccgcctgcttcccggcaagccctatccgctcggcgcgcaatgggatggtctcggggtgaacttcgccgtgttctcggccaatgcctcgcgcatcgacctgtgcctgttctcggcaaacggacgcaaggaactggcgcgcatgccgctgcccgaatgcacggacgagatctggcatggctatctgcccaatgctgcgcttggcaccttgtacgggttccgcgcgttcggcccctacgaccccgcgcgcgggcaccgcttcaacccgcacaagctgttactggacccgtacgcacgacgactcagcgggccggtgcgctggtccgatgccctgttcggctaccggttgcagagtgcgcgcgccgacctcacgcccgaccgccgcgacagcgcgccgaccatgccgaaggccgtggtcgtcgacgaaagcttccactggggcgacgaccggccgcccggcgtgccctggcaggacacggtcatctacgaagcccacctgcgcggcgtgtcgatgctgcgcgacgatgtgctgccgcaccagcgcggcacgtttgccgcactgtgcgacccgcgctttctcgaccatctgctgcgcatgggcatcaccgccgtcgagctgctgccgatacacgcgatcctgcaggaccgcttcctgctggaacgcggcctgcgcaattactggggctacaacacgctgtcgtacttcgcgccggagccgtcgtacctggcgacggaccagcttcacgagctcaaggtcgccgtgcggcgcctgcatgccgcgggtatcgaagtgatcctggacgtggtctacaaccacacctgcgaaggcaacgaactcgggccgaccgtgtcctggcgcgggctcgacaatgccagctactaccagctcgtgcccggcgacgaacgccattacctcaacgacaccggctgcggcaacatgctgaacctgccccatcctcgcgtgctgcagatggtgctcgattcgctgcgctactgggtgcaatgcttccatgtcgacggcttccgcttcgacctgggtgcgacgctgggccgcgaccacaacggcttcgaccccggcgcctcgttcttcgacgcaatcctgcaggacccggtgctgagccgcgtcaagctgatctccgaaccgtgggacctggggccggggggataccagctcggcaaccatccgcccggctttgccgagtggaacgacaagtttcgcgacaccgtgcgccgcttctggcggggcgactcgggccagcgcggcgagctcgcggcgcggctgtcgggctcggccgacctgttcgaccggcgccaccggcggccctgggccagcgtcaatttcatcaccgcgcatgacggcttcacgctggcggacctggtcagctacaacggcaagcacaacgacgacaacggcgaagaaaaccgcgacgggaccgacaacaactacagcgccaactggagccccgacggcagcgtcgaaggccccacggacgatcccgccatcctggcgctgcgcgcccgtgtcgcgcaagcaatgttgtccacgctgctgctggcgcagggcaccccgatgctgaccgccggtgacgaatggggccgcagccagcagggcaacaacaatgcgtactgccaggacaacgcgatgtcgtggctggactggaagcaagcccagacgccgcgcggacaggtgctgctgcagatggtgcgccgcctgctcgcgttgcgtctgcggctgccctcactcggcgccaaccacttttcccacggcaatcaggaacccgcaccggggatcggcgacattgcgtggttcgataccgaggggcaaccaccgagcccggaagcgtgggccgccccggagatccgcacgctggcgctgcgccgcgcggcagcgccgccgcgctcggaacgcctcgaacttgcccaccgcgcgacacgagaaggacagcccggtccggtcaacgtgaccctgctgctgctcaacgccggcgataccgacgtcgtgttccggctacccgaaccggcactcgcctggcaactggtactggacagcagccagccacaggcggaagccggacggccgtcgaatgccatcacggagcaggccgtgcctgcccattcgctggtgctactggcggcgcaggccgcgccacaacgcttcgatcatccggcagagcccgcacgcgccgcaccgcaggaggccgcctcatga

SEQ ID NO: 55844 - protein, 743 aa, Ralstonia eutropha JMP134
MNIALQVPDRLLPGKPYPLGAQWDGLGVNFAVFSANASRIDLCLFSANGRKELARMPLPECTDEIWHGYLPNAALGTLYGFRAFGPYDPARGHRFNPHKLLLDPYARRLSGPVRWSDALFGYRLQSARADLTPDRRDSAPTMPKAVVVDESFHWGDDRPPGVPWQDTVIYEAHLRGVSMLRDDVLPHQRGTFAALCDPRFLDHLLRMGITAVELLPIHAILQDRFLLERGLRNYWGYNTLSYFAPEPSYLATDQLHELKVAVRRLHAAGIEVILDVVYNHTCEGNELGPTVSWRGLDNASYYQLVPGDERHYLNDTGCGNMLNLPHPRVLQMVLDSLRYWVQCFHVDGFRFDLGATLGRDHNGFDPGASFFDAILQDPVLSRVKLISEPWDLGPGGYQLGNHPPGFAEWNDKFRDTVRRFWRGDSGQRGELAARLSGSADLFDRRHRRPWASVNFITAHDGFTLADLVSYNGKHNDDNGEENRDGTDNNYSANWSPDGSVEGPTDDPAILALRARVAQAMLSTLLLAQGTPMLTAGDEWGRSQQGNNNAYCQDNAMSWLDWKQAQTPRGQVLLQMVRRLLALRLRLPSLGANHFSHGNQEPAPGIGDIAWFDTEGQPPSPEAWAAPEIRTLALRRAAAPPRSERLELAHRATREGQPGPVNVTLLLLNAGDTDVVFRLPEPALAWQLVLDSSQPQAEAGRPSNAITEQAVPAHSLVLLAAQAAPQRFDHPAEPARAAPQEAAS

SEQ ID NO: 55845 - DNA, 2325 bp, Methanosarcina barkeri str. Fusaro
  CDS (1)..(2325): transl_table=11
atgttaggagaattatatacggaccacaaacagaatttaaaggaatatcactatattatcgaaagaggatatccacatcctcttggggcaacgcctgatgaaaatggagtaaatttttctatttattccgaacatgcagattacgttgaacttttgctttttgataagtgtgatgatctgaaccctgctcttatcctttacacaaacagagttggagaacttacccattctgaaaatattgagaactcagttaaggtttccgaggatattgaaaatattgaaagctcagttaaggtttccgaggatattgaaaatattgagagctcagttaaggtttccgagaatagtgaaaccactgaagccacaagtattgcccttaataaaaccttccacttctggcatgtatatgtgcgaggcctgaagcctggagtccactatgcatatcgaataggtggtccttttgatccctccagaggatgccgttttgatggagataaggtcctgatagatccttattctaaaggaaacaacaaaacactctggaacagagaaaaagcctgcatgccaggagacaaccttgcgttttctatgcgtagcgtggtaattgatatgtcccactacaaatggggaaataacagtcacgtaactgcagaaaagatatatgagatgcccggaatgggcgaaaagctctacggcaaaaaaaggctgcaagaactgaatgaaaccatcatctatgagctacatgtaggcggattcacccgatctccaacatcaggggctacagcgtccggtacattttcaggagtaattgacaaaattccatatctcaaggaacttggtatcacagctgtagaattaatgcctgtctttgattttgatgatgcaacaagccttgacggaagaaaacaatactggggctatgaccctatatgtttttttgcgcctcatagcggctattgtgtgaatcctgagtatggggctcatatggaagaattcagggacatggtaagagctttgcacaaagctggaattgaggtagttcttgatgtggtcttcaaccatacagctgaaggagacaacctgggtccggtattttctttcaagggtatagataacagcatatattatctcctggaacctgacgagcaatactacagcaattactcgggttgtggaaacacagtgagctgcaaccatccgatttcccaaaaattgatagttgattgcttgaaatactgggcaaaagagatgcatgttgatggttttcgttttgatgagggctctatcctttcgctggataccaatgggaaggttatgaagtatcctcctgttatatggcagattgaacttgacgatgctctcggatacataaaagtgattgctgaagcctgggatgcagctgcactcaatcaggtaggatacttcccgggcccaaggtgggctgaatggaacggttattatcgggatgagatccgccgctttgtaagaggagatcccgggattgtaaggagggttgcaagccggattgccgggagccctgacctctaccagtccgaatcaaggcttccgatcaatagtgttaatttcgtgacttgccatgatggatttacacttaacgaccttgtttcgtataaccacaaacataatgaggctaacggggaaaataacagggatggaattgagaataatttaagctggaactgcggggttgagggagagaccgaagacccggaggtcgaaaccttgcgggaaagacagatcaaaaatttcgctgcaattctgttgctgtctataggggttccgatgatttgcatgggagatgaagtcagacgcactcagaaaggcaacaacaatgcttattgccaggataatgagaccagctggtttgactgggacttagtagagaaaaatcacgatatgttccgtttctggaaattgatgattgattttcggaaacgccatactactatccttcgcccccgatattttacaggcaaagaaaacgaacgcgggctaaaagatatttcctggcatgggtgtaagctctacagtccaggctgggatgaccctcatgcaagagccctttcttttaccatgggggaaccaggagatgaagaagatatacatgttctgatgaatatgtactgggagcctcttgagttcgaaattccagaactcaaaggtataagtagaagctggtatagagcagtcgatactttcctgccttctcctcaggaaattgccggagccggagaagaaactcaggtcaacgggaacagctacattgtgcagggtaggagtgtagttgtgctaatttcaaagtga

SEQ ID NO: 55846 - protein, 774 aa, Methanosarcina barkeri str. Fusaro
MLGELYTDHKQNLKEYHYIIERGYPHPLGATPDENGVNFSIYSEHADYVELLLFDKCDDLNPALILYTNRVGELTHSENIENSVKVSEDIENIESSVKVSEDIENIESSVKVSENSETTEATSIALNKTFHFWHVYVRGLKPGVHYAYRIGGPFDPSRGCRFDGDKVLIDPYSKGNNKTLWNREKACMPGDNLAFSMRSVVIDMSHYKWGNNSHVTAEKIYEMPGMGEKLYGKKRLQELNETIIYELHVGGFTRSPTSGATASGTFSGVIDKIPYLKELGITAVELMPVFDFDDATSLDGRKQYWGYDPICFFAPHSGYCVNPEYGAHMEEFRDMVRALHKAGIEVVLDVVFNHTAEGDNLGPVFSFKGIDNSIYYLLEPDEQYYSNYSGCGNTVSCNHPISQKLIVDCLKYWAKEMHVDGFRFDEGSILSLDTNGKVMKYPPVIWQIELDDALGYIKVIAEAWDAAALNQVGYFPGPRWAEWNGYYRDEIRRFVRGDPGIVRRVASRIAGSPDLYQSESRLPINSVNFVTCHDGFTLNDLVSYNHKHNEANGENNRDGIENNLSWNCGVEGETEDPEVETLRERQIKNFAAILLLSIGVPMICMGDEVRRTQKGNNNAYCQDNETSWFDWDLVEKNHDMFRFWKLMIDFRKRHTTILRPRYFTGKENERGLKDISWHGCKLYSPGWDDPHARALSFTMGEPGDEEDIHVLMNMYWEPLEFEIPELKGISRSWYRAVDTFLPSPQEIAGAGEETQVNGNSYIVQGRSVVVLISK

SEQ ID NO: 55847 - DNA, 2067 bp, Rhodobacter sphaeroides 2.4.1
  CDS (1)..(2067): transl_table=11
atgagctttgcgctgcgcgaggggaggccctttccgctcggggcgacctgggacgggtcgggcaccaacttcgccatcttctcggcccatgcgcgcaaggtcgagctctgcctcttcgatgcccgcgggcggcgcgagatcgcccgcgtggccctgccggaatatacccacgaggtttggcacggctatctgcccgaggtgcgccccgggcagctctacggctaccgtgtccacggaccctacgagccgcaggcggggctccgcttcaatccgaacaagctcctgatcgacccctatgcgctgatgctgcagggcgaggtcgtctggcacgatgcggtcttcggctaccggatgggcaatgcccgcgccgacctctcgttcgaccgccgggactcggccttcgtgatgccgaaatgcgtggtcgtcgatcccgcggtgacctgggggcccgactatccgccgaacatcccctggcccgagacgatcatctacgaggcccatgtcaagggcatgaccgcccagaatgccgccatccccgaccgggtgcgcggctccttcgcggcgctggccgacccgcgggccatcgagcatctggtgacgctcggcgtgaccgccatcgagctcatgcccacgcaggccttcttcgacgaccgctacctgatcgagaaggggctcacgaactactggggctacaatacgatcggcttcttcgcgccggccacccgctacatctcgcccggcggcggggtgcatgaattcaagctgatggtgcgccggctgcacgaggccgggatcgaggtcatcctcgacgtggtctacaaccacacggcggagggcaaccacctcggtcccacgctctcgttcaaggggatcgacaatgccagctactacatgctgggcgacgatccgcgttactactacgacacgacgggttgcggaaacacggtgaacctcgggcaccagcgggtgctgcagatggtcatggacagtttgcgctactgggtcgaggcctgccatgtcgacggcttccgcttcgatctggcaacctcgctcgggcgcgaccggcaggggttcaacgcgaatgcggtctttctcgacgcggtgcggcaggatccggtcctgagccgggtgaagctgatcgccgagccctgggacacgggccacgaaggctatcagctcggcaatttccctcccggatgggccgagtggaacgatcagtaccgcgacacggtgcgctcctactggaagggcgatgcgggcgagctgccggggctcgcctcgcagcttctgggatcggccggccacttcgaccgccggggccggcgtccatgggccagcgtgaatttcatcaccgctcacgacgggttcaccctcgccgacaccgtgtcctacaacgacaagcacaatgcggcgaacgaggaaggaaaccgcgacggccattccgacaaccgcagctggaactgcggcgaggaggggcccaccgaggatgcggaggtgctcgacctccgcgaccggatgcggcgggcgatgatgggcacgctcctgatctcgcagggcacgccgatgcttctgatgggagacgaggtgggccgcagtcagggcggcaacaacaacgcctactgtcaggacaatgcgatgaactggctgaagctcgaggggctcgagccgcgggacgcggccttcctcgacttcacccggcggctgatcgcgctgcgcaggtcgcgcccgctgctgcggcatccctcgttcctgcacaaggcggcggtgggagaagagccggtcgaagtgcgctggctgcgccccgacggggaagagatggagcccgacgactggcacaatccggcggcgcgaactttgggcctgctgatccggaacaagccggccctgctggcacttttcaatagccatttcgaggaggtgcccttctccctgccggtgcgcggccggggatgggggctgcttctggacacggctgcggggcgggtgccggagcggcccgtgccgcagcgggcggcgggcttcgttgtgccgccgaggacacttctggttctggaggagaccgaatga

SEQ ID NO: 55848 - protein, 688 aa, Rhodobacter sphaeroides 2.4.1
MSFALREGRPFPLGATWDGSGTNFAIFSAHARKVELCLFDARGRREIARVALPEYTHEVWHGYLPEVRPGQLYGYRVHGPYEPQAGLRFNPNKLLIDPYALMLQGEVVWHDAVFGYRMGNARADLSFDRRDSAFVMPKCVVVDPAVTWGPDYPPNIPWPETIIYEAHVKGMTAQNAAIPDRVRGSFAALADPRAIEHLVTLGVTAIELMPTQAFFDDRYLIEKGLTNYWGYNTIGFFAPATRYISPGGGVHEFKLMVRRLHEAGIEVILDVVYNHTAEGNHLGPTLSFKGIDNASYYMLGDDPRYYYDTTGCGNTVNLGHQRVLQMVMDSLRYWVEACHVDGFRFDLATSLGRDRQGFNANAVFLDAVRQDPVLSRVKLIAEPWDTGHEGYQLGNFPPGWAEWNDQYRDTVRSYWKGDAGELPGLASQLLGSAGHFDRRGRRPWASVNFITAHDGFTLADTVSYNDKHNAANEEGNRDGHSDNRSWNCGEEGPTEDAEVLDLRDRMRRAMMGTLLISQGTPMLLMGDEVGRSQGGNNNAYCQDNAMNWLKLEGLEPRDAAFLDFTRRLIALRRSRPLLRHPSFLHKAAVGEEPVEVRWLRPDGEEMEPDDWHNPAARTLGLLIRNKPALLALFNSHFEEVPFSLPVRGRGWGLLLDTAAGRVPERPVPQRAAGFVVPPRTLLVLEETE

SEQ ID NO: 55849 - DNA, 2166 bp, Synechococcus sp. CC9605
  CDS (1)..(2166): transl_table=11
atgacgattagcgctcctcctgtcattgcatcgcttaggggcaatccgctcgaaccacagggcacagcatttcgtcgttacaccgggtctcctcacccttttggaagcaccgtcgaagcagacggcgtgaacttttctctgttcagcggcagtgctactggggttcaactgctgattttcactcgacctgaagaccttgagccggtcaaggtcattaccctcagtgcgactgaaaacagaagcttcaacatctggcatgccttcatcgaaggcgtcaaacctggcatgggctatgcctaccgggtggacggtccccgtgaaccctggaacggccatcgcttcgatccagagaaggttcttgtcgatccgtattccaaaggaaacagtctggccctttggaatcgcggagctgcctgcacacctgggaacaacctgcacagcagcatgcgcagcgttgttatcgacaccggcgactacgactgggaaggggatcagcccctgaaacgcccgatggccgatacggttgtttatgaaatgcatgtcgggggctttaccaagagtccgaccagtggcgttaaacatccaggcacttatctgggactgatcgaaaaaattccttatctgaaaagtcttggtgtcacggctgtcgagcttcttccctgcttcagcttcgaccacacagatgtcaccaaggaacatgaaggccgcaaattagtgaactattggggctatagcaccatgggctatttcgcgcctcaccagggttattgcgtaagcgcggatgtaggaactcatatcaaggagttccgtgacatggtgaaagctctacacaatgcaggaatcgaagtgatccttgatgtggtttacaaccatacggatgagggtaatcatcaggggccgatgttcagcttcaggggaattgataattcaacatattactatctgactggtgctaatggatcaaaagagtattactacgactacacaggatgtggcaacacatttaactgtaatcatcccgttggcgaaaagctgattctcgattcactaaggttttgggtggatgagatgcatgttgatggtttccgattcgatgaaggttctgtgttgagtcgaggcgaagacggttctccattagagcatcctccagtgatttgggcgattgaactcgacgatattcttggcaagagcaaggtgattgctgaagcttgggatgctgcaggtctgtaccaaattggttattttccaggagcgcgatgggccgagtggaacggtaaatacagggattgcattcgtcgttttattaaaggtgatgcgggcatcatcagtgaggtggcctcacgcataacgggcagtgcagatctctatcagtggcaccaccatgaacctgtcaatagtgtgaacttcgtcacggcacatgatggatttactctttatgatttaactgcgtataacgaaaagcataactgggcgaatggggaagataataacgacggaattgatgaaaatttaagttggaattgtggcgtcgagggcgagactgacgatcaatggattaatgatatgagaaaaaggcaggtcaagaactttgccgcaattcatatgctttctatgggtgtgcccatgattgttggtggagatgaatacatgcggagccaaggtggcaacaacaacacctattgccatgataacgagatcaattggtataactgggatcagattgaatcaaaagaaagtcaggagatgattcgattctggtcactcctaattgggaaaagaaaaatgtatattgaccatttccgtggtcgttatttcacaggtgaatcaaacaagttcgggctttccgatattagctggcatggtacgcaattgaacaatccaggctgggacaacagtgaagctcgatgtcttgcgatgacccttggagacacggcggaggatacagatcagactcacaatgttcacgttatgttcaacatgttttgggatgccatcgaatttgaaattcctcaaattcctggcttagtctggtatcgagcaatagatactgctttgccttcacctcaggacatcgcgtctcccgatcagcaggttgctgttcaaggaaacagctatttggtaactggccgcagcatcgtgacgctcgtctctcgggcgtcgacataa

SEQ ID NO: 55850 - protein, 721 aa, Synechococcus sp. CC9605
MTISAPPVIASLRGNPLEPQGTAFRRYTGSPHPFGSTVEADGVNFSLFSGSATGVQLLIFTRPEDLEPVKVITLSATENRSFNIWHAFIEGVKPGMGYAYRVDGPREPWNGHRFDPEKVLVDPYSKGNSLALWNRGAACTPGNNLHSSMRSVVIDTGDYDWEGDQPLKRPMADTVVYEMHVGGFTKSPTSGVKHPGTYLGLIEKIPYLKSLGVTAVELLPCFSFDHTDVTKEHEGRKLVNYWGYSTMGYFAPHQGYCVSADVGTHIKEFRDMVKALHNAGIEVILDVVYNHTDEGNHQGPMFSFRGIDNSTYYYLTGANGSKEYYYDYTGCGNTFNCNHPVGEKLILDSLRFWVDEMHVDGFRFDEGSVLSRGEDGSPLEHPPVIWAIELDDILGKSKVIAEAWDAAGLYQIGYFPGARWAEWNGKYRDCIRRFIKGDAGIISEVASRITGSADLYQWHHHEPVNSVNFVTAHDGFTLYDLTAYNEKHNWANGEDNNDGIDENLSWNCGVEGETDDQWINDMRKRQVKNFAAIHMLSMGVPMIVGGDEYMRSQGGNNNTYCHDNEINWYNWDQIESKESQEMIRFWSLLIGKRKMYIDHFRGRYFTGESNKFGLSDISWHGTQLNNPGWDNSEARCLAMTLGDTAEDTDQTHNVHVMFNMFWDAIEFEIPQIPGLVWYRAIDTALPSPQDIASPDQQVAVQGNSYLVTGRSIVTLVSRAST

SEQ ID NO: 55851 - DNA, 2106 bp, Synechococcus sp. CC9605
  CDS (1)..(2106): transl_table=11
atgccccaacgggctttgagtggcattcaccccggttctccctggcccctgggcagcagcctcaccaggcggggggtgaatttcgtgctggcggcccccggggccgaccggattgagttgctgctctacagcaacagcaatgaccgcagcccggaacgggtgatcgaactggatgttcgacgtcaccgctcgggcaactactggcacgtggaggtggaaggagtcggcgaaggctgctgttacggctaccgcgtcttcgggccactggcaccagggggccatggcttccgcccctccaaggtgttgctcgaccccgccgcccgcgccattagcggctgggacgtctacgaccgggtgctggccaccggcctctcacccaatgcccatacctgcctcaaggcggtggtgtgcgaacgggatctgtttgatttccaggcccatccgcgcccacgccacagctggcaacgcacggtgatctacgagctgcacgtggggggcttcacccgccgcgaggatgcgggcgttgccgcagcgaaccggggcacatacctcgggctgattgagaagctgccctacctcaaggaactgggcatcacggcagtggagctgttgccggtgttctgcttcgatccggccgatgccccccctgggcgcgacaacgtgtggggttacagccccctgagctggttcacaccccaccacggctactgcagcagtagcaatccgctgcaggcccgccatgaggtgcgccaactggtggccgcctgccatgacgccggcatcgaagtgctgctggatgtggtctacaaccacaccacggaaggcaaccgccatggccccacgttgagctggcgtggctgtgctgatgacgtctactaccaccagaacgacgacggcgattatctggatgtgagcggctgcggcaactcgatcgccgctaacgcgccgatcagcacccagttgatcctcgaatcaatgcggtgctgggccctggagctgggggtggatggcttccgcttcgacctgggcatcgccctgagccgcggcaatcaactcaaacccctcaacgacccgcccctgttcacggcgatgggggccgacccgcagctgagcgacctcaaactggtgagcgaaccgtgggattgcggcggcctctatcggctagaggatttccccgccaagcggatcggcacctggaacggccatttccgcgacggcatgcggcgtttctggaagggtgacgaccacagcacctggaccctggcccagcggttcaaaggcagccctgatctctatgacggcaagcccgtagccctggggcgttcggtgaatttcatcaccgcccatgacggcttcaccctggcggatctggtgagctacaaccgcaaacacaacctggccaacggcgaagacaaccgcgacggcgagaaccacaacaacagctggaaccacggcatcgaaggccctagcagcaatcccctggtgcagaccctgcggcgccggcagcaacgcaacctgctcagctcactgctgctggcccgcggggtgccgatgctgctgatgggcgatgaagtgggccgcagccagggaggcaacaacaacagctggtgccagaacagtccgctggggtggatggtctgggatgaagaccactgcgacctggaactcaagctgtttctgcagcggctgctgcggctgcgccaggccctgccgcagctgttcaatccgctggtgccgccacgggaaagcaaccgcaaatcagcaccacagccatccgaacagcggagcgatctctggcggcaatggcacggcgtgagcctggccaaacccgactgggcggcctggagccgcaccacggccaccagcctccacagcggcagccgcggtgctctgctctggatgggcttcaacgcttacaaggaaagtctcagctttgaattgccgattccggcatccccctggaagcgggtgatcgacacctcgttgcccagcccccaggattttcctgctgagccggtgaacttcagctgcatggagatacctctgcaaagtcggagcttcgtgctgctgcttgccgaagaggaaatctcaggccttcggttgtaa

SEQ ID NO: 55852 - protein, 701 aa, Synechococcus sp. CC9605
MPQRALSGIHPGSPWPLGSSLTRRGVNFVLAAPGADRIELLLYSNSNDRSPERVIELDVRRHRSGNYWHVEVEGVGEGCCYGYRVFGPLAPGGHGFRPSKVLLDPAARAISGWDVYDRVLATGLSPNAHTCLKAVVCERDLFDFQAHPRPRHSWQRTVIYELHVGGFTRREDAGVAAANRGTYLGLIEKLPYLKELGITAVELLPVFCFDPADAPPGRDNVWGYSPLSWFTPHHGYCSSSNPLQARHEVRQLVAACHDAGIEVLLDVVYNHTTEGNRHGPTLSWRGCADDVYYHQNDDGDYLDVSGCGNSIAANAPISTQLILESMRCWALELGVDGFRFDLGIALSRGNQLKPLNDPPLFTAMGADPQLSDLKLVSEPWDCGGLYRLEDFPAKRIGTWNGHFRDGMRRFWKGDDHSTWTLAQRFKGSPDLYDGKPVALGRSVNFITAHDGFTLADLVSYNRKHNLANGEDNRDGENHNNSWNHGIEGPSSNPLVQTLRRRQQRNLLSSLLLARGVPMLLMGDEVGRSQGGNNNSWCQNSPLGWMVWDEDHCDLELKLFLQRLLRLRQALPQLFNPLVPPRESNRKSAPQPSEQRSDLWRQWHGVSLAKPDWAAWSRTTATSLHSGSRGALLWMGFNAYKESLSFELPIPASPWKRVIDTSLPSPQDFPAEPVNFSCMEIPLQSRSFVLLLAEEEISGLRL

SEQ ID NO: 55853 - DNA, 2085 bp, Synechococcus elongatus PCC 7942
  CDS (1)..(2085): transl_table=11
atgactgtttcatcccgtcgccctgaatcgaccgtggctgttgaccccggccaaagctatcccctcggggcaaccgtctatcccaccggcgtcaacttctcgctctacaccaagtacgcgacgggcgttgaattactgctgtttgatgaccctgagggtgcccagcctcaacggacagtgcgcctcgatccgcacctcaatcgcacctctttctactggcatgtttttattccgggcattcgctccggtcaggtttatgcttaccgcgtctttggcccctacgcacctgatcgcggcctctgttttaaccccaacaaagtgctgctggatccctacgctcgcggggttgtcggctggcagcactacagtcgcgaagcggctattaaacccagtaataactgcgttcaagccctgcgtagcgtggttgttgaccccagcgactacgactgggaaggcgatcgccatccacgcacaccctacgctcgcacagtaatctatgagctgcatgttggcggcttcaccaagcatcccaattccggcgtcgcccctgaaaaacgtggcacctacgctggtctaatcgaaaaaattccctacctgcaatccctcggcgtcacggccgttgagttgctgccggtgcaccagttcgatcgccaagatgcccccttaggacgcgagaactactggggctacagcaccatggctttttttgcgccccacgcagcctacagctctcgccatgatccacttggtccagttgatgagttccgcgacctcgtcaaggcgctccaccaagcagggattgaggtgattctcgacgtggtgttcaaccacactgctgaagggaatgaagacggtccaacgctgtctttcaaaggtctagcgaattcaacctactatctgctggatgaacaggcgggctatcgcaactacaccggctgcggcaacaccgtcaaagctaacaattcgatcgtgcgatcgctgattctcgattgcctgcgttattgggtctcggaaatgcacgtcgatggcttccgctttgaccttgcgtcggtgctgagtcgtgatgccaatggcaaccccctatcggatccgcccttgctttgggcgattgattccgatccggttttggccggtacgaagctcattgctgaagcttgggacgcagccggcttatatcaggttggtacctttattggcgatcgctttgggacttggaacggtcccttccgggacgatattcggcgtttttggcgtggagatcagggctgtacttacgccctcagtcaacgcctgctgggtagccccgatgtctacagcacagaccaatggtatgccggacgcaccattaacttcatcacctgccatgacggctttacgctgcgagatctagtcagctatagccagaagcacaactttgccaatggagagaacaatcgggacgggaccaatgacaactacagctggaactacggcattgaaggcgagaccgatgaccccacgattctgagcttacgggaacggcagcagcgcaatttgctcgccacgttattcctcgcccagggcacaccgatgctgacgatgggcgatgaggtcaaacgcagtcagcagggtaacaataacgcctactgccaagacaatgagatcagctggtttgattggtcgctgtgcgatcgccatgccgatttcttggtgttcagtcgccgcctgattgaactttcccagtcgctggtgatgttccaacagaacgaactgctgcagaacgaaccccatccgcgtcgtccctatgccatctggcatggcgtcaaactcaaacaacccgattgggcgctgtggtcccacagtctggccgtcagtctctgccatcctcgccagcaggaatggctttacctagcctttaatgcttactgggaagacctgcgcttccagttgccgaggcctcctcgcggccgcgtttggtatcgcttgctcgatacttcactgccgaatcttgaagcttgtcatctgccggatgaggcaaaaccctgcctacggcgcgattacatcgtcccagcgcgatcgctcttactgttgatggctcgtgcttaa

SEQ ID NO: 55854 - protein, 694 aa, Synechococcus elongatus PCC 7942
MTVSSRRPESTVAVDPGQSYPLGATVYPTGVNFSLYTKYATGVELLLFDDPEGAQPQRTVRLDPHLNRTSFYWHVFIPGIRSGQVYAYRVFGPYAPDRGLCFNPNKVLLDPYARGVVGWQHYSREAAIKPSNNCVQALRSVVVDPSDYDWEGDRHPRTPYARTVIYELHVGGFTKHPNSGVAPEKRGTYAGLIEKIPYLQSLGVTAVELLPVHQFDRQDAPLGRENYWGYSTMAFFAPHAAYSSRHDPLGPVDEFRDLVKALHQAGIEVILDVVFNHTAEGNEDGPTLSFKGLANSTYYLLDEQAGYRNYTGCGNTVKANNSIVRSLILDCLRYWVSEMHVDGFRFDLASVLSRDANGNPLSDPPLLWAIDSDPVLAGTKLIAEAWDAAGLYQVGTFIGDRFGTWNGPFRDDIRRFWRGDQGCTYALSQRLLGSPDVYSTDQWYAGRTINFITCHDGFTLRDLVSYSQKHNFANGENNRDGTNDNYSWNYGIEGETDDPTILSLRERQQRNLLATLFLAQGTPMLTMGDEVKRSQQGNNNAYCQDNEISWFDWSLCDRHADFLVFSRRLIELSQSLVMFQQNELLQNEPHPRRPYAIWHGVKLKQPDWALWSHSLAVSLCHPRQQEWLYLAFNAYWEDLRFQLPRPPRGRVWYRLLDTSLPNLEACHLPDEAKPCLRRDYIVPARSLLLLMARA

SEQ ID NO: 55855 - DNA, 2190 bp, Rhodospirillum rubrum ATCC 11170
  CDS (1)..(2190): transl_table=11
atgccgcttacgcgaccgcgagtctggcccggccgcccctatccccttggcgggacctgggatggccggggggtcaattttgcgttgttttccgagcatgcggaaaaggtggaactttgccttttcgacggggatgacggccgggaactctcgcgcgttcctcttcccgaatacaccgatgagatttggcatggctatctgcccgacgttcgcccgggccagcgctacggctatcgggtttacggcccctatgccccccatgccggccatcgtttcaatcccaacaagctggtgctcgacccttacgcccgttcgtggggcgggcgcctgcagtggaccgatgcccatttcggctatcgcttcggcgcggcgtcggaagatctgaccttcgacacccgcgacaattccgccttcatgcccaaatgcgtcatcgtcgaaaccgccttcacctgggatgacgaccgcgccccgcgccggccctggcacgacagcgtgttgtacgagcttcacgtcaagggcttcaccatccgccatcccgaggtgccgcgcgccattcgcggcaccttcgccggcatgtcgacccaggcggtggtgtcctatctgaaatccctgggcatcacggcgatcgagcttttgccggttcaggcctttgtcgatgagcgccatctggtcaagaacaacttgaccaattattggggttacgcctcgctgggttatttcgccccccagccgtcctatctggccagcggcaagctgggcgagttcaagaccttcgtgcaggtcatgcatgacgccggcatcgaggttatccttgatgtcgtttacaaccatacggccgagggcaatcaccttggcccgaccttcagtttcaaaggcatcgacaacgccagctattaccggctggtgccgggcaacgagcgtttctacgccgacagcacgggctgcggcaacgcgctcaacctgcgccacccccgggttttgcagatggtcatggactcgctgcgctattgggtgcgcgagatgcatgtcgatggtttccgcttcgatctggcgacgaccctggcccgcgaccacggccgcttcgatccccattccgcctttatcgaggccctgcgccaggatccggtgctctccaccgtcaagctgatcgccgagccctgggacgtcggcgatggcggctaccggctgggcggcttccccccgggcttcgccgaatggaatgaccgttaccgcgataccgtgcggcgcttttggaagggcgatcgcgggcaggtggccgatctggcgacccggctgaccgggtcttcggacctgttcgccaatcgcggccgctgcccctgggccagcatcaatttcgtcaccgcccatgacgggttcaccctggccgatcttgtctcctacaacggcaagcacaacgaggccaatggcgagaacaaccgggacggcacggataacaacaattcgtggaaccacgggattgaagggccgacctcggatccgtcgatccaggccttgcgccgtcggcaggtgcggaacttccttgccaccttgctgttgtcgcaaggggtgccgatgctggtggccggcgatgaattcgggcgcagccagcgcggcaacaacaatccctactgccaggacaacgagatttcctggatcaattgggcggcgatcgatgccgagggccagtccctcgcccgcatggtgcgctggctgatacgcttgcgccggcgccatatcgtctttcatcgcaaccgcttctttcacggaacgaccctgcgcggcaccgatgtcaaggacatcacctggcttgagcccgacggccgcgagcgctccgatgcccgcgattggaccgacccggaagagcgtttcctggcctttctcatccgcggcgaggccggcgagtactttgtgaccgaaatgggcgatcccgagcccgatcatagctttttggtagccctgaacgccgattcccgcccggtgccgatgcttctgcccgtgctgacggcgggcacgcgctgggtcttgctgttcgacacggcgcggccgggggcggaacggcgcccggccccggccgacggcaagatgtattcggtggaggggcgatcgctgacggtgttccggcgcgagccgggactgcgggatggggatggggatggtccctgggaattggatggcttccccgaggtatga

SEQ ID NO: 55856 - protein, 729 aa, Rhodospirillum rubrum ATCC 11170
MPLTRPRVWPGRPYPLGGTWDGRGVNFALFSEHAEKVELCLFDGDDGRELSRVPLPEYTDEIWHGYLPDVRPGQRYGYRVYGPYAPHAGHRFNPNKLVLDPYARSWGGRLQWTDAHFGYRFGAASEDLTFDTRDNSAFMPKCVIVETAFTWDDDRAPRRPWHDSVLYELHVKGFTIRHPEVPRAIRGTFAGMSTQAVVSYLKSLGITAIELLPVQAFVDERHLVKNNLTNYWGYASLGYFAPQPSYLASGKLGEFKTFVQVMHDAGIEVILDVVYNHTAEGNHLGPTFSFKGIDNASYYRLVPGNERFYADSTGCGNALNLRHPRVLQMVMDSLRYWVREMHVDGFRFDLATTLARDHGRFDPHSAFIEALRQDPVLSTVKLIAEPWDVGDGGYRLGGFPPGFAEWNDRYRDTVRRFWKGDRGQVADLATRLTGSSDLFANRGRCPWASINFVTAHDGFTLADLVSYNGKHNEANGENNRDGTDNNNSWNHGIEGPTSDPSIQALRRRQVRNFLATLLLSQGVPMLVAGDEFGRSQRGNNNPYCQDNEISWINWAAIDAEGQSLARMVRWLIRLRRRHIVFHRNRFFHGTTLRGTDVKDITWLEPDGRERSDARDWTDPEERFLAFLIRGEAGEYFVTEMGDPEPDHSFLVALNADSRPVPMLLPVLTAGTRWVLLFDTARPGAERRPAPADGKMYSVEGRSLTVFRREPGLRDGDGDGPWELDGFPEV

SEQ ID NO: 55857 - DNA, 2331 bp, Frankia sp. CcI3
  CDS (1)..(2331): transl_table=11
atgaagcgaccccggcccgcgaataccgttcggcccgtaggcttcggtcgtatgtcacaggtatggcccggcagcccctatcccctgggcgccacatacgacggatcgggcacaaatttcgcgatcttctccgaggtcgccgaccgggtccagctgtgcctgttcgacgacgcgggcaacgaggagcggatcgacctgcgggaacgggacgccttcgtctggcacgcctaccttcccaccgtgggaccgggccagcgctacggctatcgggtccacgggtcctacgaccccgcccgagggctgcgctgcaactccaccaagctcctcctcgacccgtacgcgaaggcggtcgacggggaggtcgcctgggaccaggcggtgttcccctacaccttcggcgaccccgacagcgtcaacgacgccgactccggcccccacatgatgaagtcggtggtaatcagcccgttcttcgactggaacggggaccgcccgccacgccggccctacaacgagtcggtgatctacgaggcgcatgtccgggggctgaccaagaaccatcccggcctgccggaggagtaccgcgggacctacgcgggagtcgcccacccggtgatgatcgaccactatcgcaagctcggcgtgaccgcgatcgagctgctgccggtgcaccagttcgtccatgacgagcatctggtcagccgcgggctgcgcaactactggggctacaactccatcgcgttcctggcgccgcacagcggctactccgcctccggcggccacggccgccaggtgcaggagttcaagggaatggtcaagaacctgcacgaggccggaatcgaggtgatcctcgacgtcgtctacaaccacaccgccgagggcaaccacatgggtccgatgctgtgcttccgcggcatcgacaacagcgcctactaccggctcgtggacaaccgtccccagtactacatggactacacgggcaccggcaacagcctgcgggtacgacacccgcacgtgctacaactgatcatggactcgctgcgttactgggtcaccgacatgcacgtggacgggttccggttcgatctcgcggcgaccctggcccgggagttctacgacgtcgaccggctgtcatcgttcttcgacctcgtccagcaggatccggtggtctcccaggtcaagctgatcgcggaaccgtgggacctcggcgagggcggttaccaggtggggaacttccccccgctgtggaccgagtggaacggtaaataccgcgacaccgtccgcggcttctggcgcgggcaggaccacgggatcgccgagttcgcctcccggctgaccggatcgagcgacctgtacgagaacagcgggcgccggccgtgggcatcgatcaacttcatcaccgcgcacgacgggttcaccctgcacgacctggtctcctacaacgaaaaacacaacgaagccaacggcgaggacaatcgggatggctccgacgacaaccggtcgtggaactgcggagtcgaagggcccaccgacgacccgaccgtcctgtccctgcgcgccgcgcagacccgtaacctgctgacgacgctgttgctgtcccagggggtgccgatgctggtcgccggagacgagatgggacgcacccagcagggcaacaacaacgcgtactgccaggacaacccgatctcctggctggactggtccgacgccgagcgcaacgccgacctgatcgagttcaccggcatgctgtcaaggctgcgccatgatcatccgatcttccgccgccgccggttcttccagggcaagtcgctgcgcgggcagggcggcacgacgcacggcgcggccgaggcggtcaccggcgggcaggcgggcggccaggacgcggacggcagtggcgggcgctccggcgacgaccccgccgtcaaggacgaccccgccgtcaaggacatcgcctggctccgcccggacggcacggagatgtccgacagcgactgggagtccgggacggcgcgatcactcggcgtctacctcaacggtgaggggataccggaccccgacgcgctgggccaggccatcatcgacgactcgttcctgctgttcttcaatgcccaccatgaaccggtcgggttccaggcgccggcgaccagtttcggcagttcgtgggagatcgtcgtcgacacccgggcgtcgacggccgaggtcgacgcccggctcagcgacaccgcgctgctccactcggccctcgatcccgcgagcatgggaagggccgtgaaggccggcgatcccatcgaactcgacgcccgctcgaccgtcgtgctgcgccgtgtcagctga

SEQ ID NO: 55858 - protein, 776 aa, Frankia sp. CcI3
MKRPRPANTVRPVGFGRMSQVWPGSPYPLGATYDGSGTNFAIFSEVADRVQLCLFDDAGNEERIDLRERDAFVWHAYLPTVGPGQRYGYRVHGSYDPARGLRCNSTKLLLDPYAKAVDGEVAWDQAVFPYTFGDPDSVNDADSGPHMMKSVVISPFFDWNGDRPPRRPYNESVIYEAHVRGLTKNHPGLPEEYRGTYAGVAHPVMIDHYRKLGVTAIELLPVHQFVHDEHLVSRGLRNYWGYNSIAFLAPHSGYSASGGHGRQVQEFKGMVKNLHEAGIEVILDVVYNHTAEGNHMGPMLCFRGIDNSAYYRLVDNRPQYYMDYTGTGNSLRVRHPHVLQLIMDSLRYWVTDMHVDGFRFDLAATLAREFYDVDRLSSFFDLVQQDPVVSQVKLIAEPWDLGEGGYQVGNFPPLWTEWNGKYRDTVRGFWRGQDHGIAEFASRLTGSSDLYENSGRRPWASINFITAHDGFTLHDLVSYNEKHNEANGEDNRDGSDDNRSWNCGVEGPTDDPTVLSLRAAQTRNLLTTLLLSQGVPMLVAGDEMGRTQQGNNNAYCQDNPISWLDWSDAERNADLIEFTGMLSRLRHDHPIFRRRRFFQGKSLRGQGGTTHGAAEAVTGGQAGGQDADGSGGRSGDDPAVKDDPAVKDIAWLRPDGTEMSDSDWESGTARSLGVYLNGEGIPDPDALGQAIIDDSFLLFFNAHHEPVGFQAPATSFGSSWEIVVDTRASTAEVDARLSDTALLHSALDPASMGRAVKAGDPIELDARSTVVLRRVS

SEQ ID NO: 55859 - DNA, 2151 bp, Saccharophagus degradans 2-40
  CDS (1)..(2151): transl_table=11
atgagtgaaggttatagcgtttccgaaggccgttcttttcctatgggcgctacggtaagtgcgcaaggcaccaatttcgcaatattttccgagcacgcagaaaaagtagagctgtgtttattcgatgagatggggcagacggaaactgcgcgcattatgttgccgggtaatactgaccatgtgtggcatgggtttgttgagggggttcacgctggcgcattatacggttaccgagtgtacggcccctacgagccgcagcgcggccataggtttaaccccaataaactacttttagacccctatgccaagcgaattgacggcgcttttcattggtcgagcataatgtacggctatgatgcagataatcctcggcaagacttggtgaaagataagcgcgataacagcagggatatgccgaaatgtgttgttgttgcgccactaagcttgagtgataaagaacgaattagtgaagctcgacctcaagtgccgtggcacaaaacaattatttacgaaacgcacgtaaaaggttttacccagttgaatctggctatcccttcaagcgcaaggggcacgttcgcagggttagctcacccagaaaatctagcttatataaaagagttaggcgtaacggcaattgaattacttcctgtacacggttttatcgatgagtcctttcttacggcccagggtttgtctaactattggggctataattcactgcacttttttgcccctcactctggttacttgaatgatggtgacccagctgaatttcgacattttacccaagccgcacacgaagccgggctagaggttattttagatgtggtttataaccacacttcagaaggtaaccatttgggaccaacgctttcgtttcgcggtatagataacgcaagctactattgtttacaggcgcaggattcgcgtttttatgtgaacgataccggttgcggcaacacgttaaacttaaagcacccgcgcgttttacaaatggttatggacagcctgcggtattgggtaacggaaatgggagtagacggcttccgtttcgatttggcaaccgtacttggtagagagtcgcacggttttgatcctggtagcggctttttcgatgctatcaagcaagacccagtgttagcttctgtgaaaatgattgcagaaccttgggatattggccctggcggctaccagcttggtaattaccctacgggttggtctgaatggaatgaccgctaccgcgatacctgtcggcgtttctggcgaggtgaccccggtatgctgccagagtttgcgcgacgcattcacggctccagtgatttgtttgagcactccggtagaaagccctctagcagtgtgaactttataactagtcacgatggttttactttggccgatttagtgagctataaaaatcgccacaatgaagccaataacgaacaaaatagcgacggtcatcactcgaattttagcgaaaattatggcgttgaaggcgaaacagatgatgatgctattttgtatgtacgtgaacgacaaaagcgcaattttctcgccacactgtttttatcgcaaggcacgcccatgttgttggctggcgatgagctgagccgttcgcaaaaaggcaacaacaatgcctactgccaagataacgaaataaactggttggattggcaagccttaaccaaaaaggaaattgccctaagcaaatttgtatcgcatttaattaaagtgcgaagcagctcaccactattaacttcgcaacgttatattcataagcccgacgagccagacggaaaaataagctggtgtgtaaactggataaacagttacggcgagcccatgaaagatgctcaatgggcggagcagcacgcgcattgtctcggctgggtgttagaaaaaattcctgtggcggaagattcagataaaaaatcagagcgcctattagttctatttaattcaggtaatgacgacgtgttgtttcgcttgcctgaagatgaaaatgtaattggttggaaatgcttggtcgatacacggtttattgatggccaaggggttccctcatgttacgagccaagaggagaggtgccactaatgcataaatctctttgcttgcttaaagcgttgttcgatggtcaggatgagcgtgactag

SEQ ID NO: 55860 - protein, 716 aa, Saccharophagus degradans 2-40
MSEGYSVSEGRSFPMGATVSAQGTNFAIFSEHAEKVELCLFDEMGQTETARIMLPGNTDHVWHGFVEGVHAGALYGYRVYGPYEPQRGHRFNPNKLLLDPYAKRIDGAFHWSSIMYGYDADNPRQDLVKDKRDNSRDMPKCVVVAPLSLSDKERISEARPQVPWHKTIIYETHVKGFTQLNLAIPSSARGTFAGLAHPENLAYIKELGVTAIELLPVHGFIDESFLTAQGLSNYWGYNSLHFFAPHSGYLNDGDPAEFRHFTQAAHEAGLEVILDVVYNHTSEGNHLGPTLSFRGIDNASYYCLQAQDSRFYVNDTGCGNTLNLKHPRVLQMVMDSLRYWVTEMGVDGFRFDLATVLGRESHGFDPGSGFFDAIKQDPVLASVKMIAEPWDIGPGGYQLGNYPTGWSEWNDRYRDTCRRFWRGDPGMLPEFARRIHGSSDLFEHSGRKPSSSVNFITSHDGFTLADLVSYKNRHNEANNEQNSDGHHSNFSENYGVEGETDDDAILYVRERQKRNFLATLFLSQGTPMLLAGDELSRSQKGNNNAYCQDNEINWLDWQALTKKEIALSKFVSHLIKVRSSSPLLTSQRYIHKPDEPDGKISWCVNWINSYGEPMKDAQWAEQHAHCLGWVLEKIPVAEDSDKKSERLLVLFNSGNDDVLFRLPEDENVIGWKCLVDTRFIDGQGVPSCYEPRGEVPLMHKSLCLLKALFDGQDERD

SEQ ID NO: 55861 - DNA, 2217 bp, Burkholderia xenovorans LB400
  CDS (1)..(2217): transl_table=11
atgtcatcccaggtcaattactcgacgcgcatcgcggaaggcacgccttttccgctcggcgcgacatggaacggaagcggcgtcaacttcgcgctattctcggcgcacgctaccaaggtcgaactgtgtctgttcgatgaaaccggtgaaaacgaaatcgaacgcatcgaactgccggaatacaccgacgaggtgtggcacgtgttcgtgccgaatctcaaaccgggcgcggtctacgggtatcgcgtgcacggaccttacgagccggagaaagggcaccgcttcaatccgaacaagcttctgctcgacccgtatgcaaaagcgcacatcggcgagctcaaatgggcgccggagattttcggctatacgctggattccgaagagggcgacctgtctttcgatgaacgcgacagcgcgcccttcgtgccgaaatgcaaggtggtcgatgccaatttctcgtggagtcaccccgagcgcaatgcattgccgtgggaacgcgtgattttttatgaagcccatgtgcgcggatttaccaaacggcatccggaagtaccggaaaatctgcgcggcaccttcgccggactggggcagcaggtcgtgctcgactacatcaagaaccttggcgtgacctcggtggaattgatgccgatccagaccttcgtcaacgacagttatctgctcgataaaggactcacgaactactggggctacaacaccatcggttttttcgcggccgatccgcgtttcttcgcgtcgtcgatcgattcggtgggcgagttcaaggagatggtggaccgctttcacaacgccaatctcgaagtcattctcgacgtggtctacaaccatacggccgaaggcaacgagcgcgggccgaccatctcgttcaaaggtatcgacaacgcgtcgtactaccggctgatgcctgacgagccgcgctactacatcaacgacaccggcaccggcaacacgctgaacctgtcgcatccgcgcgtattgcagatggtgaccgacagcctgcgctactgggtgacggaaatgaaagtggacggtttccgtttcgacctcgccacgattctcggccgcgaactgcacggtttcgacgaaggaggcggttttctcgacagttgccggcaggaccccgtgctgtccagcgtgcggctggtggccgagccgtgggattgcggtcccggcggttatcaggtgggcggctttccgcccggctgggcggagtggaacgaccgctttcgcgataccgtgcgcgaatactggaagggcgacgaaggcaaggtcccggatctcgccacgcgtctcaccggttcgggcgacaagttcaaccatcgcggccgccgcccgtgggccagcgtgaacttcatcgccgcgcacgacggcttcacgctcaacgatctggtttcgtacaacgacaaacacaacgaagccaacggcgaggacaacaaggacggccattccgacaacaaatcctggaacatgggcgtggaaggcccgaccgacgatccggacattcgtcagcaacgcgagcgacagaagcgcaatctgctcgccacgctgctgttgtcgcaaggcacgccgatgattctcgcgggcgacgaattcggccgcacgcagaagggcaacaacaacgcctattgtcaggacaacgagatcagctgggtcgattgggaagcgatcgacgacgacggccgcgcgctgatcgagttcgtcaggaatctgaccacgctgcgccaccgtctgccggtgctgcggcgcggccgctttctgaccggcgaatacaacgaggcgctggacgtgaccgacgcgcgctggatctcgccggacggcaaggatctctcgcaggagcaatgggacgatgcgtccatgcgctgctttggtctcgtgatcgacggccgcgcgcaggcgagcggcattcgccgtccggcttcggacgcgactttgctgctggtgctgaatgcgcatcacgacgtcgtcaatttcacgctgcccgacattcccgaaggccagcgctggacctgcctgctcgacaccaacatgccggtgcgctccgagttgcctcacttcgcggccggcgacgcgtatcaggtgaccgcccgctcgctgctgctgcttgcgctggaagcgccgagccgcgccacgcagcgcgtgttcgaccgcctcgaagaacagctgaccaccgaggatagcgaaccgcccgcgcaagcttga

SEQ ID NO: 55862 - protein, 738 aa, Burkholderia xenovorans LB400
MSSQVNYSTRIAEGTPFPLGATWNGSGVNFALFSAHATKVELCLFDETGENEIERIELPEYTDEVWHVFVPNLKPGAVYGYRVHGPYEPEKGHRFNPNKLLLDPYAKAHIGELKWAPEIFGYTLDSEEGDLSFDERDSAPFVPKCKVVDANFSWSHPERNALPWERVIFYEAHVRGFTKRHPEVPENLRGTFAGLGQQVVLDYIKNLGVTSVELMPIQTFVNDSYLLDKGLTNYWGYNTIGFFAADPRFFASSIDSVGEFKEMVDRFHNANLEVILDVVYNHTAEGNERGPTISFKGIDNASYYRLMPDEPRYYINDTGTGNTLNLSHPRVLQMVTDSLRYWVTEMKVDGFRFDLATILGRELHGFDEGGGFLDSCRQDPVLSSVRLVAEPWDCGPGGYQVGGFPPGWAEWNDRFRDTVREYWKGDEGKVPDLATRLTGSGDKFNHRGRRPWASVNFIAAHDGFTLNDLVSYNDKHNEANGEDNKDGHSDNKSWNMGVEGPTDDPDIRQQRERQKRNLLATLLLSQGTPMILAGDEFGRTQKGNNNAYCQDNEISWVDWEAIDDDGRALIEFVRNLTTLRHRLPVLRRGRFLTGEYNEALDVTDARWISPDGKDLSQEQWDDASMRCFGLVIDGRAQASGIRRPASDATLLLVLNAHHDVVNFTLPDIPEGQRWTCLLDTNMPVRSELPHFAAGDAYQVTARSLLLLALEAPSRATQRVFDRLEEQLTTEDSEPPAQA

SEQ ID NO: 55863 - DNA, 2088 bp, Acidobacteria bacterium Ellin345
  CDS (1)..(2088): transl_table=11
atggcccgaccgccgcgaactcccgcccagcctgtgcccggcctaacccacccgctcggcgcgaccatttgccctgagggcgttaacttcagcctattttcgcggcatgctaccggtgtcgagctgcttttctttgaccacgcagaagacgcccagcctactcgtgtgttccggctggatcccgtgcgaaatcgaacctattactactggcacctctgcataccggacgtctcgcccggccagctatacggctatcgcgtgtacgggccattcgcgccggacaaagggcaccgcttcaatcccgagaagctgctgctcgatccttatggtcgttgtgtcgtcacgccgaagacatatagccgggatgccgccattactccgggcgacaactgcgccacggcgatgaagaatgccgtcgtggacgtgcacgattacgactgggagggcgatgaaccgttacgatgtcccgccagccgaaccattgtttacgagatgcatgtccgcggcttcacccggaatcccaactccggcgttgctgaagagaagcgcggcacatttgctggtgtcatcgaaaaaattccttacctgaaagatctcgggatcaccgcggttgagttgctgccggttttcgaattcgatccgctcgactgtcctccggggctggtgaattactggggctatgcgcccgtttctttcttctcgccgcacaaggcgtacagctcagggcacgcctatctcgcggcgatcaacgaattccgcgacatggtgaaagcgctgcatcgcgcgggaatcgaagtcatcctcgacgtggtttacaaccataccgctgaaggaagtgaaaccggtccaaccttcagcttcaagggcattgataacctcacctactacattctcgagagtgatcgttgccgctacgccaactacagcggtaccggcaacacattcaaagccaaccatcccgtcgtccgccgcatgattgtggacagcctttgttactgggtggaagagatgcacgtggatggtttccgcttcgacctcgcgtcgatcctcgcgcgcgattccagcggcaacacgatggcgaatccgccggcgctgtgggacatcgaatccgagccgcgcctggctggaacgaagtttatggccgaagcctgggacgccgccggcctctaccaggtcggcacctttgtcggcgactcttggaaggaatggaacggccgcttccgcgacgatgtgcgcgacttctttcgcggcgaggatggcactgtttgcaagctggcgtcgcgcttacttggcagcccggatatctacgggcacaagggaagagaggccgagcagagcgtgaactttgtcacctgtcacgatggcttcaccctcaacgatctggtttcgtacgaggtgaagcacaatgaagcgaatcgcgagcagaatcgcgatggtcacgacgacaaccggagctggaactgcggcgtggaaggcccgacgaatgatcctgcgatcaaccggttgcgcaataaacaggtaaagaattttctcgcgacaacactgctctcgctcggcatgcccatgctcaccatgggtgacgaagtgcgccacacgcagcgcggcaacaacaacgcctattgccaggacaacgagctcagttggttcgactggagcttgctggacgagcatgccgatattcaccgctttgtgaaaatgattgccctgaggcgtcttctgcgcgacgttgcgccggagcaggaacgtagatcactgacggaatttctcgagtcggcacgcaaaacctggcatggtgtggaactcgaccaaccggactgggcggaccattcgcactcgatcgcgctgtgcattgaggtggcagaggaaggcatcgtcttccactttattctaaacggctacaccgaagggctcgatttcgaacttccaccacgcctcaacggttcgcgctggcgacggtggattgataccagcctcgactctcctgatgacatcgtgaactggcgaaccgctcccgccatacagggcccgcgttaccacgcggccgcgcattccacggttgtgctgatctccgcaacggacggcccatag

SEQ ID NO: 55864 - protein, 695 aa, Acidobacteria bacterium Ellin345
MARPPRTPAQPVPGLTHPLGATICPEGVNFSLFSRHATGVELLFFDHAEDAQPTRVFRLDPVRNRTYYYWHLCIPDVSPGQLYGYRVYGPFAPDKGHRFNPEKLLLDPYGRCVVTPKTYSRDAAITPGDNCATAMKNAVVDVHDYDWEGDEPLRCPASRTIVYEMHVRGFTRNPNSGVAEEKRGTFAGVIEKIPYLKDLGITAVELLPVFEFDPLDCPPGLVNYWGYAPVSFFSPHKAYSSGHAYLAAINEFRDMVKALHRAGIEVILDVVYNHTAEGSETGPTFSFKGIDNLTYYILESDRCRYANYSGTGNTFKANHPVVRRMIVDSLCYWVEEMHVDGFRFDLASILARDSSGNTMANPPALWDIESEPRLAGTKFMAEAWDAAGLYQVGTFVGDSWKEWNGRFRDDVRDFFRGEDGTVCKLASRLLGSPDIYGHKGREAEQSVNFVTCHDGFTLNDLVSYEVKHNEANREQNRDGHDDNRSWNCGVEGPTNDPAINRLRNKQVKNFLATTLLSLGMPMLTMGDEVRHTQRGNNNAYCQDNELSWFDWSLLDEHADIHRFVKMIALRRLLRDVAPEQERRSLTEFLESARKTWHGVELDQPDWADHSHSIALCIEVAEEGIVFHFILNGYTEGLDFELPPRLNGSRWRRWIDTSLDSPDDIVNWRTAPAIQGPRYHAAAHSTVVLISATDGP

SEQ ID NO: 55865 - DNA, 2127 bp, Myxococcus xanthus DK 1622
  CDS (1)..(2127): transl_table=11
atgagtcgggaagtctggccaggcaagccctggcctcgcggcgccaccttcgatggttcaggggtcaacttcgccatctactcccaggtcgcgacccgcgtggaggtctgcctgttcgaccccgcggacccggcgcgcgaaatcgaacggttcggcctgccggagtccacggacttcgtgcaccacggctacgtgccgggcctggagccaggcacgctctacggtctgcgcgttcatggcccgtacgagcccaccaagggccaccgctgcaatccgcacaagctgctggtggacccctacgccaaggcgctctacggcgacgtggactggcgccagccggtgttcggctatccactggggcacgagcagcaggacctggcgcgagacgaacgcgacagcgcggcgggcgtgcccaagtccgtggtggtgagcgactacttcgactggggcaatgaccggcgcccggacatcaactggcgtgagacggtgctgtacgaggctcacgtgcgcggcctcaccatgcgccaccccggcgtgcccgaacacctgcgtggcacctacgcgggcctggcctgcccgcccgtcatcgagcatttgctgaagctgggcgtgacgtcggtggagttgctgccggtgcatgccttcgcggacgactcgttcctcgacgacaagaagctgtccaacttctggggctacaacacgctgggctacttcgcgccggagcagtactacgccagtcgcaagacgcccggcgccgccgtcgccgagttcaaggcgatggtgagggacctgcacgccgcgggcatcgaggtcatcctcgacgtcgtctacaaccacacctgcgagggcaaccacctggggcccacgctgtcgctcaagggcatcgacaacgcgagctactactggctgatgccggacgggcggcactacctggacttcaccgggtgcggcaacagcatcaacgcgtccaacccgcaggcggcgcggctcatcatcgacagcctccgctactgggtgacggagatgcacgtggacgggttccgcttcgacctcgccacggtgctgggccgcacgggtgaaggcgcgttcgaccgcgacgcggcgctgttccagattctccaccaggacccggtgctcggccgcgtgaaactcatcgccgagccctgggacgtgggcctcggcggctaccaggtgggcggattccctccgccctggcgcgagtggaacggcaagtaccgggacgcgctgcgccgctactggaagggcgatgagaacctcgccagtgagatgggctaccgaatcacgggcaacgcggacctgtacgcggaggcgcgccggcggccccaggcgagcatcaacttcgtcaccgcgcatgacggcttcacgctgcacgacctggtgacgtacagccacaagcacaacgaggccaacggcgagcacaaccgtgacggcgcggacgacaaccagtcgtggaactgcggcgtggagggtgagacggacaaagcggacgtcatcgccctgcgcgagcggcagaagcgcaacctgctggcctcgctcttcctgtccaccggcatcccgatgattgtcgcgggtgacgagatgggccgcacgcagggcggcaacaacaacgcgtactgccaggacaacgagctgtcgtgggtggattggaacctggatgagcggcggcggaagctgctggcgttcacgcgcaagctcatccacttccgccaccgccagccggtgctccagcgccgccgcttcttcaagggtcagcacctgtgggactccgagcacaaggacctgacgtggttccggccggatggcccggagatgaaggcggaggactgggagaagcccttcgtgcgctcgctggcattcctcctgggcggcgacgccatccccacgccggacgagcgcgggcagcgcatcatcggtgacgcgctgctgatactgctcaactcgcaccatgagccggtgacgtacaagctgccgcctgccgcgcagagccagcgatgggagctggagctctgcaccaccgacgacaaccggggaccggagccggtgaaaggtgagacgttcgagctcatcggccgctcgctcgcggtgttccggcaggtcgcggactga

SEQ ID NO: 55866 - protein, 708 aa, Myxococcus xanthus DK 1622
MSREVWPGKPWPRGATFDGSGVNFAIYSQVATRVEVCLFDPADPAREIERFGLPESTDFVHHGYVPGLEPGTLYGLRVHGPYEPTKGHRCNPHKLLVDPYAKALYGDVDWRQPVFGYPLGHEQQDLARDERDSAAGVPKSVVVSDYFDWGNDRRPDINWRETVLYEAHVRGLTMRHPGVPEHLRGTYAGLACPPVIEHLLKLGVTSVELLPVHAFADDSFLDDKKLSNFWGYNTLGYFAPEQYYASRKTPGAAVAEFKAMVRDLHAAGIEVILDVVYNHTCEGNHLGPTLSLKGIDNASYYWLMPDGRHYLDFTGCGNSINASNPQAARLIIDSLRYWVTEMHVDGFRFDLATVLGRTGEGAFDRDAALFQILHQDPVLGRVKLIAEPWDVGLGGYQVGGFPPPWREWNGKYRDALRRYWKGDENLASEMGYRITGNADLYAEARRRPQASINFVTAHDGFTLHDLVTYSHKHNEANGEHNRDGADDNQSWNCGVEGETDKADVIALRERQKRNLLASLFLSTGIPMIVAGDEMGRTQGGNNNAYCQDNELSWVDWNLDERRRKLLAFTRKLIHFRHRQPVLQRRRFFKGQHLWDSEHKDLTWFRPDGPEMKAEDWEKPFVRSLAFLLGGDAIPTPDERGQRIIGDALLILLNSHHEPVTYKLPPAAQSQRWELELCTTDDNRGPEPVKGETFELIGRSLAVFRQVAD

SEQ ID NO: 55867 - DNA, 2142 bp, Myxococcus xanthus DK 1622
  CDS (1)..(2142): transl_table=11
atgaggagggccgaggtgcttccagggaagccgtatcccctgggcgccacgttcgatgggcagggtgtcaacttcgccgttttcagcgagcacgcgaagaaggtcgaggtctgtctcttcgatccggaggaccccgcgaaggagacgcgccgctttcccttgctggagacgacgcaccaggtgtggcacggctacgtgcctggcctggccgcgggcgccctctacggactgcgcgtgcacgggccctacgagccgaagaaggggctgcgcttcaacccccacaagctgttggtggacccgtatgcccgggccatccacggccaggtggactaccaggcccccatctacgcctatacgccgggcaccaaggaggacgacctcgcgttcgacacgcgcgatgacgcggccgccgtgcccaagggcgtggtgatgggcgcggacaccttcgactgggagggagataccccgcctggcgtgccgtggcacgacacgctcatctatgaagtccacgtgaagggcttcacccagctgcacccgcgcgtcccggaggcgctgcggggcacctacgcggggctggcgcacccggccagcatcgagcacctgaagaaggtgggcgtcaccgcggtggagctgctgcccatccagcacatcgtcgacgagcctttcctcatccagcgcgagaaggtcaattactggggctacaacacgctggggttcttcgcgccggacgcgcgctacagcggctcgggttcgctgggcgggcaggtggacgagttcaagcgcatggtgaagcagctgcaccgcgctggcatcgaggtgctgctcgacgtcgtctacaaccacacctgcgaaggcaaccagctgggccccacgctgtccttcaagggcgtggacaacgcggcgtactaccggctcacggagaaggacccgcgctactacctggacgtcaccgggtgcgggaactcgtggaacgccacgcacccgtacgcgctgaagctcgtcgccgactccctgcgctattgggtggaggagatgcatgtggacgggttccgcttcgacctggccaccacgctgggaagagacaggcacggctacgacacccgcgccgccttcttccaaatcatccaccaggacccggtgctcagccgggtgaagctcatctccgaaccctgggacgtgggcgactttggctaccaggtgggcaacttcccggtgctgtggagcgagtggaacggcaagtaccgcgacaccatccgccgctactggaagggcgatgaccggcaggcggcggagattggctaccgcctcaccggcagctcggacctgttctcactgtccggccgcaagcccgcagcgagcgtgaacttcgtcaccgcgcacgacggcttcacgctgcacgacctcgtcacgtacaacgacaagcacaacgaggcgaacggtgaggagaaccgcgacggcgccaacgacaaccactcctggaactgcggggtggagggcgagacgaccgacgccgaaatcaacgccctgcgcgaacagcagaagcgcaacttcctggcgacgctcttcctgtcccagggcgtgcccatgctggtggccggcgacgagatgggccgcacgcagaagggcaacaacaacgcctactgccaggacaacgagctgtcgtgggtggactgggagctgaacgacacgcagcgcgcgctgctggacttcacctgcgccctgaccaagctgcggcgtgagcagccggtgctgcacaagcggcgcttcttccgcggcgcccatatgtgggacagcgagctgaaggacctggcgtggttccggcccgatggccaggagatgcgcaaggacgactgggagaagccctacgtgcgctccctgggattcctgctgggcggtgacgccatcaccgcgccggacgatgaagggaaccggattgtgggggacaccatcctggtgctgatgaacgcccaccacgagcccatcaccttcaggctgcctgctgtcgaatggggcgcggactgggagctggtggtggacacggcgttggcgggggagtcgcttcgcacgcatacgccggcggggggcaccgtgcaggtggtgggccgctccctggcggtgctgcgccgcccggcgacggagtag

SEQ ID NO: 55868 - protein, 713 aa, Myxococcus xanthus DK 1622
MRRAEVLPGKPYPLGATFDGQGVNFAVFSEHAKKVEVCLFDPEDPAKETRRFPLLETTHQVWHGYVPGLAAGALYGLRVHGPYEPKKGLRFNPHKLLVDPYARAIHGQVDYQAPIYAYTPGTKEDDLAFDTRDDAAAVPKGVVMGADTFDWEGDTPPGVPWHDTLIYEVHVKGFTQLHPRVPEALRGTYAGLAHPASIEHLKKVGVTAVELLPIQHIVDEPFLIQREKVNYWGYNTLGFFAPDARYSGSGSLGGQVDEFKRMVKQLHRAGIEVLLDVVYNHTCEGNQLGPTLSFKGVDNAAYYRLTEKDPRYYLDVTGCGNSWNATHPYALKLVADSLRYWVEEMHVDGFRFDLATTLGRDRHGYDTRAAFFQIIHQDPVLSRVKLISEPWDVGDFGYQVGNFPVLWSEWNGKYRDTIRRYWKGDDRQAAEIGYRLTGSSDLFSLSGRKPAASVNFVTAHDGFTLHDLVTYNDKHNEANGEENRDGANDNHSWNCGVEGETTDAEINALREQQKRNFLATLFLSQGVPMLVAGDEMGRTQKGNNNAYCQDNELSWVDWELNDTQRALLDFTCALTKLRREQPVLHKRRFFRGAHMWDSELKDLAWFRPDGQEMRKDDWEKPYVRSLGFLLGGDAITAPDDEGNRIVGDTILVLMNAHHEPITFRLPAVEWGADWELVVDTALAGESLRTHTPAGGTVQVVGRSLAVLRRPATE

SEQ ID NO: 55869 - DNA, 2145 bp, Mycobacterium sp. MCS
  CDS (1)..(2145): transl_table=11
ttggccgcagcccccaaaccgaacgtcacccccgaagtatggcccggtaaggcataccccctcggagcgacgtatgacggctttggcaccaatttcgcgttgttcagcgaggccgccgagcgtgtggagctgtgcctgttcgacgccgacggcgagcagacggcgtgtgtcaccctgcccgaggtcgacggcttcgtctggcacgggttcatcccgaacatcgagccgggtcagcgctacggctaccgcgtgcacggcccgtacgatccgcccaacggtcagcggtgcaatccgaacaagctgctgctcgacccgtacgccaaggccatcgacggcaccttcgactggggccagccgctgttcagctacaacttcggcgatccggacagccgcaacgacgacgactcggcggattgcatgccgaagtcggtggtgatcaacccgtacttcgactggggcaccgaccgcccgccgaaccatgagtacgccgacacggtgatctacgaggcccacgtcaagggtctgacgcagacccaccccgacatccccgagcagatccgcggcacctactcggcggtggcccacccggtgatcatcgaccacctcaaggcgctcggtgtcaacgcgatcgagctgatgccggtgcaccacttcgccaacgactcgacgctgctcgacaaggggctgtcgaactactggggctacaacacgatcgggttcctcgcccccgatcccaagtacagctcgagcctcacccccggtggccaggtgcaggagttcaaggcgatggtgcgcaccctgcacgaggcggggatcgaggtcatcctcgacgtggtctacaaccacaccgccgagggcaaccacatggggccgacgctgtccttccgcggcatcgacaacgccgcgtactaccggctcgtcgacgacgacaagcgctactacatggactacaccggcaccggcaacagcctcaacgccggccacccgcacgccctgcagctcatcatggactcgctgcggtactgggtgaccgagatgcacgtcgacggtttccggttcgatctggcctcgacgctggcccgcgagttctacgacgtcgaccggctggcgacgttcttcgaactcgtgcagcaggatccgaccgtcagccaggtcaagctgatcgctgaaccgtgggacgtcggcccgggcgggtaccaggtcggcaacttcccgccgcagtggacggagtggaacggcaagtaccgcgacaccgtgcgcgactactggcgcggcgaatcggcgacgctggacgaattcgcctcgaggctgaccgggtcgtcggacctctacgagcacacctcgcgcaggcccgtcgcgtcgatcaacttcgtcatcgcccacgacggcttcacgctgcgggacctggtgtcctacaacgagaaacacaacgaggacaacggcgaggacaacaacgacggggagagccacaaccggtcgtggaactgcggtgtggaaggcccgacggacgatcctcaggtcaacgcgctacgcagccgtcagcagcgcaacttcctcaccaccctgctgctgagccagggcgtgccgatgatcgcgcacggcgacgagctcgggcgcacgcagcacggcaacaacaacgtctactgccaggacaacgaactgtcctggatcgactggtcgaccgtcgacaccgagttgatggcgttcacccagaaggtctcggaactgcgcgccgcacacccggtgttccgtcggcgccggttcttctccggccgtccggtccgccagcgcggtgcgcccggcctccccgacatcgcctggttcgcccccgacggctcggagatgaccgacgaggactgggacagcggcttcgccaagtcgatcgcggtctacctcaacggccagggcatccccgatctggacgtccgcggtcagcgcgtcaccgacgactcgttcctgctgtgtttcaacgcccaccacgagccgctcgaattcgccatgcccgcagcggaattcgcccgggcctggctcccggtgatcaacaccgcagacgacgatgacgcccgcgagtcggtgactgcgggcgccaagatcgaggtcgccgaacggtcggtgctggtgctgcaggccgtcaacgagccctga

SEQ ID NO: 55870 - protein, 714 aa, Mycobacterium sp. MCS
MAAAPKPNVTPEVWPGKAYPLGATYDGFGTNFALFSEAAERVELCLFDADGEQTACVTLPEVDGFVWHGFIPNIEPGQRYGYRVHGPYDPPNGQRCNPNKLLLDPYAKAIDGTFDWGQPLFSYNFGDPDSRNDDDSADCMPKSVVINPYFDWGTDRPPNHEYADTVIYEAHVKGLTQTHPDIPEQIRGTYSAVAHPVIIDHLKALGVNAIELMPVHHFANDSTLLDKGLSNYWGYNTIGFLAPDPKYSSSLTPGGQVQEFKAMVRTLHEAGIEVILDVVYNHTAEGNHMGPTLSFRGIDNAAYYRLVDDDKRYYMDYTGTGNSLNAGHPHALQLIMDSLRYWVTEMHVDGFRFDLASTLAREFYDVDRLATFFELVQQDPTVSQVKLIAEPWDVGPGGYQVGNFPPQWTEWNGKYRDTVRDYWRGESATLDEFASRLTGSSDLYEHTSRRPVASINFVIAHDGFTLRDLVSYNEKHNEDNGEDNNDGESHNRSWNCGVEGPTDDPQVNALRSRQQRNFLTTLLLSQGVPMIAHGDELGRTQHGNNNVYCQDNELSWIDWSTVDTELMAFTQKVSELRAAHPVFRRRRFFSGRPVRQRGAPGLPDIAWFAPDGSEMTDEDWDSGFAKSIAVYLNGQGIPDLDVRGQRVTDDSFLLCFNAHHEPLEFAMPAAEFARAWLPVINTADDDDARESVTAGAKIEVAERSVLVLQAVNEP

SEQ ID NO: 55871 - DNA, 2148 bp, Rubrobacter xylanophilus DSM 9941
  CDS (1)..(2148): transl_table=11
ttgagcgagcagcgcagcgtggtctggcccggcgaaccctacccgctcggggccacctgggacggggagggggtcaacttcgccctcttctccgagaacgccgagagggtcgagctctgcctcttcgacccctcgggcaggagggaggtcgagcgcatagagctccgggagcagaccgaccagatctggcactgctacctgccctacgggcggctcggccagctctacggctaccgggtctacgggccctacgaccccgagaacggccaccggttcaaccccaacaagctcctcctcgacccctacgccaagtccatcgcgggcagcctggactggcggcacccccacttcggctacaggcccggcgaggacgacctctccttcgacgagcgggacaacgccgccggggccctcaagtgccgcgtggtggacaccgccttcacctggggcgacgaccgcccccccaggacgccctggcacgacaccataatctacgagctgcacgtaaagggcttcacccggctccaccccgagatcccaccccacctgcgcggcacctacgccgggctggcctcggccccggccatagagcacctgaagcggctcggcgtcaccgccgtggagctgatgcccgtccacttctttgtcgacgacaagcacctcctggacaggggcctcagaaactactggggctacaactccatcggcttcttcgcccccgacgcccgctactcggccaccggctccataaacgagttcaagaccatggtcaagaggctccactccgcggggctggaggtgatcctggacgtcgtctacaaccacaccgccgagggcaaccacctgggccccacgctctccttccgggggatagacaacgccgcctactaccggctcgtccccgacgaccggcgctactacatggactacaccggcaccggcaacaccctcaacatgatgcacccgcgcgtcctgcagctcatcatggactcgctgcgctactggatcctggagatgcacgtcgacggcttccgcttcgacctggcgagcgcgctcgcccgcgagctgcacgacgtggacaagctctccgccttcttcgacatcatccggcaggacccggtgatctcgcaggtcaagctcatcgccgagccctgggacgtgggggagggcggctaccaggtcgggaacttcccggtgggctggacggagtggaacggcaagtaccgcgacgcggtccgctcctactggaagggcgacggcgggctggtggacgagctggcctaccgcctgaccggctcctcggacctctacgagcgcgacggacgccgcccctacgcctccatcaacttcgtcaccgcccacgacggcttcaccctgcaggacctcgtcagctacaacgagaagcacaacgaggccaacggcgaggacaaccgggacggccacgacgacaaccgcagctggaactgcggggtggagggccccacgggcgacaggggcatccgccgcctgcgggcccgccagaagcgcaacctcatggccaccctcctgctctcccagggggtgcccatgatcctccacggcgacgagatgggccgcacccagaacggcaacaacaacgcctactgccaggacaacgagacgagctgggtgagctggaacctcgcccccgccgaccgcaacttcctggccttcgtgcggcgcatgatccgcctgcgccgcgagcaccccatcttccgccgccgcagcttcttccagggccgccggctgcggggcgcgggggtgaaggacatcacctggctcacccccgacggggacgagatgaccgacgaggagtgggcgagctccttcgcccgctccctggggctgcagatgtccggcatcctcgagggggaggtggacgcgcaggggcggcagatccaggacgacgacttcctgctgctcctcaacgcccaccacgaggacctgagcttcgtcctcccccccgtcccggaggacgcccgctgggaggcggtggtggacaccgcccacgccgccgggctgaagcccgccggcttctacaagcccggcgacgcctaccccctgaaggcccgctcgatggcggtgctcgccaacgcccgccgcgaggcgccggaggaggaggaagagtga

SEQ ID NO: 55872 - protein, 715 aa, Rubrobacter xylanophilus DSM 9941
MSEQRSVVWPGEPYPLGATWDGEGVNFALFSENAERVELCLFDPSGRREVERIELREQTDQIWHCYLPYGRLGQLYGYRVYGPYDPENGHRFNPNKLLLDPYAKSIAGSLDWRHPHFGYRPGEDDLSFDERDNAAGALKCRVVDTAFTWGDDRPPRTPWHDTIIYELHVKGFTRLHPEIPPHLRGTYAGLASAPAIEHLKRLGVTAVELMPVHFFVDDKHLLDRGLRNYWGYNSIGFFAPDARYSATGSINEFKTMVKRLHSAGLEVILDVVYNHTAEGNHLGPTLSFRGIDNAAYYRLVPDDRRYYMDYTGTGNTLNMMHPRVLQLIMDSLRYWILEMHVDGFRFDLASALARELHDVDKLSAFFDIIRQDPVISQVKLIAEPWDVGEGGYQVGNFPVGWTEWNGKYRDAVRSYWKGDGGLVDELAYRLTGSSDLYERDGRRPYASINFVTAHDGFTLQDLVSYNEKHNEANGEDNRDGHDDNRSWNCGVEGPTGDRGIRRLRARQKRNLMATLLLSQGVPMILHGDEMGRTQNGNNNAYCQDNETSWVSWNLAPADRNFLAFVRRMIRLRREHPIFRRRSFFQGRRLRGAGVKDITWLTPDGDEMTDEEWASSFARSLGLQMSGILEGEVDAQGRQIQDDDFLLLLNAHHEDLSFVLPPVPEDARWEAVVDTAHAAGLKPAGFYKPGDAYPLKARSMAVLANARREAPEEEEE

SEQ ID NO: 55873 - DNA, 2262 bp, Rhodococcus sp. RHA1
  CDS (1)..(2262): transl_table=11
atggaagcaagcgagtcgaccggcaccacgcccattcccgtgtggcccggcagcgcctacccactgggcgccacctacgacggagccgggacgaacttctcgttgttctccgaggtcgccgaggcggtcgatctgtgcctgatcgcgaaggacggcaccgagacgcggattcgcctcgacgaggtcgacggttacgtgtggcacgcgtacctgccgaccgtcgttcccggtcagcggtacgggtaccggatccacggcccctgggatccctctgccgggcaccgctgcgaccccagcaagctcctcctcgacccctacggcaaggcgttcgacggcgagttcgacggagaccggtccctgttctcctacgacatcgacgcgcccgccgaggccgcccccgacgaatcggaggacgccgccctactcgtcgacacggacgacgacatcgaggcagaggacgaggcgggggccgagctcgcggcggaacccgaggagacctcggcgcccggactgcccggacacgactcgctcggccacacgatgacgacggtggtgatcaacccgttcttcgactgggctgccgaccgcgcaccgaagcacccgtaccacgacaccgtgatctacgaggcccacgtcaagggcatgacggcgacgcatcccggtgtgccggaagagctccgcggcacgtatgcgggcctcgcgcatccggtgatcatcgaccacctcgtcgacctcggggtcaccgcgatcgaactgatgccggtgcatcagttcatgcacgatcagacgctgctggacaaggggctgcggaactactggggttacaacacgttcggcttcctcgccccgcacaccgggtattcgtcggcggagaagccgggcgccgcggtgtcggagttcaaggcgatggtccgctcgttccacgaagcgggcatcgaggtcatcctcgacgtcgtctacaaccacaccgccgagggcaaccacctcggtccgaccatctcgttccgcggcatcgacaacgccgcctactaccggctcgtcgacggcgacgccgagcactacatggactacacgggcaccgggaacagcctcaacgcccggcacccgcacacgctgcaactgatcatggactcgctgcggtactgggtcaccgagatgcacgtcgacggattccggttcgacctcgcgtccacgctcgcccgtgaactgcacgacgtcgaccggctctccgcgttcttcgacctcgtccagcaggatccgatcgtcagccaggtcaagctcatcgccgaaccgtgggacatcggcgaaggcgggtaccaggtgggcaacttcccgggcctgtggacggagtggaacggcaagtaccgggacacggtccgcgactactggcgcggcgaacccgcgacgctcggcgagttcgcgtcccggctgaccgggtcctccgacctctacgaggccaccgggcgccgccccggcgcgagcatcaacttcgtcatcgcccacgacgggttcaccctgcacgacctggtgtcgtacaacgagaagcacaacgaggccaacggcgagggcaacaacgacggcgagagccacaaccggtcctggaactgcggtgtcgaggggccgacggacgatccggagatcctcgatctgcgcgggcggcagagccgcaacatcctggccaccctgctgctcagccaggggacgccgatgctggcgcacggcgacgagatgggccgcacccagcagggcaacaacaacgtgtactgccaggactcggaactgtcgtggatggactggtcgctggcggacgccaacgccgacctggtcgagttcaccaaacgggtgatcgccttgcggatgaagaatccggtgttccgtcgtcgccggttcttcgagggcacccccatccgcagcggtgaccagacccgcgacatcgcgtggctcaccccggccggtgaggagatgacccccgaggactgggacagcggtttcgggaagtccctcgcggtcttcctcaacggcgagggcatccccgaacccaaccaccgcggcgagcgggtggtcggcgactcgttcctgctgtgtttcaacgcgcacgacgaggagatcgagttctccacgccgaattccgattatgccgacgaatgggcggtcgtgctcgacaccgccgtcccgacgggggcgaaggaagcggtgatcaaggccggggatccgctgcaggtcgaggcccggtcgctggtcgtgctgcgccggacagcctga

SEQ ID NO: 55874 - protein, 753 aa, Rhodococcus sp. RHA1
MEASESTGTTPIPVWPGSAYPLGATYDGAGTNFSLFSEVAEAVDLCLIAKDGTETRIRLDEVDGYVWHAYLPTVVPGQRYGYRIHGPWDPSAGHRCDPSKLLLDPYGKAFDGEFDGDRSLFSYDIDAPAEAAPDESEDAALLVDTDDDIEAEDEAGAELAAEPEETSAPGLPGHDSLGHTMTTVVINPFFDWAADRAPKHPYHDTVIYEAHVKGMTATHPGVPEELRGTYAGLAHPVIIDHLVDLGVTAIELMPVHQFMHDQTLLDKGLRNYWGYNTFGFLAPHTGYSSAEKPGAAVSEFKAMVRSFHEAGIEVILDVVYNHTAEGNHLGPTISFRGIDNAAYYRLVDGDAEHYMDYTGTGNSLNARHPHTLQLIMDSLRYWVTEMHVDGFRFDLASTLARELHDVDRLSAFFDLVQQDPIVSQVKLIAEPWDIGEGGYQVGNFPGLWTEWNGKYRDTVRDYWRGEPATLGEFASRLTGSSDLYEATGRRPGASINFVIAHDGFTLHDLVSYNEKHNEANGEGNNDGESHNRSWNCGVEGPTDDPEILDLRGRQSRNILATLLLSQGTPMLAHGDEMGRTQQGNNNVYCQDSELSWMDWSLADANADLVEFTKRVIALRMKNPVFRRRRFFEGTPIRSGDQTRDIAWLTPAGEEMTPEDWDSGFGKSLAVFLNGEGIPEPNHRGERVVGDSFLLCFNAHDEEIEFSTPNSDYADEWAVVLDTAVPTGAKEAVIKAGDPLQVEARSLVVLRRTA

SEQ ID NO: 55875 - DNA, 2118 bp, Trichodesmium erythraeum IMS101
  CDS (1)..(2118): transl_table=11
atgaatcttaatatcttacccggtaatacttttcccattggtgccactgtctgccaagaccccaaaggagtaaacttctctatctattccaaaaatgctacagcaatagaattactactatttgatgaaccattagcagctaaaccaaagcaagtaattttacttgacccaacacaacacagaactcatcattactggcatatttttatttctggtattggagcgggacaaatatatgcctatcgagtctatggaccctttaacccagaaaaaggtcatcggtttgatggtacaaaagttttacttgacccttatgctagaattgtagtgggacaagaaaaatatagtcgtaaagctgctacaggtaacggtaataattgtgcttacgctctcaagggggtggtagttgacccaactacctatgactgggaagatgacaaacctttagaaactccctatgctaaaacagttatctatgaaatgcatgttggtggatttactcgtcatcctaattctggtgttgctcctgaaaaacggggtacttttgctgggctaatagaaaaaattccctatctcaaagaattgggaattactgcagtggaattattaccagtccagcaatttgatgaacaagatgtgcgcgaacccctaatcaattattggggctatagtcagatcgctttttttgcacctcaccacagttatagttcccgcaaagatattttcggaccaatggatgagttccgagatatggtaaaggcattgcataaagaaggaatagaagtcattctggatgtagtttttaatcacactgcagagggtaacgaaaacggaccaacagtttctttccgggggttagaaaactcaacttactacattctagaaaagaatgatcgtggatactacagcaattataccggttgtggcaataccttcaatacaaataatccttttgtacatcgcttaattgttgactgtctttgttactgggttagagaaatgcatgttgatgggttccggtttgacttggcatctgttatgtctcggagcatgactggtgatcccttagaagatcctcctgttttgtgggcaattgagtcagatccggttttggcaggcacaaaaattattgctgaagcttgggatgcagccggactttatcaggtgggttcatttattggcgatcgctttgctgaatggaacggacattatcgtgacgatgttcgtcaatttgtcaaaagtgatccccaaatagttgagaaattggcagcaagaattatgggtagtcctgatatttatcctaaaccagatcgagaaccaaatcatagtattaactttattacttgtcatgatggttttactatgaatgatctggtttcttataatgagaaacataatgaagctaattgtgaagataaccgcgatggtgctaatcataattttagttggaattgtggaattgaaggaactacagatcaagaagaaattgaaatgttaagactgcgacaaattaagaacttttttactatactgtttttttctcaaggtacacctatgattttgatgggagatgaagtcaggcgaactcaattaggtaacaacaatagttattgtcagaataataaaagtagttggtttgactggagtcaaattgatcaacaaaatgatttattacgatttgtcaaaaagattattcatttcactcaagaattacaaattacacagttagataaggttttagctactgtaggagcgatacccgaatcatctttggttagcactaaagagaaaactaacttgaataaagtacctaatattagttggcatggaatacatttaggtatacctgattggaatgtaggttccaggactctagcttttagtttaaaacatccagaaagtggtgaatattttcacattatgttgaatgcttattggaaacctttaatgtttgaattgccacctttggaaaggggggaaaattggtatttaattgttaatactgcttttacttctcctaaagattttaataaccttgatgtggcaacaaaagttattggtgttagataccgcttagagccccgggctgctgttattttaatgacaaaaagagattag

SEQ ID NO: 55876 - protein, 705 aa, Trichodesmium erythraeum IMS101
MNLNILPGNTFPIGATVCQDPKGVNFSIYSKNATAIELLLFDEPLAAKPKQVILLDPTQHRTHHYWHIFISGIGAGQIYAYRVYGPFNPEKGHRFDGTKVLLDPYARIVVGQEKYSRKAATGNGNNCAYALKGVVVDPTTYDWEDDKPLETPYAKTVIYEMHVGGFTRHPNSGVAPEKRGTFAGLIEKIPYLKELGITAVELLPVQQFDEQDVREPLINYWGYSQIAFFAPHHSYSSRKDIFGPMDEFRDMVKALHKEGIEVILDVVFNHTAEGNENGPTVSFRGLENSTYYILEKNDRGYYSNYTGCGNTFNTNNPFVHRLIVDCLCYWVREMHVDGFRFDLASVMSRSMTGDPLEDPPVLWAIESDPVLAGTKIIAEAWDAAGLYQVGSFIGDRFAEWNGHYRDDVRQFVKSDPQIVEKLAARIMGSPDIYPKPDREPNHSINFITCHDGFTMNDLVSYNEKHNEANCEDNRDGANHNFSWNCGIEGTTDQEEIEMLRLRQIKNFFTILFFSQGTPMILMGDEVRRTQLGNNNSYCQNNKSSWFDWSQIDQQNDLLRFVKKIIHFTQELQITQLDKVLATVGAIPESSLVSTKEKTNLNKVPNISWHGIHLGIPDWNVGSRTLAFSLKHPESGEYFHIMLNAYWKPLMFELPPLERGENWYLIVNTAFTSPKDFNNLDVATKVIGVRYRLEPRAAVILMTKRD

SEQ ID NO: 55877 - DNA, 2121 bp, Trichodesmium erythraeum IMS101
  CDS (1)..(2121): transl_table=11
atgttacaagagcgtattgatatccatcctacccacagtcatggtgactttaagctccgtagtggaaaaccttttccattcggtgcaactatggtgtctggaggagtaaacttttccatcttctcttcttatgctacatcttgtacattggttttgtttcaaaaaggtgctttaaaaccaatggcagaaattccttttcctgaagaatttcggatagggaatgtttattgtatgattgtctttgatcttgatgttgagaacatcgaatatggctatcgcatggatggaccgaataatttccatgagggtcaatggttcgacaaaagtaaaattctcatggacccctatgctaagattattgggggtagggatgtttggggaaaaacaccaaactgggatgatatttatcaacaccgggggagaattccctatgatgattttgactgggaaaatgaccgcccactagaaattccaccacaagatcagattatctatgaaatgcacgttcgtagctttacggctcatccttcttctggtgtcaaacatccaggcacatttgctgctattcgcgaaaaaattccttacctcaaagaattaggtgttaacgcggtggagttgatgcctatctatgaatttgatgagtttgaaaattctcggcccagccccatcacaggagaaatgctctacaattattggggttatagtacagtcgggttttttgctcctaaggcagggtacgcagcgacaggtaagttaggaatgcagatggatgagttaaaaactctagttaaagacctgcacaaaaatgggattgaagtaattcttgacgttgttttcaaccacacagcagaaggaaatgaaaacggtccgacaatttctttccggggtattgacaataagacatattatatgctaacaccagaaggttattattttaactttagtggttgtggcaatactattaattgtaataaccccattgttcgtaatgtggtgttagattgtttgcgctattgggcaagtgaatatcatattgatggtttcagatttgatttggcttcaattcttggacgtgacccctggggcgcacctttagcaaatcctccattattagaaactttggcttttgacccaattttagctaactgtaagttgattgcagaagcttgggatgctggtggtttatatcaagtgggttccttccctgcttttggacgttgggccgaatggaatggtaagtatcgcgatgcaattcgcaagtttattaaaggtgattgtactgtaggggaaatggcacaaaggatacagggttctccagacctctatgcttggcaaggtcgtggaccggcaacatctattaattttattactgcccacgatggttttactttggctgatttggtttcctacaatgataagcataatgaagctaatggtgaaaataataatgatggtgctaatgataacgaaagttggaactgtggggcagagggttggagtgatgaccctggaataaatgctttgcgtagccgtcagatgcgaaatgcgatcgcaattatgatggttagtcaaggtgttcctatgttgctgatgggagatgaaatagggcggagtaaaaatggtaataataatacttattgccatgactcagaactaaattggctaaattgggagcttctggaaactaatgctgagttatttaggtttgtgaagaattgtgtggcatttcggaaagctcaccctatattgaaaaatcagaaccatttccgaaatcaagattatgtaggtagtggaaaatctgatattacttggcatggtactcaagcttggaatgctgactggtcagataattctcgaactttggcttttatgctttgtggtaaacatgctacagaggtgacaaagcaagataatgatatttatgtagcaatgaatatgcactgggactctctctggtttaacattcccggtttatcagatgggaaacattggcatatttttgttaatactgcttgtgcttcgccagaagatgtttgggaacttgggagcgaacctgttttagaaaatcaacatgggttattacttggggatcgatctatagttattttagtaagtaaataa

SEQ ID NO: 55878 - protein, 706 aa, Trichodesmium erythraeum IMS101
MLQERIDIHPTHSHGDFKLRSGKPFPFGATMVSGGVNFSIFSSYATSCTLVLFQKGALKPMAEIPFPEEFRIGNVYCMIVFDLDVENIEYGYRMDGPNNFHEGQWFDKSKILMDPYAKIIGGRDVWGKTPNWDDIYQHRGRIPYDDFDWENDRPLEIPPQDQIIYEMHVRSFTAHPSSGVKHPGTFAAIREKIPYLKELGVNAVELMPIYEFDEFENSRPSPITGEMLYNYWGYSTVGFFAPKAGYAATGKLGMQMDELKTLVKDLHKNGIEVILDVVFNHTAEGNENGPTISFRGIDNKTYYMLTPEGYYFNFSGCGNTINCNNPIVRNVVLDCLRYWASEYHIDGFRFDLASILGRDPWGAPLANPPLLETLAFDPILANCKLIAEAWDAGGLYQVGSFPAFGRWAEWNGKYRDAIRKFIKGDCTVGEMAQRIQGSPDLYAWQGRGPATSINFITAHDGFTLADLVSYNDKHNEANGENNNDGANDNESWNCGAEGWSDDPGINALRSRQMRNAIAIMMVSQGVPMLLMGDEIGRSKNGNNNTYCHDSELNWLNWELLETNAELFRFVKNCVAFRKAHPILKNQNHFRNQDYVGSGKSDITWHGTQAWNADWSDNSRTLAFMLCGKHATEVTKQDNDIYVAMNMHWDSLWFNIPGLSDGKHWHIFVNTACASPEDVWELGSEPVLENQHGLLLGDRSIVILVSK

SEQ ID NO: 55879 - DNA, 2076 bp, Synechococcus sp. CC9311
  CDS (1)..(2076): transl_table=11
ttgagcacgatccatcgcggcagtccctggccactaggcagcacgatcacacctcgaggtgtgaatttttctgttgcagcgccaacggccaatcggctcgaattactgatcttttcccatccagaggcaaaaacacctgagcaggtgattgagctgtcggaggaacatcgctcggcagattattggcatgtcgaggtcgaaggagttggtgctggctgttgctactgctatcgggtgtttggccccattgagccaggtggccatggctttagacccgccaaggtgctagttgacccctgcgcacgggccattgatggctggaacatctaccagcgagcagcggcgaccggtgcatcacctaacaccgataggtgcttgaaatcggtggtttgcgaacgagatccgttcgatttccaagcccatccccgtcctcgccacagctggcaagagaccgtgatctacgagctccacatcggcgggttcaccaaacgccccgacagcggtgtaagcccagatcaacgcggaacctatttgggagtgatcgaaaagatcccctacctgaaggagctcggggtcaccacgatcgagctccttccgatccaagccttcgatcccaacgatgcccccgctggtcgtgacaatgtttggggctacagccctctcagttggttcgcaccacatcacgaatatgcgacgggctcggatccccattcggctcgagaccaggtccgagacctcgtagcggcctgccatgacgaaggcattgaagtccttttagatgtggtttacaaccacaccaccgaagggaaccgcaacggtcccaccttgagctggaggggatttgctgatcgcaattactaccaccagagcgatgcaggtgagtacatggacgtgagcggatgtggcaacagcattgctgccaacgatccactctccagacaactcatccttgaatcactccgttgctggtccaatgaactgggtatcgacggattccgtttcgatttagggattgctctcagccgcggggagaagctgaaaccccttgaacaccctcccctgtttgaagcgatggaggctgatcctcagctgagtgaactcaaactcgtgagcgaaccctgggattgtggtgggctctatcggctgagtgattttccagccaaacggattggcacctggaatggacacttccgtgatgcattgcgcagtttctggaaaggagatgagggcagcacctggcctctaggacaacgcttccgtggcagtcccgatttgtacaacggaaaagcggcaagccttggtagctcagtgaacctaattacggcccatgacggcttcagcctcttggacctcgtgagcttcaacaacaaacacaacttggccaatggtgaaaacaacagagatggggagaaccacaacaacagctggaatcacggagtcgaggggccgagcagcgatcgcgctatccagacactgcgacggcgccaacaacgcaatctgctcagcaccttgctgctgagtcgtggtgtcccgatgctccttatgggcgatgaagtggggcgcagtcagggagggaataacaacacttggtgccaggacagcccgctcagctggatgatctggggagacgatcactgcgatcacgagttgcaggcctacgtgcaacgcctgctgaatgtgcgccaacaacttgcggttttattcaatccgatccggcctcacattgaaaagaaaccgcttcgatcaaacgattcagacgagttgtggaggcagtggcatggcgtagagctcagcaaacctgactgggctaactggtcccactgcttagcgatgagcctgcagcaaggacatcaaggggctgtgttgtggatgggattcaacgcgtacttcaaatccatgcacttcgacttaccagaagcggcctcgccatggtgtcgattgattgacacagcattacctgctggagaagatctcccaacgcggatcgagcgttggagtccatctggagtgccattagaggcgagaagcctagtagtgatggtggctcaggagtacgcagaccgactgagtttgtga

SEQ ID NO: 55880 - protein, 691 aa, Synechococcus sp. CC9311
MSTIHRGSPWPLGSTITPRGVNFSVAAPTANRLELLIFSHPEAKTPEQVIELSEEHRSADYWHVEVEGVGAGCCYCYRVFGPIEPGGHGFRPAKVLVDPCARAIDGWNIYQRAAATGASPNTDRCLKSVVCERDPFDFQAHPRPRHSWQETVIYELHIGGFTKRPDSGVSPDQRGTYLGVIEKIPYLKELGVTTIELLPIQAFDPNDAPAGRDNVWGYSPLSWFAPHHEYATGSDPHSARDQVRDLVAACHDEGIEVLLDVVYNHTTEGNRNGPTLSWRGFADRNYYHQSDAGEYMDVSGCGNSIAANDPLSRQLILESLRCWSNELGIDGFRFDLGIALSRGEKLKPLEHPPLFEAMEADPQLSELKLVSEPWDCGGLYRLSDFPAKRIGTWNGHFRDALRSFWKGDEGSTWPLGQRFRGSPDLYNGKAASLGSSVNLITAHDGFSLLDLVSFNNKHNLANGENNRDGENHNNSWNHGVEGPSSDRAIQTLRRRQQRNLLSTLLLSRGVPMLLMGDEVGRSQGGNNNTWCQDSPLSWMIWGDDHCDHELQAYVQRLLNVRQQLAVLFNPIRPHIEKKPLRSNDSDELWRQWHGVELSKPDWANWSHCLAMSLQQGHQGAVLWMGFNAYFKSMHFDLPEAASPWCRLIDTALPAGEDLPTRIERWSPSGVPLEARSLVVMVAQEYADRLSL

SEQ ID NO: 55881 - DNA, 2151 bp, Pseudomonas aeruginosa UCBPP-PA14
  CDS (1)..(2151): transl_table=11
atgagcagaaagcgtagccccgccccttcgcggatcagcgaagggcaccccttcccccttggcgccacctgggacggcctcggcgtcaatttcgcgctgttctcggcccacgcgaccaaggtcgagctgtgcctgttcgacgcgcgcggggaaaaggagatcgagcgcatcgaattgcccgagtacaccgacgagatctggcacggctacctgcccgacgcccacccggggcagatctacggctaccgggtgcacggtccctacgagccggatgccggccaccgcttcaatcccaacaaattgctcctcgatccctacgccaagcagttggtcggccgcctgcgctggtctgaggcgctgttcggctacaccatcggctcggccgacgccgacctcagctttgacgagcgcgacagcgcgcccttcgtgcccaagtcgaaggtcatcgatccggccttcacctgggccgagcgcccgccggtacgcgtcccctgggaccgcacggtgatctacgaagcccacctgcgcgggctcagcatgcgccatccgcaggtcccggaggcggttcgcgggaccttcgccgggctgatgaacgccgacctgctggcgcacatccgccggctcggggtgaccagcgtcgagctgctgccgatccacggcttcgtcgacgacaagcacctgttggaaaacggcatgagcaactactggggctacaacagcatcgccttcttcgccccgcacccggcctacctcgccagcggccaggtcaacgagttcaaggagatggtcgcgcacctccacgacgccgggctggagctgatcctcgacgtggtctacaaccacaccgcggaaggcaacgagctgggtccgaccctgtgcatgcgcggcatcgacaacgcctcgtactaccgcctgatgcccgaccagcgccgctactacatcaacgattccggcaccggaaacaccctcgacctcagccacccctgcgtgttgcagatggtcaccgactcgctgcgctactgggccacggagatgcgcgtggacggcttccgcttcgacctggcgaccatcctcggccgccatccggacggtttcgacgagcgccacggcttcctcgtcgcctgccgccaggacccggtgctgagcaagtgcaagctgatcgccgaaccctgggattgcggccccggcggctaccaggtcggcggcttcccgcctggctgggcggaatggaacgaccgtttccgcgattgcgtgcgcgcctactggcgcggcgacgacggcatgctgccggaactggcgcgacgcctaaccgcctccggcgatctctacgaccagcgtggacggcggccctacgcgtcggtgaacttcgtcaccgcccacgacggtttcaccctgcgcgacgtggtttcctacgatcacaagcacaacgaggccaacggcgagaacaacgccgacggcagcgaccacaacctgtcctggaaccacggctgcgagggccccaccgacgacccggagatccgcgccctgcgcctgcgccagatgcgcaacctgctgtccaccctgctgctgtcccagggcaccccgatgctggtcgccggcgacgagttcagccgcacccagcagggcaacaacaatgtctattgccaggacaacgaactgggctggatcgactggcggctggacgacgagggccgttcgctgctggccttcacccagcgcctgctggccctgcgccaacgctatccgatcctgcgcagggggcgcttcctggtcggcgagtacaacgaggcgctgggggtcaaggacgtcacctggctggcgcccggcggcgaggagatgaccgaggaacactggcacgacgagcacgcccgctgtctcggcgtgctcctcgatggccgcgcgcaacccaccgggatcctgcgcagcggtgaggatgccaccctgctgctgatcctcaatgcctaccacgacgcggtgtccttccgtcttcccgaggtggccgaaggcagcggctggtcctgcctgctggatacccagcggccggaggacccgctcggcgaacgctacccgttcgccagcgagttcctggtcggcggccgcagtttcctgctgttcgagctacaaccgccgggcgccggagcggaaggatga

SEQ ID NO: 55882 - protein, 716 aa, Pseudomonas aeruginosa UCBPP-PA14
MSRKRSPAPSRISEGHPFPLGATWDGLGVNFALFSAHATKVELCLFDARGEKEIERIELPEYTDEIWHGYLPDAHPGQIYGYRVHGPYEPDAGHRFNPNKLLLDPYAKQLVGRLRWSEALFGYTIGSADADLSFDERDSAPFVPKSKVIDPAFTWAERPPVRVPWDRTVIYEAHLRGLSMRHPQVPEAVRGTFAGLMNADLLAHIRRLGVTSVELLPIHGFVDDKHLLENGMSNYWGYNSIAFFAPHPAYLASGQVNEFKEMVAHLHDAGLELILDVVYNHTAEGNELGPTLCMRGIDNASYYRLMPDQRRYYINDSGTGNTLDLSHPCVLQMVTDSLRYWATEMRVDGFRFDLATILGRHPDGFDERHGFLVACRQDPVLSKCKLIAEPWDCGPGGYQVGGFPPGWAEWNDRFRDCVRAYWRGDDGMLPELARRLTASGDLYDQRGRRPYASVNFVTAHDGFTLRDVVSYDHKHNEANGENNADGSDHNLSWNHGCEGPTDDPEIRALRLRQMRNLLSTLLLSQGTPMLVAGDEFSRTQQGNNNVYCQDNELGWIDWRLDDEGRSLLAFTQRLLALRQRYPILRRGRFLVGEYNEALGVKDVTWLAPGGEEMTEEHWHDEHARCLGVLLDGRAQPTGILRSGEDATLLLILNAYHDAVSFRLPEVAEGSGWSCLLDTQRPEDPLGERYPFASEFLVGGRSFLLFELQPPGAGAEG

SEQ ID NO: 55883 - DNA, 2091 bp, Solibacter usitatus Ellin6076
  CDS (1)..(2091): transl_table=11
atgacctctaacctcctcgaaaacccgcaatccgcacctccctgcacagccgcactcgccggacgctgctcccctctcggtgccaccgtgcaggccaatggtgtcaacttcagcgtcttctcgcgctccgcctccgccatcgagttgctcctcttcgatcgcgaagacgatgccctccccgcgcgcgtcatccgcatccccgccgccaccaatcgcacctaccactactggcataccttcgtccccggcgcccgccccggccagctctacggctaccgcgtccacgggcccttcgaccccgcctccggattgcgcttcgatccccgtaaactcctcctcgatccgtacggacgcggcatcgttgtccccgccgggtacagccgcgaagccgcccgccttcccggcgatagcgcgcgcaccgccatgaaaagcgtcgtcatcgatcccgccgcctacgattgggagggtgacacgccccttcaccgcccctcctctcgcaccatcatctatgaactccacgtccgcggcttcacccgccatcccagctccggcctttccgaaaaccttcgcggcacctacgccggcctgatcgaaaaaatcccctacctgcacgatctaggcatcaccgccgtggagctcatgccggtcttccagttcgatccccaggatgccccggtcggacactgcaactattggggctacgcacccgtctccttcttcgcgccccatcagcaatacagttcgcgccgcgacccccagggcgtcctcaacgagttccgcgatatggtgaaggccctgcaccgcgccggcatcgaagtcatcctcgacgtcgttttcaatcacaccgccgagggcgaccatcgcgggcctaccctcagtttccgcggcttcgataacaccgcctactacctcctcgagcccgatcgctcgtactccaattacagcggcaccggcaacaccctcaacgccaatcaccccatcgttcgccgcatgatcgtcgatagcctccgctactgggtggaggaaatgcacatcgatggcttccgtttcgatctcgcctccatcctctcgcgcgattgctgcggccgccctatggcccagccgcccgtcctctgggacatcgaatgcgacgccgtcctcgccggcaccaagctcatcgccgaagcctgggacgccgccggcctctatcaggtcggcagcttcatcggcgatagctggcgcgaatggaatggccgctttcgcgacgatatccgtgccttcgtccgcggtgacgacgataccgccgcccgcttcgccgaccgctggttaggcagccaggaaatttacggccatgagaatcgcgaggccgaacagagcatcaacttcgtcacctgccacgatggcttcacgcttaacgacctggtctcctataacgacaaacacaaccagcagaacggcgaaagcaatcgcgatggctgcaacgacaatcgtagttggaactgcggcgtcgaaggaccttccaacgaccccgaaatcgaggccctgcgcaaccgccagatcaagaacttcctcaccatcaccctgctctccctcggcgtccccatgatcgtgatgggagatgaagtccggcgcacccagcaaggaaacaacaacgcgtatagccaggataatgaaaccagttggttcgattggacactcgtccagcgccacgccgatctacatcgcttcgtcaaactgctgatcgcccgccgcctcctgcgcgatatcgatagcgaccgcactactctgaatgaactgctccacggcgcccgaaaggcctggcacggcgtaaccctcttcgagcccgattggagtccctggtcgcacagcctcgccctgggcgccgagctgttcaaagagcgcctggagttccacatgatcttcaactcctggtggcagcccctcgatttcgagcttccccccgtgctctcgcgctctccctggcgccgctggattgataccgcccagccctcgccgcgcgacatcgtcgattggcaagccgcttccccaatcgacggcctccactaccacgctgccccccgctccgtcgtcgtcctcatccgcgaccggtaa

SEQ ID NO: 55884 - protein, 696 aa, Solibacter usitatus Ellin6076
MTSNLLENPQSAPPCTAALAGRCSPLGATVQANGVNFSVFSRSASAIELLLFDREDDALPARVIRIPAATNRTYHYWHTFVPGARPGQLYGYRVHGPFDPASGLRFDPRKLLLDPYGRGIVVPAGYSREAARLPGDSARTAMKSVVIDPAAYDWEGDTPLHRPSSRTIIYELHVRGFTRHPSSGLSENLRGTYAGLIEKIPYLHDLGITAVELMPVFQFDPQDAPVGHCNYWGYAPVSFFAPHQQYSSRRDPQGVLNEFRDMVKALHRAGIEVILDVVFNHTAEGDHRGPTLSFRGFDNTAYYLLEPDRSYSNYSGTGNTLNANHPIVRRMIVDSLRYWVEEMHIDGFRFDLASILSRDCCGRPMAQPPVLWDIECDAVLAGTKLIAEAWDAAGLYQVGSFIGDSWREWNGRFRDDIRAFVRGDDDTAARFADRWLGSQEIYGHENREAEQSINFVTCHDGFTLNDLVSYNDKHNQQNGESNRDGCNDNRSWNCGVEGPSNDPEIEALRNRQIKNFLTITLLSLGVPMIVMGDEVRRTQQGNNNAYSQDNETSWFDWTLVQRHADLHRFVKLLIARRLLRDIDSDRTTLNELLHGARKAWHGVTLFEPDWSPWSHSLALGAELFKERLEFHMIFNSWWQPLDFELPPVLSRSPWRRWIDTAQPSPRDIVDWQAASPIDGLHYHAAPRSVVVLIRDR

SEQ ID NO: 55885 - DNA, 2130 bp, Solibacter usitatus Ellin6076
  CDS (1)..(2130): transl_table=11
atgctggaaccgcacaccacgaaagcggtggagcccggctccccctttccccttggcgcgacgctggttgacggcggcgtgaactttgccatctactccaaacaagcggccggggtttttctactgctgttcgattccgcggacggcgcggcgacggatgtcatcccactaaccgctcgcgacaagctggtatggcacgcgtgcgtcaagggcgttcgcgcgggacagctttacgggtacaaagttagcggggaataccggccggatctcggcctgcgcttcaatgaggctaaactgctgctggatccgtacgccagggcggtcacggggaagttccgcaatgtggataacctgctgctcgcgtacgctgcgcagcccgcgtcggcagacctcacgcaggacacgcgcgacaacagcgcggtggtgccgaagggcatcgtgatcgacgacggtttcgactggcagggcgtgggcgcgccaaaatccgcgctggaacaattggtgatctacgaggtccacgtcaaggggttcacggcgcatccatcatccggcgtaagcgctccggggacatacctgggattcatcgagaaaatcccgcacctgaccaggctcggtgtgaatgcggtcgagttgatgcctgtgcacgagcactacgtcgatgactttctagtcgatcgcgggctgacaaattactggggttacaacacgattggatttttcgcgccggaagtgtcgtacggcagccagcgtgaagcgggatgccaggtagcggagttcaagacgctcgtgcgggaactgcatcgcgctgggatccaggtgatactcgacgtggtttacaaccacacagcggagggcaacgagatgggcccgagcatgagttttcgcgggctggacaacgtctcgtattactgcctcacaggtccggcggaggcgccgcggcgctactacatgaactatacgggctgcggcaacagcatgaatttcgacagtccggcggtaatccggctggtgatggactcgctgcgttattgggtggaggcgatgcacgtggacgggttccggttcgacctggcgagcgtgctggggcgcggtgccgacggcagtttccggtcgacgtcgggattcttcgacgcggtggcgcaggatcccgtgttgagccgcgcgattctgatcgctgagccgtgggataccgggacgtaccagctcgggaattttccaatcgactggtcagagtggaatggaaagttccgcgacacggtgcggtgtttcgcgaagagcgactccggacagttgtcgcagatgggctggcggctcacggggtcggcggatttgtatggcagcgaagggcggtcggcgtataacagcgtcaacttcgtgacctgccacgacgggttcacgctgcacgacctggtttcctataacgggaagcacaatgagggcaacggtgagaacaaccaggacggaaccaacgacaacaactcatggaattgcggcgcggaaggggacacgacggattccgggatcctgtcgctccgccggcagctaatgaggaatcacgcgtgctacctgatgttcgcgtgcggcactccgatgatgctcggcggagacgaattcgcacggagccagcaggggaacaacaacgcgtactgccaggacaacgcgattggctggttcgactggagcctggtagagcgcaacggcgacctggtggaattctttcggaaggcgattgctttcacccggcgcttcccggtgctgcaacgccggaagtttctgctgggggacgatctggacgcggacggggtcgccgacctgacctggttttcgccggacctgggtactccggcatggtcggatgcgaatgcgcgcgtgctctgctaccagctggatacgtccgactgcggcgacacatgcgatgccgaccggctgttcttcattctcaacagcgacttcgattcgcagtgggtgaagctgccgccgctcgcggccggacacacatggttccgtgcgattgacacgagcttggccgcgggcgaggacttcgcggagaacggcacggaagtccgcgtggagccggacgaccactacattgcgaatgccaggagcacggtagtgctcctggcgcggtga

SEQ ID NO: 55886 - protein, 709 aa, Solibacter usitatus Ellin6076
MLEPHTTKAVEPGSPFPLGATLVDGGVNFAIYSKQAAGVFLLLFDSADGAATDVIPLTARDKLVWHACVKGVRAGQLYGYKVSGEYRPDLGLRFNEAKLLLDPYARAVTGKFRNVDNLLLAYAAQPASADLTQDTRDNSAVVPKGIVIDDGFDWQGVGAPKSALEQLVIYEVHVKGFTAHPSSGVSAPGTYLGFIEKIPHLTRLGVNAVELMPVHEHYVDDFLVDRGLTNYWGYNTIGFFAPEVSYGSQREAGCQVAEFKTLVRELHRAGIQVILDVVYNHTAEGNEMGPSMSFRGLDNVSYYCLTGPAEAPRRYYMNYTGCGNSMNFDSPAVIRLVMDSLRYWVEAMHVDGFRFDLASVLGRGADGSFRSTSGFFDAVAQDPVLSRAILIAEPWDTGTYQLGNFPIDWSEWNGKFRDTVRCFAKSDSGQLSQMGWRLTGSADLYGSEGRSAYNSVNFVTCHDGFTLHDLVSYNGKHNEGNGENNQDGTNDNNSWNCGAEGDTTDSGILSLRRQLMRNHACYLMFACGTPMMLGGDEFARSQQGNNNAYCQDNAIGWFDWSLVERNGDLVEFFRKAIAFTRRFPVLQRRKFLLGDDLDADGVADLTWFSPDLGTPAWSDANARVLCYQLDTSDCGDTCDADRLFFILNSDFDSQWVKLPPLAAGHTWFRAIDTSLAAGEDFAENGTEVRVEPDDHYIANARSTVVLLAR

SEQ ID NO: 55887 - DNA, 2259 bp, Shewanella sp. ANA-3
  CDS (1)..(2259): transl_table=11
atgacgaatcctgtgcctgtaaatgctgatggctcaaccgcgtataacctaagtgcggggcagccctttcccttgggggcgacggtcgatgatggcggggtgaatttcgccctgttttcggcccatgccactggggtggagttatgtctgtttaatgcccgaggcgaggtggaaattcagcgcatcgccttgacggagcagacccagcagatctggcatttgtatgtgcatggactgagtgccggccagctttatggctaccgtgtttatggtccctacgagccgcaattaggccacagatttaatccgcataagttgctattagacccttacgctcgccagctcgtgggacgctatcaccaccatatcgccaactttggttatgagattgataaccccaacgaggacttatctttcagtaccttagataacgcggactttgtcccaaaatgcaaagtggtcgatactcgaccccttttggatgccgctaaggcccatactattcggccgcttgcaagcaagcgtgagccattgccacttgagcagtgcattatctatgagatgcacttaaagggatttaccgcgctgcaccctgagatagatgcgccgctgcgtggtacctttgctgggctggcatcgaatgccgcgatagattacttagtcaatctcggcgtgaattgcgtcgagttactgccggttcaggcatttttctccgagccctttctgcttgaaaaacagctatctaactattggggctataacagcattggcttttttgcgcctgagccgagttatctctcgggtgaggatatcggcgagtttcgcaacatggtggatgcgctgcacggtgcgggcatcgaagtcattctcgatgtggtctataaccacagcgccgagggcagtcgtctcggaccgacttttagctttcgcggcatcgacaatctgagttattaccgactgcatccaaacgataaacgcttttatatcaacgataccggctgcggcaataccttaaacctcaatcacccacgcatgttgcagttggtgttagattcgctgcgttactgggtcgaagtgatgggggtcgatggctttcgtttcgatttagccgcctgccttggccgtgaagcctatggattcgacccaggtagtggttttttcgatgcgttgctgcaagacccagtactttgccgggtgaagctgattgccgagccttgggatattggtccgggtgggtatcagctgggtaatttcccggtggcctttagcgagtggaatgacagataccgcgacactatgcggcgtttttggcggggcgatcacgccatgttgcccgagtttgcgaggcgatttcatggctcgggggatttctttgagcatagcggtcgtcctcctgccgccagtatcaactttttaaccagtcacgatggttttacccttaaagatttagtgagttattgcgagcggcacaattgggccaacggtgaagaaaaccgcgacggccaccatgagaacttcagccatcactacggagtagagggcgacaccgacgacgccaccattcttgcgctgcgcgctcgccagcaacgcaatctattgaccacattattcctttcccaaggggtgcccatgttactcagcggcgatgagacgggccgcacccaaggcgggaataataacgcctattgccaagataacccattgaattggttcgattggtcatcggatggcatggatagctcattgctgagtttcacctcacagttgattgccttgcgtaaacgctttccgctcttgtgtgccaaacgttttatccatgagcagctagtggccaatgctttcgattggtcgtctgagtcatcttcaactcaagcagcaagccctgtatcaaccccatcgggggcgaggctggattggtttagtcgccaaggtgaacctatgagcaaaagcctgtggagtgagtccatgggccgcagcctctgcgtggtgctatcgggcaatttaaccgccactcaaccacagactcagggtgacagccttcaagcactgttgttaatggtcaatgccgatgagcatcccttggcctttactctgccgatttttgacggtttagggccgtggcaatgtctgctgcatacccaaaccgacccacaatttttaactcccactgagccgctggatgctcagtcctcaccgacgcggtacttgctacaggatcgcagtcttatgctgtttcatgctgattttataaggaattaa

SEQ ID NO: 55888 - protein, 752 aa, Shewanella sp. ANA-3
MTNPVPVNADGSTAYNLSAGQPFPLGATVDDGGVNFALFSAHATGVELCLFNARGEVEIQRIALTEQTQQIWHLYVHGLSAGQLYGYRVYGPYEPQLGHRFNPHKLLLDPYARQLVGRYHHHIANFGYEIDNPNEDLSFSTLDNADFVPKCKVVDTRPLLDAAKAHTIRPLASKREPLPLEQCIIYEMHLKGFTALHPEIDAPLRGTFAGLASNAAIDYLVNLGVNCVELLPVQAFFSEPFLLEKQLSNYWGYNSIGFFAPEPSYLSGEDIGEFRNMVDALHGAGIEVILDVVYNHSAEGSRLGPTFSFRGIDNLSYYRLHPNDKRFYINDTGCGNTLNLNHPRMLQLVLDSLRYWVEVMGVDGFRFDLAACLGREAYGFDPGSGFFDALLQDPVLCRVKLIAEPWDIGPGGYQLGNFPVAFSEWNDRYRDTMRRFWRGDHAMLPEFARRFHGSGDFFEHSGRPPAASINFLTSHDGFTLKDLVSYCERHNWANGEENRDGHHENFSHHYGVEGDTDDATILALRARQQRNLLTTLFLSQGVPMLLSGDETGRTQGGNNNAYCQDNPLNWFDWSSDGMDSSLLSFTSQLIALRKRFPLLCAKRFIHEQLVANAFDWSSESSSTQAASPVSTPSGARLDWFSRQGEPMSKSLWSESMGRSLCVVLSGNLTATQPQTQGDSLQALLLMVNADEHPLAFTLPIFDGLGPWQCLLHTQTDPQFLTPTEPLDAQSSPTRYLLQDRSLMLFHADFIRN

SEQ ID NO: 55889 - DNA, 2151 bp, Mycobacterium avium 104
  CDS (1)..(2151): transl_table=11
atgacctctgcaaaggctgccgctcccacgcccaccggagaggtgtggcctggcaaggcctacccgctgggcgccagctacgacggcgccggcaccaacttcgcggtgttcagcgaggtggccgagcgggtcgagttgtgcctgttcgacggcgacggcaccgagagccgggtggcgctgcccgaggtcgacggcttcgtctggcacgcctacatccccggcatcgaaccggggcagcgctacgggtatcgggtacacggcccctacgacccagcggccgggcagcggtgcaacccgaacaagctgctgctggacccgtattcgaaggccatcgacggcaccttcgagtggaaccagtcgctgttcggctacaacttcggtgacccggacagccgcaacgacgacgactcggcgcccagcatgcccaagtcggtggtgatcaacccgtacttcgactggggcaacgaccgcccgccggaccaccactacgccgacaccgtcgtctacgaggcgcacgtcaagggcctcacccagacccaccccgacatccccgaacagatgcgcggcagctacggcgcggtggcgcacccggtgatcatcgagcacctgcagagcatcggggtcaccgcgatcgaactgatgccggtgcatcacttcgccaacgactccaccctgatcgacaagggcctgtccaactactggggctacaacaccatcggcttcttcgccccggacacaaaatactccagcgccgccacgccgggcgggcaggtgcaggagttcaaggccatggtgcgctcgctgcacgaggccggcatcgaggtcatcctcgacgtggtctacaaccacaccgccgagggcaatcacctgggccccaccctgtcgatgcgcggcatcgacaacgccgcctactaccggctggtcgacgacgacaagcggtactacatggactacaccggcaccggcaacagcctcaacgtcgggcacccgcacgccctgcagctgatcatggactcgctgcgctactgggtgaccgagatgcacgtcgacggattccgcttcgacctggccgccaccctggcccgcgagttctacgacgtcgaccggctggcgacgtttttcgaactggtgcaacaggatccgacggtcagccaggtcaagctgatcgccgaaccgtgggacgtcgggccgggcggctaccaggtgggcaacttcccgccgcagtggacggagtggaacggcaagtaccgcgacaccgtccgcgacttctggcgcggcgaacccgccaccctcgacgagttcgcctaccggctgtccggttcggccgacctgtacgaacacaccgggcgccggccggtcgcctcgatcaacttcgtcaccgcccacgacgggttcacgctgcgtgacctggtgtcctacaacgagaagcacaacgaggccaacggcgaggacaacaacgacggcgagagccacaaccggtcctggaactgcggcgccgagggaccgaccgacgacgagcaggtcaacgcgctgcgggcccgccagcagcgcaatttcctgaccacgctgctgctgtcgcagggcgtgccgatgatctgccacggcgacgagctgggccgcacccagaacggcaacaacaacggctactgccaggacaacgagctcacctggatcgactgggccaacgcggacgtggacctgctggccttcacccgggtggtgtcggcgctgcgcgccgagcacgcggtgttccgccggcgccggttcttctccggcaagccggtgggccggcgcggccaggacgggctgcgcgacatcgcctggttcacccccgacggcaccgagatgaccgacgaggattggggcgccaatttcgccaagtccgtcacggtgttcctcaacggccacggcatccccgaccgcgacgcgcgcggtcaacggctgctggacgactcgttcctgctgtgcttcaacgcccaccacgagtccatcgaattcacccttccgccaaaggagttcggtgcatcatggcaggtcgtggtgtacaccgggccggaggagaccacgccagccgacgaggtgcccggtgccggcgtgctcaacgtcgacgcccacaccgcggtggtgctgcgggcacctgacggcggctga

SEQ ID NO: 55890 - protein, 716 aa, Mycobacterium avium 104
MTSAKAAAPTPTGEVWPGKAYPLGASYDGAGTNFAVFSEVAERVELCLFDGDGTESRVALPEVDGFVWHAYIPGIEPGQRYGYRVHGPYDPAAGQRCNPNKLLLDPYSKAIDGTFEWNQSLFGYNFGDPDSRNDDDSAPSMPKSVVINPYFDWGNDRPPDHHYADTVVYEAHVKGLTQTHPDIPEQMRGSYGAVAHPVIIEHLQSIGVTAIELMPVHHFANDSTLIDKGLSNYWGYNTIGFFAPDTKYSSAATPGGQVQEFKAMVRSLHEAGIEVILDVVYNHTAEGNHLGPTLSMRGIDNAAYYRLVDDDKRYYMDYTGTGNSLNVGHPHALQLIMDSLRYWVTEMHVDGFRFDLAATLAREFYDVDRLATFFELVQQDPTVSQVKLIAEPWDVGPGGYQVGNFPPQWTEWNGKYRDTVRDFWRGEPATLDEFAYRLSGSADLYEHTGRRPVASINFVTAHDGFTLRDLVSYNEKHNEANGEDNNDGESHNRSWNCGAEGPTDDEQVNALRARQQRNFLTTLLLSQGVPMICHGDELGRTQNGNNNGYCQDNELTWIDWANADVDLLAFTRVVSALRAEHAVFRRRRFFSGKPVGRRGQDGLRDIAWFTPDGTEMTDEDWGANFAKSVTVFLNGHGIPDRDARGQRLLDDSFLLCFNAHHESIEFTLPPKEFGASWQVVVYTGPEETTPADEVPGAGVLNVDAHTAVVLRAPDGG

SEQ ID NO: 55891 - DNA, 2118 bp, Mycobacterium smegmatis str. MC2 155
  CDS (1)..(2118): transl_table=11
ttggagatctggcgaggcaaggcatacccgttgggcgccacctacgacggctcgggcaccaacttcgcgttgttcagcgaggtcgccgagcgggtcgagttgtgcctgttcgacgacgacggcgacggcggcctgcgcgaaacccgcatcacgctgcccgaggtcgacggcttcgtgtggcacggcttcatccccaacatcgaaccgggccagcgctacggctaccgcgtacacgggccgtacgatccggccgcgggccaccggtgcaatcccaacaagctggtactggacccgtacgccaaggccatcgacgggcagttcgactggggtcagccgctgttctcgtacaacttcggcgacccggacagccgcaacgacgacgattcggcgcccaacatgccgaagtccgtggtgatcaacccgtacttcgactggggcgtggaccgtccgccgagccacgactacgccgacaccgtgatatacgaggcccacgtcaagggcctgacccagacgcatcccgacatcccggacaacatccgtggcacgtacgcggcggtcgcgcacccggccatcgtcgaacatctgcagaacctcgggatcaacgcgatcgagttgatgccggtgcaccacttcgccaacgattcgacgctcatcgacaagggtctgtcgaactactggggctacaacacgatcggattcctcgcgccggattcgaagtacagctcgagccccaacccgggcgggcaggtgcaggaattcaaggcgatggtccgcacgctgcacgaggcaggcatcgaggtgatcctcgacgtggtctacaaccacaccgccgaaggcaaccacatgggcccgacgctgtccttccgcggcatcgacaacgcggcgtactaccgcctcgtcgacgacgacaagcggtactacatggactacaccggcacgggcaacagcctcaacgtcggtcatccgcacgcgttgcagctgatcatggattcgttgcgctactgggtgatcgagatgcacgtcgacggtttccgcttcgacctggcctcgacgctggcccgtgagttctacgacgtcgaccgccttgcgacgttcttcgaactggtgcaacaggatccggtggtcagccaggtcaagctgatcgccgagccgtgggacgtcggcccgggcggataccaggtgggcaacttcccgccgctgtggaccgagtggaacggcaagtaccgcgacaccgtgcgcgactactggcgcggcgagccggcaacgctcgacgagttcgcctcccggatcaccggttcggccgatctgtacgagcagaccggcaggcgcccgttcgcgtcgatcaacttcgtcatcgcccacgacggcttcacgctgcgggacctggtgtcctacaacgagaaacacaacgaggccaacggcgaggacaacaacgacggcgagagccacaaccggtcgtggaactgcggagccgagggtccgaccgacgatccggaggtcaacgccctgcggtcgcgtcagcaacgcaacttcatcacgactcttctgctctcccaaggtgttccgatgctcgcccacggcgacgaactgggccgtacgcagcagggcaacaacaacgtctactgccaggacagtgagctgtcctggatcgactgggagagcgcggacaccgaactgctggagttcacgcagaaggtgtcggcgctgcggtccgcgcacccggtgttccggcgcaggcgcttcttcaacggcagacctgtgcggcgtcccggtgagccgcgcctgcccgacatcggctggtatgcgccagacgggtcggagatgaccgacgaggactgggacgccggctacgccaagtcgatggcggtgtatctcaacggccagggcatccccgaccgcgacgagcgcgggcagcgcatcgtcgacgactcgttctacatgtgtttcaacgcacactacgagcccatcgagttcgtgctaccgccgtccgatttcgccgagcagtgggtcgaggtgatcaacaccgcagccgactgcggcaccgacccgatcgaggcgggcacgcgggtcacggtcgagtcacgcgccatgctggtattgcaggcgcaccatgattga

SEQ ID NO: 55892 - protein, 705 aa, Mycobacterium smegmatis str. MC2 155
MEIWRGKAYPLGATYDGSGTNFALFSEVAERVELCLFDDDGDGGLRETRITLPEVDGFVWHGFIPNIEPGQRYGYRVHGPYDPAAGHRCNPNKLVLDPYAKAIDGQFDWGQPLFSYNFGDPDSRNDDDSAPNMPKSVVINPYFDWGVDRPPSHDYADTVIYEAHVKGLTQTHPDIPDNIRGTYAAVAHPAIVEHLQNLGINAIELMPVHHFANDSTLIDKGLSNYWGYNTIGFLAPDSKYSSSPNPGGQVQEFKAMVRTLHEAGIEVILDVVYNHTAEGNHMGPTLSFRGIDNAAYYRLVDDDKRYYMDYTGTGNSLNVGHPHALQLIMDSLRYWVIEMHVDGFRFDLASTLAREFYDVDRLATFFELVQQDPVVSQVKLIAEPWDVGPGGYQVGNFPPLWTEWNGKYRDTVRDYWRGEPATLDEFASRITGSADLYEQTGRRPFASINFVIAHDGFTLRDLVSYNEKHNEANGEDNNDGESHNRSWNCGAEGPTDDPEVNALRSRQQRNFITTLLLSQGVPMLAHGDELGRTQQGNNNVYCQDSELSWIDWESADTELLEFTQKVSALRSAHPVFRRRRFFNGRPVRRPGEPRLPDIGWYAPDGSEMTDEDWDAGYAKSMAVYLNGQGIPDRDERGQRIVDDSFYMCFNAHYEPIEFVLPPSDFAEQWVEVINTAADCGTDPIEAGTRVTVESRAMLVLQAHHD

SEQ ID NO: 55893 - DNA, 2181 bp, Azoarcus sp. BH72
  CDS (1)..(2181): transl_table=11
atgacggccgcgctgcagatgacgctcgaagccggccaggcctatccgctgggggcaacctggaccggcgacggggtcaacttcgccgtgttctcggcccacgccagccgcatggagctgtgcctgttcgacgaggccgggcgcaacgagatcgcgcgcatggacctgcccgaactcaccgacgaggtctggcacggctttctgccgggcgcggggccggggctggtgtacggctaccgcgcgcacgggccctacgtgcccgaggaaggccaccgcttcaacccgcacaagctgctgctcgacccctacgccaccgagctggtcggccgcctgcgctgggggccgccgatcttcggctacgagctgcgcaacaagcgcccggggcacggcttcgacaagcgcgacagcgccgcctgcacgctcaaggcgcgtgtcgccgcgccctggccgagcgccagccgcccggcgcggcgcggtcagcgcgtgccgtgggaatgcatggtgatctatgaggcgcatgtacgcggcctcacccgccagcatccggcggtgggcgcggagcaccgcggcaccatcgcggggctgggcagcgcggcggtcatcgaccacctcaaggccctgggcgtgacctcggtggagctgctgccggtgcacgcctacgtggatgacgcctacctgaccgacaagggcctgcgcaactactggggctacaactcgatcggcttcttcgcgctggagccgcgctacctcgccggcgagggcgcggcggaattccgcgacaccgtagcgcggctgcacgacgccggcctcgaggtgatcctggacgtggtctacaaccacaccgccgagggcaacgagctgggccccacgctcagcttcaagggcctggacaacgcctcctactaccgcctcaacccggacgaccggcgctactacatcaacgacaccggcaccggcaacacggtgaatctcagccatccgcgcgtgctgcagctggtgatggacagcctgcgctactgggtgacgcagatggaggtggacggcttccgtttcgacctcgccaccatcctcgggcgcgaggcggcaggcttcgaccccggctgcggcttcttcgacgccgtgcggcaggacccggtgctcaaccgcgtcaagctgatcgccgagccttgggactgcggccccggcggctaccagccgggcaatttcccgcccgggtgggcggaatggaacgacggcttccgcgacaccgtgcgcgccttctggcgcggtgacgaaggccaggcgcccggcctcgcgacccggctcgccggctcggccgaccgcttcaaccaccacggccggcggccgtgggccagcatcaacttcatcaccgcgcacgacgggttcacgctgcacgacctcgtctcgtacaacgacaagcacaacgaggccaacggcgaggacaaccgcgacggccacgacgacaaccggtcgtggaactgcggcgcggaaggccccaccgacgaccccgaggtgctggcgttgcgcgagcgccagaagcgcaacctgctcgccacgctgctgctcgcgcagggcacgccgatgctgctggccggcgacgagatcggccgcagccagcagggcaacaacaacgcctattgccaggacaacgagatcagctgggtgcactgggccggcgtggatgccgacggcgagcgcctgcgcgccttcgtgcgcagcctgctgctgatccgccgcgcgctgccggtgctgcgcccggcgcgcttcgccaccggcggcgaccccggccacgtgctgcgcgacgtgatctggctggcgcccaacggcgtcgaactgacgcccgagggctgggcggacgcgcagatgcgctgctttgcgatgctggccgacggccgcgcccacctcggcaccgggccggaacccgccgccgacgcggtcgtgctggtggtgctgaacgccgcgcacgaggcggtcgagtgcaccttgccgcaggcggccggcatcacccgctgggtgcggctggtggataccgcgcaggcagaggtggcggatttcgccgagtccgcgcccggcgagggctacagcgccgccgggcgctcgctgcagcttttcgtcgccgcacccacgccgcaggcggccgaatgcgttgcgcgcctgaccgcgcggctgggcgagggctag

SEQ ID NO: 55894 - protein, 726 aa, Azoarcus sp. BH72
MTAALQMTLEAGQAYPLGATWTGDGVNFAVFSAHASRMELCLFDEAGRNEIARMDLPELTDEVWHGFLPGAGPGLVYGYRAHGPYVPEEGHRFNPHKLLLDPYATELVGRLRWGPPIFGYELRNKRPGHGFDKRDSAACTLKARVAAPWPSASRPARRGQRVPWECMVIYEAHVRGLTRQHPAVGAEHRGTIAGLGSAAVIDHLKALGVTSVELLPVHAYVDDAYLTDKGLRNYWGYNSIGFFALEPRYLAGEGAAEFRDTVARLHDAGLEVILDVVYNHTAEGNELGPTLSFKGLDNASYYRLNPDDRRYYINDTGTGNTVNLSHPRVLQLVMDSLRYWVTQMEVDGFRFDLATILGREAAGFDPGCGFFDAVRQDPVLNRVKLIAEPWDCGPGGYQPGNFPPGWAEWNDGFRDTVRAFWRGDEGQAPGLATRLAGSADRFNHHGRRPWASINFITAHDGFTLHDLVSYNDKHNEANGEDNRDGHDDNRSWNCGAEGPTDDPEVLALRERQKRNLLATLLLAQGTPMLLAGDEIGRSQQGNNNAYCQDNEISWVHWAGVDADGERLRAFVRSLLLIRRALPVLRPARFATGGDPGHVLRDVIWLAPNGVELTPEGWADAQMRCFAMLADGRAHLGTGPEPAADAVVLVVLNAAHEAVECTLPQAAGITRWVRLVDTAQAEVADFAESAPGEGYSAAGRSLQLFVAAPTPQAAECVARLTARLGEG

SEQ ID NO: 55895 - DNA, 2196 bp, Magnetospirillum magnetotacticum MS-1
  CDS (1)..(2196): transl_table=11
atgagcccgcgccgccgcattcttcccggttcggccaatcccttgggggcgacctgggatggcaacggggtcaatttcgccctgttctcggcccatgccgagaaggtggaactgtgcctgttcgatcggcgcggcctgcgcgaggtcgagcgcatcaccttgcccgaatataccgacgaggtctggcacggctatctgcctgattgccgtcccggccagctttacggctatcgcgtccacggcccctacgaccccaatgaggggcaccggttcaacgcccacaagctgctgctcgacccctatgccaaggcccatgccggaagcttcgagtggtcggacacccatttcggcttcaagcccggcacgcccaaacaggaccttatcgccgacaagcgcgataacgcccgtttcatgcccaaatgccgggttctggataccgccttcacctggggcgatgatcgccgccccaatgttccctggcccgagaccatcgtctacgaggcccatgtgcgcggcatgagcatgaagcatcccggcgtgacgaacggcatgcgcggcaccttcctgggcctgacccagccgggaatcatcgaccatttgcggcgcttaggcgtcaccaccctgcaattgctgcccatccacgccatgatcgacgagaagcatctggcagataagggcatgcgcaatttctggggctataactccatcggcttcttcgcctccgatgcgcgctactactcggccagtccccatggcgatttcaagaccatggtggcgcggcttcacgatgtgggcatcgaggtgattctcgacgtggtctacaaccacaccgccgagggcaatcatctggggccgaccctgtcttaccggggcatcgacaatctcagctattaccgcctgggacccgacggcaagcgctggtacgagaactattccggttgcggcaatacgctgaatctggcccatccccgcgtgctgcagatggtgatggacagcttgcgctattgggccgaggacatgcatgtggacggcttccgctttgatctggcggcgtcgctggtgcgcggcaaggggggctttgaccatacatccggctttctcgacgcggtgcgccaggacccggttctgtccaagctgaagctgatcgccgagccttgggacttaggcggagacggctatcgcgttggacgttttccccccggctggtccgagtggaacggtcgttaccgcgacacggtgcggcgcttctggaccggcgaggggggcgtgatcggcgatctggcctcgcgcctgaccggctcatcggacatttttggctggggcgggcgcaggccctgggccagcctgaacttcgtcacctgccacgacggtttcaccctggccgatctggtcacttacgagcgcaagcacaacgaagccaatctggaagccaacaaggacggctcggacgccaattacgcctggaattgcggccatgagggcccgtcgccctaccccgaaatcaccgcgcttcgggcgcgtcagagccgcaatctgctggccaccttgctgctgtcccagggcgtgcccatgctgctggccggcgacgagatggggcgctcgcaaaagggcaacaacaacgcctattgccaggacaacgaactgggctgggttgactggtctcaggtggacgaggacctgctggccttcgtccagatgctgattggcttgcgtaaatcccatccggtgttccgccgcccgcgcttcttcgaaggcaagcgtctgcccaattctcccttaaaggacatcgtctggatcacgcctgaggggcgcgagatgggccagggtgactggaccacgccgttcgcccgcacgctgggctttgtgctgggcggtgaatcctgcgccgtggacaatctcacgggccgcgaggagatggacgacaccttcctggtgctgttgaacgcctatcacgaggcggtgccctatgttctgccaccgccccatctgggccggtcgtgggaactggtgctcgacaccaacgacccggcgggaaagcaggcgggaacccaatggatggcgggcatcacttatccgctgggaagccgatctttggcggtcttgcgccgctcgggcggtctgcgtaacgggccgcgcgacgcaagcgttagcccaggcggcgtgccgcaggatgaaactgaagggaatgtggaatga

SEQ ID NO: 55896 - protein, 731 aa, Magnetospirillum magnetotacticum MS-1
MSPRRRILPGSANPLGATWDGNGVNFALFSAHAEKVELCLFDRRGLREVERITLPEYTDEVWHGYLPDCRPGQLYGYRVHGPYDPNEGHRFNAHKLLLDPYAKAHAGSFEWSDTHFGFKPGTPKQDLIADKRDNARFMPKCRVLDTAFTWGDDRRPNVPWPETIVYEAHVRGMSMKHPGVTNGMRGTFLGLTQPGIIDHLRRLGVTTLQLLPIHAMIDEKHLADKGMRNFWGYNSIGFFASDARYYSASPHGDFKTMVARLHDVGIEVILDVVYNHTAEGNHLGPTLSYRGIDNLSYYRLGPDGKRWYENYSGCGNTLNLAHPRVLQMVMDSLRYWAEDMHVDGFRFDLAASLVRGKGGFDHTSGFLDAVRQDPVLSKLKLIAEPWDLGGDGYRVGRFPPGWSEWNGRYRDTVRRFWTGEGGVIGDLASRLTGSSDIFGWGGRRPWASLNFVTCHDGFTLADLVTYERKHNEANLEANKDGSDANYAWNCGHEGPSPYPEITALRARQSRNLLATLLLSQGVPMLLAGDEMGRSQKGNNNAYCQDNELGWVDWSQVDEDLLAFVQMLIGLRKSHPVFRRPRFFEGKRLPNSPLKDIVWITPEGREMGQGDWTTPFARTLGFVLGGESCAVDNLTGREEMDDTFLVLLNAYHEAVPYVLPPPHLGRSWELVLDTNDPAGKQAGTQWMAGITYPLGSRSLAVLRRSGGLRNGPRDASVSPGGVPQDETEGNVE

SEQ ID NO: 55897 - DNA, 2130 bp, Nostoc punctiforme PCC 73102
  CDS (1)..(2130): transl_table=11
atgtatgtagctgtatggcctgggaatgtatatcccttgggtgctaattgggatggaaaaggtacaaattttgctttgttttcggaaaatgcaacaggtgtagaactttgtttatttgatgctgataatcatgaaattcgcttgcctttaacagaaaaaaataattttgtttggcacgcttatctaccaggagtaggtcctgggcaacgctatggatttagagtacatggcccttgggccccagaacttggtcatcgctttaaccctaataaactattaattgatccctatgccaaggcaattgatggggaaattagcgataccgcagctatttttggctactctttagatgcgccagagcaagacctagctttttccgatttagataatgccgaaattatgccgaagtgtattgttgtcgatcagtcttttgattggggagatgacaaactactttctataccgtggcacgaaactattatttatgaaactcacgttagaggttttactaaattacacccagaaattccagaagaattacgtggtacctatgcagggctggcacatccagttgctattcaatatctacaacaactaggaatcacatctgtggaattgatgcctgtgcatcactttttatcttctccaggatttctggtaaataaaggactgaaaaactattggggttacgattccattaattatttcaccccctattctggttacagtgctaatggctcagtcggacaacaagtgaccgagtttaagcagatggtcaaggacttacactctgctggcattgaagtaattttagatgtagtttataaccacactggcgaaggcaatcatttagggccaacattatcgctacgaggcatcgataatgctgtgtactatcgcttggtcaaagataattctcgctactacatggacttcacaggctgcggcaactctctaaatgtgcgtcatgcccaagttctgaagttaatcatggatagcctgcgctattgggtaacagaaatgcatattgatggctttcggtttgatttagcttcggcattagcgcgagaactatatgaagtagatagtctcgcagctttttttgatattattcatcaagatccagttctggcagatgtaaagctaattgctgaaccttgggatttaggagaaggtggttatcaagttggcaattttcctttacgttggtctgaatggaatggcagatatcgtgatactgtaagggatttttggcgtggtgaggatgatagcctcggacaatttgcttactgttttactggtagccctgacctttaccaagcaaacgggcgtaatcccagtgccagtattaatttcatcactgctcatgatggcttcacgctcaatgatttggtcagctataacgaaaaacataatcaggacaacggcgaagatagccgggatggggaaagccataaccgctcttggaattgtggtgtagaaggagaaactaatgacccagatgtaatccgcttacggcaacgtcagcgacgcaactttttagcaactctaatgctgtctcaaggcatacctatgctattaggaggagatgaaattggttgcactcagaagggtaacaacaatgtatactgccaagataatgaaattgcctggcgtgattggagtttacaaaagtctaattccgaactactagattttgcccgcgaactgatttattttcgtcatcagcatccagtatttcggcggcgtaagtggtttcaaggccgtcctattcacggttttgggatcagtgatattggttggtttaatgacgatggcagcgaaatgactgaaaagcagtggctagttagttatgccaaagctatggaaattttcttgaatggcgaaggcattgttactcctggccgccgtggtgaacggattattgatgaaagctttttgctattttttaatgctcactacgaaacgattgagtttgctttacccaatgttttccaggatagggaatgggaaatagttattgacaccaacgaacctcgcttccttagcccaggaaagttggttatgggtgagcaaactgtgccagttacagatcgctctctcatagtgttacgtcgtcttgcttcataa

SEQ ID NO: 55898 - protein, 709 aa, Nostoc punctiforme PCC 73102
MYVAVWPGNVYPLGANWDGKGTNFALFSENATGVELCLFDADNHEIRLPLTEKNNFVWHAYLPGVGPGQRYGFRVHGPWAPELGHRFNPNKLLIDPYAKAIDGEISDTAAIFGYSLDAPEQDLAFSDLDNAEIMPKCIVVDQSFDWGDDKLLSIPWHETIIYETHVRGFTKLHPEIPEELRGTYAGLAHPVAIQYLQQLGITSVELMPVHHFLSSPGFLVNKGLKNYWGYDSINYFTPYSGYSANGSVGQQVTEFKQMVKDLHSAGIEVILDVVYNHTGEGNHLGPTLSLRGIDNAVYYRLVKDNSRYYMDFTGCGNSLNVRHAQVLKLIMDSLRYWVTEMHIDGFRFDLASALARELYEVDSLAAFFDIIHQDPVLADVKLIAEPWDLGEGGYQVGNFPLRWSEWNGRYRDTVRDFWRGEDDSLGQFAYCFTGSPDLYQANGRNPSASINFITAHDGFTLNDLVSYNEKHNQDNGEDSRDGESHNRSWNCGVEGETNDPDVIRLRQRQRRNFLATLMLSQGIPMLLGGDEIGCTQKGNNNVYCQDNEIAWRDWSLQKSNSELLDFARELIYFRHQHPVFRRRKWFQGRPIHGFGISDIGWFNDDGSEMTEKQWLVSYAKAMEIFLNGEGIVTPGRRGERIIDESFLLFFNAHYETIEFALPNVFQDREWEIVIDTNEPRFLSPGKLVMGEQTVPVTDRSLIVLRRLAS

SEQ ID NO: 55899 - DNA, 2121 bp, Bifidobacterium longum DJO10A
  CDS (1)..(2121): transl_table=11
atgtatccgttgggcgccagctatgacggcgccggtgtgaacttcgcgctgtactcacaggttgcgcagaaagtcgagctatgcctgttcgacgagcacgatgcggaaacgcgcatcgaaatgaccgaacggaactcgtacgtatggcataactacattcccggcctccatcctggccagcgttacggctaccgcgtctacggtccctatgacccggtgcacggcctcagatgcaaccccaacaaactgctgcttgacccgtatgccaaggccattgaaggtaatatcgacggcgacgaaagcctgttctcatactggttcaagagcccggacgacaactcggcgatgaacgaccttgactcggccgcccacaccatgaagtcggccgtcatcaacccctacttcgattggggcaacgaccagcacccctacatctcgtaccacgattcggtgatctacgaggcgcacgtgcgcggcatgaccaacctcaacatggacgtgccgccggacatccgcggcacctacgccggcctggcctatccgagcgtcatcgaatacctgaagaagctcggcatcaccgccatcgaactcatgccgatccaccagttcgtcaacgactccttcctgcaggagaagggcctgtcgaactactggggctacaacaccatcggcttcttcgcaccgcacaacgcctactcctcctccggggaacgcggcgagcaggtcaacgaattcaagtccatggtcaaggcctaccatcgcgccggcatggaggtcatcctcgacgtggtgtacaaccacaccgccgaaggcaaccatatgggccccaccctgagcttcaagggcatcgacaacgcctcctactaccgactggtggaaggcgaccagcagcactacttcgacaccaccggtaccggtaactcgctgctcatgcgctcgccgcacgcgctgcagttgattaccgattcgctgcgctactgggttaccgaaatgcacgtcgacggcttccgcttcgatctggccgccacgctggcacgccagttccaggaggtcgacaagctgtccgcgttcttcgacatcgtggagcaggacccgatcatctcgcgcgtgaagctgattgccgaaccgtgggatctgggctccggcggctatcaggtgggcggcttcccgtccagctggtccgaatggaatggccgctaccgcgacaccgtgcgcgacttctggcgctcgcagccctccacgctgcccgaattcgcctcgcgcctgatgggcagttccgatctgtatcaggtcaacggccgtcgaccggtggcgtccgtgaacttcatcaccgcgcatgacggtttcacgatgaacgacctggtcagctacaacgaaaagcacaacgaagccaatggcgagggcaatcgcgacggcgagagcaacaatcgctcttggaattgcggcgttgaaggcccgaccaatattccggacgtcaacgacttgcgtcagcgtcagatgcgcaacatgttcgccacgttgctgttcagccagggtatcccgatgatttgcggtggcgacgaagtggcccgcacccagcagggcaacaacaacgcctactgtcaggacaacgagatctcctggaccaactggcatcttgacaagggacgcaaggaactgctcgccttcgtttccaaactcattcatctgcgtttggatcatccggtgttgcaccgccgtcgctttttcaccggccgtgagcccggcgacgattcgaacatgattccgcaggtcgagtggttcgaccacaccggctcgatcatggatatggacgactggcagaacacgcatgcgttctccatgatgatctatctgaacggttcggatattccggaggtggactggtacggcaaccggatggtcgacaacgatttcatcctgatcttcaacgcgcattacgagccgattatgttcaccctgccggatgagcgatacggccgcaaatggcagctggtcgtggatacgcacaacccggatgggccggaactgagctatgaggcgggcttcatgatcaccgcccagtcccgcagcttcctcatgctcatgagcgacaaaaagcccaagaagcccatgggcctataa

SEQ ID NO: 55900 - protein, 706 aa, Bifidobacterium longum DJO10A
MYPLGASYDGAGVNFALYSQVAQKVELCLFDEHDAETRIEMTERNSYVWHNYIPGLHPGQRYGYRVYGPYDPVHGLRCNPNKLLLDPYAKAIEGNIDGDESLFSYWFKSPDDNSAMNDLDSAAHTMKSAVINPYFDWGNDQHPYISYHDSVIYEAHVRGMTNLNMDVPPDIRGTYAGLAYPSVIEYLKKLGITAIELMPIHQFVNDSFLQEKGLSNYWGYNTIGFFAPHNAYSSSGERGEQVNEFKSMVKAYHRAGMEVILDVVYNHTAEGNHMGPTLSFKGIDNASYYRLVEGDQQHYFDTTGTGNSLLMRSPHALQLITDSLRYWVTEMHVDGFRFDLAATLARQFQEVDKLSAFFDIVEQDPIISRVKLIAEPWDLGSGGYQVGGFPSSWSEWNGRYRDTVRDFWRSQPSTLPEFASRLMGSSDLYQVNGRRPVASVNFITAHDGFTMNDLVSYNEKHNEANGEGNRDGESNNRSWNCGVEGPTNIPDVNDLRQRQMRNMFATLLFSQGIPMICGGDEVARTQQGNNNAYCQDNEISWTNWHLDKGRKELLAFVSKLIHLRLDHPVLHRRRFFTGREPGDDSNMIPQVEWFDHTGSIMDMDDWQNTHAFSMMIYLNGSDIPEVDWYGNRMVDNDFILIFNAHYEPIMFTLPDERYGRKWQLVVDTHNPDGPELSYEAGFMITAQSRSFLMLMSDKKPKKPMGL

SEQ ID NO: 55901 - DNA, 1986 bp, Actinobacillus pleuropneumoniae serovar 1 str. 4074
  CDS (1)..(1986): transl_table=11
atgaaagtgacagcgggaagtccttttccattaggtgcgcaagcggtcgaaaacggcacgaattttgcaattttttcagaaaatgcgaccgctatcgaactctgtttatttaagcaatcgcaagaacaacgttttgcgatgcgacgtaccggtgatgtatggcatttattcgttgaaaatatcggagaaggcatcgaatacggtttccgtgtcgcagggattaccgataagcaaaaaggcgcgttatttaatccgcaaaagttattacttgatccttatgcgaaacgtatcgtcggtacggtatcggcgcatacggcggatgaaattaagtattttcaatgggatgataaacgtgataacgctcatttagcgcctaaatcggtagtggttgcgccggataatttcgattgggaagatgacgaacgcccgcattacccgtggagagaaaccattatttacgagcttcatgtaaagggtttcagtcggttaaatcaacagattcccgaaccgttacgcgggacttatgcaggtcttgcacatccggcttctattgcgtatctgaagcgtttaggcgtcacgaccatagaattgcaaccggtcagccatcatattgatgaagtgcacttgcagaaaatggggaaaaccaattattggggatacaatgttatcggacattctgcagttgagccggtgcttgcttgggatcaagaagacccgattaccgaatttaaatatttggttaaaacattacataaacacggttttgaagtcattttagatttggtttataaccataccgcagagggcggtacggacagtttaacgctatgtcaaagaggcattgataaccaaaattattattggctgaatcagcaaggggaatatgagaattgggcgggatgcggtaatgcgttaaatttaagccatccgagagtgtgccagtgggcgatagacagcttggtttactgggtaagtgaatgccatgtcgatggattccgtttcgatttggcaaccacattaggacgaacccccgaatttgatcaattatcgccgttttttgaaaaaattaagcaaacgcctgaattagaacatattaaattaatcgccgagccttgggatattggtccgaacggttatcaagtcggcagatttccgattcagtttgcggaatggaatgataaataccgtaccacgatgcgagaattctttttaggcgagagtggcaatctaggcgagtttgctcgtcgtttagccggtagcgatgacctttattggcaatattctccggcaaaaagtatcaactattttgcttcacacgacggttttactctacaagatctcgtgagttataacaaaaagcataatgaagcaaacggtgaaaataatcgtgacggtgaaaacactaatcatagtaataaccacggtgttgaaggcgaaaccgataacgaatttgtaaatattttgcgagatcagaccgcttgtagcttattggcgaccttatttctctcaaacggcgtacctatgctacgtgccggtgatgagttggggcattcgcaaaagggtaataacaacgcttattgccaagataatgagatagcttggattgactggcaaaatgcaaatgaatcaagaattgagtatgtagcaaaatggatagccttacgtaaacgtattgccttactctctcaccaaaaccactggtggacggagaatgacgttcaatggttttcatcgcaagggaaagtgatggagattgaagattggcataatacggagtccaaagcgttacaaattctactgcaagatcattggctgatcttaataaatgccaaaaaaaccacccagcaatttttcctaccgacaggtaaatggcatatttgtctcggtaagaatattgcgactttgatagcgaatacgcaatcggttgctcttcagttcgaacagatgggagtgtgcgtgcttcaaagaaaattaagttcatattaa

SEQ ID NO: 55902 - protein, 661 aa, Actinobacillus pleuropneumoniae serovar 1 str. 4074
MKVTAGSPFPLGAQAVENGTNFAIFSENATAIELCLFKQSQEQRFAMRRTGDVWHLFVENIGEGIEYGFRVAGITDKQKGALFNPQKLLLDPYAKRIVGTVSAHTADEIKYFQWDDKRDNAHLAPKSVVVAPDNFDWEDDERPHYPWRETIIYELHVKGFSRLNQQIPEPLRGTYAGLAHPASIAYLKRLGVTTIELQPVSHHIDEVHLQKMGKTNYWGYNVIGHSAVEPVLAWDQEDPITEFKYLVKTLHKHGFEVILDLVYNHTAEGGTDSLTLCQRGIDNQNYYWLNQQGEYENWAGCGNALNLSHPRVCQWAIDSLVYWVSECHVDGFRFDLATTLGRTPEFDQLSPFFEKIKQTPELEHIKLIAEPWDIGPNGYQVGRFPIQFAEWNDKYRTTMREFFLGESGNLGEFARRLAGSDDLYWQYSPAKSINYFASHDGFTLQDLVSYNKKHNEANGENNRDGENTNHSNNHGVEGETDNEFVNILRDQTACSLLATLFLSNGVPMLRAGDELGHSQKGNNNAYCQDNEIAWIDWQNANESRIEYVAKWIALRKRIALLSHQNHWWTENDVQWFSSQGKVMEIEDWHNTESKALQILLQDHWLILINAKKTTQQFFLPTGKWHICLGKNIATLIANTQSVALQFEQMGVCVLQRKLSSY

SEQ ID NO: 55903 - DNA, 2118 bp, Crocosphaera watsonii WH 8501
  CDS (1)..(2118): transl_table=11
atgaccctcaaaacccttccaggcgaaagttatcccatcggcgcaacagtagaaaaagatggaaaacatggggtaaatttttgtattttctccaaagaagcgacttttatagaattactattatttgcagggcaaaatgacccccaaccctcccatactatccccttagatactaaaacaaatcgtacccattattattggcatatttttgtagagggactcaaagccggacaaatctatgcttatcgggtgcatggtccctttgatctcagtcaaggccatcgctttaaccctgaaaaagtattactagacccctacgctaaagccattgtgggatcttctatttacaatcgagaagccgccaaacaaccaggagacaactgcgcccaagccttacgtggtgtggtggtagacacagaaacctatgattgggaaggggactggacacaaaaacctcgtttacgccaaccctattctaaaagtgtcatctatgagatgcacgtgggagggtttacccgtcatcccaactctggggtggccccagaaaaaaaaggcacctttgctggattaattgaaccagaaaaaattgcttatttaaaaagcttaggaataactgccgttgaactattacccattcattactttgatgtagaagatgtcaaaccgggacttcaaaattattggggatatagtaccatcggattttttgcccctcacagttactatagttccgatcaaagtcctcttggccccgttaatgaatttcgggacatggtgaaagcgttacataaagaaggcatagaagtcattttagatgttgtctttaaccacaccgcagaaggcgacgaacgggggccaacccttaattttcgggggatcgataactcaacctattacatcctagaagaagaccattcacagtacaaaaattatgccggttgcggtaatacttttcggggaaatcatcccattgtgggtcgttttatcttagactgtttgcattattgggtcacagaaatgcacgtggatggattccgttttgatctggcttcgattctgtccagagattcatcaggaacccccttagaagacttgcgaggaacaactccagatattttatggattatcgaatctgaccccgttttagcaggaacaaaattgattgcagaagcttgggatgctgccggattatacgatgtgggaagatttgtagagttagcagactggtttgctgagtggaatggaccgtttcgggatgatgtgcgttgttttgtcaaaggggatgacgggatggttccccgtttagccagtcgtattcttggtagtcccgatatttatcaccgtgaagatgttgatattaatcgtagtattaattttgtcacttgtcatgatggttttaccctcaatgatttagtttcttatgatgaaaaacataacgaaggaaatggggaggataattgtgatggagataatcataataatagttggaattgtggggtagaaggggaaacaaatgattcagtaattaatacattgcgactgcaacagattaaaaatttcttcaccattctctttttatcccaaggaactccaatgatattaatgggggatgaaataaaacgcacccaaagaggtaataataatgtttattgtcagaataatgagttaagttggtttaattgggatggggtggaaagcgaatatgatttatggtgttttcttcgacgtttaatttactttactcaagggttggaattatttaatcaagaggaaaggttagaggttgcttataataatcctaatcatcctcatattagttggcatggggtaaaattaggagaaccagattggtcagattattcccactgtttggcttttagtttacgtcatcctgaaaaaaaagagtatcttcacgtaatgcttaatgcttattgggaacctctagaatttgaattaccttggttgggagatgacgagcattggtatcgtgttgtagatacttctttacccatcgataaaaccatttgtgaattagacgttgcggttgaagtaactacgggaaattatacaaccaatggacgatcttgtgtggttttaatggctaaagcaaaacattaa

SEQ ID NO: 55904 - protein, 705 aa, Crocosphaera watsonii WH 8501
MTLKTLPGESYPIGATVEKDGKHGVNFCIFSKEATFIELLLFAGQNDPQPSHTIPLDTKTNRTHYYWHIFVEGLKAGQIYAYRVHGPFDLSQGHRFNPEKVLLDPYAKAIVGSSIYNREAAKQPGDNCAQALRGVVVDTETYDWEGDWTQKPRLRQPYSKSVIYEMHVGGFTRHPNSGVAPEKKGTFAGLIEPEKIAYLKSLGITAVELLPIHYFDVEDVKPGLQNYWGYSTIGFFAPHSYYSSDQSPLGPVNEFRDMVKALHKEGIEVILDVVFNHTAEGDERGPTLNFRGIDNSTYYILEEDHSQYKNYAGCGNTFRGNHPIVGRFILDCLHYWVTEMHVDGFRFDLASILSRDSSGTPLEDLRGTTPDILWIIESDPVLAGTKLIAEAWDAAGLYDVGRFVELADWFAEWNGPFRDDVRCFVKGDDGMVPRLASRILGSPDIYHREDVDINRSINFVTCHDGFTLNDLVSYDEKHNEGNGEDNCDGDNHNNSWNCGVEGETNDSVINTLRLQQIKNFFTILFLSQGTPMILMGDEIKRTQRGNNNVYCQNNELSWFNWDGVESEYDLWCFLRRLIYFTQGLELFNQEERLEVAYNNPNHPHISWHGVKLGEPDWSDYSHCLAFSLRHPEKKEYLHVMLNAYWEPLEFELPWLGDDEHWYRVVDTSLPIDKTICELDVAVEVTTGNYTTNGRSCVVLMAKAKH

SEQ ID NO: 55905 - DNA, 2043 bp, Synechococcus sp. RS9917
  CDS (1)..(2043): transl_table=11
ttgggcagtgcgatcaccgaacagggggtgaatttttccctcgcagctcccggcgcctatcgggtggagctcctgctgtatgcccgagcggatgcacctcaaccggagcggatcatcgatctcggcctggagcatcggtccggtgactactggcatgtggaggtggagggcctccaggccggttgctgctatggctatcgcgtcttcggtccgctggagccgggcggccatggcttccgaccggcgaaggtgctgctcgatccctgcgcgcgggcgatcgccggctgggaggtgtatcggcgggaggcggccaccggtgcttcacctaacaccgattgctgtctgaaggcggtggtgtgtgagcgggacagcttcgactttcaggcccatccgcgaccgcatcacagctggaatcgcagcgtgatctacgaactgcatgtggggggcttcacccggcgcggcgacagtggtgtggcgccggaccgccggggcaccctgcggggggtgatcgacaagctcccctatctcaaggatctgggagtcacggcgatcgagctgctgccgatccaggcgtttgatccgcaggatgccccggcggggcgcgacaacgtctggggatacagccccctcagctggttcgctccccaccatggctacatcgagggcgacgaccctctgcaggcccgcgcccaggtgcgcgagctggtggcggcctgtcacgacaacgggcttgaggtgctgctcgatgtggtgtacaaccacaccaccgaagggaatcggcatgggccgacgctgagttggaggggctgcggcgaccggctctattaccaccagaacagcaagggcgattacctcgatgtgagcgggtgtggcaacagcattgccgccaatcgccccctgacccgccagctcattctcgaatcgattcgctgctgggcgatcgaactcggtgtggatgggttccggtttgatctcggcattgccctcagtcggggagaggggctgcaaccgctcgaccatccgcctctgttcgaggcgatcgaagccgaccccctgttgagtgacctgaaactggtgagtgagccctgggattgcggcggcctttatcggctcagcgatttcccggcgcagcggatcggtgcctggaatggacggttccgcgacgatctgcgcagcttctggaagggggatgacaacagcacctggaagctgggtcagcgcctgcgcggcagcccggacctgaacggggggcgccccctcgcgttggggcgttccgtcaatttcatcacggcccacgacggcttcaccctgatggacctggtgagtttcaacggcaaacacaacctcgccaacggagaagacaaccgcgatggcgagaatcacaacagcagctggaaccacggtgtggaggggcccagcacggatcacgccgttctggccttgcgccgcaggcagcagcgcaatctgatcacctcactgcttctcagccgaggggtgccgatgctgttgatgggcgatgaggtgggacggagtcagggcggcaacaacaacagctggtgccaagacagccccttgagttggatgatctggggcgacgaccactgcgaccggcacctccagggctatgtgcggcgtttgctccgcctgcgccagcagctggccgatctgatcaaccctcaacagccgatcggtgagatgccgcagcggcgcagcagcgatcccgatcagctctggcgccaatggcacggggtggaactcggcaagcccgactgggccagctggtcccattgcctggcggtgagcctgcagcgcggcagtcggggtgccgtgctctgggccggtttcaacagctatttcaaggcgatgcacttcgatctgccccagcccacctcgccctggcatcgcctgatcgacaccgctttgccaccgggagacgatctgccccagcagccggaggtgtggacgcccgcgggggtgcccctggaggcccgaagcatggtggtgatggtgtcccgtgaaatgctcggcagtcttcggctctga

SEQ ID NO: 55906 - protein, 680 aa, Synechococcus sp. RS9917
MGSAITEQGVNFSLAAPGAYRVELLLYARADAPQPERIIDLGLEHRSGDYWHVEVEGLQAGCCYGYRVFGPLEPGGHGFRPAKVLLDPCARAIAGWEVYRREAATGASPNTDCCLKAVVCERDSFDFQAHPRPHHSWNRSVIYELHVGGFTRRGDSGVAPDRRGTLRGVIDKLPYLKDLGVTAIELLPIQAFDPQDAPAGRDNVWGYSPLSWFAPHHGYIEGDDPLQARAQVRELVAACHDNGLEVLLDVVYNHTTEGNRHGPTLSWRGCGDRLYYHQNSKGDYLDVSGCGNSIAANRPLTRQLILESIRCWAIELGVDGFRFDLGIALSRGEGLQPLDHPPLFEAIEADPLLSDLKLVSEPWDCGGLYRLSDFPAQRIGAWNGRFRDDLRSFWKGDDNSTWKLGQRLRGSPDLNGGRPLALGRSVNFITAHDGFTLMDLVSFNGKHNLANGEDNRDGENHNSSWNHGVEGPSTDHAVLALRRRQQRNLITSLLLSRGVPMLLMGDEVGRSQGGNNNSWCQDSPLSWMIWGDDHCDRHLQGYVRRLLRLRQQLADLINPQQPIGEMPQRRSSDPDQLWRQWHGVELGKPDWASWSHCLAVSLQRGSRGAVLWAGFNSYFKAMHFDLPQPTSPWHRLIDTALPPGDDLPQQPEVWTPAGVPLEARSMVVMVSREMLGSLRL

SEQ ID NO: 55907 - DNA, 2049 bp, Synechococcus sp. WH 5701
  CDS (1)..(2049): transl_table=11
atgcacgattccacccagggtcgcagccacccgatcggcgccacgctggagcatggtggtgccaacttcagcctgttttccagaacggcatcagccgttgaccttctgctgttcgacggggtgaacgagacccacccatcacgggtggtcacccttgatccccagacgaatcgcacctaccactattggcatggcttcgtgccgggtgtggagcctggtcagctgtatggctaccgggtccatggtccctgggacccttcgcgcggcttgtacttcgatccctcccgggtgttgctcgatccctatggaagggctgtggcagtcccggagggctccgaagccatgaaaagtgtggtcgtcgatccgggagcctacgactggcaggatgaccagcctctacgccatccctgtgcccgcacgatcatctatgagatgcatgtgcggggattcacggcccatccaaattcgggcgtttcagcggagcggcggggaacctatgccggtctgatcgagaagatcccctatctccaggatctcggcatcacagctgtggagctgttgccggtgttcgccttcgatcgccaggccgccccatccggccatgtgaactactggggttaccaacccctgggattcttcgcgccccatccgggctacagctgcggggaagaccccctggaggctgtcgatgaattccgggacatggtcaaggccctgcatcatgcggggattgaggtgattctcgatgtggtcttcaaccacacggcagaaggaggagtgaacgggcccaccttctgcttccgaggcatcgacaatcccaattactacctcctcagggacgggggcagtcaatacgccgatttttcagggtgtggcaacaccctgaacgccaaccatcctgtcgtgcgacggatgattgtcgacagcctgcggtactgggttggggagatgcatgtggatggctttcgttttgatcttgcttccatcctctcgcgcgattctgcggggaatgtgcttcccaatccccccgttctctgggacattgagtcggatccgctgctggcgggaaccaagctgatcgctgaagcctgggacgcagcagggctctatcaggtgggcagtttcgtcggcgacagctggcgtgaatggaatggccgctttcgcgacgacgcccgtgacttctttcgcgctgcgcctggttcgctgggcaggttcgctgatcgcctcatcggcagcccccagatctacggacataaagagcgcgaagcggagcagagcatcaatttcgtgacctgtcacgatggattcaccctcaacgatctggtttcctacaacggcaagcacaacgaagccaacggagagaacaaccgtgacgggaccgatgacaaccggagctggaactgtggggtggaaggacccagcgatgactctgccgtggaagacctgcgcaaccggcagatccggaacttcttcgccgtcaccctgctctcgctgggagtccccatgctgctgatgggcgatgaggtcaggcgtacccagcatggcaacaacaacgcctacggtctcgacgactccagcaactggttcgactgggcccttctccagcggcatggcgacctgcatcgcttcgtcaagctgctgatcgctcgccgcctgcagcgagatcttcgctcggagcgggagcgcaccagcctgaacacgctcattcgccgggcctcaaaagcgtggcatggcacccggctgaaccatcccgactggggcgatcaatcccacagcatctccctgactgtgaagctgctgcaggacaaggcctggctccacctgatcctcaatgcctactggcaacccctcgagttcgccctgcccatgatcacaccggatggatccagcccctggcaccgctggatcgatacctctaggccctcccccagcgacatcgtgccgtgggaggaggcagcggaatgccctgcgggcccctaccgtgccatggagcattcggttgttgtgctcatcgctggggcgggagtcggaccggagcaaggaggctga

SEQ ID NO: 55908 - protein, 682 aa, Synechococcus sp. WH 5701
MHDSTQGRSHPIGATLEHGGANFSLFSRTASAVDLLLFDGVNETHPSRVVTLDPQTNRTYHYWHGFVPGVEPGQLYGYRVHGPWDPSRGLYFDPSRVLLDPYGRAVAVPEGSEAMKSVVVDPGAYDWQDDQPLRHPCARTIIYEMHVRGFTAHPNSGVSAERRGTYAGLIEKIPYLQDLGITAVELLPVFAFDRQAAPSGHVNYWGYQPLGFFAPHPGYSCGEDPLEAVDEFRDMVKALHHAGIEVILDVVFNHTAEGGVNGPTFCFRGIDNPNYYLLRDGGSQYADFSGCGNTLNANHPVVRRMIVDSLRYWVGEMHVDGFRFDLASILSRDSAGNVLPNPPVLWDIESDPLLAGTKLIAEAWDAAGLYQVGSFVGDSWREWNGRFRDDARDFFRAAPGSLGRFADRLIGSPQIYGHKEREAEQSINFVTCHDGFTLNDLVSYNGKHNEANGENNRDGTDDNRSWNCGVEGPSDDSAVEDLRNRQIRNFFAVTLLSLGVPMLLMGDEVRRTQHGNNNAYGLDDSSNWFDWALLQRHGDLHRFVKLLIARRLQRDLRSERERTSLNTLIRRASKAWHGTRLNHPDWGDQSHSISLTVKLLQDKAWLHLILNAYWQPLEFALPMITPDGSSPWHRWIDTSRPSPSDIVPWEEAAECPAGPYRAMEHSVVVLIAGAGVGPEQGG

SEQ ID NO: 55909 - DNA, 2079 bp, Synechococcus sp. WH 5701
  CDS (1)..(2079): transl_table=11
ttgtcttcgatccagctcggacatccctggcccctcggggcagcgctcaccgcccggggggtgaatttctccctggtggccccatcggcctcgcgagtggagctgctgctgtttgcccgtggaagctcgcctgagcccttccggatcattcccctggatctgcgccatcgctccggcgaccactggcatgtggaagttgaggggatcggcgccggcacctgctacggctaccgcgtctatgggcctctccaccccgggggccacggcttcaacccgtcgaaggtgctgcttgatccctgcgccagggcgatcagcggctgggatgtctaccgccgcggtgacgccatcggcgccatccccaacaccgccgcctgcctgaagggggtggtcacggagcgggatcacttcgatttcgtggccgcgccgaggccccgccacagctggcagaccacggtgatctacgagctgcacgtaggcgggctcagccggggccagggcagccccgtggcccccgagcgccagggcagcctgctgggcgtgatcgactgcctgccctacctgcggagcctgggcgtcaccgccctggaattgctgccggtgatggccttcgatccccaggacgccccccacgggcgccagaactactggggctacagccccctgagctggatggcgccccaccagggctatctggtgggcgacgacccgctggcggggcgccagcaggtgcgtcagctggtcaccgcctgccaccaggccgggatagaggtgctgctcgacgtggtttacaaccacaccagcgaaggcaaccaggccgggccgaccctgagctggcgcggactggcggaccgcctctactaccaccagaacagccggggcgactacctggatgtcaccggctgcggcaacaccatcgccgccaaccgccccctggcgcggcggctgctgctggaatcgatgcgctgctgggccctggagttgggcatcgacggcttccgcttcgatctcggcatcgccctcagccgcggcgaggagctggccccgctcgacaaaccgcccctgttcgaggagatcgaggccgaccccgaactgagcgacctcaagctggtgagcgaaccctgggattgcggcggtctctaccggctcaatgatttcccggcgcggcgcatgggcacctggaatggccgcttccgcgacgacgtgcgccgcttctggaaaggggacgacaacggcagctggttgatggcccagaggctctcaggcagccctgatctctacggcggcaaaccggccacggcaggccgcagcatcaccttcatcaccgcccacgacggcttcacgctcgccgacctggtcagctacgaccgcaagcacaacctggccaacggcgaggacaaccgcgacggcgacaaccacaacaacagctggaatcacggggtggaggggccctgcagcgacctgcagatcaacgagctgcgcaaccgccagatccgcaacatgctgggcaccatgctgctggcacccggggtgccgatgctgctgatgggcgatgaagtgcgccgcagccaggggggcaacaacaacacctggtgccagaacaatcccctgggctggatgcactggcgccccgacgaggacgaccagcgccttcatcggttcttgagccgcctggtgcgcctgcgccgccggctcgaaaggctgctcaatcccgagatcccccatgccgacagccccccctccaagcccggcgagcgggacctgatctggcgcgagtggcacggggtggaactgctccaacccgactggggcagctggtcccacagtctggcctggagcctgcacgacatgcgccacggccccctgctctggtgcggcatgaatgcctactaccagcccatggtcttcaagctgccagaggccagcgccggctggctgagggtgatcgacaccggagcccccgacggtgacgacgtgatggcctcccctcagccctggattgccgaggaagccgccctggagagccgcagcctgatgctgctgctggcgtcccacctgggcgagaaggccgtcgaggcctga

SEQ ID NO: 55910 - protein, 692 aa, Synechococcus sp. WH 5701
MSSIQLGHPWPLGAALTARGVNFSLVAPSASRVELLLFARGSSPEPFRIIPLDLRHRSGDHWHVEVEGIGAGTCYGYRVYGPLHPGGHGFNPSKVLLDPCARAISGWDVYRRGDAIGAIPNTAACLKGVVTERDHFDFVAAPRPRHSWQTTVIYELHVGGLSRGQGSPVAPERQGSLLGVIDCLPYLRSLGVTALELLPVMAFDPQDAPHGRQNYWGYSPLSWMAPHQGYLVGDDPLAGRQQVRQLVTACHQAGIEVLLDVVYNHTSEGNQAGPTLSWRGLADRLYYHQNSRGDYLDVTGCGNTIAANRPLARRLLLESMRCWALELGIDGFRFDLGIALSRGEELAPLDKPPLFEEIEADPELSDLKLVSEPWDCGGLYRLNDFPARRMGTWNGRFRDDVRRFWKGDDNGSWLMAQRLSGSPDLYGGKPATAGRSITFITAHDGFTLADLVSYDRKHNLANGEDNRDGDNHNNSWNHGVEGPCSDLQINELRNRQIRNMLGTMLLAPGVPMLLMGDEVRRSQGGNNNTWCQNNPLGWMHWRPDEDDQRLHRFLSRLVRLRRRLERLLNPEIPHADSPPSKPGERDLIWREWHGVELLQPDWGSWSHSLAWSLHDMRHGPLLWCGMNAYYQPMVFKLPEASAGWLRVIDTGAPDGDDVMASPQPWIAEEAALESRSLMLLLASHLGEKAVEA

SEQ ID NO: 55911 - DNA, 2103 bp, delta proteobacterium MLMS-1
  CDS (1)..(2103): transl_table=11
atgaaggtctggcccggcaccccctaccccctgggggccacctacgacggcaccggcaccaatttttcgctgttttccagtatcgccgaggcggtggaactctgtttattcgatgccgacgataacgaaacccggatcaacctgcccgaggttaccggctactgctggcatggctacctgccggaggtggagccgggccaacgctacggtttccgggtccacggcccctggcagcccgaggcgggccaccgctgcaacccggccaagctgctgctcgacccctacgtcaaggccattgccggtgatatcgcctgggatgaagcgctctttccctatcgcttcgccgacggccccgacagccgcgacgatcgcgacagcgccccctttatgccgcgctgcgtggtccatcaaccctacttcgactggagcggtgatcgccggccgctacgaccctggcataaaacggtgatctacgagacccacgtcaagggattcagcaagctgcacccggagattcccgaagagttgcgcggcacctacgccggcctggcccatccggtggcggtggcgtatctgcaggaattggggattaccgccgtggagttgctgccgatccatcaatttatccacgataagcacttaatcgacaaaggcctgcgcaactactggggctacaacacccttgccttcttcgccccccaccacgaatacgccgccgaccgacggccggcggcggcggtggccgagttcaaacagatggtcaaaagcctgcaccaggccggcatcgaagtaatcctcgatgtggtttacaaccacaccggcgagggtaaccacctgggaccgatcatctcccttaaaggcatcgacaacgcccactattaccggaccatggccgacgatccgcgctactacatggattacaccggcaccggcaacagcctcaatatgcgccacccccatgttctgcagttattgatggattcgttgcgctactgggtgctggaaatgcatgtcgatggtttccgtttcgacctggcctccaccctggcccgggagctgcacgatgtcgacaaactctcggccttttttgatctgatccagcaggacccggtgatcagccaggttaaactgatcgccgaaccctgggatatcggcgaggggggctatcaggtgggcaacttcccgccgggctggtcggagtggaacggcaaataccgtgactgtctccgcgatttctgggccggccgcgacaaaaccctgggtgagttcgcctaccgcttcaccggcagttccgatctctacgccaacgacagccggctgccctttgccagcatcaactttatcaccgcccacgatggctttaccctgcgggatctggtcagctacgaccacaagcacaacgaggccaacggcgaagacagcctggacggcaacgaccacgaaggttcgtggaactgcggcgccgagggccccaccgacgatcccgggatcctggccctgcgggcccgccagcagcgtaatttcctggccaccctgctcttctcccaggggataccgatgctgctggggggtgatgagttcggccgcagccaacagggcaacaacaacgcctactgccaggataacgagatttcatggtatgactgggagaacatcgatgaagaactgctggccttcagccgccgactgctggcctatttccacgagcatccggttttccgccgccgccgctggttccagggccgggccatccacggcccggaagtaaccgatatcgcctggttcaatcatttaggcgagcagatggccgaagagcactggggggaggatcatgccaaatcggtgggaatttttctaaacggccgcaccatccccaaccccaaccccaagggcgagccggtgaccgacgacagcttttacctgctctttaacgcccactacgaagacctgccctgccaactgcccgccgccgcctggggagagcagtggctgctggaactggacaccgcccggggctggctggccaagccggaaccactggcggcgggcgccgacttcacagtggccgcccgcgccctggtggtcctgcggctgccggtttag

SEQ ID NO: 55912 - protein, 700 aa, delta proteobacterium MLMS-1
MKVWPGTPYPLGATYDGTGTNFSLFSSIAEAVELCLFDADDNETRINLPEVTGYCWHGYLPEVEPGQRYGFRVHGPWQPEAGHRCNPAKLLLDPYVKAIAGDIAWDEALFPYRFADGPDSRDDRDSAPFMPRCVVHQPYFDWSGDRRPLRPWHKTVIYETHVKGFSKLHPEIPEELRGTYAGLAHPVAVAYLQELGITAVELLPIHQFIHDKHLIDKGLRNYWGYNTLAFFAPHHEYAADRRPAAAVAEFKQMVKSLHQAGIEVILDVVYNHTGEGNHLGPIISLKGIDNAHYYRTMADDPRYYMDYTGTGNSLNMRHPHVLQLLMDSLRYWVLEMHVDGFRFDLASTLARELHDVDKLSAFFDLIQQDPVISQVKLIAEPWDIGEGGYQVGNFPPGWSEWNGKYRDCLRDFWAGRDKTLGEFAYRFTGSSDLYANDSRLPFASINFITAHDGFTLRDLVSYDHKHNEANGEDSLDGNDHEGSWNCGAEGPTDDPGILALRARQQRNFLATLLFSQGIPMLLGGDEFGRSQQGNNNAYCQDNEISWYDWENIDEELLAFSRRLLAYFHEHPVFRRRRWFQGRAIHGPEVTDIAWFNHLGEQMAEEHWGEDHAKSVGIFLNGRTIPNPNPKGEPVTDDSFYLLFNAHYEDLPCQLPAAAWGEQWLLELDTARGWLAKPEPLAAGADFTVAARALVVLRLPV

SEQ ID NO: 55913 - DNA, 2103 bp, delta proteobacterium MLMS-1
  CDS (1)..(2103): transl_table=11
atgaaggtctggcccggcaccccctaccccctgggggccacctacgacggcaccggcaccaatttttcgctgttttccagtatcgccgaggcggtggaactctgtttattcgatgccgacgataacgaaacccggatcaacctgcccgaggttaccggctactgctggcatggctacctgccggaggtggaaccgggccaacgctacggtttccgggtccacggcccctggcagcccgaggcgggccaccgctgcaacccggccaagctgctgctcgacccctacgtcaaggccattgccggtgatatcgcctgggatgaagcgctctttccctatcgcttcgccgacggccccgacagccgcgacgatcgcgacagcgccccctttatgccgcgctgcgtggtccatcaaccctacttcgactggagcggtgatcgccggccgctacgaccctggcataaaacggtgatctacgagacccacgtcaagggattcagcaagctgcacccggagattcccgaagagttgcgcggcacctacgccggcctggcccatccggtggcggtggcgtatctgcaggaattggggattaccgccgtggagttgctgccgatccatcaatttatccacgataagcacttaatcgacaaaggcctgcgcaactactggggctacaacagccttgccttcttcgccccccaccacgaatacgccgccgaccgacggccggcggcggcggtggccgagttcaaacagatggtcaaaagcctgcaccaggccggcatcgaagtaatcctcgatgtggtttacaaccacaccggcgagggtaaccacttgggaccgatcatttcccttaaaggcatcgacaacgcccactattaccggaccatggccgacgatccgcgctactacatggattacaccggcaccggcaacagcctcaatatgcgccatccccatgttctgcagttattgatggattcgttgcgctactgggtgctggaaatgcatgtcgatggtttccgtttcgacctggcctccaccctggcccgggagctgcacgatgtcgacaaactctcggccttcttcgatatcatccagcaggacccggtgatcagccaggtcaaactgatcgccgaaccctgggatatcggcgagggtggctatcaggtgggcaacttcccgccgggctggtcggagtggaacggcaaataccgcgactgtctccgcgatttctgggccggccgcgacaaaagcctgggtgaattcgcctaccgcttcaccggcagttccgatctctacgccaacgacagccggctgccctttgccagcatcaactttatcaccgcccacgacggctttaccctgcgggatctggtcagctacgaccacaaacacaacgaggccaacggcgaaaacagcctggacggcaacgaccacgaaggttcgtggaactgcggcgccgagggccccaccgacgatcccgggatcctggccctgcgggcccgccagcagcgtaatttcctggccaccctgctcttctcccagggggtaccgatgctgctggggggtgatgagttcggccgcagccaacagggcaacaacaacgcctactgccaggataatgagatttcatggtatgactgggagaacatcgatgaagaactgctggccttcagtcgccgactgctggcctatttccacgagcatccggtcttccgccgccgccgctggttccagggccgggccatccacggcccggaagtaaccgatatcgcctggttcaatcatttaggcgagcagatggccgaagagcactggggggaggatcatgccaaatcggtgggaatttttctaaacggccgcaccatccccaaccccaaccccaagggggagccggtgaccgacgacagcttttacctgctctttaacgcccactacgaagatctgccctgccgactgcccgccgccgcctggggcgagcgatggctgctggagctggacaccgcccggggctggctggccaagccggaaccactggcggcgggcgccgacttcacagtggccgcccgcgccctggtggtcatgcggctgccgaattag

SEQ ID NO: 55914 - protein, 700 aa, delta proteobacterium MLMS-1
MKVWPGTPYPLGATYDGTGTNFSLFSSIAEAVELCLFDADDNETRINLPEVTGYCWHGYLPEVEPGQRYGFRVHGPWQPEAGHRCNPAKLLLDPYVKAIAGDIAWDEALFPYRFADGPDSRDDRDSAPFMPRCVVHQPYFDWSGDRRPLRPWHKTVIYETHVKGFSKLHPEIPEELRGTYAGLAHPVAVAYLQELGITAVELLPIHQFIHDKHLIDKGLRNYWGYNSLAFFAPHHEYAADRRPAAAVAEFKQMVKSLHQAGIEVILDVVYNHTGEGNHLGPIISLKGIDNAHYYRTMADDPRYYMDYTGTGNSLNMRHPHVLQLLMDSLRYWVLEMHVDGFRFDLASTLARELHDVDKLSAFFDIIQQDPVISQVKLIAEPWDIGEGGYQVGNFPPGWSEWNGKYRDCLRDFWAGRDKSLGEFAYRFTGSSDLYANDSRLPFASINFITAHDGFTLRDLVSYDHKHNEANGENSLDGNDHEGSWNCGAEGPTDDPGILALRARQQRNFLATLLFSQGVPMLLGGDEFGRSQQGNNNAYCQDNEISWYDWENIDEELLAFSRRLLAYFHEHPVFRRRRWFQGRAIHGPEVTDIAWFNHLGEQMAEEHWGEDHAKSVGIFLNGRTIPNPNPKGEPVTDDSFYLLFNAHYEDLPCRLPAAAWGERWLLELDTARGWLAKPEPLAAGADFTVAARALVVMRLPN

SEQ ID NO: 55915 - DNA, 2109 bp, delta proteobacterium MLMS-1
  CDS (1)..(2109): transl_table=11
atgaagaccagaaaaaaaacttttcgttcgggggccggcagcccgctgcccctgggggttagccgtactccggccggctacaatttcgccatcgccgcccgccatgccgaggcggtttccctggtgctctatccccccagccgagccgagccggtggccgagttggctttcgacccccacttgaaccgtagcggcgatgtctggcacctgttgctggccgatttcgagcccaccctgcgttacggtttccggttgcgtggcccctgccggtcagccgcggccggttattgctaccgggacgaactggtgatgctcgatccctacgccaaggctttaaccggtggctccgactggggcaaggcctatcggcgaccggggcggtccgatcccctggccagcttccagcgccgctgcctttacctggaagacgattttgactgggagggggatcggccacttaatattcccctctcggagaccattatctatgaactgcatgtacggggcttcacccggcatccctcgtcggcggtggagcatcccggcacttaccggggaataattgagaaaattccgtattttaaagagctgggggtcaccgccatcgagctgctgccggtggccgaattcaatgagctggagaatacccgggtcaatcctttcaccggtgagcagttaaaaaacttctggggctactcaccgctggccttttttgcccccaaagcagcctacgcggtcaacggccgggacggcaaccaggtgcgggagttcaaggagatggtcaaggccctgcacgccgccgggcttgaagtaatccttgatgtggtcttcaaccataccgccgagggtggtgccgatgggccggtgatcagcttcaaaggtatcgacaacccgatctactacctgctcgatcccgccacccgggaatatcttaacttttccggctgcggcaacaccgtcaactgcaatcatccctgggtccgggaactgattgtcgattgtctgcgctactgggtcaccgaaatgcatgttgacggtttccggttcgatctggcttcgatcttcggccggggggccaggggggaaatcctggccgagccgcccatggtggagaaaatcgccgaagacccggtactggccaaaaccaagatcatcgccgaggcctgggatgccgccgggctttaccaggtgggcagtttttccccccaccagcgctgggccgagtggaacggccgcttccgtgatgatgtccgccgcttcctctgcggccatgatgacaccgtggccgccctggccaccaggctggccggcagctccgatctttacggccaaaacgggcgccggcccttcaactccatcaattttatcaccagccacgacggcttcaccctccacgacctggtcagctacaaccacaaacataacgaggccaacggcgaagataaccgggatggcgataatcacaatatttcctggaactccggggtggaaggggagagtgacgagccggccatactggccctgcgggcccggcggctccgcaccgccgcggtgattctgctgctctcccagggggtgccgatgctctgcgccggcgatgaattcggccgcagccagcggggcaacaacaacgcctactgccaggacaatgaaatctcctggcttgattggcggctggtcgagcaaaacgccggcctgttgcgttttttccgtttactgatcagcctgcgccggcggcatccgctcttccgccgggatcattttttctccaccgcgccgtcggccaggcagcccgagatcagctggcaggccctggaaccggggcgccaggactggtcggccggctgccgggtgctggccttccggctccacggtcgggccggcggtagcggccagcggcgggatcgggattttttcgtgatgctcaactccgatgcccaaccccagcgatttaccctgcccaagccaccggctcggcggccctggcggttgctcattgacaccgccgccgcctcgccccgggatatttaccaggatgaaaaggcgcccaaagtgggaggcgggcggcaggaagtggccccccacggggccgtggtgctcatcgcttaa

SEQ ID NO: 55916 - protein, 702 aa, delta proteobacterium MLMS-1
MKTRKKTFRSGAGSPLPLGVSRTPAGYNFAIAARHAEAVSLVLYPPSRAEPVAELAFDPHLNRSGDVWHLLLADFEPTLRYGFRLRGPCRSAAAGYCYRDELVMLDPYAKALTGGSDWGKAYRRPGRSDPLASFQRRCLYLEDDFDWEGDRPLNIPLSETIIYELHVRGFTRHPSSAVEHPGTYRGIIEKIPYFKELGVTAIELLPVAEFNELENTRVNPFTGEQLKNFWGYSPLAFFAPKAAYAVNGRDGNQVREFKEMVKALHAAGLEVILDVVFNHTAEGGADGPVISFKGIDNPIYYLLDPATREYLNFSGCGNTVNCNHPWVRELIVDCLRYWVTEMHVDGFRFDLASIFGRGARGEILAEPPMVEKIAEDPVLAKTKIIAEAWDAAGLYQVGSFSPHQRWAEWNGRFRDDVRRFLCGHDDTVAALATRLAGSSDLYGQNGRRPFNSINFITSHDGFTLHDLVSYNHKHNEANGEDNRDGDNHNISWNSGVEGESDEPAILALRARRLRTAAVILLLSQGVPMLCAGDEFGRSQRGNNNAYCQDNEISWLDWRLVEQNAGLLRFFRLLISLRRRHPLFRRDHFFSTAPSARQPEISWQALEPGRQDWSAGCRVLAFRLHGRAGGSGQRRDRDFFVMLNSDAQPQRFTLPKPPARRPWRLLIDTAAASPRDIYQDEKAPKVGGGRQEVAPHGAVVLIA

SEQ ID NO: 55917 - DNA, 2109 bp, delta proteobacterium MLMS-1
  CDS (1)..(2109): transl_table=11
atgaagaccagaaaaaaaacttttcgttcgggggccggcagcccgctgcccctgggggttagccgtactccggccggctacaatttcgccatcgccgcccgccatgccgaggcggtttccctggtgctctacccccccagccgagccgagccggtggccgagttggctttcgacccccacttgaaccgcagcggcgatgtctggcacctgttgctggccgatttcgagcccaccctgcgttacggtttccggttgcgtggcccctgccggtcagccgctgccggttattgctaccgggacgaactggtgatgctcgatccctacgccaaggctttaaccggtggctccgattggggcaagccctatcggcgaccggggcggtccgatcccctggccagcttccagcgccgctgcctttatctggaagacgattttgactgggagggggatcggccacttaatattcccctctcggagaccattatctatgaactgcatgtacggggcttcacccggcatccatcgtcggcggtggagcatcccggcacttaccggggaataattgagaaaattccgtattttaaagagctgggagtcaccgccatcgagctgctgccggtggccgaattcaacgagctggaaaatacccgggtcaatcctttcaccggtgagcagttaaaaaacttctggggctactcaccgctggccttttttgcccccaaggcagcctacgcggtcaacggccgggacggcaaccaggtgcgggagttcaaggagatggtcaaggccctgcacgccgccgggcttgaagtaatccttgatgtggtcttcaaccataccgccgagggtggtgccgatgggccggtgatcagcttcaagggtatcgacaacccgatctactacctgcttgatcccgccacccgggaatatcttaacttttccggctgtggcaacaccgtcaactgcaatcatccctgggtccgggagttgattgtcgattgtctgcgctactgggtcaccgaaatgcatgttgacggtttccggttcgatctggcttcgatcttcggccggggggccgggggggaaatcctggccgagccgcccatggtggagaaaatcgccgaagacccggtactggccaaaaccaagatcatcgccgaggcctgggatgccgccgggctttaccaggtgggcagtttttccccccatcagcgctgggccgagtggaacggtcgttatcgtgatgatgtccgccgcttcctctgcggccatgatgacaccgtggcctccctggccacccggctggccggcagctccgatctttacggccaaaacgggcgccggcccttcaactccatcaattttatcaccagccacgacggctttaccctccacgacctggtcagctacaaccacaaacacaacgaggccaacggcgaagataaccgggatggcgataatcacaatatttcctggaactccggggtggaaggggagagtgacgagccggcggtactggccctgcgggcccggcggctccgcaccgccgcggtgattctgctgctctcccagggggtgccgatgctctgcgccggcgatgaattcggccgcagccagcggggcaacaacaacgcctactgccaggacaatgaaatctcctggcttgattggcggctggtcgagcaaaacgccggcctgttccgttttttccgtttactgatcagcctgcgccggcggcatccgctcttccgccgggatcattttttctccaccgcgccgtcggccaggcagcccgagatcagctggcaggccctggagccggggcgccaggactggtcggccggctgccgggtgctggccttccggctccacggtcgggccggcggtagcggccagcggcgggatcgggattttttcgtgatgctcaactccgatgcccaaccccagcgatttaccctgcccaagccaccggctcggcggccctggcggttgctcattgacaccgccgccgcctcgccccgggatatttaccaggatgaaaaggcgcccaaagtgagaggcgggcggcaggaagtggccccccacggggccgtggtgctcatcgcttaa

SEQ ID NO: 55918 - protein, 702 aa, delta proteobacterium MLMS-1
MKTRKKTFRSGAGSPLPLGVSRTPAGYNFAIAARHAEAVSLVLYPPSRAEPVAELAFDPHLNRSGDVWHLLLADFEPTLRYGFRLRGPCRSAAAGYCYRDELVMLDPYAKALTGGSDWGKPYRRPGRSDPLASFQRRCLYLEDDFDWEGDRPLNIPLSETIIYELHVRGFTRHPSSAVEHPGTYRGIIEKIPYFKELGVTAIELLPVAEFNELENTRVNPFTGEQLKNFWGYSPLAFFAPKAAYAVNGRDGNQVREFKEMVKALHAAGLEVILDVVFNHTAEGGADGPVISFKGIDNPIYYLLDPATREYLNFSGCGNTVNCNHPWVRELIVDCLRYWVTEMHVDGFRFDLASIFGRGAGGEILAEPPMVEKIAEDPVLAKTKIIAEAWDAAGLYQVGSFSPHQRWAEWNGRYRDDVRRFLCGHDDTVASLATRLAGSSDLYGQNGRRPFNSINFITSHDGFTLHDLVSYNHKHNEANGEDNRDGDNHNISWNSGVEGESDEPAVLALRARRLRTAAVILLLSQGVPMLCAGDEFGRSQRGNNNAYCQDNEISWLDWRLVEQNAGLFRFFRLLISLRRRHPLFRRDHFFSTAPSARQPEISWQALEPGRQDWSAGCRVLAFRLHGRAGGSGQRRDRDFFVMLNSDAQPQRFTLPKPPARRPWRLLIDTAAASPRDIYQDEKAPKVRGGRQEVAPHGAVVLIA

SEQ ID NO: 55919 - DNA, 2103 bp, Synechococcus sp. RS9916
  CDS (1)..(2103): transl_table=11
ttggccacgatccaccgcggcagcccctggccgatgggcagcacgatcacggcacgaggcgtgaatttctccctggcagctcccgctgccaaccgggtggaactgctgctgttcccccatggcgatgcagcccagccggatcgaatcatcgacctcgacagcgcgcaccgctccggggactactggcatgtggaggtggaagggctcggtgccggctgctgctacggctatcgcgtgttcggcccgctgcagcccgggggccatggcttccggcccgccaaggtgctgctcgacccctgcgcccgggccatcagcggctggaacgtttaccggcgcggctccgccaccggcgcatctcccaacactgatgcctgcctgaagggggtggtctgcgaacgggaccgattcgatttcaacacccatccccgaccccagcaccgctggaaccgcagcgtgatctatgagctgcatgtgggcagcttcacccggcgtgaggactccggcctggagcccaacctgcggggcaccctgcggggcttgatccgcaaactcccctatttgcagtcgctgggaatcacagcgatcgaactgctgccgattcaggcctttgatccccaggatgcgcctccaggtcgcgacaacgtgtggggctacagccccctcagctggttcgcgccccaccacgaattcatcgaaggccacgaccccctcgccgcgcggcagcaggtgcgcgaactggtggccgcctgccacgacgccggcatcgaggtgctgctggatgtggtctacaaccacaccacggagggcaaccagcaagggccaaccctcagctggcgaggcattgccgattgcctctactaccaccagaccgccaagggcgagtaccaagacgtgagcggttgcggcaacagcattgcggccaacaggcccttggtgcgccagctgatcctggaatccatgcgctgctgggcgatcgagctggggatcgacggtttccgttttgatctgggcatcgccctcagtcgcggggaaaagctcaaaccgctcgaccatccaccgctgtttgaagccatcgacagtgaccccgagctcagtgatctgaagctggtgagtgaaccctgggattgcggcgggctgtatcgcctgagcgatttcccctccaaacgcatcggcgcctggaacggcaggttccgcgatgacctgcgccgcttctggaagggcgatgagaacagcacctggacgctggggcaacgcctgcggggcagccccgacctcaatgacggcaaaccgctgaagctcgaccgctcagtgaatttcatcaccgcccacgacggcttcaccctggcggacctagtgagcttcaacgtcaagcacaacctcgccaacggtgaagacaaccgggacggcgaaaaccacaacagcagctggaaccatggggtggaagggcccaccaccgatcgggccgtgcaaaccctgcgccgccgccaacaacgcaatttgctcaccagcctgctgctcagccgcggggtgccgatgctgctgatgggcgatgaagtgggccgcagccaggggggcaacaacaacacctggtgccaggacagccctttgagctggatgatctggcggcaggacgactgcgacggcgatcttctcctcttcgtgcaacggctgttgaagctgcggcagcggttgccggatctgttcagccccgagacgccgatcagcgaaacgcgaccccggcgtggcagcgagcccgaccaactgtggcgccagtggcatggggtggaactgaacaaacccgactgggccagctggtctcactgcattgccacaagcctgcagcggggtgatcgcggtgcggtgctgtgggtgggcttcaacagctatttcaaagcaatgcacttcgatctgccgccggcagcctctccttggcaccgcctgatcgacaccgccctgccggcgggcgacgacctgccggagaccccagaaccgtggacccctcaaggcgtgcccctggaaagccgcagcctggtggtgatggcagcccgggaactgctccccagcgaaacgaacacaggctcaacaacggccaacaacacatag

SEQ ID NO: 55920 - protein, 700 aa, Synechococcus sp. RS9916
MATIHRGSPWPMGSTITARGVNFSLAAPAANRVELLLFPHGDAAQPDRIIDLDSAHRSGDYWHVEVEGLGAGCCYGYRVFGPLQPGGHGFRPAKVLLDPCARAISGWNVYRRGSATGASPNTDACLKGVVCERDRFDFNTHPRPQHRWNRSVIYELHVGSFTRREDSGLEPNLRGTLRGLIRKLPYLQSLGITAIELLPIQAFDPQDAPPGRDNVWGYSPLSWFAPHHEFIEGHDPLAARQQVRELVAACHDAGIEVLLDVVYNHTTEGNQQGPTLSWRGIADCLYYHQTAKGEYQDVSGCGNSIAANRPLVRQLILESMRCWAIELGIDGFRFDLGIALSRGEKLKPLDHPPLFEAIDSDPELSDLKLVSEPWDCGGLYRLSDFPSKRIGAWNGRFRDDLRRFWKGDENSTWTLGQRLRGSPDLNDGKPLKLDRSVNFITAHDGFTLADLVSFNVKHNLANGEDNRDGENHNSSWNHGVEGPTTDRAVQTLRRRQQRNLLTSLLLSRGVPMLLMGDEVGRSQGGNNNTWCQDSPLSWMIWRQDDCDGDLLLFVQRLLKLRQRLPDLFSPETPISETRPRRGSEPDQLWRQWHGVELNKPDWASWSHCIATSLQRGDRGAVLWVGFNSYFKAMHFDLPPAASPWHRLIDTALPAGDDLPETPEPWTPQGVPLESRSLVVMAARELLPSETNTGSTTANNT

SEQ ID NO: 55921 - DNA, 2370 bp, Zea mays
  CDS (1)..(2370)
atggcgcagcagctcccctgcgtctcgtcgccgcgcccgctgctcgccgtgcccgcgggccggtggcgcgccggcgtgcggggccggcccaatgtggcgggactggggcgggggcggctgtctctccacgccgccgccgcgcggcccgtggccgaggcggtgcaggcggaggaggacgacgacgacgacgacgaggaggtggccgaggagaggttcgcgctgggcggcgcgtgccgggtgctcgcgggaatgcccgcgccgctcggcgccaccgcgctccgcggcggtgtcaacttcgccgtctactccagcggtgcctccgccgcgtcgctgtgcctcttcgctcccggcgacctcaaggcggatagggtgaccgaggaggtgcccctcgatcccctgctcaaccgaacgggaaacgtgtggcacgtgttcatccacggggaccagctgcacggcatgctctacggatacaggttcgatggcgtgttcgcccctgagcgcggacagtactacgatgtgtccaacgttgtggtggatccatacgctaaggcagtggtaagccgaggtgaatatggtgtgcctgcgcctggtggtagttgttggcctcaaatggctggtatgatccctcttccctataataagtttgattggcaaggtgacctaccccttgggtaccatcagaaggaccttgtcatatatgaaatgcatttgcgtggattcacaaagcacaactcaagcaagacaaaacacccaggaacttacattggtgctgtgtcaaagcttgaccatctaaaggaacttggagtgaactgtatagagctaatgccctgccatgagttcaatgagctagagtacttcagctcctcttcgaagatgaacttctggggatattccacaataaattttttctcaccaatggcaagatattcttcaagtggcataagagactctggatgtggtgccataaatgaatttaaagcttttgtaagggaggcccacaaacggggaattgaggtgatcatggatgttgtcttcaatcatacagctgaaggtaatgagaaaggcccaatattatcctttagggggatagataatagtacatactacatgcttgcacctaagggagagttttataattattctggttgtggaaataccttcaattgtaatcatcctgtagtccgtgaatttatagtggattgcttgagatactgggtaacagaaatgcatgttgatggttttcgttttgaccttgcatctatactgaccagaggatgcagtctatgggatccagttaatgtgtatggaagtccaatggaaggtgacatgattacgacagggacacctcttgttgccccaccacttattgacatgattagcaatgacccaattcttggaaatgtcaagctcattgctgaagcatgggatgcaggaggtctctatcaagttggtcagtttcctcactggaacgtttggtcagagtggaatggaaagtatcgcgataccgtgcgtcagttcatcaaaggcacagatggatttgctggtgcttttgctgaatgcctatgtggaagtccacagttataccaggcaggggggaggaagccttggcacagtatcaactttgtatgtgcacacgatggatttacactggctgatttggtcacatacaatagcaagtacaacttgtcaaatggtgaggacaacagagatggggaaaatcataatcttagctggaattgtggggaggaaggagaatttgcaagtctgtcagtccgaagattaaggaagaggcaaatgcgcaatttctttgtttgtcttatggtttctcagggagttccaatgttctacatgggcgatgaatatggtcacacaaagggagggaacaacaatacgtactgccatgaccattatgtcaactatttccgttgggataagaaggaagaacaatcctctgatttgtacagattctgccgtctcatgaccaaattccgcaaggaatgtgaatctcttggccttgaggacttcccgacttcagaacggttgaaatggcacggtcatcagcccgggaagcctgactggtcagaggcaagccgattcgttgccttcaccatgaaggacgaaaccaaaggcgagatctacgtggccttcaacaccagtcaccttccggtggttgtcgggcttccagagcgctctgggttccgatgggagccggtggtggacaccggcaaggaggcaccatatgacttcctcaccgatggcctaccagatcgtgctgtcaccgtctaccagttctctcatttcctcaactccaatctctatcctatgctcagctactcctccatcatccttgtattgcgccctgatgtctga

SEQ ID NO: 55922 - protein, 789 aa, Zea mays
MAQQLPCVSSPRPLLAVPAGRWRAGVRGRPNVAGLGRGRLSLHAAAARPVAEAVQAEEDDDDDDEEVAEERFALGGACRVLAGMPAPLGATALRGGVNFAVYSSGASAASLCLFAPGDLKADRVTEEVPLDPLLNRTGNVWHVFIHGDQLHGMLYGYRFDGVFAPERGQYYDVSNVVVDPYAKAVVSRGEYGVPAPGGSCWPQMAGMIPLPYNKFDWQGDLPLGYHQKDLVIYEMHLRGFTKHNSSKTKHPGTYIGAVSKLDHLKELGVNCIELMPCHEFNELEYFSSSSKMNFWGYSTINFFSPMARYSSSGIRDSGCGAINEFKAFVREAHKRGIEVIMDVVFNHTAEGNEKGPILSFRGIDNSTYYMLAPKGEFYNYSGCGNTFNCNHPVVREFIVDCLRYWVTEMHVDGFRFDLASILTRGCSLWDPVNVYGSPMEGDMITTGTPLVAPPLIDMISNDPILGNVKLIAEAWDAGGLYQVGQFPHWNVWSEWNGKYRDTVRQFIKGTDGFAGAFAECLCGSPQLYQAGGRKPWHSINFVCAHDGFTLADLVTYNSKYNLSNGEDNRDGENHNLSWNCGEEGEFASLSVRRLRKRQMRNFFVCLMVSQGVPMFYMGDEYGHTKGGNNNTYCHDHYVNYFRWDKKEEQSSDLYRFCRLMTKFRKECESLGLEDFPTSERLKWHGHQPGKPDWSEASRFVAFTMKDETKGEIYVAFNTSHLPVVVGLPERSGFRWEPVVDTGKEAPYDFLTDGLPDRAVTVYQFSHFLNSNLYPMLSYSSIILVLRPDV

SEQ ID NO: 55923 - DNA, 2868 bp, Pisum sativum
  CDS (124)..(2334)
agttcaagaaccctcactcaaccaacactcctcgcttcgattttctccggcaccggcaacaatcccggacgcacttcacttgccggaaatttctctcaccgtgatattcggttggagtttagtatgcaagcatctggaagcaagtcgagtaatagtggccgtggaagctttagtgagacaagagaaggcttaaaggttagaacaactaatgctaatgcttatgggcgtgctcaagaagaggtgaataaggacgaagccttcaaagtgatggagaccagaccatcgtgggaagtttctccaggccaagcatttccgttgggtgtatcacaagtcgacaacgggatcaactttgctattttttcacaacatgcaactgctgtcacactttgtttggtccttcctaaaagggaaagcattgacacactggatggtggtacgatagaactggctttggaccctcatttaaacaaaacaggggacatttggcacatacgtattgaggatcttgctaggagcaatgttctgtacgggtatcggatagatggatctcaagactggggtaaggggcatcgatttgacagaagcattgtgcttgttgatccttatgcaaaactagttgaaggtcggagatattttggggatattagcaagaagttttctaagtttctgggcacatatgattttgacagcttgccttttgactggggagagaattataagcttccaaatgttgccgagaaagatcttgttatatatgagatgaatgtccgtgcatttacaatggatgaatctagtgggttggataacaacattcgtggaagctatcttggcgtgattgagaagatcccacatcttctagagcttggcatcaatgcagtggagttgctgcctatctttgagtttgatgagttggaattgcagaggcgtccaaatcctagagatcacatgattaatacgtggggttattcaacaataaatttctttgctccaatgagtcgctatgctagtgctggaggaggaccagctaatgcttcccaagagttcaagcaaatggttaaagccttacattctgctagcatagaggttattttggatgttgtctacaatcatactaatgaggctgatgaccccaatccttacactacttcatttcgtggcatagataataaggtttattacatgctggacgacaaaggacaattgctgaacttttctggctgtggaaatacattgaattgtaaccatcctgtggtcatggagctaattcttgacagcctaagacattgggtaactgagtatcatgttgatggatttcgatttgatcttgcaagtatattgtgtcgaggaactgatggttcacccctcaatgctcctccactcatcagggcaattgctaaggatgcagtcttgtcaagatgtaaaattattgcagagccttgggactgtggtggtctctatcttgttggaagttttcctaattgggatcgatgggctgaatggaatgggaaatatcgtgatgacgtacggagatttatcaagggtgattctggtaccaaggggagctttgcaactcgtgtttctggatcttctgatctttacagagtgaacaaacgcagaccatatcatggtattaattttgttattgcacatgatggattcagcctgcatgatcttgtttcatacaacttgaagcacaatgaagctaacggggaaggtggaaatgatggatgcaatgataactttagttggaattgtggttttgaaggtgaaactgatgatactagtataagagctttgcggtcgaggcaaatgaaaaactttcatttggcattaatggtttctcagggaataccaatgatgctaatgggggatgaatatggtcatactcgctatggaaataacaatagttatgggcatgattctgccattaattttctcctgtgggatcagttagatgcaaggaagggtgatcactttaggtttttctccaatgtgataaagtaccggcttggacataaaatattcagtcatgaaaattttctcagtgagaatgaaataacatggcatgaagacaattgggacaattatgaaagcaaatttcttgcatttacgcttcatgacaaaagtgggggagacgtctatttagcttttaatgctcatgactactttttgaaagttctgcttcccacacccccaacaaagagaaggtggtatcgcgtggtggacactaatcttgaatcacctgatgacttggtccttgacggtgttcctggcataggaaaaacgtacagtatagctccatactcctccattcttctggaggcaaagttttgattgcagaagctgttgtatacatgtatcagtaaaggaataaaaaaggaaaaagggaaaaagacagtgtatatagcgtgtatcagtgtaatgttaatcttattttcttttcaaggaaacaagatgaaatttatgctctgaattaggttccctggctcagtatggcatgaagttttacagctcaggattagaagacgcctgtatcaaatagaagataaacgtttctgaatagaaatgtgttgtaggaataatcgtaggagagggaaatctgaaatcatatcattttcagaatggtgcagggtatatatgcaaggtacaagctctacttgagagtggtcctacgaagtatggatagtcaattactactactactaccgtgtctactatatatttgtttgataaaatgtctatatgtgattttatatttacgcatgtatactgagatcctatgtactgttgttatattgtaaatttcacttgaatggaataaattcatttagtttgagaagcttacattccaaaaaaaaaaaaaaaaaa

SEQ ID NO: 55924 - protein, 736 aa, Pisum sativum
MQASGSKSSNSGRGSFSETREGLKVRTTNANAYGRAQEEVNKDEAFKVMETRPSWEVSPGQAFPLGVSQVDNGINFAIFSQHATAVTLCLVLPKRESIDTLDGGTIELALDPHLNKTGDIWHIRIEDLARSNVLYGYRIDGSQDWGKGHRFDRSIVLVDPYAKLVEGRRYFGDISKKFSKFLGTYDFDSLPFDWGENYKLPNVAEKDLVIYEMNVRAFTMDESSGLDNNIRGSYLGVIEKIPHLLELGINAVELLPIFEFDELELQRRPNPRDHMINTWGYSTINFFAPMSRYASAGGGPANASQEFKQMVKALHSASIEVILDVVYNHTNEADDPNPYTTSFRGIDNKVYYMLDDKGQLLNFSGCGNTLNCNHPVVMELILDSLRHWVTEYHVDGFRFDLASILCRGTDGSPLNAPPLIRAIAKDAVLSRCKIIAEPWDCGGLYLVGSFPNWDRWAEWNGKYRDDVRRFIKGDSGTKGSFATRVSGSSDLYRVNKRRPYHGINFVIAHDGFSLHDLVSYNLKHNEANGEGGNDGCNDNFSWNCGFEGETDDTSIRALRSRQMKNFHLALMVSQGIPMMLMGDEYGHTRYGNNNSYGHDSAINFLLWDQLDARKGDHFRFFSNVIKYRLGHKIFSHENFLSENEITWHEDNWDNYESKFLAFTLHDKSGGDVYLAFNAHDYFLKVLLPTPPTKRRWYRVVDTNLESPDDLVLDGVPGIGKTYSIAPYSSILLEAKF

SEQ ID NO: 55925 - DNA, 2802 bp, Pisum sativum
  CDS (130)..(2505)
acgagatatgcttcttcaagagaatcaatgactactagagtccacacacactcacaccccttccaaaaccctgcattgcattcattcccaattttccatcctcactttcatttctgatcaaaattcgcaatgtattctctctctcctccgcacaccaccaccacctccatttctcactctacaacacatgctctcatcaacaaaaccaaattgctcgaacttcacaatcacaaccacagtagaatctccatcaccatttcctccaagtcaaattcgaacaagaccttcgctatcggaaatcgtgtcggcgttgaaactgaaatagcggttgttgaaattcacaagcctcaattcgaagtttccagaggcttcccctctcctttcggtgctactgctcaagaagacggagtcaatttcgccatttactctctcaatgcacactcagctactctctgtttgttcactctttctgatttcaaaaacaataaagtgacggagtacattgcacttgatccgttggtgaataaaacgggatgtgtttggcatgtgtttctaaaaggagattttaaagatatgctctatggatacaaatttgatggcaaattttctcctcaacaaggacactactatgattcttctcgtgtattacttgatccttatgcaaaagctgttataagcagaggtgaatatggggctgtaggacttgatggtaactgctggccccaaatggctggcatggtaccttttgatcctgaggagtttgactgggaaggagacttgccgctgaaatatccacaaaaggatcttattatatatgaaatgcatgtgcgagggtttacaaagcatgagtcgagcaagaccgagtttcccggtacttatcttggtgtagtggagaagcttgatcacttaacggagcttggagtaaattgtatacaattaatgccatgtaatgagttcaatgagctggaatactacagttacaatgctgtacaaggggactacagggtcaatttttgggggtattcaaccatcaattacttttccccaatgatcagatactcatcagctggcacacaaaactgtggccgtgatgggattaatgaaattaagttcctcatcaaagaggcgcacaagcgaggaatagaggttattatggatgttgttttcaatcatacagctgaagggaatgaaaagggtcccattatttctttcagaggagttgacaatagcgtgtattatatggtagcacccaagggggaattctacaattattcaggatgtgggaacacattcaattgcaaccatccagttgtaaggaaattcatagtggactgcttaagatattgggtagcagaaatgcatgttgatggttttcgctttgatcttgcttccatcatgaccaggggtagcagtctatggaacggagttaatgtatttggtactccaatagaaggcgacatgctgacaattggaacccctctaagcagcccaccattgattgatatgatcagtaacgatccaatacttcgtggagtgaagcttatagccgaagcctgggatgctgggggtctctaccaagttggcattttccctcactggggtatttggtctgaatggaatgggaagtatagagacacagtacgccagtttatcaagggcacagatggctttgctggagcatttgccgaatgtgtttgtggtagtcctagtttgtatcagggaggaagaaaaccatggaatagtattaaccttgtatgtgctcatgatggcttcactctagctgatttggtgacttataacagcaagcataacttgcccaatggagaagacaataatgatggagaaaatcataataatagctggaactgtggagaggagggggagtttgtcagtgcctcagtaaagaaattgaggaaacgacaaatgcgtaatttctttctttctctcatggtttcccagggagttccgatgatacatatgggttatgaatatggacatacaaaagggggaaacaacaatacctactgtcatgataattatcttaattatttccaatgggacaaaaaggaagagtcctcatcagacttcttcagattttgcagccttttgatcaagtttcgccaagaatgtgaatcgcttggtttagatgacttcccaacatcagagaggctgcaggggcatggtctttttcctgtaactccagactggtctgaaactagccgttttgtggcttttaccctggtggactcggtaaagggagaaatttacattgctttcaatacgagtcatctacctttcacagttaccttgccagagcgtccaggatacagatgggaacctctcatagacaccagcaagtccgcaccatatgatttcctcacgcctgatcttcctggaagagatattgcaatacaacagtatgctcattttcttgatgtcaatatgtatcccatgcttagttactcttccatcatccttttgcgcactcctgatgtaaatgcctagcctggagaatcctgctgctttgaagatacactgtatatgctggagccataaatgactcattggatcagtaaaaatgtgttgaaaattttcctttccctttatgtaggaaggaaacattatgaagaaaaatgttgttatggaatcatgtatgatggaaaagtggacgacttgtatctgcattaatttagatatttcgttttgtatttgattttcactttaaaaatttatttactttgaaggatttaaataataaaaaaaacattaagttgattaaaaaaaaaaaaaaaaaaaaaaaaa

SEQ ID NO: 55926 - protein, 791 aa, Pisum sativum
MYSLSPPHTTTTSISHSTTHALINKTKLLELHNHNHSRISITISSKSNSNKTFAIGNRVGVETEIAVVEIHKPQFEVSRGFPSPFGATAQEDGVNFAIYSLNAHSATLCLFTLSDFKNNKVTEYIALDPLVNKTGCVWHVFLKGDFKDMLYGYKFDGKFSPQQGHYYDSSRVLLDPYAKAVISRGEYGAVGLDGNCWPQMAGMVPFDPEEFDWEGDLPLKYPQKDLIIYEMHVRGFTKHESSKTEFPGTYLGVVEKLDHLTELGVNCIQLMPCNEFNELEYYSYNAVQGDYRVNFWGYSTINYFSPMIRYSSAGTQNCGRDGINEIKFLIKEAHKRGIEVIMDVVFNHTAEGNEKGPIISFRGVDNSVYYMVAPKGEFYNYSGCGNTFNCNHPVVRKFIVDCLRYWVAEMHVDGFRFDLASIMTRGSSLWNGVNVFGTPIEGDMLTIGTPLSSPPLIDMISNDPILRGVKLIAEAWDAGGLYQVGIFPHWGIWSEWNGKYRDTVRQFIKGTDGFAGAFAECVCGSPSLYQGGRKPWNSINLVCAHDGFTLADLVTYNSKHNLPNGEDNNDGENHNNSWNCGEEGEFVSASVKKLRKRQMRNFFLSLMVSQGVPMIHMGYEYGHTKGGNNNTYCHDNYLNYFQWDKKEESSSDFFRFCSLLIKFRQECESLGLDDFPTSERLQGHGLFPVTPDWSETSRFVAFTLVDSVKGEIYIAFNTSHLPFTVTLPERPGYRWEPLIDTSKSAPYDFLTPDLPGRDIAIQQYAHFLDVNMYPMLSYSSIILLRTPDVNA

SEQ ID NO: 55927 - DNA, 2510 bp, Ipomoea batatas
  CDS (15)..(2372)
ggctcaattcccaaatggagttgcttcactctccttcaatctcacaatactcccccaaactacactccagaagttcaaacatccgcaaaactggattaagtttcggatttccgcacaattactttgctgaatttgagaaaaaggcgaggccttcagcgctcgctgttaatgcggccattgatggcggaggtgagtccgacaccgcggtggtggtggagaagcctctaccgtacggattacttcgtcgtttcgaggttttatccgggcatccggcaccgttcggcgccaccgctagagacggcgggatcaatttcgctgtcttttcgagcaatgccacgtcggcagctctctgcttgatcagtctcgccgacttacctgagaaaaaagtgacggagcagattcctttggatccatctatcaataagactggagatgtctggcatgtatttctccagggagactttgataatatgctttatggctacagttttgatgggaagtttgctcctgaagaagggcattactttgattcagctaggatacttttggatccttatgctaaggccattgtaagcagagcagaatttggtgctttgggacctgagaaggattgttggcccccaatggcctgcatgctacctaccgctgataagtttgactgggaaggggatctgccattaaagtttcctcagagagatcttgtaatttatgaaatgcatgttcgtggatttacaaaccatgagtcaagtggaacggaatttcctggtacataccgtggtgttgtggagaaactggatcacttgaaggtactgggtgtcaactgcatagagctaatgccatgtcatgaattcaatgaactggagtactatagctataatcctgtcttgggtgactataaggtaaacttttggggctattcaactgtcaatttcttttctccaatgggaaggtattcatctgctgggatgcacaaatctggtcttggtgccatagatgagttcaagtatcttgttagagaggcacatagaaggggaattgaggtaatcatggatgttgttttcaatcacacagcggaagggaatgagaatggtccgatgttctcatttagaggtgttgacaacagtgtcttttatatgcttgcacccaagggagagttctataattattcaggctgtggaaataccttcaactgtaaccatcctgttgcacgccaatttatattggaattcttgaggtattgggttatagaaatgcatgttgatggcttccgctttgatcttgcttccatcctgacgagagtagcaggtgacatgctcacaactggagctcctctctctagcccaccattaattgatatgattagcagtgatccaatactgagtggagtaaaggagcttatagctgaagcatgggattgtggaggcctgtaccaagttggtgcatttcctcattggggtatctggtcagagtggaatgggaagtaccgtgacatagtgcgacagttcataaaaggtacagatgggttttcaggggcttttgctgaatgcctttgtggaagccctaatttataccaggaaggaggaaggaaaccttggaacagcataaactttgtgtgtgcccatgatggtttcactttggctgatctggtgacttataatgataaacacaacatggcaaatggagaagacaataaggatggagagaatcacaataatagttggaattgtggccaggagggagggtttgcaagtatctcggttaagaaattgaggaaaaggcaaatgcgaaatttcttcctctgtctaatggtttcccaaggtgttccaatgatctatatgggtgatgagtatggccatacaaaaggaggaaacaacaacacatattgccatgataattatattaactacttcagatgggataagaaggatgagtcctccacagattttttcagattttgctgccatgtgaccaagttccgccatgaagctgagtcacttggcttggatgatttcccaacagcagagcggctgcaatggcacggtcatactccagggatgccggattggtcagaaagcagccgctttgtagcatttacactggttgacaaagtgaagggagaaatatacattgcctttaatgcgagccacctgcccgtcacggttacgctgccggaacgaggtggttatcggtgggagccattggtggacaccggcaagcaaactccatttgattttcttggtgatgatgttccggagaagaaaacagcattgaaacagtatgctcattttcttgatgccaacatgtaccccatgcttagctactcttccataattctgttgctatgcccagatgagatgatagagaactcctagaagcgagagacgaggtatcatatttgttctatatttgacctggtatacagtatactttgatgtactgggtgtaaattatcggactgaccatgaaaaggagtgtgttttaccaaaaaaaaaaaaaaaaaaaaaaaaaaa

SEQ ID NO: 55928 - protein, 785 aa, Ipomoea batatas
MELLHSPSISQYSPKLHSRSSNIRKTGLSFGFPHNYFAEFEKKARPSALAVNAAIDGGGESDTAVVVEKPLPYGLLRRFEVLSGHPAPFGATARDGGINFAVFSSNATSAALCLISLADLPEKKVTEQIPLDPSINKTGDVWHVFLQGDFDNMLYGYSFDGKFAPEEGHYFDSARILLDPYAKAIVSRAEFGALGPEKDCWPPMACMLPTADKFDWEGDLPLKFPQRDLVIYEMHVRGFTNHESSGTEFPGTYRGVVEKLDHLKVLGVNCIELMPCHEFNELEYYSYNPVLGDYKVNFWGYSTVNFFSPMGRYSSAGMHKSGLGAIDEFKYLVREAHRRGIEVIMDVVFNHTAEGNENGPMFSFRGVDNSVFYMLAPKGEFYNYSGCGNTFNCNHPVARQFILEFLRYWVIEMHVDGFRFDLASILTRVAGDMLTTGAPLSSPPLIDMISSDPILSGVKELIAEAWDCGGLYQVGAFPHWGIWSEWNGKYRDIVRQFIKGTDGFSGAFAECLCGSPNLYQEGGRKPWNSINFVCAHDGFTLADLVTYNDKHNMANGEDNKDGENHNNSWNCGQEGGFASISVKKLRKRQMRNFFLCLMVSQGVPMIYMGDEYGHTKGGNNNTYCHDNYINYFRWDKKDESSTDFFRFCCHVTKFRHEAESLGLDDFPTAERLQWHGHTPGMPDWSESSRFVAFTLVDKVKGEIYIAFNASHLPVTVTLPERGGYRWEPLVDTGKQTPFDFLGDDVPEKKTALKQYAHFLDANMYPMLSYSSIILLLCPDEMIENS

SEQ ID NO: 55929 - DNA, 2367 bp, Medicago truncatula
  CDS (1)..(2367)
atggcctgcattcctcacattctttctcctctttctcactctacaacacttgctaatctcatcaatataaccaatttcgagattcacaacagaacttccatcatcatttccccaaattcaaggccaaagaagaagaagaagaagatcttcgccattggaaatcgtgtcggtgttgatactgaaactgcagttatcgaaattgagaagcgccaattgcaactttccaaaggccacccctcaccctacggtgccactcctcaagaagacggggtcaatttcgccattaattcactcaattcactctcagctactctctgcttcttcactctttccgacttcaaaaacaataaagtgacagagtacattactcttgatccattggtgaataaaacaggatgtgtttggcatgtgtttctaaaaggagattttaaagatatgctctatgcttataaatttgatggcaaattttctcctcaacagggtcactactatgattcttctcgtattttaatcgacccttatgcaaaagcagttataagtagaggagagtttggagaagtaggacctgatggtaactgctggccccaaatggctggtatggtaccttttgataacgaggagtttgactgggaaggtgacttgcctttgaaatatccacaaaaggatcttattatatatgaaatgcatgtgagagggtttacaaagcatgagtcaagtaaggctgagttccctggtacatatcttggtgtagtagagaagcttgatcacttaaaggaacttggagtaaattgtatagaattaatgccatgtcatgagttcaatgagctggaatactacagttacaatgctattcagggggactatagggtcaatttttggggctattcaaccatcaattacttttcaccaatgataagatactcatcagctggcatacaaaactgtggccgtgacgggattaatgaaatgaagctcctcatcaaagaggcacacaagcgaggaatagaggttatcatggatgttgttttcaatcatacagctgaagggaatgagaagggtcccattatttcttttagaggagttgacaatagcgtgtattacatggtagcacccaagggggaattctacaactactcaggatgtgggaacacatttaattgcaaccatcccgttgtaaggaaatttatagtggactgcttaagatattgggtaaccgaaatgcacgtggatggttttcgctttgatcttgcttctattatgaccaggagtagcagtctctggaacggagttaatgtatttggtgctccaatagaaggtgactttctgacaactggaacccctttaagcagtccgccattgattgatatgatcagtattgatccaatacttcgtggagtgaagcttatagctgaagcctgggatgctggaggcctgtaccaagttggcactttccctcactggggtatttggtcggaatggaatgggaagtacagagacactgtacgccagtttatcaagggtacagatggctttgctggagcatttgctgaatgtatttgtgggagtcctaatttgtatcagggaggaagaaaaccatggaatagtattaaccttgtatgtgctcatgatggcttcactctagctgatttggtgacttacaacaacaagcataacttgcccaatggagaagacaacaatgatggagaaaatcacaatagtagctggaactgtggagaggagggggagtttgtcagtgcctcagtaaagaaaatgaggaaacgacaaatgcgtaatttctttctttctctcatggtttcccagggagttccgatgatatttatgggagatgaatatggacatacaaaaggaggaaacaacaatacctactgtcatgataattaccttaattatttccgatgggacaaaaaggaagaatcctcgtcagacttcttcagattttgccgccttttgaccaagttccgccaggaatgtgagtcgcttggcctagatgacttcccgacatcagagaggcttcagtggcatggccattttcctgtaacaccagactggtctgaatctagccgttttgttgcttttaccctgatggacttggtgaagggagaagtttatgttgctttcaatacaagtcatttacctttcactattaccttgccagagcgtcctggatacagatgggaacctctcgtagacaccagcaagaaagcaccatatgattttctcacacctgatcttcccggaagagatattgcaatacagcagtatgctcagtttcttgacgccaatatgtatcccatgcttagttactcttcaatcatccttttgcgcacccctgatgtaaatgcttag

SEQ ID NO: 55930 - protein, 788 aa, Medicago truncatula
MACIPHILSPLSHSTTLANLINITNFEIHNRTSIIISPNSRPKKKKKKIFAIGNRVGVDTETAVIEIEKRQLQLSKGHPSPYGATPQEDGVNFAINSLNSLSATLCFFTLSDFKNNKVTEYITLDPLVNKTGCVWHVFLKGDFKDMLYAYKFDGKFSPQQGHYYDSSRILIDPYAKAVISRGEFGEVGPDGNCWPQMAGMVPFDNEEFDWEGDLPLKYPQKDLIIYEMHVRGFTKHESSKAEFPGTYLGVVEKLDHLKELGVNCIELMPCHEFNELEYYSYNAIQGDYRVNFWGYSTINYFSPMIRYSSAGIQNCGRDGINEMKLLIKEAHKRGIEVIMDVVFNHTAEGNEKGPIISFRGVDNSVYYMVAPKGEFYNYSGCGNTFNCNHPVVRKFIVDCLRYWVTEMHVDGFRFDLASIMTRSSSLWNGVNVFGAPIEGDFLTTGTPLSSPPLIDMISIDPILRGVKLIAEAWDAGGLYQVGTFPHWGIWSEWNGKYRDTVRQFIKGTDGFAGAFAECICGSPNLYQGGRKPWNSINLVCAHDGFTLADLVTYNNKHNLPNGEDNNDGENHNSSWNCGEEGEFVSASVKKMRKRQMRNFFLSLMVSQGVPMIFMGDEYGHTKGGNNNTYCHDNYLNYFRWDKKEESSSDFFRFCRLLTKFRQECESLGLDDFPTSERLQWHGHFPVTPDWSESSRFVAFTLMDLVKGEVYVAFNTSHLPFTITLPERPGYRWEPLVDTSKKAPYDFLTPDLPGRDIAIQQYAQFLDANMYPMLSYSSIILLRTPDVNA

SEQ ID NO: 55931 - DNA, 2957 bp, Hordeum vulgare
  CDS (198)..(2528)
gccgcgcgccctccccgaggtgagatcaccgccgcatcctcctcctcctcccgctccgacttgcgctccccatcgccacgccactccgtcgacctcgagagccgccccatgaccgcgtccacgggcccctataactagccccggtcccgggtcaaacccctcccgccacccgtcccagcaccacccccctcatttggatggattcggcggcctctacaaatcgctccccgctgcgccccgccgccgccgccaccgccaccgccaccgcacgccgaagcagcagctccgcgcttccgaaccgtgtggcggcgagcaggcttggggtcgcgcccgggtgcggaggagggcatttcggaaaggcacagcgatttgggtccgtgcggactaccacggcgagagctcaggctggtaatgctgggagaatcgcgaccgaggaaaaggaaagcgcaatggcaggcaccgaaatgcccttgaaatattcttccggcaaagcatcccctctaggagtgtcgcaggttgaaagtggtatcaacttcgcgattttctctcaacatgcttcttctgtcactctctgcatcaagcttgctgagagaggaaccaaggatgaagaaagtgaaaaacttgtggagtttgctttagattgccagaagaacaaaactggagatatatggcatgtgttggtggaggggttgcccacttctggagttctttatggatatcgtgttaatggtcctcaaggatgggaacaaggccataggtttgatagcaacattattcttcttgacccttacgcgaaactagtttctggtcgaaattactttggtgttgataaagggaagccaagccagccttttggaacatatgattttgatagctctccttttgattggggtgctgattaccagcttccaaatttgcctgagacagatctagttatatatgagatgaacgttcgcgctttcactgcggatgagtcaagtgggcttgatccagctgttcgtggaagctatctaggattcatcgacaaaatcccgcatttgcttgaactcggagttaatgcagtggagttgctacctgtttttgagtttgatgagctggagttcaagagataccctaacccaagggaccacatggtcaatacatggggttattctacaatcaacttttttgctcccatgacccgctatgcaagtgctggtggtggaccattggctgcttccagagagctcaaacagatggtcaaggcattgcataaagctggtatagaggttattctggacgttgtttacaaccatacgaatgaagcagatgatgctcatccttatgttacttcttttcgtggcatcgacaacaaggtttattacatgttagatccgaacaacaactctcaactgctgaacttctcgggatgcgggaatacactaaactgcaaccatcctgttgtcatggaactagtactcgacagcttgagacattgggttaaggaataccacatagatggatttcggtttgaccttgcaagtgttctttgtcgcggaccagatggcagtcctcttgatgctcctccactcatcagggaaattgcgaaagattctgtgttatctcgatgcaagataattgctgaaccttgggattgtggaggtctttatctagtagggcgtttccctaactgggacaggtgggctgaatggaatggaaagtatagagacgaccttcgaaggttcatcaagggtgaccctggtatgaagggggtgttggcaactcgtatttctggatccgctgatctctaccaggtgaaccagcggaagcctcatcacggtgtgaactttataatcgcacatgatgggttcaccttatgtgaccttgtatcatacaacttaaagcacaacgatgctaatggagaaggtggacgtgatggatgcaatgataactttagctggaactgtggtgttgaaggagaaacaaatgattcgaatgtgttagctctgcgttcgagacaaatgaagaacttccatgtggcattaatgatttctcaaggcaccccaatgatgttgatgggagatgaatatggtcatacacgttatggaaacaataatagctatggacatgatacctgcataaataatttccagtgggaacagttggcggaaagaagatatggccatttcaggtttttctcagagatgattaagtttcgtcagaaccacccaatactgaaacgggacaggtttcttagtaaaaatgatgtcacctggcatgaggattgttgggataacttggaaagcaaattcttggcattcacgatacacgaccacaattctggtggagatatctatttggcattcaatgcccatgactattttgtggatgctgtgattcccccagcacctcatcataaaagctggaaccgtgtggtggataccaacctggaatcaccaaacgatattacaccggaaggggtgccacttactggatccgggtatagaattgcttcatactcttccatcttgctcaaagcaaagccatagattggaggggcactggccagtctgatggaagcatacgaataatgtcagtttcggctcatttttgtgagttgtcagttggttaaaacagtatgctgatcttgctctctgagccctagacaacatgctgcaaagcgtgacaaactcttgagttgggagtcgggcgcatctctgtgaaaatcgaccgacgggagctatagttgcaactcgtatatagagctttgtgtaataatagcacatgccaagcacactttgtttccactgttccacatgtaagtagaactgaagttgctagccatttagtcggggacaagaaagtctcgagggaatctagcccatagctatctgttctttcattcttcgaatacccagcgaatggctaccaaactctttgttcctctaataaacgtggccaccgaaatgccttcgttt

SEQ ID NO: 55932 - protein, 776 aa, Hordeum vulgare
MDSAASTNRSPLRPAAAATATATARRSSSSALPNRVAASRLGVAPGCGGGHFGKAQRFGSVRTTTARAQAGNAGRIATEEKESAMAGTEMPLKYSSGKASPLGVSQVESGINFAIFSQHASSVTLCIKLAERGTKDEESEKLVEFALDCQKNKTGDIWHVLVEGLPTSGVLYGYRVNGPQGWEQGHRFDSNIILLDPYAKLVSGRNYFGVDKGKPSQPFGTYDFDSSPFDWGADYQLPNLPETDLVIYEMNVRAFTADESSGLDPAVRGSYLGFIDKIPHLLELGVNAVELLPVFEFDELEFKRYPNPRDHMVNTWGYSTINFFAPMTRYASAGGGPLAASRELKQMVKALHKAGIEVILDVVYNHTNEADDAHPYVTSFRGIDNKVYYMLDPNNNSQLLNFSGCGNTLNCNHPVVMELVLDSLRHWVKEYHIDGFRFDLASVLCRGPDGSPLDAPPLIREIAKDSVLSRCKIIAEPWDCGGLYLVGRFPNWDRWAEWNGKYRDDLRRFIKGDPGMKGVLATRISGSADLYQVNQRKPHHGVNFIIAHDGFTLCDLVSYNLKHNDANGEGGRDGCNDNFSWNCGVEGETNDSNVLALRSRQMKNFHVALMISQGTPMMLMGDEYGHTRYGNNNSYGHDTCINNFQWEQLAERRYGHFRFFSEMIKFRQNHPILKRDRFLSKNDVTWHEDCWDNLESKFLAFTIHDHNSGGDIYLAFNAHDYFVDAVIPPAPHHKSWNRVVDTNLESPNDITPEGVPLTGSGYRIASYSSILLKAKP

SEQ ID NO: 55933 - DNA, 2103 bp, Oryza sativa
  CDS (1)..(2103)
atgaccgaggaaagaggatgtacaatgtctgatactgaaatgccatttaaatattcctctggtaaagccttcccattaggagtgtctcaagttgaaggcgggctgaacttcgcacttttctctcagcatgcttcttctgtcattctctgcttaaagcttcctgggaggggaactgaagatgagaaaggtgcagatgttgtcgagtttgttttagaccagcagaagaacaaaactggggatatatggcatgtgatagtggagggcttgcctgcttctggtgttctttatgggtatcgtgttggtggccctcaaggatgggaccaaggccatagatttgatagcagcactgttcttctggacccttatgcaaaattagtttctggtcgaaagtactttggggttgctgaagagaagtcaagccagcattttggaacatatgattttgatagctctccttttgattggggtgatgactacaggcttccgaatttgcctgaggcagatctagtcatatatgaaatgaacgtccgtgctttcaccgcggatgagtcaagtggccttgattcgacttctcgtggaagctatcttggtctcattgataaaatccctcatttgctggaacttggcgttaatgcagtggaactacttcctgtttttgagtatgatgagctggaattcaagaggtaccccaacccaagggaccacatggtcaatacatggggctattctacgataaacttttttgcacccatgagccgttatgctagtgccggtggtggaccagtggctgcttccaaagagctcaagcagatggtcaaagaattgcataaagctggcatagaggttattctggatgttgtttacaaccatacaaatgaggcggatgatgctcacccgtatatgacttctttccgtggcattgataacaaggtctattacatgttagacctgaacaaaaatgctgaactactgaacttctcaggctgcgggaatacactgaactgcaaccatcctgttgtcaaggagctcattcttgacagcttgagacactgggttgaggagtatcacatagatggatttcgatttgaccttgcaagtgttctttgtcgtggaccagatggttgtcctcttgatgcacctccactcatcaaggaaattgccaaagatgctgtattatctagatgtaagatcattgctgaaccttgggattgcggcggcctttatctcgtagggcgtttccctaactgggacaggtgggctgaatggaacggcaaatacagagatgatcttcgaagatttattaagggtgaccctggtatgaagggggtgtttgcgactcgtgtgtctggatctgctgatctctatcaggtgaacgagcggaagccttaccatggtgtaaattttgtgattgcacatgatggatttactttatgtgaccttgtttcttacaacttaaagcacaatgatgctaatggagaaggtggctgtgatggatgcaatgacaactttagctggaactgtggtgttgaaggagaaacaaatgatctgaatgtgttaagtctgcgttcaagacaaatgaaaaacttccatgtagctttaatgatttctcagggcaccccaatgatgttgatgggcgatgaatatggtcatacacgttatgggaacaacaatagctatggacatgatacttgcattaataatttccaatgggaacagttggaacaaagaagagatggccatttcaggtttttctcagagatgataaagtttcgtcacagcaacccaatattaagacgagacaggtttcttaataaaaacgatgtcacctggcacgaggattgttgggagaaccaggaaagcaaatttttggcattcacagtacatgatcacaactctggtggagatatctatttggcattcaatgcacatgactattttgtggacgctgtaattcccccaccaccacaccataaatgttggaaccgtgtggtggataccaacctggaatcaccaaatgatattgtaccagaaggggtgccatttacaggaccaaaatacagaattgctccatactcttccattctgctcaaggcaaagccttag

SEQ ID NO: 55934 - protein, 700 aa, Oryza sativa
MTEERGCTMSDTEMPFKYSSGKAFPLGVSQVEGGLNFALFSQHASSVILCLKLPGRGTEDEKGADVVEFVLDQQKNKTGDIWHVIVEGLPASGVLYGYRVGGPQGWDQGHRFDSSTVLLDPYAKLVSGRKYFGVAEEKSSQHFGTYDFDSSPFDWGDDYRLPNLPEADLVIYEMNVRAFTADESSGLDSTSRGSYLGLIDKIPHLLELGVNAVELLPVFEYDELEFKRYPNPRDHMVNTWGYSTINFFAPMSRYASAGGGPVAASKELKQMVKELHKAGIEVILDVVYNHTNEADDAHPYMTSFRGIDNKVYYMLDLNKNAELLNFSGCGNTLNCNHPVVKELILDSLRHWVEEYHIDGFRFDLASVLCRGPDGCPLDAPPLIKEIAKDAVLSRCKIIAEPWDCGGLYLVGRFPNWDRWAEWNGKYRDDLRRFIKGDPGMKGVFATRVSGSADLYQVNERKPYHGVNFVIAHDGFTLCDLVSYNLKHNDANGEGGCDGCNDNFSWNCGVEGETNDLNVLSLRSRQMKNFHVALMISQGTPMMLMGDEYGHTRYGNNNSYGHDTCINNFQWEQLEQRRDGHFRFFSEMIKFRHSNPILRRDRFLNKNDVTWHEDCWENQESKFLAFTVHDHNSGGDIYLAFNAHDYFVDAVIPPPPHHKCWNRVVDTNLESPNDIVPEGVPFTGPKYRIAPYSSILLKAKP

SEQ ID NO: 55935 - DNA, 2556 bp, Ostreococcus tauri
  CDS (1)..(2556)
atggcgacgcgcgcgatcgcgagtgcgcgatcgcgtgcccccgcgcgcgcgcgcgaggggacgtccctcgcgcgcgcgcgacggtggacgcgatcgccccatcgcggcgtctcgggacgacggtcgcgcgcgacgcgatggacgctcgacgcggtctccaccgaggacgcggaggggtggcgacgggagacgtcgaaggcgaaggagacgaggccgacgcggacgacggtggcggacgcggggcgtggggtggacgacgtgcacgcgcggacgcgcgtcgcgcgcgaggcgaaacggcgaacggcgccgcgcggcgtcccgggcgtgtgcgacacccctcggaggggtgacgcgagcgctctgggagcgacgcgagtggttggatgtccggatgatacggtgaactttgcggtgtacacgagcgcggcgacggcggtgagtttggtgctgtggacgccggagggactggcgcgcggagagattgcgggcgagatcgagttggacgagacgacgaataagactgggagcgtgtggcacgtcgcgctgccgcggtgcgcggaggatgtgctgtacgggtacagggtggacgggccgtacgagccggaagcggggcacagatttgataagagcaagattttgctcgacccgtacgcaaagttcaccgtgagtcgacccgagtacggagtcgcttcgaagaaggaggacgggacggaagattgctggccgcagtacgcgggtggggtgcccaaaaagttgcggagcgatgggaaggaggattttgattgggagggcgtgacctcgccaaagcgcccgatgcgagacttggttgtgtacgaggcgcacgcgcgcgggttaacggcagatttggagaccaaggcgaaaccgggaacgtacgccgcgatagaggaggcccttccgtacttaaaacagctcggtgtgaacgcaattgagctcatgccgtgccacgagttcaacgaaatggagtatcacagcctgaaccacgtcaccggcgagttcaggcgtaacttttggggatacagcaccgtgaacttcttcagcccgatgacgaggtatgccgaggccggggcggacgattgcggacgcgaagcggcgagagagttcaagcgaatgattcgagagtgccatcgagcgggaatagaggtcatcatggacgttgtcttcaaccataccgcggaaggcaacgagcaaggcttgacgctgtcgttccgaggtttggacaaccgcgtgtactacatggtcgctccagagggacaattctacaactacagcgggtgtggcaacacgatgaactgtaatcatcccgtcgtgcgcgagttcatcttagagtgccttcggtattgggtcctggagtatcacattgacggctttcgattcgacttggcgagcatcctcacgagagcttcgagcatgtgggatcgcgcgaacattttcggtgaacccacggcggagacgccgatgttggaggaagtggtcattggtacgccactccaagatccgccgctcatcgatgccatcagcaacgatccggttctggctggcacaaagctcatcgccgaggcgtgggacgccggaggcctgtaccaagtcgggtcattcccgcattacggcgtgtggtcagagtggaacggtaagttccgtgacgatgttcgcaatttcattaaaggcgtcgacgggtacgccggtttgtttgccgaacgcttgtgcggaagtcccaacctttatgccgacagaagtccgtccgcgagcatcaactttgtcaccgcccacgacggtttcactcttcgcgactgcgtgagctacaacgagaagcagaaccatgcgaacggagaggaaaatcgcgatggagaagagcacaatgcctcctggaactgtggcttgagctgtgatgacgacggagagtgctgggatcccgagatagtcgcactgcgagatcgacaaatgcgcaacttcgtggtggcgctcttcgtcgctcagggcgttccgatgatgtatatgggcgatgagtacggccacactaagtgcggcaataacaacacgtattgtcacgacaatgcgttgaactggatcgattggagcgaggcgtcgagcccactcgcgggtgacggtctcgcgcgtttcacaaaacaagtcatcgcgttgcggaagaagcacagcgccttccgtctcgattcgtttccgagcgccgataacattcaatggcacggtcaccttccggatactccgatgtgggacgaggagtcgcgattcgtggccttcacccttcaggacaagcccgagacggataagttttacatcgccttcaactctcaccacgagccggcaatgttaaagctcccgtcaccacctgaaagatgcaagtggaagctcatcctcgacacctctttggaatcaccgttcgatgtcctctccgccgaggacatcgcggaggcggattcgtacacggcagaggcaatgtttttgccgggacttcgcaaaaacacctacctctgcgccgatcgctccgccgtcatcttccgagccgtttcgctcgcgtga

SEQ ID NO: 55936 - protein, 851 aa, Ostreococcus tauri
MATRAIASARSRAPARAREGTSLARARRWTRSPHRGVSGRRSRATRWTLDAVSTEDAEGWRRETSKAKETRPTRTTVADAGRGVDDVHARTRVAREAKRRTAPRGVPGVCDTPRRGDASALGATRVVGCPDDTVNFAVYTSAATAVSLVLWTPEGLARGEIAGEIELDETTNKTGSVWHVALPRCAEDVLYGYRVDGPYEPEAGHRFDKSKILLDPYAKFTVSRPEYGVASKKEDGTEDCWPQYAGGVPKKLRSDGKEDFDWEGVTSPKRPMRDLVVYEAHARGLTADLETKAKPGTYAAIEEALPYLKQLGVNAIELMPCHEFNEMEYHSLNHVTGEFRRNFWGYSTVNFFSPMTRYAEAGADDCGREAAREFKRMIRECHRAGIEVIMDVVFNHTAEGNEQGLTLSFRGLDNRVYYMVAPEGQFYNYSGCGNTMNCNHPVVREFILECLRYWVLEYHIDGFRFDLASILTRASSMWDRANIFGEPTAETPMLEEVVIGTPLQDPPLIDAISNDPVLAGTKLIAEAWDAGGLYQVGSFPHYGVWSEWNGKFRDDVRNFIKGVDGYAGLFAERLCGSPNLYADRSPSASINFVTAHDGFTLRDCVSYNEKQNHANGEENRDGEEHNASWNCGLSCDDDGECWDPEIVALRDRQMRNFVVALFVAQGVPMMYMGDEYGHTKCGNNNTYCHDNALNWIDWSEASSPLAGDGLARFTKQVIALRKKHSAFRLDSFPSADNIQWHGHLPDTPMWDEESRFVAFTLQDKPETDKFYIAFNSHHEPAMLKLPSPPERCKWKLILDTSLESPFDVLSAEDIAEADSYTAEAMFLPGLRKNTYLCADRSAVIFRAVSLA

SEQ ID NO: 55937 - DNA, 2676 bp, Hordeum vulgare
  CDS (138)..(2534)
gtaattcggcacgaggccacatccctcgtgccgccccacgctcactccacccagtcacaagtaaacccgcgcagtcccccatgcccgcccactgctcgacgcaattccccaccggctgatcgcgccgcgctagccccatggcctccctcctcgcgccgcccgcctccacgcgcgtcttcccgccgccacccgcgcctccccggcggccggccgtagtcgcccgcgccgcgcgctcgcgctaccgcttccgcaccgacgacgacgccgtcgtggacgtggccgtcgccgcggcggagggcggcgggtacacggtcggcgtcgaggtcccgcccctcccgggcgcgcgccggcgggagggcgggctggcgctccgccccgcgggctccggcgaggccgtcccgctggcgccgcccggcgacggcgcctgccccgcggccgagctctccttccaggcgtcccgagccccgttctgcctctcgttcctgctgacggacgacgagggggccgagatacggacccaccgcgggacggccttccgcgtgccggtcggcgtcgggccgggcagccccgcgccgctcggcctgtccctgtcggaggccggggccgccaacttcgccttgtacagcaggggcgccgagggcgtgctgctttgcctttacggccgcggcggcggcggcggtgagcccgctcttgagatcgagctcgatcccttcgtcaaccggacgggcaacgtctggcacgtctcactggagagcgtggaggggtacttcagctacggcttccggtgcgggctgttcggcgcggaccacccactgttggatccgtatgccaagctgatcggcgacttcgttgctgcggatcctgttcatgtgaaggagggcactgtgccgtcgtccgtgagttgcctcggatcgttggcgaatccaccgagctacaactggggcagggacaagcgcccatgcttgccattggagaatctcgtggtgtaccgggcaaatgtggctctcttcaccaaggataagtcgagtgggctgccgaacaatgtcgccggtactttctccgggatggctgcaaagatacaccacttcgggagtctcggtgtcaatgccgttttgctggaaccagtgttcccgttcgatcaggtgaagggaccttacttcccataccatttcttttcacctatgaactcgtacagcgctgaaggttgcagtgcttcagctatcacggctatgaaggatatggtcaaggcaatgcacagaaatggaatagaggtcctcttggaggttgttttcacacatactgctgaaggacaagcagatggtcagatgatatcgatcagtggcattgacaaatcctcgtattacattgctgatgagattgctggatgcaaatcgggtatactgaattgcaattctccagtgaccgagaggctgatattggacagcctccgccattgggtggttgatttccatgttgatgggttttgcttcatcaatgcccctttccttgtcaggggctcacgtggtgaatatctgtctcgaccgccccttcttgaatctatagcttttgatccagttctttccaagacaaagatcatcgctgatccttggtctccactcggcatatctaacgtgcaatttccattccctcactggaaaagatgggctgaaatgaacacaaggttctcaattgatgtgcgcaattttttgaaaggagaagctcttattggcgatcttgctacgcgtctgtgtggtagcggagacctattttccaacaggggaccggcattttctttcaattatgtatccaggaattcagggcttagtcttgttgatttggtgagttttagcaatggggatcttgcttctgagtctagctggaattgtggtgaagaaggaccatccgagaacagtgcagtccttcagacaaggctaaggcagataaggaatttcatatttattctcttcgtttcacttggaattcctgtcctgaacatgggagatgaatgcgggcactcctctgctggttcaacatcgtacaaggatagagttcctctaaaatggaaggccttgaagaccagttttgtcaaggaagttactggattcatttcatttctagctgcactcagaagtcggcgaggcgacgtttttcaaagaagagaattcctcaaactagaaaacataagttggcacgggaacaatctatctgaaccacgatgggaggatcctactagcaagtttctttgcatgcacataatcgcagaaaatgatgggaatacaccagagttaaccaaaggtgacttgtacatatgtttcaatgcaagtgaggaaccagcaagtgctacattacctgctcctgcagaaggatctgtgtggttacgtttggttgatacatcacttacgtttccaagtttctttacaaccgagtctaatctggaagtacaacaagtgctaggatattcatcttatgaagtaaaagcgcacagttgtgttttatttgaatcgaagagggatcttccccagtttctcggataaagcagtaagtctgttgacgcctactttctgctttcagagctttggttgaaataagttgatatgtactgtagctgagaatgtttatgataataaatttagcatttgtccaatggatggtatacctaatttccaaaaaaaaaaa

SEQ ID NO: 55938 - protein, 798 aa, Hordeum vulgare
MASLLAPPASTRVFPPPPAPPRRPAVVARAARSRYRFRTDDDAVVDVAVAAAEGGGYTVGVEVPPLPGARRREGGLALRPAGSGEAVPLAPPGDGACPAAELSFQASRAPFCLSFLLTDDEGAEIRTHRGTAFRVPVGVGPGSPAPLGLSLSEAGAANFALYSRGAEGVLLCLYGRGGGGGEPALEIELDPFVNRTGNVWHVSLESVEGYFSYGFRCGLFGADHPLLDPYAKLIGDFVAADPVHVKEGTVPSSVSCLGSLANPPSYNWGRDKRPCLPLENLVVYRANVALFTKDKSSGLPNNVAGTFSGMAAKIHHFGSLGVNAVLLEPVFPFDQVKGPYFPYHFFSPMNSYSAEGCSASAITAMKDMVKAMHRNGIEVLLEVVFTHTAEGQADGQMISISGIDKSSYYIADEIAGCKSGILNCNSPVTERLILDSLRHWVVDFHVDGFCFINAPFLVRGSRGEYLSRPPLLESIAFDPVLSKTKIIADPWSPLGISNVQFPFPHWKRWAEMNTRFSIDVRNFLKGEALIGDLATRLCGSGDLFSNRGPAFSFNYVSRNSGLSLVDLVSFSNGDLASESSWNCGEEGPSENSAVLQTRLRQIRNFIFILFVSLGIPVLNMGDECGHSSAGSTSYKDRVPLKWKALKTSFVKEVTGFISFLAALRSRRGDVFQRREFLKLENISWHGNNLSEPRWEDPTSKFLCMHIIAENDGNTPELTKGDLYICFNASEEPASATLPAPAEGSVWLRLVDTSLTFPSFFTTESNLEVQQVLGYSSYEVKAHSCVLFESKRDLPQFLG

SEQ ID NO: 55939 - DNA, 2574 bp, Triticum aestivum
  CDS (102)..(2477)
ctcccacgaagaaccaacaggaggcgcggatcccaccgataaataaccccgcctcgccgctcctccccaaaatcaatcaccgatcgctcggggttcccggcatgacgatgatggccatggccaaggcgccctgcctctgcgcgcgcccgtccctcgccgcgcgcgcgaggcggccggggccggggccggcgccgcgcctgcgacggtggcgacccaatgcgacggcggggaagggggtcggcgaggtgtgcgccgcggttgtcgaggcggcgacgaaggccgaggatgaggacgacgacgaggaggaggcggtggcggaggacaggtacgcgctcggcggcgcgtgcagggtgctcgccggaatgcccgcgccgctgggcgccaccgcgctcgccggcggggtcaatttcgccgtctactccggtggagccaccgccgcggcgctctgcctcttcacgccagaagatctcaaggcggatagggtgacggaggaggtttcccttgaccccctgatgaatcggactgggaacgtgtggcatgtcttcattgaaggcgagctgcacgacatgctttacgggtacaggttcgacggcacctttgctcctcactgcgggcactaccttgatatttccaatgtcgtggtggatccttatgctaaggcagtgataagccgaggggagtatggcgttccggcgcgtggtaacaattgctggcctcagatggctggcatgatccctcttccatatagcacgtttgattgggaaggcgacctacctctaagatatcctcaaaaggacctggtaatatatgagatgcacttgcgtggattcacgaagcatgattcaagcaatgtagaacatccgggtactttcattggagctgtgtcgaagcttgactatttgaaggagcttggagttaattgtattgaattaatgccctgccatgagttcaacgagctggagtactcaacctcttcttccaagatgaacttttggggatattctaccataaacttcttttcaccaatgacgagatacacatcaggcgggataaaaaactgtgggcgtgatgccataaatgagttcaaaacttttgtaagagaggctcacaaacggggaattgaggtgatcctggatgttgtcttcaaccatacagctgagggtaatgagaatggtccaatattatcatttaggggggtcgataatactacatactatatgcttgcacccaagggagagttttataactattctggctgtgggaataccttcaactgtaatcatcctgtggttcgtcaattcattgtagattgtttaagatactgggtgatggaaatgcatgttgatggttttcgttttgatcttgcatccataatgaccagaggttccagtctgtgggatccagttaacgtgtatggagctccaatagaaggtgacatgatcacaacagggacacctcttgttactccaccacttattgacatgatcagcaatgacccaattcttggaggcgtcaagctcattgctgaagcatgggatgcaggaggcctctatcaagtaggtcaattccctcactggaatgtttggtctgagtggaatgggaagtaccgggacattgtgcgccaattcattaaaggcactgatggatttgctggtggttttgccgaatgtctttgtggaagtccacacctataccaggcaggaggaaggaaaccttggcacagtatcaactttgtatgtgcacatgatggatttacactgggtgatttggtaacatataataacaagtacaatttaccaaatggggagaacaatagagatggagaaaatcacaatcttagctggaattgtggggaggaaggagaattcgcaagattgtctgtcaaaagattgaggaagaggcagatgcgcaatttctttgtttgtctcatggtttctcaaggagttccaatgttttacatgggcgatgaatatggccacacaaaagggggcaacaacaatacatactgccatgattcttatgtcaattattttcgctgggataaaaaagaacaatactctgacttgcacagattctgctgcctcatgaccaaattccgcaaggagtgcgatggtcttggccttgaggactttccaacggccgaacggctgcagtggcatggtcatcagcctgggaagcctgattggtctgagaatagccgattcgttgccttttccatgaaagatgaaagacagggcgagatctatgtggccttcaacaccagccacttaccggccgttgttgagctcccagagcgcgcagggcgccggtgggaaccggtggtggacacaggcaagccagcaccatatgacttcctcaccgacgacttacctgatcgcgctctcaccatacaccagttctctcatttcctcaactccaacctctaccccatgctcagctactcatcggtcatcctagtattgcgccctgatgtttgagagacaaatatatacagtaaataatatgtctatatgtagtcctttggcgtattatcagtgtgcacaattgctctattgccagtgatctattcgatcc

SEQ ID NO: 55940 - protein, 791 aa, Triticum aestivum
MTMMAMAKAPCLCARPSLAARARRPGPGPAPRLRRWRPNATAGKGVGEVCAAVVEAATKAEDEDDDEEEAVAEDRYALGGACRVLAGMPAPLGATALAGGVNFAVYSGGATAAALCLFTPEDLKADRVTEEVSLDPLMNRTGNVWHVFIEGELHDMLYGYRFDGTFAPHCGHYLDISNVVVDPYAKAVISRGEYGVPARGNNCWPQMAGMIPLPYSTFDWEGDLPLRYPQKDLVIYEMHLRGFTKHDSSNVEHPGTFIGAVSKLDYLKELGVNCIELMPCHEFNELEYSTSSSKMNFWGYSTINFFSPMTRYTSGGIKNCGRDAINEFKTFVREAHKRGIEVILDVVFNHTAEGNENGPILSFRGVDNTTYYMLAPKGEFYNYSGCGNTFNCNHPVVRQFIVDCLRYWVMEMHVDGFRFDLASIMTRGSSLWDPVNVYGAPIEGDMITTGTPLVTPPLIDMISNDPILGGVKLIAEAWDAGGLYQVGQFPHWNVWSEWNGKYRDIVRQFIKGTDGFAGGFAECLCGSPHLYQAGGRKPWHSINFVCAHDGFTLGDLVTYNNKYNLPNGENNRDGENHNLSWNCGEEGEFARLSVKRLRKRQMRNFFVCLMVSQGVPMFYMGDEYGHTKGGNNNTYCHDSYVNYFRWDKKEQYSDLHRFCCLMTKFRKECDGLGLEDFPTAERLQWHGHQPGKPDWSENSRFVAFSMKDERQGEIYVAFNTSHLPAVVELPERAGRRWEPVVDTGKPAPYDFLTDDLPDRALTIHQFSHFLNSNLYPMLSYSSVILVLRPDV

SEQ ID NO: 55941 - DNA, 2376 bp, Aegilops tauschii
  CDS (1)..(2376)
atgacgatgatggccatggccaaggcgccctgcctctgcgcgcgcccgtccctcgccgcgcgcgcgaggcggccggggccggggccggcgccgcgcctgcgacggtggcgacccaatgcgacggcggggaagggggtcggcgaggtgtgcgccgcggttgtcgaggcggcgacgaaggccgaggatgaggacgacgacgaggaggaggcggtggcggaggacaggtacgcgctcggcggcgcgtgcagggtgctcgccggaatgcccgcgccgctgggcgccaccgcgctcgccggcggggtcaatttcgccgtctactccggtggagccaccgccgcggcgctctgcctcttcacgccagaagatctcaaggcggatagggtgacggaggaggtttcccttgaccccctgatgaatcggactgggaacgtgtggcatgtcttcattgaaggcgagctgcacgacatgctttacgggtacaggttcgacggcacctttgctcctcactgcgggcactaccttgatatttccaatgtcgtggtggatccttatgctaaggcagtgataagccgaggggagtatggcgttccggcgcgtggtaacaattgctggcctcagatggctggcatgatccctcttccatatagcacgtttgattgggaaggcgacctacctctaagatatcctcaaaaggacctggtaatatatgagatgcacttgcgtggattcacgaagcatgattcaagcaatgtagaacatccgggtactttcattggagctgtgtcgaagcttgactatttgaaggagcttggagttaattgtattgaattaatgccctgccatgagttcaacgagctggagtactcaacctcttcttccaagatgaacttttggggatattctaccataaacttcttttcaccaatgacgagatacacatcaggcgggataaaaaactgtgggcgtgatgccataaatgagttcaaaacttttgtaagagaggctcacaaacggggaattgaggtgatcctggatgttgtcttcaaccatacagctgagggtaatgagaatggtccaatattatcatttaggggggtcgataatactacatactatatgcttgcacccaagggagagttttataactattctggctgtgggaataccttcaactgtaatcatcctgtggttcgtcaattcattgtagattgtttaagatactgggtgatggaaatgcatgttgatggttttcgttttgatcttgcatccataatgaccagaggttccagtctgtgggatccagttaacgtgtatggagctccaatagaaggtgacatgatcacaacagggacacctcttgttactccaccacttattgacatgatcagcaatgacccaattcttggaggcgtcaagctcattgctgaagcatgggatgcaggaggcctctatcaagtaggtcaattccctcactggaatgtttggtctgagtggaatgggaagtaccgggacattgtgcgccaattcattaaaggcactgatggatttgctggtggttttgccgaatgtctttgtggaagtccacacctataccaggcaggaggaaggaaaccttggcacagtatcaactttgtatgtgcacatgatggatttacactgggtgatttggtaacatataataacaagtacaatttaccaaatggggagaacaatagagatggagaaaatcacaatcttagctggaattgtggggaggaaggagaattcgcaagattgtctgtcaaaagattgaggaagaggcagatgcgcaatttctttgtttgtctcatggtttctcaaggagttccaatgttttacatgggcgatgaatatggccacacaaaagggggcaacaacaatacatactgccatgattcttatgtcaattattttcgctgggataaaaaagaacaatactctgacttgcaaagattctgctgcctcatgaccaaattccgcaaggagtgcgagggtcttggccttgaggactttccaacggccgaacggctgcagtggcatggtcatcagcctgggaagcctgattggtctgagaatagccgattcgttgccttttccatgaaagatgaaagacagggcgagatctatgtggccttcaacaccagccacttaccggccgttgttgagctcccagagcgcgcagggcgccggtgggaaccggtggtggacacaggcaagccagcaccatatgacttcctcaccgacgacttacctgatcgcgctctcaccatacaccagttctctcatttcctcaactccaacctctaccccatgctcagctactcatcggtcatcctagtattgcgccctgatgtttga

SEQ ID NO: 55942 - protein, 791 aa, Aegilops tauschii
MTMMAMAKAPCLCARPSLAARARRPGPGPAPRLRRWRPNATAGKGVGEVCAAVVEAATKAEDEDDDEEEAVAEDRYALGGACRVLAGMPAPLGATALAGGVNFAVYSGGATAAALCLFTPEDLKADRVTEEVSLDPLMNRTGNVWHVFIEGELHDMLYGYRFDGTFAPHCGHYLDISNVVVDPYAKAVISRGEYGVPARGNNCWPQMAGMIPLPYSTFDWEGDLPLRYPQKDLVIYEMHLRGFTKHDSSNVEHPGTFIGAVSKLDYLKELGVNCIELMPCHEFNELEYSTSSSKMNFWGYSTINFFSPMTRYTSGGIKNCGRDAINEFKTFVREAHKRGIEVILDVVFNHTAEGNENGPILSFRGVDNTTYYMLAPKGEFYNYSGCGNTFNCNHPVVRQFIVDCLRYWVMEMHVDGFRFDLASIMTRGSSLWDPVNVYGAPIEGDMITTGTPLVTPPLIDMISNDPILGGVKLIAEAWDAGGLYQVGQFPHWNVWSEWNGKYRDIVRQFIKGTDGFAGGFAECLCGSPHLYQAGGRKPWHSINFVCAHDGFTLGDLVTYNNKYNLPNGENNRDGENHNLSWNCGEEGEFARLSVKRLRKRQMRNFFVCLMVSQGVPMFYMGDEYGHTKGGNNNTYCHDSYVNYFRWDKKEQYSDLQRFCCLMTKFRKECEGLGLEDFPTAERLQWHGHQPGKPDWSENSRFVAFSMKDERQGEIYVAFNTSHLPAVVELPERAGRRWEPVVDTGKPAPYDFLTDDLPDRALTIHQFSHFLNSNLYPMLSYSSVILVLRPDV

SEQ ID NO: 55943 - DNA, 2793 bp, Zea mays
  CDS (391)..(2475)
tccctttccgcgcgcgctccccaaggtgagatcagcatctccgtctcttccccgccgctcctcactcccctaccgccacccctaaaactagccccattcccttaccagcgtccgatcacactcctcggtcccacgcttggatggattccgtcggtacaaatcggcccccgctgcgccccgttgccgccgcagctactcgacgcggcgcgcttcctgccccccctagccacctcgggctcggctaatcgttttgcggagactaagcttgggatcgcgtcagggtgtggaggagggggagggtattttggaaaggtacagggatttgatgccttgcggagtaccacgacgaaagttcagagcgggaaggcggggaggagtgtgaccaaggaaatgggacacacttcatctggcaatgaagtgcccttgaaatattcttcaggcaaagccttccccctaggagtgtcacaagttgacgatgggttaaattttgcaatattctcacaacatgcttcttctgtcaccctttgcttgaattttcctgagagaggcaaccaagatgatgtggacattgtagagtttgctttagaccgccagaggaataaaactggagatatatggcatgtgtcagtggagggtttgcctgcttctggtgttctttatgggtatcgcattaatggtcctcaagggtggcaacaaggtcatagatttgatgacagcgttattcttctggacccctatgcaaaattagtttatggtcgaaagcactttgctgttgaaaaagagaagccaagccagcttttcggaacatatgatttcgatagctcaccttttgactggggtgacaattataagcttcctaatttgcctgagacagatcttgttatatatgaaatgaatgtccgtgccttcactgccgacgagtcaagcaggcttgctccagctattcgtggaagttaccttggtgtcattgataaaattcctcatttgctggaacttggcgttaatgccgtggaactacttcctgtttttgagttcgatgagctggagttgaagaggttccctaacccaagggaccacatggtaaatacatggggatattctacaatcaacttttttgcgcccatgagtcgttatgctagtgctggtggtggacctgtggctgcttccaaagagctcaaacagatggtcaaggcatttcataattctggaattgaggttattttggatgtagtttacaaccatacaaatgaagctgatgatgttaacccttacatgacttcctttcgtggtattgataacaaggtctattacatgttagatctcaacaacagtgcacagctgctgaacttctcgggttgcgggaatacactaaactgcaaccatcctgttgtcaaggagcttgtacttgacagtttaagacattgggttaaggagtatcacatagatggatttcggtttgaccttgcgagtgttctttgtcgtggaccagatggcagtcctcttgatgcacctccacttattaaggaaattgccaaagactctgtattgtctagatgtaagatcattgctgaaccttgggactgtggtggcctttatctagtagggaggttccctaattgggacaggtgggctgaatggaacgggaagtacagagatgatattcgaagatttattaagggagatcctggtatgaagggggtgtttgcaactcgcgtttctggttctgcagatctctaccaggtgaacaatcggaagccttaccatagtgtgaactttgtaattgctcatgatggatttactttatgcgaccttgtttcgtataactccaagcacaatgatgcaaatggagaaggtggtcgtgatgggtgcaatgacaactacagctggaactgtggcattgaaggagaaacaaatgatttgaatgtgctaagtcttcgttcaaggcaaatgaagaacttccatgtggcattaatgatttcccagggtactccaatgatgctgatgggagatgaatatggtcacacacgttatggaaacaacaatagctatggacatgatactcacataaataattttcagtggggccagttggaagaaaggaaggatggccatttcaggtttttctcagagatgatcaagtttcggcataaccatcctatattgagacgagacaggtttctcaacaaaaatgatgtcacctggcatgaaaatcgttgggagaaccaggacagcaaatttttggcatttacgatacatgatcacagttctggtggagacatctatttggcattcaatgctcatgagtattttgtggatgctgtaattcccccaccaccacaccataaatcttggagtcgtgtggtggataccaacctggaatcaccaaaggatattgtcccagaaggggtgccattcacaggttcagggtacaggattgctccttactcttccatcttgcttaaggcaaagccttagaaagttagaatggctgagacaagtcattctcaagagaagccatggttgcaacaagtatactcatccagatattgtccataagacaataacaacatggcaaacacaagtaatttccacacatcgtagccagaagagcctttcattaggggaagctagtattcacagtctccttaatattttagcattcctttgttccatatttgtgttgtacttagattctattaagctatttctttcatcgaacatatgttggacaatggatgccccagaaccttttgctttcattaaaaaaaaaaaaaaaaaaaaaaaaaaaaaaaa

SEQ ID NO: 55944 - protein, 694 aa, Zea mays
MGHTSSGNEVPLKYSSGKAFPLGVSQVDDGLNFAIFSQHASSVTLCLNFPERGNQDDVDIVEFALDRQRNKTGDIWHVSVEGLPASGVLYGYRINGPQGWQQGHRFDDSVILLDPYAKLVYGRKHFAVEKEKPSQLFGTYDFDSSPFDWGDNYKLPNLPETDLVIYEMNVRAFTADESSRLAPAIRGSYLGVIDKIPHLLELGVNAVELLPVFEFDELELKRFPNPRDHMVNTWGYSTINFFAPMSRYASAGGGPVAASKELKQMVKAFHNSGIEVILDVVYNHTNEADDVNPYMTSFRGIDNKVYYMLDLNNSAQLLNFSGCGNTLNCNHPVVKELVLDSLRHWVKEYHIDGFRFDLASVLCRGPDGSPLDAPPLIKEIAKDSVLSRCKIIAEPWDCGGLYLVGRFPNWDRWAEWNGKYRDDIRRFIKGDPGMKGVFATRVSGSADLYQVNNRKPYHSVNFVIAHDGFTLCDLVSYNSKHNDANGEGGRDGCNDNYSWNCGIEGETNDLNVLSLRSRQMKNFHVALMISQGTPMMLMGDEYGHTRYGNNNSYGHDTHINNFQWGQLEERKDGHFRFFSEMIKFRHNHPILRRDRFLNKNDVTWHENRWENQDSKFLAFTIHDHSSGGDIYLAFNAHEYFVDAVIPPPPHHKSWSRVVDTNLESPKDIVPEGVPFTGSGYRIAPYSSILLKAKP

SEQ ID NO: 55945 - DNA, 2829 bp, Zea mays
  CDS (138)..(2537)
actccacatatatctcgtgcagccgtgctcgtgcggtcgtgaccccactccctggcatagcacgcgatgcccaccgactgctcgacgcaattctccagccgctgatcgcgccgcaccctttcccacccgcgcccatcatggcctcctccctccccgcgccgccggcctcgccctcttcctcctggcgcggactcacgccccgctgccctccgcctcgctgcggtcccctcctcgcccgcgcggcagcgcgttcttaccgttaccgcttccgaaccgacgacgacggcgtggtggacgtggccgtcgccgggaaagacggcgatgcggggtatgtggtcgctatcgaggctcctacccatggacagaggggcggtcttgtgctccgccccgccggctccggcgagggcgtccctctggccccagccgcgccgggaggtgccctcgtggctgagttgtcctacgacgtggcccgcgcgccgttccacgtctcgttcacgctggccgacgcgatgggagcggagatacggacacaccgcgggacgagcttccgcgtgcctgttggcgtcggacggggctgcccctcgccgctcggcctgtcccagtccaaggatggggccgctaacttcgcggtttacagcaagatcgccaagggcatggtgctctgcctcttcggtggtggcggcggggacggacccgcgcttgagattgagctcgacccgtacgtccaccggaccggcgatgtctggcacgtctcgatggagagcgtggaggggtacgcccgctacggcttccgcagcgggctgttcgcaatgtttggcattgaccgcccgctactcgacccgtacgccaaggtgatcggggacttcgtcgctggcgactctgttgatgaggatgggctagctgtgccatccataaggtgtctcgcgtccttgaagaatgcacccaactacgattggggcagggacaagcacccatgcttgccattgcagaagctggtggtctaccgggcaaatgtagctttgttcaccaaggataggtcgagtcggctggcagacaatgccgctggtactttctccggcatgtctgcaaaggtggaacacttcaggcatcttggtgtcaatgcagttttgctggagccagttttcccattccaccaagtgaagggaccatattttccataccattttttttcacctatgagcttgtatagcagtgaatgctccagtgtttcagctatcaagtctatgaaggatatggtcaaaacaatgcacagaaatggaatagaggttctcttggaggttgttttcacgcatactgctgaaggaggggcggagtgtcagatgatatcacttcgaggcatcgatggttcctcgtactacattgctgatggaatcgctggatgcaaggcaagtgtgttgaattgcaaccatccagtgactcagaagctgattttggacagcctccgccattgggtgctcgacttccatgttgatgggttctgcttcatcaatgctcctttcctcgtcagaggtccaggtggtgagggcctctcacggcctccacttctggaagccatagcatttgatcctgttctttcaaagactaagatcattgcagatccttggtctccgcttgacatatctaatgtgcaatttccattccctcattggaaaagatgggctgagatgaacacaagattctctatggatgtgcgcaagtttcttaagggagaagcacttatcagtgatcttgctacacgtttgtgtggcagtggggacttattttcctcaaggggcccagcattttcgttcaattatgtatccaggaattctggactcactcttgttgatctagtgagcttcagcagtgatgagcttgcttctgagttcagctggaattatggtgaagaaggaccatcggagaacaacgcagtctttcaaaccaggctaagacagatacacaacttcctgtttattctattcatttcccttggtattcctgttcttaacatgggggatgaatgtggaaactcagctgctggttcaacatcatacaaggatagagggcttctgaactggaaagccttgaagaccgcttttgttaaggaagttaccgggtttatttcgtttctatctgcactaaggagtcgacgagcagacattttccagagatgcgagtttctaaaacttgaaaatatacattggtatgggagtgatttatctgagccatgttgggaggatcctactagcaactttctttgcttgcacataaatgcagagctggacgagaagctaccagattcgactggaggtgatttgtatatctgtttcaatgcaaacgaggagtcagcgagtgctactttaccagcaattgcagaaggatccatgtggctgcgcttggttgatacatcacttgcatttccaggtttcttttccagagggtctagtcatgaaacacaccaggtgctaggattttcctcatatcaagtgaaggcacatagctgtgttttgttcgaatccaagagggttctttcatagtttgtgatgtcaaacatgaagctcgtgtggtttcagcaataattaggaactttgtggttactatattactatctaattttgggaggccctcagttccaataaattgccaattgtagatggaatgataataaagttcctcattttcatagatggatggtatgtgtctagtttcttactgcatttttgtaacctaaactccgtgagatgtgagctgatagcttcatttgccctgttggtgaatttgtctttactaatggatacaatgcttaacaaaaaaaaaaaaaaaaaaaaa

SEQ ID NO: 55946 - protein, 799 aa, Zea mays
MASSLPAPPASPSSSWRGLTPRCPPPRCGPLLARAAARSYRYRFRTDDDGVVDVAVAGKDGDAGYVVAIEAPTHGQRGGLVLRPAGSGEGVPLAPAAPGGALVAELSYDVARAPFHVSFTLADAMGAEIRTHRGTSFRVPVGVGRGCPSPLGLSQSKDGAANFAVYSKIAKGMVLCLFGGGGGDGPALEIELDPYVHRTGDVWHVSMESVEGYARYGFRSGLFAMFGIDRPLLDPYAKVIGDFVAGDSVDEDGLAVPSIRCLASLKNAPNYDWGRDKHPCLPLQKLVVYRANVALFTKDRSSRLADNAAGTFSGMSAKVEHFRHLGVNAVLLEPVFPFHQVKGPYFPYHFFSPMSLYSSECSSVSAIKSMKDMVKTMHRNGIEVLLEVVFTHTAEGGAECQMISLRGIDGSSYYIADGIAGCKASVLNCNHPVTQKLILDSLRHWVLDFHVDGFCFINAPFLVRGPGGEGLSRPPLLEAIAFDPVLSKTKIIADPWSPLDISNVQFPFPHWKRWAEMNTRFSMDVRKFLKGEALISDLATRLCGSGDLFSSRGPAFSFNYVSRNSGLTLVDLVSFSSDELASEFSWNYGEEGPSENNAVFQTRLRQIHNFLFILFISLGIPVLNMGDECGNSAAGSTSYKDRGLLNWKALKTAFVKEVTGFISFLSALRSRRADIFQRCEFLKLENIHWYGSDLSEPCWEDPTSNFLCLHINAELDEKLPDSTGGDLYICFNANEESASATLPAIAEGSMWLRLVDTSLAFPGFFSRGSSHETHQVLGFSSYQVKAHSCVLFESKRVLS

SEQ ID NO: 55947 - DNA, 2634 bp, Solanum tuberosum
  CDS (32)..(2332)
cacagattctcttctccaaaaatagggcccgatgattagaggaccaccacaaatcgtccagaaatgtccaaccgacattgtaacagttaaccggaccaatatagttccacgaacgcaccgtcacgctcttcaagatctccggcagcttcgccggcgtgatagtctcaggctcttctcctctgatcaccggattctgaagttttgtacatcggaggaggcgttccaacctaggttggtcgcagcagctaaacttcaggaagaagctcctcaaatgctggacactttcccttcattcaaagtttcccctggtctggctcatccactaggagtatcagaaactgaaagtggaataaattttgcaattttttctcagcatgcttctgcagttacactttgcataattcttccaaagagtgttcatgatggaatgattgaattagcattggatccacagaagaaccgcacaggagacatatggcacatatgcattaaggagttgccccaaggtggtgtcctttatggttatcgcattgatggacctcgaaattggcatgaagggcatcgatttgatgatagcattattttggttgatccttacgcaaaactaattgaaggtcgacgagtttttggagatgaaagcaataaaatgtgtagattttttggaacttatgatttcaatagcttgccttttgactggggagaaaattacaagcttccaaatatacccgagaaagatcttgttatatatgagatgaatgttcgtgcttttactgctgatgaaacaagtagtttggatcaagatcaacggggaagttaccttggcttaattgaaaagataccacatcttctcgagcttggtgtcaatgcagtagaattattgcctgtttttgagtttgatgaactggaattacaaaggcgacctaatccgagagatcacatgatcaatacatggggctactcaacaataaacttttttgctccaatgagtcgatatgcaagttgtggtggcggacctgtccgtgcttcctgggagttcaaagaaatggtcaaggccttgcatggtgctggaattgaggtcatcttagatgttgtttataatcacacaaatgaagctgatgatgaaaacccatatacaacctcattccgaggaatagacaacaaggtttattacatggtagatttaaacaacaatgctcagctgctgaatttcgctggatgtggaaatacttttaactgcaaccatcccacagtcatggaacttatacttgaaagcttaagacactgggtcaccgagtatcatgtcgatggatttcgctttgatcttgctagtgttctttgcagagggacagatggtactcccattaatgctcccccccttgttaaggccatttccaaagatagtgtattgtcgaggtgcaaaattattgctgagccatgggattgtggaggcctatatcttgttggaaagtttccgaactgggaccggtgggctgagtggaatgggaagtaccgcgatgacatcaggagatttataaagggcgatgctggcatgaaaggaaattttgcaacccgtatcgcaggttcagcggatctgtacagagtgaacaagcgaaagccgtaccacagtgtcaacttcgtgattgcccatgatggctttaccttgtatgaccttgtttcatacaataataagcacaatgatgcaaacggtgaaggtggcaatgatggatgcaatgacaacttcagttggaattgtggaattgaaggtgaaacttcagatgcaaatattaacgcactgcgttcacggcaaatgaaaaattttcatttggcactgatggtttctcagggaacaccaatgatgcttatgggggatgagtatgggcatacccgctatggaaataataacagttatggacatgataccgccatcaacaatttccagtggggacaattggaagcaaggaagaatgatcacttcaggttcttttccaagatgataaagtttcgactgtcccacaatgttcttagaaaggaaaacttcattgagaagaacgacattacctggctcgaggacaactggtacaatgaagagagtagattccttgcatttatgctccatgatgggaatggaggagatatttacttggcatttaatgcacaccacttctccatcaaaacagcaataccttcaccaccacgaaatagaagttggtaccgagtggtggacactaatctgaaatcaccagatgattttgttactgagggagtgtctggtatcagtaaaacttatgatgttgcgccgtactctgctatccttcttgaagcaaagcaataattaccgggactatgctgctttagatgttgtccatgagttattacagtattacctccttctggattggatagttcaaatcggaattcaggctgttagcctatagatgtttgcaataagcaaccagtttgttcaagctgctattgacaggtacaaacaccccatagtaataagataaactgagaccattgatccaaaaaaaaaaaaaaaaaaaaaaaaaaaaaaaaaaaaaaaaaaaaaaaaaaaaaaaaaaaaaaaaaaaaaaaaaaaaaaaaaaaaaaaaaaaaaaaaaaaaaaaaaaaaaa

SEQ ID NO: 55948 - protein, 766 aa, Solanum tuberosum
MIRGPPQIVQKCPTDIVTVNRTNIVPRTHRHALQDLRQLRRRDSLRLFSSDHRILKFCTSEEAFQPRLVAAAKLQEEAPQMLDTFPSFKVSPGLAHPLGVSETESGINFAIFSQHASAVTLCIILPKSVHDGMIELALDPQKNRTGDIWHICIKELPQGGVLYGYRIDGPRNWHEGHRFDDSIILVDPYAKLIEGRRVFGDESNKMCRFFGTYDFNSLPFDWGENYKLPNIPEKDLVIYEMNVRAFTADETSSLDQDQRGSYLGLIEKIPHLLELGVNAVELLPVFEFDELELQRRPNPRDHMINTWGYSTINFFAPMSRYASCGGGPVRASWEFKEMVKALHGAGIEVILDVVYNHTNEADDENPYTTSFRGIDNKVYYMVDLNNNAQLLNFAGCGNTFNCNHPTVMELILESLRHWVTEYHVDGFRFDLASVLCRGTDGTPINAPPLVKAISKDSVLSRCKIIAEPWDCGGLYLVGKFPNWDRWAEWNGKYRDDIRRFIKGDAGMKGNFATRIAGSADLYRVNKRKPYHSVNFVIAHDGFTLYDLVSYNNKHNDANGEGGNDGCNDNFSWNCGIEGETSDANINALRSRQMKNFHLALMVSQGTPMMLMGDEYGHTRYGNNNSYGHDTAINNFQWGQLEARKNDHFRFFSKMIKFRLSHNVLRKENFIEKNDITWLEDNWYNEESRFLAFMLHDGNGGDIYLAFNAHHFSIKTAIPSPPRNRSWYRVVDTNLKSPDDFVTEGVSGISKTYDVAPYSAILLEAKQ

SEQ ID NO: 55949 - DNA, 2831 bp, Solanum tuberosum
  CDS (64)..(2700)
gattaagaatatgtgatccaccaagttctatatctgacgctgtcgtaacattgtgtgctgctaatggcaacttcaccaatacagttggctgtgcattcacgtttgttgagctatggcagtactgagtcaaccaagttggttccttcatcatcaggtaaccgtggaaaaatagtatgcagtctaaggaagctggaattggaagacatgaatttctctggcataggtcgaaataatgatcaagaagctcctaggagagctcatcgacgaaaagcactatcagcatcgagaatttcgcttgttccatctgcaaaaagggttcccacttaccttttcaggacagatattggtggtcaagtgaaagtcttggtggaaaggacaaatggaaagtacaaagtgcttgtagaagtattgccattggagctctcatatgcacattctgagctggttatggtttggggtctttttagatctgatgcttcatgctttatgcctctagatctaaatagacgtggagcagatggaaaaagtagtactgttgaaacaccatttgtgcaaggaccttcaggcaaggtcaccgtggagctggattttgaagcaagtttagcccccttctatatctccttctatatgaagtcgcaactagtttctgacatggaaaactcagaaatcagaagtcacaggaacacaaattttgttgtaccagttggtctcagttcagggcatcctgctccattgggtatttcctttcagccagatggatctgtgaattttgctctcttctcacgcagtgcaagaagtgtagttctgtgcttgtatgatgacatatcagttgaaaaaccttctttagagattgatctagatccttatattaatcgatcaggcgatatttggcatgctgctttagattgttctttgccatttaagacttatggttatagatgtaaggcgactacttctgggaagggagagctggttcttttggacccatatgctaaggtgataaggcgtgttattcctcgtcagggtgggtctgagatacgtccaaaatatcttggagaactatgcctggaacctggctatgattggagcggtgatgtcccccctagcttacctatggagaaactaataatttaccgcttaaatgtgactcaatttacaaaggacaagtccagtaagctacctgatgaccttgctggaactttctctggcattagcgaaaaatggcaccattttaaagatcttggtgtgaatgcaatgttactggagccaattttcccttttgatgagcagaaaggaccctattttccgtggcatttcttctcacctggaaatatgtatggaccttctggtgaccctctttctgccattaaatcgatgaaggatatggttaagaaattacatgctaacgggatagaggtttttcttgaagttgttttcactcacactgcagaggatgcacctttgatgaatgttgataacttttcatattgcataaaaggtggtcagtatctgaatattcaaaatgcattgaattgcaattaccccatagtccaacaaatgattttggactgtctccgccactgggtaattgagtttcatattgatggttttgtttttgtcaacgcttcttccttgttgagagggttcaatggagagattctatctcgtcctccattagttgaagctattgcctttgatcctatcctttcaaaggtcaagatgattgcagataattggaatccattaaccaatgattcgaaggaaaatttattccctcactggaggagatgggcagagataaatatgagattttgtgatgacattcgagacttcttgagaggcgagggtcttctaagcaatctagcaacacgactttgtggaagtggggatatcttcgcaggtggacgtggtcctgcattctcttttaattatattgccagaaattctggactcacacttgttgacctagttagcttcagtagtaatgaagtggcttcagagttaagttggaactgtggacaagaaggcgctacgaccaataacattgtcctagagagacgacttaaacaagttcgtaattttctgttcatattgttcatttctctaggtgtaccagtacttaacatgggagacgagtgtggtcagtcttcaggaggtccccctgcatatgatgctcgaaaatctttgggttggaatactttaaaaactggttttgggactcagattgcccagtttatttcattcttgagtaatttaagaatgagaagaagtgatcttcttcaaaagagaaccttcttgaaggaagaaaacatccagtggcatgggagtgaccaatctcctccgaaatgggatggcccgtctagcaaattcttggctatgactttgaaggccgatgctgaagtcagccagacattagtctctgatatcgtaggtgacctgtttgttgctttcaatggtgctggtgattcagagattgttatccttccacctcctccaacagatatggtatggcatcgtctcgttgacacagccctccctttcccggggtttttcgatgagaagggaactccagttgaagatgaattagttgcttatgagatgaagtctcacagctgtttgctgtttgaagctcagagactagctgaaatagattctagcaagagaaagaaacagattagactttcttctaagaggcaatagtttgtaaagcccctaagtatatatatatgtttaaataagaggcttttttttctgaataaataagaagattttactgagaatacttgtatctaaacattttcttttgcagcttcaaataaaaaaaaaaaaaa

SEQ ID NO: 55950 - protein, 878 aa, Solanum tuberosum
MATSPIQLAVHSRLLSYGSTESTKLVPSSSGNRGKIVCSLRKLELEDMNFSGIGRNNDQEAPRRAHRRKALSASRISLVPSAKRVPTYLFRTDIGGQVKVLVERTNGKYKVLVEVLPLELSYAHSELVMVWGLFRSDASCFMPLDLNRRGADGKSSTVETPFVQGPSGKVTVELDFEASLAPFYISFYMKSQLVSDMENSEIRSHRNTNFVVPVGLSSGHPAPLGISFQPDGSVNFALFSRSARSVVLCLYDDISVEKPSLEIDLDPYINRSGDIWHAALDCSLPFKTYGYRCKATTSGKGELVLLDPYAKVIRRVIPRQGGSEIRPKYLGELCLEPGYDWSGDVPPSLPMEKLIIYRLNVTQFTKDKSSKLPDDLAGTFSGISEKWHHFKDLGVNAMLLEPIFPFDEQKGPYFPWHFFSPGNMYGPSGDPLSAIKSMKDMVKKLHANGIEVFLEVVFTHTAEDAPLMNVDNFSYCIKGGQYLNIQNALNCNYPIVQQMILDCLRHWVIEFHIDGFVFVNASSLLRGFNGEILSRPPLVEAIAFDPILSKVKMIADNWNPLTNDSKENLFPHWRRWAEINMRFCDDIRDFLRGEGLLSNLATRLCGSGDIFAGGRGPAFSFNYIARNSGLTLVDLVSFSSNEVASELSWNCGQEGATTNNIVLERRLKQVRNFLFILFISLGVPVLNMGDECGQSSGGPPAYDARKSLGWNTLKTGFGTQIAQFISFLSNLRMRRSDLLQKRTFLKEENIQWHGSDQSPPKWDGPSSKFLAMTLKADAEVSQTLVSDIVGDLFVAFNGAGDSEIVILPPPPTDMVWHRLVDTALPFPGFFDEKGTPVEDELVAYEMKSHSCLLFEAQRLAEIDSSKRKKQIRLSSKRQ

SEQ ID NO: 55951 - DNA, 2706 bp, Solanum tuberosum
  CDS (70)..(2451)
  misc_feature (2641)..(2641): n is a, g, c or t
ctcagtccttctcaatttcagtgccacatactctagatcacactctctcttcttcctcaaagttctcccatggagttacttcattgtccttccatttctacctacaaacctaaactctctttccacaaccatcttttctcgaggagaagcagtaacggtgtagattttgagagtatttggagaaaatcgaggtcttcagtggttaatgctgctgttgatagtggacgtggaggtgtggtgaagactgcggctactgcggtggtggtggagaagccgacgacggaacgatgtcgttttgaggttttatcagggaagccattgccgtttggtgctactgcgacagatggtggtgtgaatttcgctgttttttcaaggaatgctacagctgctactctttgcttgatcactctttccgatttacctgagaagagagtgaccgagcaaattttcctggatcctctagctaataaaactggagatgtatggcatgtgttccttaagggagattttgagaatatgctatatggctacaaatttgatgggaaattctgtcctgaagaaggacactactttgactcttcgcagatagtgttggatccttatgccaaggctatagtaagcagaggagaatatggtgtattagggccagaggatgattgttggcccccaatggctggcatggtaccttctgcttctgatcagtttgattgggaaggagatctaccactgaagtttccacagagagatcttgtaatctatgaaatgcatgttcgtgggtttactaatcatgagtcgagtgaaacaaaatatcctggtacttaccttggtgttgtggagaaacttgatcacttgaaggaacttggtgtcaactgtatagagctaatgccctgtcacgagttcaatgagctggagtactatagttataactctgtattgggcgactacaagtttaacttttggggctattctactgtcaatttcttttctccaatgggaagatactcatctgctggtctaagtaattgcggcctcggtgcaataaacgaatttaagtatcttgtcaaggaagcacataaacgtggaatcgaggttatcatggatgttgttttcaatcacactgctgaaggaaatgaaaatggtcccatactatcatttagaggcattgacaacagtgtgttttatacgctagctcctaagggtgaattttacaactactcaggatgtggaaataccttcaactgtaataatcccattgtacgtcaatttatagtggattgcttgagatattgggttaccgaaatgcacgtagatggcttccgctttgatcttgcttctatccttacaagaagtagcagctcgtggaatgctgtaaatgtctatggaaattcaattgacggtgacgtgatcaccacaggcactcctctcacaagcccaccattgattgatatgattagcaatgatccaatacttcgtggagtaaagcttatagctgaagcatgggattgtggaggcctttaccaagttggcatgtttccgcactggggtatctggtcggagtggaacggaaagtaccgtgacatggtacggcagttcatcaaaggcactgatgggttttctggggcttttgctgaatgcctttgtggaagcccaaatctataccagaaaggaggaagaaaaccatggaacagtataaatttcgtgtgtgcccacgatggttttactttggctgatttagtgacatacaacaataaacacaatttggcaaatggagaggacaacaaagacggggagaatcacaataatagttggaattgtggtgaggaaggagaatttgcaagtatctttgtgaagaaattgaggaaaagacaaatgcggaacttcttcctctgccttatggtttcccaaggtgttcccatgatatatatgggcgatgaatatggtcacactaagggaggaaacaacaacacgtattgccatgataattatattaattacttccgttgggataagaaggatgaatcttcatctgattttttgagattttgcggcctcatgaccaaattccgccatgaatgtgaatcactgggattagatggtttccctacagcagaaaggctgcaatggcatggtcacactcctagaactccagattggtctgaaacaagtcgattcgttgcattcacactggtcgacaaagtgaagggagaactatatattgcctttaacgccagccatttgcctgtaacgattacacttccagataggcctggttatagatggcagccgtttgtggacacaggcaaaccagcaccatttgacttcttgacagacgacgttcctgagagagagacagcagccaaacaatattctcattttctggacgcgaaccagtatccgatgctcagttattcatccattattcttttactatcatctgctgatgatgcatagtttcattcaccaagttaggtggaggtaaatcagcttcagattttgttatatgcagtgaggtgttactttgtaaataaaagtaagaagcaggacagaacagaactgcaaacggataaaatttgtgaggaagaagctgatgatttataagatacaccttgtattttaattgcatttatataaaataaaatantagtgaaattgtctgtgcgaaaaaaaaaaaaaaaaaaaataaaaaaaaaaaaaaaaaaaaaaaaa

SEQ ID NO: 55952 - protein, 793 aa, Solanum tuberosum
MELLHCPSISTYKPKLSFHNHLFSRRSSNGVDFESIWRKSRSSVVNAAVDSGRGGVVKTAATAVVVEKPTTERCRFEVLSGKPLPFGATATDGGVNFAVFSRNATAATLCLITLSDLPEKRVTEQIFLDPLANKTGDVWHVFLKGDFENMLYGYKFDGKFCPEEGHYFDSSQIVLDPYAKAIVSRGEYGVLGPEDDCWPPMAGMVPSASDQFDWEGDLPLKFPQRDLVIYEMHVRGFTNHESSETKYPGTYLGVVEKLDHLKELGVNCIELMPCHEFNELEYYSYNSVLGDYKFNFWGYSTVNFFSPMGRYSSAGLSNCGLGAINEFKYLVKEAHKRGIEVIMDVVFNHTAEGNENGPILSFRGIDNSVFYTLAPKGEFYNYSGCGNTFNCNNPIVRQFIVDCLRYWVTEMHVDGFRFDLASILTRSSSSWNAVNVYGNSIDGDVITTGTPLTSPPLIDMISNDPILRGVKLIAEAWDCGGLYQVGMFPHWGIWSEWNGKYRDMVRQFIKGTDGFSGAFAECLCGSPNLYQKGGRKPWNSINFVCAHDGFTLADLVTYNNKHNLANGEDNKDGENHNNSWNCGEEGEFASIFVKKLRKRQMRNFFLCLMVSQGVPMIYMGDEYGHTKGGNNNTYCHDNYINYFRWDKKDESSSDFLRFCGLMTKFRHECESLGLDGFPTAERLQWHGHTPRTPDWSETSRFVAFTLVDKVKGELYIAFNASHLPVTITLPDRPGYRWQPFVDTGKPAPFDFLTDDVPERETAAKQYSHFLDANQYPMLSYSSIILLLSSADDA

SEQ ID NO: 55953 - DNA, 2495 bp, Hordeum vulgare
  CDS (67)..(2436)
ccgataaataatcccacctcgccgctcctccccaaaactaatcaccgatcgttcggggttcccggcatgaagatgatggccatggccgaggcgccctgcctctgcgcgcgcccgttcctcgccgcgcgcgcgtggcggccggggccggcgccgcgcctgcgacgatggcggcccaatgcgacggcggggaagggggtcggcgaggtctgcgccgcggccgtcgaggcggcgacgaaggccgaggaggaggaggacgaggaggaggagccggtggctgaggacaggtatgcgctcggaggcgcgtgcagggtgctcgccggaatgcccgcgccgctgggcgccaccgcgctcgccggcggggtcaatttcgccgtctactcaggcggagccaccgccgctgcgctctgcctcttcacgccagaagatctcaaggcggatagggtgagcgaggaggttccccttgaccccctgatgaatcggactggggacgtgtggcatgtcttcctcgaaggcgagctgcacggcatgctttatgggtacaggttcgacggcaccttcgctcctcactgcgggcactactttgatgtttccaatgttgtggtggatccttatgctaaggcagtgataagccgggaggagtatggtgttccggcgcatggtaacaattgctggcctcagatggctggcatgatccctcttccatatagcacgtttgattgggaaggcgacctacctctaagatatcctcaaaaggaccttgtaatatatgagatgcacttgcgtggattcacgaagcatgattcaagcaatgtagaacatccgggtactttcattggggctgtgtcgaagcttgactatttgaaggagcttggagttaattgtatagaattaatgccctgccatgagttcaacgagctggagtatgcaacctcttcttccaagatgaacttttggggatattctaccataaacttcttttcaccaatgacgagatacacgtcaggtgggataaaaaactgtgggcgtgatggcataaacgagttcaaaacttttgtaagagagtctcacaaacggggaattgaggtgatcctggatgttgtcttcaaccatacagctgagggtaatgagaatggtccgatattatcatttaggggggttgataatactacatactatatgcttgcacccaagggagagttttataactattctggctgtgggaataccttcaactgtaatcatcctgtggttcgtcaatttattgtagattgtttaagatactgggtgatggaaatgcatattgatggttttcgttttgatcttgcatccataatgaccagaggttccagtctgtgggatccaattaacgtgtatggagctccaatagaaggtgacatgatcacaacagggacacctcttgttactccaccacttattgacatgatcagcaatgacccaattcttggaggcgtcaagctcattgctgaagcatgggatgcaggaggcctctatcaagtaggtcagttccctcactggaatgtttggtctgagtggaatgggaagtaccgggacattgtgcgtcaattcattaaaggcactgatggatttgctggtggttttgccgaatgtctttgtggaagtccacaactataccaggcaggaggaaggaaaccttggcacagtatcaattttgtatgtgcacatgatggatttacactggctgatttggtaacatataataacaagtacaatttaccaaatggggaggacaacagagatggagaaaatcacaatcttagctggaactgtggggaggaaggagaattcgcaagatcgtcagtcaaaagattgaggaagaggcagatgcgcaatttctttgtctgtctcatggtttctcaaggagttcccatgttctacatgggcgatgaatatggccacacaaaagggggcaacaacaatacatactgccatgattcttatgtcaattattttcgctgggataaaaaagaagaacactctgacttgcaccgattctgctgcctcatgaccaaattccgcaaggagtgcgagggtcttggccttgaggactttccaacggccgaacaactgcaatggcatggtcatcagcctgggaagcctgattggtctgagaaaagccgatttgttgccttttcaatgaaagatgaaacaaaaggcgagatctatgtggccttcaacaccagccacttagcggccgttgttgaactcccagagcgcatagggcaccggtgggaaccggtggtggacacaggcaagccagcaccatacgacttcctcaccgacgacctacctgatcgcgctctcaccgtacagcagttttctcatttcctcaactccaacctctaccccatgctcagctacacatcggtcatccttgtatcacgccctgatgtttgagagaccaatgtacagtaaataatatgtatatgtagtcgttcggcggatcaaaaaaaaaa

SEQ ID NO: 55954 - protein, 789 aa, Hordeum vulgare
MKMMAMAEAPCLCARPFLAARAWRPGPAPRLRRWRPNATAGKGVGEVCAAAVEAATKAEEEEDEEEEPVAEDRYALGGACRVLAGMPAPLGATALAGGVNFAVYSGGATAAALCLFTPEDLKADRVSEEVPLDPLMNRTGDVWHVFLEGELHGMLYGYRFDGTFAPHCGHYFDVSNVVVDPYAKAVISREEYGVPAHGNNCWPQMAGMIPLPYSTFDWEGDLPLRYPQKDLVIYEMHLRGFTKHDSSNVEHPGTFIGAVSKLDYLKELGVNCIELMPCHEFNELEYATSSSKMNFWGYSTINFFSPMTRYTSGGIKNCGRDGINEFKTFVRESHKRGIEVILDVVFNHTAEGNENGPILSFRGVDNTTYYMLAPKGEFYNYSGCGNTFNCNHPVVRQFIVDCLRYWVMEMHIDGFRFDLASIMTRGSSLWDPINVYGAPIEGDMITTGTPLVTPPLIDMISNDPILGGVKLIAEAWDAGGLYQVGQFPHWNVWSEWNGKYRDIVRQFIKGTDGFAGGFAECLCGSPQLYQAGGRKPWHSINFVCAHDGFTLADLVTYNNKYNLPNGEDNRDGENHNLSWNCGEEGEFARSSVKRLRKRQMRNFFVCLMVSQGVPMFYMGDEYGHTKGGNNNTYCHDSYVNYFRWDKKEEHSDLHRFCCLMTKFRKECEGLGLEDFPTAEQLQWHGHQPGKPDWSEKSRFVAFSMKDETKGEIYVAFNTSHLAAVVELPERIGHRWEPVVDTGKPAPYDFLTDDLPDRALTVQQFSHFLNSNLYPMLSYTSVILVSRPDV

SEQ ID NO: 55955 - DNA, 2490 bp, Triticum aestivum
  CDS (6)..(2363)
tggccatggccaaggcgccctgcctctgcgcgcgcccgtccctcgccgcgcgcacgaggcggccggggccggggccggcgccgcgcctgcgacggtggcggcccaatgcgacggcggggaagggggtcggcgaggtctgcgccgcggttgtcgaggtggcgacgaaggccgaggatgagggggaggaggacgagccggtggcggaggacaggtacgcgctcggcggcgcgtgcagggtgctcgccggaatgcccacgccgctgggcgccaccgcgctcgccggcggggtcaatttcgccgtctactccggcggagccacagccgcggcgctctgcctcttcacgccagaagatctcaaggcggatagggtgacggaggaggttccccttgaccccctgatgaatcggactgggaacgtatggcatgtcttcatcgaaggcgagctgcaggacatgctttacgggtacaggttcgacggcacctttgctcctcactgcgggcactaccttgatgtttccaatgtcgtggtggatccttatgctaaggcagtgataagccgaggggagtatggtgttccggcgcgtggtaacaattgctggcctcagatggctggcatgatccctcttccatatagcacgtttgattgggaaggcgacctacctctaagatatcctcaaaaggacctggtaatatatgagatgcacttgcgtggattcacgaagcatgattcaagcaatgtagaacatcccggtactttcattggggctgtgtcgaagcttgactatttgaaggagcttggagttaattgtattgagttaatgccctgccatgagttcaacgagctggagtactcaacctcttcttccaagatgaacttttggggatattctaccataaacttcttttcaccaatgacgagatacacatcaggcgggataaaaaactgtgggcgtgatgccataaatgagttcaaaacttttgtaagagaggctcacaaacggggaattgaggtgatcctggatgttgtcttcaaccatacagctgagggtaatgagaatggtccaatattatcatttaggggggtcgataatactacatactatatgcttgcacccaagggagagttttataactattctggctgtgggaataccttcaactgtaatcatcctgtggttcgtcaattcattgtagattgtttaagatactgggtgacggaaatgcatgttgatggttttcgttttgatcttgcatccataatgaccagaggttccagtctgtgggatccagttaacgtgtatggagctccaatagaaggtgacatgatcacaacagggacacctcttgttactccaccacttattgacatgatcagcaatgacccaattcttggaggcgtcaagctcgttgctgaagcatgggatgcaggaggcctctatcaagtaggtcaattccctcactggaatgtttggtctgagtggaatgggaagtaccgggacattgtgcgtcaattcattaaaggcactgatggatttgctggtggttttgccgaatgtctttgtggaagtccacacctataccaggcaggaggaaggaaaccttggcacagtatcaactttgtatgtgcacacgatggatttacactggctgatttggtaacatataataacaagtacaatttaccaaatggggagaacaacagagatggagaaaatcacaatcttagctggaattgtggggaggaaggagaattcgcaagattgtctgtcaaaagattgaggaagaggcagatgcgcaatttctttgtttgtctcatggtttctcaaggagttccaatgttctacatgggtgatgaatatggccacacaaaagggggcaacaacaatacatactgccatgattcttatgtcaattattttcgctgggataaaaaagaacaatactctgacttgcaccgattctgttgcctcatgaccaaattccgcaaggagtgcgagggtcttggccttgaggattttccaacggccgaacggctgcagtggcatggtcatcagcctgggaagcctgattggtctgagaatagccgattcgttgccttttccatgaaagatgaaagacagggcgagatctatgtggccttcaacaccagccacttaccggccgttgttgagctcccggagcgcacagggcgccggtgggaaccggtggtggacacaggcaagccagcaccatacgacttcctcactgacgacttacctgatcgcgctctcaccatacaccagttctctcatttcctcaactccaacctctaccccatgctcagctactcatcggtcatcctagtattgcgccctgatgtttgagaggcggatatacagtaaataatatgtatatatgtagtcctttggcgtattatcagtgtgcacaattgctctattgccaatgatctattcgatccacagatacatgtgcaaaaaaaaaaaaaaaaaa

SEQ ID NO: 55956 - protein, 785 aa, Triticum aestivum
MAKAPCLCARPSLAARTRRPGPGPAPRLRRWRPNATAGKGVGEVCAAVVEVATKAEDEGEEDEPVAEDRYALGGACRVLAGMPTPLGATALAGGVNFAVYSGGATAAALCLFTPEDLKADRVTEEVPLDPLMNRTGNVWHVFIEGELQDMLYGYRFDGTFAPHCGHYLDVSNVVVDPYAKAVISRGEYGVPARGNNCWPQMAGMIPLPYSTFDWEGDLPLRYPQKDLVIYEMHLRGFTKHDSSNVEHPGTFIGAVSKLDYLKELGVNCIELMPCHEFNELEYSTSSSKMNFWGYSTINFFSPMTRYTSGGIKNCGRDAINEFKTFVREAHKRGIEVILDVVFNHTAEGNENGPILSFRGVDNTTYYMLAPKGEFYNYSGCGNTFNCNHPVVRQFIVDCLRYWVTEMHVDGFRFDLASIMTRGSSLWDPVNVYGAPIEGDMITTGTPLVTPPLIDMISNDPILGGVKLVAEAWDAGGLYQVGQFPHWNVWSEWNGKYRDIVRQFIKGTDGFAGGFAECLCGSPHLYQAGGRKPWHSINFVCAHDGFTLADLVTYNNKYNLPNGENNRDGENHNLSWNCGEEGEFARLSVKRLRKRQMRNFFVCLMVSQGVPMFYMGDEYGHTKGGNNNTYCHDSYVNYFRWDKKEQYSDLHRFCCLMTKFRKECEGLGLEDFPTAERLQWHGHQPGKPDWSENSRFVAFSMKDERQGEIYVAFNTSHLPAVVELPERTGRRWEPVVDTGKPAPYDFLTDDLPDRALTIHQFSHFLNSNLYPMLSYSSVILVLRPDV

SEQ ID NO: 55957 - DNA, 1974 bp, Escherichia coli
  CDS (1)..(1974): transl_table=11
atgacacaactcgccattggcaaacccgctcccctcggcgcgcattacgacggtcagggcgtcaacttcacacttttctccgctcatgccgagcgggtagaactgtgtgtctttgacgccaatggccaggaacatcgctatgacttgccagggcacagtggcgacatttggcacggttatctgccggatgcgcgcccgggtttgcgttatggttatcgcgttcatggcccctggcaacccgccgaggggcatcgctttaacccggcgaagttgttgattgatccttgcgcgcggcaaattgacggggagtttaaagataacccgctgctgcacgccggtcataatgaacctgactatcgcgacaacgccgccattgcgccgaaatgcgtagtggtggttgatcactatgactgggaagatgatgccccgccgcgcacgccgtggggcagcaccatcatttatgaagcccatgtcaaaggattaacgtacttgcacccggagatcccggtcgagatccgtggcacttataaagccctcgggcatccggtgatgatcaactatttgaaacaattgggcattaccgcgctggaactgctgccagtggcgcagtttgccagtgaaccacgtctgcaacgcatggggctaagtaactactggggttacaacccggtggcgatgtttgcgctgcatccggcgtatgcctgctcgccagaaacggcgctggatgagtttcgcgatgcaatcaaagcactgcataaagcgggtatcgaagtcattcttgatatcgtgctcaaccatagtgcggaactggacctcgacggcccgttattctcgctgcgtgggatcgataaccgtagctattattggataagagaagacggcgattatcacaactggaccggttgcggcaacacgctcaatttgagtcatccggcggtggtggattatgccagcgcctgcctgcgttattgggtagaaacctgccacgtcgatggtttccgctttgatctggcggcagtcatgggccgtacgccagagttccgtcaggatgcgccgttgtttaccgctatccagaactgcccggtgctctcgcaggtgaagttaattgctgaaccgtgggatatcgctcctggtggttatcaggtgggaaatttcccgccgctgtttgccgagtggaacgatcatttccgcgatgctgcccgtcgtttctggctacattatgatttgcctctgggggcgtttgccgggcgttttgctgcctccagcgatgtttttaaacgtaatggtcgtctgccgagtgccgcgattaatctcgtcaccgcgcatgacggttttacgcttcgcgactgcgtttgcttcaaccataaacacaatgaagcaaacggagaagaaaatcgcgacgggaccaacaacaattacagtaacaatcatggtaaagaagggttaggcggttctcttgacctggttgaacggcggcgcgacagcattcacgccctgttaacaacgttgttgctctcccagggtacgccgatgttactggccggtgacgaacatggtcacagccagcatggcaataacaatgcctactgtcaggataaccaattaacctggttggactggtcgcaggcaagcagtggtttaaccgcatttaccgccgcgttaatccatctgcgcaagcgcattcccgctttggtggagaatcgctggtgggaagaaggcgacggcaatgtccgttggctaaatcgatatgctcaacctttaagcacggatgagtggcaaaacgggccgaaacagctgcaaattctgctctcggatcgctttttgatcgcaattaacgccacgcttgaggtaacagagattgttttacctgctggggagtggcacgccattcccccattcgctggagaggataacccagtgattacggctgtctggcagggacctgcacacggattgtgtgtgttccagagatga

SEQ ID NO: 55958 - protein, 657 aa, Escherichia coli
MTQLAIGKPAPLGAHYDGQGVNFTLFSAHAERVELCVFDANGQEHRYDLPGHSGDIWHGYLPDARPGLRYGYRVHGPWQPAEGHRFNPAKLLIDPCARQIDGEFKDNPLLHAGHNEPDYRDNAAIAPKCVVVVDHYDWEDDAPPRTPWGSTIIYEAHVKGLTYLHPEIPVEIRGTYKALGHPVMINYLKQLGITALELLPVAQFASEPRLQRMGLSNYWGYNPVAMFALHPAYACSPETALDEFRDAIKALHKAGIEVILDIVLNHSAELDLDGPLFSLRGIDNRSYYWIREDGDYHNWTGCGNTLNLSHPAVVDYASACLRYWVETCHVDGFRFDLAAVMGRTPEFRQDAPLFTAIQNCPVLSQVKLIAEPWDIAPGGYQVGNFPPLFAEWNDHFRDAARRFWLHYDLPLGAFAGRFAASSDVFKRNGRLPSAAINLVTAHDGFTLRDCVCFNHKHNEANGEENRDGTNNNYSNNHGKEGLGGSLDLVERRRDSIHALLTTLLLSQGTPMLLAGDEHGHSQHGNNNAYCQDNQLTWLDWSQASSGLTAFTAALIHLRKRIPALVENRWWEEGDGNVRWLNRYAQPLSTDEWQNGPKQLQILLSDRFLIAINATLEVTEIVLPAGEWHAIPPFAGEDNPVITAVWQGPAHGLCVFQR

SEQ ID NO: 55959 - DNA, 1974 bp, Shigella flexneri
  CDS (1)..(1974): transl_table=11
atgacacaactcgccattggcaaacccgctcccctcggcgcgcattacgacggtcagggcgtcaacttcacacttttctccgctcatgccgagcgggtagaactgtgtgtctttgacgccaatggccaggaacatcgctatgacttgccagggaacagtggcgacatttggcacggttatctgccggatgcgcgcccgggtttgcgttatggttatcgcgttcatggcccctggcaacccgccgaggggcatcgctttaacccggcgaagttgttgattgatccttgcgcgcggcaaattgacggggagtttaaagataacccgctgctgcacgccggtcataatgaacctgactatcgcgacaacgccgccattgcgccgaaatgcgtagtggtggttgatcactatgactgggaagatgacgccccgccgcgcacgccgtggggcagcaccatcatttatgaagcccatgtcaaaggattaacgtacttgcacccggagatcccggtcgagatccgtggcacttataaagccctcgggcatccggtgatgatcaactatttgaaacaattgggcattaccgcgctggaactgctgccagtggcgcagtttgccagtgaaccacgtctgcaacgcatggggctaagtaactactggggttacaacccggtggcgatgtttgcgctgcatccggcgtatgcctgctcgccagaaacggcgctggatgagtttcgcgatgcaatcaaagcactgcataaagcgggtatcgaagtcattcttgatatcgtgctcaaccatagtgcggaactggacctcgacggcccgttattctcgctgcgtgggatcgataaccgtagctattattggataagagaagacggcgattatcacaactggaccggttgcggcaacacgctcaatttgagtcatccggcggtggtggattatgccagcgcctgcctgcgttattgggtagaaacctgccacgtcgatggtttccgctttgatctggcggcagtcatgggccgtacgccagagttccgtcaggatgcgccgttgtttaccgctatccagaactgcccggtgctctcgcaggtgaagttaattgctgaaccgtgggatatcgctcctagtggttatcaggtgggaaatttcccgccgctgtttgccgagtggaacgatcatttccgcgatgctgcccgtcgtttctggctacattatgatttgcctctgggggcgtttgccgggcgttttgctgcctccagcgatgtttttaaacgtaatggtcgtctgccgagtgccgcgattaatctcgtcaccgcgcatgacggttttacgcttcgcgactgcgtttgcttcaaccataaacacaatgaagcaaacggagaagaaaatcgcgacgggaccaacaacaattacagtaacaatcatggtaaagaagggttaggcggtactcttgacctggttgaacggcggcgcgacagcattcatgccctgttaacaacgttgttgctctcccagggcacgccgatgttactggccggtgacgaacatggtcacagccagcatggcaataacaatgcctactgtcaggataaccaattaaactggttggactggtcgcaggcaagcagtggtttaaccgcatttaccgccgcgttaatccatctgcgcaagcgcattcccgctttggtggagaatcgctggtgggaagaaggtgacggcaatgtccgttggctaaatcgatatgctcaacctttaagcacggatgagtggcaaaacgggccgaaacagctgcaaattctgctctcggatcgctttttgatcgcaattaacgccacgcttgaggtaacagagattgttttacctgctggggagtggcacgccattcccccattcgctggagaggataacccagtgattacggttgtctggcagggacctgcacacggattgtgtgtgttccagagatga

SEQ ID NO: 55960 - protein, 657 aa, Shigella flexneri
MTQLAIGKPAPLGAHYDGQGVNFTLFSAHAERVELCVFDANGQEHRYDLPGNSGDIWHGYLPDARPGLRYGYRVHGPWQPAEGHRFNPAKLLIDPCARQIDGEFKDNPLLHAGHNEPDYRDNAAIAPKCVVVVDHYDWEDDAPPRTPWGSTIIYEAHVKGLTYLHPEIPVEIRGTYKALGHPVMINYLKQLGITALELLPVAQFASEPRLQRMGLSNYWGYNPVAMFALHPAYACSPETALDEFRDAIKALHKAGIEVILDIVLNHSAELDLDGPLFSLRGIDNRSYYWIREDGDYHNWTGCGNTLNLSHPAVVDYASACLRYWVETCHVDGFRFDLAAVMGRTPEFRQDAPLFTAIQNCPVLSQVKLIAEPWDIAPSGYQVGNFPPLFAEWNDHFRDAARRFWLHYDLPLGAFAGRFAASSDVFKRNGRLPSAAINLVTAHDGFTLRDCVCFNHKHNEANGEENRDGTNNNYSNNHGKEGLGGTLDLVERRRDSIHALLTTLLLSQGTPMLLAGDEHGHSQHGNNNAYCQDNQLNWLDWSQASSGLTAFTAALIHLRKRIPALVENRWWEEGDGNVRWLNRYAQPLSTDEWQNGPKQLQILLSDRFLIAINATLEVTEIVLPAGEWHAIPPFAGEDNPVITVVWQGPAHGLCVFQR

SEQ ID NO: 55961 - DNA, 2403 bp, Oryza sativa
  CDS (1)..(2403)
atggcgtccctccccgcgccgcccacgccgctcggctcctgcccccgcggccgcggcggcggaagagttgtagcgcggccccgtcgcgcgggtctcgcctgcgccgcgcggtcgtgctaccgcttccggaccgacgacgacggcgtggtggacgtggccgtctccggggaggatggggacggcggcggcggggggtacgcggtgtccgtcgaggtccctggcactcgcgggcgggagggcgggctagtgctccgcgcctcggggtccggcgagggcgtcccgctggcgccggccgccggcggcgcctccctcgcggccgagctctccttcgacccgacccgcgcgccgttctacctctcgttcctgctcacggacgcgtcgggggcggagatacggacgcaccgcaagacgagcttccgcgtgcccgtcggcgtcgggccgggcagccccgcgccgctcggcatgtctatctcaggcgacggcgccgtcaatttcgcggtgtacagcaagaatgccaatgccgtttctctctacctctacgccgccgccgtcggcggcggcggcggcgacgagcccgcgctggagatcgacctcgatccgtacatccaccggactggcaacgtctggcatgtctctctggcgagcgtagatgggtacgtcagctatgccttctgctgcggtggcatccgccgcccactgttggacccgtacgccaaggtgatcggagacttcgtctccagcaactcggtttacgacgagggtgtcactgcgccgtcaatgaggtgctttgcatcgttggcgattgcgccgagctacaactggggaagggacaggcacccccgtctgccattggagaagctggtggtgtaccgggcaaatgtggctttgttcacaaaggacaggtcgagcgggctcccggatgacgctgccggcactttcaccgggctttctgctaaggtagagcacttcaggagccttggtgtcaatgcaattttgctggaaccagtgttcccatttcatcaggtgaaaggaccttatttcccgtaccatttcttttcaccgatgaacttgtatagcagcaaaggtttgagtgtttcagccatcaagtccatgaaggatatggtcagggtaatgcatagaaatggaatagaggtcctcttggaggtggtttttacacatactgctgagggagaatcagagtgtcagacgatatcaatgcgtggcattgataattcctcgtattacattgccaatgggatcgcaggatgcaaagcgagcatactgaattgcaaccatccggtgactcagaagctgattttggacagcctccgccattgggtgcttgacttccatgttgatgggttttgcttcatcaatgcccctttccttgtgagaggtcctggtggtgaatatttatctcgacctccccttcttgaggcgataacttttgacccggttctttccatgacaaagatcattgcagatccttggtctccacttgacatatctaacgtgcaattcccattccctcattggaaaagatgggctgaggtgaacacaagattctctattgatgtgcgcaaatttttgaagagagaagcacttattagtgatcttgctacacgcctgtgcggcagtggggacctgttctcaaccagagggcctgcattttcattcaatcatgtatccaggaattcagggctttctcttgttgatctggtgagtttcagcaatgatgatcttctttctgagtcgagctggaattgtggtgaagaaggtccatcagagaacagtgctgtccttcagacaaggctaaggcagatacgcaacttcttatttattctatttgtatcacttggtgttcctgttctgaacatgggagatgaatgtgggcactctgctgctggttcagtatcatacaaggatagagggcctctgaactggagaggcatgaagacaacatttgttaaggaagtgaccggattcatttcatttctaactgcactcaggagtcggcgaggcgatatctttcagagaagggaattcctaaaacttgagaatatacattggtatgggagcgatctatgtgagccaggttgggatgatcctaccagcaactttctttgcatgcacataaatgcagaggtagatgaaatggcggcagattcggtcagaggcgacctgtacatctgtttcaatgcaaacgaggaatcagtgagtgctgccttgcctgctcttgcagaaggatccgtgtggttgcgcttggttgacacatcacttgcatttccaggtttctttgcaaccgaatctaatcccaaggtgcaacaagtgccaggattatcctcttatcatgtggaagcgcatacttgtgttctatttgaatcaaagagcgctcttgcctag

SEQ ID NO: 55962 - protein, 800 aa, Oryza sativa
MASLPAPPTPLGSCPRGRGGGRVVARPRRAGLACAARSCYRFRTDDDGVVDVAVSGEDGDGGGGGYAVSVEVPGTRGREGGLVLRASGSGEGVPLAPAAGGASLAAELSFDPTRAPFYLSFLLTDASGAEIRTHRKTSFRVPVGVGPGSPAPLGMSISGDGAVNFAVYSKNANAVSLYLYAAAVGGGGGDEPALEIDLDPYIHRTGNVWHVSLASVDGYVSYAFCCGGIRRPLLDPYAKVIGDFVSSNSVYDEGVTAPSMRCFASLAIAPSYNWGRDRHPRLPLEKLVVYRANVALFTKDRSSGLPDDAAGTFTGLSAKVEHFRSLGVNAILLEPVFPFHQVKGPYFPYHFFSPMNLYSSKGLSVSAIKSMKDMVRVMHRNGIEVLLEVVFTHTAEGESECQTISMRGIDNSSYYIANGIAGCKASILNCNHPVTQKLILDSLRHWVLDFHVDGFCFINAPFLVRGPGGEYLSRPPLLEAITFDPVLSMTKIIADPWSPLDISNVQFPFPHWKRWAEVNTRFSIDVRKFLKREALISDLATRLCGSGDLFSTRGPAFSFNHVSRNSGLSLVDLVSFSNDDLLSESSWNCGEEGPSENSAVLQTRLRQIRNFLFILFVSLGVPVLNMGDECGHSAAGSVSYKDRGPLNWRGMKTTFVKEVTGFISFLTALRSRRGDIFQRREFLKLENIHWYGSDLCEPGWDDPTSNFLCMHINAEVDEMAADSVRGDLYICFNANEESVSAALPALAEGSVWLRLVDTSLAFPGFFATESNPKVQQVPGLSSYHVEAHTCVLFESKSALA

SEQ ID NO: 55963 - DNA, 2412 bp, Oryza sativa
  CDS (1)..(2412)
atggcgagcctcccgcactgcctctccgcgcgcccgctcgtcgtcgcggcggccccggggcggcctgggccggggccggggccgtggctgcgcggcggggcgaggcggcggaatgcggcgttttcggcggggaacgcggggaggcgggtggggttgaggaggtcggtggcctcggcggtggaggtcggggtcggggaggatgaggaggagggtgtggaggaggaggaggaggaggtggaggcggtggtgatgccggagaggtacgcgctgggtggcgcgtgcagggtgctcgccggaatgcccgcgccgctcggggccaccgcgctcgacggcggggtcaatttcgccgtctactccgccggcgcatccgccgcgtcgctctgcctcttcacccccgacgatctcgaggcggatgaggtgactgaggaggttccgcttgatcctctgttcaatcggacggggaatgtgtggcacgtcttcatcgaaggcgagctgcacaacatgctgtacgggtacaggttcgatggtatgttcgcccctcactgcggccagtacttcgatgtctccaatgtcgtggtggatccttatgccaaggcagtgataagccgaggagagtatggtgtccccggtcctggtggcgattgctggcctcaaatggctggcatgatccctcttccgtacagtacgtttgattggcaaggtgacctacctctgagatatcctcagaaggatcttgtaatctatgagatgcatttacgtgggtttacaaagcacagttcaagcaatgtagaacatccagggacttacattggggctatatcaaagcttgactatctgaaggagcttggagttaactgtgtagagttgatgccctgccatgaattcaatgagctggagtacttcagctgctcttccaagatgaacttctggggatactccacgataaactttttttcaccaatgataagatattcatcaggtgggataagaaactgtggccgtgatgccataaatgaattcaaaacttttgttagagaggctcacaaacggggaattgaggtgatcatggatgttgtcttcaatcatacagccgagggtaatgagaaaggaccaatattatcatttagggggatagataatagcacatactatatgcttgcccctaagggagagttttacaattattctggttgtgggaataccttcaactgtaatcatcctgtggtccgtgaatttattgtagattgtttaagatactgggtgacagaaatgcatgttgatggttttcgttttgatcttgcatccataatgaccagaggatgcagtctttgggatccagttaatgtgtatggaagtccagtagaaggtgacatgactacgacagggacacctcttgctactccaccacttattgacatgatcagcaatgatccaattcttggagatgtcaagctcattgctgaagcatgggatgcgggaggcctctatcaagtaggtcaatttcctcactggaaaatttggtcagaatggaatggaaagtaccgggacattgttcgtcaattcattaaaggcacagatggatttgctggtggtttcgctgaatgtttgtgtggaagtccacatctataccaggcaggggggaggaaaccttggcacagtatcaactttgtgtgtgcgcatgatggatttacgctggctgatttggtgacatataacaagaagtacaactcttcaaatggtgaggataatagagatggagaaaatcataacctcagctggaactgtggggaggaaggagaatttgcaggtttgtcggtcaaaagattgaggaagaggcaaatgcgcaatttctttgtttctctcatggtttctcaaggtgttccgatgttctacatgggcgatgaatatggccatacaaaaggaggcaacaacaacacatactgccatgaccattatgtcaattatttccgctgggacaagaaagaagaatcctctgacttgcaacggttctgctctcttatgaccaaattccgcaaacaatgcgagtcccttggcctcgcagacttcccaacagctcaacggttgcattggcatggccatcagcctgggaaacctgactggtctgagacaagccgtttcgtggccttctccacgaaagatgaaacgaaaggcgagatctacgtggccttcaacgccagccatttgccggcggttgttggactcccagagcgcccaggctaccgctgggagccgctggtggacacaggcaagccagcgccttatgacttcctcaccgacgacctgcctgatcgtgctcacgccgtccacctgttctctcatttcctcaactccaatctctaccccatgctcagctactcctccatcatccttgaattgcagcctgatgattga

SEQ ID NO: 55964 - protein, 803 aa, Oryza sativa
MASLPHCLSARPLVVAAAPGRPGPGPGPWLRGGARRRNAAFSAGNAGRRVGLRRSVASAVEVGVGEDEEEGVEEEEEEVEAVVMPERYALGGACRVLAGMPAPLGATALDGGVNFAVYSAGASAASLCLFTPDDLEADEVTEEVPLDPLFNRTGNVWHVFIEGELHNMLYGYRFDGMFAPHCGQYFDVSNVVVDPYAKAVISRGEYGVPGPGGDCWPQMAGMIPLPYSTFDWQGDLPLRYPQKDLVIYEMHLRGFTKHSSSNVEHPGTYIGAISKLDYLKELGVNCVELMPCHEFNELEYFSCSSKMNFWGYSTINFFSPMIRYSSGGIRNCGRDAINEFKTFVREAHKRGIEVIMDVVFNHTAEGNEKGPILSFRGIDNSTYYMLAPKGEFYNYSGCGNTFNCNHPVVREFIVDCLRYWVTEMHVDGFRFDLASIMTRGCSLWDPVNVYGSPVEGDMTTTGTPLATPPLIDMISNDPILGDVKLIAEAWDAGGLYQVGQFPHWKIWSEWNGKYRDIVRQFIKGTDGFAGGFAECLCGSPHLYQAGGRKPWHSINFVCAHDGFTLADLVTYNKKYNSSNGEDNRDGENHNLSWNCGEEGEFAGLSVKRLRKRQMRNFFVSLMVSQGVPMFYMGDEYGHTKGGNNNTYCHDHYVNYFRWDKKEESSDLQRFCSLMTKFRKQCESLGLADFPTAQRLHWHGHQPGKPDWSETSRFVAFSTKDETKGEIYVAFNASHLPAVVGLPERPGYRWEPLVDTGKPAPYDFLTDDLPDRAHAVHLFSHFLNSNLYPMLSYSSIILELQPDD

SEQ ID NO: 55965 - DNA, 2400 bp, Zea mays
  CDS (1)..(2400)
atggcctcctccctccccgcgccgccggcctcgccctcttcctcctggcgcggactcacgccccgctgccctccgcctcgctgcggtcccctcctcgcccgcgcggcagcgcgttcttaccgttaccgcttccgaaccgacgacgacggcgtggtggacgtggccgtcgccgggaaagacggcgatgcggggtatgtggtcgctatcgaggctcctacccatggacagaggggcggtcttgtgctccgccccgccggctccggcgagggcgtccctctggccccagccgcgccgggaggtgccctcgtggctgagttgtcctacgacgtggcccgcgcgccgttccacgtctcgttcacgctggccgacgcgatgggagcggagatacggacacaccgcgggacgagcttccgcgtgcctgttggcgtcggacggggctgcccctcgccgctcggcctgtcccagtccaaggatggggccgctaacttcgcggtttacagcaagatcgccaagggcatggtgctctgcctcttcggtggtggcggcggggacggacccgcgcttgagattgagctcgacccgtacgtccaccggaccggcgatgtctggcacgtctcgatggagagcgtggaggggtacgcccgctacggcttccgcagcgggctgttcgcaatgtttggcattgaccgcccgctactcgacccgtacgccaaggtgatcggggacttcgtcgctggcgactctgttgatgaggatgggctagctgtgccatccataaggtgtctcgcgtccttgaagaatgcacccaactacgattggggcagggacaagcacccatgcttgccattgcagaagctggtggtctaccgggcaaatgtagctttgttcaccaaggataggtcgagtcggctggcagacaatgccgctggtactttctccggcatgtctgcaaaggtggaacacttcaggcatcttggtgtcaatgcagttttgctggagccagttttcccattccaccaagtgaagggaccatattttccataccattttttttcacctatgagcttgtatagcagtgaatgctccagtgtttcagctatcaagtctatgaaggatatggtcaaaacaatgcacagaaatggaatagaggttctcttggaggttgttttcacgcatactgctgaaggaggggcggagtgtcagatgatatcacttcgaggcatcgatggttcctcgtactacattgctgatggaatcgctggatgcaaggcaagtgtgttgaattgcaaccatccagtgactcagaagctgattttggacagcctccgccattgggtgctcgacttccatgttgatgggttctgcttcatcaatgctcctttcctcgtcagaggtccacgtggtgagggcctctcacggcctccacttctggaagccatagcatttgatcctgttctttcaaagactaagatcattgcagatccttggtctccgcttgacatatctaatgtgcaatttccattccctcattggaaaagatgggctgagatgaacacaagattctctatggatgtgcgcaagtttcttaagggagaagcacttatcagtgatcttgctacacgtttgtgtggcagtggggacttattttcctcaagggccccagcattttcgttcaattatgtatccaggaattctggactcactcttgttgatctagtgagcttcagcagtgatgagcttgcttctgagttcagctggaattatggtgaagaaggaccatcggagaacaacgcagtccttcaaaccaggctaagacagatacacaacttcctgtttattctattcatttcccttggtattcctgttcttaacatgggggatgaatgtggaaactcagctgctggttcaacatcatacaaggatagagggcctctgaactggaaagccttgaagaccgcttttgttaaggaagttaccgggtttatttcgtttctatctgcactaaggagtcgacgagcagacattttccagagatgcgagtttctaaaacttgaaaatatacattggtatgggagtgatttatctgagccatgttgggaggatcctactagcaactttctttgcttgcacataaatgcagagctggacgagaagctaccagattcgactggaggtgatttgtatatctgtttcaatgcaaacgaggagtcagcgagtgctactttaccagctattgcagaaggatccatgtggctgcgcttggttgatacatcacttgcatttccaggtttcttttccagagggtctagtcatgaaacacaccaggtgctaggattttcctcatatcaagtgaaggcacatagctgtgttctgttcgaatccaagagggttctttcatag

SEQ ID NO: 55966 - protein, 799 aa, Zea mays
MASSLPAPPASPSSSWRGLTPRCPPPRCGPLLARAAARSYRYRFRTDDDGVVDVAVAGKDGDAGYVVAIEAPTHGQRGGLVLRPAGSGEGVPLAPAAPGGALVAELSYDVARAPFHVSFTLADAMGAEIRTHRGTSFRVPVGVGRGCPSPLGLSQSKDGAANFAVYSKIAKGMVLCLFGGGGGDGPALEIELDPYVHRTGDVWHVSMESVEGYARYGFRSGLFAMFGIDRPLLDPYAKVIGDFVAGDSVDEDGLAVPSIRCLASLKNAPNYDWGRDKHPCLPLQKLVVYRANVALFTKDRSSRLADNAAGTFSGMSAKVEHFRHLGVNAVLLEPVFPFHQVKGPYFPYHFFSPMSLYSSECSSVSAIKSMKDMVKTMHRNGIEVLLEVVFTHTAEGGAECQMISLRGIDGSSYYIADGIAGCKASVLNCNHPVTQKLILDSLRHWVLDFHVDGFCFINAPFLVRGPRGEGLSRPPLLEAIAFDPVLSKTKIIADPWSPLDISNVQFPFPHWKRWAEMNTRFSMDVRKFLKGEALISDLATRLCGSGDLFSSRAPAFSFNYVSRNSGLTLVDLVSFSSDELASEFSWNYGEEGPSENNAVLQTRLRQIHNFLFILFISLGIPVLNMGDECGNSAAGSTSYKDRGPLNWKALKTAFVKEVTGFISFLSALRSRRADIFQRCEFLKLENIHWYGSDLSEPCWEDPTSNFLCLHINAELDEKLPDSTGGDLYICFNANEESASATLPAIAEGSMWLRLVDTSLAFPGFFSRGSSHETHQVLGFSSYQVKAHSCVLFESKRVLS

SEQ ID NO: 55967 - DNA, 22 bp, Artificial sequence
  primer
atgccacagttgatatctgttc

SEQ ID NO: 55968 - DNA, 21 bp, Artificial sequence
  primer
ttattttgccattaacaccac

SEQ ID NO: 55969 - protein, 873 aa, Artificial sequence
  consensus sequence
  Variant (2)..(2): Xaa in position 2 is any amino acid
  Variant (3)..(4): Xaa in position 3 to 4 is any or no amino acid
  Variant (8)..(13): Xaa in position 8 to 13 is any amino acid
  Variant (14)..(17): Xaa in position 14 to 17 is any or no amino acid
  Variant (19)..(19): Xaa in position 19 is any amino acid
  Variant (20)..(22): Xaa in position 20 to 22 is any or no amino acid
  Variant (25)..(27): Xaa in position 25 to 27 is any amino acid
  Variant (29)..(30): Xaa in position 29 to 30 is any amino acid
  Variant (32)..(35): Xaa in position 32 to 35 is any amino acid
  Variant (37)..(37): Xaa in position 37 is any amino acid
  Variant (39)..(55): Xaa in position 39 to 55 is any amino acid
  Variant (56)..(117): Xaa in position 56 to 117 is any or no amino acid
  Variant (120)..(125): Xaa in position 120 to 125 is any amino acid
  Variant (126)..(131): Xaa in position 126 to 131 is any or no amino acid
  Variant (134)..(134): Xaa in position 134 is any amino acid
  Variant (136)..(137): Xaa in position 136 to 137 is any amino acid
  Variant (139)..(139): Xaa in position 139 is any amino acid
  Variant (140)..(145): Xaa in position 140 to 145 is any or no amino acid
  Variant (147)..(151): Xaa in position 147 to 151 is any amino acid
  Variant (152)..(154): Xaa in position 152 to 154 is any or no amino acid
  Variant (156)..(156): Xaa in position 156 is any amino acid
  Variant (161)..(195): Xaa in position 161 to 195 is any amino acid
  Variant (196)..(259): Xaa in position 196 to 259 is any or no amino acid
  Variant (263)..(263): Xaa in position 263 is any amino acid
  Variant (266)..(266): Xaa in position 266 is any amino acid
  Variant (268)..(268): Xaa in position 268 is any amino acid
  Variant (270)..(278): Xaa in position 270 to 278 is any amino acid
  Variant (279)..(281): Xaa in position 279 to 281 is any or no amino acid
  Variant (284)..(285): Xaa in position 284 to 285 is any amino acid
  Variant (287)..(293): Xaa in position 287 to 293 is any amino acid
  Variant (294)..(295): Xaa in position 294 to 295 is any or no amino acid
  Variant (297)..(298): Xaa in position 297 to 298 is any amino acid
  Variant (301)..(304): Xaa in position 301 to 304 is any amino acid
  Variant (307)..(307): Xaa in position 307 is any amino acid
  Variant (309)..(311): Xaa in position 309 to 311 is any amino acid
  Variant (313)..(316): Xaa in position 313 to 316 is any amino acid
  Variant (317)..(329): Xaa in position 317 to 329 is any or no amino acid
  Variant (331)..(331): Xaa in position 331 is any amino acid
  Variant (335)..(339): Xaa in position 335 to 339 is any amino acid
  Variant (341)..(341): Xaa in position 341 is any amino acid
  Variant (343)..(345): Xaa in position 343 to 345 is any amino acid
  Variant (347)..(352): Xaa in position 347 to 352 is any amino acid
  Variant (353)..(360): Xaa in position 353 to 360 is any or no amino acid
  Variant (362)..(365): Xaa in position 362 to 365 is any amino acid
  Variant (367)..(369): Xaa in position 367 to 369 is any amino acid
  Variant (371)..(372): Xaa in position 371 to 372 is any amino acid
  Variant (374)..(374): Xaa in position 374 is any amino acid
  Variant (382)..(382): Xaa in position 382 is any amino acid
  Variant (386)..(386): Xaa in position 386 is any amino acid
  Variant (389)..(390): Xaa in position 389 to 390 is any amino acid
  Variant (391)..(391): Xaa in position 391 is any or no amino acid
  Variant (394)..(395): Xaa in position 394 to 395 is any amino acid
  Variant (396)..(396): Xaa in position 396 is any or no amino acid
  Variant (398)..(399): Xaa in position 398 to 399 is any amino acid
  Variant (401)..(401): Xaa in position 401 is any amino acid
  Variant (404)..(405): Xaa in position 404 to 405 is any amino acid
  Variant (408)..(414): Xaa in position 408 to 414 is any amino acid
  Variant (415)..(424): Xaa in position 415 to 424 is any or no amino acid
  Variant (426)..(426): Xaa in position 426 is any amino acid
  Variant (429)..(434): Xaa in position 429 to 434 is any amino acid
  Variant (436)..(442): Xaa in position 436 to 442 is any amino acid
  Variant (444)..(444): Xaa in position 444 is any amino acid
  Variant (447)..(447): Xaa in position 447 is any amino acid
  Variant (449)..(452): Xaa in position 449 to 452 is any amino acid
  Variant (463)..(464): Xaa in position 463 to 464 is any amino acid
  Variant (466)..(466): Xaa in position 466 is any amino acid
  Variant (468)..(484): Xaa in position 468 to 484 is any amino acid
  Variant (485)..(508): Xaa in position 485 to 508 is any or no amino acid
  Variant (511)..(511): Xaa in position 511 is any amino acid
  Variant (513)..(515): Xaa in position 513 to 515 is any amino acid
  Variant (517)..(517): Xaa in position 517 is any amino acid
  Variant (518)..(518): Xaa in position 518 is any or no amino acid
  Variant (522)..(522): Xaa in position 522 is any amino acid
  Variant (525)..(526): Xaa in position 525 to 526 is any amino acid
  Variant (527)..(527): Xaa in position 527 is any or no amino acid
  Variant (529)..(529): Xaa in position 529 is any amino acid
  Variant (531)..(532): Xaa in position 531 to 532 is any amino acid
  Variant (534)..(534): Xaa in position 534 is any amino acid
  Variant (537)..(540): Xaa in position 537 to 540 is any amino acid
  Variant (541)..(543): Xaa in position 541 to 543 is any or no amino acid
  Variant (547)..(549): Xaa in position 547 to 549 is any amino acid
  Variant (552)..(553): Xaa in position 552 to 553 is any amino acid
  Variant (555)..(555): Xaa in position 555 is any amino acid
  Variant (557)..(558): Xaa in position 557 to 558 is any amino acid
  Variant (560)..(566): Xaa in position 560 to 566 is any amino acid
  Variant (567)..(567): Xaa in position 567 is any or no amino acid
  Variant (569)..(569): Xaa in position 569 is any amino acid
  Variant (571)..(572): Xaa in position 571 to 572 is any amino acid
  Variant (575)..(575): Xaa in position 575 is any amino acid
  Variant (577)..(579): Xaa in position 577 to 579 is any amino acid
  Variant (580)..(582): Xaa in position 580 to 582 is any or no amino acid
  Variant (584)..(584): Xaa in position 584 is any amino acid
  Variant (586)..(587): Xaa in position 586 to 587 is any amino acid
  Variant (589)..(589): Xaa in position 589 is any amino acid
  Variant (592)..(594): Xaa in position 592 to 594 is any amino acid
  Variant (601)..(601): Xaa in position 601 is any amino acid
  Variant (605)..(605): Xaa in position 605 is any amino acid
  Variant (607)..(607): Xaa in position 607 is any amino acid
  Variant (608)..(608): Xaa in position 608 is any or no amino acid
  Variant (612)..(613): Xaa in position 612 to 613 is any amino acid
  Variant (617)..(617): Xaa in position 617 is any amino acid
  Variant (619)..(619): Xaa in position 619 is any amino acid
  Variant (622)..(624): Xaa in position 622 to 624 is any amino acid
  Variant (626)..(626): Xaa in position 626 is any amino acid
  Variant (630)..(630): Xaa in position 630 is any amino acid
  Variant (632)..(632): Xaa in position 632 is any amino acid
  Variant (633)..(636): Xaa in position 633 to 636 is any or no amino acid
  Variant (639)..(647): Xaa in position 639 to 647 is any amino acid
  Variant (648)..(648): Xaa in position 648 is any or no amino acid
  Variant (650)..(650): Xaa in position 650 is any amino acid
  Variant (653)..(654): Xaa in position 653 to 654 is any amino acid
  Variant (656)..(659): Xaa in position 656 to 659 is any amino acid
  Variant (661)..(662): Xaa in position 661 to 662 is any amino acid
  Variant (664)..(664): Xaa in position 664 is any amino acid
  Variant (666)..(666): Xaa in position 666 is any amino acid
  Variant (669)..(671): Xaa in position 669 to 671 is any amino acid
  Variant (675)..(680): Xaa in position 675 to 680 is any amino acid
  Variant (685)..(685): Xaa in position 685 is any amino acid
  Variant (688)..(688): Xaa in position 688 is any amino acid
  Variant (690)..(693): Xaa in position 690 to 693 is any amino acid
  Variant (695)..(696): Xaa in position 695 to 696 is any amino acid
  Variant (698)..(706): Xaa in position 698 to 706 is any amino acid
  Variant (707)..(711): Xaa in position 707 to 711 is any or no amino acid
  Variant (713)..(719): Xaa in position 713 to 719 is any amino acid
  Variant (721)..(740): Xaa in position 721 to 740 is any amino acid
  Variant (741)..(791): Xaa in position 741 to 791 is any or no amino acid
  Variant (793)..(795): Xaa in position 793 to 795 is any amino acid
  Variant (796)..(800): Xaa in position 796 to 800 is any or no amino acid
  Variant (802)..(820): Xaa in position 802 to 820 is any amino acid
  Variant (821)..(845): Xaa in position 821 to 845 is any or no amino acid
  Variant (847)..(855): Xaa in position 847 to 855 is any amino acid
  Variant (858)..(860): Xaa in position 858 to 860 is any amino acid
  Variant (861)..(866): Xaa in position 861 to 866 is any or no amino acid
  Variant (868)..(872): Xaa in position 868 to 872 is any amino acid
GXXXPLGXXXXXXXXXXGXXXXNFXXXSXXAXXXXLXLXXXXXXXXXXXXXXXXXXXXXXXXXXXXXXXXXXXXXXXXXXXXXXXXXXXXXXXXXXXXXXXXXXXXXXXXXXXXXXXWHXXXXXXXXXXXXYGXRXXGXXXXXXXGXXXXXXXXLXDPYAXXXXXXXXXXXXXXXXXXXXXXXXXXXXXXXXXXXXXXXXXXXXXXXXXXXXXXXXXXXXXXXXXXXXXXXXXXXXXXXXXXXXXXXXXXXXXXXXXXXIYEXHVXGXTXXXXXXXXXXXXGTXXGXXXXXXXXXLXXLGXXXXELXPXXXFXXXXXXXXXXXXXXXXXNXWGYXXXXXFXPXXXYXXXXXXXXXXXXXXEXXXXVXXXHXXGXEVILDVVXNHTXEGXXXGPXXXSXXGXDNXXYYXXXXXXXXXXXXXXXXXGXGNXXXXXXPXXXXXXXDXLRXWXXXXHVDGFRFDLAXXLXRXXXXXXXXXXXXXXXXXXXXXXXXXXXXXXXXXXXXXXXXXDPXLXXXKXXIAEXWDXXXGXYXXGXFPXXXXXXXEWNXXXRDXXRXFXXGXXXXXXXXAXRXXGSXDXXXXXXRXPXXSXNFXXXHDGFTLXDLVXYXXKHNXXNGEXNXDGXXXNXSWNXGXXXXXEGXXXXXXXXXXRXRQXXNXXXXLXXSXGXPMXXXGDEXXXXXXGNNNXYCXDXXXXWXXWXXXXXXXXXXXXXXFXXXXXXXRXXXXXXXXXXXXXXXXXXXXXXXXXXXXXXXXXXXXXXXXXXXXXXXXXXXXXXXXXXXXXXXXXXXXXXXGXXXXXXXXWXXXXXXXXXXXXXXXXXXXXXXXXXXXXXXXXXXXXXXXXXXXXNXXXXXXXXXLPXXXXXXXXXWXXXXXT

SEQ ID NO: 55970 - protein, 27 aa, Artificial sequence
  protein pattern
  Variant (3)..(3): Xaa in position 3 is Ile, Leu or Val
  Variant (4)..(4): Xaa in position 4 is any amino acid
  Variant (5)..(5): Xaa in position 5 is Ala, Cys or Ser
  Variant (11)..(11): Xaa in position 11 is Leu or Met
  Variant (12)..(12): Xaa in position 12 is any amino acid
  Variant (14)..(15): Xaa in position 14 to 15 is any amino acid
  Variant (16)..(16): Xaa in position 16 is Ala, Ser or Thr
  Variant (17)..(17): Xaa in position 17 is Phe or Tyr
  Variant (18)..(19): Xaa in position 18 to 19 is any amino acid
  Variant (20)..(20): Xaa in position 20 is Lys or Arg
  Variant (21)..(21): Xaa in position 21 is any amino acid
  Variant (23)..(24): Xaa in position 23 to 24 is any amino acid
  Variant (26)..(26): Xaa in position 26 is any amino acid
NFXXXHDGFTXXDXXXXXXXXNXXNXE

SEQ ID NO: 55971 - protein, 24 aa, Artificial sequence
  protein pattern
  Variant (2)..(4): Xaa in position 2 to 4 is any amino acid
  Variant (6)..(7): Xaa in position 6 to 7 is any amino acid
  Variant (8)..(8): Xaa in position 8 is Asp or Gly
  Variant (9)..(9): Xaa in position 9 is Ile, Leu or Met
  Variant (10)..(10): Xaa in position 10 is Glu, Gln or Ser
  Variant (11)..(11): Xaa in position 11 is Ile, Leu or Val
  Variant (12)..(12): Xaa in position 12 is Phe, Ile, Leu, Met or Val
  Variant (13)..(13): Xaa in position 13 is Leu or Met
  Variant (17)..(17): Xaa in position 17 is any amino acid
  Variant (21)..(21): Xaa in position 21 is any amino acid
  Variant (23)..(23): Xaa in position 23 is Ala or Gly
  Variant (24)..(24): Xaa in position 24 is Asp, Gly, Asn or Ser
VXXXHXXXXXXXXDVVXNHTXEXX

SEQ ID NO: 55972 - protein, 24 aa, Artificial sequence
  protein pattern
  Variant (2)..(2): Xaa in position 2 is any amino acid
  Variant (3)..(3): Xaa in position 3 is Phe, His or Tyr
  Variant (4)..(4): Xaa in position 4 is Phe or Trp
  Variant (5)..(9): Xaa in position 5 to 9 is any amino acid
  Variant (10)..(10): Xaa in position 10 is Ile or Val
  Variant (18)..(18): Xaa in position 18 is any or no amino acid
  Variant (20)..(22): Xaa in position 20 to 22 is any amino acid
  Variant (23)..(23): Xaa in position 23 is any or no amino acid
LXXXXXXXXXDGFRFDLXAXXXXR

SEQ ID NO: 55973 - protein, 15 aa, Artificial sequence
  protein pattern
  Variant (3)..(3): Xaa in position 3 is Asp or Gly
  Variant (4)..(4): Xaa in position 4 is any amino acid
  Variant (5)..(5): Xaa in position 5 is Phe or Tyr
  Variant (8)..(9): Xaa in position 8 to 9 is any amino acid
  Variant (11)..(14): Xaa in position 11 to 14 is any amino acid
WNXXXRDXXRXXXXG

SEQ ID NO: 55974 - protein, 9 aa, Artificial sequence
  protein pattern
  Variant (5)..(5): Xaa in position 5 is Ala, Gly, Ser, Thr or Val
  Variant (7)..(7): Xaa in position 7 is Cys or Gly
  Variant (8)..(8): Xaa in position 8 is any amino acid
GNNNXYXXD

SEQ ID NO: 55975 - protein, 17 aa, Artificial sequence
  protein pattern
  Variant (2)..(4): Xaa in position 2 to 4 is any or no amino acid
  Variant (6)..(6): Xaa in position 6 is Ile or Val
  Variant (7)..(7): Xaa in position 7 is Asn or Thr
  Variant (8)..(8): Xaa in position 8 is Ala, Cys, Ser or Thr
  Variant (9)..(9): Xaa in position 9 is Ile, Leu or Val
  Variant (12)..(12): Xaa in position 12 is Leu or Met
  Variant (14)..(16): Xaa in position 14 to 16 is any amino acid
LXXXGXXXXELXPXXXF

SEQ ID NO: 55976 - protein, 17 aa, Artificial sequence
  protein pattern
  Variant (2)..(2): Xaa in position 2 is Ala, Pro or Ser
  Variant (3)..(3): Xaa in position 3 is any amino acid
  Variant (4)..(4): Xaa in position 4 is Ile, Leu or Val
  Variant (5)..(7): Xaa in position 5 to 7 is any amino acid
  Variant (9)..(9): Xaa in position 9 is Ile, Leu or Met
  Variant (10)..(10): Xaa in position 10 is Phe, Ile or Val
  Variant (11)..(11): Xaa in position 11 is Ala, Gly or Ser
  Variant (13)..(13): Xaa in position 13 is Ala or Pro
  Variant (16)..(16): Xaa in position 16 is any amino acid
  Variant (17)..(17): Xaa in position 17 is Ala or Gly
DXXXXXXKXXXEXWDXX

SEQ ID NO: 55977 - protein, 15 aa, Artificial sequence
  protein pattern
  Variant (3)..(3): Xaa in position 3 is any amino acid
  Variant (4)..(4): Xaa in position 4 is Asp, Asn or Ser
  Variant (5)..(5): Xaa in position 5 is any amino acid
  Variant (7)..(7): Xaa in position 7 is any amino acid
  Variant (9)..(9): Xaa in position 9 is any amino acid
  Variant (11)..(11): Xaa in position 11 is any amino acid
  Variant (13)..(13): Xaa in position 13 is any amino acid
DGXXXNXSXNXGXEG

SEQ ID NO: 55978 - DNA, 654 bp, Synechocystis sp.
  CDS (1)..(654): transl_table=11
atgtcggctatgtcagatttgtcgaataacttgagttttatttccccccccgttgctttagggaatattccccaaccccgctgtttatcccttgggataatggcatccggtagtggtagtaattttgaggcgatcgccaaggccattaaggagggaaagttaaatgcagtggtgaaactggtgatttacaacaaccctaatgctggggttaggaaacgggccatggaccatggggtgccccaccgattactcaaccatcgggactacgacagccgggaagatttggatcaagatattgttgagcattttcgccaagcaggggtggaatgggtgatcatggccgggtggatgcgtattgtcactccagtactattagatgcttttagccgtcgggtgttgaatatccaccccagtttattgcctagttttcgaggtgtgcgggctgtggaacaggccttggcggcgggggtgaaagtgagtggttgcacagtccattatgccgaagcaacggtggatagtggccccattgtggcccaggcggtagtgcccattctggctgatgatacgggggagactctccatcaacgcattcaagtccaagaacatcgcctctttcccctggcgatcgcccttgccgcccagcaaagcccataa

SEQ ID NO: 55979 - protein, 217 aa, Synechocystis sp.
MSAMSDLSNNLSFISPPVALGNIPQPRCLSLGIMASGSGSNFEAIAKAIKEGKLNAVVKLVIYNNPNAGVRKRAMDHGVPHRLLNHRDYDSREDLDQDIVEHFRQAGVEWVIMAGWMRIVTPVLLDAFSRRVLNIHPSLLPSFRGVRAVEQALAAGVKVSGCTVHYAEATVDSGPIVAQAVVPILADDTGETLHQRIQVQEHRLFPLAIALAAQQSP

SEQ ID NO: 55980 - DNA, 717 bp, Oryza sativa (japonica cultivar-group)
  CDS (1)..(717)
atgctcacgcctatgcggcggtgggggcgggggcgaagggggggtgaggctaggggtgtcggggtggagaggaagaggctcgtggtgttcgtgtccggtgggggatccaacttccgggcgatccacgatgccgctctgggtggggacgtgaatggcgttgtggttgcgttggttaccgataaaccaggctgtggaggagcagagcatgcgaggggtaatggcataccggtcgttgtgttccctaagttgaagtctgctccagagggggtatctactgatgagctgttgaatggtctgagggaactcagggtagacttcattctacttgctggctacctgaagcttataccggttgagctagttcaggcatatccaaaatccattttgaatattcacccttcactactcccggcatttggaggcaaaggttattatggtttgaaggtgcataaagcagtcatcgcatcaggagccaggtactcgggtccaactgtgcactttgtggatgagcactatgacacaggaaggactctagcccaaagggttgtacctgtgcaagccaatgatactccagagcaattggctacaagagtccttcatgaggaacatcaggtttatgttgaggcagttactgccctatgtgaggaccgaattgtgtggagagaagatggtatcccacttattagaagccagacaaatcccgatgagtacacttaa

SEQ ID NO: 55981 - protein, 238 aa, Oryza sativa (japonica cultivar-group)
MLTPMRRWGRGRRGGEARGVGVERKRLVVFVSGGGSNFRAIHDAALGGDVNGVVVALVTDKPGCGGAEHARGNGIPVVVFPKLKSAPEGVSTDELLNGLRELRVDFILLAGYLKLIPVELVQAYPKSILNIHPSLLPAFGGKGYYGLKVHKAVIASGARYSGPTVHFVDEHYDTGRTLAQRVVPVQANDTPEQLATRVLHEEHQVYVEAVTALCEDRIVWREDGIPLIRSQTNPDEYT

SEQ ID NO: 55982 - DNA, 873 bp, Oryza sativa (japonica cultivar-group)
  CDS (1)..(873)
atggaggcggccgtcgcttccaccggctccggcctgcgctgctcgcccaatccgatgcctaagcagcagcacgagcggcgaagtgctcgggtgggcttcgtctcccagccgcgacctcgcgctgtccgctgcgagcggtcgccccatccggatgctcgagcctacgcggcggtggcggtgggggtggtggcgaaggggcgtgaggttgggggcgtcggggtggagagaaggaggctcgcggtgttcgtttccggtgggggatccaacttccgggcgatccacgacgccgctctgggtggggaggtgaatggtgatgtggttgcgttggttaccgataaaccaggctgtggaggagcggagcatgcgaggggtaatgggataccggtggttgtgttcccgaagtcgaagtctgctccagagggggtttctattgatgagttgttgaatgctctgagggaactcagggtagacttcattctacttgctggttacctgaaacttatacctgttgagctagttcaggaatatccaaaatccattttgaatattcacccttcactactcccagcatttggaggcaaaggttattatggtttgaaggtgcataaagcagtcatcgcatcaggggccaggtattcgggtccaactgtgcactttgtggatgagcactatgacacaggaaggactctagcccaaagggttgtacctgtgctagccaatgatactccagagcaattggctgcaagagtccttcatgaggaacatcaggtttatgttgaggcagttgctgccctatgtgatgaccgaattgtgtggagagaagatggtgttccacttattagaagtcatacaaaccctgacgagtacacttaa

SEQ ID NO: 55983 - protein, 290 aa, Oryza sativa (japonica cultivar-group)
MEAAVASTGSGLRCSPNPMPKQQHERRSARVGFVSQPRPRAVRCERSPHPDARAYAAVAVGVVAKGREVGGVGVERRRLAVFVSGGGSNFRAIHDAALGGEVNGDVVALVTDKPGCGGAEHARGNGIPVVVFPKSKSAPEGVSIDELLNALRELRVDFILLAGYLKLIPVELVQEYPKSILNIHPSLLPAFGGKGYYGLKVHKAVIASGARYSGPTVHFVDEHYDTGRTLAQRVVPVLANDTPEQLAARVLHEEHQVYVEAVAALCDDRIVWREDGVPLIRSHTNPDEYT

SEQ ID NO: 55984 - DNA, 651 bp, Aquifex aeolicus VF5
  CDS (1)..(651): transl_table=11
atgctaaaaataggagtactggtttcgggaagaggaagcaaccttcaagcgataatagacgccatagaaagcggaaaggtaaacgcgagtatagaactcgtgatttccgacaaccctaaagcctacgccatagaaaggtgtaaaaaacacaacgtagagtgtaaagtaattcagagaaaggaattcccttcaaaaaaagagtttgaagagagaatggctcttgagctgaagaaaaagggtgttgaacttgtagtgcttgcgggttttatgagaatactctctcacaactttttaaagtactttccgaataaggttataaacatacacccttccctaattcccgcctttcaggggctgcacgctcaaaaacaagcagttgagttcggtgtgaagttttccggttgcaccgttcacatagtggatgagagcgttgatgctggacccgtaatagttcaggctgtagttccggtgctccccgaagatgatgaaaacaccttggcggacagaattttaaagtgggaacacaaaatactccctcaaactgtccagtggtttgctcaggacaggataattatcgacggaaggaaggtaatagtaaaagacgcaacctacggaacgcttccagtaaatcccgctcttgagattttttaa

SEQ ID NO: 55985 - protein, 216 aa, Aquifex aeolicus VF5
MLKIGVLVSGRGSNLQAIIDAIESGKVNASIELVISDNPKAYAIERCKKHNVECKVIQRKEFPSKKEFEERMALELKKKGVELVVLAGFMRILSHNFLKYFPNKVINIHPSLIPAFQGLHAQKQAVEFGVKFSGCTVHIVDESVDAGPVIVQAVVPVLPEDDENTLADRILKWEHKILPQTVQWFAQDRIIIDGRKVIVKDATYGTLPVNPALEIF

SEQ ID NO: 55986 - DNA, 567 bp, Bacillus halodurans C-125
  CDS (1)..(567): transl_table=11
atgaagcgagtagccatctttgcttccggtagcgggacgaatgccgaagcgattattcagtcacaaaaggcagggcagcttccctgtgaagtcgctcttttaatcacggataaacccggggcaaaagtggtggagcgtgtaaaggttcacgaaattcctgtctgtgcattagacccaaaaacgtatccatctaaggaagcgtatgaaatagaagttgtccagcagctaaaggaaaaacagatcgattttgttgtgttagcaggttatatgcgtctagtgggaccgacgttgcttggagcgtatgaggggcgaattgtgaacatccatccatcgctcttacctgcatttccaggactccatgcgatcgaacaagcgataagggcgaacgtgaaagtaacaggcgtcacgatccattacgtagatgaaggaatggatactgggccgattatcgcccaggaagccgtttcgattgaagaggaagatactcttgaaacgttaacaacgaaaattcaagcagtcgagcacaggctttatccagccacgttgcacaagctgctttcaaaataa

SEQ ID NO: 55987 - protein, 188 aa, Bacillus halodurans C-125
MKRVAIFASGSGTNAEAIIQSQKAGQLPCEVALLITDKPGAKVVERVKVHEIPVCALDPKTYPSKEAYEIEVVQQLKEKQIDFVVLAGYMRLVGPTLLGAYEGRIVNIHPSLLPAFPGLHAIEQAIRANVKVTGVTIHYVDEGMDTGPIIAQEAVSIEEEDTLETLTTKIQAVEHRLYPATLHKLLSK

SEQ ID NO: 55988 - DNA, 639 bp, Escherichia coli O157:H7 EDL933
  CDS (1)..(639): transl_table=11
  misc_feature (326)..(326): h is a, c or t
atgaatattgtggtgcttatttccggcaacggaagtaatttgcaggcaattattgacgcctgtaaaaccaacaaaattaaaggcaccgtacgggcagttttcagcaataaggccgacgcgttcggccttgaacgcgcccgccaggcgggtattgcaacgcatacgctcatcgccagcgcgtttgacagtcgtgaagcctatgaccgggagttgattcatgaaatcgacatgtacgcacccgatgtggtcgtgctggctggttttatgcgcattctcagcccggcatttgtctcccactatgccgggcgtttgctgaacattcacchttctctgctgccgaaatatcccggattacatccccatcgtcaggcgctggaaaatggcgatgaagagcacggtacatcggtgcatttcgtcaccgatgaactggacggtggcccggttattttacaggcgaaagtcccggtatttgctggtgatacggaggatgacgtcaccgcccgcgtgcaaacccaggaacacgccatttatccactggtgattagctggtttgccgatggtcgtctgaaaatgcacgaaaacgccgcgtggctggatggtcaacgtctgccgccgcagggctacgctgccgacgagtaa

SEQ ID NO: 55989 - protein, 212 aa, Escherichia coli O157:H7 EDL933
  misc_feature (109)..(109): The Xaa at location 109 stands for His, Leu, or Pro.
MNIVVLISGNGSNLQAIIDACKTNKIKGTVRAVFSNKADAFGLERARQAGIATHTLIASAFDSREAYDRELIHEIDMYAPDVVVLAGFMRILSPAFVSHYAGRLLNIHXSLLPKYPGLHPHRQALENGDEEHGTSVHFVTDELDGGPVILQAKVPVFAGDTEDDVTARVQTQEHAIYPLVISWFADGRLKMHENAAWLDGQRLPPQGYAADE

SEQ ID NO: 55990 - DNA, 669 bp, Xylella fastidiosa 9a5c
  CDS (1)..(669): transl_table=11
ttgacctcaccctcctcccctttacgcctcgccatcctggcctcaggacgtggcagcaatctgcaagccatccttgatgccatcgcgaccgaccgactgcatgccgaagtggttggagttttttccgatcgccccgacgcacccgcactcaccaaagtgttacctacgcaccgttggagtgcagatccacacgactcccctgatcgcatcaccttcgacacaacgctcagcgcagcgatcgccgccgtaacaccacactgggtcgtatgcgcaggctacatgcgcatcctcagcgcagcatttatagaacgcttccccaagcgaatccttaacatccacccctcactgcttcccaaacaccgcggcttacacacgcatgcacgcgcactggcagcaggcgacaccgaacacggtgccagcgtccatcttgttataccggaactagatgctggaacggtactggcccaggcagtagttcccatccttaccaatgacaccgccgaaacgttggccaaacgcgtgctagtacgcgaacatccactgctcgtcgccaccttggaactacttgcaaacggtcgcctgacggtcgacggaccaacaccgcaattagacactcagtacctgtttacaccactgcgcctagattcacagggaactctcacccgttga

SEQ ID NO: 55991 - protein, 222 aa, Xylella fastidiosa 9a5c
MTSPSSPLRLAILASGRGSNLQAILDAIATDRLHAEVVGVFSDRPDAPALTKVLPTHRWSADPHDSPDRITFDTTLSAAIAAVTPHWVVCAGYMRILSAAFIERFPKRILNIHPSLLPKHRGLHTHARALAAGDTEHGASVHLVIPELDAGTVLAQAVVPILTNDTAETLAKRVLVREHPLLVATLELLANGRLTVDGPTPQLDTQYLFTPLRLDSQGTLTR

SEQ ID NO: 55992 - DNA, 675 bp, Agrobacterium tumefaciens str. C58
  CDS (1)..(675): transl_table=11
atgatgagcgccgccttgtcgtccggtcgcaagcgtgtcgtcgttttcatctccggcggcggctccaacatggtgtcgctggccaaggcttgtcaggccgcggattttccggccgaaatcgcctgcgtgatctcggataaggcgtccgcgggcgggctggaaaaagcccgtgacctcggcattccgacgctggtgttcgaacgcaaaacctatgcaagcaaggccgaacatgaaggcgccattctggccgcacttggcgagatcgcgcctgatatcatctgccttgccgggtacatgcggctgatatcgggggatttcatcgccccctatgaaggccggatcatcaatatccacccttccctgctgccgctctttcccggtcttcacacccatcagcgcgccatcgacagcggcatgaagatttccggctgcaccgtgcatttcgtcaccgaaggcatggatgaaggcccaaccatcgctcaaggggcggtgccggtactttccggcgacacggccgagacgcttgcggcacgcatcctcaccgtcgagcaccagctttacccgcttacgttgaagcggcttgccgaaggcaaggttcggatggaagacggcaaagccgtctccacggacaatgaaagtaaatcagagtattccagcctgatttccgctttctaa

SEQ ID NO: 55993 - protein, 224 aa, Agrobacterium tumefaciens str. C58
MMSAALSSGRKRVVVFISGGGSNMVSLAKACQAADFPAEIACVISDKASAGGLEKARDLGIPTLVFERKTYASKAEHEGAILAALGEIAPDIICLAGYMRLISGDFIAPYEGRIINIHPSLLPLFPGLHTHQRAIDSGMKISGCTVHFVTEGMDEGPTIAQGAVPVLSGDTAETLAARILTVEHQLYPLTLKRLAEGKVRMEDGKAVSTDNESKSEYSSLISAF

SEQ ID NO: 55994 - DNA, 639 bp, Salmonella typhimurium LT2
  CDS (1)..(639): transl_table=11
atgaatattgtggtgctgatttccggcaatggaagcaatttacaggcgattatcgatgcctgcgaagcgaagaaaattaaaggcaccctcagggcagtattcagcaataaggccgacgcgttcggccttgaacgcgccagagaagccggtattccggcgcaagcgctgactgccgatcggtttgacagccgcgacgccttcgatcgcgagctgattcgcaagatagacgcgtatgcgcccgatgtggtcgtgctggccggttttatgcgtattctgagtccgatgtttgtcgcgcattactacgggcgtctgctgaacattcacccttccctgctaccaaaatatccggggttgcatacccatcgccaggcgctggaaaacggcgatgaggagcacggtacctcggtacatttcgtgacagacgaactcgacggcggcccggtcattctccaggcgaaggtgccggtttttgccaacgacagcgaagatgatatcaccgcacgcgtacagactcaggaacatgcgatttatccgctggtgattagctggtttgcgcaggggcgtctaaagatgcgcgataacgccgcctggctggacgggcgtcgtctgccgccgcaaggttatgcgtctgacgaataa

SEQ ID NO: 55995 - protein, 212 aa, Salmonella typhimurium LT2
MNIVVLISGNGSNLQAIIDACEAKKIKGTLRAVFSNKADAFGLERAREAGIPAQALTADRFDSRDAFDRELIRKIDAYAPDVVVLAGFMRILSPMFVAHYYGRLLNIHPSLLPKYPGLHTHRQALENGDEEHGTSVHFVTDELDGGPVILQAKVPVFANDSEDDITARVQTQEHAIYPLVISWFAQGRLKMRDNAAWLDGRRLPPQGYASDE

SEQ ID NO: 55996 - DNA, 723 bp, Nostoc sp. PCC 7120
  CDS (1)..(723): transl_table=11
gtgctgagtgtatattctttcccagcccccagtccccagtccccagcccctaattttgaattgtttatgaccctccgccctgattctacctttagccttgtttctcccagcattaatacatatcaattttctcatggcgctcctgtgaaactgggggtgatggcttctggtagtggtagcaattttgaggcagttgctcaagctattgaagaccagcaactcaatgcccaaatccaagttttaatttacaataatcccaccgctaaggcagcaactagagcagctaacagaggaataaaaacggttttgttaaaccaccgcgaatacaaaaatcgggaaattcttgatcaaaaaattgtggaaactctacgccaatatgatgtggaatggataattttagctggttggatgcgtgtggtgacatcggttttaattgatgcctttccccggaggattattaatattcaccctagtttgttacctagctttaagggtattcatgctgtagaacaagctttagaggctcaggtgaaaattacaggctgcacggtgcatttggtttctttagaagtggatagcgggccgattttgatgcaggcggccgtgccaatattacccgatgacacagcagagacactccacgccaggattcagattcaggaacaccgtatattaccacaggcgatcgctctggcgactcaaactaataggacttacgcataa

SEQ ID NO: 55997 - protein, 240 aa, Nostoc sp. PCC 7120
MLSVYSFPAPSPQSPAPNFELFMTLRPDSTFSLVSPSINTYQFSHGAPVKLGVMASGSGSNFEAVAQAIEDQQLNAQIQVLIYNNPTAKAATRAANRGIKTVLLNHREYKNREILDQKIVETLRQYDVEWIILAGWMRVVTSVLIDAFPRRIINIHPSLLPSFKGIHAVEQALEAQVKITGCTVHLVSLEVDSGPILMQAAVPILPDDTAETLHARIQIQEHRILPQAIALATQTNRTYA

SEQ ID NO: 55998 - DNA, 651 bp, Methanosarcina acetivorans C2A
  CDS (1)..(651): transl_table=11
atgcaaaaccctaatatatcactgtttcaatctaaaagctcgatgacggtaaagattgcagttctggtctcaggacggggctcaaatctccaggcgattatagacagcattgaaaagggctacataaaaaacgcggcagtcagtgtggttatctccaacaaagccgatgcttatgcgctcgaacgtgcagaaaaacatggaataagtgctgtttttcttgatcctgaagggcgtgatagagccggatacgacagggaaattctgaagatacttaaacagtatgatacggaccttctcctgcttgcaggctatttcaggctcctgggaagcgaaatcattgaggcatacaggcacaggatcctgaacatacacccttctcttcttccggctttcaaaggacttcatgcccagaaacaggcttttgagtatggtgtaaaggttgcaggctgcacagtacattttgtagatgagggactcgattccgggcccattatcatccagaaatgcgtgcctgtgctcccggaagataccgaagaaactcttactgccaggattctcgaacaggagcacattatctatcccgaagctgtcaggctctttgtcgagagtaagcttaaagttgagggtagaaatgtaataactcttaagtaa

SEQ ID NO: 55999 - protein, 216 aa, Methanosarcina acetivorans C2A
MQNPNISLFQSKSSMTVKIAVLVSGRGSNLQAIIDSIEKGYIKNAAVSVVISNKADAYALERAEKHGISAVFLDPEGRDRAGYDREILKILKQYDTDLLLLAGYFRLLGSEIIEAYRHRILNIHPSLLPAFKGLHAQKQAFEYGVKVAGCTVHFVDEGLDSGPIIIQKCVPVLPEDTEETLTARILEQEHIIYPEAVRLFVESKLKVEGRNVITLK

SEQ ID NO: 56000 - DNA, 648 bp, Streptomyces coelicolor A3(2)
  CDS (1)..(648): transl_table=11
gtggccgccaagcccgtggaccggcgagccaagcgcctcgtcgtgctggtctccggatccggcaccaacctccaggcgctcctcgacgagatcgccaccaccggggccgaggcctacggtgccgagatcgtcgcggtcggcgccgaccgcgacggcatcgaggggctcgcccgcgccgagcgggccggggtgacgaccttcgtccgcagggtcaaggactacgggacccgcgaggagtgggacgcggcactcgccgagtccgtcgcggcccacgagccggacctcgtcgtctcggccgggttcatgaagatcgtggggaaggagttcctcgcgcggttcggcgggcggttcgtcaacacccaccccgccctcctccccagctttccgggggcccacggcgtacgggacgcgctcgcgtacggcgccagggtcaccggctgcaccgtccacttcgtcgacgacggcgtcgacaccgggccgatcatcgcgcagggcgtggtggaggtccgggacgaggactacgaagacgaaggtgtcgctctgcacgagcgcatcaaggaagtcgagcgaaggctgctcgtcgatgtcgtggggcggctcgcccgcaacggctatcgcattgagggacgaaaggtagttatccagtga

SEQ ID NO: 56001 - protein, 215 aa, Streptomyces coelicolor A3(2)
MAAKPVDRRAKRLVVLVSGSGTNLQALLDEIATTGAEAYGAEIVAVGADRDGIEGLARAERAGVTTFVRRVKDYGTREEWDAALAESVAAHEPDLVVSAGFMKIVGKEFLARFGGRFVNTHPALLPSFPGAHGVRDALAYGARVTGCTVHFVDDGVDTGPIIAQGVVEVRDEDYEDEGVALHERIKEVERRLLVDVVGRLARNGYRIEGRKVVIQ

SEQ ID NO: 56002 - DNA, 648 bp, Thermosynechococcus elongatus BP-1
  CDS (1)..(648): transl_table=11
atgctcgccatgtccagtgaggctcttgttgtgccctcggcacctgagaatacccctacctgccgccccctgcgattgggggtgttggcctctgggagtggctccaattttgctgcccttgcggaggcgatcgctgccggtgaactagccgcccaaattcaagttctgatctacaacaatcccgatgcctttgtggcagagcgggcaaaacagtggcagatccccagtgtcctcctcaaccatcgccactatcccaaccgtgaaagccttgatgcagccattgtcgaaaccctgaaggcgcatgaagtagagtgggtggttatggccggttggatgcgcattgtcacccccgtactcctcaacgcctatccccagcgggtcattaacttgcaccccagtttgctccccagttttcggggactccgtgccgttgagcaagcccttgctgccggcgtcaaaattacgggctgtacggtgcatttggtggaggaggaagtggatagtggcccaattttagtgcaagcagcggtgcctgttctccctgatgatacaccgcaaaccctccatgcccgcattcaagtccaggaacatcgcattctcaagcaggcgatcgccgacattgccgcacggcaagcccaacgttcttag

SEQ ID NO: 56003 - protein, 215 aa, Thermosynechococcus elongatus BP-1
MLAMSSEALVVPSAPENTPTCRPLRLGVLASGSGSNFAALAEAIAAGELAAQIQVLIYNNPDAFVAERAKQWQIPSVLLNHRHYPNRESLDAAIVETLKAHEVEWVVMAGWMRIVTPVLLNAYPQRVINLHPSLLPSFRGLRAVEQALAAGVKITGCTVHLVEEEVDSGPILVQAAVPVLPDDTPQTLHARIQVQEHRILKQAIADIAARQAQRS

SEQ ID NO: 56004 - DNA, 654 bp, Pseudomonas putida KT2440
  CDS (1)..(654): transl_table=11
atgccgagcaagacctgcaatgtagtggtactgctgtcgggctccggcagcaacctgcaagccctgatcgacagctgccaagggcaggacagcccggtgcgtatccgcgcggtgctttccaaccgcgccgatgcctacggcctgcaacgcgccgcagcggccggcatcgacagcgtcgtgctcgaccacacccagttcgacggccgtgaagccttcgatgccgcgctaatggcgcgcatcgacggctttgccccggacctggtggtgctggccggtttcatgcgcatcctcagtggcggcttcgtgcgccactatcagggccgcctgctcaacatccacccgtcgctgctgcccaagtacaagggcctgcatacgcatcgccgggcattggaagctggcgacgccgagcatggctgcagcgtacacttcgtgactgaggaactcgatggcggcccactggtcgtacaggctgtggtaccggtggcgtctgatgacaccgtcgaaagcctggcacagcgggtacaccatcaggaacacctgatctacccactggcggtgcgctggttcgctgaagggcgcttgcgtcttggcgaacagggtgcattactggacggccagccactggcggccagcggtcacttgattcgatcctag

SEQ ID NO: 56005 - protein, 217 aa, Pseudomonas putida KT2440
MPSKTCNVVVLLSGSGSNLQALIDSCQGQDSPVRIRAVLSNRADAYGLQRAAAAGIDSVVLDHTQFDGREAFDAALMARIDGFAPDLVVLAGFMRILSGGFVRHYQGRLLNIHPSLLPKYKGLHTHRRALEAGDAEHGCSVHFVTEELDGGPLVVQAVVPVASDDTVESLAQRVHHQEHLIYPLAVRWFAEGRLRLGEQGALLDGQPLAASGHLIRS

SEQ ID NO: 56006 - DNA, 657 bp, Bradyrhizobium japonicum USDA 110
  CDS (1)..(657): transl_table=11
gtgatgaagcgccgcgtcgccattctgatttccggccgcggctccaacatggtcgcgctgatcaaggcagccagcgcgcgggattttccggcggaaatttccctcgtcatctcgaacaaggccgatgcaccggggctcgaacgggccagggcgagcggcgtgaacacgctggtgatcgagagcaagccgttcggcaaggatcgcgccggcttcgaggcggtgctgcaggccgcgctcgatcagcacggcatcgagctgatctgtcttggcggcttcatgcgcctgttcacggccgaattcaccaaggcctggtacgggcggatgctcaacatccatccctcgctgctgccgtccttccccggcctcgacccgcacggtcaggccctgcgcgccggcgtgaaactgtctggcgcgacggtgcacttcgtgatccccgagaccgatgccggcccgatcgtgatgcagggcgcggttcccgtcagcgaccacgatacagcggacacgctgtcggaacgcatcctcgaagtcgagcaccgcatctatccggccgcgctgcggctattggcgaccggcaaggtccagatcgagggcgatgtctgcaagacggcgggcagcggaccgtcggagaatttcctggtttcgcccgtggcgagctga

SEQ ID NO: 56007 - protein, 218 aa, Bradyrhizobium japonicum USDA 110
MMKRRVAILISGRGSNMVALIKAASARDFPAEISLVISNKADAPGLERARASGVNTLVIESKPFGKDRAGFEAVLQAALDQHGIELICLGGFMRLFTAEFTKAWYGRMLNIHPSLLPSFPGLDPHGQALRAGVKLSGATVHFVIPETDAGPIVMQGAVPVSDHDTADTLSERILEVEHRIYPAALRLLATGKVQIEGDVCKTAGSGPSENFLVSPVAS

SEQ ID NO: 56008 - DNA, 639 bp, Prochlorococcus marinus subsp. marinus str. CCMP1375
  CDS (1)..(639): transl_table=11
atgaattctattaatatcaaatctatcactagtcctaatattataagcttaccaagatttacaccaaaactaaaacttgcagtattagcctctggtaaaggtagtaacttaaaagcaataatagaagatattttatcaaaaagactagacgcagagattaaatgtctaatagttagtaatccaaattgcggagctatagaaatagctaataaacatttaataccagttaaagtagtaacctccaatgactttataaatagggagagtttagatcagcatttagttaatcttttacacgcttataatgttgaattagtcataatggctggctggatgagaatagttacacatatattaatcgactcatttaagaacaagataattaacattcatccttctttgctgcctagttttaaaggaaaagaagctgttaaaaatgctctaaataataaggttaaaattactggttgtacagttcacatagttgaagaagaagtggattcaggagaaatattaatacaatctgcagtacaagttaatacaggagacacagaggaactactacttaaaaggatacaatcacaagagcataagattattagtctaggtatagctatagcaggtcaaaggttacgttaa

SEQ ID NO: 56009 - protein, 212 aa, Prochlorococcus marinus subsp. marinus str. CCMP1375
MNSINIKSITSPNIISLPRFTPKLKLAVLASGKGSNLKAIIEDILSKRLDAEIKCLIVSNPNCGAIEIANKHLIPVKVVTSNDFINRESLDQHLVNLLHAYNVELVIMAGWMRIVTHILIDSFKNKIINIHPSLLPSFKGKEAVKNALNNKVKITGCTVHIVEEEVDSGEILIQSAVQVNTGDTEELLLKRIQSQEHKIISLGIAIAGQRLR

SEQ ID NO: 56010 - DNA, 654 bp, Bordetella bronchiseptica RB50
  CDS (1)..(654): transl_table=11
atgtccaatcccaagcgccgcctcgtcatcctgatttccgggcgcggcagcaacatgcaggccctggtgcaggcgtgccgcgggcagtcctggccggccgaagtggccgccgtgatcgccagccgcccggacgccgccggcctggattgggcgcgccagcaaggcatcgccacggcggccctctaccacaaggactaccccagccgcgaggcgttcgacgccgcgctggcccgggagatcgaccgccacgcgcccgattacgtgctgctggccggattcatgcgggtgctcacgccgggcttcgtcaatcactacgcgggccggctggtcaatatccatccttcgctgctgccggcgtttcccggcctgcatacgcatgcgcaggccctggccaccggcgtgcgcgcgcatggttgcacggtgcatttcgtgacgcccgtgctcgaccacggccccatcatcgcgcagggctgcgtgccggtgctggcgggcgatacgcccgaggcgctggccgggcgcgtgctcgaggtcgaacaccaggtctatccggcggcggcgcgctggctggccgaaggaagggtcagcctgaccgccgaccagcgcgtcgaagtcgccggcgagccgcagcgcctctttttctggccggcggcgtaa

SEQ ID NO: 56011 - protein, 217 aa, Bordetella bronchiseptica RB50
MSNPKRRLVILISGRGSNMQALVQACRGQSWPAEVAAVIASRPDAAGLDWARQQGIATAALYHKDYPSREAFDAALAREIDRHAPDYVLLAGFMRVLTPGFVNHYAGRLVNIHPSLLPAFPGLHTHAQALATGVRAHGCTVHFVTPVLDHGPIIAQGCVPVLAGDTPEALAGRVLEVEHQVYPAAARWLAEGRVSLTADQRVEVAGEPQRLFFWPAA

SEQ ID NO: 56012 - DNA, 723 bp, Prochlorococcus marinus str. MIT 9313
  CDS (1)..(723): transl_table=11
atgaacaacttagataaaaaggagatttgtctgaccagtgctgcttcgaatcctcttcagaacagttgctatgaaaaggatgcgaagcgatcgctgatctggccacccctccaggccagcccaaaattcaaccctcgcttaaatcttggcgtgatggcatcagggaatggcagcaattttgaagccctggttaaagccattcaaaattctcaacttgatgcttatatttccatattggtggttaacaaccctaattgtgaagcaagtctccgggccaaacggctaggtgtgccttgtgtcatccacgatcatcgcgaattcagtagtcgagaagaactggataaggccttggtaaagacattcactaaccatgctgtagaaggcgtggtgatggccggctggatgcgaatcgtcaccccaatcctgattgctgctttcccgaatcgccttattaatattcacccatctctgcttcctagctttcgcggtttagatgcggttgggcaagcacttaaagcgagagttgctatcagtggttgttccgttcacctggttacacctcaagtagatgacggtccggtgcttgcgcaagctgcagtgccagttttgagctcagacgaccatcagagcctcagcaaaaggatccagcgcatggagcatcaactgcttccattatctgttgctcttgcaggccagaattggagaaacgcagctcaaaattaa

SEQ ID NO: 56013 - protein, 240 aa, Prochlorococcus marinus str. MIT 9313
MNNLDKKEICLTSAASNPLQNSCYEKDAKRSLIWPPLQASPKFNPRLNLGVMASGNGSNFEALVKAIQNSQLDAYISILVVNNPNCEASLRAKRLGVPCVIHDHREFSSREELDKALVKTFTNHAVEGVVMAGWMRIVTPILIAAFPNRLINIHPSLLPSFRGLDAVGQALKARVAISGCSVHLVTPQVDDGPVLAQAAVPVLSSDDHQSLSKRIQRMEHQLLPLSVALAGQNWRNAAQN

SEQ ID NO: 56014 - DNA, 669 bp, Synechococcus sp. WH 8102
  CDS (1)..(669): transl_table=11
atgcccgcttttgcagaccctagccagcagatgtcatctgaccaggccctgattcatccatcgtcaggtggaccagccgatctcagcccaccgatcagagtgggcgtgatggcatcgggtaacggaagcaatttcgaggccttggcaacagcgatccgggatggacacatcaatgccgagatcgctctgttggtggtgaacaaccctggctgcggtgcccaacaacgggcaaaacggctcggcattccctggcaactgttcaatcatcggaactacgacagccgctcagcactcgaccgtgacctggtgcagcgattccaatcgcttggcgtggaaggaatcgtgatggccggctggatgcgcatcgtcaccaacgagttgattcaggccttcccagaccggctgatcaacatccatccatcgctgctgcccagcttccgggggcttgatggcgtcggccaggccctcaaggccggggtccggctcgctggttgcacggttcatctggtcacagaggacctcgatgccggtccgatcctggttcaggcagctgtgccggtgctggacactgacaatcacgacagcctgtcccggcggattcagcaacaggaacatcgcatcctgcccgctggcctgatgctggctgctgatcgctggcgtcagggataa

SEQ ID NO: 56015 - protein, 222 aa, Synechococcus sp. WH 8102
MPAFADPSQQMSSDQALIHPSSGGPADLSPPIRVGVMASGNGSNFEALATAIRDGHINAEIALLVVNNPGCGAQQRAKRLGIPWQLFNHRNYDSRSALDRDLVQRFQSLGVEGIVMAGWMRIVTNELIQAFPDRLINIHPSLLPSFRGLDGVGQALKAGVRLAGCTVHLVTEDLDAGPILVQAAVPVLDTDNHDSLSRRIQQQEHRILPAGLMLAADRWRQG

SEQ ID NO: 56016 - DNA, 594 bp, Gloeobacter violaceus PCC 7421
  CDS (1)..(594): transl_table=11
gtgctcgccgatgcggcgcgctcgggccggttgccagtcgaaatcgccgtactcgtctacaacaaccccggcgcctacgtcgccgatcgcgcccgcgccgcgggcatcgcggcagtcctactcgaccaccgcaaattcgtcagccgcgaagtactcgatgaggagattgtcgccaccctcgaagcccacggcgtcgaactggtggtgatggccggttggatgcgcaaggtgacggaggtgctgatcggccgctttgcagatcgcatcctcaacatccatccgagtttgctgcctgcctttcggggcgccaaagcgatcgagcaggccctcgactacggcgtcaaagtggcgggttgcacagtccatatcgtgcgcctcgaagtcgacgccggtccgattatcctgcaggcggcggaggcggtgcgcgaggacgacacccccgaaaccctggctgtgcgcatccacgcccacgaataccggatccttcccgaggcggtacggctttttgccgagggccgggtgcgcgtcgagggcaaccgcgcccgtattgttatcgatgaagtcgaaccgaccggttttgaagagcaactctag

SEQ ID NO: 56017 - protein, 197 aa, Gloeobacter violaceus PCC 7421
MLADAARSGRLPVEIAVLVYNNPGAYVADRARAAGIAAVLLDHRKFVSREVLDEEIVATLEAHGVELVVMAGWMRKVTEVLIGRFADRILNIHPSLLPAFRGAKAIEQALDYGVKVAGCTVHIVRLEVDAGPIILQAAEAVREDDTPETLAVRIHAHEYRILPEAVRLFAEGRVRVEGNRARIVIDEVEPTGFEEQL

SEQ ID NO: 56018 - DNA, 621 bp, Geobacter sulfurreducens PCA
  CDS (1)..(621): transl_table=11
atgattcaaccgcttgcagttggtgttctcgtttcgggcaatggctcgaatctccaggcgatcatcgaccggatcgaggatggctcgctcccggcgagaatagtctgcgtgatcagcaacaaagctgatgcctttggccttgagcgcgctagaaagcacggcgtacccgccatccatatcgatcacagggcccacggcggccgtgaatcctacgatgcggccctagtggaaaccctgcgctcccacggggtgcaactcgtcgtcctggcaggcttcatgcgcatcgttacgccggtgttgcttgacgccttccccaatgcggtcatgaatatccatcccgccctcctgcccgcctttcccgggctccacgcccaggctcaggcgctccggtacggagtcaagttctccggttgcactgtccactttgttgatgaagggaccgacacaggaccgatcatcatccaggcagccgtcccggtcatggatgatgacgatgaagcctccctttcggcccgtatccagagagaagagcaccgggcctatcccgaggctatccggctgtttgccgcgaaacgcctcaggatcgaaggaagaaaggtatccatacttcagggggcatga

SEQ ID NO: 56019 - protein, 206 aa, Geobacter sulfurreducens PCA
MIQPLAVGVLVSGNGSNLQAIIDRIEDGSLPARIVCVISNKADAFGLERARKHGVPAIHIDHRAHGGRESYDAALVETLRSHGVQLVVLAGFMRIVTPVLLDAFPNAVMNIHPALLPAFPGLHAQAQALRYGVKFSGCTVHFVDEGTDTGPIIIQAAVPVMDDDDEASLSARIQREEHRAYPEAIRLFAAKRLRIEGRKVSILQGA

SEQ ID NO: 56020 - DNA, 672 bp, Magnaporthe grisea 70-15
  CDS (1)..(672)
atggcagctcccatcaggatatccgtcctcgcctcaggcaacggctcaaacttccaagccctaattgacgccgtgcaaaagacacacgccatctcgcccgcgaccatcgtgcggctgattgcgaaccgcaagaacgcttacgcgctgacccgcgccgccgacgccggcatcccgaccgagtacttcaacctggtcgggaacgggttccaaaaggcgggcgagaaggaccccgaggcgaagcggcaggcgcgggaggcctacgacgctgcgctggccgcgctcgtgctcaaggacgagccggaactggtcgtgctcgccggctggatgcacgtcttctccgaggcgttcctacgcccgctcgaggccgccggcatcaagtgcatcaacctccacccggccctgcccggcaagtacgacggcgccaacgccatcggccgtgcgtaccaggacttcaaggacgggaacctggagggtggaaagacgggcatcatgatccactatgtcattgcccaggtcgatcggggagccccgatcatggttcaggagatcgagtgcagggagggagagacgttggaggagctcgagcagaggatacactcacatgagcatgagctcatcgtcaaggcgacggcacaggtcgtcaaggagattgccgagacgaagaagaggtag

SEQ ID NO: 56021 - protein, 223 aa, Magnaporthe grisea 70-15
MAAPIRISVLASGNGSNFQALIDAVQKTHAISPATIVRLIANRKNAYALTRAADAGIPTEYFNLVGNGFQKAGEKDPEAKRQAREAYDAALAALVLKDEPELVVLAGWMHVFSEAFLRPLEAAGIKCINLHPALPGKYDGANAIGRAYQDFKDGNLEGGKTGIMIHYVIAQVDRGAPIMVQEIECREGETLEELEQRIHSHEHELIVKATAQVVKEIAETKKR

SEQ ID NO: 56022 - DNA, 663 bp, Gibberella zeae PH-1
  CDS (1)..(663)
atgtccagccaggataactcaccatgtcggattcttgtcatggcctcaggctttggctctaatttccaagccatcatagatgcgatttcctctggatctctcccaaacagtcgtatcatttctctcatcgtgaaccgcaaaaggctacagggtgaaggcagcattccatgggaatacttcaacttgattagcggcgggttcctgaagaagggagagtcagatgagcagaaaattgtcgagggtcgtcaaaagtacgacgccgcattggcagagaagatcctatcagcagaggtgaagcctgaacttattgttcttgctggctggatgcacgttttctcgactgctttccttgatcccataaagaaggcgggcatcaacattattaacctccaccctgcgcttcctggagagtttgacggagctagtgccattgagcgagcctacgatgaattcaaggccggacgactaacacgctcgggtatcatggcccactacgtaattgctgaggtagacaggggtactcctatcctagtcaaagagattgagtggaagggtgagagtcttgaagagtataaggacaaggtacactctcatgagcatgagctgattgtgaacgcaacaaccaaggttgcgcaggagacagttcaaaagagggcatcatag

SEQ ID NO: 56023 - protein, 220 aa, Gibberella zeae PH-1
MSSQDNSPCRILVMASGFGSNFQAIIDAISSGSLPNSRIISLIVNRKRLQGEGSIPWEYFNLISGGFLKKGESDEQKIVEGRQKYDAALAEKILSAEVKPELIVLAGWMHVFSTAFLDPIKKAGINIINLHPALPGEFDGASAIERAYDEFKAGRLTRSGIMAHYVIAEVDRGTPILVKEIEWKGESLEEYKDKVHSHEHELIVNATTKVAQETVQKRAS

SEQ ID NO: 56024 - DNA, 753 bp, Prochlorococcus marinus str. MIT 9303
  CDS (1)..(753): transl_table=11
atgcagctggtcttctcgatcgtcaacaagatgaacaacttagataaaaaggagaattgtctgaccagcgcttcttcgcatcctcgtcagaacagttgctatgaaaaggatgcgaggcgatcgctgatctggccccccccccaggcccgccaaatattcaaccctcgcttaaatcttggcgtgatggcatcagggaatggcagcaattttgaagccctggttaaagccattcaaaattctcgacttgatgcccatatttccatattggtggttaacaaccctaattgtgaagcacgtcgtcgagctcaacgactaggtgtgccttgtgtcatccacaatcatcgtgaatttagtagtcgagaagaactggataaggccttggtaaagacattcagcaaccatgctgtagaaggcgtggtgatggccggctggatgcgaatcgtcacccctatcctgattgctgctttcccgaatcgccttattaatattcacccatctctgctacctagctttcgcggtttagatgcggttgggcaagcactaaaagcgagagttcctatcagtggttgttccgttcacctggttacacctcaagtagatgacggtccggtgcttgcgcaagctgcagtgccagtcttgagctcagacgaccatcagagcctcagcgaaaggatccagcgcatggagcatcaactgcttccactatctgttgctcttgcaggccagaattggagaaacgaagctcaaaattaa

SEQ ID NO: 56025 - protein, 250 aa, Prochlorococcus marinus str. MIT 9303
MQLVFSIVNKMNNLDKKENCLTSASSHPRQNSCYEKDARRSLIWPPPQARQIFNPRLNLGVMASGNGSNFEALVKAIQNSRLDAHISILVVNNPNCEARRRAQRLGVPCVIHNHREFSSREELDKALVKTFSNHAVEGVVMAGWMRIVTPILIAAFPNRLINIHPSLLPSFRGLDAVGQALKARVPISGCSVHLVTPQVDDGPVLAQAAVPVLSSDDHQSLSERIQRMEHQLLPLSVALAGQNWRNEAQN

SEQ ID NO: 56026 - DNA, 630 bp, Herminiimonas arsenicoxydans
  CDS (1)..(630): transl_table=11
atgagaagaatcgtcattctgatttccggacgcggcagcaatatggaagccattatccgggctgcacaagatgaaaaatggccggcgaagatcgtcgcggtagtcagcaaccgggccgatgcgagcggtttgcagtacgctgccgagcatggcattccagccatcgtggtgccgcacaaggactatgcgacgcgcgaagcattcgatgcggcgctgcaaagccgcatcgatgaattttctccggatctggtggtgctggccggattcatgcgtgtgcttaccagccgtttcgttgcgcattacgcaggccggatgttgaatattcatccgtcgctgctgccaagttttgtcggtttggcaacgcatcgtcaggctttggcagcgggcgtcaccattcacggtgcaaccgtacatttcgttactgccgatctggatcatggtcctatcgtggcgcaggcgacggtgccggtactgcccgacgatacagaaacaacattggctgcgcgcgtgctggagcaggagcacatcatttatccgcgtgtcatacgtgcttttgtcgaaggacgcgtagcgctgactgatggcattgcacacatggttccggacaatatcgagccatcgtctcactaa

SEQ ID NO: 56027 - protein, 209 aa, Herminiimonas arsenicoxydans
MRRIVILISGRGSNMEAIIRAAQDEKWPAKIVAVVSNRADASGLQYAAEHGIPAIVVPHKDYATREAFDAALQSRIDEFSPDLVVLAGFMRVLTSRFVAHYAGRMLNIHPSLLPSFVGLATHRQALAAGVTIHGATVHFVTADLDHGPIVAQATVPVLPDDTETTLAARVLEQEHIIYPRVIRAFVEGRVALTDGIAHMVPDNIEPSSH

SEQ ID NO: 56028 - DNA, 663 bp, Burkholderia vietnamiensis G4
  CDS (1)..(663): transl_table=11
atgaaaaaactcgtgatcctgatttccggtcgcggcagcaacatggaggccatcgtccgcgcgtgcgcgcaggaacgctggccggcccaggtcgccgccgtgatcgccaaccggcccgacgcggccggcctggcttttgccgcgtcgcacggcgtggcgaccgcggtggtcgaccatcgcgccttcgacggccgcgacagcttcgacgcggcgctggccgccgaaatcgaccgcttcgcgcccgatctcgtcgtgctggccggcttcatgcgcattctcacccccgatttcgtcagacgatatgagggccggctgctgaacatccatccgtcgctcctgccgagcttcaagggcgtgcacacgcatcagcaggcgctggacgccggcgtcgcgctgcacggcgtgaccgtgcatttcgtcagccccgaactcgacagcggcgcgatcgtcgcgcagggcgcggtgcccgtgctggccggcgacgacgccgcggcgctcgcgcagcgcgtgctggcggtcgagcacgtgctgtatccgcgtgcggtgcgctggttcgtcgaaggcagcctgcgcctcgagaacggccgggcagtggtggcgccgcaagaggcgcgctggattttcgcggatcaaccgcataccgaaacgagcgagggcgtatga

SEQ ID NO: 56029 - protein, 220 aa, Burkholderia vietnamiensis G4
MKKLVILISGRGSNMEAIVRACAQERWPAQVAAVIANRPDAAGLAFAASHGVATAVVDHRAFDGRDSFDAALAAEIDRFAPDLVVLAGFMRILTPDFVRRYEGRLLNIHPSLLPSFKGVHTHQQALDAGVALHGVTVHFVSPELDSGAIVAQGAVPVLAGDDAAALAQRVLAVEHVLYPRAVRWFVEGSLRLENGRAVVAPQEARWIFADQPHTETSEGV

SEQ ID NO: 56030 - DNA, 678 bp, Desulfovibrio vulgaris subsp. vulgaris str. Hildenborough
  CDS (1)..(678): transl_table=11
atgctgcgaatcgctgtgctggcttccggcaacggctcgaatcttcaggccatcctcgacaggattgcctctggcgcgctcgatgccgaggtgggcgtcgtcatctccaacaagccgcaggcccgtgcgcttgagcgtgcccgcagtgcgggagtgccgtcattggcactcgaccccgccgcatacgccgaccgcgaaagctacgatgccgccctcgtggaagccatccgtgccgccggggcacagtgtgtggtactcgccggctacatgcggctgctgaccccggtttttctggctgcctttccgggggcggtcatcaacatccacccttcgctgcttcccagttttcccggtttgcgcggggctggcgacgccctggactacggggtgcgccttgccggttgtaccgtgcatttcgtgaatgaggagatggacggcggcgctgtcatcgtgcaggctgccgtgcccgtcacgccgggtgaaccgctggacgacctcaaagcccgcatccatgccatggaacaccgcatctacccgcaggccctgcaatggcttgcgcaggggcgcctgcgtgtggaggggcgttgcgttcatgtcgccccgccggatagtggtgtggtgcctgcggcggctggcggggcgtggctggtgagtccgccccttgaaccgggattctga

SEQ ID NO: 56031 - protein, 225 aa, Desulfovibrio vulgaris subsp. vulgaris str. Hildenborough
MLRIAVLASGNGSNLQAILDRIASGALDAEVGVVISNKPQARALERARSAGVPSLALDPAAYADRESYDAALVEAIRAAGAQCVVLAGYMRLLTPVFLAAFPGAVINIHPSLLPSFPGLRGAGDALDYGVRLAGCTVHFVNEEMDGGAVIVQAAVPVTPGEPLDDLKARIHAMEHRIYPQALQWLAQGRLRVEGRCVHVAPPDSGVVPAAAGGAWLVSPPLEPGF

SEQ ID NO: 56032 - DNA, 627 bp, Symbiobacterium thermophilum IAM 14863
  CDS (1)..(627): transl_table=11
atgatccgcatcggcgtgttgatctccggctcgggcaccaacctgcaggcgatcctggacggctgccgggaggggcgcatccccggccgggtggcggtggtcatctccgaccgggccgatgcctacgggctggagcgggcccgccgggccggggtcgatgccctgcacatggacccggccgcgtacccgagccggacagcctttgacgcggcgctggcggagcggctgcaggcctacggggtcgatctggtctgcctcgcggggtacatgcggctggtccgcgggccgatgctcacggcgttcccgaaccgcatcctcaacatccacccgtcgctgctgccggccttcccggggctggaggcccagcggcaggccctggagcacggggtgaaggtggcgggttgcacggtccacttcgtcacggcgggcgtggacgaggggcccatcatcctgcaggccgccgtgccggtgctggagggggacacggtggaggacctgcgccggcgcatcctggccgaggagcaccgcatctaccccgaggcgatccggctgttcgcggaggggcggctggtgatcgaggggcgccgggtgcggatcctcgaccgggcggaggctccccgcgggtaa

SEQ ID NO: 56033 - protein, 208 aa, Symbiobacterium thermophilum IAM 14863
MIRIGVLISGSGTNLQAILDGCREGRIPGRVAVVISDRADAYGLERARRAGVDALHMDPAAYPSRTAFDAALAERLQAYGVDLVCLAGYMRLVRGPMLTAFPNRILNIHPSLLPAFPGLEAQRQALEHGVKVAGCTVHFVTAGVDEGPIILQAAVPVLEGDTVEDLRRRILAEEHRIYPEAIRLFAEGRLVIEGRRVRILDRAEAPRG

SEQ ID NO: 56034 - DNA, 645 bp, Anaplasma marginale str. St. Maries
  CDS (1)..(645): transl_table=11
gtggcagctgtagaccgtcttagacttggtgtgctgatctccggtagggggtcgaacatggcagcaatagctcaagcgtgtttggataacacgttccccgcagttgtggagtgcgtaatatcaaacaaccccaaagccgcggggctctccatcgcgaatgactatgggttacgttcattcgttgtcgagagaaagcctttagatgttgagcgaattgatcaaattttgacggatcacaaagtagatttggtatgcttggcaggttttatgagcatactagagggagggttcgttcaaaaatggcatcgcaagatgatcaatattcacccatcgctgctgccatctttcaaaggtatgcgggcgcaagaacaggccttaagagctggggttaaagtcgctggatgtactgtgcattacgtttatccagagctggacgccgggccgataataatgcaggccgcagttccggtcatgaacaacgacagcgtagaaagcctcgcggacagaatactggctgcggagcacgtgtgctaccctgaggcagtacggcttatatccctgggtaaaataagcctagacagtaatgacgtagtcgaggcaaatgacggcagtaggctatttctcttccccaccagcgtttcatag

SEQ ID NO: 56035 - protein, 214 aa, Anaplasma marginale str. St. Maries
MAAVDRLRLGVLISGRGSNMAAIAQACLDNTFPAVVECVISNNPKAAGLSIANDYGLRSFVVERKPLDVERIDQILTDHKVDLVCLAGFMSILEGGFVQKWHRKMINIHPSLLPSFKGMRAQEQALRAGVKVAGCTVHYVYPELDAGPIIMQAAVPVMNNDSVESLADRILAAEHVCYPEAVRLISLGKISLDSNDVVEANDGSRLFLFPTSVS

SEQ ID NO: 56036 - DNA, 633 bp, Corynebacterium glutamicum ATCC 13032
  CDS (1)..(633): transl_table=11
atgatggttccgaggccgaagaccgttaacatatctgttgtgaattctgactctacgaccaccattgtcgtgctagcttccggaacaggcaccctccttcagtcactcattgaagcgcaaggtacctattcgatcgtgggcgttgtctctgacgtcgaatgccctgcactttccagagccgcagatgcaggtattgatactgcagttgttccgcttggaaaagatcgtgcacagtggaaccacgagcttgcagacgcagttgcagtaagcgacccagatttggtggtctctgcgggattcatgaaaattttgggcgaaggtttcctctcaaggttcccgtcccgcatcatcaacacccacccagctttattgccttctttccctggtgcccacgcggttcgcgatgctttggcatacggtgtgaaagtgtcaggttcgacagttcaccttgtcgatgctggtgtggataccggcccaattattgctcaacgagcagtgccggtagaagtgaatgatgatgaatccagcctgcatgaaagaatcaagcaggttgagcgtaaactcattgtagaagtcctgaacagcgtggaattttcgcgtcagggtggcgtacaactcaactggagaggctaa

SEQ ID NO: 56037 - protein, 210 aa, Corynebacterium glutamicum ATCC 13032
MMVPRPKTVNISVVNSDSTTTIVVLASGTGTLLQSLIEAQGTYSIVGVVSDVECPALSRAADAGIDTAVVPLGKDRAQWNHELADAVAVSDPDLVVSAGFMKILGEGFLSRFPSRIINTHPALLPSFPGAHAVRDALAYGVKVSGSTVHLVDAGVDTGPIIAQRAVPVEVNDDESSLHERIKQVERKLIVEVLNSVEFSRQGGVQLNWRG

SEQ ID NO: 56038 - DNA, 651 bp, Pseudomonas syringae pv. syringae B728a
  CDS (1)..(651): transl_table=11
atgccagccatctgcgaagtcgtggtgctgctgtccggcaccggcggcaacctgcaagcgatgatcgacagcttcaaggacggggccagccccgtccgcatccgcgcggtgatatccaaccgcgcagatgcgttcggcctgcaacgcgcccaggacgcaggcatcgaaacctgcgtactggatcacaccgcgtacgacggccgtgaggccttcgatgcagcgctgatcgaacggatcgacgcctttcagccacagttggtggtactggccgggttcatgcgcattctcagcgcagggttcgttcgccactatcatggccgtctgctgaatatccacccttccctgctgccgcgctacaaaggcttgcacacgcacaagcgtgcgctggaggccggcgacgccgagcatggctgcagcgtgcatttcgttaccgaggaactcgatggcggcccactggtcgtacaggcagttatttcggtacagttgcacgacacgcccgcaacgctcgcgcaacgggtccatgttcaagagcaccgtatttacccactggccattcgctggtttgccgaaggccgactgagccttggtgaacaaggtgcgttactcgatagccagttactcccggccagcggccatctgattcgacattag

SEQ ID NO: 56039 - protein, 216 aa, Pseudomonas syringae pv. syringae B728a
MPAICEVVVLLSGTGGNLQAMIDSFKDGASPVRIRAVISNRADAFGLQRAQDAGIETCVLDHTAYDGREAFDAALIERIDAFQPQLVVLAGFMRILSAGFVRHYHGRLLNIHPSLLPRYKGLHTHKRALEAGDAEHGCSVHFVTEELDGGPLVVQAVISVQLHDTPATLAQRVHVQEHRIYPLAIRWFAEGRLSLGEQGALLDSQLLPASGHLIRH

SEQ ID NO: 56040 - DNA, 723 bp, Psychrobacter arcticus 273-4
  CDS (1)..(723): transl_table=11
atgtcagctacacctttatcgttaaatgcctctttaacatcagccaatacacgcctagacagcaagcctttgcgcattgctgtcttggtatctggtagtggtagcaacttgcaagtattgattaatgccatgcaagcaggcgcgctaccgattgagattgtcggcgtgattagcaaccgtgaagatgcttatgccatcacacgggcaaaagatgctgacattcccgtggcggcgctatctcacgtggcgagcggcaaacgcatgggcatcaaaacctttgagacccatgctagcgcgcagctaacagcttggcagcctgatttgattgtcttggcaggttttatgcgtgtccttagcggtacgtttatcgacagcatgccagtgcctatgatcaatctgcacccttctctgttaccttgttataaggggcttgatactcatcagcgtgtcatacaggctggcgagcggcatcatggttgtagtatccatgttgtcacagcagagcttgatgcagggcaagtgctcactcaagcagtattagcactgagtgtaaaggatacaactgcgagcctgcaagcgcgtgtgcaaacgcttgagcatcaattgctgccttggacgatattactgattgctaaaggtgtcatagtgcttaataatcaggcgagtcatcatcagcctgattatttacccactctaccttttaagctattttttgaagattga

SEQ ID NO: 56041 - protein, 240 aa, Psychrobacter arcticus 273-4
MSATPLSLNASLTSANTRLDSKPLRIAVLVSGSGSNLQVLINAMQAGALPIEIVGVISNREDAYAITRAKDADIPVAALSHVASGKRMGIKTFETHASAQLTAWQPDLIVLAGFMRVLSGTFIDSMPVPMINLHPSLLPCYKGLDTHQRVIQAGERHHGCSIHVVTAELDAGQVLTQAVLALSVKDTTASLQARVQTLEHQLLPWTILLIAKGVIVLNNQASHHQPDYLPTLPFKLFFED

SEQ ID NO: 56042 - DNA, 699 bp, Prochlorococcus marinus str. NATL2A
  CDS (1)..(699): transl_table=11
atgaatcaagataataaagaatattgcgaaagtaacttatttaatggtttaaatggacatagcctaataagtccaattgaatcagtaagtaattttattgagccaaagattagattaggtatccttgcatctggtaatggatcaaattttgaattcattattaaatctattcaaaacaatgaacttaatgcagaagtatctatattaattgttaataatcctaattgcttagcaatagagaaggcaattaaatatgatataccctatgtaattattaatcatagagattgtaattcgagattagaacacgataaattggttatgaataaactagaggaactatctgtagaactagttgttatggctgggtggatgagaattgttggtgaagaaataattaataagttcaataatagactaattaatatacatccatcacttttaccatcttttaaaggcattgatgcaatacagcaggcaatggacaaaagggtaactattactggctgtacagttcactatgttcaaaaggaggttgattcaggctcaataattattcaagcggcagtccctcttaaagaaaaagatagtatagaaaccttaaaaaaaagaattcaagatatggaacatataatattacctttagcgattgctaaagtagcagatgaaattagaactagtttcaaggataaaaagtaa

SEQ ID NO: 56043 - protein, 232 aa, Prochlorococcus marinus str. NATL2A
MNQDNKEYCESNLFNGLNGHSLISPIESVSNFIEPKIRLGILASGNGSNFEFIIKSIQNNELNAEVSILIVNNPNCLAIEKAIKYDIPYVIINHRDCNSRLEHDKLVMNKLEELSVELVVMAGWMRIVGEEIINKFNNRLINIHPSLLPSFKGIDAIQQAMDKRVTITGCTVHYVQKEVDSGSIIIQAAVPLKEKDSIETLKKRIQDMEHIILPLAIAKVADEIRTSFKDKK

SEQ ID NO: 56044 - DNA, 666 bp, Ralstonia eutropha JMP134
  CDS (1)..(666): transl_table=11
atgaaaaaaatcgtaatcctgatttcagggcgtggctccaatatggaagccatcgtccgggcatgcgcggccgggggttggccggcgcgcattgccgcagtcatttccaaccggccggatgccgccggactgcagtttgccaaggaccacggcattgccgccggcgtggtcgatcatcgccagcatcccgaccgcgccagcttcgatgcggcgctggccgaggccattgatgcctacgaacccgatctggtcgtgctggccggctttatgcgcatcctgacgaccggctttgtcgatcgttatgccggccgactgctcaatatccatccgtcgctgctgccgtgcttcccgggtctgaacacccataagcaggcgctcgacgcaggcgtgaagctgcacggtgcgaccgtgcatttcgtgaccccggaactcgatcacggcccgatcgtgatccaggcgggcctcgatgtattgccaaacgatactccagagagcctcgccgcacgcctgctcgactgcgagcatgtcatttatccccgcgccgtccagtggttcgtcgaaggacgcctgcaggtgcaaaacggggtcgtacacgtcaatccggccgagccgcaactgcttatggccatctccgccggtgtaccggcggcaggagcaaagccatga

SEQ ID NO: 56045 - protein, 221 aa, Ralstonia eutropha JMP134
MKKIVILISGRGSNMEAIVRACAAGGWPARIAAVISNRPDAAGLQFAKDHGIAAGVVDHRQHPDRASFDAALAEAIDAYEPDLVVLAGFMRILTTGFVDRYAGRLLNIHPSLLPCFPGLNTHKQALDAGVKLHGATVHFVTPELDHGPIVIQAGLDVLPNDTPESLAARLLDCEHVIYPRAVQWFVEGRLQVQNGVVHVNPAEPQLLMAISAGVPAAGAKP

SEQ ID NO: 56046 - DNA, 627 bp, Ehrlichia canis str. Jake
  CDS (1)..(627): transl_table=11
atggtacctcttagactaggcattttaatttctggtaggggttctaatatgcatgcattgattaatgcttgtatgcaagatgattttcctgctgaaatatcttgtgtgatttcaaataatcctaatgcgaatggtttgttgattgcacaaaggaataatattaagacttttgtaattcaaggtcgccctttagattttgatgctattgataatatacttaaagaacataaagtagatttaatatgccttgcagggtttatgagtattgtgcctgagaaatttatcaataagtggtttcataaagttattaatatacatccttcacttttaccatcttttaaaggattaagtgcacaagctcaagcattgaaggctggagttaagattgcggggtgtacagtacattatgtatatcctgagcttgatgctggtcctattattatacaggcagcagttcctgtattttcatcagatactgttacagatctttctaataggattttacagatggaacatatttgttatcctaaagctgtaaaattaatagcattaaatcaagtgcaacttgatgaaaatttaactacatcagatgagtcattgcaattgttctacagtgaagctatttga

SEQ ID NO: 56047 - protein, 208 aa, Ehrlichia canis str. Jake
MVPLRLGILISGRGSNMHALINACMQDDFPAEISCVISNNPNANGLLIAQRNNIKTFVIQGRPLDFDAIDNILKEHKVDLICLAGFMSIVPEKFINKWFHKVINIHPSLLPSFKGLSAQAQALKAGVKIAGCTVHYVYPELDAGPIIIQAAVPVFSSDTVTDLSNRILQMEHICYPKAVKLIALNQVQLDENLTTSDESLQLFYSEAI

SEQ ID NO: 56048 - DNA, 642 bp, Thiobacillus denitrificans ATCC 25259
  CDS (1)..(642): transl_table=11
gtgagttgccgcgtcgtcgtcctgttgtcggggcgcggcagcaacttccgcgcgatcgccgaggccggactgccgatcacgatcgcggccgtcatcagcaaccgccccgacgccgcggggctcgcctacgcgcgtgaccgcggcattgcggtctgcgcgctcgaccaccgtgcgcatgccgaccgcgaaagcttcgatcgcctgctggccgaggaaatcgagcgccaccgccccgccctcgtcgtgctcgcgggctacatgcgcatcctgagcccggccttcatcgcccgcttcgaaggccggctgctcaacatccatccctcgctgctgccgatgttcccgggcctgaaaacgcacgagcgcgcgctcgccgaaggcgtcaaggtgcacggctgcacggtgcatttcgtcacggccgatctcgaccacgggccgatcgtgatccaggccgcggtgccggtgcgcgccgacgacacaccggagatcctcggcgcgcgcgtattgcagcaggagcatcgcatctaccccgaggccgtccgctggttcgccgagggacggctcgcgatcgaggacgggcgcgtaaacttgcgcggcgatccggcgtcacagtccgtgttggcgagcgcagaccagaaggcgtga

SEQ ID NO: 56049 - protein, 213 aa, Thiobacillus denitrificans ATCC 25259
MSCRVVVLLSGRGSNFRAIAEAGLPITIAAVISNRPDAAGLAYARDRGIAVCALDHRAHADRESFDRLLAEEIERHRPALVVLAGYMRILSPAFIARFEGRLLNIHPSLLPMFPGLKTHERALAEGVKVHGCTVHFVTADLDHGPIVIQAAVPVRADDTPEILGARVLQQEHRIYPEAVRWFAEGRLAIEDGRVNLRGDPASQSVLASADQKA

SEQ ID NO: 56050 - DNA, 657 bp, Anabaena variabilis ATCC 29413
  CDS (1)..(657): transl_table=11
atgaccctccgctctgattctacctttagccttgtttctcccagcattaatacacaccaattttctcatggcgctcctgtgaaactgggggtaatggcttctggtagtggtagcaattttgaggcagttgctcaagctattgaagaccagcaactcaatgcccaaatccaagttttaatttacaataatcccacggctaaagcagcaactagagcagctaatagaggaatagaaacggttttgttaaaccaccgggaatacaaaaatcgggaagttcttgatcaaaaaattgttgaaactctacggcaatatgatgtggaatggatagttttagctggttggatgcgtgtggtgacatcggttttaattgatgcctttccccggaagattattaatattcaccctagtttgttacctagttttaaaggcattcacgctgtggaacaagctttagaggctcaggtaaaaattacaggctgcactgtgcatttagtttctctagaagtggatagcgggccgattttgatgcaggcggccgtgccaatattaaccgatgacacagcagaaacactccacgccagaattcagattcaggaacaccgtatattaccacaggcgatcgctctggcgactcaaaataataggacttacgcatga

SEQ ID NO: 56051 - protein, 218 aa, Anabaena variabilis ATCC 29413
MTLRSDSTFSLVSPSINTHQFSHGAPVKLGVMASGSGSNFEAVAQAIEDQQLNAQIQVLIYNNPTAKAATRAANRGIETVLLNHREYKNREVLDQKIVETLRQYDVEWIVLAGWMRVVTSVLIDAFPRKIINIHPSLLPSFKGIHAVEQALEAQVKITGCTVHLVSLEVDSGPILMQAAVPILTDDTAETLHARIQIQEHRILPQAIALATQNNRTYA

SEQ ID NO: 56052 - DNA, 630 bp, Carboxydothermus hydrogenoformans Z-2901
  CDS (1)..(630): transl_table=11
atgttaaacttaggggttttggcttcgggacgggggagtaactttcaggcgattattgatgcgattgcgtggggagttttgccggcaaaaattaaagtgctggtgaccgataatcctgaagcttacgctatcgaacgggccaggcgggcaggtataccctggcattactttgacccgaaaggttttaaaaataaagaggaatacgaaaaggagatagtgaaaaccttactttcctatgaagttgatacggtgtgtcttgcgggctacatgcgcttaattggcaaacctttactttcttcttttcccatgaggattattaatatccatccggcgctgctaccggcgttccccgggcttcatgcccaaaagcaggctcttgattacggggtgaaaattgccggctgtaccgtgcattttgtcgatgaggggatggataccggccccattattttgcaggcagcggttccggtgtacgatgacgacagtgaggaaagcttaagtgagcggatcttagaacaggaacaccgaattttggtagaggcgcttaggcttttaagtgaaaaccgcttattggtagaaggacggcgggtaagaatcttgccggacgggggtgaaggacatgggaagtaa

SEQ ID NO: 56053 - protein, 209 aa, Carboxydothermus hydrogenoformans Z-2901
MLNLGVLASGRGSNFQAIIDAIAWGVLPAKIKVLVTDNPEAYAIERARRAGIPWHYFDPKGFKNKEEYEKEIVKTLLSYEVDTVCLAGYMRLIGKPLLSSFPMRIINIHPALLPAFPGLHAQKQALDYGVKIAGCTVHFVDEGMDTGPIILQAAVPVYDDDSEESLSERILEQEHRILVEALRLLSENRLLVEGRRVRILPDGGEGHGK

SEQ ID NO: 56054 - DNA, 561 bp, Synechococcus sp. CC9605
  CDS (1)..(561): transl_table=11
atggcatctggaagcggcagcaacttcgaggccgtggtccaggcgattcaggcgggggatctcaacgcgcggatccagcggctggtggtgaacaatccgggctgtggtgcccagcagcgggcggagcgtcttggcattcctgtatcggtgctcgaccatcgcaggatcaaggaccggcgcgagctggacggcgaactggtgcgcctgtttcgcgccgaccaggtggagctggtagtgatggcggggtggatgcggatcgtcaccaaggtgttggtcagcggctattccgatcgtctgatcaacatccacccctcactgctgcccagcttccgtggcatggatgccatcgggcaggccctgcaggccggggtgaaggtcaccggctgcacggtgcacatcgtcaccgaggaactggatgctggcccgattctggcccaggcagccgttcccgttcttgatggggatgaccacgccaggctcgcccaacggattcaggaacaggaacacctgctcctccccagggcattggctgagctgaagccaacctggcgtcagggatag

SEQ ID NO: 56055 - protein, 186 aa, Synechococcus sp. CC9605
MASGSGSNFEAVVQAIQAGDLNARIQRLVVNNPGCGAQQRAERLGIPVSVLDHRRIKDRRELDGELVRLFRADQVELVVMAGWMRIVTKVLVSGYSDRLINIHPSLLPSFRGMDAIGQALQAGVKVTGCTVHIVTEELDAGPILAQAAVPVLDGDDHARLAQRIQEQEHLLLPRALAELKPTWRQG

SEQ ID NO: 56056 - DNA, 621 bp, Geobacter metallireducens GS-15
  CDS (1)..(621): transl_table=11
atgactgatcttcttactatcggcgttcttgtctcaggaaacggctctaacctccaggccatcattgaccggatcgaggacggtagcctcccagcccgaattgcctgcgtcatcagcaacaaggccgatgcctatgctttggaccgggcgaagtgccacggtatcaccgtccacgtcctcgaccacaggatccatgcgggccgtgaatcgtacgacgcagccctggttgaactgcttcgctcccacggggtgcgcctcgtggtgctggccggcttcatgcggatcgttaccccggtccttattggagcatttccccatgcaatcatgaacatccatccggcgttacttccggcattccctggccttcacgcccaacgtcaggctttgcagtacggtgtcaaagtctctgggtgcacggtgcatttcgttgatgaaggaaccgacactggaccgattattattcaagccgtcgtaccggttctcgacgatgacaccgaggatacgctatcggcccgcatccagaaggaagagcaccacatctaccctgaagcggtcaatctctttgcccagggccgcctcaccgtcgacgaccggaaggttatcatcgcgccggcatcctga

SEQ ID NO: 56057 - protein, 206 aa, Geobacter metallireducens GS-15
MTDLLTIGVLVSGNGSNLQAIIDRIEDGSLPARIACVISNKADAYALDRAKCHGITVHVLDHRIHAGRESYDAALVELLRSHGVRLVVLAGFMRIVTPVLIGAFPHAIMNIHPALLPAFPGLHAQRQALQYGVKVSGCTVHFVDEGTDTGPIIIQAVVPVLDDDTEDTLSARIQKEEHHIYPEAVNLFAQGRLTVDDRKVIIAPAS

SEQ ID NO: 56058 - DNA, 630 bp, Synechococcus elongatus PCC 7942
  CDS (1)..(630): transl_table=11
atgtcgagtctcaccgtgcccgatcgcttccctactgagtcctcaaccgcgatcgccttaggggttctggcctctggcaatggcagcaattttgaagccctggcgcaggcgatcacggcagatcagctgcaggcggagattcggctgttgatctacaacaatcctgatgcttatgtgcgccagcgagctgagcggttggggattcccgccttgctcctagatcatcgccagtttgccagtcgcgaggatttggatcaggcgatcattacggcgtttcgcaatcgcggcgtcgagtggatagcgatggcaggttggatgcgactggtcacggaaacgctgattcaggcctttcccgagcgaattatcaacatccaccccagcttgctgcctagctttaagggaatccgagctgtggagcaggcgatcgcggccaaggtgcggatcagtggctgtactgcccacttagtcacgctcgatgtggacagcggcccgattttggtgcaagcggctgtgcctgtattgccggacgatacggtcgatagtctccagcagcggatccaagtggaagagcataagattttgccgctggcgatcgcccttgctgctgcgcgatcgcccctgccggtttag

SEQ ID NO: 56059 - protein, 209 aa, Synechococcus elongatus PCC 7942
MSSLTVPDRFPTESSTAIALGVLASGNGSNFEALAQAITADQLQAEIRLLIYNNPDAYVRQRAERLGIPALLLDHRQFASREDLDQAIITAFRNRGVEWIAMAGWMRLVTETLIQAFPERIINIHPSLLPSFKGIRAVEQAIAAKVRISGCTAHLVTLDVDSGPILVQAAVPVLPDDTVDSLQQRIQVEEHKILPLAIALAAARSPLPV

SEQ ID NO: 56060 - DNA, 618 bp, Moorella thermoacetica ATCC 39073
  CDS (1)..(618): transl_table=11
atggttgcgtcaactttacccattggcattctggtttccggccgcggcagcaacatggaggccattgccgctgctatagaggctggggaggtgccggcccgcatccaggcggtcataagcgaccggccggaggcccgcgccctggagctggcccgggaacgggggttgaaagccttctgcctcgcgcccggggaatatccttcacggcaggcctatgacctggccctggcgacggccctgaaaaaagagggggtggaactggtagccctggccggttttatgcgcctcctgggccgggagtttctggaacagttcccgggagcggtcatcaacatccacccggccctgttgcctgctttcccggggcttaacgcccagcgtcaggccctggagtacggcgtcaagttttccggctgcaccgtccactttgtcgacgccggcatggacaccggccccatcatcgcccaggccgtagtaccggtccggaacgatgataccccggaaaccctggccgcccgcatcctggcggaggagcatcgcctctacccccgggtgatcaagtggttggccgaaggccgggtagaactccggggccggcgggtaatagtaagaatttga

SEQ ID NO: 56061 - protein, 205 aa, Moorella thermoacetica ATCC 39073
MVASTLPIGILVSGRGSNMEAIAAAIEAGEVPARIQAVISDRPEARALELARERGLKAFCLAPGEYPSRQAYDLALATALKKEGVELVALAGFMRLLGREFLEQFPGAVINIHPALLPAFPGLNAQRQALEYGVKFSGCTVHFVDAGMDTGPIIAQAVVPVRNDDTPETLAARILAEEHRLYPRVIKWLAEGRVELRGRRVIVRI

SEQ ID NO: 56062 - DNA, 672 bp, Syntrophus aciditrophicus SB
  CDS (1)..(672): transl_table=11
ttgattatgaacagaaagctgcctattggtgtccttgtctccggaagcggttcaaacctgcagtccatcattgatcacattgagcggggtctacttggtgcggagatcaaggtggtgatcagcaacgtaccagatgcctatgccttggaacgggcccgaaaacatcaccttcccactctcgttattcgtcatgaagattttgaaacaagggaagcattcgacgcggaaattgtccgtgtctttaaatccgcagatgttgagcttgtcgttatggccggttttatgagaattatcactcctgttttacttgatgcctatccgtacagggtcatgaacattcaccctgcccttctgccttcattccggggcatgaacgcgcagcgtcaggctgtcgattacggtgtccgattttcaggatgcacggttcattttgtcgaccaaggcgttgattccggtcctatcatcattcaggcggttgtccccgttcttgatgaagatacggaagaaaccctttctgcaaggattttaaaagaggaacaccgaatttatccccaagccattcagttttttgtcgaaggacgaatttctgtcaataatcgcagggtaagaattcgagacggaaaatgtgacgaattcttaacagttcataaccctgccctttccggattctaa

SEQ ID NO: 56063 - protein, 223 aa, Syntrophus aciditrophicus SB
MIMNRKLPIGVLVSGSGSNLQSIIDHIERGLLGAEIKVVISNVPDAYALERARKHHLPTLVIRHEDFETREAFDAEIVRVFKSADVELVVMAGFMRIITPVLLDAYPYRVMNIHPALLPSFRGMNAQRQAVDYGVRFSGCTVHFVDQGVDSGPIIIQAVVPVLDEDTEETLSARILKEEHRIYPQAIQFFVEGRISVNNRRVRIRDGKCDEFLTVHNPALSGF

SEQ ID NO: 56064 - DNA, 654 bp, Desulfitobacterium hafniense Y51
  CDS (1)..(654): transl_table=11
gtgctttgtcttaggagaggtaagcgggcaaagcgaaggagtgagttatctttgatgcggatcggagtgcttgcgtcagggcgcgggagtaatttgcaagccttgattgaagcctggaagcttggcgaattaaacggggaactggtggctgtgggttcggatcatgaagaggccctggctctcaaaagagcggaagaggctggaataccccatggtgcctttcccttgagccggttttcttcccgccaggagcaggagaaagcgatcctgacctggctgcgggaacaaaaggtggagattttggtcttagccggatttatgagggttttaagcaaggagtttctccaggatattcagattcctgtactcaatatccacccctcccttttgccctctttccaaggattgcatgctcaaaggcaagcccttgactacggggtcaaaatctccggatgcaccgttcattttgtggatgaaggtctggacagcggccccattattgcccaagaagcggtgccggttttgccgggggatacggaagattccttgtctgcccgtatcttggaagccgagcaccgtctttatccggaagcggtaggatgggtggccggtggacggatcaaaagaaatgggcgcatcgtagttaagctatag

SEQ ID NO: 56065 - protein, 217 aa, Desulfitobacterium hafniense Y51
MLCLRRGKRAKRRSELSLMRIGVLASGRGSNLQALIEAWKLGELNGELVAVGSDHEEALALKRAEEAGIPHGAFPLSRFSSRQEQEKAILTWLREQKVEILVLAGFMRVLSKEFLQDIQIPVLNIHPSLLPSFQGLHAQRQALDYGVKISGCTVHFVDEGLDSGPIIAQEAVPVLPGDTEDSLSARILEAEHRLYPEAVGWVAGGRIKRNGRIVVKL

SEQ ID NO: 56066 - DNA, 684 bp, Acidobacteria bacterium Ellin345
  CDS (1)..(684): transl_table=11
gtgttgaaggtccactctcacgctcacgtcctcatcccgaagagcttgtcaggattttgtcccatttacaataaccgcgtgaagaacctcggcatcctgctctctgggcgcggctccaatttcgaagctattgcggacaatgttgccgccggaaaaatcccggcacagatttccgtcgtcatctccaaccgcgccgatgcggggggaattgagtcggcgaagcgacgcggcttgaatgcgctggtcattccgtcaaagggcgtccctcgcgaagaacacgatcggcgagttgtaaaggcgctgcaggaccatggcgttgatctcatctgtctggccgggtatatgcggctgctgtcgccgtggttcgtacagcagtttccgcgacgcatcctgaatattcatccttcgctgctgcccgcgttccccggactcgaggcatccaagcaggcgttcgactacggcgtgaaggtcagcgggtgcacggtgcactttgtggatgagcacctcgaccacggcgacatcatcgtgcagaaagtcgtaccggtgctggataacgatgacgatcacacgctggcggcgcgcattttggagcaggagcacattgcgtatagcgaggcggtgcgcatcgtgctttcagacagcttcaaggttgtgggaaggcgcgtagtcgccaccgcgcaatag

SEQ ID NO: 56067 - protein, 227 aa, Acidobacteria bacterium Ellin345
MLKVHSHAHVLIPKSLSGFCPIYNNRVKNLGILLSGRGSNFEAIADNVAAGKIPAQISVVISNRADAGGIESAKRRGLNALVIPSKGVPREEHDRRVVKALQDHGVDLICLAGYMRLLSPWFVQQFPRRILNIHPSLLPAFPGLEASKQAFDYGVKVSGCTVHFVDEHLDHGDIIVQKVVPVLDNDDDHTLAARILEQEHIAYSEAVRIVLSDSFKVVGRRVVATAQ

SEQ ID NO: 56068 - DNA, 675 bp, Myxococcus xanthus DK 1622
  CDS (1)..(675): transl_table=11
atgagcggccagcgagtccgcctgggcgtgctcgtgtccggcagcgggagcaacctccaggcgctgctggacgcctgtgcgcgggaggactttcccgccgaggtggcctgcgtggtgtccaacgtctccaccgcgttcgcgctggagcgggcgcgcaaggcgggcgtgacggccaaggtggtggaccacaaggcccacgcgacgaaggagggcttcgagaaggccctgctggacacgctgcgcgcggcgaacgtggagtgggtgtgccttgcggggttcatgcgcttgttgagcgcggacttcctgggccactacgcggggcgggtgctgaacatccacccgtcgctgctgcccgccttcccgggcctgcatgcgcagcgacaggcgctggagcgaggcgtgaaagtggccgggtgcacggtgcacttcgtggacgcgggcaccgacacggggcccatcatcgcgcaggtggccgtgccggtgctgccggatgacgacgagaaggccctgagttcgcgaatcctcgcggaggagcaccggctctacccgctggccgtgcggctcgccgtgacgggcaaggtgacgctggacgcggcccgcacgcgcgtggaggcgcgggccacggtgggcgaactggcgcttcggaatcccggcgcgacggtcgacccggcgtga

SEQ ID NO: 56069 - protein, 224 aa, Myxococcus xanthus DK 1622
MSGQRVRLGVLVSGSGSNLQALLDACAREDFPAEVACVVSNVSTAFALERARKAGVTAKVVDHKAHATKEGFEKALLDTLRAANVEWVCLAGFMRLLSADFLGHYAGRVLNIHPSLLPAFPGLHAQRQALERGVKVAGCTVHFVDAGTDTGPIIAQVAVPVLPDDDEKALSSRILAEEHRLYPLAVRLAVTGKVTLDAARTRVEARATVGELALRNPGATVDPA

SEQ ID NO: 56070 - DNA, 633 bp, Haemophilus somnus 129PT
  CDS (1)..(633): transl_table=11
atgaacactcaaaacattgtaattctaatttcagggcgtggcagtaatatgcaggctgtagttgaagctcgaattgagggtgcaaatgtggtggcggtattggctaataaagctgatgctgctggtttggcatgggcggaagaacaaggtattgctaccggtgtggtcagtcacaaagattatcctgaacgtagcgattttgatgcggctttgatgagaaaaatcgatgaataccagcctgattgggttgttttagcaggctttatgaggatacttacgccagaattttgcacgcattatgctgggagactgattaatattcacccatcgttattgcccgcatttactgggttggatacgcatcgtcgggcattggaagcaggatgtcgtgtagttgggtgtacggtgcattttgtaacggcagagatggattgcggaccgattatcgcacaggcggctgtgcctgtggccgatgatgattcaccggaaacattggcggcacgagttttagcagcagaacaccgtttgttaccaaaagccatagctgattgtgtgacaggtcgtgtgcgggttgaaggtatgcgggtacatcgtggagataatggcgtgctacctgaatctttgctactttga

SEQ ID NO: 56071 - protein, 210 aa, Haemophilus somnus 129PT
MNTQNIVILISGRGSNMQAVVEARIEGANVVAVLANKADAAGLAWAEEQGIATGVVSHKDYPERSDFDAALMRKIDEYQPDWVVLAGFMRILTPEFCTHYAGRLINIHPSLLPAFTGLDTHRRALEAGCRVVGCTVHFVTAEMDCGPIIAQAAVPVADDDSPETLAARVLAAEHRLLPKAIADCVTGRVRVEGMRVHRGDNGVLPESLLL

SEQ ID NO: 56072 - DNA, 720 bp, Trichodesmium erythraeum IMS101
  CDS (1)..(720): transl_table=11
atgactataatactgtataatttaaataatttacactattgtattttacacaaaatgaaaactgaaactcaactaattaattctaattcttgtttagtttctccagctattcctgaaaatgctttgccaaaattttctcctataaaattggggattctagcttctggtaatgggagtaattttgaggctattgcagaagcgataagtaatcaaaaattaaatgccaaaattcaggtaatgatttataacaatcctggagctaaggttacatcacgagcagaaaagtggaatgttccatcagtattgttaaatcatcgaaaatacaaaaaccgagaagaatttgatagtcaaattgtcaaaactttacaagaatacaatgtagagtgggtgattatggctggttggatgcgaatagttactaaaattttaatagatgcttttcctaatcaaatcatcaatattcatcctagtttgttgcctagttttaagggtatagaagcagttgaacaagctttaaatgcaggagtaaaaataactggttgtacagtacatttagtggatgtagaagtcgataatggtccgattttaatgcaggctgctgtaccaattttgcttgatgatacaccagaaactctccaccagaaaattcaagtgcaagaacataaaattattgtgggtgctattactcttgctgcatcaaaaaaaattggttttaagtag

SEQ ID NO: 56073 - protein, 239 aa, Trichodesmium erythraeum IMS101
MTIILYNLNNLHYCILHKMKTETQLINSNSCLVSPAIPENALPKFSPIKLGILASGNGSNFEAIAEAISNQKLNAKIQVMIYNNPGAKVTSRAEKWNVPSVLLNHRKYKNREEFDSQIVKTLQEYNVEWVIMAGWMRIVTKILIDAFPNQIINIHPSLLPSFKGIEAVEQALNAGVKITGCTVHLVDVEVDNGPILMQAAVPILLDDTPETLHQKIQVQEHKIIVGAITLAASKKIGFK

SEQ ID NO: 56074 - DNA, 711 bp, Synechococcus sp. CC9311
  CDS (1)..(711): transl_table=11
atgcccgcgcgtacgaaccttagccactgtgttgatgattctctcgattcaggtctcgagctgatttccccattgattcagcattggcctcactttgaaccaccgctgcgtctcggagtgatggcctctggcaatggaagcaatttcgaggcgatccaagactcgatttctgccaacgcgctgcatgccgacattcacctcctagtggtcaacaaccaaggttgtggcgctgaagagagagcacaacgtctcgatatcccttgccaattattggatcatcgacagtttgagacgagagaaagtctcgatcacgcacttgttaaggctttccttgaggccgatgtggaactgatcgtgatggctggctggatgcggattgtcactccagtgttgattgaagccttcccaaacagattgctcaatatccacccatcccttctgcccagcttcaaaggtctcgatgcggttgggcaagctctccaagcgtcggtacggatcagtggttgcactgctcatctggtgcaggctgatgtggataccggaccggtcattgcccaagcggctgttccagtatttcaggacgacagtcgagcttccctggcccaacgcattcaatctcaggaacatcggattctgccctgggctatcgctcttgcaggattgaattggcgccaggccgccgagaaacttcccagcgaagctcagggatag

SEQ ID NO: 56075 - protein, 236 aa, Synechococcus sp. CC9311
MPARTNLSHCVDDSLDSGLELISPLIQHWPHFEPPLRLGVMASGNGSNFEAIQDSISANALHADIHLLVVNNQGCGAEERAQRLDIPCQLLDHRQFETRESLDHALVKAFLEADVELIVMAGWMRIVTPVLIEAFPNRLLNIHPSLLPSFKGLDAVGQALQASVRISGCTAHLVQADVDTGPVIAQAAVPVFQDDSRASLAQRIQSQEHRILPWAIALAGLNWRQAAEKLPSEAQG

SEQ ID NO: 56076 - DNA, 681 bp, Alkalilimnicola ehrlichei MLHE-1
  CDS (1)..(681): transl_table=11
atgagcgaggcaccgcgacagccgctgccggtggtggtgctgatctccggcagcggcagcaacctgcaggccttcatcgatggccaggcccgtggtgagctgcccatcgacatccgggcggtgatcagcaacagggccgacgcctacggcctggaacgggcccgcgcggcgggcatccccggcgaggtgctctcccaccgcggattcgacgaccgggccagttacgatcgggcactggccgaggtgatcgaccgccatgaaccggggctggtgatcctggccgggttcatgcgcatcctgtccgacgccttcgtcacccactacctggggcggctgatcaacatccacccttccctgctccccgacttccgcggcctgcacacccatgaacgcgcgctggaatccgcggtccaagtgcatggctgcagcgtccacttcgtcataccggagttggatgccgggccgctgatcgtgcaggcggaggtcccggtgtggcccgacgacaccccggagacactggcccgccgggtccagatccaggagcatcgcatctacccgctggcggtgcgctggctggccgagggccgggtctgcatgcgggagggccgcacctggatggacggccggccgctggagcaaaccccgcgaatcaccgcggacacccgggtggaaaccctgtag

SEQ ID NO: 56077 - protein, 226 aa, Alkalilimnicola ehrlichei MLHE-1
MSEAPRQPLPVVVLISGSGSNLQAFIDGQARGELPIDIRAVISNRADAYGLERARAAGIPGEVLSHRGFDDRASYDRALAEVIDRHEPGLVILAGFMRILSDAFVTHYLGRLINIHPSLLPDFRGLHTHERALESAVQVHGCSVHFVIPELDAGPLIVQAEVPVWPDDTPETLARRVQIQEHRIYPLAVRWLAEGRVCMREGRTWMDGRPLEQTPRITADTRVETL

SEQ ID NO: 56078 - DNA, 585 bp, Hyphomonas neptunium ATCC 15444
  CDS (1)..(585): transl_table=11
atgacgcgcctcaatctggcgatcctgatttcaggccgcggctccaatatggaggccctgctgagcgccgccgaagacccggcctatccggcaaagcccgttctggtcgcctccaaccgtcccgatgccaagggccttgaaaccgccgccgctgcgggcatccccacgctctccatcgaccacaagctctatggcaaggaccgcgaagccttcgagcgcgcgctggacgaggccttgactaaagctggcacggagatcatcgcgctggccggtttcatgcgcgtgctcaccccttggttcgtaatgcgctgggaaggccggatgatcaacatccacccatcgctcctgccgaaatacaaaggcctcgacacgcatcagcgcgccatcgatgcaggcgacgcggaagcaggctgcacggttcactgggtcagcgccggggtcgatgaaggcgagatcatcgcgcaggcctccgtgcccatcctgccgggcgacaccgcagacaccctcgccgcccgcaccctgccggaagaacacacactctacccgcgcgccctcgcgctggcctgccagcaaatccggcgctag

SEQ ID NO: 56079 - protein, 194 aa, Hyphomonas neptunium ATCC 15444
MTRLNLAILISGRGSNMEALLSAAEDPAYPAKPVLVASNRPDAKGLETAAAAGIPTLSIDHKLYGKDREAFERALDEALTKAGTEIIALAGFMRVLTPWFVMRWEGRMINIHPSLLPKYKGLDTHQRAIDAGDAEAGCTVHWVSAGVDEGEIIAQASVPILPGDTADTLAARTLPEEHTLYPRALALACQQIRR

SEQ ID NO: 56080 - DNA, 600 bp, Solibacter usitatus Ellin6076
  CDS (1)..(600): transl_table=11
gtgaagcgactcggcattctgatctccggccggggatcgaatttcgaggcgattgccgcgaacgtgcagagcggcgcgctgaacgccgatatcgcggtggtgatcgccaaccgtgcggaggctccgggcctggagatcgcgcgggcccgcggcttgactgccgtctgcctgccttcgaagggcctggatcgcgaagtctatgaccggatgctggccgcggagttgcgcaggcacgaggtcgaactggtctgcctcgcgggcttcatgcggctcctcagcgccggcttcgtccgcgaatttccgcagaggattttgaacatccacccctcgctgctgccggcctttcccggcctggacgcgcagcatcaggcgctggcgcacggcgtgaagctgacggggtgcaccgtccatttcgtggaccaggacctcgatgcgggcccgattgtcttacaggcggccgtcccggtgaaggacgatgacacggtggatgcgctctcggcgcgcatcctcaaagaggagcaccgcatttattcggaggcgatccgcattgtgatcgcggggaactaccggatcgacgggcggcgggttctactcggttga

SEQ ID NO: 56081 - protein, 199 aa, Solibacter usitatus Ellin6076
MKRLGILISGRGSNFEAIAANVQSGALNADIAVVIANRAEAPGLEIARARGLTAVCLPSKGLDREVYDRMLAAELRRHEVELVCLAGFMRLLSAGFVREFPQRILNIHPSLLPAFPGLDAQHQALAHGVKLTGCTVHFVDQDLDAGPIVLQAAVPVKDDDTVDALSARILKEEHRIYSEAIRIVIAGNYRIDGRRVLLG

SEQ ID NO: 56082 - DNA, 663 bp, Magnetococcus sp. MC-1
  CDS (1)..(663): transl_table=11
atgagcggggcaagctttcgtattggtgtactgatctcgggttctggcagcaatctgcaagctcttattgatggggttaagagcggttttattcccgcagagatcgccttggtgattagcaataaggccgatgcctatggcctgacccgtgcccgcgaggcggggattgagacgcgggtggtggatcataaaacctttgagggccgcagcccttttgagcatgaacttattcgcgcgctggatgatgccggtgtggagttggtctgtttggctggttttatgcgggtattgacccccctatttgtgcgccactatttgggccggttgatcaacattcacccctctttactgcccgcttttgcagggctgcatgtgcagcagcgggccattgatgcgggggtgcgttttagtggctgtaccgtccattttgtggaagaagaggtggatgcagggcctattatcgcccaagcggtggtacctgtactgcccagcgaccgtgctgaagatctggccaagcgcattttaacccaagagcaccggctctatccgtgggcggttaagctgtttgtggaggggcgcacccaggttaaggagcgggtcgtacatattcaaccggcccaatggggcgctgagcaggcattgatcggcccaacccccgactga

SEQ ID NO: 56083 - protein, 220 aa, Magnetococcus sp. MC-1
MSGASFRIGVLISGSGSNLQALIDGVKSGFIPAEIALVISNKADAYGLTRAREAGIETRVVDHKTFEGRSPFEHELIRALDDAGVELVCLAGFMRVLTPLFVRHYLGRLINIHPSLLPAFAGLHVQQRAIDAGVRFSGCTVHFVEEEVDAGPIIAQAVVPVLPSDRAEDLAKRILTQEHRLYPWAVKLFVEGRTQVKERVVHIQPAQWGAEQALIGPTPD

SEQ ID NO: 56084 - DNA, 642 bp, Azoarcus sp. BH72
  CDS (1)..(642): transl_table=11
atgaagtccatcgtcatcctcatttccggccgcggtagcaatatggaggccatcgtccgcgccggcctcgacggcgtccgcgtcgccgcggtgatcagcaaccgcccggacgcggcggggctggcattcgcccgcgcgcacgggattccggtcgccgtcgtcgaccacaaggcctacccggaccgcgcggcgttcgatgccgcgctcgccgaagtcatcgacgcgcacacgcccgacctggtggtgctcgcgggcttcatgcgggtgctcaccgagaccttcgtgcgccgctacgagggtcgcctgctcaacatccatccttcgctgctgcccgccttccccgggctgcacacgcatcgccgggcgctggaggcgggggtgaaggtccatggcgccacggtgcatttcgtcaccgccgatctcgattgcggccccatcgtcgttcaggcggtggtgccggtgctggccgacgacgacgaggcggcgctcgccgcccgcgtgctggcgcaggaacaccgcatctacccgcaagccctgcgttggttcgccgccggccgcttgagcctggaggcaggccgggtgcggctgcgcgacgaaccggcgacgagcgcgggctgcgtcgtgccgccggtggaaggctag

SEQ ID NO: 56085 - protein, 213 aa, Azoarcus sp. BH72
MKSIVILISGRGSNMEAIVRAGLDGVRVAAVISNRPDAAGLAFARAHGIPVAVVDHKAYPDRAAFDAALAEVIDAHTPDLVVLAGFMRVLTETFVRRYEGRLLNIHPSLLPAFPGLHTHRRALEAGVKVHGATVHFVTADLDCGPIVVQAVVPVLADDDEAALAARVLAQEHRIYPQALRWFAAGRLSLEAGRVRLRDEPATSAGCVVPPVEG

SEQ ID NO: 56086 - DNA, 654 bp, Nostoc punctiforme PCC 73102
  CDS (1)..(654): transl_table=11
atgaccctccgccctgattctaccctgagcttgatttctcccagtattagcgatgttcgccaacaagtcgcccctttaaagctgggaattatggcttctgggaatggcagcaattttgatgtagttgctcaagctatccaagatggacaactaaatgcccaaattcaagttttaatttacaataatccctcggcgaaagcagccgtcagagcagctaatagaggtgtagaagctgttttattgaatcaccgcaactataaaatccgagaagagttggatgagaaaattgtgcagacattgcagcactacgatgtggaatgggtgattttggcgggttggatgcgattgttaacgtcagttttcattgatgcctttcctgacaaaattattaatatccatcctagtttgttacctagtttcaagggaatccatgctgtagaacaagccttggcatctggggtaaaaattactggttgtacggcgcatatcgcttgtttagaaatggacagtggcccaatattgatgcaagccgcagtaccagtattgccagatgatacagcagaaacactccacgccaggattcaaattcaagaacatcgaattttgccgctagcgatcgctctggcagcttcttcgtcaaagtcatttttttaa

SEQ ID NO: 56087 - protein, 217 aa, Nostoc punctiforme PCC 73102
MTLRPDSTLSLISPSISDVRQQVAPLKLGIMASGNGSNFDVVAQAIQDGQLNAQIQVLIYNNPSAKAAVRAANRGVEAVLLNHRNYKIREELDEKIVQTLQHYDVEWVILAGWMRLLTSVFIDAFPDKIINIHPSLLPSFKGIHAVEQALASGVKITGCTAHIACLEMDSGPILMQAAVPVLPDDTAETLHARIQIQEHRILPLAIALAASSSKSFF

SEQ ID NO: 56088 - DNA, 639 bp, Crocosphaera watsonii WH 8501
  CDS (1)..(639): transl_table=11
atggaaaatgccactcctagttttatttctcctcaagtatctagggaagaattgatattagagatcccattaaaattaggtgtattagcatcaggaagtgggactaactttgaagcgatcgctaatgctatcaatcaacaacaattaaacgcgacaattcccctcttaatttacaataatcctcaagctaaagtcaaggaaaaagcaacagctttaaacattgagtccaaactcctcaatcatcgagaatttaagggacgagaagacttagatcaagctattgtagatttgttcaaatcttatcaggttgattgggtaattatggcaggttggatgagaattgttaccccagtgttattagaagcatttcccaatcatgttatcaatattcatcctagtttgttacctagtttcaaaggaattaaggcaatagaacaagctttagaagcaaaagttaaaattacaggatgtacagttcatcttgccagtttagaggtggatagtggaccgattttattacaagcagcagtccctatcttacctaacgataccctagagaccttacacaatagaattcaaatagaagaacataaaatttttccccttgctattgccttagctgctaaactatactattaa

SEQ ID NO: 56089 - protein, 212 aa, Crocosphaera watsonii WH 8501
MENATPSFISPQVSREELILEIPLKLGVLASGSGTNFEAIANAINQQQLNATIPLLIYNNPQAKVKEKATALNIESKLLNHREFKGREDLDQAIVDLFKSYQVDWVIMAGWMRIVTPVLLEAFPNHVINIHPSLLPSFKGIKAIEQALEAKVKITGCTVHLASLEVDSGPILLQAAVPILPNDTLETLHNRIQIEEHKIFPLAIALAAKLYY

SEQ ID NO: 56090 - DNA, 576 bp, Exiguobacterium sibiricum 255-15
  CDS (1)..(576): transl_table=11
atgaagattgcctgttttgcctcgggaagtggcagtaatgtcgaagctttattcgaagcagttgaaacaggacgtctgcaggctacgattgaactcgtcgtctgtgatcaaaaacaagcaaaagtgattgaacgggctcaggcccgcggctgtgatatcttcgtcttcacagccaaagactacccggataaaccgtcgtttgaacgggaaatcgttgcggaactggagcggcggggcgtggaacggattatcctagccggatatatgcgcttgatcggagacgtcctgctgtcgcattatgctggacggatcgtcaacatccacccgtcgttgctcccggcatttccgggaaaagatgcgatcgggcaagcatttcgtggcggagtcaaaatcacaggtgttacaattcatatagtcgatgaaggcatggatacaggaccaatcatcgcccaagaagcggttcggattacagaggatatgacacgggaaacgctccaacaagcgattcagcaggtggagcatagattgtacccgcaagtcatcgaagagtggatgaaagaggaggcaaacgtatga

SEQ ID NO: 56091 - protein, 191 aa, Exiguobacterium sibiricum 255-15
MKIACFASGSGSNVEALFEAVETGRLQATIELVVCDQKQAKVIERAQARGCDIFVFTAKDYPDKPSFEREIVAELERRGVERIILAGYMRLIGDVLLSHYAGRIVNIHPSLLPAFPGKDAIGQAFRGGVKITGVTIHIVDEGMDTGPIIAQEAVRITEDMTRETLQQAIQQVEHRLYPQVIEEWMKEEANV

SEQ ID NO: 56092 - DNA, 642 bp, Prochlorococcus marinus str. MIT 9211
  CDS (1)..(642): transl_table=11
atgaacttaagtgttggccatagtattacttcaccagaagttagtcagttttatagttttaaacccaaaataagattaggagtaatggcatctggtagtgggactaattttgaagcgctaataaatgctattaagaattccaaacttgatgctgagataaaatgtctagtagttaacaactctaaatgtaaggctatcgaaaaagcccaaaaatataatattccatatgtaatattagatcatagaagttttgaatctagagaaagcctagatcgtgaaatcattgaatacttcgaatcgtacaagatagaaggtattgtaatggctggttggatgaggatagttacatctaccttaataaataaatatcccaataggctagtaaatatacacccatcactattacctagtttcccaggtaataatgctataaagcaagctctagaatcaggagtcaagataacaggttgtagcgtacatcttgtaaaagaaaaagttgactctggtccaattttaattcaatctgcagtacctatctttgaaagtgacaatgaaaacattttattaagaagagtacaaaaaagagagcataaaatactctacgttggtgttgcaatagcagctcgtctatggagagaataa

SEQ ID NO: 56093 - protein, 213 aa, Prochlorococcus marinus str. MIT 9211
MNLSVGHSITSPEVSQFYSFKPKIRLGVMASGSGTNFEALINAIKNSKLDAEIKCLVVNNSKCKAIEKAQKYNIPYVILDHRSFESRESLDREIIEYFESYKIEGIVMAGWMRIVTSTLINKYPNRLVNIHPSLLPSFPGNNAIKQALESGVKITGCSVHLVKEKVDSGPILIQSAVPIFESDNENILLRRVQKREHKILYVGVAIAARLWRE

SEQ ID NO: 56094 - DNA, 612 bp, Synechococcus sp. WH 5701
  CDS (1)..(612): transl_table=11
gtgatggcctccggggagggctccaacttcgaagcgctggtggcggcctgccgtgaaggccccctgcggggccgggtgctccagctggtggtgaacaatcccggctgcggcgcccaggagcgggcccgtcggctggggatcccctgtgccttggtggatcaccgccgacaccgaagccgtgaggagctggatggcgccctgatcgaaaccttcgcggccaccggtgtggatctggtggtgatggccggctggatgcggatcgtcacgccgctcctgatcggcgccttcccctcgcgcctgatcaacatccatccatcgttgctgcccagcttccggggcctcgatgccgtgggccaggccctcgctgcaggagtcaccctcagcggctgcaccgctcacctcgtaaccgaggacctcgacggaggcccgatcctggcccaggccactgttccggtgctccccggcgacgaccgcgacaccctggcagcccggattcaccagcaggaacaccgcctgctgcccctggccgtggccctcgccgcggctcggctcagggatagaacgggagcagcggcaaacccatcgacgccggcaggccggccatcagattga

SEQ ID NO: 56095 - protein, 203 aa, Synechococcus sp. WH 5701
MMASGEGSNFEALVAACREGPLRGRVLQLVVNNPGCGAQERARRLGIPCALVDHRRHRSREELDGALIETFAATGVDLVVMAGWMRIVTPLLIGAFPSRLINIHPSLLPSFRGLDAVGQALAAGVTLSGCTAHLVTEDLDGGPILAQATVPVLPGDDRDTLAARIHQQEHRLLPLAVALAAARLRDRTGAAANPSTPAGRPSD

SEQ ID NO: 56096 - DNA, 693 bp, Synechococcus sp. WH 7805
  CDS (1)..(693): transl_table=11
atgcccgcttttttagacactagccaggtccatgaagaagatcccactgaattcattgttccggcactcggatcctggccacggtttacgccgccgctccgaatcggcgtcatggcatccggctctggcagcaatttcgaagctctttacaaggcgacgacacagggacgcctcgatgcatcgttgcgattgctgattgtgaacaacccgaactgcggagccaaggaacgggctgctcgtcttcagattccctgccagctcattgatcaccgacttcacagcacccgtgaatccctggacctcgccctggtgtctgcgttccaggctgccgatgtcgaagccgtggtgatggctggttggatgcgaatcgtcacgccgacgttgattgacgcctatcccggcaggctgatcaatctccacccttctctccttccctcgttcaaaggattggatgccgttggtcaagccctcgccgcaggggtcaggatcagcggatgcagcgtccatcacgttcaggccgatgtggactcaggaacagtgattgctcaggcagcagtccctgtctacgcaagcgatgataaaaatgctctctccaggcgcattcagaggcaagagcatcggctccttccctgggccacagcgttagcgggcttgcaatggagagacgagggagatgcagaggttcagggatag

SEQ ID NO: 56097 - protein, 230 aa, Synechococcus sp. WH 7805
MPAFLDTSQVHEEDPTEFIVPALGSWPRFTPPLRIGVMASGSGSNFEALYKATTQGRLDASLRLLIVNNPNCGAKERAARLQIPCQLIDHRLHSTRESLDLALVSAFQAADVEAVVMAGWMRIVTPTLIDAYPGRLINLHPSLLPSFKGLDAVGQALAAGVRISGCSVHHVQADVDSGTVIAQAAVPVYASDDKNALSRRIQRQEHRLLPWATALAGLQWRDEGDAEVQG

SEQ ID NO: 56098 - DNA, 669 bp, Xanthobacter autotrophicus Py2
  CDS (1)..(669): transl_table=11
gtgagcgctgggtcgagtgaggcgccgcgccgcaccgccgtcctcatttcgggccggggctccaatatggcggcgctggtgcgcgcggccgaacaggaagactttccggccgagatcgccctggtgctctccaaccgcgccgatgcggctgggctggatttcgccaaggatcatggcatccccactctggtgctctcccacaagggctattccgatcgcctcgccttcgacgcggcgctggatgcgcacctgaaggcggagggcattgagatcgtctgcctcgccggcttcatgcgcctgctcaccccctggctggtggagcgctggcgcaaccgcatgattaacgtgcatccctcgctgctgccgagcttcaagggcctgcacacccacgaacgggcgcttgaggccggggtgcgggtacatggctgcaccgtgcatttcgtgcgggcggagatggacgaggggccgatcatcctgcaggccgtggtgcccatcgagcccggcgacacgccggacgtgctcgccgaccgagtgctggaacaagagcacatcatctatcccaagggcctggaactcctcgccgccggccggttgacggtcgaagacgagcgggtggcgatcgcgggcgccaagggcgggctgaaaccgctggtggtgccggcggtgtga

SEQ ID NO: 56099 - protein, 222 aa, Xanthobacter autotrophicus Py2
MSAGSSEAPRRTAVLISGRGSNMAALVRAAEQEDFPAEIALVLSNRADAAGLDFAKDHGIPTLVLSHKGYSDRLAFDAALDAHLKAEGIEIVCLAGFMRLLTPWLVERWRNRMINVHPSLLPSFKGLHTHERALEAGVRVHGCTVHFVRAEMDEGPIILQAVVPIEPGDTPDVLADRVLEQEHIIYPKGLELLAAGRLTVEDERVAIAGAKGGLKPLVVPAV

SEQ ID NO: 56100 - DNA, 669 bp, Oceanobacter sp. RED65
  CDS (1)..(669): transl_table=11
atgaccccagaaaaaccagaaccagctcgtatcgtggttttgatttcaggctctggcagtaacatgtctgctatagccacagcatgcgccagcgaagaagtcgatgccgaagtggttgcagtaattagcaaccgtccaggggtgcttggtttagatagggcacaagagataggcatcgtcactcaagtggtcgatcacaaggattatgctagccgcgaagagtttgacgttcatctcatgcgcgaaatcgacaactacgagcctgacctcgttgttcttgccggctttatgcgcatcctaacgcccgacttcgtccgtcgctacaaaggacgcatgcttaacattcacccatccttactccccaagtacaaaggcctaaacacccaccaacgagctttggacaatggtgacaacgagcacggcgtaaccgtgcatttcgttagcgaagacctagatggtggccctaacgtaattcaagccgtggtacctgttacatcaaatgatacagaagaaacactgcgcacacgcgttcagcagcaagagcacgtaatctaccccattgctgtaaagtggttcgtggagggccgtatcagcatgattaaaggggacgcatacttcgacaatgagcccatgccagaaacgggtgttcaactccccaccacagcgtaa

SEQ ID NO: 56101 - protein, 222 aa, Oceanobacter sp. RED65
MTPEKPEPARIVVLISGSGSNMSAIATACASEEVDAEVVAVISNRPGVLGLDRAQEIGIVTQVVDHKDYASREEFDVHLMREIDNYEPDLVVLAGFMRILTPDFVRRYKGRMLNIHPSLLPKYKGLNTHQRALDNGDNEHGVTVHFVSEDLDGGPNVIQAVVPVTSNDTEETLRTRVQQQEHVIYPIAVKWFVEGRISMIKGDAYFDNEPMPETGVQLPTTA

SEQ ID NO: 56102 - DNA, 645 bp, Synechococcus sp. RS9916
  CDS (1)..(645): transl_table=11
atggttggtcaagatcttgatgctctggtgacaccggcgcagggtgactggcctcgttacaccacgccactgcggttgggcgtgatggcatcgggcagcggcagcaactttgaagccctgttcgccgccacccagcagcatcttgacgcaaccatcgaggtgctggtggtgaacaatccgggttgcggagcccagctgagagcggaacggcttggtgtggattgcatcgttcatgaccatcgccagtacaccaatcgagaagatctcgacagcgccctagtgagcacatttgaagcagcgcaagtggagggtgtggtgatggccgggtggatgcgcatcgtgaccccagtgctgattggggcctatcagggccgactgatcaacattcatccgtccttacttcccagctttcgaggtttggacgccgtcggccaggcgttgaaggcgggcgttcgcctcactggctgtacggcccatatcgtcactgcagaggtcgacaccggacctgtcatcgctcaggcggcagtcccggtgatggacaacgacgatcaccagtccttgtcggagcgaatccatcgacaggaacatcgaatcctgccttgggccgttgccctcaaaggacgtgattggaaggctcagggatag

SEQ ID NO: 56103 - protein, 214 aa, Synechococcus sp. RS9916
MVGQDLDALVTPAQGDWPRYTTPLRLGVMASGSGSNFEALFAATQQHLDATIEVLVVNNPGCGAQLRAERLGVDCIVHDHRQYTNREDLDSALVSTFEAAQVEGVVMAGWMRIVTPVLIGAYQGRLINIHPSLLPSFRGLDAVGQALKAGVRLTGCTAHIVTAEVDTGPVIAQAAVPVMDNDDHQSLSERIHRQEHRILPWAVALKGRDWKAQG

SEQ ID NO: 56104 - DNA, 660 bp, marine gamma proteobacterium HTCC2143
  CDS (1)..(660): transl_table=11
atgaatccggcatctacaaaatgcaaattggtcattttgatttcgggcggcggctctaatttacaatccttcatcgatgctattgagactgggaaccttaatgcagaaatcgccgccgttttttgcaacaaacccagtgcctttggactcacccgtgctgccaacgcaggcattccaactgaagtgatagaccatacgacctatgacaatcgcgattcgtttgatcgagtgttaatggaccgaatcagtcactattcgcccgatttaattatactcgctggcttcatgagaattcttaccccgcgatttgttcataatttccgaggccaattactgaacattcacccctctttgttgcccaagtatccagggcttaacactcaccagcgagcattggacgctggtgacaaacaggccggggcgactgtgcattttgttaccgaagaactggatggcgggcctgctattgtgcaatctcgtgtcagcatcgagccactcgacacggtagagacactcgcctctaaaatactcgctgaagaacacaagatattccctcttgccgctcagtggtttgcagagggccgtttacaactggaagataactatgcagcgctggacaaccaacaattaccacccggtggcgaaaagatcagtggctag

SEQ ID NO: 56105 - protein, 219 aa, marine gamma proteobacterium HTCC2143
MNPASTKCKLVILISGGGSNLQSFIDAIETGNLNAEIAAVFCNKPSAFGLTRAANAGIPTEVIDHTTYDNRDSFDRVLMDRISHYSPDLIILAGFMRILTPRFVHNFRGQLLNIHPSLLPKYPGLNTHQRALDAGDKQAGATVHFVTEELDGGPAIVQSRVSIEPLDTVETLASKILAEEHKIFPLAAQWFAEGRLQLEDNYAALDNQQLPPGGEKISG

SEQ ID NO: 56106 - DNA, 729 bp, Pseudomonas putida GB-1
  CDS (1)..(729): transl_table=11
atgggtgatcggccacatcgccgaagccgccgaaggcgccgcccaggtcgagctgcagaacctcaaggcacactgatgccgagcaagacctgcaatgtagtggtactgctgtcgggctccggcagcaacctgcaagccctgatcgacagctgccaaggccaggacagcccggtgcgcatccgtgcggtggtttccaaccgcgccgatgcctacggcctgcaacgcgccacggcagcgggcatcgaaggtgccgtgcttgaccacacccagttcgacggccgtgaagctttcgatgccgccttgatggcgcgcatcgacggctttgcgccggacctggtggtgctggccggcttcatgcgcatcctcagcggcggcttcgtgcgccactatcagggccgcctgctcaacatccacccgtcgttgctgcccaagtacaagggcctgcatacccaccgccgggcgctggaagcaggcgacgccgagcatggctgcagcgtacacttcgtgactgaggaactcgatggcggcccactggtcgtacaggctgtggtaccggtggcgtctgacgacaccgtcgaaagcctggcccaacgggtacaccgtcaggaacacctgatctacccgctggcggtgcgctggttcgctgaagggcgcttgcgtcttggcgaacagggcgcattactggacggccagccactggcggccagcggtcacttgattcgatcctag

SEQ ID NO: 56107 - protein, 242 aa, Pseudomonas putida GB-1
MGDRPHRRSRRRRRPGRAAEPQGTLMPSKTCNVVVLLSGSGSNLQALIDSCQGQDSPVRIRAVVSNRADAYGLQRATAAGIEGAVLDHTQFDGREAFDAALMARIDGFAPDLVVLAGFMRILSGGFVRHYQGRLLNIHPSLLPKYKGLHTHRRALEAGDAEHGCSVHFVTEELDGGPLVVQAVVPVASDDTVESLAQRVHRQEHLIYPLAVRWFAEGRLRLGEQGALLDGQPLAASGHLIRS

SEQ ID NO: 56108 - DNA, 651 bp, Pseudomonas chlororaphis
  CDS (1)..(651): transl_table=11
atgccagccacctgtgatgtagtggtgctgttgtccggtaccggcagcaacttgcaggccctgatcgacagtacccggcccgacgacagcccggtacgcatccgcgcggtgatttccaatcgcgccgatgcctatggcctgcaacgcgcccaggacgcgggtatcgatacccgcgccctcgatcacaaagcattcgaaggccgcgaggccttcgatgccgcactgatcgaactgatcgacgccttccagcccaagctcgtggtgcttgccggattcatgcgcattctcagcgcggatttcgttcggcactatcagggtcgcctgctcaatatccatccttcgctgctacccaaatacaaagggttacacactcatcagcgagcgctggaggccggagacaccgagcacggctgcagcgtgcactttgtgacagaggaactcgatggcggaccactggtcgtacaggcagtgatcccggtagagttgcacgactcgccgcaaagcctggcgcagcgggtccacgtccaggaacaccggatttacccgatggccgtacgctggtttgccgaaggtcgactcacactcggcgaacagggtgctttactggatggtcagttactggccgccagtggccacttgattcgtaattag

SEQ ID NO: 56109 - protein, 216 aa, Pseudomonas chlororaphis
MPATCDVVVLLSGTGSNLQALIDSTRPDDSPVRIRAVISNRADAYGLQRAQDAGIDTRALDHKAFEGREAFDAALIELIDAFQPKLVVLAGFMRILSADFVRHYQGRLLNIHPSLLPKYKGLHTHQRALEAGDTEHGCSVHFVTEELDGGPLVVQAVIPVELHDSPQSLAQRVHVQEHRIYPMAVRWFAEGRLTLGEQGALLDGQLLAASGHLIRN

SEQ ID NO: 56110 - DNA, 1166 bp, Solanum tuberosum
  CDS (4)..(921)
  misc_feature (900)..(900): r is g or a
tcaatggaagctcaaaatttgtcttttggactttcctctaccttacccacttcaccaattcaaaaccaaaaaaatccattctttcagattttgctcaaaccatcttcttcttcaaataatcttacccttaaaggggttttcttgaaaccccatgtttctttttctcctaaaagtttccccagcaaggaatttttccagtgtaggaattgtttgcaaagaactgaaagagaagctactacagttcctgatagtggtgtgaataaagaacttagaaagaagaagcttgcagtgtttgtatctggtggaggttcaaatttcaggtcaatttatgaagctacacttgaagggactgttcatggagaggtagctgttttagttaccaataaaaatgattgtggaggtgcaaagtatgcaagggagcaaggcattcctgttattttgtttcctaaagcaaagaattcatcggagggtttatcggaggaggatctcgtgggttctctaagagcctataatatcgacttcattcttttagctgggtacttaaagcttattcctactgagttagtccaagcatttccaagatcgatatttaatattcatccgtcacttcttccatcttttggaggcaaaggctactatggcataaaggtgcataaagcagtcatagcttctggagctaggtattcaggtcctacgatccattatgtcgatgagcattatgacactggacgtattcttgctcaaggggtcgtgcctgtgctggctaatgacacagcagaacacttgcagccaagggttcttcaagaggagcataagctttacgtagaagtagcagcagcattatgtgaagagagaatcgtgtggcgtgaagatggtgtccctctcatccggagcaaagargatcccaatcattacaagtagaaacaaagccagaggttagcaactccgcggctagaagtattcgttactgagctctgtgttgacactaacatagttttggtacatatgcctcgtggaaaggcgtaccaacgtccttaattgttcaatttacgattataccatagaaaattcaacacatgtagacgaatattgtatgtctatgactataagttttgtaccaatatgttttgacaactttttatgttttcatctatgaaagaaatagc

SEQ ID NO: 56111 - protein, 305 aa, Solanum tuberosum
MEAQNLSFGLSSTLPTSPIQNQKNPFFQILLKPSSSSNNLTLKGVFLKPHVSFSPKSFPSKEFFQCRNCLQRTEREATTVPDSGVNKELRKKKLAVFVSGGGSNFRSIYEATLEGTVHGEVAVLVTNKNDCGGAKYAREQGIPVILFPKAKNSSEGLSEEDLVGSLRAYNIDFILLAGYLKLIPTELVQAFPRSIFNIHPSLLPSFGGKGYYGIKVHKAVIASGARYSGPTIHYVDEHYDTGRILAQGVVPVLANDTAEHLQPRVLQEEHKLYVEVAAALCEERIVWREDGVPLIRSKEDPNHYK

SEQ ID NO: 56112 - DNA, 1376 bp, Glycine max
  CDS (254)..(1192)
gctgaccccagccccagagtgtgcttcttcgttcacaacacttcactcattaacttttcattctccgatacgccactcgcttcatatgcaagcacagcctgaatcctctatagatcgaaactgttaagtttcgacaaacttgacacaaggacaccatcaacatcttgaagagctcgctgtgttgttcgttccttttggccccttcaacgaaattgtactaatctaagatttgcgattttttgttcaaattaaaatgtccatggaagctcaacagattctttccagattctgtccaaaaccatcttcagtgccatctattccaattgtgaaacaacaattctctccaaagttccctcgtttaccttcttcatcgttgtatccttctagtcaatctcagaatctcaatgttcctagtggagctttccatcctatcagcattgtgcacaaagaagtgtgttctagttcttgcaagaggatatggtgcagcagcagcagcagcagcactgcagaaccaaaggagggccatgaggtgagggctcaggtcaccgtgcgaaggaaaaagctagcagttttcgtttctggtggaggatccaacttcagagcaattcatgaggcctccaaaaggggatcacttcatggagatgttcttgtgttggtcacaaataaaagtgattgtggaggtgcggagtatgcaagaaataatggtatcccagttatactgtaccatatatcaaaggatgaatctaatccaagtgaccttgttgatacactaaggaaatttgaggttgattttattcttttagctggatacctcaaacttataccagtggaattgatccgagcttacaaaagatctatattcaacattcatccatcacttcttccagcttttggaggcaagggattctatggcatgaaagtgcacaaagcagtaattgcttctggagcaaggttttcaggtcctaccattcattttgttgatgaacactatgatacagggcgtatccttgcacagcgtgttgtccctgtgcttgccaatgatactgtagaagagctggctgcaagggttctcaaagaggagcaccaattatatgtggaggtggtggaggctttatgcgaagaacgtgtggtttggaggcaagatggtgttcctctcatccaaagcaaagaaaaccccaatgagtttcgctgattatcatttatatggggattttggttggagattttgcatatgaaattttcgcattcaccccaaatacagttaatgaattgtaattattaggtaatttctggtgcactcatgatgtcacatatccaagaatgttataaccaggaagtcacaaacttttctcttaaaaaaaaaaaaaaaaaaaaaa

SEQ ID NO: 56113 - protein, 312 aa, Glycine max
MSMEAQQILSRFCPKPSSVPSIPIVKQQFSPKFPRLPSSSLYPSSQSQNLNVPSGAFHPISIVHKEVCSSSCKRIWCSSSSSSTAEPKEGHEVRAQVTVRRKKLAVFVSGGGSNFRAIHEASKRGSLHGDVLVLVTNKSDCGGAEYARNNGIPVILYHISKDESNPSDLVDTLRKFEVDFILLAGYLKLIPVELIRAYKRSIFNIHPSLLPAFGGKGFYGMKVHKAVIASGARFSGPTIHFVDEHYDTGRILAQRVVPVLANDTVEELAARVLKEEHQLYVEVVEALCEERVVWRQDGVPLIQSKENPNEFR

SEQ ID NO: 56114 - DNA, 939 bp, Glycine max
  CDS (1)..(939)
  misc_feature (190)..(190): y is t or c
  misc_feature (701)..(701): y is t or c
atgtccatggaagctcaacagattctttccagattctgtccaaaaccatcttcagtgccatctattccaattgtgaaacaacaattctctccaaagttccctcgtttaccttcttcatcgttgtatccttctagtcaatctcagaatctcaatgttcctagtggagctttccatcctatcagcattgtgyacaaagaagtgtgttctagttcttgcaagaggatatggtgcagcagcagcagcagcagcactgcagaaccaaaggagggccatgaggtgagggctcaggtcaccgtgcgaaggaaaaagctagcagttttcgtttctggtggaggatccaacttcagagcaattcatgaggcctccaaaaggggatcacttcatggagatgttcttgtgttggtcacaaataaaagtgattgtggaggtgcggagtatgcaagaaataatggtatcccagttatactgtaccatatatcaaaggatgaatctaatccaagtgaccttgttgatacactaaggaaatttgaggttgattttattcttttagctggatacctcaaacttataccagtggaattgatccgagcttacaaaagatctatattcaacattcatccatcacttcttccagcttttggaggcaagggattctatggcatgaaagtgcacaaagcagtaattgcttctggagcaaggtyttcaggtcctaccattcattttgttgatgaacactatgatacagggcgtatccttgcacagcgtgttgtccctgtgcttgccaatgatactgtagaagagctggctgcaagggttctcaaagaggagcaccaattatatgtggaggtggtggaggctttatgcgaagaacgtgtggtttggaggcaagatggtgttcctctcatccaaagcaaagaaaaccccaatgagtttcgctga

SEQ ID NO: 56115 - protein, 312 aa, Glycine max
  misc_feature (64)..(64): The Xaa at location 64 stands for His, or Tyr.
  misc_feature (234)..(234): The Xaa at location 234 stands for Phe, or Ser.
MSMEAQQILSRFCPKPSSVPSIPIVKQQFSPKFPRLPSSSLYPSSQSQNLNVPSGAFHPISIVXKEVCSSSCKRIWCSSSSSSTAEPKEGHEVRAQVTVRRKKLAVFVSGGGSNFRAIHEASKRGSLHGDVLVLVTNKSDCGGAEYARNNGIPVILYHISKDESNPSDLVDTLRKFEVDFILLAGYLKLIPVELIRAYKRSIFNIHPSLLPAFGGKGFYGMKVHKAVIASGARXSGPTIHFVDEHYDTGRILAQRVVPVLANDTVEELAARVLKEEHQLYVEVVEALCEERVVWRQDGVPLIQSKENPNEFR

SEQ ID NO: 56116 - DNA, 639 bp, Escherichia coli
  CDS (1)..(639): transl_table=11
atgaatattgtggtgcttatttccggtaacggaagtaatttacaggcaattattgacgcctgtaaaaccaacaaaattaaaggcaccgtacgggcagttttcagcaataaggccgacgcgttcggccttgaacgcgcccgccaggcgggtattgcaacgcatacgctcatcgccagagcgtttgacagtcgtgaagcctatgaccgggagttgattcatgaaatcgacatgtacgcacccgatgtggtcgtgctggctggttttatgcgcattctcagcccggcgtttgtctcccactatgccgggcgtttgctgaacattcacccttctctgctgccgaaatatcccggattacacacccatcgtcaggcgctggaaaatggcgatgaagagcacggtacatcggtgcatttcgtcaccgatgaactggacggtggcccggttattttacaggcgaaagtcccggtatttgctggtgatacggaagatgacgtcaccgcccgcgtgcaaacccaggaacacgctatttatccactggtgattagctggtttgccgatggtcgtctgaaaatgcacgaaaacgccgcgtggctggatggtcaacgtctgccgccgcagggctacgctgccgacgagtaa

SEQ ID NO: 56117 - protein, 212 aa, Escherichia coli
MNIVVLISGNGSNLQAIIDACKTNKIKGTVRAVFSNKADAFGLERARQAGIATHTLIARAFDSREAYDRELIHEIDMYAPDVVVLAGFMRILSPAFVSHYAGRLLNIHPSLLPKYPGLHTHRQALENGDEEHGTSVHFVTDELDGGPVILQAKVPVFAGDTEDDVTARVQTQEHAIYPLVISWFADGRLKMHENAAWLDGQRLPPQGYAADE

SEQ ID NO: 56118 - DNA, 639 bp, Escherichia coli
  CDS (1)..(639): transl_table=11
atgaatattgtggtgcttatttccggcaacggaagtaatttgcaggcaattattgacgcctgcaaaaccaacaaaattaaaggcaccgtacgggcagttttcagcaataaggccgacgcgttcggccttgaacgcgcccgccaggcgggtattgcaacgcatacgctcatcgccagcgcgtttgacagtcgtgaagcctatgaccgggagttgattcatgaaatcgacatgtacgcacccgatgtggtcgtgctggctggttttatgcgcattctcagcccggcgtttgtctcccactatgccgggcgtttgctgaacattcacccttctttgctgccgaaatatcccggattacacacccatcgtcaggcgctggaaaatggcgatgaagagcacggtacatcggtgcatttcgtcaccgatgtactggacggtggcccggttattttacaggcgaaagtcccggtatttgctggtgatacggaagatgacatcaccgcccgcgtgcaaacccaggaacacgctatttatccactggtgattagctggtttgccgatggtcgtctgaaaatgcacgaaaacgccgcgtggctggatggtcaacgtctgccgccgcagggctacgctgccgacgagtaa

SEQ ID NO: 56119 - protein, 212 aa, Escherichia coli
MNIVVLISGNGSNLQAIIDACKTNKIKGTVRAVFSNKADAFGLERARQAGIATHTLIASAFDSREAYDRELIHEIDMYAPDVVVLAGFMRILSPAFVSHYAGRLLNIHPSLLPKYPGLHTHRQALENGDEEHGTSVHFVTDVLDGGPVILQAKVPVFAGDTEDDITARVQTQEHAIYPLVISWFADGRLKMHENAAWLDGQRLPPQGYAADE

SEQ ID NO: 56120 - DNA, 642 bp, Escherichia coli
  CDS (1)..(642): transl_table=11
atgaatattgtggtgcttatttccggcaacggaagtaatttgcaggcaattattgatgcctgcaaggccaacaaaattaaaggcaccctacgggcagttttcagtaataaggccgacgcgttcggccttgaacgcgcccgccaggccggtattgcaacacatacacttgtcgccagcgagtttgacagccgtgaagcttatgatcgggagttgattcatgagatcgacgtttactctcccgatgtcgtggtactggccggttttatgcgcattctcagcccagcatttgtttcccactatgccgggcgtttgctgaatatccacccctccctgctaccgaaatatcccggcttgcatacccatcgtcaggcactggaaaacggcgatgaggaacatggtacatcggtgcatttcgtgaccgatgaactggatggcggccctgttattttacaggctaaagttccggtttttgccggtgatacggaagatgaaattacagcccgcgtgcaaactcaggagcacgccatttacccactggtgattagctggtttgccgatggtcgcctgaaaatgtacgaaaacgccgcatggctggatggtcagcgtctgccgccgcagggctatgccgctgacgaagagtag

SEQ ID NO: 56121 - protein, 213 aa, Escherichia coli
MNIVVLISGNGSNLQAIIDACKANKIKGTLRAVFSNKADAFGLERARQAGIATHTLVASEFDSREAYDRELIHEIDVYSPDVVVLAGFMRILSPAFVSHYAGRLLNIHPSLLPKYPGLHTHRQALENGDEEHGTSVHFVTDELDGGPVILQAKVPVFAGDTEDEITARVQTQEHAIYPLVISWFADGRLKMYENAAWLDGQRLPPQGYAADEE

SEQ ID NO: 56122 - DNA, 600 bp, Corynebacterium ammoniagenes
  CDS (1)..(600): transl_table=11
gtgactgaatcgccttcgcaagttttgaaagcacaagacccgcttcaagtagtggtgctggtatctggcaccggatctttgctgcaaaatattatcgacaaccaagatgactcctatcgggttatcaaggtagtcgcggataagccctgcccggggattaaccgagcccaagatgcaggcatcgacaccgaagtcgtgcttttaggctcagaccgcgcgcagtggaacaaagaccttgtcgcagcggttggtaccgccgatgttgtggtgtccgctggatttatgaaaatcctggggcctgaattcttggccagctttgaaggccgcacaataaatacgcatcccgcactcctgccgtcctttccgggcgcgcatggagtacgggatgcgttggcttatggcgtgaaagtcaccggctctactgtccattttgtggacgcgggagtcgatactggccgcatcatcgcacaacgcgcagtagagattgaggcagaagatgatgaggcaagcttgcatgagcgcatcaaaagcgtcgaacgtgagcttatcgtgcaggtcttacgcgcagcgaatgttccaagaccagcagcttattattga

SEQ ID NO: 56123 - protein, 199 aa, Corynebacterium ammoniagenes
MTESPSQVLKAQDPLQVVVLVSGTGSLLQNIIDNQDDSYRVIKVVADKPCPGINRAQDAGIDTEVVLLGSDRAQWNKDLVAAVGTADVVVSAGFMKILGPEFLASFEGRTINTHPALLPSFPGAHGVRDALAYGVKVTGSTVHFVDAGVDTGRIIAQRAVEIEAEDDEASLHERIKSVERELIVQVLRAANVPRPAAYY

SEQ ID NO: 56124 - DNA, 910 bp, Arabidopsis thaliana
  CDS (1)..(879)
atggaatcacgggttttgttctctagtcaattcaacttcccggtgaattcaccgtttaagacccgtgaaacctcgattgctccgctcacaccttcccggaatgttctctccttctctttccgtagtcccgcagagagatgtgcgatgaggattgtaccgcttgtaaaagctgcttcgtctactccacagatagtagcggaggtcgatggttcgtctcacgaaccaagaaggaagaagcttgctgtgtttgtgtcgggaggtggttcaaatttcaggaagattcatgagggatgcagtgatggttctgttaatggtgatgttgttttgttggtcactaacaaaaaagattgtggaggtgctgagtatgcaagaagtaatggaattcctgttttagtattcccaaaagcgaaacgagaaccatctgatggactctctccttcagaacttgtagatgtactaaggaaatatggtgtagactttgttcttttagctggatatttgaaacttataccggtcgagctggtccaagcttttcctaaacggattctaaatattcatcctgctcttcttccggctttcggaggcaaaggtctttatggtataaaagtgcataaagctgttctagaatcgggagctagatattcgggtccgacaattcacttcgtcaatgaggagtacgatacaggtcggatacttgctcaaagtgcagtccgtgtgattgctaatgatacaccagaagaattggccaaaagggttcttcatgaggaacacaaactgtatgtcgaggtggtgggtgcgatttgcgaagagcggattaaatggagagaagacggtgtccctctcattcaaaacaaacaaaaccctgacgagtactattagattctcaacaaatgaagttatgcattggatg

SEQ ID NO: 56125 - protein, 292 aa, Arabidopsis thaliana
MESRVLFSSQFNFPVNSPFKTRETSIAPLTPSRNVLSFSFRSPAERCAMRIVPLVKAASSTPQIVAEVDGSSHEPRRKKLAVFVSGGGSNFRKIHEGCSDGSVNGDVVLLVTNKKDCGGAEYARSNGIPVLVFPKAKREPSDGLSPSELVDVLRKYGVDFVLLAGYLKLIPVELVQAFPKRILNIHPALLPAFGGKGLYGIKVHKAVLESGARYSGPTIHFVNEEYDTGRILAQSAVRVIANDTPEELAKRVLHEEHKLYVEVVGAICEERIKWREDGVPLIQNKQNPDEYY

SEQ ID NO: 56126 - DNA, 588 bp, Bacillus subtilis
  CDS (1)..(588): transl_table=11
atgaaaaagtttgcggtatttgcatcaggaaacggttcaaacttcgaagccatcgtcacgcgtttgaaggaggagaactgggatgcgtcacgagcgctcctcgtttgcgacaaaccgcaggcgaaagtcatcgaacgggcggaacgattccacattccatccttcgcatttgagccgaagtcttatgaaaacaaggctgcatttgaacaagccatcattgaacagcttcgtcttcacgaggttgaattgattgctcttgccggctatatgaggctgatcggtgatacgctccttcaagcatatgggggaaaaatcattaacattcacccatcgcttcttccggcgtttcctggaatcgacgcagtcggacaggcgttccgggcgggtgtgaaggtggccggaatcaccgtgcattatgtcgatgaaggaatggatacaggtccgatcatcgctcaaaaggcaatcgaaattgatgaacatgatacattggaaacaatcgaacagcgaattcacaagcttgagcataaatggtatccgagtgtgattaaacagctattaggattaaataacagaggtgaaaaggcatga

SEQ ID NO: 56127 - protein, 195 aa, Bacillus subtilis
MKKFAVFASGNGSNFEAIVTRLKEENWDASRALLVCDKPQAKVIERAERFHIPSFAFEPKSYENKAAFEQAIIEQLRLHEVELIALAGYMRLIGDTLLQAYGGKIINIHPSLLPAFPGIDAVGQAFRAGVKVAGITVHYVDEGMDTGPIIAQKAIEIDEHDTLETIEQRIHKLEHKWYPSVIKQLLGLNNRGEKA

SEQ ID NO: 56128 - DNA, 624 bp, Schizosaccharomyces pombe
  CDS (1)..(624)
atggtagcttcacttgtcgtgttaatttcgggatcaggttctaacctccaagcaataattgatgctacgctgaatggagttttaaagggagaagcagctgtaacgcacgttttgtcaaaccgcaaaaatgcttatggcttagaaagagccgcgaaagctgggataccaacgtctttgcatacattgttaccctacaaaaaggaatacggacctgagataggaagaaaaaagtatgatgctgagttggcggaaaagataattaagcttcaaccatccttggttgtctgtgctggatggatgcacattttgtccccagaagtgttgattcctttagaaacaaataaaatcggaattattaatcttcatccagctcttcctggcgcttttaacggtattcatgctatcgaacgcgcgttcgaagctgcccagcaaggaaagatcactcacaccggtgctatggtacattgggtgattgcagcagtcgatgaaggaaaacctattatcgtgcaagaagttcccattttgtcaaccgatagtattgaagcactagaagaaaaaattcacgcagcagaacatgtaatacttgtgcaggccattcaccagatcattactgacaataaataa

SEQ ID NO: 56129 - protein, 207 aa, Schizosaccharomyces pombe
MVASLVVLISGSGSNLQAIIDATLNGVLKGEAAVTHVLSNRKNAYGLERAAKAGIPTSLHTLLPYKKEYGPEIGRKKYDAELAEKIIKLQPSLVVCAGWMHILSPEVLIPLETNKIGIINLHPALPGAFNGIHAIERAFEAAQQGKITHTGAMVHWVIAAVDEGKPIIVQEVPILSTDSIEALEEKIHAAEHVILVQAIHQIITDNK

SEQ ID NO: 56130 - DNA, 888 bp, Glycine max
  CDS (1)..(888)
atgtcagtgccatctattccaattgtgaaacaacaattctctccaaagttccctcgtttaccttcttcatcgttgtatccttctagtcaatctcagaatctcaatgttcctagtggagctttccatcctatcagcattgtgcacaaagaagtgtgttctagttcttgcaagaggatatggtgcagcagcagcagcagcagcactgcagaaccaaaggagggccatgaggtgagggctcaggtcaccgtgcgaaggaaaaagctaggagttttcgtttctggtggaggtaccaacttcagagcaattcatgaggccaccaaaaggggatcacttcatggagatgttcttgtgttggtcacaaataaaagtgattgtggaggtgcggagtatgcaagaaataatggtatcccagttatactgtaccatatatcaaaggatgaatctaatggaagtgaccttgttgatacactaaggaaatttgaggttgattttattcttttagctggatacctaaacttataccagtggaatgatccgagcttacaaaagatctatattcaacattcatccatcacttcttccagcttttggaggcaagggattcatggcatgaaagtgcacaaagcagtaattgcttctggagcaaggttttcaggtcctaccattcattttgttgatgaacactatgatacagggcgtatccttgcacagcgtgttgtccctgtgcaagccaatgatactgtagaagagctggctgcaagggttctcaaagaggagcaccaattatatgtggaggtggtggaggctttatgcgaagaacgtgtggtttggaggcaagatggtgttcctctcatccaaagcaaagaaaaccccaatgagtttcgctga

SEQ ID NO: 56131 - protein, 295 aa, Glycine max
MSVPSIPIVKQQFSPKFPRLPSSSLYPSSQSQNLNVPSGAFHPISIVHKEVCSSSCKRIWCSSSSSSTAEPKEGHEVRAQVTVRRKKLGVFVSGGGTNFRAIHEATKRGSLHGDVLVLVTNKSDCGGAEYARNNGIPVILYHISKDESNGSDLVDTLRKFEVDFILLAGYLNLYQWNDPSLQKIYIQHSSITSSSFWRQGIHGMKVHKAVIASGARFSGPTIHFVDEHYDTGRILAQRVVPVQANDTVEELAARVLKEEHQLYVEVVEALCEERVVWRQDGVPLIQSKENPNEFR

SEQ ID NO: 56132 - DNA, 1458 bp, Vigna unguiculata
  CDS (258)..(1196)
attgaaaaatcgtgcttttgttatctgggttttctcgtcttggtcatcttttttatattccgaagaacttgtttgtgtaagcaaccccattggagttgttctaaaaggtcttcttgttttagagcgctgtcttgaagatcgtaattgtgttttcatttggccccttcaatcaactttacctatcccttaccttaacttttcaacctcgccaacagcatcaaatactataatagacctctgtttacattaatttttccatggaagctcaacagattatttccagattttgcccaaaatcatcactagcgccatcaattccaatggtgaagcaaccgttctctttaaatttccctcctctacactctttatcgtcatacccttttctccagtctcagaatcttggcttccctactggagctttacatgctatcagctttgtgcacaaagaagtttgttctagttcttggagaatatggtgtagcaagagtagtagtagtactgcagaaccagaggaggaccatgaggtgagggctcaggtcacagtgagaaggaaaaagctagcagttttcgtgtctgggggaggatccaactttagatcaattcacgaggcctctaaaaagggatcgcttcatggagatgttactgtattggtcacaaataaaagtgagtgtggaggtgcacagtatgcaagaaataatggtatcccagttatattgttccctaaagcaaaggatgaacccaaaggattatctccttgtgaccttgttgatacactaaggaaattcgaggtggattttgttcttttagctggatacctcaaactgatacccgtagaattgatccgagcttttgaaagatctatattcaacattcatccatcacttcttccagcttttggaggcaagggctactatggcatgaaggttcataaagcagtaattgcttctggagcaaggttttcaggtccaaccattcattttgttgatgaacactatgacaccgggcgtatccttgcacaacgtgtggtccctgtgcttgctaatgatactgcagaggagttggctgcaagggttctcaatgaggagcaccaattatatgttgaggtggtggaggctttatgtgaagagcgtatcgtttggaggaaagatggtgttcctctcatccaaagcagagaaaaccccaatgagtttctctgattatcattaatatggtatgatactcttttactttgagtactgtaaaaagtttttgtatacatctttttacaatgatgaagtcttgcatctgatgggacttttgtttctgttataggggattttggttgtgaaaacttcacatttaccccaaagctgttgtagttaatgaattgtaactattaggtaggtaatttctggtgcactgatatcatatctctaaggcaacatataataagcaagaaatcacaaacttatcttctga

SEQ ID NO: 56133 - protein, 312 aa, Vigna unguiculata
MEAQQIISRFCPKSSLAPSIPMVKQPFSLNFPPLHSLSSYPFLQSQNLGFPTGALHAISFVHKEVCSSSWRIWCSKSSSSTAEPEEDHEVRAQVTVRRKKLAVFVSGGGSNFRSIHEASKKGSLHGDVTVLVTNKSECGGAQYARNNGIPVILFPKAKDEPKGLSPCDLVDTLRKFEVDFVLLAGYLKLIPVELIRAFERSIFNIHPSLLPAFGGKGYYGMKVHKAVIASGARFSGPTIHFVDEHYDTGRILAQRVVPVLANDTAEELAARVLNEEHQLYVEVVEALCEERIVWRKDGVPLIQSRENPNEFL

SEQ ID NO: 56134 - DNA, 645 bp, Saccharomyces cerevisiae
  CDS (1)..(645)
atggccagaattgtcgtattaatttcgggctcaggttccaacttgcaagccttgatcgatgcccaaaagcagggccaattaggcgaggatgctcatattgtctctgtcatatcttccagcaagaaggcatacgggttaactagggcagcggacaataatatccccacaaaggtttgttcgctatacccatatacaaagggtattgcgaaggaggacaaagccgcaagggccaaggcaagatcccagtttgagaacgacctcgcaaaactagtgctcgaggaaaagcctgacgttatcatctgcgcgggctggttattgatccttggatctactttcttgagccaactgcaatctgtgccgatattaaatctgcatccagcgctaccaggttgtttcgatggtaccacacacgcaattgaaatggcatggcgcaaatgtcaggacgagaacaagcctctgacggccggatgcatggtgcactatgtcatcgaggaggtcgacaagggtgagccattggtggtaaaaaagctagaaatcatacctggcgaagaaacactagagcagtacgagcaaagggtacacgatgctgagcacatcgcgattgtagaagctacatataaggttttacagcagcttcacaaataa

SEQ ID NO: 56135 - protein, 214 aa, Saccharomyces cerevisiae
MARIVVLISGSGSNLQALIDAQKQGQLGEDAHIVSVISSSKKAYGLTRAADNNIPTKVCSLYPYTKGIAKEDKAARAKARSQFENDLAKLVLEEKPDVIICAGWLLILGSTFLSQLQSVPILNLHPALPGCFDGTTHAIEMAWRKCQDENKPLTAGCMVHYVIEEVDKGEPLVVKKLEIIPGEETLEQYEQRVHDAEHIAIVEATYKVLQQLHK

SEQ ID NO: 56136 - DNA, 705 bp, Oryza sativa
  CDS (1)..(705)
atgcggcggtgggggcgggggcgaagggggggtgaggctaggggtgtcggggtggagaggaagaggctcgtggtgttcgtgtccggtgggggatccaacttccgggcgatccacgatgccgctctgggtggggacgtgaatggcgttgtggttgcgttggttaccgataaaccaggctgtggaggagcagagcatgcgaggggtaatggcataccggtcgttgtgttccctaagttgaagtctgctccagagggggtatctactgatgagctgttgaatggtctgagggaactcagggtagacttcattctacttgctggctacctgaagcttataccggttgagctagttcaggcatatccaaaatccattttgaatattcacccttcactactcccggcatttggaggcaaaggttattatggtttgaaggtgcataaagcagtcatcgcatcaggagccaggtactcgggtccaactgtgcactttgtggatgagcactatgacacaggaaggactctagcccaaagggttgtacctgtgcaagccaatgatactccagagcaattggctacaagagtccttcatgaggaacatcaggtttatgttgaggcagttactgccctatgtgaggaccgaattgtgtggagagaagatggtatcccacttattagaagccagacaaatcccgatgagtacacttaa

SEQ ID NO: 56137 - protein, 234 aa, Oryza sativa
MRRWGRGRRGGEARGVGVERKRLVVFVSGGGSNFRAIHDAALGGDVNGVVVALVTDKPGCGGAEHARGNGIPVVVFPKLKSAPEGVSTDELLNGLRELRVDFILLAGYLKLIPVELVQAYPKSILNIHPSLLPAFGGKGYYGLKVHKAVIASGARYSGPTVHFVDEHYDTGRTLAQRVVPVQANDTPEQLATRVLHEEHQVYVEAVTALCEDRIVWREDGIPLIRSQTNPDEYT

SEQ ID NO: 56138 - DNA, 981 bp, Brassica napus
  CDS (1)..(981)
atgatgatgcgaagaatctccgagagagctgctactggtttctctaagaacttgatcctcagatcctctgcgtcgcggtttcacggcgagtctctcgattcctccgtctcacccgttctcattcccggcgtccatgtcttccactgccaggacgcagttggaatcgtagcgaagctatcagattgcattgcagctaaaggcggaaacattctcgggtacgatgtctttgttcctgagaacaacaacgtcttctactctcgcagtgagtttatatttgatccggtgaaatggccgagacagcagatgtgtgaagattttcaagctattgcgcaaagatacggtgccatgaactctgttgttcgtgtgccttctatagatcccaagtataagattgctcttctactctcaaaacaggatcattgtctggtcgaaatgttgcatagatggcaagacggaaaactccctgttgatatcacctgtgtgattagcaatcatgagagagcttcaaacactcatgttatgcggtttcttgagaggcatggcattccgtatcattatgtagccaaaactaaagataataaacgagaagatgagattctggaattggttaaagacactgacttcttagttctcgctagatacatgcagattctgtcgggtaacttcttgaaaggttatggaaaggatgtaatcaacatccaccatggtctcttgccatcattcaagggcggatatccagccaaacaggcctttgatgcaggtgtgaagctgattggagcaacaagtcactttgttactgaggaacttgatgcagggcctatcattgaacaaatggttgagagtgtttcccaccgggacaatctaaggagctttgtccagaaatctgaggacctcgagaaaaaatgcctcacaaaagctataaagtcatactgtgaactacgggtgttaccttatggaacaaacaagactgttgtattctaa

SEQ ID NO: 56139 - protein, 326 aa, Brassica napus
MMMRRISERAATGFSKNLILRSSASRFHGESLDSSVSPVLIPGVHVFHCQDAVGIVAKLSDCIAAKGGNILGYDVFVPENNNVFYSRSEFIFDPVKWPRQQMCEDFQAIAQRYGAMNSVVRVPSIDPKYKIALLLSKQDHCLVEMLHRWQDGKLPVDITCVISNHERASNTHVMRFLERHGIPYHYVAKTKDNKREDEILELVKDTDFLVLARYMQILSGNFLKGYGKDVINIHHGLLPSFKGGYPAKQAFDAGVKLIGATSHFVTEELDAGPIIEQMVESVSHRDNLRSFVQKSEDLEKKCLTKAIKSYCELRVLPYGTNKTVVF

SEQ ID NO: 56140 - DNA, 867 bp, Zea mays
  CDS (1)..(867)
atggaggccgcgatcgctcacgctccatctgctccggccctgcgccgctcgctcagcctcaaccccacgcccgccgtccggccgcacccaaaaccctggcagggggtgctttcggcgaggcacccgtcgaacgccgtcaggtgcgagccgtcccagcgcccagaggcgcgcccgcgcctgcgcgctgcgcagccggctggcgctgacgcggcggtcgggaggaagcggctggcagtgttcgtgtccggagggggatcaaacttccgggcgatccatgaggccgcgctgggcggcgccgtgcacggagatgtcgtcgcgcttgtcaccgacaagccaggttgcggtggcgcggaatatgctacgaacaatggcatccctgtgctcgtatttcccaagtccaagtctgcgcccgaggggatttcggttgctcaactgctggatactctgaggggaaacaatgtagactttgttcttcttgccggttacctgaagcttatacccactgaattgatccaggaatacccaaaatccatattaaatatccacccttctctccttccggcattcggagggaaaggtttctatggttcaaaggtgcataaagctgttattgcctctggggcaagatactcgggtccaaccgtacattttgtggatgagcactatgataccggtaaaacgttagcccagagggttgtgcctgtgttcgcagatgacaccccagagttattggctgcaagagtcctccatgaggaacatatggtctatgttgaagcagttgctgctttgtgcgaggaccgcgtcgtatggagggaagatggtgtcccacttatcaaaagtcggacaaatccagctgtgtacatctaa

SEQ ID NO: 56141 - protein, 288 aa, Zea mays
MEAAIAHAPSAPALRRSLSLNPTPAVRPHPKPWQGVLSARHPSNAVRCEPSQRPEARPRLRAAQPAGADAAVGRKRLAVFVSGGGSNFRAIHEAALGGAVHGDVVALVTDKPGCGGAEYATNNGIPVLVFPKSKSAPEGISVAQLLDTLRGNNVDFVLLAGYLKLIPTELIQEYPKSILNIHPSLLPAFGGKGFYGSKVHKAVIASGARYSGPTVHFVDEHYDTGKTLAQRVVPVFADDTPELLAARVLHEEHMVYVEAVAALCEDRVVWREDGVPLIKSRTNPAVYI

SEQ ID NO: 56142 - DNA, 981 bp, Brassica napus
  CDS (1)..(981)
atgatgatgcgaagaatctccgagagagctgctactggtttctctaagaacttgatcctcagatcctctgcgtcgcggtttcacggcgagtctctcgattcctccgtctcacccgttctcattcccggcgtccatgtcttccactgccaggacgcagttggaatcgtagcgaagctatcagattgcattgcagctaaaggcggaaacattctcgggtacgatgtctttgttcctgagaacaacaacgtcttctactctcgcagtgagtttatatttgatccggtgaaatggccgagagagcaaatgagtgaagattttcaagctattgcgcaaagattcggtgccatgaactctgttgttcgtgttccttctatagatcccaagtataagattgctcttctactttctaaacaggatcattgtctggtggaaatgttgcatagatggcaagacggaaaactccctgtggatataacatgtgtgataagcaatcatgagagagcttcaaacactcatgttatgcggtttcttgagaggcatggcattccgtatcattatgtagccaaaactaaagataataaacgagaagatgagattctggaattggttaaagacactgacttcttagttctcgctagatacatgcagattctgtcgggtaacttcttgaaaggttatggaaaggatgtaatcaacatccaccatggtctcttgccatcattcaagggcggatatccagccaaacaggcctttgatgcaggtgtgaagctgattggagcaacaagtcactttgttactgaggaacttgatgcagggcctatcattgaacaaatggttgagagtgtttcccaccgggacaatctaaggagctttgtccagaaatctgaggacctcgagaaaaaatgcctaacaaaagctataaagtcatactgcgaactacgtgtgttaccttatggagcaaacaagactgttgtattctaa

SEQ ID NO: 56143 - protein, 326 aa, Brassica napus
MMMRRISERAATGFSKNLILRSSASRFHGESLDSSVSPVLIPGVHVFHCQDAVGIVAKLSDCIAAKGGNILGYDVFVPENNNVFYSRSEFIFDPVKWPREQMSEDFQAIAQRFGAMNSVVRVPSIDPKYKIALLLSKQDHCLVEMLHRWQDGKLPVDITCVISNHERASNTHVMRFLERHGIPYHYVAKTKDNKREDEILELVKDTDFLVLARYMQILSGNFLKGYGKDVINIHHGLLPSFKGGYPAKQAFDAGVKLIGATSHFVTEELDAGPIIEQMVESVSHRDNLRSFVQKSEDLEKKCLTKAIKSYCELRVLPYGANKTVVF

SEQ ID NO: 56144 - DNA, 867 bp, Zea mays
  CDS (1)..(867)
atggaggccgcgatcgctcacgctccatctgctccggccctgcgccgctcgcgcagcctcaaccccacgcccgccgtccggccgcacccaaaaccctggcagggggtgctttcggcgaggcacccgtcgaacgccgtcaggtgcgagccgtcccagcgcccagaggcgcgcccgcgcctgcgcgcgacgcagccggctggcgctgacgcggcggccgggaggaagcggctggcagtgttcgtgtccggagggggatcaaacttccgggcgatccatgaggccgcgctgggcggcgccgtgcacggagatgtcgtcgcgcttgtcaccgacaagccaggttgcggtggcgcggaatatgctacgaacaatgacatccctgtgctcgtatttcccaagtccaagtctgcgcccgaggggatttcggttgctcaactgctggatactctgaggggaaacaatgtagactttgttcttcttgccggttacctgaagcttatacccactgaattgatccaggaatacccaaaatccatattaaatatccacccttctctccttccagcattcggagggaaaggtttctatggttcaaaggtgcataaagctgttattgcctctggagcaagatactcgggtccaaccgtacattttgtggatgagcactatgataccggtaaaacgttagcccagagggttgtgcctgtgttcgcagatgacaccccagagctattggctgcaagagtcctccatgaggaacatatggtctatgttgaagcagttgctgctttgtgcgaggaccgcgtcgtatggagggaagatggtgtcccacttatcaaaagtcggacaaatccagctgtgtacatctaa

SEQ ID NO: 56145 - protein, 288 aa, Zea mays
MEAAIAHAPSAPALRRSRSLNPTPAVRPHPKPWQGVLSARHPSNAVRCEPSQRPEARPRLRATQPAGADAAAGRKRLAVFVSGGGSNFRAIHEAALGGAVHGDVVALVTDKPGCGGAEYATNNDIPVLVFPKSKSAPEGISVAQLLDTLRGNNVDFVLLAGYLKLIPTELIQEYPKSILNIHPSLLPAFGGKGFYGSKVHKAVIASGARYSGPTVHFVDEHYDTGKTLAQRVVPVFADDTPELLAARVLHEEHMVYVEAVAALCEDRVVWREDGVPLIKSRTNPAVYI

SEQ ID NO: 56146 - DNA, 867 bp, Zea mays
  CDS (1)..(867)
atggaggccgcgatcgctcacgctccatctgctccggccctgcgccgctcgctcaacctcaaccccacgcccgccgtccggccgcacccaaaaccctggcagggggtgctttcggcgaggcacccgtcgaacgccgtcaggtgcgagccgtcccagcgcccagaggcgcgcccgcgcctgcgcgctgcgcagccggctggcgctgacgcggcggtcgggaggaagcggctggcagtgttcgtgtccggagggggatcaaacttccgggcgatccatgaggccgcgctgggcggcgccgtgcacggagatgtcgtcgcgcttgtcaccgacaagccaggttgcggtggcgcggaatatgctacgaacaatggcatccctgtgctcgtatttcccaagtccaagtctgcgcccgaggggatttcggttgctcaactgctggatactctgaggggaaacaatgtagactttgttcttcttgccggttacctgaagcttatacccactgaattgatccaggaatacccaaaatccatattaaatatccacccttctctccttccggcattcggagggaaaggtttctatggttcaaaggtgcataaagctgttattgcctctggggcaagatactcgggtccaaccgtacattttgtggatgagcactatgataccggtaaaacgttagcccagagggttgtgcctgtgttcgcagatgacaccccagagttattggctgcaagagtcctccatgaggaacatatggtctatgttgaagcagttgctgctttgtgcgaggaccgcgtcgtatggagggaagatggtgtcccacttatcaaaagtcggacaaatccagctgtgtacatctaa

SEQ ID NO: 56147 - protein, 288 aa, Zea mays
MEAAIAHAPSAPALRRSLNLNPTPAVRPHPKPWQGVLSARHPSNAVRCEPSQRPEARPRLRAAQPAGADAAVGRKRLAVFVSGGGSNFRAIHEAALGGAVHGDVVALVTDKPGCGGAEYATNNGIPVLVFPKSKSAPEGISVAQLLDTLRGNNVDFVLLAGYLKLIPTELIQEYPKSILNIHPSLLPAFGGKGFYGSKVHKAVIASGARYSGPTVHFVDEHYDTGKTLAQRVVPVFADDTPELLAARVLHEEHMVYVEAVAALCEDRVVWREDGVPLIKSRTNPAVYI

SEQ ID NO: 56148 - DNA, 21 bp, Artificial sequence
  primer
atgtcggctatgtcagatttg

SEQ ID NO: 56149 - DNA, 20 bp, Artificial sequence
  primer
ttatgggctttgctgggcgg

SEQ ID NO: 56150 - protein, 206 aa, Artificial sequence
  consensus sequence
  Variant (3)..(3): Xaa in position 3 is any amino acid
  Variant (7)..(8): Xaa in position 7 to 8 is any amino acid
  Variant (10)..(33): Xaa in position 10 to 33 is any amino acid
  Variant (34)..(41): Xaa in position 34 to 41 is any or no amino acid
  Variant (43)..(76): Xaa in position 43 to 76 is any amino acid
  Variant (77)..(97): Xaa in position 77 to 97 is any or no amino acid
  Variant (100)..(100): Xaa in position 100 is any amino acid
  Variant (102)..(115): Xaa in position 102 to 115 is any amino acid
  Variant (116)..(120): Xaa in position 116 to 120 is any or no amino acid
  Variant (129)..(131): Xaa in position 129 to 131 is any amino acid
  Variant (132)..(137): Xaa in position 132 to 137 is any or no amino acid
  Variant (139)..(144): Xaa in position 139 to 144 is any amino acid
  Variant (145)..(145): Xaa in position 145 is any or no amino acid
  Variant (147)..(149): Xaa in position 147 to 149 is any amino acid
  Variant (151)..(154): Xaa in position 151 to 154 is any amino acid
  Variant (155)..(160): Xaa in position 155 to 160 is any or no amino acid
  Variant (162)..(164): Xaa in position 162 to 164 is any amino acid
  Variant (166)..(166): Xaa in position 166 is any amino acid
  Variant (168)..(171): Xaa in position 168 to 171 is any amino acid
  Variant (173)..(173): Xaa in position 173 is any amino acid
  Variant (175)..(178): Xaa in position 175 to 178 is any amino acid
  Variant (180)..(181): Xaa in position 180 to 181 is any amino acid
  Variant (184)..(186): Xaa in position 184 to 186 is any amino acid
  Variant (187)..(188): Xaa in position 187 to 188 is any or no amino acid
  Variant (190)..(193): Xaa in position 190 to 193 is any amino acid
  Variant (194)..(196): Xaa in position 194 to 196 is any or no amino acid
  Variant (198)..(199): Xaa in position 198 to 199 is any amino acid
  Variant (201)..(204): Xaa in position 201 to 204 is any amino acid
SGXGSNXXAXXXXXXXXXXXXXXXXXXXXXXXXXXXXXXXXAXXXXXXXXXXXXXXXXXXXXXXXXXXXXXXXXXXXXXXXXXXXXXXXXXXXXXXXAGXMXXXXXXXXXXXXXXXXXXXNIHPSLLPXXXXXXXXXGXXXXXXXAXXXGXXXXXXXXXXGXXXHXVXXXXDXGXXXXQXXVPXXXXXDXXXXXXXLXXRXXXXEH

SEQ ID NO: 56151 - protein, 12 aa, Artificial sequence
  protein pattern
  Variant (5)..(5): Xaa in position 5 is Ala or Ser
  Variant (9)..(9): Xaa in position 9 is any amino acid
  Variant (10)..(10): Xaa in position 10 is Phe or Tyr
  Variant (11)..(11): Xaa in position 11 is any amino acid
NIHPXLLPXXXG

SEQ ID NO: 56152 - protein, 15 aa, Artificial sequence
  protein pattern
  Variant (2)..(2): Xaa in position 2 is any amino acid
  Variant (3)..(5): Xaa in position 3 to 5 is any or no amino acid
  Variant (8)..(8): Xaa in position 8 is any amino acid
  Variant (10)..(10): Xaa in position 10 is Ser or Thr
  Variant (12)..(12): Xaa in position 12 is Phe, Leu or Met
  Variant (13)..(13): Xaa in position 13 is any amino acid
  Variant (14)..(14): Xaa in position 14 is Ala, Ser or Val
  Variant (15)..(15): Xaa in position 15 is Phe, Ile, Leu or Val
LXXXXSGXGXNXXXX

SEQ ID NO: 56153 - DNA, 1662 bp, Synechocystis sp.
  CDS (1)..(1662): transl_table=11
atggttgtcgtcaggcgatcgaggcagtgtaccatttccaaccgcctagtctggacaggaaagggtaagggagaccaactcctgggggataatgggggatggaaaaattaccaagaggagaaggcaatggcccgtttagccctgctgagtgtgtccgacaaaagtggcattgtggaactggcccaacggctagtgaatgaatttcagtttgacctgatcagtagtggtggtactgccaaaaccctcaaagaagctggggttcctgtcaccaaggtgagtgattacaccggggcaccagaaattttgggtggacgggtcaaaacgttgcatccccgcatccatgggggtattttagcccggcgggatttgcccagtgaccaggcggatttagaagctaacgatattcgtccgttagatctggtcgtggttaacctttatccctttgagcaaaccattgctaaaccgggggtcaccgttgctgaagcagtggaacagattgatattggtggcccggccatgattcgagccaccgccaaaaactttgcccataccactgtcctcaccaatcccaaccagtacgaagcctatctccaagctctgcaggaacagggggaaatacccttggctttgcgccaacaattcgctggggaagcctttgccctcaccaatgcctatgaccaggcgatcgccaattatttcagtggtttaagtggggacagtgcaaaccaatttggccttagcggtacattgcggcaaccgttgcggtatggggaaaatccccaccaaagtgcaggttggtatcaaactgggcgggaagccaccggctgggccaaggccgagaaactccagggcaaggaactgagctataacaatttggtggatttggaagcagcccggcgcattatcaacgaattcgatgtcagggaaccggcggcggtgattttaaagcacactaatccctgcggtgtcgccctggcccccacattggtagaagcctatcaaaaagcctttaatgctgatgccacttccgcttttgggggcattgtcgccttgaatcaacccctggatggacccacggcggcggccatggtcaaaacttttttggaatgtattgtggccccgggctgtgatgctgaagcccaggaaattctagctaagaaaaacaatttgcgggtattgattctccccgatctggccaccggccccagccaaaccattaaggcgatcgccggaggatttttagtacagtcagcggatgatgaacgggaagaccccagcacttggcaggtggtgacggaaaaacaacccagtggggaggagttggcggaactagcttttgcctggaaagtgtgcaaacacgttaaatccaacgccatcaccatcaccaaaaataaaaccaccttgggggtgggagcaggacaaatgaatcgagtcggctcggtggaaattgcccttaaacaagcgggcacagaagcccagggagcttgcttggccagtgatgcgttctttccctttgacgattctgtccgcaccgccgccgccgccggcattaccaccatcatccaaccgggggggtccatgcgggaccaggattccatccaagcggccaacgaattgggcttagtgatgattttcactggggtgcgccatttcctccactaa

SEQ ID NO: 56154 - protein, 553 aa, Synechocystis sp.
MVVVRRSRQCTISNRLVWTGKGKGDQLLGDNGGWKNYQEEKAMARLALLSVSDKSGIVELAQRLVNEFQFDLISSGGTAKTLKEAGVPVTKVSDYTGAPEILGGRVKTLHPRIHGGILARRDLPSDQADLEANDIRPLDLVVVNLYPFEQTIAKPGVTVAEAVEQIDIGGPAMIRATAKNFAHTTVLTNPNQYEAYLQALQEQGEIPLALRQQFAGEAFALTNAYDQAIANYFSGLSGDSANQFGLSGTLRQPLRYGENPHQSAGWYQTGREATGWAKAEKLQGKELSYNNLVDLEAARRIINEFDVREPAAVILKHTNPCGVALAPTLVEAYQKAFNADATSAFGGIVALNQPLDGPTAAAMVKTFLECIVAPGCDAEAQEILAKKNNLRVLILPDLATGPSQTIKAIAGGFLVQSADDEREDPSTWQVVTEKQPSGEELAELAFAWKVCKHVKSNAITITKNKTTLGVGAGQMNRVGSVEIALKQAGTEAQGACLASDAFFPFDDSVRTAAAAGITTIIQPGGSMRDQDSIQAANELGLVMIFTGVRHFLH

SEQ ID NO: 56155 - DNA, 2182 bp, Zea mays
  CDS (199)..(1842)
cgggagaaagggacgggaaggtgccaataaattgcgaggatgccgctttatctcttctctcccgccgccgccaagctcgccaccggcccacacgcgtccctgcaccggcggcgccagttcctcttccgagttccccaccgccccagccgccgcgccccactgctaacttcggcggctgagcgtccagcagggcgcaccatggctactgcggataccggagcgtccacggtgaccgattcgaggctccgagctacaggagtgaagcaagcactgatatcattgtcagataaaacagacctggctaatcttggaaatggtcttcagcgtttggggttttctattatttccactggtggcacggcatcaagtttggaagcatctggtgttaatgttacaaaagttgaagaaattacacagtttcctgaaatgcttgatggaagagtaaaaacattgcaccccagtatacatggtggtattcttgcgcgaagagaccaggagcaccatctgaaagcactgaaagagcatggcattgggacatttgatgtggttgtagtgaatttgtatccattctatgataaggtcacctcaggtgcaatatcttttgaggatggcattgaaaatattgatattggtgggcctacattgatccgagctgctgccaagaatcataaggacgttcttgtcgttgttgatcataaagactatcctgctctactggaatatctagaagggaaacaagatgaccctgatttccgcaggacacttgcatggaaagcattccaacatgttgcttcctatgattctgctatctcggagtggttgtggaagcaatctaataaagattcatttcctcccagctttactgtgcccctcacaatgaagtctacacttcgctatggtgagaatcctcatcaaaaggctgccttttatggtgacaggagtctttctctagtaaatgctggcggtattgcaacagcaattcagcaccatggaaaggaaatgtcctacaacaactatctggacgcggacgctgcgtggaactgcgtctcggagtttgagagcccgacttgcgtcgtggttaagcacacaaatccgtgtggcgtagcgtctcggcacgacatcctggaagcgtacaggttggctgtgagggcagaccccgtgagcgcgttcggaggcatagtcgccttcaacacgacggtcgacgaggatctcgcgagggagatccgggagttcaggaggccgacggacggcgagacgaggatgttctacgagatcgtggtggcgcctgggtacacggcggagggcctggaggtgctgaaagggaagtcgaagacgctgaggatactggaggcgaagcggaggaggagcgggaagggcacgctgctgtcgctgcggcaggtcggcggcggctggctggcccaggagcccgacgacgtgaccccggaggacgtggccttcacgaacgtgtccgagagggctcccgacgcccgtgagctctcggacgccaagttcgcgtgcctctgcgtcaagcacgtgaagagcaacgccattgtgatcgccaagaacagttgcatgctgggcatgggcagtggccagccgaaccggctggagagcctgaggatcgctttcaggaaggcaggggaggaggccaagggagctgctttggccagcgacgccttcttcccgttcgcttggaacgacgcggtggaggaggcgtgccagcgcggcgtggcggtgatcgcagagcccggcggcagcatccgggaccaggacgccgtggagtgctgcaacaagtacggggtggccctcgtcttcaccggcgtccggcacttcaggcactgatcgacggcgacggcgagggtggcaacgtagaccgtcacggacgatggtacctgtagctgcgtcgacctgatgcccgctggcgtttcttggctagggagactgatgacgctgaagcaaccaaatgtcgcctcctctagtctggagaggatgggtcggtgggtcccggtttgtatatataacgtcgtcagcctggcaagaggttgactgagcttagtgactcttgcggtggatggaaatcggaaacggtcgctgacccggtgggaccgcacagtctgttgcttggctacatgccgtgttattattattaatactatttattgctgtcacgttacatgacacc

SEQ ID NO: 56156 - protein, 547 aa, Zea mays
MATADTGASTVTDSRLRATGVKQALISLSDKTDLANLGNGLQRLGFSIISTGGTASSLEASGVNVTKVEEITQFPEMLDGRVKTLHPSIHGGILARRDQEHHLKALKEHGIGTFDVVVVNLYPFYDKVTSGAISFEDGIENIDIGGPTLIRAAAKNHKDVLVVVDHKDYPALLEYLEGKQDDPDFRRTLAWKAFQHVASYDSAISEWLWKQSNKDSFPPSFTVPLTMKSTLRYGENPHQKAAFYGDRSLSLVNAGGIATAIQHHGKEMSYNNYLDADAAWNCVSEFESPTCVVVKHTNPCGVASRHDILEAYRLAVRADPVSAFGGIVAFNTTVDEDLAREIREFRRPTDGETRMFYEIVVAPGYTAEGLEVLKGKSKTLRILEAKRRRSGKGTLLSLRQVGGGWLAQEPDDVTPEDVAFTNVSERAPDARELSDAKFACLCVKHVKSNAIVIAKNSCMLGMGSGQPNRLESLRIAFRKAGEEAKGAALASDAFFPFAWNDAVEEACQRGVAVIAEPGGSIRDQDAVECCNKYGVALVFTGVRHFRH

SEQ ID NO: 56157 - DNA, 2779 bp, Zea mays
  CDS (315)..(2264)
ggaaagcgagacgatcagcagttccccaggatgttggcatggaaagccatgcagcatgtcgcctcttatgattctgcagtgtcagaatggttgtggaagcaatcaaataaaggtagtgtttcagcaacagactgaatagttgaattcattattgtaaataggactattggatttagtggcagccttcggaaaacggtgatagcgtcgctatagtctgctattttcttagcagtggttacaacaacagctctcagaagctgctataacaccactatttacaacacagattgaatttttaagtgacatttgactgcatgcatgttattttggtactcgagcggccgggacaattagaaatagaaaaaattcttcgcagccgttctttcctgtaccctgcacctgccttttactccattcccctcggtgcgccgccgccagtccgccccgccccgccccgcccagcagacagcgcagccatgccgctccacctccacctgctgtcgtccccggccaccgctgccaagctcgcggcaggtctgcgtgcggcgcctctccgccggtgccacagcttggccccggcgccgcgccacacggatcgcgtggcccttgcgtcgtccctctcggcggtggcgcggtctgctggccccgccgtggcagcggcgcagaccaagcccagcgtttcaggaaagaaacaagtattgatatccttgtcggataaaacggatttggcttatcttggcaatggtcttcagggtttggggtattccatcgtttccactggtggaacagcatccagtctggaagcagcaggagtcagtgtaacaaaagttgaagaaatcacacacttccctgaaatgcttgatggacgagtgaaaacattgcacccaagtatacatggtggtattcttgccaggagagaccaggagcatcatttgaaggcactaaaagatcatggaattgggacatttgatgtggttgtggtgaatttgtatcccttttatgacaaagtcacctctggtaacatctcttttgaggatggcattgaaaatattgatattggtgggcccacgatgatcagagctgcagccaagaaccataaggatgttcttattgtggtggatcataatgattatcctgctttactggagtaccttaaaggaaagcgagacgatcagcagttccccaggatgttggcatggaaagccatgcagcatgtcgcctcttatgattctgcagtgtcagaatggttgtggaagcaatcaaataaaggagagatgttccccccaagctttactgtgccactggagctgaagtctacactccggtatggcgaaaatcctcatcagagtgctgcattctatgctgacaagagcctttctcttgtcggtgctggtggtattgccactgctattcaacaccatggaaaggaaatgtcttacaacaactacttggatgcggatgctgcatggaactgtgtatcggagtttgatagtcctacttgtgttgtggtgaagcacacaaatccatgtggtgttgcctcacgaaaggatattcttgaagcttacaggttagctgtaaggggagatgctgtcagtgcatttggtgggatagttgcattcaacacgactattgacgaggatcttgcgaaggaaattcgtgagttcaggagtcctacagatggtgagacgcggatgttctatgagatagtggttgctcccggctatacggagaagggtcttgaggttctcagaggcaagtccaaggcactgaggatactcgaggcgaagagaagtggaaaagggatgctttcacttaggcaggtgagtggtgggtggttagctcaggagtctgatgatctaacccctgaagagatcacctttaccacaaagtctgagaggtctccgcaagaaaacgagcttgccgatgccaaatttgcctggctttgcgcaaaacatgtcaagagcaacgcaattgtgatagccaagaacaactgcatgctgggaatgggcagtggtcagccgaacaggcgagagagcgttcgaatcgccttcaggaaggcaggagaggaggccaagggagccgcattggccagcgacgccttctttccctttgcctggaatgatgccgtcgaggaggcgtgccagaacggcatcggcatcatcgcccagccaggaggcagtaagaaggacgaggacgccgtcgcgtgctgcaacaagtatggtgtgtcgctcgtcctcaccggcgtcaggcacttcaagcattagccgtcatgccccatggctggtcatcttagcttagggagttacggaaaaaaaaacaagcttcgaaggctgcagcttgtggagctgccctgatgtttagctttctgcaaagtgcaaaactgcaaattttggtttctgtagggcgtaggctttggtgggtgagctcgtggggaaggtaatgtttctcctggagtcgaataagctgatgggtgtaccgcgagtgacaattgaacccaacctaaggacttgcaggttggtacttttatctgtcaaaatcagccgtgcgcctatgcaccaggagaatcatcgatgtgacctacaatcttcggactacaaaccattgaaaaataaaaagagaaaaggtgcctgggaaaaaaaaaaaaaaaaaaaatatgagcgttaaaaaaaaaaaaaaaaagcggcccaaaaaaaaaaaaaaaaaaaaaaaaaaaaaaaaaaaaaaaaaaaaaaagggcggccgccgactagtgagctcgtcgacccgggaattaattccg

SEQ ID NO: 56158 - protein, 649 aa, Zea mays
MHVILVLERPGQLEIEKILRSRSFLYPAPAFYSIPLGAPPPVRPAPPRPADSAAMPLHLHLLSSPATAAKLAAGLRAAPLRRCHSLAPAPRHTDRVALASSLSAVARSAGPAVAAAQTKPSVSGKKQVLISLSDKTDLAYLGNGLQGLGYSIVSTGGTASSLEAAGVSVTKVEEITHFPEMLDGRVKTLHPSIHGGILARRDQEHHLKALKDHGIGTFDVVVVNLYPFYDKVTSGNISFEDGIENIDIGGPTMIRAAAKNHKDVLIVVDHNDYPALLEYLKGKRDDQQFPRMLAWKAMQHVASYDSAVSEWLWKQSNKGEMFPPSFTVPLELKSTLRYGENPHQSAAFYADKSLSLVGAGGIATAIQHHGKEMSYNNYLDADAAWNCVSEFDSPTCVVVKHTNPCGVASRKDILEAYRLAVRGDAVSAFGGIVAFNTTIDEDLAKEIREFRSPTDGETRMFYEIVVAPGYTEKGLEVLRGKSKALRILEAKRSGKGMLSLRQVSGGWLAQESDDLTPEEITFTTKSERSPQENELADAKFAWLCAKHVKSNAIVIAKNNCMLGMGSGQPNRRESVRIAFRKAGEEAKGAALASDAFFPFAWNDAVEEACQNGIGIIAQPGGSKKDEDAVACCNKYGVSLVLTGVRHFKH

SEQ ID NO: 56159 - DNA, 1578 bp, Kineococcus radiotolerans SRS30216
  CDS (1)..(1578): transl_table=11
atggcacaggagacccccgaggcccgcgtccccgtcaagcgcgcgctggtcagcgtctacgacaagaccggcctggaggaactcgcccaggggctgcacgccgccggcgtcgcgctcgtctccaccggctccaccgccgcccgcatcgccgccgccggtgtcccggtcaccccggtggaggacctcaccggcttccccgagtgcctcgacgggcgggtcaagacgctgcacccgcgcgtccacgccggcatcctcgccgaccgccgcctgcccgaccacgtccgccagctcgccgagctcgacgtcgagcccttcgacctcgtcgtcgtgaacctctaccccttcgccgcgaccgtcgcctccggcgccggctacgacgacgtcgtcgagcagatcgacatcggcggcccctcgatggtccgcgccgcggccaagaaccaccccagcgtcgccgtcgtcgtcgaccccgcccgctacggcgacgtcctggacgccgtcgccgccggcgggttcgacctgcccgcccgcaagcggctggccgccgccgcgttcgcgcacaccgcggcctacgacaccgccgtcgccgggtggttcgccgagcagaccctgagcgaggaggacggcggctggcccgcggtcaccggcgtcgccctggaacgcgccgacgtcctgcgctacggcgagaacccccaccagcaggccgccgtctacgtcgacccgaccgccgccccgggcatcgcgcaggccgtccagctgcacggcaaggccatgtcctacaacaactacgtcgacgccgacgccgccctgcgcgccgcccacgacctcgacggccccgccgtcgccgtcatcaagcacgccaacccctgcggcatcgccaccggcaccgacgtcgccgacgcccatgccaaggcccacgcctgcgacccggtgtccgccttcggcggggtcatcgccgccaaccgcgtcgtgaccgccgcgatggccgcccaggtcgccgacgtgttcaccgaggtcgtcatcgcccccggcttcgaacccgaggcgctggagaccctgcgggccaagaagaacatccgcctgctgcagctgcccgagggctacggccgcggcgcgcgggagtggcgcccggtctccggcggcgtcctcgtccaggagctggaccgcgtcgacgcccacggcgacgaccccgcgaactggacgctggccgccggcgaggccgccgacgagcagaccctcgccgacctcgagttcgcctggcgcgcggtgcgctcggtgcgctccaacgccatcctgctggcccgcgacggcgcgtccgtcggggtcgggatggggcaggtcaaccgcgtcgactcctgcaagctggccgtcgagcgcgccggcgccgagcgcgccgcggggtcggtcgcggcctccgacgccttcttccccttcgccgacggggcgcagatcctcctcgacgccggggtgcgcgccatcgtccagccgggcgggtcgatccgcgacggcgaggtcgtcgaggccgcgacgaaggccgggatcaccatgtacttcaccggcgcgcggcacttcgcgcactga

SEQ ID NO: 56160 - protein, 525 aa, Kineococcus radiotolerans SRS30216
MAQETPEARVPVKRALVSVYDKTGLEELAQGLHAAGVALVSTGSTAARIAAAGVPVTPVEDLTGFPECLDGRVKTLHPRVHAGILADRRLPDHVRQLAELDVEPFDLVVVNLYPFAATVASGAGYDDVVEQIDIGGPSMVRAAAKNHPSVAVVVDPARYGDVLDAVAAGGFDLPARKRLAAAAFAHTAAYDTAVAGWFAEQTLSEEDGGWPAVTGVALERADVLRYGENPHQQAAVYVDPTAAPGIAQAVQLHGKAMSYNNYVDADAALRAAHDLDGPAVAVIKHANPCGIATGTDVADAHAKAHACDPVSAFGGVIAANRVVTAAMAAQVADVFTEVVIAPGFEPEALETLRAKKNIRLLQLPEGYGRGAREWRPVSGGVLVQELDRVDAHGDDPANWTLAAGEAADEQTLADLEFAWRAVRSVRSNAILLARDGASVGVGMGQVNRVDSCKLAVERAGAERAAGSVAASDAFFPFADGAQILLDAGVRAIVQPGGSIRDGEVVEAATKAGITMYFTGARHFAH

SEQ ID NO: 56161 - DNA, 1590 bp, Xanthobacter autotrophicus Py2
  CDS (1)..(1590): transl_table=11
atgaccgccgatatccgtcccgtgacccgcgccctcctctcggtgtcggacaagacgggtctcgtgccgttcgcgacagccctcgttgcccacggggttgagctggtctccaccggcggcaccgccaaggccatcgccgacgccggcctgccggtgaaggacgtgtccgagctcaccggcttcccggagatgatggacggccgggtgaaaaccctgcatcccaaggtgcacggcggcatcctcgccatccgcgccgacaagggccaccaggcgtccctcgccgagcacgccatcgcccccatcgacctcgtggtggtgaacctctatccgttcgaggcgaccgtcgcccgcaaggcggatttcgaggagaccatcgagaacatcgacatcggcggcccctccatgatccgcggcgcggccaagaaccacaatgacgtggcggtggtggtggaagccgccgactacgaggcggtgctcgctgagatcgccgcccacgggggcaccaccctgcccctgcgccgcaagctggcccagaaggcctatgcccgcaccgccgcctatgacgcggccatctccaactggttcgcccgcgagctgaaggaggaggccccggccttccgcgccttcagcggcaagctcatcgaggccctgcgctacggcgagaacccgcaccagtccgccgccttctacgcctcggacgagatccgtcccggcgtcgccacggcgcgtcaggtgcagggcaagcagctctcctacaacaacatcaacgacaccgacgccgccttcgaggcggtggccgaattccaccccgcccgcaccgccgcggtggtgatcgtgaagcacgccaacccctgcggcgtggccgaaggcgcctcgctggaggaggcctatgccaaggcgctggcctgcgatccggtgtcggccttcggcggcatcatcgcggtcaaccgcacgctggatgcggcctccgcccgcgccatggtggagatcttcaccgaggtgatcgtcgcccccgacgcaaccgacgaggccatcgccgtggtggcggccaagaagaacctgcgcctgctgctcaccggcggcctgcccgacccgcgcgcgggaggcctcacggtgaagaccgtggccggcggcctgctggtgcagggccgcgacaatgccagcgccgacgacctcgacctgaaggtggtcaccaagcgcgcgcccaccgaccgcgagctgaccgacctgcgcttcgccttccgcgtggccaagcatgtgaagtccaacaccatcatctatgcgaaggacctcgccacggtgggcatcggcgccgggcagatgagccgggtggacagtgcccgcatcgccgcccgcaaggcgctggacgcggccgaggccctgggcctcaaggagccgctgaccaagggctcggtggtggcctccgatgccttcttccccttcgccgatggcctgctggcggcggtggaggcgggtgccacggcggtgatccagcccggcggctccatgcgcgacaacgaggtgatcgcggcggcggatgcggccggcctcgccatggtcttcaccggcgtgcgccacttccgccactga

SEQ ID NO: 56162 - protein, 529 aa, Xanthobacter autotrophicus Py2
MTADIRPVTRALLSVSDKTGLVPFATALVAHGVELVSTGGTAKAIADAGLPVKDVSELTGFPEMMDGRVKTLHPKVHGGILAIRADKGHQASLAEHAIAPIDLVVVNLYPFEATVARKADFEETIENIDIGGPSMIRGAAKNHNDVAVVVEAADYEAVLAEIAAHGGTTLPLRRKLAQKAYARTAAYDAAISNWFARELKEEAPAFRAFSGKLIEALRYGENPHQSAAFYASDEIRPGVATARQVQGKQLSYNNINDTDAAFEAVAEFHPARTAAVVIVKHANPCGVAEGASLEEAYAKALACDPVSAFGGIIAVNRTLDAASARAMVEIFTEVIVAPDATDEAIAVVAAKKNLRLLLTGGLPDPRAGGLTVKTVAGGLLVQGRDNASADDLDLKVVTKRAPTDRELTDLRFAFRVAKHVKSNTIIYAKDLATVGIGAGQMSRVDSARIAARKALDAAEALGLKEPLTKGSVVASDAFFPFADGLLAAVEAGATAVIQPGGSMRDNEVIAAADAAGLAMVFTGVRHFRH

SEQ ID NO: 56163 - DNA, 1470 bp, Thermoplasma volcanium GSS1
  CDS (1)..(1470): transl_table=11
atgaacttccttattagtgtgtataacaaagaggggcttactgattttctggcgagggtgaaggcaaatatcgattatatatatgctacaggaggaacagctaaatttcttgaaaagaatggatacaccgtcagagatacgtccgaaataacaggatttagtgatctacttggcggccgtgttaaaactttgcatcctaaaatatatgctgcactgctctacagggaaaagaacgaagcatcagacttacatttcgatgttttagtgtcaaatttatatccattcaccggaaacacaggaaatgaaaatgagatgatcgagaatatagatataggcggtgtttctctaaccagagcagcagccaagaattacaagaatgtacttgtgctgtcatctccagatgattacacggaagcagcggaaattatctcttctgggaagaacgatgccgagtacaggaaacgaatggcacttaaggcatttgcaagaatggctgaatacgatgccataatttataatggcctttcagatcttttcaaaatcgagaaggaaaacttttttgttgtcggaaagaaaggtgaaaggttaaggtacggtgaaaaccctgaccaggaaggcttcctctattctgatgggagtgcatatggcgttgcaaacgctgaaaaattaaatgggaaggagttatcttataacaatatactcgatgccgacagtgcttttgatactgcgcttgaattcgatgagcctacagtcgttgtaatgaagcataacacaccatccggagtttcttcgcataacgatatcgtaaatgcgtttaagagagcatgggatgccgattcagaatcggcctacggatcagtaatagctgtgaacagaaaagtcccattagatctagcaaaggaaatgcgacacctattcattgaagtcctaattgccccagaatacgatgaatatgccctttcagagttaagaaagaagaaaaatctacgcatattgaggattccttggatcagagatcaatccatgagatacagatcaatatcaaacggattgcttgtccagactccaatggcatcttcctttaaggaattgaaacttgtaacagagaagggagctgattcaaagacgattgatgaccttttatttgcgtggaaagttgttgcacattcaaggagtaacgccatagttttcgccaaagacaaaacaacaactggtataggcgctggccagacatctagggtagaatctgtgaggatagctatggaacgttccggttcaagggccgatggttctgtaatggcttcagatgcatttttcccgttccctgacagcatagatgtagcggcaaaagctggaataaaagcaataatacagccgggtgggtccataagagacgaagaggtaataaaaaaatgcaatgaatatggaatacccatgtactttacaggcaagagggtattccttcattga

SEQ ID NO: 56164 - protein, 489 aa, Thermoplasma volcanium GSS1
MNFLISVYNKEGLTDFLARVKANIDYIYATGGTAKFLEKNGYTVRDTSEITGFSDLLGGRVKTLHPKIYAALLYREKNEASDLHFDVLVSNLYPFTGNTGNENEMIENIDIGGVSLTRAAAKNYKNVLVLSSPDDYTEAAEIISSGKNDAEYRKRMALKAFARMAEYDAIIYNGLSDLFKIEKENFFVVGKKGERLRYGENPDQEGFLYSDGSAYGVANAEKLNGKELSYNNILDADSAFDTALEFDEPTVVVMKHNTPSGVSSHNDIVNAFKRAWDADSESAYGSVIAVNRKVPLDLAKEMRHLFIEVLIAPEYDEYALSELRKKKNLRILRIPWIRDQSMRYRSISNGLLVQTPMASSFKELKLVTEKGADSKTIDDLLFAWKVVAHSRSNAIVFAKDKTTTGIGAGQTSRVESVRIAMERSGSRADGSVMASDAFFPFPDSIDVAAKAGIKAIIQPGGSIRDEEVIKKCNEYGIPMYFTGKRVFLH

SEQ ID NO: 56165 - DNA, 1689 bp, Agrobacterium tumefaciens str. C58
  CDS (1)..(1689): transl_table=11
gtgttaacgcggcggcaatcgctggatcattccccttccagcctgtcctccctattatacggagtatgcccgatggccgtggtgtccaagaaaattcccgcccccgataaggtcaagattcgcacggcgcttctttccgtgtccgacaagaccgatattatcgagttggcaacggtactctccaagctcggcgtcaagctcctgtcgaccggcggtacggcaaaggcgattgccgaagcgggtcttgccgtcacagatgtctccgacgtcaccaattttcccgagatcatggatggccgcgtcaagacgctgcatcccaatgttcatggcgggcttctggcaatccgcgacgatgccgagcatgtcgaggccatgaaggcacatggtatcgaggcgatcgatctttccgtgatcaatctctatccgttcgaggaagtgcgcgccaagggcggcgattatccgacgacggttgagaatatcgatattggcggcccggcgatgatccgcgcttccgccaagaaccatgcctatgtcaccgttgttaccgacccttccgactaccctgcgctggtggaagccctgcaggccgatgacggacagacctcctatgcgctgcgccagcgttttgccgccaaggcctatgcccgcacggctgcttatgatgccgtgatttccaactggtttgccgaagcactggcgatcgagacgcctcattaccgcgccatcggcggtgtgctgaaagaaaagatgcgttatggtgaaaacccgcatcagagcgccggtttctacctgaccggtgaaaagcgccccggcgttgcaacggcgacgcttctccagggcaagcagctctcctacaacaacatcaatgataccgatgcggcttacgagctggtggcggagttcctgccggaaaatgcgccggccgttgccatcgtcaaacacgccaatccctgtggcgttgcgaccggccctacccttgcagaagcctatcggcgggcgctggcatgcgattccgtttccgcctttggcggcgtcattgcgctcaaccgcacgctcgatgcggaaacggcggaagagatcgtcaagctcttcaccgaagtcatcatcgcgcctgacgtgaccgaagaggccaagtccatcatcgcccgcaagccgaacctgcgccttctggccgccggcggcctgccagacccgcgtgcggctggcctcacggcgaagaccgtttccggtggcctgctggtgcagagccgtgacaatggcatggtcgaggatctcgaactcaaggtcgtaaccaagcgtgcaccgacggcgcaagagcttgaggacatgaagttcgctttcaagatcgccaagcatgtgaaatccaatgccgtgatctatgcgaaggacggtcagacggcgggtatcggcgctggccagatgagccgtgtggattccgcccgcatcgccgcccagaaggcggaagatgcagccaaggctcttggccttgccgaaccattgacgcgcggctctgccgttgcgtcggaagccttttatccgtttgcggatggtttgcttgctgcaatcgctgcgggcgccaccgctgtcatccagccgggtggctccatgcgcgatcaggacgtgatcgacgctgcaaacgagcataatgtggctatggtcttcaccggcatgcgccacttccgccattaa

SEQ ID NO: 56166 - protein, 562 aa, Agrobacterium tumefaciens str. C58
MLTRRQSLDHSPSSLSSLLYGVCPMAVVSKKIPAPDKVKIRTALLSVSDKTDIIELATVLSKLGVKLLSTGGTAKAIAEAGLAVTDVSDVTNFPEIMDGRVKTLHPNVHGGLLAIRDDAEHVEAMKAHGIEAIDLSVINLYPFEEVRAKGGDYPTTVENIDIGGPAMIRASAKNHAYVTVVTDPSDYPALVEALQADDGQTSYALRQRFAAKAYARTAAYDAVISNWFAEALAIETPHYRAIGGVLKEKMRYGENPHQSAGFYLTGEKRPGVATATLLQGKQLSYNNINDTDAAYELVAEFLPENAPAVAIVKHANPCGVATGPTLAEAYRRALACDSVSAFGGVIALNRTLDAETAEEIVKLFTEVIIAPDVTEEAKSIIARKPNLRLLAAGGLPDPRAAGLTAKTVSGGLLVQSRDNGMVEDLELKVVTKRAPTAQELEDMKFAFKIAKHVKSNAVIYAKDGQTAGIGAGQMSRVDSARIAAQKAEDAAKALGLAEPLTRGSAVASEAFYPFADGLLAAIAAGATAVIQPGGSMRDQDVIDAANEHNVAMVFTGMRHFRH

SEQ ID NO: 56167 - DNA, 1569 bp, Streptococcus pneumoniae R6
  CDS (1)..(1569): transl_table=11
atgattaaaaaggagaatataatgactaaacgcgtcttaatcagcgtctcagacaaagcgggcattgttgaatttgcccaagaactaaaaaaacttggttgggagattatctcgacaggtggaactaaggttgcccttgataatgctggggtggagaccattgcgatcgatgatgtgacgggcttcccagagatgatggatggccgtgttaagactcttcatccaaatatccacgggggtcttctcgctcgtcgtgatttggatagccacttggaagcagccaatgagaaccaaattgagcttattgaccttgtagtggtcaacctttatcctttcaaggaaacgattctcaaaccagacgtgacgtacgctgatgctgtggagaatattgatattggtgggccatctatgcttcgttcagcagcgaagaatcatgccagcgtgacggttgtggtagaccctgctgactatacagtggttttggacgagttgtcagccaatggtgaaacgacttacgaaacgcgtcaacgtttggcagccaaggttttccgtcacacagcggcttatgacgctttgattgcagaatacttcacagctcaagtgggcgaaagtaaacctgaaaagttgaccttgacctatgacctaaaacaagctatgcgttatggggaaaatccccagcaggatgcggacttctaccagaaagctttgccgactgattactccattgcatcagccaaacagcttaacggtaaggaattgtcattcaacaatatccgcgatgcagatgctgccattcgtattatccgtgacttcaaagaccgtccaaccgttgtggctctcaagcatatgaatccatgtggtatcggccaggcggatgacatcgagacggcttgggattatgcttatgagtctgacccagtgtctatctttggtggtatcgctgttcttaaccgtgaggtggatgctgcgacagctgagaagatgcacggcgttttcctcgaaatcatcattgcaccaagctatacggatgaagcgctagccattttgatcaataaaaagaaaaacttgcgtatccttgccttgccatttaatgctcaagaggctagcgaagtggaagcagaatacacaggtgtagtcggtggacttctcgtgcaaaatcaagacgtggtcaaggaaagcccagctgactggcaagtggtgaccaaacgtcagccaaccgagacagaagcgactgctcttgagttcgcttggaaggctatcaagtacgtcaaatcaaatggtattatcgtgaccaacgaccacatgacacttggtgttggtccaggtcaaaccaaccgtgtggcttctgttcgccttgccattgaccaagccaaagatcgtctggacggggcggtccttgcttcagatgccttcttcccatttgcggataacgtggaagaaatcgccaaagcaggaattaaggccatcatccagcccggtggctctgtccgtgaccaagaatccatcgaagcagcggataaatacggcttgactatggtctttacaggtgtgagacattttagacattaa

SEQ ID NO: 56168 - protein, 522 aa, Streptococcus pneumoniae R6
MIKKENIMTKRVLISVSDKAGIVEFAQELKKLGWEIISTGGTKVALDNAGVETIAIDDVTGFPEMMDGRVKTLHPNIHGGLLARRDLDSHLEAANENQIELIDLVVVNLYPFKETILKPDVTYADAVENIDIGGPSMLRSAAKNHASVTVVVDPADYTVVLDELSANGETTYETRQRLAAKVFRHTAAYDALIAEYFTAQVGESKPEKLTLTYDLKQAMRYGENPQQDADFYQKALPTDYSIASAKQLNGKELSFNNIRDADAAIRIIRDFKDRPTVVALKHMNPCGIGQADDIETAWDYAYESDPVSIFGGIAVLNREVDAATAEKMHGVFLEIIIAPSYTDEALAILINKKKNLRILALPFNAQEASEVEAEYTGVVGGLLVQNQDVVKESPADWQVVTKRQPTETEATALEFAWKAIKYVKSNGIIVTNDHMTLGVGPGQTNRVASVRLAIDQAKDRLDGAVLASDAFFPFADNVEEIAKAGIKAIIQPGGSVRDQESIEAADKYGLTMVFTGVRHFRH

SEQ ID NO: 56169 - DNA, 1563 bp, Streptococcus mutans UA159
  CDS (1)..(1563): transl_table=11
atgaaaggaaaaaacatgactaaacgcgcacttatcagcgtctcagacaaatcgggtattgttgactttgctcaagaattgaaaaacttgggttgggaaatcgtctcaaccggcggaactaaggttgcccttgacaaggcagggattgacaccatcgctattgacgatgtgactggctttcctgaaatgatggatggtcgtgtcaagactcttcacccaaacattcatggcggtctattggcgcgccgcgaccttgatagtcatgttaatgctatgaaggaacatgaaatcacaccgattgatttggtcgttgtcaacctttacccattcaaggagactattcttaaaccagatgcgacctatgcggatgcggttgaaaatattgatatcggtggaccatctatgctgcgctcagcagctaaaaaccatgccagtgtgacggttgtggttgaccctgctgactacgctgagattcttgacgaattgtcagctaatggtgaaacaagttttgaaactcgtaagcgtctggcagcaaaagttttccgtcacaccgcagcttacgatgccctcatcgctgaatatttcactgctcaagtgggtgaagaaaaacctgaaaaactcaccttgacttatgacctcaagcagccaatgcgttatggtgaaaatccacagcagaatgcggatttctaccaaaaagccttgccaactgcttattctattgcctctgctcagcagctcaacggtaaggaattgtccttcaacaatattcgcgatgctgatgcggctatacgtgtcattcgtgactttaaagaccgtccaaccgttgtggcgctcaagcacatgaatccatgtggtatcggtcaggctgatgacattgaaacagcttgggattacgcttatgaggctgatttagtttcgatcttcggcggcattgttgtcctaaaccgtgaggttgatgcagcgacagctgagaagatgcacgctatcttcctagaaatcatcattgcgccatcttatacagacgaagcgctagctattctcacaaccaaaaagaaaaatctgcgtattctgcaacttccctttgacgctcaagaagctagcgaggctgaaaaagagtatactggcgtggttggtggcctccttgtgcaaaatcaagacgtggtcaaggaaagtccagccgattggcaggtcgttaccaagcgccagccaactaaaacggaagaaactgctcttgaatttgcttggaaagctatcaagtatgtcaagtctaatggcattatcgtgaccaatgaccacatgacacttggtgtcggtccgggtcagaccaatcgtgtcgcttctgttcgcatcgccattgaccaagctaaagatcgccttgacggggctgttcttgcctctgatgctttcttcccgtttgctgataacgttgaagaaattgcagctgctggtatcaaagctatcatccaacccggcggttccgtccgtgaccaagagtctatcgatatggctgataaatacggcattgctatggtatttacgggtgtgagacattttagacattga

SEQ ID NO: 56170 - protein, 520 aa, Streptococcus mutans UA159
MKGKNMTKRALISVSDKSGIVDFAQELKNLGWEIVSTGGTKVALDKAGIDTIAIDDVTGFPEMMDGRVKTLHPNIHGGLLARRDLDSHVNAMKEHEITPIDLVVVNLYPFKETILKPDATYADAVENIDIGGPSMLRSAAKNHASVTVVVDPADYAEILDELSANGETSFETRKRLAAKVFRHTAAYDALIAEYFTAQVGEEKPEKLTLTYDLKQPMRYGENPQQNADFYQKALPTAYSIASAQQLNGKELSFNNIRDADAAIRVIRDFKDRPTVVALKHMNPCGIGQADDIETAWDYAYEADLVSIFGGIVVLNREVDAATAEKMHAIFLEIIIAPSYTDEALAILTTKKKNLRILQLPFDAQEASEAEKEYTGVVGGLLVQNQDVVKESPADWQVVTKRQPTKTEETALEFAWKAIKYVKSNGIIVTNDHMTLGVGPGQTNRVASVRIAIDQAKDRLDGAVLASDAFFPFADNVEEIAAAGIKAIIQPGGSVRDQESIDMADKYGIAMVFTGVRHFRH

SEQ ID NO: 56171 - DNA, 1629 bp, Tropheryma whipplei TW08/27
  CDS (1)..(1629): transl_table=11
atgacgacaaatatacgtataaaaagagctcttatttcagtgagtgataagtcaggccttgcagatctagcagaagccctcgcggcgcattctgtcaaaatagtgtcaaccggcagcacggcagagttcatacgcggggtgtctattcccgtgcgcgatgtatctgaggtaacaggggttggggaactcttggatggccgcgtgaaaaccctgcatcccaaaatacatgccccgattcttgctgacacaacttcacagatgcaccgcgcgcagctacagcagcttggcgttgatgcttttgatcttgtcgtggtcaacctgtatccattttttgaaatttccaaaaactctgaagcagaattctctgatgtaattgagcaaattgacattggtggctctgccctaataagggctgcggcaaaaaatcatacacgagttgttgttattgttgatccaagtgactacattcatgtgattaacagccttgaaaggggtgccccgtcccgcctgcgccaccaactcgctataaaggcgtattcacacacttccgaatatgatcttcatatttccagatggctttccgagcggttttacaaacatactctttattcttcgagtgattctgtaggtgatgtttgtgataacaatctcgattccaatgatcattttgttgaactgcgtggcaaaaaactgggtgatctgcgctacggcgaaaacagtcatcagaaggcttccctatacctgtcttgcaaggagagcgttccccaattgggcttggcgagtgcagctcttcttgggggcaagcagatgtcgtacaacaattatcttgacgcagatgttgcctcaagaattgtcaacagctttgatctgccaacagtatcgtttgtaaagcacggtaacccttgtggaattgcctcaaatattgaggttgctattgcatgcagaaatgctcatgagtgtgacccaacttcagcctttggcggtgttgtcgctgtcaatagggaagttacccttgacgttgcaactcatcttttgccgatttttatagaggtagttgtggcgcccggttatgacccacaagcactacagcttttgctaaaaaagaagaatctgagggttgtagagcttcctgagtgcgcttcgtatccgcaagatcagttgcggcaaatctccggtggatttctggtgcaggacgcagacaaatttgaccatcacgacacattttccagctggactcaggtgtctggcccacgtatttttatggatgccggagctgataacgagacgctaatggatttggaatttgcctggaaatcctgtgcgtttgttaaatccaatgcgattcttctggcaaaaaacatggcatcggttggaataggaatggggcaggtaaatagactagatgcgtgttacctggctgtaaatcgtgcgggatccagatccctgggtgcagtcgccgcatctgatgcattttttcccttttctgatggcctggatgtgctaataaattccggagtaaaggctattgtgcagccgggcgggtctgttcgtgataatgctgttatagctgctgctcaacaggcgggtgtcaccatgttttttaccggcaagaggcattttgcgcattga

SEQ ID NO: 56172 - protein, 542 aa, Tropheryma whipplei TW08/27
MTTNIRIKRALISVSDKSGLADLAEALAAHSVKIVSTGSTAEFIRGVSIPVRDVSEVTGVGELLDGRVKTLHPKIHAPILADTTSQMHRAQLQQLGVDAFDLVVVNLYPFFEISKNSEAEFSDVIEQIDIGGSALIRAAAKNHTRVVVIVDPSDYIHVINSLERGAPSRLRHQLAIKAYSHTSEYDLHISRWLSERFYKHTLYSSSDSVGDVCDNNLDSNDHFVELRGKKLGDLRYGENSHQKASLYLSCKESVPQLGLASAALLGGKQMSYNNYLDADVASRIVNSFDLPTVSFVKHGNPCGIASNIEVAIACRNAHECDPTSAFGGVVAVNREVTLDVATHLLPIFIEVVVAPGYDPQALQLLLKKKNLRVVELPECASYPQDQLRQISGGFLVQDADKFDHHDTFSSWTQVSGPRIFMDAGADNETLMDLEFAWKSCAFVKSNAILLAKNMASVGIGMGQVNRLDACYLAVNRAGSRSLGAVAASDAFFPFSDGLDVLINSGVKAIVQPGGSVRDNAVIAAAQQAGVTMFFTGKRHFAH

SEQ ID NO: 56173 - DNA, 1542 bp, Enterococcus faecalis V583
  CDS (1)..(1542): transl_table=11
atgaccaaaagagcattgattagcgtttcagacaaaacaggagtgacaacatttgcagcaggcttagttgcaaatggctttgaaattatctccactgggggaacaaggactgtcttggaagaagcgggggtaccgacacttgctattgacgacatcactggctttccagaaatgttagatggccgtgtcaaaacgttacatccgaatatccatggcggacttttggcaaaaaggggaaaccaagcgcatcaaaaagcactgactgaacaaggcattcactttattgaccttgtagtagtgaatctttatccatttaaagaaacaattttaaaaccagcgatctctgaagcagaagcgattgaaatgattgatattggcggtcctagcatgttacgttcagcggcaaaaaattatcaagacgtaacagcagtggttgatcctagtgattatgaacaggtattaagtgaaattagcagcactggaactagccagttagccactagaaaaagattagcagcaaaagtctttcgtcataccgctgcttatgacgcgcttatcgctgactatttaacgacgcaagtgggtgaaactgaaccagagaaacagacgcttacttatgaacgtaagcaaacattgcgttatggcgaaaatagccatcaacaagccaccttttatcaatccgttgtacctgtatcattatccattgcttccgctcgacaacttcatggcaaagaactgtcatataacaatattcgagatgctgatgcagcactccggattgctagcgagtttacagaacctacggtcgtcgctgttaaacatatgaacccatgtggaattggaacaggaaaaacgattttggcagcctatcgtcaggcatttgaagcagatccagtttcaatttttggtggcattgttgttttgaatcgtccagtggaccaagcgactgcggctgaaatgcatcaaatctttttagagataattattgcgcctagttttgaggaagaagctttggcactgttatctcagaaaaagaatcttcgtttgttaacgttagattttcatgctcaagaaaaaaaagcggtggaattagtttctgttatgggcgggttattaattcaagaacaggatacagttgttgaaaatgaccaagcatggcaagttgttacagagcgccaacccacaccagccgaaagagacgcattgaactttgcttggaaagcagtcaagcatgtaaaatcaaacgctattgttttagccaatgaaagccaaacggtggggattggcgctggtcaaatgaatcgaattggttcagtaaaaattgcagttgatcaagcccaagcagctggaaaattacaaggggccgtcttagcaagtgatgcctttttccccatggcagatagcgtggaatatgctgcacaacatggcattcaagcaattattcagccaggcgggagcattaaagaccaagcatcaatcgatctagcgaatcattatggtattgcgatgatttttactgggactcgtcatttcaaacattaa

SEQ ID NO: 56174 - protein, 513 aa, Enterococcus faecalis V583
MTKRALISVSDKTGVTTFAAGLVANGFEIISTGGTRTVLEEAGVPTLAIDDITGFPEMLDGRVKTLHPNIHGGLLAKRGNQAHQKALTEQGIHFIDLVVVNLYPFKETILKPAISEAEAIEMIDIGGPSMLRSAAKNYQDVTAVVDPSDYEQVLSEISSTGTSQLATRKRLAAKVFRHTAAYDALIADYLTTQVGETEPEKQTLTYERKQTLRYGENSHQQATFYQSVVPVSLSIASARQLHGKELSYNNIRDADAALRIASEFTEPTVVAVKHMNPCGIGTGKTILAAYRQAFEADPVSIFGGIVVLNRPVDQATAAEMHQIFLEIIIAPSFEEEALALLSQKKNLRLLTLDFHAQEKKAVELVSVMGGLLIQEQDTVVENDQAWQVVTERQPTPAERDALNFAWKAVKHVKSNAIVLANESQTVGIGAGQMNRIGSVKIAVDQAQAAGKLQGAVLASDAFFPMADSVEYAAQHGIQAIIQPGGSIKDQASIDLANHYGIAMIFTGTRHFKH

SEQ ID NO: 56175 - DNA, 1581 bp, Coxiella burnetii RSA 493
  CDS (1)..(1581): transl_table=11
atgagtcgcgtcggtgatactgaaaggccgattaagcgtgcgctcatcagcaccgcagataaaatcggccttattgaattcatatcacaattagtgacttgcggcgttgagataatagctacggggggtacggctgagttgcttaagcaacatcagctccccgtcatcgatgtctttacttataccggttttcctgagattatggatggccgagtcaaaactttgcaccctaagatacacgcgggattgttggcccgacggggtatcgacgagaaaacgcttgatcagcacgccatcaaacccatcgacttactagtggtaaacctttacccctttgttcaaaccgtcagcgcgtcaaattgttcgctggaaaaggcagtggagcaaattgacattggtggccccagtatgctgcgagcggccgccaagaatttcgccgctgttaccgtggtggttgatccagaagactattcacgaattttagaggaaataaagacccatcacggatccaccacgctgtctacccgcaaacggttggcccaaaaaacatttgaacacctttcgtattacgatgctcacatcgccacctatctcgctgaaaaagaaggagcaacgactcttcccgcacggcttccatccatctttaagaaaaagattgacctacggtatggcgaaaatcctcatcaaaccgccgccctttatagtattgatccccccttatcccacagtttggcggaagcgcaattattacaaggcaagcctttatcatttaacaatctcttagacagtgattgcgcttatcggtgcgtttatgaaggctctttgtctgaacccgcctgtgtcattgtcaaacacgctacacccgccggagcggcaagggcacaaacccagttagcggcttatgaaaaagcttatgccactgatccgctttccgcttttggcggtattgtggcttttaatgcccctttggaagcagtaacagcggaaaaaattctctctcaacagttcgtagaagtcattatcgcccccgatttcccagcggaaacgcttcgtctactgcaaaccaaacccaatttgcgcgtattacgcgggcagccactcgatagttcccaaattacgtattcctttcactccatcaccggcggcgttttatgccaagaggctgatgcgacgaaattttccgacgaaactttcaccgtggtcacccgccgtcagcccacagcaaaagaacagcaagatctctattttgcctggcaaatcgtaaagtacgtcaaatcaaacgccatcgtttatgcgaaagaccatgccacactgggaattggcagcggtcaaacaagtcgagttttcgcggctaaaatcgctatcttgaaagcagaagaagctggattatggttaacagacgccgtcatggcctcggatgcttttttccctttcagcgatagtatcgaaatcgcagcgaaagcaggcataaccgctgtgatccaacccggtggttcaaaacgcgatgaagaagtcattaaggccgcgaacgaagcgggaatggcaatgctgttcacccaccagcgacatttccgccattaa

SEQ ID NO: 56176 - protein, 526 aa, Coxiella burnetii RSA 493
MSRVGDTERPIKRALISTADKIGLIEFISQLVTCGVEIIATGGTAELLKQHQLPVIDVFTYTGFPEIMDGRVKTLHPKIHAGLLARRGIDEKTLDQHAIKPIDLLVVNLYPFVQTVSASNCSLEKAVEQIDIGGPSMLRAAAKNFAAVTVVVDPEDYSRILEEIKTHHGSTTLSTRKRLAQKTFEHLSYYDAHIATYLAEKEGATTLPARLPSIFKKKIDLRYGENPHQTAALYSIDPPLSHSLAEAQLLQGKPLSFNNLLDSDCAYRCVYEGSLSEPACVIVKHATPAGAARAQTQLAAYEKAYATDPLSAFGGIVAFNAPLEAVTAEKILSQQFVEVIIAPDFPAETLRLLQTKPNLRVLRGQPLDSSQITYSFHSITGGVLCQEADATKFSDETFTVVTRRQPTAKEQQDLYFAWQIVKYVKSNAIVYAKDHATLGIGSGQTSRVFAAKIAILKAEEAGLWLTDAVMASDAFFPFSDSIEIAAKAGITAVIQPGGSKRDEEVIKAANEAGMAMLFTHQRHFRH

SEQ ID NO: 56177 - DNA, 1584 bp, Streptomyces avermitilis MA-4680
  CDS (1)..(1584): transl_table=11
gtgaccgccgaaggtaccgtgaccgccgagggcacgcagcgcccgatcaggcgcgcgctcatcagcgtctacgacaagacggggctcgaagacctcgcccgcggcctgcacgaggccggtgtcgagctcgtctccaccggctccaccgccgcgaagatcgccgcggccggcgtcccggtcaccaaggtcgaggagctgaccggcttccccgagtgcctggacggccgcgtcaagacgctgcatcccaaggtccacgcgggcatcctcgccgacctgcggctcgacgagcaccggcgtcagctcgaggaactgggcgtggaaccgttccagctcgtcgtcgtgaacctctacccgttccgcgagaccgtcgcctccggcgcctccccggacgagtgcgtcgagcagatcgacatcggcggcccgtccatggtccgtgccgccgccaagaaccacccgtccgtggccgtggtcaccagccccgagcggtacgccgacgtcctctccgcggtccgcggcggcggcttcgacctcaccgcccgcaagcggctcgccgccgaggccttccggcacaccgcggcgtacgacgtcgccgtcgcctcctggttcgcgtcctcgtacgcccccgtcgacgagtccgtcttcccggacttcctcggtgccaccttcgagcgcaagagcaccctgcgctacggcgagaacccgcaccagcccgccgccctctacgtcgacggcggcggcaccggcctcgccgaggccgagcagctgcacggcaaggagatgtcgtacaacaactacacggacacggacgccgcgcgccgtgccgcgtacgaccacgccgagccctgcgtcgcgatcatcaagcacgccaacccctgcggcatcgcgatcggcgcggacgtcgccgaggcgcaccgcaaggcgcacgcctgcgacccgctgtccgcgttcggcggtgtgatcgcggtcaaccgcccggtgtccaaggagctggccgagcaggtcgcggagatcttcaccgaggtcatcgtcgcgcccggttacgaggacggcgcgctggaggccctcgccaagaagaagaacatccgcgtgctgcgggcccaggacgctccggccaacccggccgagctcaagcagatcgacggcggcgcgctgctccaggtcaccgaccgtctccaggccgacggcgacgacccggcgaactggaccctggccaccggcgaggccctgtcgcccgccgagctggacgagctggccttcgcctggcgagcgtgccgcgcggtgaagtccaacgcgatcctgctcgccaaggacggtgcctcggtgggtgtcggcatgggtcaggtcaaccgggtcgactccgcgaagctggcggtcgagcgggcgggcgaggagcgtgcccgtggtgcgttcgccgcgtcggacgcgttcttcccgttccccgacggcctggagatcctcaccgcggcgggcgtcagggccgtggtccagcccggcggttcggtccgtgacgaactggtcgtggaggccgcgaagaaggcgggcgtgacgatgtacttcacgggcacgcgccacttcttccactag

SEQ ID NO: 56178 - protein, 527 aa, Streptomyces avermitilis MA-4680
MTAEGTVTAEGTQRPIRRALISVYDKTGLEDLARGLHEAGVELVSTGSTAAKIAAAGVPVTKVEELTGFPECLDGRVKTLHPKVHAGILADLRLDEHRRQLEELGVEPFQLVVVNLYPFRETVASGASPDECVEQIDIGGPSMVRAAAKNHPSVAVVTSPERYADVLSAVRGGGFDLTARKRLAAEAFRHTAAYDVAVASWFASSYAPVDESVFPDFLGATFERKSTLRYGENPHQPAALYVDGGGTGLAEAEQLHGKEMSYNNYTDTDAARRAAYDHAEPCVAIIKHANPCGIAIGADVAEAHRKAHACDPLSAFGGVIAVNRPVSKELAEQVAEIFTEVIVAPGYEDGALEALAKKKNIRVLRAQDAPANPAELKQIDGGALLQVTDRLQADGDDPANWTLATGEALSPAELDELAFAWRACRAVKSNAILLAKDGASVGVGMGQVNRVDSAKLAVERAGEERARGAFAASDAFFPFPDGLEILTAAGVRAVVQPGGSVRDELVVEAAKKAGVTMYFTGTRHFFH

SEQ ID NO: 56179 - DNA, 1563 bp, Nitrosomonas europaea ATCC 19718
  CDS (1)..(1563): transl_table=11
atgagcataaaacaggcgctgatcagcgtttccgacaaaacaggcatagttgagctggcagcagctctgcaccaattcaatatcaccattctctcgaccggtggaaccgcaagattactgcaggaatcaggtattcccgtcatagaagtaagcgactataccggtttccccgaaatgctagatggacgggtcaagacgctgcaccctaaggtacatgcaggcattctcgccaggatggatttgcctgagcatcgacaagtgatggaacaagcacagattccagcgatcgatctggtggtggtcaatctgtatccgtttactcaaaccattacccgaccggattgttcgtttgaagaagcaatcgaaaacatcgatatcggcgggcctaccatgatccgggccgctgccaagaatttccagcgtgtcgctgtcgtgaccgacccacaggattacgggccactgctggaacaaatacgcgctaacgacggatcaatcgatcatgactatcgtttccagctggcacaaaaagctttttcccatacggcgcgctatgatggcgccatcagtaattatctgactgcactggagccattgagctcacagcgcaaacgttttccggatcagctcaatctgagttttacgctggcccagccgttgcgctacggtgagaaccctcaccagcaggcagcgttctatcgtgatacgacaaatgttccgggcagtcttgcggactatgaccagcttcagggtaaggagctctcctataacaatattgctgataccgatgccgcatgggcatgtgtcagaacttttgataaaccggcctgcgtaatcattaaacacgccaatccgtgtggtgtggctattgccgataccgcgctggctgcttataaaaaggcatttaccactgatccggtatcggcctttggcggcattatcgcgatcaaccgggctgtcgaggctgatctggccaaagcagtattgcaacagtttgtggaagtcatcattgcaccggaattcagcccggaagccagacatttgctggcagacaagcccaatatccgggtattgaccgtaccgctggataaacacaacaatgtctatgatctgaaacgggtggatggtggactgctggttcaaacaccggatgatctcgatatcacggtagatcagttgcaggtcgtcacacggataaaacccactcgtgaacaaatagaagattgtctgtttgcctggagagtggcgaaattcgtcaaatcaaacaccatcgtattttgtgccaacggccagacgctcggtatcggggccgggcagatgagccgggtggacagtgcacgtattgcttcgatcaaagcacagcaggccaaccttgatttgcatggatcagttgttgcatcggatgcatttttcccatttcgggatggtctggatgtacttgcccaggcgggtgccggggttgtgattcagcccggcggcagtattcgtgatgaggaagtcatcgcggcagctgatgagcaaggggtggctatggtctttaccggtgtcagacatttcaggcattag

SEQ ID NO: 56180 - protein, 520 aa, Nitrosomonas europaea ATCC 19718
MSIKQALISVSDKTGIVELAAALHQFNITILSTGGTARLLQESGIPVIEVSDYTGFPEMLDGRVKTLHPKVHAGILARMDLPEHRQVMEQAQIPAIDLVVVNLYPFTQTITRPDCSFEEAIENIDIGGPTMIRAAAKNFQRVAVVTDPQDYGPLLEQIRANDGSIDHDYRFQLAQKAFSHTARYDGAISNYLTALEPLSSQRKRFPDQLNLSFTLAQPLRYGENPHQQAAFYRDTTNVPGSLADYDQLQGKELSYNNIADTDAAWACVRTFDKPACVIIKHANPCGVAIADTALAAYKKAFTTDPVSAFGGIIAINRAVEADLAKAVLQQFVEVIIAPEFSPEARHLLADKPNIRVLTVPLDKHNNVYDLKRVDGGLLVQTPDDLDITVDQLQVVTRIKPTREQIEDCLFAWRVAKFVKSNTIVFCANGQTLGIGAGQMSRVDSARIASIKAQQANLDLHGSVVASDAFFPFRDGLDVLAQAGAGVVIQPGGSIRDEEVIAAADEQGVAMVFTGVRHFRH

SEQ ID NO: 56181 - DNA, 1791 bp, Arabidopsis thaliana
  CDS (1)..(1791)
atgctcagctcagccgccaccgccacctccgtgagtgctcgctccggcgatattctctgcggcttgtttcgcaaaaaatccgtcgcgccttttcgttttactcagcctgtctatcgtacgtcgctgtgtccaagtttcgttgctgttcgagccatggcagagtctcagactgctcagaggaatcagccgcaatcctcaggctcctctggggagaagcaagctttgatatctctatctgacaagagggacttggcttctcttggcaacggtctgcaagaattgggatacactattgtttctactggaggaactgcctctactttggagaatgctggagtctctgtgaccaaagtggagaagcttactcattttccagaaatgcttgatggccgtgtgaaaactttgcatccaaacatacatggtggtatcctcgctagaagggatgtggagcatcatatggaagctcttaatgagcatgggattggtacatttgatgttgtggttgtcaatttgtacccgttctatgaaaaagttactgctccaggtgggatcagttttgaggatgggattgagaacattgacattggtggccctgctatgattagagcagctgctaagaaccacaaagacgttctcattgttgtcgattcaggagattatcaagctgttttggagtatctcaaaggaggacagagcgaccaacaattccgcagaaaacttgcgtggaaggcctttcagcatgttgctgcatatgattctgcggtttcagaatggctatggaagcagactgaaggaaaagagaagttccctcccagctttacagttccgcttgtacttaagagttctcttcgttacggtgaaaatcctcatcaaaaagctgcattttatgttgataagagccttgctgaagtgaatgccggtggtatcgcaacagcgattcagcatcatggaaaggaaatgtcatacaacaactatcttgatgctgacgctgcatggaactgtgtgtcggaatttgaaaacccaacatgtgtagtcgtgaagcatacaaatccttgtggtgtggcctctcgtgatgatattcttgaggcttaccggctagctgtaaaagctgacccagttagtgcctttggtggcattgtagctttcaatgttgaagttgacgaggttcttgcgagggagatccgagagttcaggagcccaacagacggggaaactagaatgttttatgaaatcgtggttgctccaaagtatactgctaaaggtcttgaagtcctcaaagggaaatcaaaaactttgaggatcctcgaagctaaaaagaatgaccaagggaaactatcgctcagacaggttggtggcggctggttggctcaggactcggacgatttaactccagaagacatcagcttcaattctgtctcagacaaaactccgactgaaagcgaacttgcggatgcaaaatttgcctggctctgcgttaagcatgtcaagagcaatgccattgtgatagcaaagaacaattgtatgctggggatgggaagcggacagccaaaccgagtagagagtctgagaatagctttcaagaaagctggggaggaagctaaaggagctgccttggccagtgacgcattcttcccattcgcttggaaagatgcggtggaagaggcgtgccagatgggaataggagtgatagcagaacctggaggcagtattagagaccaagacgctattgattgctgcaaaaagtatggagtctctctgctcttcaccaacgttagacatttccgccattaa

SEQ ID NO: 56182 - protein, 596 aa, Arabidopsis thaliana
MLSSAATATSVSARSGDILCGLFRKKSVAPFRFTQPVYRTSLCPSFVAVRAMAESQTAQRNQPQSSGSSGEKQALISLSDKRDLASLGNGLQELGYTIVSTGGTASTLENAGVSVTKVEKLTHFPEMLDGRVKTLHPNIHGGILARRDVEHHMEALNEHGIGTFDVVVVNLYPFYEKVTAPGGISFEDGIENIDIGGPAMIRAAAKNHKDVLIVVDSGDYQAVLEYLKGGQSDQQFRRKLAWKAFQHVAAYDSAVSEWLWKQTEGKEKFPPSFTVPLVLKSSLRYGENPHQKAAFYVDKSLAEVNAGGIATAIQHHGKEMSYNNYLDADAAWNCVSEFENPTCVVVKHTNPCGVASRDDILEAYRLAVKADPVSAFGGIVAFNVEVDEVLAREIREFRSPTDGETRMFYEIVVAPKYTAKGLEVLKGKSKTLRILEAKKNDQGKLSLRQVGGGWLAQDSDDLTPEDISFNSVSDKTPTESELADAKFAWLCVKHVKSNAIVIAKNNCMLGMGSGQPNRVESLRIAFKKAGEEAKGAALASDAFFPFAWKDAVEEACQMGIGVIAEPGGSIRDQDAIDCCKKYGVSLLFTNVRHFRH

SEQ ID NO: 56183 - DNA, 1557 bp, Prochlorococcus marinus subsp. marinus str. CCMP1375
  CDS (1)..(1557): transl_table=11
atgccacctattgcattattaagcgtttcaaacaaagaagggctaatccctttagcgaaagaactaagcatcgaatatggatttgaaattatttccagcggaggtactgccaaaacattgcagcaagctggaatccttgttactccagtagcagaatacacaggtgctccagaaatcttaggaggcagagtaaaaactcttcatcctaaagttcatggaggaatccttgcaaagaaaggagatctattccatcaaaaagatctcaaagatcaaaagattaaagctattgatttagtagttgttaatttatatccatttcaagaaaccattaaaaagccaaatatcagttgggaagaagctattgaaaatatagacattgggggtccagcaatggttcgtgcagcagctaaaaaccatgagtcagtatctgtcttaactagaccagagcaatatcaaccttttttacaggctttaaagaaagggacattatctaacgagatgcgaagagaactagcgaaagaagcgtttgagcacacagctaattatgacaatgctattagtcgctggatgaaacttaatgcagaaaagaaatcctctcaatggattgaatccatacctctaaaacaaaccttgagatatggagagaaccctcatcaatcagcttcttggtatagccaccaagatcaaggatggggaggagcaaaacaaatacaagggaaggaacttagcatgaacaatctattagatctagaggcagctctatcaacaattcgagaatttggatatgacgaaaatttactggccacaacttctcaaaaggcggctgtagtaattaagcatacaaatccttgtggtgttgcaacagcaaattctgtttcattggccctaaaaaaagctcttgatgcagatagaacaagtgcatttggtggaatcgtggcagtaaattcttctatagatctagcaacagcctctgaattaaaaaatctatttttagaatgcgttattgcacctaattttgagaatgatgcaaagttacttctttcagagaagaaaaatctaagacttttagaaatgaataaatactatatagatcaatcagaaagaaataatataagaagtatccttggaggattattaatacaagaaagtgatgatgaattaatagatgaaaagtcttgggaagtagttaccaagaaacagccaagctctatagaaaaaaaagatttaacttttgcttggaaagttgttaagcatatccgctctaatgcaattgcaattgcatcttcaggccaaacaattggaataggtgctggtcaaatgaatagaattggtgctgcaaaaatagctttagaaactgctggcgataaagcaaagaaagctgttctagcaagtgatggatttttcccttttgatgacacagttaggatggcagcaagtcatggtattactgcaattattcaacctggaggcagcataaaagataacttgtcaatagaagcttgtaatgagttaaatatatctatgatttttacaggtcgccgacactttctacactaa

SEQ ID NO: 56184 - protein, 518 aa, Prochlorococcus marinus subsp. marinus str. CCMP1375
MPPIALLSVSNKEGLIPLAKELSIEYGFEIISSGGTAKTLQQAGILVTPVAEYTGAPEILGGRVKTLHPKVHGGILAKKGDLFHQKDLKDQKIKAIDLVVVNLYPFQETIKKPNISWEEAIENIDIGGPAMVRAAAKNHESVSVLTRPEQYQPFLQALKKGTLSNEMRRELAKEAFEHTANYDNAISRWMKLNAEKKSSQWIESIPLKQTLRYGENPHQSASWYSHQDQGWGGAKQIQGKELSMNNLLDLEAALSTIREFGYDENLLATTSQKAAVVIKHTNPCGVATANSVSLALKKALDADRTSAFGGIVAVNSSIDLATASELKNLFLECVIAPNFENDAKLLLSEKKNLRLLEMNKYYIDQSERNNIRSILGGLLIQESDDELIDEKSWEVVTKKQPSSIEKKDLTFAWKVVKHIRSNAIAIASSGQTIGIGAGQMNRIGAAKIALETAGDKAKKAVLASDGFFPFDDTVRMAASHGITAIIQPGGSIKDNLSIEACNELNISMIFTGRRHFLH

SEQ ID NO: 56185 - DNA, 1590 bp, Bordetella bronchiseptica RB50
  CDS (1)..(1590): transl_table=11
atgaaaatcgaaaccgccctgctctcggtgtccgacaagaccggcatcgtcgaattcgcccgcgccctgaccgctcgcggcgtgcgcctgctgtcgaccggaggaaccgcccgcctgctgtccgaagccggcctggccgtcaccgaggtcgcccagcacaccggttcgccggaaatcctggaaggccgcgtgaagacgctgcatcccaagatccacggcggcctgctggcgcggcgcgacagcgccgagcacatggatacgatcgccgcctgcggcatcgatcgcatcgacatgctggtggtcaacctgtatccgtttcgcgaaaccgtggccaagcccgactgcaccttcgccgacgccatcgagaacatcgacatcggcggcccggccatgctgcgcgccgccgccaagaaccatggcaccgacgccggcggggtgacggtcgtgatcgatccggccgactactcgcgcgtgctggcccagatggaccagggcggcagcacctcgtacgcgctgcgcctggagctggcggccaaggtctacagccataccgccgcctacgacggcgccatcgccgcctacctgaccagcctggccgaggccgcgccggcccaggacgcggtgcccgcgcgcaacgaatggccgggcaccttgaccatccaggtgcgccaggagcaggcgctgcgctacggcgagaacccgcaccagaccgcggcgttctacgtcgacgcgcagcgtccggcgggcctgctgggcaactatcgccagctgcagggcaaggagctgtcgtacaacaacatcgccgacgcggacgcggcctgggaatgcgtgcgcagcttcgacagcaccgcctgcgtcatcgtcaagcacgccaacccgtgcggcgtggcgatcggcgacggcacgctgcacgcctaccagcaggccttcaagaccgacccgacctcggccttcggcggcatcatcgccttcaaccgcccggtcgacgccgccaccgccgaagcggtcagcggccagttcctggaagtgctgctggcccccgcctacgacggcgcggcgctggccatcctggcggccaagaagaacgtacgcgtgctggaagtgccggccggcccgggccagaatgccttcgacatcaagcgcgtgggcggcggctggctggtgcagagcccggacgcctacaacgtgccgcgcgacgcgctgaaagtggtcagcaagcgccagcccaccgagcaggaaatgaacgacctggcgtttgcctggaaggtcgccaagtacgtcaagtccaacgccatcgtgttcgtgggcggcggcatgacgctgggcgtgggcgccggccagatgagccgcatcgactcggcccgcatcgcctcgatcaaggccgagaacgcgggcctgaccctgcgcggttcggcggtcgcctcggacgccttcttccccttccgcgacggcctggacgtggtggtggcggcgggcgcgacctgcgtcatccagcccggcggcagcgtgcgcgacgacgaagtgatcgcggcggcggacgagcatggcatcgccatggtcctgaccggcacgcgccacttccgccactga

SEQ ID NO: 56186 - protein, 529 aa, Bordetella bronchiseptica RB50
MKIETALLSVSDKTGIVEFARALTARGVRLLSTGGTARLLSEAGLAVTEVAQHTGSPEILEGRVKTLHPKIHGGLLARRDSAEHMDTIAACGIDRIDMLVVNLYPFRETVAKPDCTFADAIENIDIGGPAMLRAAAKNHGTDAGGVTVVIDPADYSRVLAQMDQGGSTSYALRLELAAKVYSHTAAYDGAIAAYLTSLAEAAPAQDAVPARNEWPGTLTIQVRQEQALRYGENPHQTAAFYVDAQRPAGLLGNYRQLQGKELSYNNIADADAAWECVRSFDSTACVIVKHANPCGVAIGDGTLHAYQQAFKTDPTSAFGGIIAFNRPVDAATAEAVSGQFLEVLLAPAYDGAALAILAAKKNVRVLEVPAGPGQNAFDIKRVGGGWLVQSPDAYNVPRDALKVVSKRQPTEQEMNDLAFAWKVAKYVKSNAIVFVGGGMTLGVGAGQMSRIDSARIASIKAENAGLTLRGSAVASDAFFPFRDGLDVVVAAGATCVIQPGGSVRDDEVIAAADEHGIAMVLTGTRHFRH

SEQ ID NO: 56187 - DNA, 1551 bp, Synechococcus sp. WH 8102
  CDS (1)..(1551): transl_table=11
atggctccttttgcgctgctgagcgtgtccgacaaaaacggcgttgtggcgctggcggaggcgttgcatcgcacccatggttatgcgcttctgtccagtggtgggaccgccaaggttctggaagatgccggacttccggtgacccgtatgtcagagcacaacggcgcaccggagattctcggtggtcgagtgaagaccctgcatccgagggtgcacggcggcatccttgccaaacgaggtgatgctgcccatcaggctgatctggagcagcagggcatccccgccattgatctggtggtggtgaatctgtacccgttccgggaaacggtggcccgagcggatgtcacctgggatcaggcgatcgaaaacatcgatatcggaggtccggcgatggtccgggccgctgccaaaaatcatgctgatgtggcggtgctcaccagcccggatcagtactcctcggtgctggcggccatggcggaatcggctggtcgtgtgcctgcggatctatgccgccagttggccctcgaagcgtttcagcacaccgcggcctacgacaccgccatcagccgttggatggctggcgaggttgagcttgtgagcagcccctggttggaggcagtaccgcttcgccagaccttgcgttatggggagaacccacaccagaaagcacgctggttcagccatccccgtcagggatggggaggagcgattcagctgcagggcaaggagctcagcaccaacaacctgttggacctggaggcagctctggcgacggttcgcgagtttggctacggcccaaacgccgtcggccccgctgccgtggtggtgaagcacaccaacccctgtggtgtggctgtgggaccggtggtggcttccgcgctgacgagagcgctggatgcggatcgcgtcagtgcgttcggcggcatcgtggcgatcaacggacccgtggaggccgccgcagcccgtgagctcaccgggttgtttctggaatgtgtcgtggccccatccttctccccggaagccagggaaatcctggccgccaaggccaatctccggctgctggagctgtcgccggatgcgatcgctgctgctggtccagatcacgtccgcagcatcctcgggggactgctggtgcaggacctcgatgatcaagtgatgacccctgatcagtggacgctggcaaccaagaggcctcctaccgctcaggagaagcaggatcttgagttcgcctggcgcctggtgcggcatgtgcgctctaacgccatcgttgtggccagggatggtcagagcctcggggtcggcgccggtcagatgaatcgcgtcggttcagcgcggattgccctggaggcggcggctgagaaagccaagggagcagtgctggccagtgacggattctttcccttcgatgacaccgttcgcctggcagctagccatggcatcacagccgtgattcatcccggaggcagccttcgggacggggagtcggtcaaggcctgcgatgaactgggtctggccatgctgctcaccggccgccgccatttcctgcactga

SEQ ID NO: 56188 - protein, 516 aa, Synechococcus sp. WH 8102
MAPFALLSVSDKNGVVALAEALHRTHGYALLSSGGTAKVLEDAGLPVTRMSEHNGAPEILGGRVKTLHPRVHGGILAKRGDAAHQADLEQQGIPAIDLVVVNLYPFRETVARADVTWDQAIENIDIGGPAMVRAAAKNHADVAVLTSPDQYSSVLAAMAESAGRVPADLCRQLALEAFQHTAAYDTAISRWMAGEVELVSSPWLEAVPLRQTLRYGENPHQKARWFSHPRQGWGGAIQLQGKELSTNNLLDLEAALATVREFGYGPNAVGPAAVVVKHTNPCGVAVGPVVASALTRALDADRVSAFGGIVAINGPVEAAAARELTGLFLECVVAPSFSPEAREILAAKANLRLLELSPDAIAAAGPDHVRSILGGLLVQDLDDQVMTPDQWTLATKRPPTAQEKQDLEFAWRLVRHVRSNAIVVARDGQSLGVGAGQMNRVGSARIALEAAAEKAKGAVLASDGFFPFDDTVRLAASHGITAVIHPGGSLRDGESVKACDELGLAMLLTGRRHFLH

SEQ ID NO: 56189 - DNA, 1578 bp, Chromobacterium violaceum ATCC 12472
  CDS (1)..(1578): transl_table=11
atgaccaagatcgaacgagcgctgatcagcgtgtccgacaagaacggtgtgctggaattcgccagggagctgtccgccctgggcgtgcacatcctgtccaccggcggcaccgccaagctgctgctggaagccggcctgccggtgaccgaagtgtccgattacaccggcttcccagaaatgctggacggccgcgtcaagacgctgcatcccaaggtgcacggcggcatcctcggccggcgcgacctgcccgagcatgtggccaccatggccgagcacggcatcggcaacatcgacctggtctgcgtcaacctctacccgttcgaggccaccgtcgccaatccggactgttcgctggaggacgcgatcgagaacatcgacatcggcggtccgaccatggtgcgctccgccgccaagaactgggcgcacgtcgccatcgtcaccgacagcgccgactatccggcgctggtgggcgagctgaaggccaacggcggccggcttgccaaggccacccgcttcgagctggccaagaaggcgtttacccacaccgccgcctacgacggcgccatctccaactacctgaccagcctggccgagggcgtggtggcgggcaagccggagcgcgtggccttcccgaaccgcctgaacgcccagttcatcaaggtgcaggacatgcgctacggcgagaacccgcaccaagccgccgccttctaccgcgacctggacccggccgccggcagcatcgcccactacaagcagctgcagggcaaggagctgtcgtacaacaacatcgccgacgccgacgcggcctgggaggcggtgaagaccttcgagcaaaccgcctgcgtgatcgtcaagcacgccaacccgtgcggcgtggcggtcggtccggacacgctgtccgcctacaagctggccttcgccaccgacaccaccagcgccttcggcggcatcatcgccttcaaccgcccggtggacgcggccacggtcgaggccgtcaccggccagttcctggaagtgctgatcgcgccgtccttcaccgaggaagccaaggccatcatcgccgccaagaagaacgtgcgcgtgctggagattccgctggaatccggcgccaaccgcttcgagctgaagcgcgtcggcggcggcgtgctggtgcagacgcctgacatccgcaacgtgggcctggacgagctgcgcgtggtcagcaagcgccagccgacgccgcaggaaatgtcggacctgctgttcgcctggcgcgtggccaagttcgtcaagtccaacgccatcgtgttctgcaaggacggccagaccgccggcatcggcgccggccagatgagccgcgtcgactccacccgcatcgccgcccgcaaggcgcaggacgccgggctcagcctggccggcgcggtggcggcgtctgacgccttcttcccgttccgcgacggcatcgacgtcatcgccgagcagggcatcaaggccatcatccagccgggcggctcgatgcgcgacgaggaagtcttcgccgccgccgacgagcacggcatcgcgctggtgttgaccggcgtgcgccatttccgccactga

SEQ ID NO: 56190 - protein, 525 aa, Chromobacterium violaceum ATCC 12472
MTKIERALISVSDKNGVLEFARELSALGVHILSTGGTAKLLLEAGLPVTEVSDYTGFPEMLDGRVKTLHPKVHGGILGRRDLPEHVATMAEHGIGNIDLVCVNLYPFEATVANPDCSLEDAIENIDIGGPTMVRSAAKNWAHVAIVTDSADYPALVGELKANGGRLAKATRFELAKKAFTHTAAYDGAISNYLTSLAEGVVAGKPERVAFPNRLNAQFIKVQDMRYGENPHQAAAFYRDLDPAAGSIAHYKQLQGKELSYNNIADADAAWEAVKTFEQTACVIVKHANPCGVAVGPDTLSAYKLAFATDTTSAFGGIIAFNRPVDAATVEAVTGQFLEVLIAPSFTEEAKAIIAAKKNVRVLEIPLESGANRFELKRVGGGVLVQTPDIRNVGLDELRVVSKRQPTPQEMSDLLFAWRVAKFVKSNAIVFCKDGQTAGIGAGQMSRVDSTRIAARKAQDAGLSLAGAVAASDAFFPFRDGIDVIAEQGIKAIIQPGGSMRDEEVFAAADEHGIALVLTGVRHFRH

SEQ ID NO: 56191 - DNA, 1527 bp, Porphyromonas gingivalis W83
  CDS (1)..(1527): transl_table=11
ttgcgtgtgatggaaaaggttatccgcagagctctcatatcggtctatcataaagaaggtttggccgagatactggccgaattgaacagacaaggggtagagttcgtatccacaggaggaactcatgaatttatcacttcgctcggttatgcgtgtcgggccgtggatgatctgacgcgttatccttcgatgctcgggggacgggtgaagacattacacccaatgatcttcggcggtattttggctcgtcgcggtcatgaaagcgatgtgcgagaagtaggcgagtacgggttacctcttatcgatttggtcatcgtggatctatatccattcgaggccaccgtggcatcaggagcatcggaagaagatatcattgagaagatagatataggcggtatctctctcattagaggagctgccaaaaacttcgaagatgtcgttatcatctcgtcacgggcacagtatgccggattttacagcctgctgaaagagcagggagctcgaacctctttggctgaacgcagacattatgctcgagaagctttcgctgtgagttcggcatacgacagtgctatcttccgctatttcgatgatggagagcagacggcttttcgtatgtcggcagatagcccgaaagtgcttcgctatggggagaaccctcatcagcgaggattctttttcggcaacttcgaccgctatttcgataagctccaaggaaaagaaatctcctacaacaatttgcaggacatcgaagctgcggtatcgcttatcagtgagttttccgcccccacctttgccatcctcaagcatacgaatgcctgtggcatagcttcgcgcggtacactgatcgaagcttggcaggctgctcttgccggtgatcccgtatcggcttttggcggcatattggtgacaaatactcctatcgatagggagacagctcaggagatcgacaagattttcttcgaggtgatcattgctcccgactacgataatgctgccatggaatatctgacacgcaagacgaacaggattatacttctacagaaagagcctgtacgtgagcagtggcagttccgctccatgtttggcggtgtgctcatgcagcaggtggatggtgtgacagccaagactgtcgatttcaagcctgtaacacccgtagtgcctacagcagatgaaacggacgacctcatctttgccaataaggtagtgaagcatagcaagagtaatgctattactttggtcaaggatagccaactttgtgccagtggagttgggcagacctccagagtcgatgctttgcgacaggctatcgataaagcacggaatttcggctttgacctgaatggggctgtcatggccagcgatgctttctttccttttgccgattgtgtggagatagcagccgaagcaggtattcgcgctatcattcagcccggaggttccattaaggacaatctgagcatcgaagaggccacaaaaaaaggtattgccatggtgatgacgggtgtaagacatttcaaacattaa

SEQ ID NO: 56192 - protein, 508 aa, Porphyromonas gingivalis W83
MRVMEKVIRRALISVYHKEGLAEILAELNRQGVEFVSTGGTHEFITSLGYACRAVDDLTRYPSMLGGRVKTLHPMIFGGILARRGHESDVREVGEYGLPLIDLVIVDLYPFEATVASGASEEDIIEKIDIGGISLIRGAAKNFEDVVIISSRAQYAGFYSLLKEQGARTSLAERRHYAREAFAVSSAYDSAIFRYFDDGEQTAFRMSADSPKVLRYGENPHQRGFFFGNFDRYFDKLQGKEISYNNLQDIEAAVSLISEFSAPTFAILKHTNACGIASRGTLIEAWQAALAGDPVSAFGGILVTNTPIDRETAQEIDKIFFEVIIAPDYDNAAMEYLTRKTNRIILLQKEPVREQWQFRSMFGGVLMQQVDGVTAKTVDFKPVTPVVPTADETDDLIFANKVVKHSKSNAITLVKDSQLCASGVGQTSRVDALRQAIDKARNFGFDLNGAVMASDAFFPFADCVEIAAEAGIRAIIQPGGSIKDNLSIEEATKKGIAMVMTGVRHFKH

SEQ ID NO: 56193 - DNA, 1533 bp, Wolinella succinogenes DSM 1740
  CDS (1)..(1533): transl_table=11
atgaacgccctacttagtgtcagcgacaaaaccggaatcgtcgaattcgcccaagagctttgcgccctaggctacactctcctctccacaggaggcacgctcaaactgctccaagaacacaacatcaaagccaaagaggtgggcgaatacacccaaagccctgagatgtttgagggaagagtcaaaaccctccaccccaaaatccatggaggaatcctccatcggcgccacctcaaagaagatgtcaagaccgcaaaggagcatggaatcgagcctattgatatcgtctgcgtcaatctctatccctttaaagcgaccatagagcgcactgatgactttgaggagattatcgaaaacatcgatattggcggtccgagcatggtgagagccgcagccaaaaactatcgtgatgtactcattatcaccgatcccaaggactacgcctccgtcattgagagtctcaaaaagggcgagaatgatgaagagtttcgccgcgacatgatgatccgcgcctttgaacataccgccgcctatgatagcctcatcgccaactacatgaacactcgattcaataatggctttggagcgaagcgattccttgtaggggagcgcgtctgcatgacacgatatggcgaaaatccccatcaaatgggtgctctttatgagtttgagcgattttggcgcgactcatttaagacgcttaaaggcgaggcgagtttcaacaacttcaccgacttaagcggagcggttaagatcgcttcggcctttggagattcgcctgcagtgtgcatcatcaaacacgggaatccttgtggattcgccatcaaagagaatctcctctcctcctatcaggccgcattggcttgcgatcctatctcagcctacgggggcgtggtcgcgatcaatggggtgctagatgagaggctcgctctagagatcaaccaaatcttcatcgaagtgattgtcgctggacgcatcacccccgaagccttggctgtctttgaaaccaagaagcgaatcaagctctttgagtgcggcgcagaccgcctcaacttccctagagatgagatcgacttcaagcatatcgaggggggctttgtctttcaagaggccgatagagtcaaagatgaggagatccaaggcgccaagctcatggggcaaatcgaggcgacccccgcccaaaagcgtgatctagagatcgcttacaaggtggccgctttggttaaatccaactgcgtggtctatgtcaaagatagcgcgatggtggccgtgggcatgggaatgaccagccgcgtggacgcctccaaggctgctctagccaaggctaaagaatcaggcttagaggtgaagggagccgtgctcgctagcgaggccttcttccccttcaaagatagcatcgaagccgcccacgaggcaggagtaagtgcggtgattgagccaggggggagcatccgagatgatgaggtgatccaagcggccaatgagtttggtatggcgctctacttcacaggcgttcgccactttctacactaa

SEQ ID NO: 56194 - protein, 510 aa, Wolinella succinogenes DSM 1740
MNALLSVSDKTGIVEFAQELCALGYTLLSTGGTLKLLQEHNIKAKEVGEYTQSPEMFEGRVKTLHPKIHGGILHRRHLKEDVKTAKEHGIEPIDIVCVNLYPFKATIERTDDFEEIIENIDIGGPSMVRAAAKNYRDVLIITDPKDYASVIESLKKGENDEEFRRDMMIRAFEHTAAYDSLIANYMNTRFNNGFGAKRFLVGERVCMTRYGENPHQMGALYEFERFWRDSFKTLKGEASFNNFTDLSGAVKIASAFGDSPAVCIIKHGNPCGFAIKENLLSSYQAALACDPISAYGGVVAINGVLDERLALEINQIFIEVIVAGRITPEALAVFETKKRIKLFECGADRLNFPRDEIDFKHIEGGFVFQEADRVKDEEIQGAKLMGQIEATPAQKRDLEIAYKVAALVKSNCVVYVKDSAMVAVGMGMTSRVDASKAALAKAKESGLEVKGAVLASEAFFPFKDSIEAAHEAGVSAVIEPGGSIRDDEVIQAANEFGMALYFTGVRHFLH

SEQ ID NO: 56195 - DNA, 1500 bp, Gloeobacter violaceus PCC 7421
  CDS (1)..(1500): transl_table=11
atgcccatcgccctgttgagcgtttccgacaagaccggtctggtcgactttgcccgtgccctggtgacggaatttgagtatcagctcatcagctccggcggcaccgcccgggcgctcgccgaggcgggtgttccggtgcaggaagtgggcgattttaccggtgccgccgagatgctgggcgggcgggtcaagacactgcatcccaagatccacggcggcatcctggcgcgccgcgaccaggaatcggaccggcgcgacctggagacccacagcatcgcacccatcgatctggtggtggtcaatctctacccgttcgagcaagatccgcgcatcgagcaaatcgacgtgggcggcccgacgatggtgcgtgccgccgccaaaaaccacgcctttgtgacggtgctggtctcaccgggtcagtacgaggggtgcctggccgagttgcgccgcaaccgcggtgtgacgacgctgccctttcgcgccgcttgcgcagcggcggcttttgcgcgcaccgccgcctacgaccgggcgatcgccgcgtggtttgccggttctgaaccggtcctgggcgagcggctagtcctggaactggagcgggtgcagcccttgcgctatggcgagaatcctcaccaggccgccgcctggtaccgccacggcccggcggcgggttggagtacgggtcgcatcctccagggcaaggccctcagtttcaacaacctcatcgacctggaggcaagtcgccgcctggtggccgaattcgacgacaccccggcggcagtgatcatcaagcacaccaatccctgcggggtggctgcagacgccacgattgccgcagcctaccgccgtgccttcgatgccgacagcgcctccgcctttggtggaatcgttgctctcaaccggccctgcgacgaaccgacagccgccctgctgggccagacttttctagagtgcgtcgtcgcccccgccttcaccctgggggcgttggctttgcttgaacgcaagaaaaacctgcgcctgctggaactggcagatctgaccaccccgccggtgtttgacgtcaagcccataagcggtggctttttgatccagcaggtggacgcgccggtgcgcgctgaggattggaaagtggtcaccgaggcggtgcccgatgaagaccaaagagcggagttactgttcgcctggaaagtctgccagcacgtcaaatcgaacgctatcgtcgtgagccatcttcgccagacgctgggggtcggcgccggtcagatgaaccgggtaggttcagcccgactggctctcgcccaagcaggcgagaaagcccggggggcagtgcttgcaagcgacggcttttttccgttcgacgacaccgtgcgcgccgccgccgagcgcggtatccgggctatcgttcagcccgggggcagcctgcgcgacgaagattcgatccgcgcctgcaacgaacttggggtggcgatggtttttaccggtgtgcgccacttcttgcactga

SEQ ID NO: 56196 - protein, 499 aa, Gloeobacter violaceus PCC 7421
MPIALLSVSDKTGLVDFARALVTEFEYQLISSGGTARALAEAGVPVQEVGDFTGAAEMLGGRVKTLHPKIHGGILARRDQESDRRDLETHSIAPIDLVVVNLYPFEQDPRIEQIDVGGPTMVRAAAKNHAFVTVLVSPGQYEGCLAELRRNRGVTTLPFRAACAAAAFARTAAYDRAIAAWFAGSEPVLGERLVLELERVQPLRYGENPHQAAAWYRHGPAAGWSTGRILQGKALSFNNLIDLEASRRLVAEFDDTPAAVIIKHTNPCGVAADATIAAAYRRAFDADSASAFGGIVALNRPCDEPTAALLGQTFLECVVAPAFTLGALALLERKKNLRLLELADLTTPPVFDVKPISGGFLIQQVDAPVRAEDWKVVTEAVPDEDQRAELLFAWKVCQHVKSNAIVVSHLRQTLGVGAGQMNRVGSARLALAQAGEKARGAVLASDGFFPFDDTVRAAAERGIRAIVQPGGSLRDEDSIRACNELGVAMVFTGVRHFLH

SEQ ID NO: 56197 - DNA, 1590 bp, Photorhabdus luminescens subsp. laumondii TTO1
  CDS (1)..(1590): transl_table=11
atgcaacagcttcgtccaatccatcgtgccctgcttagcgtttccgataaatcaggggttgttgaatttgcaaaagccttatctcaacgcggtgtcgaattgctttctactggtggcacagcgcgtttactcgctgagtcagatctaaaggttactgaagtttcagactacaccggttttcctgaaatgatggatggccgtgttaagacgctgcatcctaaagtacatggcggaatccttggccgccgcggacaagatgatgaaatcatggcacaacaccaaatctcaccgatcgatatggtggttgtgaatctatatccattcgctcagaccgtagctaaaccagattgtactttggcagatgccgttgaaaacattgatatcggtggtccaactatggttcgctctgcggctaagaaccataaagatgtagcgattgtggtaaatagtaaggattacaaaaaaatcattgaagagatggataacaatcaggggtcattaacacaatcaacccgcttcgatttagccattaaggcttttgaacacaccgcggcttatgacagcatgattgctaactattttggcaagctggttcctccttatcatggtgatacgactcaaccatcaggacgtttccctcgtactctgaatttgaatttcattaaaaagcaggatatgcgttacggtgagaacagccaccaagatgctgcattctatatagaagagaatctttctgaatcatccattgcaactgcaactcagttacaaggtaaggctctttcctataataacattgctgataccgatgcagcgctggaatgtgttaaggaattcgtggagcctgcatgcgttattgttaagcacgctaacccatgcggtgtagccattggtaaagatatccacgaagcttatgatagcgcattcaaaacagatccaacctccgctttcggcggtattattgctttcaaccgcgaacttgatattaaaactgcacaagccattatcgaccgtcaattcgtcgaggtaattattgccccctcagtaaataaagatgtcttacctgtgctggcaaccaagcaaaatatccgcgttctggtatgtggtgaatgggaggaccgggctgctggccttgattttaaacgagttaatggtggcttactggtacaagatcgcgatcttggtatggttgcagtaactaacctacgtgtggtttccaaacgtcatcccaccgaacaagaaatgaaagatgctctgttctgctggaaggtcgctaagtttgtcaaatctaatgccattgtttatgcaaaaaatgatatgaccattggtattggtgctggccaaatgagccgtgtctattccgcaaaaattgcggggattaaagcagccgatgaaggcttggaagtccaaggatgcgcaatggcgtctgacgcctttttcccatttcgtgacggcattgatgccgctgcggctgtcggcgtaagttgcattatccaacccggcggttcaatccgtgacgacgaagtaattaccgcggctgatgaacacggtattgctatgattttcaccggcatgcgccattttcgccactaa

SEQ ID NO: 56198 - protein, 529 aa, Photorhabdus luminescens subsp. laumondii TTO1
MQQLRPIHRALLSVSDKSGVVEFAKALSQRGVELLSTGGTARLLAESDLKVTEVSDYTGFPEMMDGRVKTLHPKVHGGILGRRGQDDEIMAQHQISPIDMVVVNLYPFAQTVAKPDCTLADAVENIDIGGPTMVRSAAKNHKDVAIVVNSKDYKKIIEEMDNNQGSLTQSTRFDLAIKAFEHTAAYDSMIANYFGKLVPPYHGDTTQPSGRFPRTLNLNFIKKQDMRYGENSHQDAAFYIEENLSESSIATATQLQGKALSYNNIADTDAALECVKEFVEPACVIVKHANPCGVAIGKDIHEAYDSAFKTDPTSAFGGIIAFNRELDIKTAQAIIDRQFVEVIIAPSVNKDVLPVLATKQNIRVLVCGEWEDRAAGLDFKRVNGGLLVQDRDLGMVAVTNLRVVSKRHPTEQEMKDALFCWKVAKFVKSNAIVYAKNDMTIGIGAGQMSRVYSAKIAGIKAADEGLEVQGCAMASDAFFPFRDGIDAAAAVGVSCIIQPGGSIRDDEVITAADEHGIAMIFTGMRHFRH

SEQ ID NO: 56199 - DNA, 1593 bp, Rhodopseudomonas palustris CGA009
  CDS (1)..(1593): transl_table=11
atgacccagaattcccgtcgcgtcacccgtgccctgttgtccgtgtccgataagaccggtctgatcgatttcgcccgtgcgctcgccggccatggcgtcgaactggtttcgaccggcggcactgccaaggcgatcgccgcggccggccttccggtcaaggacgtctccgagctgaccggcttccccgaaatgatggatggccgggtcaagacgctgcatccgaaggtgcatggcggcctgctggcgatccgcgacaatgacgaacacacccaggcgatggccgcgcacggcatcccgcagatcgacctgctggtagtgaacctctatccgttcgaagccaccgtcgataaaggcgcgtcctacgaggattgcatcgagaacatcgacatcggcggcccggcgatgatccgcgccgccgccaagaaccacgacgacgtcgcggttgtggtcgaggccagcgattatcaggcggtgctggatgagctgactgccaacaacggcgccaccacgctgccactgcgcaagcgcctcgccgccaaggcctatgcgcgcacggccgcttatgatgcggcgatctccaactggttcgcgctgcagctcaagaccgatgcgccggacttccgcgcgatcggtggacggctgatccagagcctccgctacggcgaaaatccgcaccagaccgcagcgttctacgccacgccggagaagcgtccgggcgttgccaccgcgcgccaggtgcagggcaaggagctgtcctacaacaatatcaacgacaccgacgccgcctatgagtgcgtcggcgagttcgacgcggcgcgtaccgcggcctgcgtcatcgtcaagcacgccaatccctgcggcgtcgccgagggatcgagcctgctcgacgcctacaagaaggcgctggcttgcgactccgtctcggcgttcggaggcatcgtcgcgctcaaccgcacgctcgacgccgaagcggcgcgcgccatcaccgagatcttcaccgaagtgatcatcgcgccggacgccaccgacgaagcgatcgcgatcgtcgcggcgaagaagaacctgcggctgctgctggcgggcgcgctgcccgatccgcgcgccaacggcctgacctacaagaccgtcgccggcggcctgctggtgcagagccgcgacaatgcggtggtcgatgacatggcgctgaaggtcgtcaccaagcggcagccgaccgaagccgagctgcgtgacctgaagttcgcgttccgcgtcggcaagcacgtcaagtccaacaccatcatctatgccaaggacctcgccactgtcggtatcggtgccggtcagatgagccgcgtcgactccgcccgcatcgccgcccgcaaggcgcaggatgcggccgaggcgatgaagctcgccgcgccgatgaccaagggctcggtggtggcctccgacgcgttcttcccgttcgccgacggcatgctggcctgtatcgaagccggcgccaccgcggtgatccagcccggcggttcggtccgcgacgacgaagtgatcaaggctgcggacgacgccggcatcgccatggtgttcaccggcacccggcacttccgccactaa

SEQ ID NO: 56200 - protein, 530 aa, Rhodopseudomonas palustris CGA009
MTQNSRRVTRALLSVSDKTGLIDFARALAGHGVELVSTGGTAKAIAAAGLPVKDVSELTGFPEMMDGRVKTLHPKVHGGLLAIRDNDEHTQAMAAHGIPQIDLLVVNLYPFEATVDKGASYEDCIENIDIGGPAMIRAAAKNHDDVAVVVEASDYQAVLDELTANNGATTLPLRKRLAAKAYARTAAYDAAISNWFALQLKTDAPDFRAIGGRLIQSLRYGENPHQTAAFYATPEKRPGVATARQVQGKELSYNNINDTDAAYECVGEFDAARTAACVIVKHANPCGVAEGSSLLDAYKKALACDSVSAFGGIVALNRTLDAEAARAITEIFTEVIIAPDATDEAIAIVAAKKNLRLLLAGALPDPRANGLTYKTVAGGLLVQSRDNAVVDDMALKVVTKRQPTEAELRDLKFAFRVGKHVKSNTIIYAKDLATVGIGAGQMSRVDSARIAARKAQDAAEAMKLAAPMTKGSVVASDAFFPFADGMLACIEAGATAVIQPGGSVRDDEVIKAADDAGIAMVFTGTRHFRH

SEQ ID NO: 56201 - DNA, 1566 bp, Geobacter sulfurreducens PCA
  CDS (1)..(1566): transl_table=11
atggcaaagataacacgtgcgctcatcagcgtctcggacaagaccggcatccttgatttcgcccgggaactggccggctacggcgtggagatcctctccaccggcggtaccgcaaagcttctccgcgacgcgggactcgcggtcaaggacgtctccgattttaccggctttccggagatgctcgacggccgggtcaagacgcttcaccccaaggtccacgggggccttctgggaatgcgctccaacccagaccatgtggcaaccatgaaggcgcacggcatcgagcccatcgacttggtggtggtgaacctctaccccttcgaggccaccgtggccaagcccgaatgcaccctggaagatgccatcgagaacatcgatatcggcggtcccaccatgctccgctccgcggccaagaacaacgccgacgtgaccgtgctcgtggatccggcggactatcggccggttctcgatgaaatgaaggcatccggcggcgccgtgtcccgggagaccaacttttgcctggcggtgaaagtctaccagcacactgcagcctatgacggcgccatttccaactggctcggcgcccggaccggcgaagggatcgccgcctatcccgacaccgtcacgcttcagttcagaaaggcccaggagatgcgctacggcgagaacccccaccagggtgccgccttctatgtggagcgccaggtgaaggaagcgtccgtcgccacggcccgccagctccagggcaaggagctttcctacaacaacatcgccgacaccgacgcggccctggagtgcgtgaagcagtttgccgaaggccccgcctgcgtcatcgtaaagcatgccaacccctgcggcgtggccgtgggcgggacgttgctggaggcctacgaccgggcctatgccaccgatcccgagtcggccttcgggggcatcatcgccttcaaccgggaactggacgccgacacggcgcgggcaatctgcgaccgccagttcgtggaggtcatcatcgctcccgccgtatcgccggaggccacggaagttgttgccgccaagaagaacgtgcgtctcctggagtgcggcacctggccggagaagcaacagccgcgcctcgacctgaagcgggtgaacggcggcatcctggtgcaggacaccgatctcgacctgtacgccgaactgaaggtcgtgaccaagcggcagcccacggagcaggagatgaaggacctgctctttgcctggcgcgtggccaagttcgtcaagtccaacgccattgtctacggcaagggcaatatgaccatcggcgtgggggccggccagatgagccgggtcaactcggcccgcatcgccgccatcaaggccgagcacgcggggcttgaggtgaagggggccgttatggcgtccgatgccttcttccccttccgcgacggcatcgacaacgcggctgccgtgggcatcaccgcggttatccagccgggcggcagcatgcgcgacgctgaggtgatcgccgccgccgacgagcacggcatggcgatggtattcaccggcatgaggcatttcagacactga

SEQ ID NO: 56202 - protein, 521 aa, Geobacter sulfurreducens PCA
MAKITRALISVSDKTGILDFARELAGYGVEILSTGGTAKLLRDAGLAVKDVSDFTGFPEMLDGRVKTLHPKVHGGLLGMRSNPDHVATMKAHGIEPIDLVVVNLYPFEATVAKPECTLEDAIENIDIGGPTMLRSAAKNNADVTVLVDPADYRPVLDEMKASGGAVSRETNFCLAVKVYQHTAAYDGAISNWLGARTGEGIAAYPDTVTLQFRKAQEMRYGENPHQGAAFYVERQVKEASVATARQLQGKELSYNNIADTDAALECVKQFAEGPACVIVKHANPCGVAVGGTLLEAYDRAYATDPESAFGGIIAFNRELDADTARAICDRQFVEVIIAPAVSPEATEVVAAKKNVRLLECGTWPEKQQPRLDLKRVNGGILVQDTDLDLYAELKVVTKRQPTEQEMKDLLFAWRVAKFVKSNAIVYGKGNMTIGVGAGQMSRVNSARIAAIKAEHAGLEVKGAVMASDAFFPFRDGIDNAAAVGITAVIQPGGSMRDAEVIAAADEHGMAMVFTGMRHFRH

SEQ ID NO: 56203 - DNA, 1602 bp, Mycobacterium avium subsp. paratuberculosis K-10
  CDS (1)..(1602): transl_table=11
atgaaaggcgaccaaccgatgagcaccgacgactggcgggaaaacgccaaaaggccgatccgtcgcgccttgatcagcgtgtacgacaagaccggtctggtcgagctcgcccaggggctgaccgaggcgggcgtcgagatcgtctcgaccggttccaccgcgaaggtcattgccgagaaaggcattccggtgacccgggtcgaggtgctgaccggtttccccgaagtgctcgacggccgggtcaagacactgcacccgcgcgtgcacgccggactgctggcggatctgcgcaaacccgaacacgccgcggcgctcgagcaactcggcatcgccgccttcgagctcgtcgtcgtcaacctgtatccgttcaccgaaaccgtcgactccggcgccggcatcgacgaatgcgtcgaacagatcgacatcggcggcccgtcgatggtgcgggccgccgccaagaaccaccccagcgtggcagtggtcgtcgacccactcggctacgacggggtgctcgcggcggtgcgccacggcggattcaccctcgccgagcgtaaaaggctggcggcgttggcgtttcagcacaccgccgactacgacatcgcggtggcgacgtggatggagtcgacgctggcccccgaacatccgccgaccaccttcccgaagtggctgggccgcagctggcgccgctcggcgatgctgcgctacggcgagaacccgcaccagcaggcgtcgctgtacagcgacccgggtgcctggccgggcctggcgcaagccgagcagctgcacggaaaagagatgtcctacaacaacttcaccgatgcggacgcggcctggcgggcggccttcgaccatgaacaaacgtgtgtggcaatcatcaagcacgccaacccatgtgggatcgcgatctcgtcgatatcggtcgccgacgcgcatcgcaaggcccacgaatgcgatccgctcagcgcgttcggcggcgtcatcgccgccaacaccgaagtcagcgtcgagatggccgaatacgtcagcaccatcttcaccgaggtgatcatcgcccccgcgtatcagcccgccgccctggagatcctgacccgcaagaagaacatccgggtgctggtggcgtccgagccgctgaccggcggcaccgaactgcgcccgatcagcggcgggctgctggtgcagcagcgcgacgaactcgacgcgcacggcgacaacccggccaattggacgctggccaccggggcacccgccgacccggccacgctggcggacctggtgttcgcgtggcgggtgtgccgcgccgtcaaatcgaatgccatcgtgatcgccgccggcggcgccaccatcggcgtcggcatgggccaggtgaaccgggtcgacgccgcccggctggccgtcgaacgaggcggggaccgggtgcgcggcgcggtcgcggcttcggatgcgttcttcccgttccccgacgggctcgagacgctcaccggcgccggggtgaaggccgtcgtgcaccccggcgggtcggtgcgcgacgacgaggtgaccgcggccgccgccaacgccggcatcacgctgtatctcaccggggcgcgtcacttcgcccactag

SEQ ID NO: 56204 - protein, 533 aa, Mycobacterium avium subsp. paratuberculosis K-10
MKGDQPMSTDDWRENAKRPIRRALISVYDKTGLVELAQGLTEAGVEIVSTGSTAKVIAEKGIPVTRVEVLTGFPEVLDGRVKTLHPRVHAGLLADLRKPEHAAALEQLGIAAFELVVVNLYPFTETVDSGAGIDECVEQIDIGGPSMVRAAAKNHPSVAVVVDPLGYDGVLAAVRHGGFTLAERKRLAALAFQHTADYDIAVATWMESTLAPEHPPTTFPKWLGRSWRRSAMLRYGENPHQQASLYSDPGAWPGLAQAEQLHGKEMSYNNFTDADAAWRAAFDHEQTCVAIIKHANPCGIAISSISVADAHRKAHECDPLSAFGGVIAANTEVSVEMAEYVSTIFTEVIIAPAYQPAALEILTRKKNIRVLVASEPLTGGTELRPISGGLLVQQRDELDAHGDNPANWTLATGAPADPATLADLVFAWRVCRAVKSNAIVIAAGGATIGVGMGQVNRVDAARLAVERGGDRVRGAVAASDAFFPFPDGLETLTGAGVKAVVHPGGSVRDDEVTAAAANAGITLYLTGARHFAH

SEQ ID NO: 56205 - DNA, 1512 bp, Wolbachia endosymbiont of Drosophila melanogaster
  CDS (1)..(1512): transl_table=11
atgaaaataaaaagagctttaatatcagtatacgataaaacgaatataattgatcttgcatcgtttttaacgcagcaacaaatagaaattctttcaacgggcaatacttataaactgctatctagtgcaggaataaaaacacaagaggtctcagattacacacaatttccagagatactgggtggtagagtaaaaactttacaccctaaaattcatggaggcatactttgcaatagagaaaaacacaaaacggaaatacaaaatctaggtattgagccaatagaactgcttataactaacctatacccattttgggagacagtaagtagcggctcaaatgaagagcaaattatagaacaaattgatatcggcggagtggcgttaattagagctgcagcaaaaaactttcgttttacttcagttatttctagcattcaagactatgaagcactgaaagctgagatgatagaaaataacaataaaacaacattggaatatagaaaacacttagcaaccaaagcatttgctctcactgcacactacgattctaatattcacagttggtttttatcccagagtaaaaataatgagttaccagagttttttgctctatacgggcataaagtacaagaactcaggtatggtgaaaatccccatcaaaaagctgcattttatagtaatcaatttacagaatatccgttggaaaaactacatggaaaagagttgagttataataatatagtagatatagaatccgcacttaacataacttctgaattcgaagaacctgcagcagtgataatcaagcataataacccatgtggcgctgctattggtaataatgctttggaggcatatgaaaaagctctatcgtgcgatgaagtaagcagttttggtggtatagttgccttaaaccgggagatagatttaaagctagcagaaaaattaaacgagatatttttggaagtagtgatagcaccatcggtaaacaatgaggcactaaaaattttacaaagaaagaaaaatttaagagtgattattcataaatcttttcaacaaaatgtgaaataccaaactaaaaatgttgttggtgggtttttggtgcaagaaaataatgaccacacaataaaagcagaacaagtaacagaatgcactgcaacagacaaagaaaaaaaagatcttatttttgcctggaaaatatgtaagcatgtgaaatccaacgcaatagttatagcaaaagatggttgtgctattggcatcggtgcagggcaaacaagcagaatagatagtgtgaacattgcagtgaaaaaagcaggtgaaaaatgtaaaggtgcagtgcttgcttcagatgcattttttccattcccagatagcatagtagaaagtgcaaaacatgagattacagctataattcagcccggcggctcgctgaaagatcaagatgtgataaaagctgcaaatgaaaataaaattgctatgtttttcactggcgttcgcagttttttccattag

SEQ ID NO: 56206 - protein, 503 aa, Wolbachia endosymbiont of Drosophila melanogaster
MKIKRALISVYDKTNIIDLASFLTQQQIEILSTGNTYKLLSSAGIKTQEVSDYTQFPEILGGRVKTLHPKIHGGILCNREKHKTEIQNLGIEPIELLITNLYPFWETVSSGSNEEQIIEQIDIGGVALIRAAAKNFRFTSVISSIQDYEALKAEMIENNNKTTLEYRKHLATKAFALTAHYDSNIHSWFLSQSKNNELPEFFALYGHKVQELRYGENPHQKAAFYSNQFTEYPLEKLHGKELSYNNIVDIESALNITSEFEEPAAVIIKHNNPCGAAIGNNALEAYEKALSCDEVSSFGGIVALNREIDLKLAEKLNEIFLEVVIAPSVNNEALKILQRKKNLRVIIHKSFQQNVKYQTKNVVGGFLVQENNDHTIKAEQVTECTATDKEKKDLIFAWKICKHVKSNAIVIAKDGCAIGIGAGQTSRIDSVNIAVKKAGEKCKGAVLASDAFFPFPDSIVESAKHEITAIIQPGGSLKDQDVIKAANENKIAMFFTGVRSFFH

SEQ ID NO: 56207 - DNA, 1524 bp, Bdellovibrio bacteriovorus HD100
  CDS (1)..(1524): transl_table=11
atgaatccaatccgcagagctctgttgagcgtctctgataaaaccggtttgctggagcttgcaaaaaatctggcagctcagaatgtcgagctgattgccagcggcggcaccgccaaggctttgactgaggccggattgaaagtcaccgcggtggaaactttgagtggcaaaggcgaagccttcaacggccgcatgaaaaccatcagctttgaaattgcctcaagtcttctgttccgtcgtcaggacgaaaatgacgtgcgccaggccgccgagctggggattgaacccattgatctggtggtggtgaatttgtatcccttccacgcgaccctgcaaaagcaggcggggtttgaggagtgcatcgaaaacatcgatattgggggcccgacattgctgcgtgccggggcgaagaactttcattcggtcacagttttgtgtgatccgtcccagtacagtgaattcttaaaagaattcaacggcaacaatggatccaccacttgggagttccgtcaaaaatgtgccgctgccgtttacaccatgaccgctttctatgacatggccatcgccggattcttgacgcaaaattccggggcggctctaagatacggcgaaaacccgcatcaaaaagcggtggtgctgaaagacccgtttgctgacggtctggcccacgccaaatccctgcaaggcaaagagatgtcctacaataactatctggacgccgactttgccctaaagactttgcaggatgtgcaccgctggcaaggtgaaaaagccctgccagccgcggtggttgtgaaacataacacgccttgcggaatggccgtcgccgaaaccccgttgcgggctttggaaaaagcctggaaaggggacgagaaaagttcctttggtgggatcatcgccctgaacgttccggtgactgaagacattgccgcgttctttgctgaaaaatttgtcgaagtgattctggcaccgtctttcactgaaggcgctcgcgaaaagctgaaaaagaactgccgcgtgatggaggtttcattaaagccaaatccctccatgcaggtgcgttccatcgagggcggactgctgctgcaggatgcagacggctttgatttaagccatatgaaaaccgtcacgcaaaaacaagtcagcccggaacagcagcgtctggcggcttttgcgatgctggcggtgaagaacctgaaaagcaacgccatcgccctttgccgtcaggacgggcccgagtttgagcttctgaccatgggatcaggacaaaccaaccgcatcgactgcatcgaaaaactgatcacttcgcgcctggcagacaagggcatcaccgatcttaccggcgtggtactggcttcagacgcgttcttcccgtttgctgattccattcaggtgtctgcaaaactgggagttcaaaccatcattcaacccggcggatctgtgaaagatccggaagtgatcgctgaagctgatcgcctgggtgtatccatgatctttaccggccgccgccactttttacactag

SEQ ID NO: 56208 - protein, 507 aa, Bdellovibrio bacteriovorus HD100
MNPIRRALLSVSDKTGLLELAKNLAAQNVELIASGGTAKALTEAGLKVTAVETLSGKGEAFNGRMKTISFEIASSLLFRRQDENDVRQAAELGIEPIDLVVVNLYPFHATLQKQAGFEECIENIDIGGPTLLRAGAKNFHSVTVLCDPSQYSEFLKEFNGNNGSTTWEFRQKCAAAVYTMTAFYDMAIAGFLTQNSGAALRYGENPHQKAVVLKDPFADGLAHAKSLQGKEMSYNNYLDADFALKTLQDVHRWQGEKALPAAVVVKHNTPCGMAVAETPLRALEKAWKGDEKSSFGGIIALNVPVTEDIAAFFAEKFVEVILAPSFTEGAREKLKKNCRVMEVSLKPNPSMQVRSIEGGLLLQDADGFDLSHMKTVTQKQVSPEQQRLAAFAMLAVKNLKSNAIALCRQDGPEFELLTMGSGQTNRIDCIEKLITSRLADKGITDLTGVVLASDAFFPFADSIQVSAKLGVQTIIQPGGSVKDPEVIAEADRLGVSMIFTGRRHFLH

SEQ ID NO: 56209 - DNA, 1602 bp, Treponema denticola ATCC 35405
  CDS (1)..(1602): transl_table=11
atgggattggtattggcatcggtttccgataagacaggtttaaaggattttgcattccgcttaaaagcggcaggttatgattttattgcctcaggaggaacggcaaagaccttacaagaggccggcattaaagtaaaagaagtttcggaatacacctcttctcccgaaattttaggcgggagggttaaaactcttcatcctatgattcatggcggtattttagcccgcgatacaaaagaggatagggcagagctaaaagctctcggctttagcggcatagacattgtaatagccaacctatacccctttgaaaaaactatcagttcccccgattcaactgaaagcgattgcatcgaaaacatagacataggcggtgtagctcttttaagagctgccgcaaaaaactattcccgcgttactgttatctgcgatccggccgactatgacgaagtttcttccgaaattgaaaagacgggagagatttctctttctttacgcaaaagactggcaataaaggcctttgacctttgtacccgctacgatgctgcaataacttcttggcttagcgggctaagccggcttagcgggggtatagaagaaaaaacctctcttaccctgtgtgcttatcccggtcaggatttgcgttacggggaaaaccctcatcaaaaagcttggctctatacaaacgaacctaaggccggtcccttgggaggaaaggtcttacagggaaaggctctttcctataacaatatcctcgatgccgacgccgcatggagggctgtttctatgtttacaaaacctgcagccgttgtggtaaagcaccttaccccttgcggccttgccgaaataaatgaagaacctgcaaaaagctcttcatcttctttgcctaattcggaagtttctcttgctttaagggcagcaatcgactgcgatcccgtttcggcctttggaagtataatcgccttaaaccgtcccttcgataaggcttccgttgaagcccttggagccttatttgttgagtgcatcattgctcctctttttaccgaagaagcaaaagaacttttatccggcaaaaaaaacttacgcttaatcgaggctcccatccttcaagaaaaagagccgtatgaatataagtctgtcttgggcggctttttaaagcaagaaaaagacttgggagaccccgaaggtactgaatataaagacgcagcggaaagaaaggctgagccttttgaaagggctcttttacaatttgccatgaaggcttgtactatggttaagtccaatgccattttgctcgcagccccgatagacttgtcaaatccccaaaaaggtttttgttccgtcggcataggctgcggtcagcccaacagggtagatgctgcccgccaagcaatagaaagagccggcgaaagagttaaaaactctgtcctagcctccgatgcctttttcccctttcccgacacaatcgaggaagctgcaaaagccggcataaaagccgtaatccagcccggcggctcaatccgcgattacttaagcatcgaagaatgtaacaaacacggaatggccatgctgataacaggcgtaagacattttaagcattag

SEQ ID NO: 56210 - protein, 533 aa, Treponema denticola ATCC 35405
MGLVLASVSDKTGLKDFAFRLKAAGYDFIASGGTAKTLQEAGIKVKEVSEYTSSPEILGGRVKTLHPMIHGGILARDTKEDRAELKALGFSGIDIVIANLYPFEKTISSPDSTESDCIENIDIGGVALLRAAAKNYSRVTVICDPADYDEVSSEIEKTGEISLSLRKRLAIKAFDLCTRYDAAITSWLSGLSRLSGGIEEKTSLTLCAYPGQDLRYGENPHQKAWLYTNEPKAGPLGGKVLQGKALSYNNILDADAAWRAVSMFTKPAAVVVKHLTPCGLAEINEEPAKSSSSSLPNSEVSLALRAAIDCDPVSAFGSIIALNRPFDKASVEALGALFVECIIAPLFTEEAKELLSGKKNLRLIEAPILQEKEPYEYKSVLGGFLKQEKDLGDPEGTEYKDAAERKAEPFERALLQFAMKACTMVKSNAILLAAPIDLSNPQKGFCSVGIGCGQPNRVDAARQAIERAGERVKNSVLASDAFFPFPDTIEEAAKAGIKAVIQPGGSIRDYLSIEECNKHGMAMLITGVRHFKH

SEQ ID NO: 56211 - DNA, 1635 bp, Yersinia pestis biovar Microtus str. 91001
  CDS (1)..(1635): transl_table=11
ttgataatgaagaaaactgcgactccaaatccaagggataaaaccatgcaacaacgccgtccaatccgccgtgctctactcagtgtgtctgacaaagcaggtatcatcgaattcgcccaagcactttctcaacgcggtatcgagttactttccaccggtgggactgcccgcctgctggctgatgctggtttacccgttaccgaagtgtctgactacaccggtttcccggaaatgatggatggacgtgtgaagactttgcatccaaaggtgcatggtgggattttaggtcgtcgtggtcaggatgatggcatcatggctcaacatggcattcagcccattgatattgtcgtcgttaatttatatcccttcgcccagacggttgcccgcccggattgctcgttggaagatgcggttgagaatattgatattggtggcccaaccatggttcgctctgcggccaagaaccataaagatgtcgccatcgtggtgaagagtagcgactaccccgccattattactgagcttgataataatgatggttcgttgacttaccccacccgcttcaatctggccattaaagctttcgaacacaccgccgcctacgacagcatgatcgccaactacttcggcacactggtgccaccttatcatggtgatacggaacagccttccggccacttccctcgcaccctaaatcttaactatataaagaagcaggatatgcgttacggtgaaaacagccaccagcaagctgccttctatatagaagaagatgtcaaagaggcatccgttgccactgcccagcaattacaagggaaagccctctcttataacaatattgcggataccgatgccgcgctggaatgcgtgaaagagttcagtgaaccagcctgtgtgatcgttaaacatgccaacccatgcggtgtggctatcggtgattctattcttgccgcttatgaacgtgcctatcaaaccgatccaacctcagctttcggtggcatcatcgcctttaaccgtgaattggatgcagcaacggccagcgcgatcatcagccgccagtttgtcgaagtgatcattgcgccaacagtcagctctgatgcattggcattgcttgcagctaaacaaaatgtccgagtcctgacttgtggccagtggcaagcacgttcagcaggtttagatttcaaacgtgttaatgggggtttgctggtacaagaacgcgatttaggtatggtgacggcggccgaccttcgcgtggtttccaagcgtcagcctaccgaacaggaactgcgtgatgcgctgttctgctggaaagtggctaagtttgttaaatccaatgcgattgtctatgcccgcgataacatgacaatcggtataggtgccggccaaatgagccgcgtgtactctgcgaaaatagccggtatcaaggccgcagatgaagggctggaagtggctggctcagccatggcctctgatgccttcttcccgttccgtgatggtattgatgccgccgcggctgtgggcattacttgtgtcatccaaccgggcggctcaattcgtgatgatgaagtcatcgcggctgctgatgaacacagtattgccatgatcttcaccgacatgcgccatttccgtcattaa

SEQ ID NO: 56212 - protein, 544 aa, Yersinia pestis biovar Microtus str. 91001
MIMKKTATPNPRDKTMQQRRPIRRALLSVSDKAGIIEFAQALSQRGIELLSTGGTARLLADAGLPVTEVSDYTGFPEMMDGRVKTLHPKVHGGILGRRGQDDGIMAQHGIQPIDIVVVNLYPFAQTVARPDCSLEDAVENIDIGGPTMVRSAAKNHKDVAIVVKSSDYPAIITELDNNDGSLTYPTRFNLAIKAFEHTAAYDSMIANYFGTLVPPYHGDTEQPSGHFPRTLNLNYIKKQDMRYGENSHQQAAFYIEEDVKEASVATAQQLQGKALSYNNIADTDAALECVKEFSEPACVIVKHANPCGVAIGDSILAAYERAYQTDPTSAFGGIIAFNRELDAATASAIISRQFVEVIIAPTVSSDALALLAAKQNVRVLTCGQWQARSAGLDFKRVNGGLLVQERDLGMVTAADLRVVSKRQPTEQELRDALFCWKVAKFVKSNAIVYARDNMTIGIGAGQMSRVYSAKIAGIKAADEGLEVAGSAMASDAFFPFRDGIDAAAAVGITCVIQPGGSIRDDEVIAAADEHSIAMIFTDMRHFRH

SEQ ID NO: 56213 - DNA, 1788 bp, Magnaporthe grisea 70-15
  CDS (1)..(1788)
atggcgtcttctcagcggattgccatcgtctccgtctatgacaagacaggactcttggatctggctaaaggcctcatcaagaacaatgttcgcattctggcgtctggaggtacctccaagatgatcagggagtccggcttccctgtggaagacatctcagccatcaccaaggcccccgagatgctggctggccgggtcaagaccctccacccagccgtgcacgccggcattctggcccgcaacctcgagtcggacgagaaggaccttgccgagcagagcatcgacaaggtcgactacgtcgtctgcaatctgtaccccttcaaggacaccgtcgccaagatcaacgtcaccgtccccgaggctgtcgaagagatcgacattggaggcgtcaccttgatccgtgccgccgccaagaaccactcgcgcgtcaccatcctgagcgacccgaccgactacgccgagttcctcaaggagctggacagcggcgagatcaaggagtcgagccgcaagctgtacgctctcaaggcctttgagcacacggccgactacgacgccgccatcgccgacttcttccgcaagcagtacgcctcggacggcctgcagcacctcaccctccgctacggcgccaacccccaccagaagcccgccgccgccttcgccaaggagggcaagctgcccttcaaggtcctctgcggcagcccgggttacatcaacctgctcgacgcgctcaacgcctggcccctggtcaaggagctcaaggccgccctcggtctccccgccgccgccagcttcaagcacgtgtcgcccgccggcgccgccatcggcaccccgctgtctgccgacgagcaaaaggtctatatggtcgagggcatcgagggtattgagtcgtcggccctggcccaggcctacgcacgcgcccgtggcgccgaccgcatgtcgtcgtttggtgacatgatcgccctcagcgacgtcgtcgacctgcccaccgcccagatcatctccaaggaggtctctgacggtgtcatcgcccctggctacgacgctgccgcgctcgaggtcctcaagaagaagaagggcggccgctacctggtgctgcagatggacgccgactacgtcccgagcccgcaggagctgcgcaccgtctacggcgtgtcgcttgcccagcaccgcaacgacgtcgaggtgtcgcccgcgtcgttcagcaccgtcttggtgcccaaggatggcccggccctgcccgagtctgccctgcgcgacctgaccgtcgccaccatcgcgctcaagtacacccagagcaactcggtctgctacgccgccaacggccaggtcatcggcctcggcgccggccagcagtcgcgcatccactgcactcgcctcgccggcgacaaggccgacaactggtggctgcgcttccacccgcgtgtccttggcatcaagtggaagaagggcaccaagaggcccgacaagagcaacgccatcgacctgctcgtcagcggcgagctgcccaagtccggccccgagagggagtcgttcgaggccctgttcgacgaggtccctgccgcctttggcgaggccgagcgcgaggagtggctcggcaagctgaccaacgttgctatttccagcgatgcattctttcccttcaccgacaatgtgtaccgtgcggcccgttcaggagtcaagtacatggccgcgccaagcggaagccaaaatgaccagcccgtcttcgacacggccgacaaattgggcatcacttttgtggagcagagcgtcaggctgttccaccactaa

SEQ ID NO: 56214 - protein, 595 aa, Magnaporthe grisea 70-15
MASSQRIAIVSVYDKTGLLDLAKGLIKNNVRILASGGTSKMIRESGFPVEDISAITKAPEMLAGRVKTLHPAVHAGILARNLESDEKDLAEQSIDKVDYVVCNLYPFKDTVAKINVTVPEAVEEIDIGGVTLIRAAAKNHSRVTILSDPTDYAEFLKELDSGEIKESSRKLYALKAFEHTADYDAAIADFFRKQYASDGLQHLTLRYGANPHQKPAAAFAKEGKLPFKVLCGSPGYINLLDALNAWPLVKELKAALGLPAAASFKHVSPAGAAIGTPLSADEQKVYMVEGIEGIESSALAQAYARARGADRMSSFGDMIALSDVVDLPTAQIISKEVSDGVIAPGYDAAALEVLKKKKGGRYLVLQMDADYVPSPQELRTVYGVSLAQHRNDVEVSPASFSTVLVPKDGPALPESALRDLTVATIALKYTQSNSVCYAANGQVIGLGAGQQSRIHCTRLAGDKADNWWLRFHPRVLGIKWKKGTKRPDKSNAIDLLVSGELPKSGPERESFEALFDEVPAAFGEAEREEWLGKLTNVAISSDAFFPFTDNVYRAARSGVKYMAAPSGSQNDQPVFDTADKLGITFVEQSVRLFHH

SEQ ID NO: 56215 - DNA, 1788 bp, Gibberella zeae PH-1
  CDS (1)..(1788)
atgtcctctcagcagaagatcgccatcgtctcggtctacgacaagaccggtctgttggacctggccaagggtcttgtccagcagaatgttcgaattctcgcctctggaggcacctccaagatgatccgagagtcgggcttccctgtcgaggacgtttccgccatcaccaaggcccctgagatgcttgctggtcgcgtcaagactctgcaccctgccgtccacgctggtatcttggcccgtgacctcgcctctgacgagaaggaccttgccgaccagaacatcaacaaggttgactacgtcatctgcaacctctaccccttcaaggacactgtcgccaagatcaacgtcagcatccccgaggctgtcgaagagatcgacattggtggtgtgactctcatccgcgctgccgccaagaaccacaagcgtgttaccatcctcagcgaccccaacgactacgctggcttcctcaaggagctcgagaagggcgatgtcaccgagagcagccgcaaccgatacgccctcaaggccttcgagcacactgccgactacgatgccgccatctcccagttcttccgcaaggagtacgctggtaacggcgaccagtacagcgctctccgatacggcgccaacccccaccagaagcctgctgccgcctacgtttccgagggcaaccttcccttcaaggtccttggtggctctcccggttacatcaacctcctcgacgccctgaacgcctggcctctcgttaaggagctccacaaggcccttggcaagcccgccgctgccagcttcaagcacgtttctcctgctggtgctgccattggtctccctcttactgaggaggagaagaaggtctactttgtccacgacattgagggcattgacgagtccagcctcgcccaggcttacgctcgtgcccgtggtgccgaccgcatgagcagctttggcgacatgattgctctcagcgacgtcgttgatgttcctactgctcgcatcatctccaaggaggtctctgacggtgtcattgctcctggctacgaagaagccgctcttgagatcctcaagaagaagaagggtggccgatacctcgtccttcagatcgaccctgagtacaaccctcccgctactgagacccgcactgtctacggtatcaacctccagcagcaccgtaacgatgttgagatcactcccaagcacttcaacaccatcatcacccccaaggacactgcttccctccccgagagcgctgctcgtgaccttaccatcgccaccatcactctcaagtacactcagagcaactctgtgtgctacgcctacaacggacaagtcgttggtctcggtgctggacagcagtcccgaattcactgtacccgacttgccggtgacaaggctgacaactggtggatgcgattccacgagcgtgttctcggcatcaagtggaagaagggtaccaagcgtcccgacaagagcaacgccatcgacctgctcgtcagcggtcagctccccaaggacggtcctgagcgtgaggctttcgagggtgtctttgaggaggtccctgctgcctttactgccgaggagcgtgaagcttggatgaagcagctcaagaacgtttgcgtttccagcgatgctttcttcccctttattgacaacgtcttccgcgtgtctcaatcaggagtcaagtatgttgctgcccctggaggcagccagaacgactctgctgtctttgacaccgctgagaagctgggcattacctttgttgagcagaacattcgtctgttccaccactaa

SEQ ID NO: 56216 - protein, 595 aa, Gibberella zeae PH-1
MSSQQKIAIVSVYDKTGLLDLAKGLVQQNVRILASGGTSKMIRESGFPVEDVSAITKAPEMLAGRVKTLHPAVHAGILARDLASDEKDLADQNINKVDYVICNLYPFKDTVAKINVSIPEAVEEIDIGGVTLIRAAAKNHKRVTILSDPNDYAGFLKELEKGDVTESSRNRYALKAFEHTADYDAAISQFFRKEYAGNGDQYSALRYGANPHQKPAAAYVSEGNLPFKVLGGSPGYINLLDALNAWPLVKELHKALGKPAAASFKHVSPAGAAIGLPLTEEEKKVYFVHDIEGIDESSLAQAYARARGADRMSSFGDMIALSDVVDVPTARIISKEVSDGVIAPGYEEAALEILKKKKGGRYLVLQIDPEYNPPATETRTVYGINLQQHRNDVEITPKHFNTIITPKDTASLPESAARDLTIATITLKYTQSNSVCYAYNGQVVGLGAGQQSRIHCTRLAGDKADNWWMRFHERVLGIKWKKGTKRPDKSNAIDLLVSGQLPKDGPEREAFEGVFEEVPAAFTAEEREAWMKQLKNVCVSSDAFFPFIDNVFRVSQSGVKYVAAPGGSQNDSAVFDTAEKLGITFVEQNIRLFHH

SEQ ID NO: 56217 - DNA, 1773 bp, Candida glabrata CBS 138
  CDS (1)..(1773)
atgtacaagaagacggctattctgtctgtttacgacaagactgggctgctggacttggcgaaggggttgattgagaacgatgtgaggattctggcctcaggcggtactgcgaacatggtgcgcgaggccgggtttcctgtggacgacgtgtcctcgatcacacatgcgccagagatgctgggtggcagagtgaagacgctgcaccctgcggtgcacggtggtattctagccaggaacttggagagcgatgagaaggacttgaaggaccagcacattgacaaagtggactttgttgtgtgcaacttgtaccctttcaaggagaccgtcgcaaaggtcggtgtcacagtaccagaagcagtcgaagagatcgatatcggtggtgttaccttgttgagagccgccgccaagaaccactcgagagtcacaatcctgtccgaccctaacgactacgctattttcttgcacgaactgaaagagcacggcgaagtttctcaggagctgagaaacagactggcactaaaggcttttgaacacactgctgactacgatgccgccatctctgacttcttcagaaaacaatactccgaaaacagagcccaattgcctctgcgttacggtgctaacccacaccaaagacctgcacaggctttcgtcacacaattggaggagctgccattcaaggtcttgagtggctccccaggttacattaaccttttggatgctctaaattcctggcctttggttaaggagctatcagcatcgctaaacttaccagcagcagcatccttcaaacacgtttcaccagctggtgccgctgttggtatcccactttccgatgttgaaaaacaaatatactttgtatccgatatcgagaacctatctccattagcatgtgcctacgcaagggcccgtggtgccgacagaatgtcctccttcggtgattggattgccctatcgaatatcgtcgatgtcccaactgcaaccattatctccaaggaggtgtctgatggtgtaattgctccaggctttgaacccgaggcattggagatcctaaaaaagaagaagaatggtaagtactgtatcttgcaaatagatccaaactacatcccagatgccatggaatcgagagatgtctacggtatcactttgcaacaaaagagaaatgacgccatcatcaaccaatcttctttcaaagaaattgtgtctgccaataagaacttgactgaacaggccgtgattgatctaactgttgcatcattagctctaaaatacacacaatctaactccgtctgttatgcaaagaacggtatggtaatcggtcttggagctggccagcaatccagaatccactgtacaagactagcaggtgataaagctgacaattggtggttgagacaacatccaaaggttcttgcctttaagtgggccaagggtgttaagagaccagataagtccaatgcaatcgacttatatgttactggtcaaattcctgaagaggatccagaaaagtccgaatatgaatctaagttcgctgaaattccaactccgctaacaccggaggaaagaaaggagtggctctctaagttgaataatgtctccttatcctcagatgcattcttcccattcccagacaatgtttacagagctgtcaaatcaggtgttaagtacattgctgctccatctggatctgttcaagacaaggctgtgtttgctgctgctgattcttttgacttagtctatgttgaaaatccaattcgtctgttccatcattga

SEQ ID NO: 56218 - protein, 590 aa, Candida glabrata CBS 138
MYKKTAILSVYDKTGLLDLAKGLIENDVRILASGGTANMVREAGFPVDDVSSITHAPEMLGGRVKTLHPAVHGGILARNLESDEKDLKDQHIDKVDFVVCNLYPFKETVAKVGVTVPEAVEEIDIGGVTLLRAAAKNHSRVTILSDPNDYAIFLHELKEHGEVSQELRNRLALKAFEHTADYDAAISDFFRKQYSENRAQLPLRYGANPHQRPAQAFVTQLEELPFKVLSGSPGYINLLDALNSWPLVKELSASLNLPAAASFKHVSPAGAAVGIPLSDVEKQIYFVSDIENLSPLACAYARARGADRMSSFGDWIALSNIVDVPTATIISKEVSDGVIAPGFEPEALEILKKKKNGKYCILQIDPNYIPDAMESRDVYGITLQQKRNDAIINQSSFKEIVSANKNLTEQAVIDLTVASLALKYTQSNSVCYAKNGMVIGLGAGQQSRIHCTRLAGDKADNWWLRQHPKVLAFKWAKGVKRPDKSNAIDLYVTGQIPEEDPEKSEYESKFAEIPTPLTPEERKEWLSKLNNVSLSSDAFFPFPDNVYRAVKSGVKYIAAPSGSVQDKAVFAAADSFDLVYVENPIRLFHH

SEQ ID NO: 56219 - DNA, 1773 bp, Kluyveromyces lactis NRRL Y-1140
  CDS (1)..(1773)
atgccacacactaagactgctattctctctgtctatgacaagacaggcttgttggatttggctaagggtctagctgaaaacaatgtcagaattttggcttctggtggtaccgctaagatggttcgtgaggctggattcccagtggatgatgtctcttccatcacccatgccccagaaatgttaggtggtagagtcaagactttgcatcctgctgttcatggtggtatcttggctagaaaccttgaatcagatgagaaagatttaaaggaacaaaacatcgacaaagtcgactttgttgtttgtaacttgtacccattcaaggaaaccgttgctaaagtgggtgtttccatcccagaagctgtcgaagaaattgacatcggtggtgtcactttgttgagagctgctgccaagaaccacgctagagttactatcctttctgacccaaaggattacccacagttcttaaacgaattgcaaaagggtgaaatttctagtgacttgagaaacaccttagccttgaaggctttcgaacacaccgctgactacgatactgctatctctgatttcttcagaaaacaatactcggagaacaagactcaattggccttaagatacggtgctaaccctcaccaaaaacctgctcaagctttcgtcacccaacaagaagaattgccattcaaggtcttgtctggttctccaggttacattaacttgttggatgctttgaactcttggccattggttaaggaattgtctgcatctctaaacttgccagctgctgcctctttcaagcacgtttccccagccggtgcagccgttggtttgccattatccgacgtcgaaaaacaaatctactttgttgctgatattgagaacttatctcccttggcttgtgcttatgcaagagcccgtggtgccgacagaatgtcctctttcggtgactggattgccttgtccaacatcgttgacgtcccaactgccaagatcatttctcgtgaagtctctgatggtgttattgctccagggtttgaaccagaagctctagaaattttgaagaagaagaagaatggtaagtactgtattttacaaattgatccaaactacactccagaagcattggaatccagacaagtctacggtgtcactctacagcaaaagagaaatgatgctattataaataaatcttccttcaaagagatcgtttctcaaaacaaggacttgccagaacaagcagttattgatttgaccgttgccacgatcgctctaaagtacacccaatccaactctgtttgctacgcaaagaacggtatggttgttggtttgggtgctggtcaacaatcaagaatccactgtactagattggcaggtgacaaggcagacaattggtggttaagacaacacccaagagtcctaggtttcaagtgggccaagggtgtcaagagaccagaaaagtccaatgccattgatttattcgtcactggtcaaattccaactgaagaaccagaaaaatcagagtatgaatcaaaattcgaaactattccagaacctttgactgccgaagaaaagaagtcgtggatgtctaagttgaccaatgttgctctatcttctgacgctttcttcccattcccagataacgtctacagagctgttagatccggtgtcaagtacattgctgctccaagcggttctgtgatggacaaggctgttttcggtgctgctgattccttcgatttggtttacgtcgaaaatccaatccgtttgttccatcattga

SEQ ID NO: 56220 - protein, 590 aa, Kluyveromyces lactis NRRL Y-1140
MPHTKTAILSVYDKTGLLDLAKGLAENNVRILASGGTAKMVREAGFPVDDVSSITHAPEMLGGRVKTLHPAVHGGILARNLESDEKDLKEQNIDKVDFVVCNLYPFKETVAKVGVSIPEAVEEIDIGGVTLLRAAAKNHARVTILSDPKDYPQFLNELQKGEISSDLRNTLALKAFEHTADYDTAISDFFRKQYSENKTQLALRYGANPHQKPAQAFVTQQEELPFKVLSGSPGYINLLDALNSWPLVKELSASLNLPAAASFKHVSPAGAAVGLPLSDVEKQIYFVADIENLSPLACAYARARGADRMSSFGDWIALSNIVDVPTAKIISREVSDGVIAPGFEPEALEILKKKKNGKYCILQIDPNYTPEALESRQVYGVTLQQKRNDAIINKSSFKEIVSQNKDLPEQAVIDLTVATIALKYTQSNSVCYAKNGMVVGLGAGQQSRIHCTRLAGDKADNWWLRQHPRVLGFKWAKGVKRPEKSNAIDLFVTGQIPTEEPEKSEYESKFETIPEPLTAEEKKSWMSKLTNVALSSDAFFPFPDNVYRAVRSGVKYIAAPSGSVMDKAVFGAADSFDLVYVENPIRLFHH

SEQ ID NO: 56221 - DNA, 1773 bp, Debaryomyces hansenii CBS767
  CDS (1)..(1773)
atgccaaaccatactaaaactgccattttatcggtttacgataaaactggattattagacttagccaagggattagtcgctcaagatgttcgtattttagcatctggtggtacctcgaagttgattcgtggagccggtttcccagttgaagacgtttctacgatcacccatgccccggaaatgttaggtggtagagttaagaccttacacccagctgttcacggtggtattttggccagagacttgaagagtgacgaagctgacttagaagctcaaggtattgaaaaggttgatattgttgtctgtaacttgtacccattcaaggaaactgtgtctaaggccgctgttaccattgaagaagctgtcgaggaagttgacattggtggtgttactttgttgagagctgctgctaagaaccattccagagtcactattttgtctgatcctaaggattacgccggctttttggaacaattaaagactggtgaaatttcgactgatgctagaaacagatacgcattgaaggctttcgaacataccgcagactacgatgttgctatctctgatttcttcagaaaggaatacgctgaaaacgtatctcaattaccattaaggtacggtgccaaccctcaccaaaagcctgctcaagcttttgttacccaaggtgaacttcctttcaaggttttgtccggttccccaggttacatcaacttattggatgccttaaactcgtggccattagttaaggaattatcagcttccttaaatttaccagccgccgcctctttcaaacacgtttccccagctggttgtgctgtcggtttaccattgtcagatgttgaaaagaagatttactttgttgaagacatcgaaaacttatctccattagctaacgcttatgctagagctagaggtgctgacagaatgtcgtcttttggtgactggatcgctttatccaacattgttgatttaccaactgcccaaattatttctaaggaagtttccgatggtgtaattgctccaggttattctgatgaagctttggcaatcttaaagaaaaagaagggtggtaagtactgtattttacagattgaccctaactacaacccagataacttggaatcaagacaagtttacggtatcactttgcaacaaaagagaaatgacgccatcatcaagggtaactccttcaaagaaatcgtttccaagaacaaggaattaactgaacaaggtaccattgatttaacagtggcaactattgttttgaagtacactcaatctaactcggtttgttacgccaagaatggtatggttattggtttaggtgctggtcaacaatctcgtatccactgtactagattagctggtgacaaggctgacaactggtggttcagacaacatccaaaggttttaggtatgaaatgggccaagggtgttaagagacctgaaaagtccaacgccatcgatttattcgtcactggccaaattccatcctctgaaccagaaaagactgaatatgaaagtaagtttgctgaattgccagaacctttgactgaaaaagaaagagaagaatggttaggcaagttaaccgatgttgctttatcttctgacgctttcttcccattccctgataatgtttacagagctgtcagatctggtgttaagttcatcgctgctccatctggttctgttatggataaggcggtctttggtgctgctgattctttcgatgttgtctacgtcgaaaacccaattcgtttattccatcattaa

SEQ ID NO: 56222 - protein, 590 aa, Debaryomyces hansenii CBS767
MPNHTKTAILSVYDKTGLLDLAKGLVAQDVRILASGGTSKLIRGAGFPVEDVSTITHAPEMLGGRVKTLHPAVHGGILARDLKSDEADLEAQGIEKVDIVVCNLYPFKETVSKAAVTIEEAVEEVDIGGVTLLRAAAKNHSRVTILSDPKDYAGFLEQLKTGEISTDARNRYALKAFEHTADYDVAISDFFRKEYAENVSQLPLRYGANPHQKPAQAFVTQGELPFKVLSGSPGYINLLDALNSWPLVKELSASLNLPAAASFKHVSPAGCAVGLPLSDVEKKIYFVEDIENLSPLANAYARARGADRMSSFGDWIALSNIVDLPTAQIISKEVSDGVIAPGYSDEALAILKKKKGGKYCILQIDPNYNPDNLESRQVYGITLQQKRNDAIIKGNSFKEIVSKNKELTEQGTIDLTVATIVLKYTQSNSVCYAKNGMVIGLGAGQQSRIHCTRLAGDKADNWWFRQHPKVLGMKWAKGVKRPEKSNAIDLFVTGQIPSSEPEKTEYESKFAELPEPLTEKEREEWLGKLTDVALSSDAFFPFPDNVYRAVRSGVKFIAAPSGSVMDKAVFGAADSFDVVYVENPIRLFHH

SEQ ID NO: 56223 - DNA, 1773 bp, Yarrowia lipolytica CLIB122
  CDS (1)..(1773)
atgtctgaacgtcagaaaatcgccatcctttccgtctacgacaagaccggtctgctggacctggccaagggcctggtgaagaacaatgtgcggcttctcgcctccggcggtactgcgaagctggtgcgggaggcaggattccccgtggaggacgtttcggccatcacccacgcccccgagatgctgtcgggccgagtcaagacgctgcatcccgcggtgcacggtggaattctggctcgaaacatcgagtcggacgaaaaagacctgtctgcgcagggcattgacaaggtggactttgtggtgtgcaacctgtaccctttccaggacacggtggccaagatcaacgtgacgatcgaggaggccgtggaggagattgacattggcggcgtgactctgctgcgagccgcagctaagaaccactcgcgagtcaccattctgtccgacccccgagactaccacgcctttctcaacgagctcgaccacggcgccatttcggccgagacccgaaaccggctcgccctcaaggcgttcgagcacaccgccgactacgactccgccatctctgactttttccgaaagcagtattcggaagacctgtcccagatgcctctccgatacggagccaacccccaccagaagcccgcccaggcgttcgtccagcagggtgagctgcccttcaaggtcctgtgtggctcgcccggctacatcaacctgctggatgcgctcaactcgtggcccctggtcaaggagctgtcggcctcgctcaacctgcccgccgccgcctccttcaagcacgtttctcccgccggagccgccgtgggtctgcccctcagcgacattgagaagaagatttactttgtcgaggacattgaaaacctgtctcctcttgccaacgcctacgcccgagctcgaggcgccgaccgaatgtcgtcctttggcgactttatcgctctgtccaacattgtcgatctccccaccgcccagatcatctccaaggaggtgtctgacggagtgattgcccccggctacgagcccgaggccctggagctgctcaagaagaagaagggcggcaagtactgcgtgctgcagatcgaccccaacttcacccccggccccgtggagacccgacaggtgtacggcatttcgctgcagcagaagcgaaatgacgcggtcatctcctccaactccttcaaggagctcgtctccaagaacaaggagctgcccgagcaggccatcatcgacctcaccgtcgccaccatcgccctcaagtacacccagtccaactcggtgtgctacgccaaggacggtatggtgattggtctgggagccggccagcagtcccgaatccactgcacccgtctcgccggcgataaggccgacaactggtggttccgacagcaccccaaggtgctggccttcaagtggaagaagggcaccaagcgacccgacaagtccaacgccatcgatctctacgtctcgggccagattccccagtccggtgtcgagaaggaggagtacgaggccaagtttgagaccgttcccgagcctttgacggccgaggagcgaaaggagtggctcggcaagctcaccaaggtggctctgtcctccgatgccttcttccccttccccgataacgtctaccgggctgcccgaagcggagtcagctacatttccgcccccagcggctctgttcaggacgaggctgtgtttgccgccgccgacagctttggcatcgcctacgtggagaacaacatccgactgttccaccactaa

SEQ ID NO: 56224 - protein, 590 aa, Yarrowia lipolytica CLIB122
MSERQKIAILSVYDKTGLLDLAKGLVKNNVRLLASGGTAKLVREAGFPVEDVSAITHAPEMLSGRVKTLHPAVHGGILARNIESDEKDLSAQGIDKVDFVVCNLYPFQDTVAKINVTIEEAVEEIDIGGVTLLRAAAKNHSRVTILSDPRDYHAFLNELDHGAISAETRNRLALKAFEHTADYDSAISDFFRKQYSEDLSQMPLRYGANPHQKPAQAFVQQGELPFKVLCGSPGYINLLDALNSWPLVKELSASLNLPAAASFKHVSPAGAAVGLPLSDIEKKIYFVEDIENLSPLANAYARARGADRMSSFGDFIALSNIVDLPTAQIISKEVSDGVIAPGYEPEALELLKKKKGGKYCVLQIDPNFTPGPVETRQVYGISLQQKRNDAVISSNSFKELVSKNKELPEQAIIDLTVATIALKYTQSNSVCYAKDGMVIGLGAGQQSRIHCTRLAGDKADNWWFRQHPKVLAFKWKKGTKRPDKSNAIDLYVSGQIPQSGVEKEEYEAKFETVPEPLTAEERKEWLGKLTKVALSSDAFFPFPDNVYRAARSGVSYISAPSGSVQDEAVFAAADSFGIAYVENNIRLFHH

SEQ ID NO: 56225 - DNA, 1779 bp, Candida albicans SC5314
  CDS (1)..(1779): transl_table=12
atgtccgacaaacaacacaccaaaactgcaattttatcagtatatgacaaaacaggtttattagatcttgccaaaggtttggttgccgctaatgtgcgcatcttagcttctggtggtaccgcaaaattgatccgtgaagctggattcccagtcgaagatgtctcatcaattacccatgctccagagatgttaggcggtagagttaagactttacatccagctgttcatggtggtattttggctagaaacttagaaagcgacgaacacgatttaactgcccaaggtattgaaaaagttgactttgttgtttgtaacttgtatccattcaaagagaccatctccaaagttgctgttactgttccagaagccgtggaagaaattgacattggtggtgttactttattgagagctgccgctaagaaccacgaaagagtttccatcttatcagacccacaagattatgcccatttcttggaagaattgaagagtggggaaatcactgccgaaactagaaacagattggcattgaaagcatttgagcatactgcagactatgacgttgctatttccgatttcttcagaaagcaatatgccgaaaacatctctcaattgcctttaagatacggtgctaacccacaccaaaagccagcacaagcttttgtgtctgaaggtgaattgccattcaaagtgttaaatggttcaccaggatacatcaacttattggatgctttaaattcatggcctttagttaaagagttatccgcttctttgaatttgccagctgctgcctcattcaagcacgtgtcgccagctggtgccgctgtcggtttacctttgacagacattgaaaagaagatttattttgtcgaagatattgaaaacttgtctcctttagcaaacgcttatgctagagccagaggagctgatagaatgtcctcttttggtgatttcattgctctctccaacattgtcgataaaccaactgcacaaatcatttctaaagaagtctcagatggtgttattgccccagggtattcggaagaagctttagagcttttaaagaaaaaaaagaatggtaaatactgtatcttacaaattgatccaaactataacccagaaaacttggaaagcagacaagtctacggtattactttgcaacaaaaaagaaacgacgctattttcaaaggttcttcattcaaagaaattgtgtccaaaaacaaggatttgactgaacaaggtgctgttgatttgactatcgccactattgccttgaaatacacccaatccaactcagtttgttacgctaagaacggtatggttatcggcttaggagctggtcaacaatctcgtattcactgtaccagattagctggtgacaaagccgacaattggtggttaagacaacatccaaaggttttgggtttcaaatgggctaaaggtaccaaaagaccagaaaaatcaaatgcaattgacttatatgttaccaaccaaatcccaactgaggaaccagaaaaatctgaatacgaatctaaatttgccgaaataccagaaccattaacagctgaagaaagaaaagaatggttgagtaaattatctaatgttgcattatcctcagatgcatttttcccattcccagataatgtttacagagctgctagatcaggtgtgaaatttattgctgctccatcaggatctgttatggacaaagctgtctttgctgctgcagatgctaacgatattgtgtacgtggaaaacccaatccgtttgttccatcattag

SEQ ID NO: 56226 - protein, 592 aa, Candida albicans SC5314
MSDKQHTKTAILSVYDKTGLLDLAKGLVAANVRILASGGTAKLIREAGFPVEDVSSITHAPEMLGGRVKTLHPAVHGGILARNLESDEHDLTAQGIEKVDFVVCNLYPFKETISKVAVTVPEAVEEIDIGGVTLLRAAAKNHERVSILSDPQDYAHFLEELKSGEITAETRNRLALKAFEHTADYDVAISDFFRKQYAENISQLPLRYGANPHQKPAQAFVSEGELPFKVLNGSPGYINLLDALNSWPLVKELSASLNLPAAASFKHVSPAGAAVGLPLTDIEKKIYFVEDIENLSPLANAYARARGADRMSSFGDFIALSNIVDKPTAQIISKEVSDGVIAPGYSEEALELLKKKKNGKYCILQIDPNYNPENLESRQVYGITLQQKRNDAIFKGSSFKEIVSKNKDLTEQGAVDLTIATIALKYTQSNSVCYAKNGMVIGLGAGQQSRIHCTRLAGDKADNWWLRQHPKVLGFKWAKGTKRPEKSNAIDLYVTNQIPTEEPEKSEYESKFAEIPEPLTAEERKEWLSKLSNVALSSDAFFPFPDNVYRAARSGVKFIAAPSGSVMDKAVFAAADANDIVYVENPIRLFHH

SEQ ID NO: 56227 - DNA, 1806 bp, Ustilago maydis 521
  CDS (1)..(1806)
atgtctgcttctcaaccgatcgccatcctgtcggtatacgacaagaccggtctgctcgatctcgccaagggcctccatgccctcggcgtgcgtctgcttggatccggaggtaccgccaagcttgtccgcgaggcgggcttgcccatcggcgatgtttccgacatcacgaaggcgcccgagatgctaggcggtcgcgtcaagacgctgcaccctgctgtccacggcggcatccttgctcagaccggcaagccctccgacgttgaggacctcaaggcgcagagtatcgagccgatcgacgtagttgtctgcaatctttaccccttcgaggagaccattgccaaggagccaaagcccacaatcgctcaggccaccgaagaggtcgacattggcggcgtcacccttctccgtgctgctgcaaagaaccacgagcgcgtctgggtgctctcggatcccaaggactacagtaagttcctcgacaattatgcctcaaaggatgctgaggccgccaaggccaaccgcaacctgcttgctgtcaaggctttctctcagactgctcgctacgacgaggccattagcaactactaccgccagcagtacgccagtctcgcatccaagtcgatcgatgtcgtccagcagcttcctctccgatacggtgcaaaccctcaccaaaagccagcgcaggccttcgtcactgccggcgaaatgcccgtaaaggccctgtgcggctctccaggctacatcaacttcctcgactcgctcaatgcttgggctcttgtccgtgagctcgccgaggctaccgggttgcctgctgctgccagcttcaagcacgtctcgcccgcgggtgccgccgttggtgttccgctgtctgacgtcgaagccaaggctttctttgtcgatgacctcggccagctctcaggtcttgccaccgcatacgcacgtgctcgtggtgctgatcgcatgtcgtcgttcggcgactttatcggcctctcgcaccccgtcgacgtgcagactgccaagatcatctcgcgcgaggtgagcgacggtgttattgcaccctcctatgagcccgaagcgctcgagattctctccaagaagaagggaggcaaatactgtgtgctcgagatcgacccccagttccagccctcggacatcgagacccgcaccgtctacggcgtccagctgcaacaacgccgcaacgacgtcaagatcaccaaggacctcttcaccaacattgtctccgagaacaagaacgttcccgagggcacacagctcgacttgatggttgccacgctcgcactcaagtacacacagagcaactcggtgtgctacgccaagaatggccaggtcatcggtcttggagctggccagcagtcgcgtattcactgcacaaggttggcaggaagcaagaccgacaacttttggctgcgtcagcatccgcgcgtgctcagcttgccgttcaagaagggcaccaagcgtcccgaaaagtcgaacgctatcgatctgttcgtcgagggcactgagaatctgtcatctgaggaaaaggctgagtgggaggccgtctttgagcaggttcctgctgcgctcagcgcggaagagcgaaaggagcatgctgacaagctgaccggcgttgtctgcgccagcgatgccttcttccctttccccgacaacgttcaccgggccaagaggagtggaaccagcttcatcgtcgccccaggcggatccgtcatggacgacgcatgcgtcgctactgcgaacaagtacgacatggtagtggtaaggacgaacctgcgtctcttccaccattaa

SEQ ID NO: 56228 - protein, 601 aa, Ustilago maydis 521
MSASQPIAILSVYDKTGLLDLAKGLHALGVRLLGSGGTAKLVREAGLPIGDVSDITKAPEMLGGRVKTLHPAVHGGILAQTGKPSDVEDLKAQSIEPIDVVVCNLYPFEETIAKEPKPTIAQATEEVDIGGVTLLRAAAKNHERVWVLSDPKDYSKFLDNYASKDAEAAKANRNLLAVKAFSQTARYDEAISNYYRQQYASLASKSIDVVQQLPLRYGANPHQKPAQAFVTAGEMPVKALCGSPGYINFLDSLNAWALVRELAEATGLPAAASFKHVSPAGAAVGVPLSDVEAKAFFVDDLGQLSGLATAYARARGADRMSSFGDFIGLSHPVDVQTAKIISREVSDGVIAPSYEPEALEILSKKKGGKYCVLEIDPQFQPSDIETRTVYGVQLQQRRNDVKITKDLFTNIVSENKNVPEGTQLDLMVATLALKYTQSNSVCYAKNGQVIGLGAGQQSRIHCTRLAGSKTDNFWLRQHPRVLSLPFKKGTKRPEKSNAIDLFVEGTENLSSEEKAEWEAVFEQVPAALSAEERKEHADKLTGVVCASDAFFPFPDNVHRAKRSGTSFIVAPGGSVMDDACVATANKYDMVVVRTNLRLFHH

SEQ ID NO: 56229 - DNA, 1818 bp, Cryptococcus neoformans var. neoformans B-3501A
  CDS (1)..(1818)
atgtcttccgaggctcccatcgcccttctctccgtctacgacaagactggcctccttcccttcgccaaaagcctgaaagagctcggcttcaggctcttgggcagcggtggtaccgccaagatgattcgagaggccggtatggagatcgaggatgtttccaacatcaccaaggcccctgagatgttgggtggtcgagtcaagaccctccaccccgctgttcacggtggtatcctttctcgagatattccttctgaccttgccgacctcgctaccaacaagatctctcccatcaccctcgttgtctgcaacctctaccctttcgtccttcaaacctccaagcctgattgcactcttgccggtgccattgaggagattgacattggcggtgtcaccctccttcgtgctgctgccaagaaccacggccgtgtctccatcatttcttccccttccgactacgagaccattgtcgccgagctcaaggccaagggcgaggtctctgccgagaccaagagaggacttgccatcaaggcattcgaggacaccaagagctacgacgaagctatcagcgactacttcaggaaggtctatgctactcccggcgttgaggacgaaatgaaggctggcgccggtgttggataccagaggctgggtttgaggtacggcgccaaccctcaccagaagcctgcccaggctttcgttgagcagggcgaaatgcccattaaggttctctccggctcccccggctacatcaacctccttgacgccctcaattcttgggcgctcgtcaaggagctcgccgccggtctcaaccttcctgctgctgcttccttcaagcacgtctctcctgccggtgccgccgtcggtcttcccctcgacgagcgtgccgccaaggtctttggtgttgaagacttgaaggagctgtctcctcttgcatgtgcctacgctagggctcgaggtgccgacaggatgtcttcttttggtgatttcatcgctctctcccactctgtcgacactcctaccgccaaaatcatctctcgagaagtctcagacggtgtcatcgcacccggctacgagcctgaagctcttgagatcctcagcaagaagaagggtggcaagtactgcgtcctccagatggaccccaactacgttccccccgagatcgaaacccgacaggtctatggcatttccctccaacagaagcgaaatgactgcaagattgacgagtctctctttagaaatgttgtcaccgccaataaggatcttcccaagtctgccatcaccgatctcgtcgtcgctacacttgccctcaaatacacccagtcgaactctgtctgttacgcccttaacggtaccgtcatcggtctcggcgccggccagcagtctcgtatccactgtactcgtctcgctggtgacaaggctgacaactggtggcttcgacaccacccccgtgtcctcgagttgcccttcaagaaaggtaccaagcgagccgacaaggccaatgccatcgacttgttcgtcaccggccaggcgtttgaagctgagggtggtgagcgtgctcaatgggagagcctattcgagactgtgcctgagcctttgaccaaggaggaaagggaaaagcacatgaaggagctgactggtgtcgcttgcgcctctgacgcctttttcccgttccccgacaatgttcaccgagcgaagaggagcggtgctacctacctcgcagccccaagcggaagtatcatggacaaggagtgtattaaagctgcggatgagaataacttggtgttctgccacaccgacttgagattgttccaccattaa

SEQ ID NO: 56230 - protein, 605 aa, Cryptococcus neoformans var. neoformans B-3501A
MSSEAPIALLSVYDKTGLLPFAKSLKELGFRLLGSGGTAKMIREAGMEIEDVSNITKAPEMLGGRVKTLHPAVHGGILSRDIPSDLADLATNKISPITLVVCNLYPFVLQTSKPDCTLAGAIEEIDIGGVTLLRAAAKNHGRVSIISSPSDYETIVAELKAKGEVSAETKRGLAIKAFEDTKSYDEAISDYFRKVYATPGVEDEMKAGAGVGYQRLGLRYGANPHQKPAQAFVEQGEMPIKVLSGSPGYINLLDALNSWALVKELAAGLNLPAAASFKHVSPAGAAVGLPLDERAAKVFGVEDLKELSPLACAYARARGADRMSSFGDFIALSHSVDTPTAKIISREVSDGVIAPGYEPEALEILSKKKGGKYCVLQMDPNYVPPEIETRQVYGISLQQKRNDCKIDESLFRNVVTANKDLPKSAITDLVVATLALKYTQSNSVCYALNGTVIGLGAGQQSRIHCTRLAGDKADNWWLRHHPRVLELPFKKGTKRADKANAIDLFVTGQAFEAEGGERAQWESLFETVPEPLTKEEREKHMKELTGVACASDAFFPFPDNVHRAKRSGATYLAAPSGSIMDKECIKAADENNLVFCHTDLRLFHH

SEQ ID NO: 56231 - DNA, 1557 bp, Prochlorococcus marinus str. NATL1A
  CDS (1)..(1557): transl_table=11
atgtcaccgatagctctgctaagtgtctcagacaaaactggcttaattccacttgcgaaagcattagttaatgaactgggcttcaaaatcatttcaagtggcgggactgcaaagttaattgagagtgaaaatcttcctgttacaagagtcgcagactacacaggattcccagagattcttggaggaagagtaaaaactctaaacccaaaaattcatggagggatattagccagacgagataaacaatctcatttagatgatttagataaacaaaatatcaatccaatagacttggtggttgttaacttatatccatttgtaaaaacaatttccaaagagaatgtttcatgggaggaagctatcgaaaatattgatattggcggtccaacaatgatccgagcagcagcaaaaaaccatcaagatgttcttgtagttactgatccaagtcaatactcaaacttaattgatgcctataaatcaaaaaagatcactcctgaattacgaaaaaaatattcgcaacaagcttttgagcataccgcgacgtatgacctaacaataagtaattggattgccaaccaaagctcctcaaaaaaggtttcttggttgcaaagcttgccattaaagcaagaacttaggtacggagaaaatcctcatcaaaaagcttcatggtatggagagcctgaaaaaggatggagtggagctaatcaattacaaggcaaagaattaagtacaaataatcttctagatcttgaggctgctttatctactcttcgtgaatttgggtataaaaatactattagtaacccttcatatcaaaaagcagcggtagtaattaagcatacaaatccttgtggagtagctattggagattctccatcttcagctcttaaaagagcattagatggcgatagagtaagtgcttttgggggtattattgctatcaattgccccgttgatgaagctgcagcaaaagaaattgaaaatatatttattgaatgtgttgtagctccatattttgatgaaactgcaaaagaaatactttcaaaaaagaaaaatcttaggctcttagaattaaaagctgagtctgtccaaaaagcagataaaaatcacataagaagtatacttggtggtttattaattcaagatttagacgaaccaagtattgatcaaaaaaaatggaaaagtgttactgaactaatcccaacagatgaagaaatgaatgacttatcttttgcttggaaaattgtaaaacatatacgatcaaacgcaatagctgttgcatccaatcagcagagtctagggattggagctggccaaatgaatagggtaggttcagctaaacttgcattagaagctgctggcacaaaatcaaaaggtgctgttttggctagtgatggttttttcccattcgacgatactgtaaagatggcttctgattatggtattagttcaattattcagccaggtggaagcattagagacgaagattctattaaagcctgcaatgaattaggaataaaaatgattcttactggtaaaaggcactttttacattga

SEQ ID NO: 56232 - protein, 518 aa, Prochlorococcus marinus str. NATL1A
MSPIALLSVSDKTGLIPLAKALVNELGFKIISSGGTAKLIESENLPVTRVADYTGFPEILGGRVKTLNPKIHGGILARRDKQSHLDDLDKQNINPIDLVVVNLYPFVKTISKENVSWEEAIENIDIGGPTMIRAAAKNHQDVLVVTDPSQYSNLIDAYKSKKITPELRKKYSQQAFEHTATYDLTISNWIANQSSSKKVSWLQSLPLKQELRYGENPHQKASWYGEPEKGWSGANQLQGKELSTNNLLDLEAALSTLREFGYKNTISNPSYQKAAVVIKHTNPCGVAIGDSPSSALKRALDGDRVSAFGGIIAINCPVDEAAAKEIENIFIECVVAPYFDETAKEILSKKKNLRLLELKAESVQKADKNHIRSILGGLLIQDLDEPSIDQKKWKSVTELIPTDEEMNDLSFAWKIVKHIRSNAIAVASNQQSLGIGAGQMNRVGSAKLALEAAGTKSKGAVLASDGFFPFDDTVKMASDYGISSIIQPGGSIRDEDSIKACNELGIKMILTGKRHFLH

SEQ ID NO: 56233 - DNA, 1554 bp, Prochlorococcus marinus str. MIT 9303
  CDS (1)..(1554): transl_table=11
atggctcccatcgccttgttgagcgtttcaaacaaacatgggattgtgtctctagcggaatccttgcatcgcatgcatgggtttcagctgctttccagtggtggcacagccaaagtgctggaggatgccggtctgcccgtgacgcgggttgctgagcacacaggagctgcggaaattcttggaggacgggtgaagactctgcaccctcgtgtccatggaggcatcttggcgatgcggggcgaccctgatcatgaggtcgatctggagcagcatcagatccctcctattgatgtggtggtggtgaacctttacccgtttcgggaaacagtggccaatccgcaggtgagttgggaaaccgcaattgagaatattgatatcggtggccccgccatggtgcgagcggcggcaaagaaccatgcgcatgtggccgtgctcacgaggccggatcagtacgacagattcctagtggctttaagtgatggtgtggatggccagctccgtcgtgagctggcccttgaagcctttgagcacaccgctgcctatgacgtggccatcagccattggatgggcgtgcggctgagcgagcaagcttcccaatggcttgaggctattccccttaggcagaggctgcgctatggcgagaatccccatcagcaggcggcttggtacagcgccccgaagcagggttggggcggtgccattcagttgcagggcaaggagctcagtaccaacaatttgcttgatttggaagctgctctggccactgttcgggagtttggatatggcacggatggggctcatcaagctgttcaagatgctgccgtggtggttaagcacaccaacccttgtggcgtcgcgattggcactggcgtggcgtcggccttaagccgtgccttggatgcggatcgggtgagtgcatttggagggatcgtggctctgaatggattagtggatgccacgactgctcgggagctcaccagtttgttcttggagtgtgttgtggcaccaggctttgaaccagaagctcgggaaatccttgccagcaaggccaacttacgcttgttggaattggctccaggtgccgttgatgcggctggtcgtgatcacattcgcaccatcctcggcggcgtgttggtgcaggaccaagacgatcaattgattgatcccaccagttggactgtggccagcaaacgcgcgcctactgctgaagaaaacgatgacctcacctttgcgtggcgcctggtgagacatgtgcgctctaacgccatcgtggtggctcgtgctggccagagtctcggagttggagcgggccagatgaaccgggtcggctcggcgcgactagcccttgaggcagctggcgatcaagccaggggagctgttttggctagtgatggcttcttcccctttgacgacacggtgcgtttggcggctaaccatggcatacgtgctgtgatccagcctggtgggagcaagcgtgatgcagattcaatcgctgtttgcgatgaatttggtctggcaatggtgttaacaggaaagcgccacttcttgcattaa

SEQ ID NO: 56234 - protein, 517 aa, Prochlorococcus marinus str. MIT 9303
MAPIALLSVSNKHGIVSLAESLHRMHGFQLLSSGGTAKVLEDAGLPVTRVAEHTGAAEILGGRVKTLHPRVHGGILAMRGDPDHEVDLEQHQIPPIDVVVVNLYPFRETVANPQVSWETAIENIDIGGPAMVRAAAKNHAHVAVLTRPDQYDRFLVALSDGVDGQLRRELALEAFEHTAAYDVAISHWMGVRLSEQASQWLEAIPLRQRLRYGENPHQQAAWYSAPKQGWGGAIQLQGKELSTNNLLDLEAALATVREFGYGTDGAHQAVQDAAVVVKHTNPCGVAIGTGVASALSRALDADRVSAFGGIVALNGLVDATTARELTSLFLECVVAPGFEPEAREILASKANLRLLELAPGAVDAAGRDHIRTILGGVLVQDQDDQLIDPTSWTVASKRAPTAEENDDLTFAWRLVRHVRSNAIVVARAGQSLGVGAGQMNRVGSARLALEAAGDQARGAVLASDGFFPFDDTVRLAANHGIRAVIQPGGSKRDADSIAVCDEFGLAMVLTGKRHFLH

SEQ ID NO: 56235 - DNA, 1584 bp, Mycobacterium sp. JLS
  CDS (1)..(1584): transl_table=11
atgagcggtgaccaagggcaggccggggcgaagaggccgatccggcgcgcactgatcagcgtctacgacaagagcgggctgatcgacctggcgcgcggactgcacgaggccggcgtcgacatcgtgtcgaccggctccaccgcgaaaaccattgccgacaaaggcattccggtcacacctgtcgaattcgtgaccgggttccccgaagtgctcgacggccgcgtcaagacgctgcatccgcacatccacgccggcctgctcgccgacacccgtaaacccgagcacgtcgaggcgctggcgaaactcggcatcgcgccgttcgacctcgtggtggtcaacctctacccgttcagcgagaccgtcgaatccggcgcgtcggtcgacgagtgcgtggagcagatcgacatcggcggcccgtcgatggtgcgcgcggccgccaagaaccacccgagcgtggcggtggtcgtcgaaccgaacgggtacgacggtgtgctggccgcggtccggaccggcggcttcacgcttgccgaacgaaagatcctggcgtcgttggcattccggcacaccgccgaatacgacgtggcggtggcgtcgtggatgggttcgacgctggcgcccgaggagcccgcgcagaagctgcccgcctgggtgggcggcacctggcggcgtgccgcggtactgcgctacggcgagaacccccatcagcaggcggcgctctaccgcgacgccaccgcgtggccggggctggcgcaggccgagcagttgcacggcaaggagatgtcgtacaacaactacaccgacgccgatgcggcgtggcgggcggcgttcgaccacgaggagatctgcgtcgcgatcatcaagcacgccaacccgtgcggtatcgcgatctcgtcggtgtcggtcgccgacgcgcaccgcaaggcccacgaatgtgacccgctgtcggcgttcggcggggtgatcgcgacgaacagctccgtgagcgtcgagatggccgagaccgtcgccgacatcttcaccgaggtcatcgtcgccccggcctacgagcccggcgccgtcgagatcctgtcccgcaagaagaacatccgcatcctgttggcggcgcaaccgccgaccaccggcaccgaactccggccgatcagcggcggtctgctgctgcagcagcgcgatgcgctcgacgccgacggcgacgacccggtcaactggaccctcgcgacgggtgagcccgccgatccggcgacgctggccaacttgaagttcgcctggcgcagctgccgcgccgtgaagtccaacgccatcgtcgtggtcgccgacggcgccaccgtgggcgtcgggatggggcaggtcaaccgcgtcgacgcggcgcggctggcggtgcagcgggccggtgaccgggtgcgcggcgcgatcgcggcgtcggatgcgttcttcccgttccccgacgggctggagacgctcaccgaggcgggggtgaaggcgatcgtgcaccccggcggatccatgcgcgacgacgtggtgaccgaggcggcggccaaggccggtatctcgctctacctgaccggcgcgcggcacttcgcgcactga

SEQ ID NO: 56236 - protein, 527 aa, Mycobacterium sp. JLS
MSGDQGQAGAKRPIRRALISVYDKSGLIDLARGLHEAGVDIVSTGSTAKTIADKGIPVTPVEFVTGFPEVLDGRVKTLHPHIHAGLLADTRKPEHVEALAKLGIAPFDLVVVNLYPFSETVESGASVDECVEQIDIGGPSMVRAAAKNHPSVAVVVEPNGYDGVLAAVRTGGFTLAERKILASLAFRHTAEYDVAVASWMGSTLAPEEPAQKLPAWVGGTWRRAAVLRYGENPHQQAALYRDATAWPGLAQAEQLHGKEMSYNNYTDADAAWRAAFDHEEICVAIIKHANPCGIAISSVSVADAHRKAHECDPLSAFGGVIATNSSVSVEMAETVADIFTEVIVAPAYEPGAVEILSRKKNIRILLAAQPPTTGTELRPISGGLLLQQRDALDADGDDPVNWTLATGEPADPATLANLKFAWRSCRAVKSNAIVVVADGATVGVGMGQVNRVDAARLAVQRAGDRVRGAIAASDAFFPFPDGLETLTEAGVKAIVHPGGSMRDDVVTEAAAKAGISLYLTGARHFAH

SEQ ID NO: 56237 - DNA, 1566 bp, Herminiimonas arsenicoxydans
  CDS (1)..(1566): transl_table=11
atgatcaaacaagctctcatctcagtttccgacaaaacaggcgtactcgattttgcgcgcgccttgtccgccatgggcgtcaacattctgtcgaccggcggtaccgcaaaattgctggcggaaaacggtatcagcgtgacggaagttgccgattacaccggcttcccggaaatgctggacggccgtgtcaagacgctgcatccgaaagtgcacggcggcattctggcgcgccgtgatttccccgaacatgttgccgcgctgagcaaacacgatattcctaccatcgacatggtggtcgtcaacctgtatccattccagcaaactgtggcacgggccgaatgctcgctggaagacgcaattgaaaatattgatatcggcggccccgccatgctgcgttcgtccgccaagaatcacaaggatgtgatcgtcatttgcgacccttccgattacagcctggtgttgcatgagttgaacaccaacaacggcgaagcaacgtacgaaaccaaattcgcgctggcgaaaaaagtgttcgcgcataccgcgcaatacgatggtgcgatcaccaactatttcacttcgctgggtgcggacaagcagcacgcgacgcgcagttcctacccagctacgctgaacctgcattttgaaaaagtgcaggaaatgcgttacggcgaaaacccgcatcagtcggcggccttctatcgcgaaagcaatccgcaggcaggcgcactggcgaactacgcgcaattgcagggcaaggaactgtcgtacaacaatatcgccgatgcagatgctgcatgggaatgcgtgaagactttcgatgaagcagcgtgcgtcatcatcaagcatgcgaatccttgcggcgtggcagtcggcattacgccgttcgaggcttacagcaaggcattgcaaaccgatccgacctcagcctttggcggcatcattgccttcaatcgcgaagtcgacggcaatgcggcggaagcggtcgccaagcaatttgtcgaagtgctgattgcgccatcatttaccgaacaggcgaagaaaatattcgccgcgaaacagaacgtccgtttgctggaaattccgctcggcgatgcagtcaacagtcacgacttcaaacgcgtaggcggaggcctgctggtgcaatcgccggatgcgaaaaacgtgacattggccgaattgaaagtcgtcagcaagaagcagccgacgccgcagcaattgcaggatctgatgtttgcgtggcgcgttgccaagttcgttaaatcgaatgcgattgtgttctgtgccaatggcatgacgatgggcgtgggcgcgggccagatgagtcgcatcgattcggctcgcatcgcagcgatcaaggcgcaaaatgcaggcttgtcgctggtcgggaccgccgttgcgtcggatgcattcttcccgttccgcgatggtctggatgtcgtggttgaggccggtgcaacttcggtgatccatccgggcggttcgatgcgcgatcaggaagtcatcgacgcagctgacgaacacggcatcgtgatgctgctgaccggtacacggcatttccgtcattaa

SEQ ID NO: 56238 - protein, 521 aa, Herminiimonas arsenicoxydans
MIKQALISVSDKTGVLDFARALSAMGVNILSTGGTAKLLAENGISVTEVADYTGFPEMLDGRVKTLHPKVHGGILARRDFPEHVAALSKHDIPTIDMVVVNLYPFQQTVARAECSLEDAIENIDIGGPAMLRSSAKNHKDVIVICDPSDYSLVLHELNTNNGEATYETKFALAKKVFAHTAQYDGAITNYFTSLGADKQHATRSSYPATLNLHFEKVQEMRYGENPHQSAAFYRESNPQAGALANYAQLQGKELSYNNIADADAAWECVKTFDEAACVIIKHANPCGVAVGITPFEAYSKALQTDPTSAFGGIIAFNREVDGNAAEAVAKQFVEVLIAPSFTEQAKKIFAAKQNVRLLEIPLGDAVNSHDFKRVGGGLLVQSPDAKNVTLAELKVVSKKQPTPQQLQDLMFAWRVAKFVKSNAIVFCANGMTMGVGAGQMSRIDSARIAAIKAQNAGLSLVGTAVASDAFFPFRDGLDVVVEAGATSVIHPGGSMRDQEVIDAADEHGIVMLLTGTRHFRH

SEQ ID NO: 56239 - DNA, 1566 bp, Burkholderia vietnamiensis G4
  CDS (1)..(1566): transl_table=11
atgatcaagcaagcgctcatttccgtttccgacaagaccggcatcgtcgacttcgcgaagtcgctgtccgacctcggcgtcaagctgctgtcgaccggcggcaccgcgaaactcctcgcagacgccggcctgcccgtgaccgaagtggccgattacacgggcttcccggaaatgctcgatgggcgcgtgaagacgctgcacccgaaggtgcacggcggcatcctggcgcgccgcgatctgcccgagcacatgcaggcgctcgaacagcacgacatcccgacgatcgacctgctggtcgtgaacctgtatccgttcgtcgcgacgattgcgaaggacgactgcacgctcgccgacgcgatcgagaacatcgacatcggtggcccgacgatgctgcgctcggccgcgaagaaccaccgcgacgtgaccgtcgtcgtcgatccggccgactacgcggtcgtgctcgatgaaatgaaggcgaacggcaacgcgatcggctacgcgaccaacttccgcctcgcgacgaaggtgttcgcgcacaccgcgcaatacgacggcgcgatcacgaactacctgacgagcctgaccgacgagctgcagcacgcctcgcgcagcacgtatccggccacgctgaacctcgcgttcgacaaggtgcaggacctgcgctacggcgagaacccgcaccagagcgccgcgttctaccgcgatctggccgcaccggccggcgcgctcgcgaactaccgccagctgcagggcaaggaactgtcgtacaacaacatcgccgattccgacgcggcgtgggaatgcgtgaagacgttcgacgcaccggcgtgcgtgatcatcaagcatgcgaacccgtgcggcgtcgcggtcggcaacgacccggccgacgcatacgcgaaggcgttccagaccgacccgacgtcggcgttcggcggcatcatcgcgttcaaccgcgaagtcgacgaggcagccgcgcaagccgtcgcgaagcagttcgtcgaagtgctgatcgcgccgtcgttctcggccgccgcgcagcaggtattcgccgcgaagcagaacgttcgcctgctcgagatcgcactcggcgacggccacaacgcattcgacctgaagcgcgtgggcggcggcctgctcgtgcagtcgctcgattcgcggaacgtgcagccgagcgagctgcgcgtcgtcacgaagcgccagccgagcgcgaaggaaatggacgacctgctgttcgcatggcgcgtcgcgaagtacgtgaagtcgaacgcgatcgtgttctgcggcaacggcatgacgctgggcgtcggtgcaggccagatgagccgcgtcgactccgcgcgcatcgcgagcatcaaggcgcagaacgcgggcctcacgctggccggctcggccgtcgcgtcggatgcgttcttcccgttccgcgacggtctcgacgtggtcgtggccgcgggcgcgacctgcgtgatccagccgggcggctcgatgcgcgacgacgaagtgatcgcggcggccgacgaacacggcatcgcgatggtgctgacgggcgtgcgtcacttccgtcactga

SEQ ID NO: 56240 - protein, 521 aa, Burkholderia vietnamiensis G4
MIKQALISVSDKTGIVDFAKSLSDLGVKLLSTGGTAKLLADAGLPVTEVADYTGFPEMLDGRVKTLHPKVHGGILARRDLPEHMQALEQHDIPTIDLLVVNLYPFVATIAKDDCTLADAIENIDIGGPTMLRSAAKNHRDVTVVVDPADYAVVLDEMKANGNAIGYATNFRLATKVFAHTAQYDGAITNYLTSLTDELQHASRSTYPATLNLAFDKVQDLRYGENPHQSAAFYRDLAAPAGALANYRQLQGKELSYNNIADSDAAWECVKTFDAPACVIIKHANPCGVAVGNDPADAYAKAFQTDPTSAFGGIIAFNREVDEAAAQAVAKQFVEVLIAPSFSAAAQQVFAAKQNVRLLEIALGDGHNAFDLKRVGGGLLVQSLDSRNVQPSELRVVTKRQPSAKEMDDLLFAWRVAKYVKSNAIVFCGNGMTLGVGAGQMSRVDSARIASIKAQNAGLTLAGSAVASDAFFPFRDGLDVVVAAGATCVIQPGGSMRDDEVIAAADEHGIAMVLTGVRHFRH

SEQ ID NO: 56241 - DNA, 1566 bp, Dichelobacter nodosus VCS1703A
  CDS (1)..(1566): transl_table=11
atgactgatgctcaattactttttccgcggcgcgctttgttaagcgtatctgataaaagaggaatagttgattttgcgcgacgtttggtggaaaaagatgttgagcttttatccaccggtggcacggcaaaagcattgcgcgaagcgggcattcccgtttgcgatgttgcgcaatacacagaatttcccgaaattatgggcggacgcgtgaaaacgttacacccgaaaattcacggcggcattttggcgcgccgcggcactgatgaagcggtaatggcagaaaacggcattaaacccatcgatttggtagtcgtgaatttatatccctttcgcgaaacgattgctaaagaaaacgtcacacttgctgaatccattgaaaatattgatatcggcgggccttcaatgttgcgcgcggcagcaaaaaatcataacgatgtggcagttgttgttgatcccacggattatccagcgctgctttctgaattagataatggcggcatcacggcggcgttgcgtcaaaaattaaccgtaaaagcatttcaacacagcgccgaatacgatcgcgccattgccgtttatttatccgcgcaatacggcgaaaaagaagattttccgcaacaattgtctttagattttcaacgcgctgatgttttgcgttacggcgaaaatccgcatcaacgggcggcgttttaccggcataatcattattccgccgcaagcattgccgcagcgaaacaatatcaaggcaaaactatgtcttataacaatattgctgatgctgatgcggcgctgcgttgtgtttgtgattttgagatgacggcgtgcgtgattgtaaaacacggcaatccctgcggtgttgccgttggtgaacatacattagcagcctacgatcgcgcgcaccgcacggatcctacttcggcattcggcggcattatcgcttttaaccgcagtttggacgccgaaaccgcgcaggaaattttgagccggcaatttgtggaagtattagtggcgccgaaatttactgatgcagcgttaaaagttttagcgcaaaagcccaatgtgcgcgttttagaaattaagaatatggaacaccccgaatctggttatcaaatgcgcagtgtttgtggcgggattttggttcaagattgggatcgcagcaatgttgccgcgggacaacgcactgtcgttagcgatcgcgaaccgacgcatcaagaattagaagatttattgttcgcgtggaaagtggtgcgttcggtaaaatcaaatgcgattgtattatgccgtcagggcgcaactttgggcatcggcgccggacaaacgagccgtgtttattctgccaaaattgcggcgatgaaagcacaagatgaaggattgaatacgcagggcgcggttttagcaagcgatgcgtttttcccgttccgcgatggtattgatgccgctgccgcggtgggcgtaacggcgattattcaacccggtggttcaattcgtgatgaagaagtgattgcggcggcaaatgaacaaggtattgcgatgatttttaccggagttcgtcactttaatcattaa

SEQ ID NO: 56242 - protein, 521 aa, Dichelobacter nodosus VCS1703A
MTDAQLLFPRRALLSVSDKRGIVDFARRLVEKDVELLSTGGTAKALREAGIPVCDVAQYTEFPEIMGGRVKTLHPKIHGGILARRGTDEAVMAENGIKPIDLVVVNLYPFRETIAKENVTLAESIENIDIGGPSMLRAAAKNHNDVAVVVDPTDYPALLSELDNGGITAALRQKLTVKAFQHSAEYDRAIAVYLSAQYGEKEDFPQQLSLDFQRADVLRYGENPHQRAAFYRHNHYSAASIAAAKQYQGKTMSYNNIADADAALRCVCDFEMTACVIVKHGNPCGVAVGEHTLAAYDRAHRTDPTSAFGGIIAFNRSLDAETAQEILSRQFVEVLVAPKFTDAALKVLAQKPNVRVLEIKNMEHPESGYQMRSVCGGILVQDWDRSNVAAGQRTVVSDREPTHQELEDLLFAWKVVRSVKSNAIVLCRQGATLGIGAGQTSRVYSAKIAAMKAQDEGLNTQGAVLASDAFFPFRDGIDAAAAVGVTAIIQPGGSIRDEEVIAAANEQGIAMIFTGVRHFNH

SEQ ID NO: 56243 - DNA, 1500 bp, Thermus thermophilus HB27
  CDS (1)..(1500): transl_table=11
atgcggtctatgtgggcccttctttccgtcgcggacaagcgggggatcgtggacttcgcccgggggcttgcggagcttggcttccgcctcctcgccacgggggggacctaccgcgccctccgcgaggcggggcttcccgtgacctacatctccgacttcaccggctttcccgagatcctggaggggagggtcaagaccctccaccccaaggtgcacgccgccctcctcgcccgcccggaccaggaggaggagcttaaggccttggggttggagcgcatcggggtcttggcggtgaacctctaccccttccgggagacggtggcccggggggcctcctttgcggaggccctggagcagattgacatcgggggccccgccatgctccgggcggcggccaagaaccaccaggcggtgcttcccgtgtgcgaccccgaggactacccccgggtcctggaggcgctcaaggcggggccctccccggacttccgccaaaagctcgcccgtaaggccttcgcccacaccgccctctacgacgccgccatcgccgagtggctttccggggagaagttccccgaggagaagcttttggccctcaggcgggaggcctccttgcgctacggggagaacccccaccaggaggcggccctctaccgggtggtgggggagagggggcctctgctcgaggcccaggtgcttcaggggaaggccatgagcttcaacaactacctggacgccgaggccgcctggaacctggtgtccgagttcgccgagcccgcctgcgtggccgtaaagcaccagaacccctgcggcgtggccctgggggagactcccctggaggcctaccggaaggcctacgaggccgaccccgtctccatcttcggcggcatcgtggccttcaaccgccccctggacggccccacggcggaggccctggcggaggtcttcctggaggtggtcctcgccccctcctttagccccgaggcccgggcggtcctcgccaggaagaagaacctccgcctcctccaggtgcccttccctgcccaagggccctacctggacctgaggcgcctccggggcggggtgctcctccaggacgcggacaccgaggaccccgcggagcccaaggtggtcacggagagggcccccaccccggaggagtggcccgacctccgcttcgcctggaaggtggtgaagcacgtgcgctccaatgccatcgtggtggccaagggggggatgaccctggggatcggggtggggcagacgaaccgcctcgccgccgcccggcacgccctggaggcggccggggaaagggccaagggcgccgtcctggcctccgacgccttcttcccctttgacgacgtggtgcgcctcgccgcctcctacggcatcgccgccatcatccagcccggggggagcgtgcgggaccaggactccatcagggcggcggaggaggcggggatcgccatggtcttcaccggggtgcgccacttccgccactga

SEQ ID NO: 56244 - protein, 499 aa, Thermus thermophilus HB27
MRSMWALLSVADKRGIVDFARGLAELGFRLLATGGTYRALREAGLPVTYISDFTGFPEILEGRVKTLHPKVHAALLARPDQEEELKALGLERIGVLAVNLYPFRETVARGASFAEALEQIDIGGPAMLRAAAKNHQAVLPVCDPEDYPRVLEALKAGPSPDFRQKLARKAFAHTALYDAAIAEWLSGEKFPEEKLLALRREASLRYGENPHQEAALYRVVGERGPLLEAQVLQGKAMSFNNYLDAEAAWNLVSEFAEPACVAVKHQNPCGVALGETPLEAYRKAYEADPVSIFGGIVAFNRPLDGPTAEALAEVFLEVVLAPSFSPEARAVLARKKNLRLLQVPFPAQGPYLDLRRLRGGVLLQDADTEDPAEPKVVTERAPTPEEWPDLRFAWKVVKHVRSNAIVVAKGGMTLGIGVGQTNRLAAARHALEAAGERAKGAVLASDAFFPFDDVVRLAASYGIAAIIQPGGSVRDQDSIRAAEEAGIAMVFTGVRHFRH

SEQ ID NO: 56245 - DNA, 1485 bp, Picrophilus torridus DSM 9790
  CDS (1)..(1485): transl_table=11
atgaatatacttgttagtgtatctgacacatccggacttacagatcttttaaggcatctaaatggagatgtatatgcaacgccaggcacgtttaaatttttatctgattcaggaataaaggcaaaaagaatctctgatataacaggcttcgatgaccttttaaatggccgtgtaaagacactgcatcctgccgttttttcaggcattctatcaaggagggacgagcagagcgaggccgatttaaaaagatacaattattttgattttgacattgttatatgcaatttatacaactttgaatcatatatagataaatccatagaagatatgatagaaaatattgatatcggcgggctatcactaatcagggctgctgccaagaactatcagcatgttaccgttgcatcaagtcctgaggattataacattataataaaggatctaagggatggtgaaatatcattaaggacaagggaaaccctggcattaagggcattcgccagggcggcgtactatgatatgataatatacaaaagcctttataagaggttgaataacgatgagccagaggagctttttatccatggttacgacagaacaaagttaagatacggcgagaatccagatcaggcaggcttcctgtacagaacagatgatgaatatggaataccaaatgctgttcagctaaacggaaaggaattatcatataataatataatagatgcagattcggcccttgaaacggtccttgaattcgatgagcctaccgccgttatagtaaagcacaggacgccctcaggcgtttcatcagcagataatatcagggatgcatttataaatgcatattcatctgacgaggaatcggcatacggttttgttcttgcattaaacagaaaagttgatgaggaaacggccatggagctatcaaagcattatatagaggttttaatagcacctgactatgatgagccggcactgaacatattaaagaagaaaaagaaccttagaatattaaaggctgttttcagaagaaataacagttacgtttttcaatcgatacctggtggcttattaatgcagagcccgctaagatcagattttaccgagatgaaatgcatgaccatcgaggcagatgaaagaacaaagaaggatcttttatttgcctggagggtctctgcgcactgcaaaagcaatgcaatagtgcttgcaaaaaacctcacaacaacaggtataggtgctggacagacatcaagaatagagtcattgagaatagccgttcagagatcaaatggaaatgcaaagggctctgttatggcatccgatggctttataccgtttaatgattccataatagaggcaaataaaaacggaataaaggcaatcattgagcccggtggctcaatacgcgataatgatgtaatacaaaaggccattgaatataaaataccgctttactttaccggtaaaagggtatttttacattaa

SEQ ID NO: 56246 - protein, 494 aa, Picrophilus torridus DSM 9790
MNILVSVSDTSGLTDLLRHLNGDVYATPGTFKFLSDSGIKAKRISDITGFDDLLNGRVKTLHPAVFSGILSRRDEQSEADLKRYNYFDFDIVICNLYNFESYIDKSIEDMIENIDIGGLSLIRAAAKNYQHVTVASSPEDYNIIIKDLRDGEISLRTRETLALRAFARAAYYDMIIYKSLYKRLNNDEPEELFIHGYDRTKLRYGENPDQAGFLYRTDDEYGIPNAVQLNGKELSYNNIIDADSALETVLEFDEPTAVIVKHRTPSGVSSADNIRDAFINAYSSDEESAYGFVLALNRKVDEETAMELSKHYIEVLIAPDYDEPALNILKKKKNLRILKAVFRRNNSYVFQSIPGGLLMQSPLRSDFTEMKCMTIEADERTKKDLLFAWRVSAHCKSNAIVLAKNLTTTGIGAGQTSRIESLRIAVQRSNGNAKGSVMASDGFIPFNDSIIEANKNGIKAIIEPGGSIRDNDVIQKAIEYKIPLYFTGKRVFLH

SEQ ID NO: 56247 - DNA, 1536 bp, Bacillus anthracis str. Sterne
  CDS (1)..(1536): transl_table=11
atgaaaaagcgtgcattagtaagtgtttcagataaaacaggagtagtagaatttgttaaaggtttactagaacaagggatcgaagttatatcaacaggtggtacgaaaaaattactagaagaaaacggcttacaagtaatcggtatttctgaagtaactggtttcccagaaattatggatggtcgtgtgaaaacattacatccaaatattcatggtggtctattagcagttcgtgataatgaaacacatgtagcgcaaatgaatgaattaggtatggagccgattgattttgttgtcgttaacttatacccattcaaagaaacgatcgctaagcctgatgtaacatttgctgatgcaattgaaaatattgatatcggtggcccgacaatgattcgctctgctgcgaaaaatcataaattcgtatctgtaattgtagatccagtagattatgatgttgtattagctgaattaaaagagaacggtgaagtagcagaggaaacaaaacgtaaactagcagcgaaagtattccgtcatacagcagcgtatgatgcgttaatttctaactacttaacagagcaaatgggtgaagaaagtccagaaacattaactgtgacatttgagaaaaagcaagacttacgttatggcgagaacccacatcaaaaagcaactttctataaagcgccattcgcagcaacttcttctgttgcatacgcagaacaattacatggcaaggaattatcgtataacaatattaacgatgcagatgcagcgcttagtatcgtgaaagaatttacagaaccagcagtagtagcggtaaaacatatgaatccatgtggtgttggagtaggtacggatattcatgaagcatacacacgtgcttatgaagcggatccagtatccatttttggaggaattattgcagcgaatcgtgaaattgataaagctacagctgaaaagttacacgaaattttcttagagattattatcgcaccttctttctcgaaagaagctttagaagtactgcaaagtaagaaaaacttacgtttattaactgtaaatattgaaaaagcgacaagcgcaagcaaaaaattaacttctgtacaaggtggccttctcgttcaagaggaagatacgttatcattagatgaaagtacaatttcaattccaacgaaacgtgaaccttcagagcaagaatggaaagatttaaaactagcttggaaagttgtaaagcatgtgaaatcaaatgcaattgttttagcaaaagatgatatgacaattggtgtcggtgctggacagatgaaccgtgtaggttctgcaaaaatcgcaattacacaagctggcgaaaaagcacaaggtagcgcacttgcatctgatgctttcttcccaatgccagatacagtagaagaagcagcaaaagcaggaattacggcaatcattcaaccaggcggatcaatccgtgacgaagattctattaaagtggcggatacgtatgggattgctatggtgttcactggcgtacgtcatttcaaacactaa

SEQ ID NO: 56248 - protein, 511 aa, Bacillus anthracis str. Sterne
MKKRALVSVSDKTGVVEFVKGLLEQGIEVISTGGTKKLLEENGLQVIGISEVTGFPEIMDGRVKTLHPNIHGGLLAVRDNETHVAQMNELGMEPIDFVVVNLYPFKETIAKPDVTFADAIENIDIGGPTMIRSAAKNHKFVSVIVDPVDYDVVLAELKENGEVAEETKRKLAAKVFRHTAAYDALISNYLTEQMGEESPETLTVTFEKKQDLRYGENPHQKATFYKAPFAATSSVAYAEQLHGKELSYNNINDADAALSIVKEFTEPAVVAVKHMNPCGVGVGTDIHEAYTRAYEADPVSIFGGIIAANREIDKATAEKLHEIFLEIIIAPSFSKEALEVLQSKKNLRLLTVNIEKATSASKKLTSVQGGLLVQEEDTLSLDESTISIPTKREPSEQEWKDLKLAWKVVKHVKSNAIVLAKDDMTIGVGAGQMNRVGSAKIAITQAGEKAQGSALASDAFFPMPDTVEEAAKAGITAIIQPGGSIRDEDSIKVADTYGIAMVFTGVRHFKH

SEQ ID NO: 56249 - DNA, 1617 bp, Bartonella henselae str. Houston-1
  CDS (1)..(1617): transl_table=11
atgggtgttgttgcaaaaaattttcccatacctgatcttcatcgggtccgtcgtgttctgctttctgtgtctgataaaacgggtatagttgcgtttgcgcaagcgcttcagacttataatgttgaattgatttcgacaggaggaacagctaaagtcttaatggctgctggtttaccggtaagagatgttgctgaagttacaggatttcccgaaataatggatggacgcgtcaaaacactccatcctttgatccatggtgctctcttgggagtaagagaagatcctagccacgcagtggctatggagcagtatggcatccatggaatcgatcttctggtggtcaatctttatccttttgaagaaactgttcaatcaggcgctgatggacaaacaattcttgaaaatattgatattggtggaccggcaatgattcgcgcggcggcaaagaaccatgtgtatactggtgttatcacagcggtgagtgattatgatgcagttctttctgaattaaagcagcatgatgggtgtttaagtttttctatgcgacaacagttagcaatgcgtgcttatgcgcacacggctgcttatgatacggcgatagcggcgtggtttgcaaaaaatttaaaaattgaaacaccctcttggcagagtttttctggtcatcttaaaaatgtcatgcgttatggggaaaacccgcatcaaaaggcagcattttatcgtaatggtgacaaacgttttggtgttgcaacagccaaacttttacagggtaaagcactctcttataacaatatgaatgatacagatgcagcatttgaacttgtggcagaatttgatccacaaaacactgctgctgttgctcttattaaacatgctaacccttgtggggttgctgaagggcagactttaaaggaagcttatttgaaggctcttctatgtgataatgtatcggcatttggtggaattattgctttaaatcaaccccttgatgcagaatgtgcagaagaggttatcaaaattttcacggaagtgattattgctcctgatgcaacaatggaggcacgtgaaattatttcaggtaaaaaaaatcttcgtttgctgctaacagggggtgttcctgatccacggtgtggaggatttatagccaaaacccttgcaggcgggattttggtgcaatcgcgtgataatgtggtggttgatgatctcaaactgcaagtggtgacaaagcgcgcaccaagtcaagaggaaatgcgtgatcttcaatttgcttttcgtgtggtaaaacatgttaaatcaaatgctattgtttatgcaaaaaatagcgcaacagttggaattggtgctggacagatgagtcgggttgattcagcaaaaattgctgcacgtaaagctgaagaaagtgcaaaaagagcaggtttaacggaatctctcaccaaagggtccgttgttgcatcagatgccttttttccttttgcagatggtttgttggcagttgctgaagcaggagctacagcagttattcaaccgggtggatcaatgcgtgatgaagaagtgattgccgcggccgatgcacagggattagctatggtttttacaggtgtaaggcattttcgtcattag

SEQ ID NO: 56250 - protein, 538 aa, Bartonella henselae str. Houston-1
MGVVAKNFPIPDLHRVRRVLLSVSDKTGIVAFAQALQTYNVELISTGGTAKVLMAAGLPVRDVAEVTGFPEIMDGRVKTLHPLIHGALLGVREDPSHAVAMEQYGIHGIDLLVVNLYPFEETVQSGADGQTILENIDIGGPAMIRAAAKNHVYTGVITAVSDYDAVLSELKQHDGCLSFSMRQQLAMRAYAHTAAYDTAIAAWFAKNLKIETPSWQSFSGHLKNVMRYGENPHQKAAFYRNGDKRFGVATAKLLQGKALSYNNMNDTDAAFELVAEFDPQNTAAVALIKHANPCGVAEGQTLKEAYLKALLCDNVSAFGGIIALNQPLDAECAEEVIKIFTEVIIAPDATMEAREIISGKKNLRLLLTGGVPDPRCGGFIAKTLAGGILVQSRDNVVVDDLKLQVVTKRAPSQEEMRDLQFAFRVVKHVKSNAIVYAKNSATVGIGAGQMSRVDSAKIAARKAEESAKRAGLTESLTKGSVVASDAFFPFADGLLAVAEAGATAVIQPGGSMRDEEVIAAADAQGLAMVFTGVRHFRH

SEQ ID NO: 56251 - DNA, 1575 bp, Acinetobacter sp. ADP1
  CDS (1)..(1575): transl_table=11
atgactattaaacgtgctttgatttctgtttccgacaaaacaggaattgtagaatttgctcaaaatcttgcgaaacttggggtagaaattttatctactggtggcacttacaagttgctcaaagacaataatattgccgtagtggaagtttctgaacatactggctttcctgaaatgatggatggtcgtgtaaaaacacttcaccctaaaatccatggtggtattctagctcgccgcggtcttgatgaagctgttatgcaagaacacaatatcgatccgattgatctggttgttgtgaatctctatccttttgctgcaactgtggcaaaaccgaattgctcacttgcagacgccattgaaaatatcgacattggtggcccgacgatggttcgtgctgctgcaaaaaatcatgcctctgttggcatcgtcgttaacgcaagtgattacgataccattatcgctgagcttgagcaaaatggtggtttaagttacgaaactcgttttgatcttgcagtaaaagcatttgaacatactgctcaatacgacggtatgatcgcttcttatttaggtgcgcgtgttggtaaagccgaaggtgaagcggacttgttccctcgtacttttaatacgcaactggtcaaggctcaggacttacgttacggtgaaaatccgcatcagtcggctgccttctatgttgattcaaatgcatctgaagcatctgtttcaacctctaaacagcttcaaggtaaagagttatcttataacaacattgcagatacagatgcagcacttgaatgcgtaaaatcatttgcaaaacctgcgtgtgtgattgtgaaacatgccaacccatgtggtgttgctgtttctcttgatggtattaaagcagcttacgacctggcttatgctacagatacagaatctgcttttggtggcattattgcattcaaccgtgaactcgatgttgaaacagcacaagccattgttgatcgtcagtttgtcgaagttattattgcacctagcattgctgatggcgtacttgaggttactggtgcgaagaaaaatgttcgcgtactcgtatgtggtgaacttccagcaattgatgaacgtgcagcacaactcgactacaaacgtgtcaatggtggactgctcgttcaagatcaagatcttggtatgatcaaggcagctgaccttaaagttgtcactgaacttgcaccaacagagcaagaaattgacgacctgatctttgcatggaaagtggctaagtatgtgaaatcaaatgccattgtttatgcaaaaaatcgccaaaccattggtgtgggtgccggccaaatgagtcgtgttaactctgctcgtattgcagcaatcaaagctgaacatgcaggtttagtggttgaaggtgcagttatggcatcagatgcatttttcccgttccgcgatggaattgataatgcagcgaaagcaggaattaagtgtattattcaacctggtggttctatgcgtgatgatgaagtcattgctgctgcgaacgaacatgggattgccatggtattcaccggaatgcgtcatttccgtcattaa

SEQ ID NO: 56252 - protein, 524 aa, Acinetobacter sp. ADP1
MTIKRALISVSDKTGIVEFAQNLAKLGVEILSTGGTYKLLKDNNIAVVEVSEHTGFPEMMDGRVKTLHPKIHGGILARRGLDEAVMQEHNIDPIDLVVVNLYPFAATVAKPNCSLADAIENIDIGGPTMVRAAAKNHASVGIVVNASDYDTIIAELEQNGGLSYETRFDLAVKAFEHTAQYDGMIASYLGARVGKAEGEADLFPRTFNTQLVKAQDLRYGENPHQSAAFYVDSNASEASVSTSKQLQGKELSYNNIADTDAALECVKSFAKPACVIVKHANPCGVAVSLDGIKAAYDLAYATDTESAFGGIIAFNRELDVETAQAIVDRQFVEVIIAPSIADGVLEVTGAKKNVRVLVCGELPAIDERAAQLDYKRVNGGLLVQDQDLGMIKAADLKVVTELAPTEQEIDDLIFAWKVAKYVKSNAIVYAKNRQTIGVGAGQMSRVNSARIAAIKAEHAGLVVEGAVMASDAFFPFRDGIDNAAKAGIKCIIQPGGSMRDDEVIAAANEHGIAMVFTGMRHFRH

SEQ ID NO: 56253 - DNA, 1590 bp, Erwinia carotovora subsp. atroseptica SCRI1043
  CDS (1)..(1590): transl_table=11
atgcaacaacgccgtccaattcgccgcgctctgctcagcgtttctgacaaagcaggtattgtcgaatttgctcaagctctgtcccatcgtggtgtcgagctcctttcaacaggtggaaccgcccgtttgctggccgatgctggcttagccgtgacggaagtctctgactacaccggtttcccagaaatgatggatgggcgtgtaaagactctgcacccgaaagtacacggcggcattctgggacgacgcgatcaagatgatgcgatcatgacgcagcacgacatcaaaccgattgatatcgtcgttgtgaatctgtatccgttcgctcagaccgtcgcccgtgagaactgcacattagaagatgcggttgagaacatcgatatcggcggcccgacgatggtacgctccgccgccaaaaaccataaagatgtggcaatcgtggtcaagagcagcgactacaccactatcattaatgaaatcgacgctaacgaaggttcattgacctacgaaacccgtttcgatttagccattaaagccttcgagcatactgccgcttacgacagcatgattgccaactactttggcgcactggttccgccttaccacggtgataccgataaaccatctggccacttcccccgcacgctgaacctgaactacatcaaaaagcaggacatgcgctacggcgagaacagtcatcaacaagctgccttctatatagaagagaatattcacgaagcctctgtcgccacctctacacagctacaaggcaaagcgctgtcttataacaacatcgccgataccgatgctgcgctggaatgtgtgaaggaatttgccgaaccagcctgcgttatcgttaaacacgcgaatccgtgcggcgtagcaattggcggctcaattcttgatgcctacgatcgcgcctataaaaccgacccaacatccgcattcggcggcattatcgctttcaaccgcgaactggatgaagaaacggcacaggccatcatcagccgtcagtttgtcgaagtcattattgcgccatccgccagtgatgccgcgttaaaggttactgctgccaaacaaaacgtacgcgtcctgaccagtggtagctggcagcaacgcgttccggctctggacttcaaacgtgtcaacggcggtttactggtacaggatcgcgatttgggcatggtcgatacgtctcaactgcgtgtcgtgaccgaacgccagccgagcgaacaggaattacgcgatgcgctcttctgctggaaagtggctaaattcgttaaatccaatgcaattgtgtacgcacgcgacaacatgaccatcggaataggtgccggtcagatgagccgcgtttactccgcgaaaatcgccggaatcaaagcggccgatgaagggctggaagttaaaggttccgccatggcctctgatgcattcttcccattccgtgatggtattgatgctgccgcagccgttggcattagctgcgtgatccaaccgggcgggtctattcgtgatgatgaagttattgctgccgccaacgaacacggcattgcgatgatctttaccgacatgcgccatttccgccattaa

SEQ ID NO: 56254 - protein, 529 aa, Erwinia carotovora subsp. atroseptica SCRI1043
MQQRRPIRRALLSVSDKAGIVEFAQALSHRGVELLSTGGTARLLADAGLAVTEVSDYTGFPEMMDGRVKTLHPKVHGGILGRRDQDDAIMTQHDIKPIDIVVVNLYPFAQTVARENCTLEDAVENIDIGGPTMVRSAAKNHKDVAIVVKSSDYTTIINEIDANEGSLTYETRFDLAIKAFEHTAAYDSMIANYFGALVPPYHGDTDKPSGHFPRTLNLNYIKKQDMRYGENSHQQAAFYIEENIHEASVATSTQLQGKALSYNNIADTDAALECVKEFAEPACVIVKHANPCGVAIGGSILDAYDRAYKTDPTSAFGGIIAFNRELDEETAQAIISRQFVEVIIAPSASDAALKVTAAKQNVRVLTSGSWQQRVPALDFKRVNGGLLVQDRDLGMVDTSQLRVVTERQPSEQELRDALFCWKVAKFVKSNAIVYARDNMTIGIGAGQMSRVYSAKIAGIKAADEGLEVKGSAMASDAFFPFRDGIDAAAAVGISCVIQPGGSIRDDEVIAAANEHGIAMIFTDMRHFRH

SEQ ID NO: 56255 - DNA, 1551 bp, Propionibacterium acnes KPA171202
  CDS (1)..(1551): transl_table=11
gtgagcgaacgtcaacccatccgtcgggccctcgtctccgtctacgacaagtctggtcttgaccagttggccaaggcccttattgacgcgcaggtcgaggtggtctcgacggggtcaaccgctaaagagctggcctctcatggggtgacggtgactgaggttagtgagattacggggttcccggagtgcctcgacggacgtgtcaagaccctgcacccgaaggtgcacgccgggatcctcgccgaccgccgcttgacgtcccatcgtgagcagctgactgctttagaagtgaagccctttgacctcgtcgtgtgcaatctgtaccccttcgccgagaccgtagcgcaagggggagatttcgatgagtgcattgagaagatcgacatcggtggcccgtcgatggtgcgtgccgctgctaagaatcacgccaatgtggcggtcctgaccaacccggaccagtacgaagaccttgcccgggccctgtccgaaggcgggtacaccatggaggagcgtcgcgtgctggcggcccgtgccttcgcccacaccgctgcctatgacgtcgcggtggccacctggttcggcagtcgtgatggggtggccgttgacggcgttcccaccttcgtcggtacgaccggggagctgtcccacccgttgcgctatggcgagaactcccaccaggccgcagccgtataccgtagctccggcgagcccggcctggccggagcccgccaactccatggcaaggccatgagctacaacaactatgtcgacaccaactcggcgcggcgggcggccttcgacttcgaggccccctgcgtggccgtcatcaagcactcgaatccgtgcggcatcgctaccggctccgacattgccgaagcccatcgcaaggctcacgcctgtgactctctgagcgctttcggtggcgttatcgccaccaatcgcccggtcagcgtggagatggccgagcaggttgccgagatcttcaccgaggtcgtcgtcgctcccggctatgaggatggtgcggtcgagatcctgtctcgcaagaagaacatccggctgttggagtgccctgccccgcacctggccggttgggagctgcgtcagatcgacggtggcctgctggccatggagaccgacctcttccaggccgacggcgacgatccggccaactggactctggcggcaggtgacccggttgatgatgtcaccttggccgacctgtccttcgcctggcgggcatgccgttcggtgaggtccaacgccattttgctggcccacgacggcgcctcagtgggtgtcggtatggggcaagtgaaccgggtcgactcctgcaggctcgccgtggagcgggccggagatcgtgccgccggatcggtcgccgcttccgacgcttttttcccatttgccgacggtccccaggtgctcattgacgcccatatcgctgcgatcgtcgagccgggtggttccattcgtgacgaccagacgatcgaggtctgccgtacggccggcgtcccactctactttaccgggactcgccacttcttccactga

SEQ ID NO: 56256 - protein, 516 aa, Propionibacterium acnes KPA171202
MSERQPIRRALVSVYDKSGLDQLAKALIDAQVEVVSTGSTAKELASHGVTVTEVSEITGFPECLDGRVKTLHPKVHAGILADRRLTSHREQLTALEVKPFDLVVCNLYPFAETVAQGGDFDECIEKIDIGGPSMVRAAAKNHANVAVLTNPDQYEDLARALSEGGYTMEERRVLAARAFAHTAAYDVAVATWFGSRDGVAVDGVPTFVGTTGELSHPLRYGENSHQAAAVYRSSGEPGLAGARQLHGKAMSYNNYVDTNSARRAAFDFEAPCVAVIKHSNPCGIATGSDIAEAHRKAHACDSLSAFGGVIATNRPVSVEMAEQVAEIFTEVVVAPGYEDGAVEILSRKKNIRLLECPAPHLAGWELRQIDGGLLAMETDLFQADGDDPANWTLAAGDPVDDVTLADLSFAWRACRSVRSNAILLAHDGASVGVGMGQVNRVDSCRLAVERAGDRAAGSVAASDAFFPFADGPQVLIDAHIAAIVEPGGSIRDDQTIEVCRTAGVPLYFTGTRHFFH

SEQ ID NO: 56257 - DNA, 1623 bp, Symbiobacterium thermophilum IAM 14863
  CDS (1)..(1623): transl_table=11
gtgaagcgcgccctgatcagcgtctacgacaagcaggggatcgtggagttcgcacgggggctggccgacctgggggtggagatcatctccacgggcggtacgtaccgcacgctgcagggagcgggcattcccgtgcgggaggtggccgaggtggccggtttcccggagatcctggacgggcgggtgaagagcctgcagccgcagatccacgcggggatcctggcgatgcgcgccaaccccacccacatggcgcagctggccgagcacggaatcggcctcatcgacctggtggtggtcaacctgtatcccttccgggagacggtggccaaccccgcggtgaccctggaggaggccatcgagaagatcgacatcggcgggcccgcgatggtgcgggcggcggcgaagaattaccaggacgtgggggtcgtcgtaaacccggcgcgctaccccgccgtgctggccgagctgcgggagacgggcgacctgtcgctgccgacccggttcagcctgatgctggaagccttccagcacacggccgcgtacgacggcgccatcgccggctggatggccacgcggggcagggagatcgtcgccacccgggccttgggggagacggcccccgaacgacccatcggagcggacccgggcccgcagaagccggccgcgccctctcccttcccggatgtcctgagcctcacgttcaccaaggtgcaggagctgcgctacggcgagaacccgcaccaggcggcggcgttctacagcgacggatccgacgggggcacggtgatcgcccgggcgaagcagctgcacggcaaggagctctcgttcaacaacatcaacgacgcccacgcggccctggagctggtgaaggagttcgaggagccggccgcggtggcgatcaagcatgccaacccctgcggcgtggccgtggccccgaccatcgccgaggcgttccgcaaggcctacgaggccgacaccgtgtcgatcttcgggggcatcgtcgcgctgaaccggccctgcgaccgggagaccgccgaggcgctgagcaagatcttcctggagatcgtgatcgccccggcgtttgcgccggaagccctggaggtgctcaccaggaagaagaacctgcggctcctggcggtggggccgatcgaccgcaatccgccgtccgggttcgacatgaagcgggtcggcggtggcctgctggtccagagctgggacgcgatcgccgaggacccggtggcctggaagccggtgaccaaggccgcacccacgccggaacagctgcgcgacctggcctttgccatgaaggtgtgcaagcacgtcaagtccaacgccatcgtggtggccagggacggccagaccctgggcgtgggcgcggggcagatgaaccgcattgacgcggcgcggttcgccctccggcaggccggggagaaggcccgcggggcggtgctggcctcggacgcctttttccccttcccggacgtggtggaggcggccggcgaggcgggtatcgcggccatcgtgcagccgggcgggtcgatccgggacgaggagtcgatcgccagggcggacgagctgggtctggcgatggtgtttacgggcgtgcggcacttccggcactga

SEQ ID NO: 56258 - protein, 540 aa, Symbiobacterium thermophilum IAM 14863
MKRALISVYDKQGIVEFARGLADLGVEIISTGGTYRTLQGAGIPVREVAEVAGFPEILDGRVKSLQPQIHAGILAMRANPTHMAQLAEHGIGLIDLVVVNLYPFRETVANPAVTLEEAIEKIDIGGPAMVRAAAKNYQDVGVVVNPARYPAVLAELRETGDLSLPTRFSLMLEAFQHTAAYDGAIAGWMATRGREIVATRALGETAPERPIGADPGPQKPAAPSPFPDVLSLTFTKVQELRYGENPHQAAAFYSDGSDGGTVIARAKQLHGKELSFNNINDAHAALELVKEFEEPAAVAIKHANPCGVAVAPTIAEAFRKAYEADTVSIFGGIVALNRPCDRETAEALSKIFLEIVIAPAFAPEALEVLTRKKNLRLLAVGPIDRNPPSGFDMKRVGGGLLVQSWDAIAEDPVAWKPVTKAAPTPEQLRDLAFAMKVCKHVKSNAIVVARDGQTLGVGAGQMNRIDAARFALRQAGEKARGAVLASDAFFPFPDVVEAAGEAGIAAIVQPGGSIRDEESIARADELGLAMVFTGVRHFRH

SEQ ID NO: 56259 - DNA, 1599 bp, Mannheimia succiniciproducens MBEL55E
  CDS (1)..(1599): transl_table=11
atgcaaattcgtcctatccgtcaagccttattaagcgtgtctgacaaaaccggtattgtggaattcgcacaaggcctggtgcaacgtggtgttaaattattatcaaccggcggtaccgccaaattattggcagacagcggtttgccggtaacggaagtgtcggattataccgggtttcccgaaatgatggacggccgggtgaaaaccttacacccgaaagtacacggcgggattttaggccgtcgcggtaccgatgatgaagtgatgcaaaaacacggtatcgaaggtatcgatatggtggttgtgaatctttatccttttgcgcaaaccgtggcaaaaccgaattgcacccttgaagatgcggtggaaaatatcgacatcggcggaccgaccatggtgcgttctgcagcgaaaaaccacaaagatgtagccatcgtggtgaataatgcggatttccatatgattttggcggaaatggatcaaaaccaaaacagcttaacgctggaaacccgtttcgatttagccgttcgcgccttcgaacatacggcgcaatatgattccatgattgccaattacttcggtcaactggtgaaaccgtattttgccgccgaggaagaagacaaagatgcgaagtgcggtcaattcccgcgtactttaaatctcaactttatccgcaaacaaaccatgcgttacggtgaaaacagtcatcaaaatgcggcattttatgtagaaaaagaggttaaagaagcctccgtatctaccgccaaacaactacaaggaaaagccctttcttacaacaatatcgctgataccgacgcagcgttggaatgtgtaaaaagttttgacgagccggcttgcgtgattgtgaaacatgccaatccgtgcggcgtagccttaggtaaagatgtgttggaagcttacaatcgcgcctaccaaaccgacccgacttccgcattcggcggtattatcgccttcaaccgcgaattagacgaagcgacggcaacggctatcgtggatcgtcaatttgtggaagtgattattgcgccgacggtttccgccgccgcggtagaagtggtgaaacgtaagaaaaacgtacgtttattggcatgcggcgaactgagcaaaccgcaggcacgcctagatgttaaacgggtaaacggtggtttattagtacaggatgcggatttaggatctgtgagtattgatgatttggaagtggtgagcaaacgtaaaccgaccaagcaggaattggaagatatgctgttctgctggaaagtggcgaaattcgtgaaatccaacgctatcgtgtatgctaaaaacaatcaaaccataggtatcggcgcaggccaaatgagtcgagtctattcggcaaaaatcgccggtatcaaggcacaggacgaaggccttgaagtgaaaggctgcgtgatggcatctgacgccttcttcccgttccgtgacggcatcgacgccgccgccgaagtgggaatcgaatgcgttatccacccgggcggttcaatgcgcgaccaagaagtgattgacgcggcggatgaacataatatggtgatggttttaactaaaatgagacattttagacattaa

SEQ ID NO: 56260 - protein, 532 aa, Mannheimia succiniciproducens MBEL55E
MQIRPIRQALLSVSDKTGIVEFAQGLVQRGVKLLSTGGTAKLLADSGLPVTEVSDYTGFPEMMDGRVKTLHPKVHGGILGRRGTDDEVMQKHGIEGIDMVVVNLYPFAQTVAKPNCTLEDAVENIDIGGPTMVRSAAKNHKDVAIVVNNADFHMILAEMDQNQNSLTLETRFDLAVRAFEHTAQYDSMIANYFGQLVKPYFAAEEEDKDAKCGQFPRTLNLNFIRKQTMRYGENSHQNAAFYVEKEVKEASVSTAKQLQGKALSYNNIADTDAALECVKSFDEPACVIVKHANPCGVALGKDVLEAYNRAYQTDPTSAFGGIIAFNRELDEATATAIVDRQFVEVIIAPTVSAAAVEVVKRKKNVRLLACGELSKPQARLDVKRVNGGLLVQDADLGSVSIDDLEVVSKRKPTKQELEDMLFCWKVAKFVKSNAIVYAKNNQTIGIGAGQMSRVYSAKIAGIKAQDEGLEVKGCVMASDAFFPFRDGIDAAAEVGIECVIHPGGSMRDQEVIDAADEHNMVMVLTKMRHFRH

SEQ ID NO: 56261 - DNA, 1539 bp, Bacillus licheniformis ATCC 14580
  CDS (1)..(1539): transl_table=11
atgacgatcaaacgcgcattaatcagcgtatctgataaaacgaacattgtcccttttgtaaaagaattgacagagcttggcgttgaagtgatttcaacagggggcacaagcaaacttcttcaggaaaacggcgttgacgtcatcggcatttctgaagtgacgggctttcccgaaatcatggacggccgtctgaaaacccttcatccgaatattcacggcgggcttcttgccgtacgcggcaacgaaaagcacatggcgcagctgaatgagcagggtatccagccaatcgaccttgtcgttgtcaatttatatccttttaaagaaacggtttctaaagaagatgtcacattcgaagaagcgattgagaatatcgacatcggcggccccggcatgcttcgcgctgcagcgaaaaaccaccaggacgtggcggtcatcgtcgatccccgcgattacagccctgtgctgaacgacttgaaagaaaacggcagcgtctctcttgagaaaaaacgcgagcttgcggcgaaggtgttccgccacacggcagcatatgacgcgttgatcgctgactatttaacaaatgtaaccggtgaaaaagagcctgaacagttcaccgtcacttttgagaaaaaacaatcgctccgctacggcgaaaatccgcatcaggaagcagtcttttatcaaagcgcgctccctgtcaaagggtcgatcgcttcagctgaacagctgcacggaaaagagctttcctacaacaacatcaaagacgcggatgcggcacttcaaattgtccgcgagttcaccgagccggctgcggttgccgtcaagcatatgaacccttgcggcgtcgggacgggcaacacgatcgaagaggcgtttaacaaagcatacgccgctgacgaaacatcgattttcggcggcatcatcgccctgaaccgcgaagtggacaaagcgactgctgaaacgcttcacaaaatctttttggaaatcattatcgcgccggcattcagccaagaagcgcttgatattttaacatccaagaaaaaccttcgcctcttgaccctcgatgtcaatcagcctgtgaaaaacgaaaaacagctgacatctgttcaaggcgggctcttgattcaggatctggatatgcacggctttgacgacgctgacattacgattccgacgaaaagggagccgaccgaacaggaatgggctgacctgaagcttgcttggaaagtcgtgaagcacgtcaaatcgaatgcgattgtcctggcaaaggacgatatgacgatcggcgtcggcgccgggcaaatgaaccgcgtcggctcggcgaaaatcgcaattgagcaagccggggagaaagcaaaaggaagcgcgctcggatcagatgccttctttccgatgcctgatacggtcgaagaagcggctaaagccggtgtgacggcaatcattcagccgggcggctcggttcgtgatgaagattcaattaaaaaagcggatgaatacgggatcgcgatggtgttcaccggaatccgccatttcaaacattaa

SEQ ID NO: 56262 - protein, 512 aa, Bacillus licheniformis ATCC 14580
MTIKRALISVSDKTNIVPFVKELTELGVEVISTGGTSKLLQENGVDVIGISEVTGFPEIMDGRLKTLHPNIHGGLLAVRGNEKHMAQLNEQGIQPIDLVVVNLYPFKETVSKEDVTFEEAIENIDIGGPGMLRAAAKNHQDVAVIVDPRDYSPVLNDLKENGSVSLEKKRELAAKVFRHTAAYDALIADYLTNVTGEKEPEQFTVTFEKKQSLRYGENPHQEAVFYQSALPVKGSIASAEQLHGKELSYNNIKDADAALQIVREFTEPAAVAVKHMNPCGVGTGNTIEEAFNKAYAADETSIFGGIIALNREVDKATAETLHKIFLEIIIAPAFSQEALDILTSKKNLRLLTLDVNQPVKNEKQLTSVQGGLLIQDLDMHGFDDADITIPTKREPTEQEWADLKLAWKVVKHVKSNAIVLAKDDMTIGVGAGQMNRVGSAKIAIEQAGEKAKGSALGSDAFFPMPDTVEEAAKAGVTAIIQPGGSVRDEDSIKKADEYGIAMVFTGIRHFKH

SEQ ID NO: 56263 - DNA, 1590 bp, Legionella pneumophila subsp. pneumophila str. Philadelphia 1
  CDS (1)..(1590): transl_table=11
atggcgaaaaaacaaatttactcttctttcaagccacgacgagcactactgagtgtttccgataaaagaggaataagagaactcggtcaagtcttacatgaccaaggagtggaattgatagccactggaaacacagctgccatattaagagaacataaattacccgttaccgatgtcagtgagtgcacaggatttcccgaaataatggatggaagagtcaaaacccttcatccagccattcatgctggtttattagcccgcggagaagaagacagcccagttttaagacaacatggaataaaacctattgatttactgattgtcaatttatacccctttgaacaagtcattaaccacccggactgcgattttaataaggccattgaaaacattgacattggtggaccagcaatggtgcgagcggcagctaaaaatcatgcccatacttatgtcatagttgatccaaatgattactcaaaattaattcattatttacaagatcagaaagcaccttcccattggaattttgcgttagctaaaaaagcatttgcccatactgcagcctacgatgccgcaattgcaaattatttaactactttggataatgattatgtcccaactggatttcccgacatactaacctgccaatttaataaaattactgatcttcgttatggtgaaaacccccatcagcaagctattttttatgctgataaaaattcacatccaggctctctaagtacagcaaccttattacagggaaaacaattatcctataataatattcttgatgccgatgcagctctcgattgtgtgaaatcattttccaatgaaaagtcggtttgcgtcattgtaaaacataccaacccctgtggcattgcgctatccgacacatcacttgatgcttacttaaaagcctttcaaagtgatccgatatccgcttatggtggaattattgctttcaatggaactctggatagcgatacggcaaaagcaatattagaaaaacaatttgttgaagtgattattgcacctgatgccaatgaagaagcaaaaaaaattctggcaaccaaagaaaacactcgtgttcttctaaccggtttttggcaacaaggtaataattttagattaagtatgaagaaagttgatggtggtctattagtacaagaacacgattctctttctctggaatcatgtgagctacaaaccgttacccagataaaacccactgatgaacaactacaaaatttaatgttcgcttggttagcagccaagcatgtcaaatctaatgccattgtatacgctaatgatttgaccactatagggattggcggaggacaaaccagtcgagtaatgagtgctcgtattggtttgtggcaagcagagcaaatggggtttgatcccaaaggcgctgttatggcctcagacgcatttatccctttccctgataccattgaaatagcagcgaaggctggtatatccgcaattattcaaccagggggctctatcagagatgaaaaaatcatttcttgcgccgaccaacacaacatagcgatgatttttacaggagtgcgacattttaaacattaa

SEQ ID NO: 56264 - protein, 529 aa, Legionella pneumophila subsp. pneumophila str. Philadelphia 1
MAKKQIYSSFKPRRALLSVSDKRGIRELGQVLHDQGVELIATGNTAAILREHKLPVTDVSECTGFPEIMDGRVKTLHPAIHAGLLARGEEDSPVLRQHGIKPIDLLIVNLYPFEQVINHPDCDFNKAIENIDIGGPAMVRAAAKNHAHTYVIVDPNDYSKLIHYLQDQKAPSHWNFALAKKAFAHTAAYDAAIANYLTTLDNDYVPTGFPDILTCQFNKITDLRYGENPHQQAIFYADKNSHPGSLSTATLLQGKQLSYNNILDADAALDCVKSFSNEKSVCVIVKHTNPCGIALSDTSLDAYLKAFQSDPISAYGGIIAFNGTLDSDTAKAILEKQFVEVIIAPDANEEAKKILATKENTRVLLTGFWQQGNNFRLSMKKVDGGLLVQEHDSLSLESCELQTVTQIKPTDEQLQNLMFAWLAAKHVKSNAIVYANDLTTIGIGGGQTSRVMSARIGLWQAEQMGFDPKGAVMASDAFIPFPDTIEIAAKAGISAIIQPGGSIRDEKIISCADQHNIAMIFTGVRHFKH

SEQ ID NO: 56265 - DNA, 1563 bp, Methylococcus capsulatus str. Bath
  CDS (1)..(1563): transl_table=11
atgagcaatcctatcgcccgcgccctcgtcagcgtttccgacaagaccggctgcgtggagttctgccggggcctcgccggcatcggcgtcgaaatcatctcgtccggcggcactgccagactgttggccgaacacggcgtcccgaccatcgaagtcagcgactacaccggctttccggagatgatggacggccgggtcaagacgctgcaccccaaggttcatggcggcatcctcggccggcgcggcatcgacgaggcggtcatggcagaacacggcatccgcccgatcgacctggtcgcggtcaatctctatccgttcgaacagaccgtcgcccggcccgattgcgacatggagaccgccatcgagaacatcgacatcggcggcccggccctgatccgcgccgcgtcgaagaatcacgcttccgtcgcggtggtggtcgaccctgcggactacgccgcggtgctggctgagctggaagcctccggcggcggcctgtcacacgccacccgcttcgctctggcggccaaggccttccgtcatacggcctggtacgatgcagcgatcgccgactatctcgatcgccgccaaggggctgacggcttcgccgatccgctgctgctgcgctttcgccgtatccaatcgatgcgctacggcgagaatccacaccagcgcgcggcgttttacctcgaacccggcgccccccccggctgcatcgcatcggcccgccagttgcagggcaaggagctgtcttacaacaatatcgccgatgccgatgccgcgctcgaatgcgtcaagggtttctcggatctccccgcctgcgtgatcgtcaaacacgccaatccgtgcggcgtagccgaaagcaccaccctgtcccaggcctacgacctggcctatgccaccgatcccacctccgccttcggcggcatcatcgcgttcaaccggccgctggacgccgaaaccgcccgtaccatcgtcgaacggcagttcgtcgaggtcgtcatcgcgcccgcgatcgccgacgatgccctgcccgttctggccgccaagcccaacgtgcgcgtgctgagcaccggcccctggcccgccgagccggcagctgagctggatttcaagcgcgtcggcggcggcttgctggtgcaggacaaagacatcgaacgggtgaccggcgggcgtttccgggtcgtgagccggcgctcgccgacggaacaggagctgatcgacctccagttcgcctggcgggtggccaaattcgtcaagtccaacgccatcgtctattgcagggaccgccgcacggtcggcatcggcgccggccagatgagccgcgtctactccgcccgcatcgccgcgctcaaggcgcaggacgaaggcttgagcgtggcgggttcggtcgtcgcctccgacgcgtacttcccgttccgcgacggtatcgacgccgccgccgaagccggggtcacggcggtgatccaaccgggcggttcggtcagggaccccgaggtgatcgctgcggcggacgaacacggcatggccatggtcttcaccggcatccgtcacttccgccattag

SEQ ID NO: 56266 - protein, 520 aa, Methylococcus capsulatus str. Bath
MSNPIARALVSVSDKTGCVEFCRGLAGIGVEIISSGGTARLLAEHGVPTIEVSDYTGFPEMMDGRVKTLHPKVHGGILGRRGIDEAVMAEHGIRPIDLVAVNLYPFEQTVARPDCDMETAIENIDIGGPALIRAASKNHASVAVVVDPADYAAVLAELEASGGGLSHATRFALAAKAFRHTAWYDAAIADYLDRRQGADGFADPLLLRFRRIQSMRYGENPHQRAAFYLEPGAPPGCIASARQLQGKELSYNNIADADAALECVKGFSDLPACVIVKHANPCGVAESTTLSQAYDLAYATDPTSAFGGIIAFNRPLDAETARTIVERQFVEVVIAPAIADDALPVLAAKPNVRVLSTGPWPAEPAAELDFKRVGGGLLVQDKDIERVTGGRFRVVSRRSPTEQELIDLQFAWRVAKFVKSNAIVYCRDRRTVGIGAGQMSRVYSARIAALKAQDEGLSVAGSVVASDAYFPFRDGIDAAAEAGVTAVIQPGGSVRDPEVIAAADEHGMAMVFTGIRHFRH

SEQ ID NO: 56267 - DNA, 1590 bp, Silicibacter pomeroyi DSS-3
  CDS (1)..(1590): transl_table=11
atgaccgacctttcccccgtgcgccgcgcgcttctttccgtttccgacaagaccggactgatcgagctgggccaggccctcgccgcgcgcggggtcgagctgctgtcgacgggcggcaccgccaaggcgctgcgcgatgcgggcctgacggtgcgcgatgtggccgaggtgaccggtttccccgagatgatggatggccgggtcaagacgctgcacccgatggtgcatggcggcctgctggcgctgcgcgacaatgcagaccacgtcgccgcgatggagcagcacggcatcgcgggcatcgacctgctggtcgtcaatctctacccgttcgaggcgaccgtcgccaagggcgcggactatgacgactgtatcgagaatatcgacatcggcggcccggcgatgatccgcgcggcgtccaagaaccacgcattcgtcaacgtcgtggtggatgtcgcggattatgacgccctgctggctgagatggcggccaatgacggccagacctcttatgccttccgtcagcggctggcgcagaccgcctatgcccgcaccgccgcctatgacgccgccgtcagcaactggatggcggatcaactggcgctggaggcgccccgccgccgcgcctttgccggtgagctgaaacagaccctgcgctatggcgagaacagccaccagcaggcggccttctataccgatggttcgaaccgtccgggcgtggccaccgcgcgccagttgcagggtaaggagctgagctacaacaacatcaacgataccgatgccgcgtttgagctggtggccgaattcgcgcccgagaacggcccggcctgtgccatcatcaagcatgccaacccctgcggtgtggcgctgggcgcgaccctgtccgaggcctaccagaaggcgttcgattgcgaccgcaccagcgcctttggcgggatcgtggcgctgaaccagccgctggacgccgagaccgctggcaagatcgtcgagatctttaccgaggtggtgatcgcccccggcgcatccgacgaggcgatcgcgatctttgccaccaagaagaacctgcgcctgttgctgaccgatggcctgcccgatccgcgtcagcccatcgtggcgatgaaacaggtggccggtggcctgctggtgcaggacaaggatgtgggccatgtcgatctgaccgacctcaaggtggtgaccaggaaggccccgaccgaggcgcagatggccgatctgctgtttgcctggaaggttggaaaacacgtcaagtcgaacgccatcgtctatgtcaaggatggcgccaccgtgggcgtcggcgcgggtcagatgagccggctggacagcgccaatgtcgccgccgccaaggcgcagcgcatggcgactgaactgggtctgcccgaaagcccggccaagggctgcgccgtggcctcggacgcgttctttccctttgctgacggtctgctcgaagcggccgcggcaggcggcgcttgcgtgatccagcccggcggctcgatgcgcgatgatgaggtgatcaaggccgcggacgaggcgggtctggccatggtctttaccggcatgcgccatttccggcactga

SEQ ID NO: 56268 - protein, 529 aa, Silicibacter pomeroyi DSS-3
MTDLSPVRRALLSVSDKTGLIELGQALAARGVELLSTGGTAKALRDAGLTVRDVAEVTGFPEMMDGRVKTLHPMVHGGLLALRDNADHVAAMEQHGIAGIDLLVVNLYPFEATVAKGADYDDCIENIDIGGPAMIRAASKNHAFVNVVVDVADYDALLAEMAANDGQTSYAFRQRLAQTAYARTAAYDAAVSNWMADQLALEAPRRRAFAGELKQTLRYGENSHQQAAFYTDGSNRPGVATARQLQGKELSYNNINDTDAAFELVAEFAPENGPACAIIKHANPCGVALGATLSEAYQKAFDCDRTSAFGGIVALNQPLDAETAGKIVEIFTEVVIAPGASDEAIAIFATKKNLRLLLTDGLPDPRQPIVAMKQVAGGLLVQDKDVGHVDLTDLKVVTRKAPTEAQMADLLFAWKVGKHVKSNAIVYVKDGATVGVGAGQMSRLDSANVAAAKAQRMATELGLPESPAKGCAVASDAFFPFADGLLEAAAAGGACVIQPGGSMRDDEVIKAADEAGLAMVFTGMRHFRH

SEQ ID NO: 56269 - DNA, 1563 bp, Synechococcus elongatus PCC 6301
  CDS (1)..(1563): transl_table=11
atgcttctcctaggattttcaatgccgcgatttgccctgctcagtgtttccgataaaactggcctcgttgattttgcacgtcaactggtcgatcgctttcagtttcagattgtcagtagcggtggcaccgccaagcaactcctagaagcaggtatccccgttacgaaagttgcagaacacacgggctcacccgaaatcctcggtggccgagtcaaaaccttgcatccccgcattcatggcggcattttggcgcgccgcgatcgcgaagaggatcaagcagatttagcggccaacaacattcagccgtttgacttagtcgtcgtcaatctctatcccttcgaggccacgatcgcccgtcctgaagtgacgctggcagatgcgatcgagcaaattgacatcggcgggccagcaatggtgcgggcctcggccaagaaccatgctcacctaacgattctgactaaccccagccagtacgagccctatctgacggccctggccgatggagagggacaaattcccctcgcgttccgccagcagtgcgctctagcggctttccagcacaccgctgcttatgatgcggcgatcgcgacttatctcgctgagcaatttgaagcgaccagcgatcgcttgcaactgagtgctcagccggtgcaagtcctgcgctacggcgaaaacccccaccaggcggcgacttggtatcaaaccggtgctacggccagcggttgggcagcggcgcagcaactacagggcaaagagctgagctacaacaacctagttgacctcgaggcagcacgccaaattattgcggagttcccggcggatggccccgctgctgccgcgattctcaaacacaataatcccggcggagtcgccacagctgaggcattgagtgatgcctatcaaaaagcgtttgacgcggactccgtctctgctttcgggggcattgtggccctgaatcgggcgatcgatgcggcaactgcaacggcgatgaccggcaccttcctcgaatgtattgttgccccatcggttgagccagcagcggctgagattctcgcagctaagaaaaacctacgggtactcaccctggcagatttcaatagcggtccgcagcaaactgtgcgatcgatcgccggcggattcttggtgcaggacagcgatgatcagctggaaaccgttgatgcttggcaggtcgtcacggaacagcagcctagcgaagccgattggcaggagttgctgtttgcttggaaggtggtcaaacatgtcaaatccaatgcgatcgcggtgacggcgaatggcgtcacgctcgggattggtgccggtcaaatgaatcgggtcggttccgtcaaaattgccttggaacaagcgggcgatcgcgctcaaggtgccattcttgccagcgatggtttctttccctttgatgacagtgttcgtaccgcagcggcagctggaattcgggcgatcgtgcaacccggcgggagtctgcgtgatgctgattcaattgcagcggcgaacgaacttggccttgtgatggtctttactggcacgcgccacttcctccactaa

SEQ ID NO: 56270 - protein, 520 aa, Synechococcus elongatus PCC 6301
MLLLGFSMPRFALLSVSDKTGLVDFARQLVDRFQFQIVSSGGTAKQLLEAGIPVTKVAEHTGSPEILGGRVKTLHPRIHGGILARRDREEDQADLAANNIQPFDLVVVNLYPFEATIARPEVTLADAIEQIDIGGPAMVRASAKNHAHLTILTNPSQYEPYLTALADGEGQIPLAFRQQCALAAFQHTAAYDAAIATYLAEQFEATSDRLQLSAQPVQVLRYGENPHQAATWYQTGATASGWAAAQQLQGKELSYNNLVDLEAARQIIAEFPADGPAAAAILKHNNPGGVATAEALSDAYQKAFDADSVSAFGGIVALNRAIDAATATAMTGTFLECIVAPSVEPAAAEILAAKKNLRVLTLADFNSGPQQTVRSIAGGFLVQDSDDQLETVDAWQVVTEQQPSEADWQELLFAWKVVKHVKSNAIAVTANGVTLGIGAGQMNRVGSVKIALEQAGDRAQGAILASDGFFPFDDSVRTAAAAGIRAIVQPGGSLRDADSIAAANELGLVMVFTGTRHFLH

SEQ ID NO: 56271 - DNA, 1581 bp, Neisseria gonorrhoeae FA 1090
  CDS (1)..(1581): transl_table=11
atgtccgtcatcaaacgcgccctgatcagcctgtccgacaaggcaggcgcggtcgaatttgcccaaaacctgcacaagctcggtgtcgaaatcctctccaccggcggcacggcgaaactgcttgccggtgcgggcgttcccgtgattgaagtcgccgactacaccggttttcccgaaatgctcgacggccgcgtgaaaaccctgcatccgaaaatccacggcggtattttgggccggcgcgatttggacgaacacgtcgccaagatggaagagcacggcatcggcaacatcgaccttgtgtgtgtcaatctttaccccttcgccgccaccatcgccaagcccggctgcacactggaagacgcgattgaaaacatcgacatcggcggcccgactatggtgcgctccgccgcgaaaaactggaaacacgtcgccatcgttaccgacaccgccgacttccccgccattgccgccgaactcgaagccaacaacggcgcgttgagcgataaaacccgcttcaacctctcacgcaaagcattcagccacaccgcccaatacgacggcatgatttccaactatttaacctcgctttcagacggtgttttgagcggagagcctgaaatcggcgaattcccaagccggttcaaccaaagctggattaaagtgcaagacatgcgctacggcgaaaacccgcatcagcgcgccgcgttttaccgcgatattgaccccgccgcaggcagcctttccgcctacaatcaactgcaaggcaaagaattgtcttacaacaacatcgccgatgccgatgccgcttgggaagccgtcaaatcctttgacgcgcccgcctgcgtgatcgtgaaacacgccaatccgtgcggcgtagccgttgcagccgataccttgaccgcctacaaactcgcctacgccaccgacaccaccagcgcgttcggcggcatcatcgccttcaaccgcgaagtcgacggcgaaaccgtcaaacagattaccgacaaccaatttatggaagtcctcatggcgccgaagtttaccgccgaagcccttgaaatcgccgccgccaagaaaaacgtgcgcgtattggaagtgccgctcaaagcaggtgccaaccgctttgaactcaaacgcgtcggcggcggactgttggtacaaacgcccgacatcaaccgcatcaaccgcgccgatttgaaagtcgtctccaaacgccaaccgaccgagcaggaatggaacgatttgctgtttgtctggaacgtcgcaaaatacgtcaaatccaacgccatcgtcttcggcaaaggcggccaaacctacggtatcggcgcaggccaaatgagccgcgtggacagcacccgcatcgccgcccgcaaagcgcaagatgccggtctcgacctcaacggcgcatgtgccgcttccgatgccttcttcccattccgcgacggcgtggacgtgattgccgaacagggcatcaaagccatcatccatccggcaggctcgatgcgcgatcaggaagttttcgacgcggcggacgaacacggcatcgccatggcggtaaccggcatccgccacttccgccattaa

SEQ ID NO: 56272 - protein, 526 aa, Neisseria gonorrhoeae FA 1090
MSVIKRALISLSDKAGAVEFAQNLHKLGVEILSTGGTAKLLAGAGVPVIEVADYTGFPEMLDGRVKTLHPKIHGGILGRRDLDEHVAKMEEHGIGNIDLVCVNLYPFAATIAKPGCTLEDAIENIDIGGPTMVRSAAKNWKHVAIVTDTADFPAIAAELEANNGALSDKTRFNLSRKAFSHTAQYDGMISNYLTSLSDGVLSGEPEIGEFPSRFNQSWIKVQDMRYGENPHQRAAFYRDIDPAAGSLSAYNQLQGKELSYNNIADADAAWEAVKSFDAPACVIVKHANPCGVAVAADTLTAYKLAYATDTTSAFGGIIAFNREVDGETVKQITDNQFMEVLMAPKFTAEALEIAAAKKNVRVLEVPLKAGANRFELKRVGGGLLVQTPDINRINRADLKVVSKRQPTEQEWNDLLFVWNVAKYVKSNAIVFGKGGQTYGIGAGQMSRVDSTRIAARKAQDAGLDLNGACAASDAFFPFRDGVDVIAEQGIKAIIHPAGSMRDQEVFDAADEHGIAMAVTGIRHFRH

SEQ ID NO: 56273 - DNA, 1617 bp, Pseudomonas syringae pv. syringae B728a
  CDS (1)..(1617): transl_table=11
atggaaatcgagatgaccgaccagactacccgcctgccgatccgccgcgctctgatcagcgtatccgacaagacaggaatccttgagtttgcccgcgagcttgaagcgctgggcgtcgagattctttccactggcggtacgttcaagctgctcaaggacaacggtgtcgcggcagtcgaagtggccgactataccggcttcgctgaaatgatggacggccgggtcaagaccctgcaccccatgatccatggcgggattctgggtcgtcgcggcatagacgacgccatcatgaccgagcacggcatcaagccgatcgatctggttgcggtcaatctgtacccgtttgaagccactgtctccaagccgggctgcgacctgcccaccgccatcgaaaacatcgacatcggcggcccgaccatggtccgctccgcggcgaagaaccacaaggacgtcgccatcgtggtcaatgccggcgattacggccaggtcctggaaagcctcaaggccggtggcctgacctacgcccagcgcttcgacctgatgctcaaggcgttcgagcacaccgccgcctacgacggcatgatcgccaactacctgggcggcgtcgaccagaccgccgaaaccctgagtaccgaaggccgcagccagttcccgcgcaccttcaacacccagttcgtcaaggctcaggaaatgcgctacggcgagaacccgcaccagagtgccgcgttctacgtcgaagccaaacctgccgaggtcggcatcgccaccgccacccagttgcaaggcaaggagctgtcgttcaacaacgtggccgataccgatgccgcactggaatgcgtcaagagcttcgtcaaaccggcctgcgtgatcgtcaagcacgccaacccctgcggtgtggcggtctgcccggatgatgaaggcggcattcgtcaggcttacgaactggcctacgccaccgattccgagtcggcatttggcggcatcatcgccttcaaccgcgagctggacgctgcaaccgccaaggccatcgtcgagcgtcagttcgtcgaagtgatcatcgcaccgagcgtcagcgccgaagcccgcgccatcgtcgccagcaaagccaacgtgcgcctgctgaccagcggccagtggagcgagcgcctgcctgcgtgggactacaagcgtgtcaatggcggcctgctggtacagagccgtgacatcggcatgatcaccgaagccgacctcaaggtcgtcacccggcgtgcgccgaccgaacaggaaatgcatgacctgatcttcgcctggaaagtcgccaagtacgtcaagtccaacgccatcgtctacgcccgcaaccgccagaccgtcggcgtcggtgcaggccagatgagccgcgtgaactcggcacgtatcgctgccatcaaggctgaacacgccgggctgcaggttcagggcgcggtcatggcctccgatgccttcttcccgttccgtgacggcatcgacaacgcggccaaggtcggcatcaccgctgtcatacagccaggcggctcgatgcgtgacaatgaagtgatcgctgcggccgacgaagccggcatcgcgatggtgtttaccggcatgcgccatttcaggcactaa

SEQ ID NO: 56274 - protein, 538 aa, Pseudomonas syringae pv. syringae B728a
MEIEMTDQTTRLPIRRALISVSDKTGILEFARELEALGVEILSTGGTFKLLKDNGVAAVEVADYTGFAEMMDGRVKTLHPMIHGGILGRRGIDDAIMTEHGIKPIDLVAVNLYPFEATVSKPGCDLPTAIENIDIGGPTMVRSAAKNHKDVAIVVNAGDYGQVLESLKAGGLTYAQRFDLMLKAFEHTAAYDGMIANYLGGVDQTAETLSTEGRSQFPRTFNTQFVKAQEMRYGENPHQSAAFYVEAKPAEVGIATATQLQGKELSFNNVADTDAALECVKSFVKPACVIVKHANPCGVAVCPDDEGGIRQAYELAYATDSESAFGGIIAFNRELDAATAKAIVERQFVEVIIAPSVSAEARAIVASKANVRLLTSGQWSERLPAWDYKRVNGGLLVQSRDIGMITEADLKVVTRRAPTEQEMHDLIFAWKVAKYVKSNAIVYARNRQTVGVGAGQMSRVNSARIAAIKAEHAGLQVQGAVMASDAFFPFRDGIDNAAKVGITAVIQPGGSMRDNEVIAAADEAGIAMVFTGMRHFRH

SEQ ID NO: 56275 - DNA, 1581 bp, Psychrobacter arcticus 273-4
  CDS (1)..(1581): transl_table=11
atgagtaaagccccacttgcactactgtcagtctccgataaatctaatatcgttgaattcgcccaaggtctgattcaggcagggtttggtttgttatcgactggcggtactttccgtttgctaacagagcataatgtcgctgtcaccgaagtatcagattacacgggttttcctgagatgatggatggtcgggttaaaacacttcatcccaagatccacggtggcattttgggacgccgcggtacagatgatatggtgatgagtgagcatgcgattgaacgcattgatttggtcgttgtcaacctctatccatttgcagaaacgattgcacgtagtgacgttaccatgaatgatgccatcgaaaatatcgatattggcggacctactatggtgcgttcagcggcaaagaatcatgcacacgttggtattgtgactgatccagctgattatacgcgagtacttgaagcattaggcgacagtactgcattgaccgctaccctacgttacgacctagcggttaaagcatttgagcatactgcacaatatgacgggatgattgcaaactttttgggtagccgtgttaatgagagccaagagcctgagagtttttcacgtacctttaacgttcagctagaaaaagtgcaagaccttcgctacggtgaaaacccgcatcaaaaggcggcgttctatgttgaaaataactcttcaaaaagcaagcaagcatctattgctactgctaagcaattgcaaggcaaagccttgtcttataacaatatcgccgatactgatgccgcgcttgaatgcgttaaagcctttagcacgcctgcttgtgtgattgtaaagcatgccaacccttgtggcgttgctgtagatatcgatcaagtagcagcatatcgcactgccttcagtaccgatcctgagtcttcttttggcggtatcatcgcttttaaccgcccgttaacccttgcagccgctacagccattatcgacaatcagtttgttgaagtcattattgccccaagtgtcgaagacggtgtgttagaggcgactgcttcgaagaaaaacgttcgcgtcttggtttgcggcgatttgccagcacctgagctacgtgaccgtcagcttgattataagcgtgtgaatggtggtttgctggtgcaagagcaagatttgggcttgattacggctcacgacttaaaaatcgtcacagacgtgcagccaaccgaagcgcagattgctgatttactatttagctggaacgttgcaaaatacgttaaatctaatgccatcgtttacgctaaaggtcagcgtaccatcggtgtaggtgcaggtcagatgagccgtgttaactcagctcgtatcgctgctattaaagcggagcacgctggacttgcaaccgaaggcgcggttatggcatctgatgccttcttcccgttccgtgatggtatcgacaatgcagcagaagtgggtattgctgcgattatccaaccaggtggttctatgcgcgatgatgagaccatcgctgccgcaaatgagcacggtatcgccatggtcttcaccggtatgcgtcatttccgtcattaa

SEQ ID NO: 56276 - protein, 526 aa, Psychrobacter arcticus 273-4
MSKAPLALLSVSDKSNIVEFAQGLIQAGFGLLSTGGTFRLLTEHNVAVTEVSDYTGFPEMMDGRVKTLHPKIHGGILGRRGTDDMVMSEHAIERIDLVVVNLYPFAETIARSDVTMNDAIENIDIGGPTMVRSAAKNHAHVGIVTDPADYTRVLEALGDSTALTATLRYDLAVKAFEHTAQYDGMIANFLGSRVNESQEPESFSRTFNVQLEKVQDLRYGENPHQKAAFYVENNSSKSKQASIATAKQLQGKALSYNNIADTDAALECVKAFSTPACVIVKHANPCGVAVDIDQVAAYRTAFSTDPESSFGGIIAFNRPLTLAAATAIIDNQFVEVIIAPSVEDGVLEATASKKNVRVLVCGDLPAPELRDRQLDYKRVNGGLLVQEQDLGLITAHDLKIVTDVQPTEAQIADLLFSWNVAKYVKSNAIVYAKGQRTIGVGAGQMSRVNSARIAAIKAEHAGLATEGAVMASDAFFPFRDGIDNAAEVGIAAIIQPGGSMRDDETIAAANEHGIAMVFTGMRHFRH

SEQ ID NO: 56277 - DNA, 1602 bp, Colwellia psychrerythraea 34H
  CDS (1)..(1602): transl_table=11
atggatactccacgtccaattaaacgtgcactgttaagtgtttctgataaagcaggtattgttgagtttgctcaacgtctaagtgagaaaggtgttgatcttctttctactggcggtacagcaaaattattagccgaaaacggcatcaaagtaactgaagtttcagattacactggtcacccagaaatcatggatggtcgtgttaaaacgttacaccctaaagtacatggcggcattttagcgcgtcgtggtattgatgaagtcgtaatggacgaaaacggtatcagcgcaattgatatggtagtggttaacttgtacccgtttgctaatgcagttagtgatgaaaactgttcattagaaaatgccatcgaaaacattgatatcggtggaccaacaatggttcgcgcagcagctaaaaatcataaagacgtgactattgttgtaaatgctagcgattatgagcgagtattaactgaattagataacaacaatgattctttaacgtataaaacacgttttgatttagcgattgcagcttacgagcatacagctagctacgacggaatgattgctaactactttggtaaaatgttaccagcgtacggcgaaactgaatctaaagcttctttagaaaacaaagttaagttcccacgcacttttaatagccagtttattaaaactcaagatttacgttacggtgaaaactctcatcaagatgctgctttttacaaagaagaaaatcctgaagaagcgtcagtttctactgcgacccaattacaaggcaaagccttatcttataacaacattgctgatactgatgcggcattagaatgtgttaaagaatttgacgaaccggcttgtgttatcgttaaacatgctaacccatgtggtgttgctattggtgatgatattttagcggcttatgaaggcgcttataaaactgatcctacttctgcttttggtggcattatcgcgtttaaccgtgagttagacgcagatacggctgaagcaattgtttctcgtcaatttgttgaagttattattgcaccaagcgtttcagatgctgctgcacaaattgttgctgctaaacctaacctacgtttattagaatgtggccagtgggataataaaaccacaggttttgattttaaacgcgttaacggtggtttattagtacaagacacagatcaaggtcgcgtaacaagtgatgacttaactgttgtaactaaacgtcaacctactgatgaagagatgcgtgatttacaattctgttggaaagtagcaaaatttgttaaatctaacgcaattgtttacgttaaaaacagctctactatcggtgttggtgcaggccaaatgagccgcgtatactcagcgaaagttgcgggtattaaagcagctgatgaaaacttagaagtgaaagggtctgttatggcctctgatgcattcttcccattccgtgatggtttagatgctgcagctgaagcaggaattactgctgtaattcagccaggtggctctatgcgtgatgacgaagttattgcagcagcagacgaacataacatcgcgatggtgtttacaggtatgcgtcacttccgccattaa

SEQ ID NO: 56278 - protein, 533 aa, Colwellia psychrerythraea 34H
MDTPRPIKRALLSVSDKAGIVEFAQRLSEKGVDLLSTGGTAKLLAENGIKVTEVSDYTGHPEIMDGRVKTLHPKVHGGILARRGIDEVVMDENGISAIDMVVVNLYPFANAVSDENCSLENAIENIDIGGPTMVRAAAKNHKDVTIVVNASDYERVLTELDNNNDSLTYKTRFDLAIAAYEHTASYDGMIANYFGKMLPAYGETESKASLENKVKFPRTFNSQFIKTQDLRYGENSHQDAAFYKEENPEEASVSTATQLQGKALSYNNIADTDAALECVKEFDEPACVIVKHANPCGVAIGDDILAAYEGAYKTDPTSAFGGIIAFNRELDADTAEAIVSRQFVEVIIAPSVSDAAAQIVAAKPNLRLLECGQWDNKTTGFDFKRVNGGLLVQDTDQGRVTSDDLTVVTKRQPTDEEMRDLQFCWKVAKFVKSNAIVYVKNSSTIGVGAGQMSRVYSAKVAGIKAADENLEVKGSVMASDAFFPFRDGLDAAAEAGITAVIQPGGSMRDDEVIAAADEHNIAMVFTGMRHFRH

SEQ ID NO: 56279 - DNA, 1593 bp, Dechloromonas aromatica RCB
  CDS (1)..(1593): transl_table=11
atgactatcaaacaagcgctgatttccgtctccgacaagacgggtgttctcgaattcgcccagggcctcgctgcccaaggcgtgaagctgctgtccaccggcggcactgccaagatgctgcgtgatgccggcctggccgtcaccgaaatcggcgattacaccggctttccggaaatgcttgatggccgcgtcaagaccctgcacccgaaggtgcatggcggcatcctggcccgtcgcgacttgccggaacatctggcgaccatcgaacagcatggcattccgatgatcgatctggtctgcgtgaacctctacccgttcgccgccaccatcgccaaggccggtgtgacgctggaagatgccatcgagaacatcgacatcggcggcccggccatggttcgctcctcagccaagaactacaacggcgtggccatcgtcaccgacccggaggactacgccccgctgctcgccgaaatgaaggccaccggcggcgccctgcaactgtccacccggtttggcctggccaagaaggccttcacccacactgcccgctacgacagcatgatcgccaactggctgaccggcctcgacgaaggcgccgaagccaagccggccgaagccgcgccggtcccggccatcttcccggccaagctgcaactggctttcgaccgcaccgaaattctgcgttacggcgaaaactctcaccagtccgccgccttctaccgcgacaccactccggtcgctggcagcatcgccgcctacacccagctgcagggcaaggaactgtcctacaacaacatcgccgactccgatgccgcctgggaatgcgtcaagtccttcgacaccccggcctgcgtcatcgtcaagcacgccaatccgtgcggcgtcgccatcgacggcacgctgctcgccgcctacgagaaggccttcaagactgattccacttcggccttcggcggcatcatcgccttcaacggcgaagtcggcatcgacgtggtcaacgccatgaatgagcgcaagcacttcgtcgaagtgctgatcgccccggccttcactgccgaagccaaagcagcgctggccggcaaagccaacttgcgcgttctggtcgtgccgatttcccgcgtgctcaataccttggaattcaagcgcgtcggtggcggcctgctcgtccagaccccggacaacttcaccgcacaagcttctggcctgaagatcgttaccaaagtgcaaccgaccgcccagcagatcgaagacctgctcttcgccgagcgcgtcgccaagttcgtcaagtccaacgccatcgtcttctgcggcaacggcatgacactcggcgtcggcgccggccagatgagccgcgtcgactcgaccaagatcgccagcatcaaggcccagcacgccggccttgaactgaacggttcggtcgtcgcttcagatgccttcttcccgttccgcgacggcgtcgacgtgctggccgaagccggcgccaaggcagtcatccagccggggggctcgatgcgcgacgaggaagtcatcgccgccgccgacgagcatggtctggccatggtcttcaccggcgcccgccacttccgtcactaa

SEQ ID NO: 56280 - protein, 530 aa, Dechloromonas aromatica RCB
MTIKQALISVSDKTGVLEFAQGLAAQGVKLLSTGGTAKMLRDAGLAVTEIGDYTGFPEMLDGRVKTLHPKVHGGILARRDLPEHLATIEQHGIPMIDLVCVNLYPFAATIAKAGVTLEDAIENIDIGGPAMVRSSAKNYNGVAIVTDPEDYAPLLAEMKATGGALQLSTRFGLAKKAFTHTARYDSMIANWLTGLDEGAEAKPAEAAPVPAIFPAKLQLAFDRTEILRYGENSHQSAAFYRDTTPVAGSIAAYTQLQGKELSYNNIADSDAAWECVKSFDTPACVIVKHANPCGVAIDGTLLAAYEKAFKTDSTSAFGGIIAFNGEVGIDVVNAMNERKHFVEVLIAPAFTAEAKAALAGKANLRVLVVPISRVLNTLEFKRVGGGLLVQTPDNFTAQASGLKIVTKVQPTAQQIEDLLFAERVAKFVKSNAIVFCGNGMTLGVGAGQMSRVDSTKIASIKAQHAGLELNGSVVASDAFFPFRDGVDVLAEAGAKAVIQPGGSMRDEEVIAAADEHGLAMVFTGARHFRH

SEQ ID NO: 56281 - DNA, 1569 bp, Thermobifida fusca YX
  CDS (1)..(1569): transl_table=11
gtgacacagcaggccattcggcgtgcgttgatcagcgtgtacgacaagaccggggtcgaggagctaggacgcggcctcgctgaagcaggggtggagatcgtctccaccggttccactgctgcccggctgaccgcagccggggtcgcagtcaccccggtggaatccgtcaccggttttcccgagtgtttcgaaggccgggtgaagaccctgcacccgaaggtgcacgcgggactgctcgctgaccggaccaaggccgagcaccgggcgcagctcgccgaactcgacatcgcgccgttcgacctggtcgtggtcaacctctaccctttcgcggacacggttgcgtccggcgcttcccctgaggagtgcatcgagaagatcgacatcggcggtccggcgatggtgcgggccgcggcaaagaaccacgcgagtgtcgcggtggtcgtggacccggcccgctacggcgacgtcctgaaagcggtgcgcagcggcgggttcaccctggaggagcgcaagcggttggcggcggcggctttcgcgcacacggcgagctacgacgctgccgtagcggcatggttcgccgaggcctacgcccccgacgaggtggcgaaggactcggggtggcccgagttcacggctgtcacctaccagcggcagacgacgctgcgctacggcgagaacccccaccagagcgcagcactgtaccggccggcgagcgccagcggcgagggcctggccggggcgcggcagttgcacggcaaggagatgtcgtacaacaactacgtggacagcgacgctgccctgcgcgccgcctacgacttcactgagccgtgcgtggcgattatcaaacatgccaacccgtgcgggatcgctgtaggagaaaatatcgccgaagcacatcgcaaggcgcacgcctgcgatccggtgtcggcgtttggtggggtgatcgccgctaaccgcgttgttgacgaggccatggccgcgcaggtcgccgaggtgttcaccgaggttgtcgtggcgcccgggttcagccctgaggccgtggagatcctcacgcgcaagaagaacatccgcctgctggaggtggcggagccggaccgcggggcccggcgggagatgcggcagatcagcggcgggctgctgatgcaggacgccgacctggtcgacgcgcccggggatgatcctgcgcagtggcagttgcgggccggaccagccgcggatgaggcgaccctggccgatctggccttcgcgtggcgtgcggtgcgggccgtgaaatccaacgcgatcctgctggctgccgaccgggccacggtgggcgtgggcatgggccaggtgaaccgggtggactcggctcgcctcgcggtgacacgcgccggggagcgggtgaagggctccgtagccgcgagtgacgcgttcttccccttccctgacggactggaagtgctggccgaggcaggcgtgcgggcgatcgtgcagccgggaggttcggtgcgggacgacgaagtcatcgccgctgccgagcgtgccggggtgaccttgtacttcaccggaacccggcacttcttccactga

SEQ ID NO: 56282 - protein, 522 aa, Thermobifida fusca YX
MTQQAIRRALISVYDKTGVEELGRGLAEAGVEIVSTGSTAARLTAAGVAVTPVESVTGFPECFEGRVKTLHPKVHAGLLADRTKAEHRAQLAELDIAPFDLVVVNLYPFADTVASGASPEECIEKIDIGGPAMVRAAAKNHASVAVVVDPARYGDVLKAVRSGGFTLEERKRLAAAAFAHTASYDAAVAAWFAEAYAPDEVAKDSGWPEFTAVTYQRQTTLRYGENPHQSAALYRPASASGEGLAGARQLHGKEMSYNNYVDSDAALRAAYDFTEPCVAIIKHANPCGIAVGENIAEAHRKAHACDPVSAFGGVIAANRVVDEAMAAQVAEVFTEVVVAPGFSPEAVEILTRKKNIRLLEVAEPDRGARREMRQISGGLLMQDADLVDAPGDDPAQWQLRAGPAADEATLADLAFAWRAVRAVKSNAILLAADRATVGVGMGQVNRVDSARLAVTRAGERVKGSVAASDAFFPFPDGLEVLAEAGVRAIVQPGGSVRDDEVIAAAERAGVTLYFTGTRHFFH

SEQ ID NO: 56283 - DNA, 1557 bp, Prochlorococcus marinus str. NATL2A
  CDS (1)..(1557): transl_table=11
atgtcaccgatagctctgctaagtgtctcagacaaaactggcttaattccacttgcgaaagcattagttaatgatctgggcttcaaaatcatttcaagtggcgggactgcaaagttaattgagagtgaaaatcttcctgttacaagagtcgcagattacacaggattcccagagattcttggaggaagagtaaaaactctaaacccaaaaattcatggagggatattagccagacgagataaacaatctcatttagatgatttagataaacaaaatatcaatccaatagacttggtggttgttaacttatatccatttgtaaaaacaatttccaaagagaatgtttcatgggaggaagctatcgaaaatattgatattggtggtccaacaatgatccgagcagcagcaaaaaaccatcaagatgttcttgtagttactgatccaagtcaatactcaaacttaattgatgcctataaatcaaaaaagatcactactgaattacgaaaaaaatattcgcaacaagcttttgagcataccgcgacgtatgacctaacaataagtaattggattgccaaccaaagctcctcaaaaaaggtttcttggttgcaaagcttgccattaaagcaagaacttaggtatggagaaaatcctcatcaaaaagcttcatggtatggagagcctgaaaaaggatggagtggagctaatcaattacaaggcaaagaattaagtacaaataatcttctagatctggaggctgctttatctactcttcgtgaatttgggtataaaaataatattagtaacccttcatatcaaaaagcagcggtagtaattaagcatacaaatccttgtggagtagctattggagattctccatcttcagctcttaaaagagcattagatggcgatagagtaagtgcttttgggggtattattgctatcaattgccccgttgatgaagctgcagcaaaagaaattgaaaatatatttattgaatgtgttgtagctccatattttgatgaaactgcaaaagaaatactttcaaaaaagaaaaatcttaggctcttagaattaaaagctgagtctgtccaaaaagcagataaaaatcacataagaagcatacttggtggtttattaattcaagatttagacgaaccaagtattgatcaaaaaaaatggaaaagtgttactgaactaatcccaacagatgaagaaatgaatgacttatcttttgcttggaaaattgtaaaacatatacgatcaaacgcaatagctgttgcatccaatcagcagagtctagggattggagctggccaaatgaatagggtaggttcagcaaaacttgcattagaagctgctggtacaaaatcaaaaggtgctgttttggctagtgatggttttttcccattcgacgatactgtaaagatggcttctgattatggtattagttcaattattcagcctggtggaagcattagagacgaagattctattaaagcctgcaatgaattaggaataaaaatgattcttactggtaaaaggcactttttacattga

SEQ ID NO: 56284 - protein, 518 aa, Prochlorococcus marinus str. NATL2A
MSPIALLSVSDKTGLIPLAKALVNDLGFKIISSGGTAKLIESENLPVTRVADYTGFPEILGGRVKTLNPKIHGGILARRDKQSHLDDLDKQNINPIDLVVVNLYPFVKTISKENVSWEEAIENIDIGGPTMIRAAAKNHQDVLVVTDPSQYSNLIDAYKSKKITTELRKKYSQQAFEHTATYDLTISNWIANQSSSKKVSWLQSLPLKQELRYGENPHQKASWYGEPEKGWSGANQLQGKELSTNNLLDLEAALSTLREFGYKNNISNPSYQKAAVVIKHTNPCGVAIGDSPSSALKRALDGDRVSAFGGIIAINCPVDEAAAKEIENIFIECVVAPYFDETAKEILSKKKNLRLLELKAESVQKADKNHIRSILGGLLIQDLDEPSIDQKKWKSVTELIPTDEEMNDLSFAWKIVKHIRSNAIAVASNQQSLGIGAGQMNRVGSAKLALEAAGTKSKGAVLASDGFFPFDDTVKMASDYGISSIIQPGGSIRDEDSIKACNELGIKMILTGKRHFLH

SEQ ID NO: 56285 - DNA, 1515 bp, Ehrlichia canis str. Jake
  CDS (1)..(1515): transl_table=11
atgaaagtcaaaagagcaattatatctgtatataataaaacaaatattatagaacttgcaaagtttcttattgcacaaaaagtagaaatcattgcaacaagtagtacttatcaaactttactaggtgcagagctgcaagtgacagaagtatctgattacacaaatttcccagaaataatgggcggtagagtaaaaactttgcatccaaaaattcatggtggaatattaagtaacagaaataatcacgctacagaatgttcaaatttaggaatatatgacatagacttagttatagtaaatttatatccattttttcaagtagcaagtctcaaaacttcaactgaaagtgagataatagaaaagatagatataggagggataacactattaagagctgcagcaaaaaactttcataatgtaacagtagtatcagacatcaatgactatgaaacattaaaagcagaaatgactaacaaccaaaatactacaactttaacatataggaaacatctagcaaaaaaggcattcgcgataacttcatcttacgatagcaatatatacaattggatgaataaagatagcaatgatactttgccaaaaacattcattatacatggcaataaagtacaaacattgagatgcggtgagaatccacatcagcaaggtgcattttatagtagtgcaaaaaacaaatatccgctagaacaactacatggaaaagaattaagttataataacatagtagatatagaatctgcaataaacatagtatcagaatttacacaaccagcagcaacaatcataaaacatagtaatccttgtggaacagcaattgctgataacattacaagtgcttataacaatgctttttcctgtgatacaaaaagtagttttggtggaattgttgcacttaacagagaaattaatgaagacatagcagaggaaatcaacaaaattttcattgaagtaatagttggtacatctattacagacaaagcattagaaatcatacaaaaaaagaaaaatgtgcgagtcatattatctacacaatataattcgccaaaatatacaattaaaaatgtaagtgatgggtttttattacaagaaagtaatacaaatcaattatcagcaaaagacctaatacaagtcacaaattttccagtatcagatgatactatttctaacttactttttgcatggaaagtatgtaaacatgtaaaatccaatgcaattgttatcgcaaaagatcatcgcacaataggagttggggctggtcaaatgagtcgtgttgacagtcttgaaattgcaataaaaaaagcacaagattgtacaggagcagttttagcatctgatgcattctttccatttacagacagtatattactaagtgcatccgtaaacatcagtgcaataatacaacccggagggtctttaaaagataaagaagtaatagaagaagcaaacaaccaaaaaattgctatgttctttactaatattagaaatttttatcattga

SEQ ID NO: 56286 - protein, 504 aa, Ehrlichia canis str. Jake
MKVKRAIISVYNKTNIIELAKFLIAQKVEIIATSSTYQTLLGAELQVTEVSDYTNFPEIMGGRVKTLHPKIHGGILSNRNNHATECSNLGIYDIDLVIVNLYPFFQVASLKTSTESEIIEKIDIGGITLLRAAAKNFHNVTVVSDINDYETLKAEMTNNQNTTTLTYRKHLAKKAFAITSSYDSNIYNWMNKDSNDTLPKTFIIHGNKVQTLRCGENPHQQGAFYSSAKNKYPLEQLHGKELSYNNIVDIESAINIVSEFTQPAATIIKHSNPCGTAIADNITSAYNNAFSCDTKSSFGGIVALNREINEDIAEEINKIFIEVIVGTSITDKALEIIQKKKNVRVILSTQYNSPKYTIKNVSDGFLLQESNTNQLSAKDLIQVTNFPVSDDTISNLLFAWKVCKHVKSNAIVIAKDHRTIGVGAGQMSRVDSLEIAIKKAQDCTGAVLASDAFFPFTDSILLSASVNISAIIQPGGSLKDKEVIEEANNQKIAMFFTNIRNFYH

SEQ ID NO: 56287 - DNA, 1617 bp, Methanosarcina barkeri str. Fusaro
  CDS (1)..(1617): transl_table=11
ttggtaaagagggcactgctcagcgtctcagacaagacaggaattgcagaattcgcacgcgggcttgaattacttggcgtgaaaataatttcaacaggcggaacagcgaaaattcttcgcgacgccggcatagaagttaccgatgtctcggaagtcacgggatgtccggagatgatgggaggaagggtcaaaaccctccatccaagaattcatggcggactcttatgcctgcgagagagcaaggaacagatggctgaagctgaaagagaagacatttcgcttattgacatggtggctgtaaacctctatccatttgaggtaacagtctcaaaagaaggcgtcgaactcgaagaagccattgagaacatagacatcggaggaccaactcttcttcgttcggcagctaaaaactaccgttcggttacagtactctcagacccgttggactacgggcgtgtcctcaaagaacttcgctcaacaggggtagtttcggaggaaactcgagctgcccttgcagttaaggctttcagacatactgcggattatgacgcaaccattgatacctatctaagtagaaccctgctcggcgaaaacgtgctccgcatgaattttaccgacggtgtaaaacttcgctatggggaaaattggcaccagaaagcctatttttacaaagattccaaaatagaaggtccaactctggcaaaagccacccagttgcatgggaaagaactctcctataataattatgtggatgccgataacgcccttcagacagtaaaagaactcggaaatgctcaccccgccgtggcaatcgtaaaacataataatccatgtggacttgcaaccggaaacacactcctgcaggctctccaggctgcctgggacggagacccgatttcagcttatggaagtataatctgcaccaatgaaacctttgatcttgaagctgcgacttttcttaacggaaaatttgtagagataattcttgctcctgacttcaaccccgatgctcttgaatacctgaaaaacaaaagtgaaaatcttagacttcttaaactgcctgatctcagggaagctttcgggacagactacacatataagtatgtaataggaggaatgctcaagcagagtcgcgatattggcctctacgaaaaatgggagtcagtcacagacatgccctatcctgaagagaagcgctctctttcggaattctgccttaaagcctgtaagtcaactaaatccaattccgtgatccttgctcatgagtacgagccaggtttcttcatggtacttgctatgggcgcaggacaaccgaatagggttgactcaattcgcaaacttgcagccacaaaagctgttgaaaatctcaaggtgatttacgaacgggaaaatcctgcaatctcttttgaagcttattgccagaaagtcatgtcagaatgcgtaatggcctcagacgcctttttccccttcgacgacagcatagttcatgcagcagaaaataatattcgctatatagtttccccaggtggatcaattcgggacggcgaagtcattgctgctgcaaatcggctaggagtttccatggtctttacaggcatgcgccacttccttcattaa

SEQ ID NO: 56288 - protein, 538 aa, Methanosarcina barkeri str. Fusaro
MVKRALLSVSDKTGIAEFARGLELLGVKIISTGGTAKILRDAGIEVTDVSEVTGCPEMMGGRVKTLHPRIHGGLLCLRESKEQMAEAEREDISLIDMVAVNLYPFEVTVSKEGVELEEAIENIDIGGPTLLRSAAKNYRSVTVLSDPLDYGRVLKELRSTGVVSEETRAALAVKAFRHTADYDATIDTYLSRTLLGENVLRMNFTDGVKLRYGENWHQKAYFYKDSKIEGPTLAKATQLHGKELSYNNYVDADNALQTVKELGNAHPAVAIVKHNNPCGLATGNTLLQALQAAWDGDPISAYGSIICTNETFDLEAATFLNGKFVEIILAPDFNPDALEYLKNKSENLRLLKLPDLREAFGTDYTYKYVIGGMLKQSRDIGLYEKWESVTDMPYPEEKRSLSEFCLKACKSTKSNSVILAHEYEPGFFMVLAMGAGQPNRVDSIRKLAATKAVENLKVIYERENPAISFEAYCQKVMSECVMASDAFFPFDDSIVHAAENNIRYIVSPGGSIRDGEVIAAANRLGVSMVFTGMRHFLH

SEQ ID NO: 56289 - DNA, 1542 bp, Dehalococcoides sp. CBDB1
  CDS (1)..(1542): transl_table=11
atgagggctatcctaagcgtctcagataaaaccggtcttatcgaattcgccaggggcttgtcagaactgggttttgatatatacagcaccggcggaaccaagaaatcactccagcaggcaaatgtaactgttcacagtatttcagacatgaccgattcacccgaaatactggacggacgggttaaaaccctgcaccccaaggtacacggtggcatactagcccggcgtgacctgcccgaacatatggccgaactggaaaaatacaatatccaacccattgacatggtggtagtcaatctctatccctttgtcaagactgtgtcgcgtccggatgtcagcctgaccgatgcactggagaatattgatattggcggcccgaccatgatacgtgcttctgccaaaaacttccccagtgtgacagtggtggtagacccccaggattacccccgtgttctggaacacctcaagaccggcactttgagcctagatgaacgcaagaagcttgcccagaaggcctttcagcatgtagctatgtacgatactgctatctcccaatatctctggcagggagaagagggcttccccgagaatatgaccatagccctttccaagcgctatgacctgcgttacggtgaaaatccccatcagccggcagttttctatgctgaaaacagggtagggcacgggcagaacaccggcattacctgggcacaacaggcctggggcaaacagctttcctttaacaatatcttggatgccgacgccgcatggggagccgccactgatttttcggccgccacagtagccatagtcaagcataccaatacctgtggtctgtgcagccgcgaagacgtagccgaagcctacaagagagctttttccggagaccctgtttcagcttacgggggcatcgtagcctcaaaccgcaaggtgactctgtccatggccgaagccatgaaaggcaccttttatgaaattattattgcccccgaatacgagccggaggcgctggaattccttaaaacccgcaaggatttacgcatacttatagccgagcttcccaaacataatgaggccgaaacccgttcactggattaccgcagggtaaagggagggctgctggtacaagccgctgatgaactggcggaaaatgccgtccagaccaaggtggtaaccaagcgcgaacccacccctgaggaaatgtcagatttgaaatttgcatggcgggcagtcaagcatatcaaatccaacgccattgtgctggctaagaacaatgttctgctgggtatgggagccggacaacccaacagggtagtcagtgtagacattgccaagagcaaagccggtgaggcttcaaagggtagtgtcatggcctctgacgccatgttccccttccctgacagcgttgaacaggctgccgctgccggagtgaccgccattatccagccaggcggttctatccgtgaccaggagtctattgatgccgccaacaagcacaacatagctatggtctttaccggcacccgtcacttccgccattag

SEQ ID NO: 56290 - protein, 513 aa, Dehalococcoides sp. CBDB1
MRAILSVSDKTGLIEFARGLSELGFDIYSTGGTKKSLQQANVTVHSISDMTDSPEILDGRVKTLHPKVHGGILARRDLPEHMAELEKYNIQPIDMVVVNLYPFVKTVSRPDVSLTDALENIDIGGPTMIRASAKNFPSVTVVVDPQDYPRVLEHLKTGTLSLDERKKLAQKAFQHVAMYDTAISQYLWQGEEGFPENMTIALSKRYDLRYGENPHQPAVFYAENRVGHGQNTGITWAQQAWGKQLSFNNILDADAAWGAATDFSAATVAIVKHTNTCGLCSREDVAEAYKRAFSGDPVSAYGGIVASNRKVTLSMAEAMKGTFYEIIIAPEYEPEALEFLKTRKDLRILIAELPKHNEAETRSLDYRRVKGGLLVQAADELAENAVQTKVVTKREPTPEEMSDLKFAWRAVKHIKSNAIVLAKNNVLLGMGAGQPNRVVSVDIAKSKAGEASKGSVMASDAMFPFPDSVEQAAAAGVTAIIQPGGSIRDQESIDAANKHNIAMVFTGTRHFRH

SEQ ID NO: 56291 - DNA, 1560 bp, Thiobacillus denitrificans ATCC 25259
  CDS (1)..(1560): transl_table=11
atgacgatcaaacgtgccctgctttccgtgtcggataaaaccggcctcgtcgatttcgcccgcgcgctcgccactgccggcgtcgaactgctgtccacgggcggcaccgccaagaccctgcgcgacgccggcctcgcggtcatcgacgtcagcgaatacaccggctttcccgaaatgctcgacgggcgcgtcaagaccctgcacccgaaggtgcacggcggcatcctcgcgcgccgcgatctcgacgaccatgtcgcgacgatggacacgcacagcctgggctacatcgacctcgtgtgcgtgaatctctatcccttcgtcgccacggtttccaagccgcataccctcgacgacgcgatcgagaacatcgacatcggcgggccggcgatggtgcgttcgtcggcgaaaaactaccgcttcgtcgcgatcgtcaccgacccggccgactacccggcgctcgtcgtcgaaatgcaggccaacgccggcgcgctgaccgacgcgacccgcttcacgctcgccaagaaggccttcagccacaccgcggaatacgacggcgcgatcagcaactacctgacgtcgctcaacgacgccaacgagcgcgagaccttcggcgagaaactgaacctgcagttcacgcgcgcgcagatctgccgctacggcgagaacccgcatcaggccggcgccttctacgtggaatccgacgcgccggccggcacgatcgccaccgcgcgccagatccagggcaaggagctttcctacaacaacattgccgacaccgacgccgcgctcgagtgcatcaagcagttcgacgccgcgcccgcctgcgtcatcgtcaagcacgcgaacccgtgcggcgtcgcgtacggcacgagcctcatggaagcctacgaccgcgcctacgcgaccgaccccgaatccgcgttcggcggcatcatcgccttcaacggccggctcgacggcgcgaccgccgcggcgatcgtcgaacgccagttcgtcgaggtcatcatcgcccccgcagtgagcccggaagcctcggccgcggtcgccgccaagaagaacgtgcgcctgctcgaatgcggccagtggacaggcagcgtcgcccagctcgacatgaagcgcgtcgccggcggcctcctggtgcaggatgccgacgttttgctcaacgccgagctcaaggtcgtcacccaacgcgccccaaccgacaaggaaatggacgacctcctgttcgcctggcgcgtcgccaagttcgtcaagtcgaacgcgatcgtctacgcgaaggaccgcatgaccatcggcgtcggcgccggccagatgagccgcgtcaactcggcgcgcatcgccgcgatcaaggccgagcacgccgggctcgtcgtgccaggctcggtcatggcgtcggacgccttcttccctttccgcgacggcatcgaccaggccgcggcggcgggcatcaaggccgtaatccagcccggcggctcgatgcgcgacgacgaggtcatcgccgcggcgaacgagcacggtctcgcgatggtgttcaccggcacgcggcatttccgtcactag

SEQ ID NO: 56292 - protein, 519 aa, Thiobacillus denitrificans ATCC 25259
MTIKRALLSVSDKTGLVDFARALATAGVELLSTGGTAKTLRDAGLAVIDVSEYTGFPEMLDGRVKTLHPKVHGGILARRDLDDHVATMDTHSLGYIDLVCVNLYPFVATVSKPHTLDDAIENIDIGGPAMVRSSAKNYRFVAIVTDPADYPALVVEMQANAGALTDATRFTLAKKAFSHTAEYDGAISNYLTSLNDANERETFGEKLNLQFTRAQICRYGENPHQAGAFYVESDAPAGTIATARQIQGKELSYNNIADTDAALECIKQFDAAPACVIVKHANPCGVAYGTSLMEAYDRAYATDPESAFGGIIAFNGRLDGATAAAIVERQFVEVIIAPAVSPEASAAVAAKKNVRLLECGQWTGSVAQLDMKRVAGGLLVQDADVLLNAELKVVTQRAPTDKEMDDLLFAWRVAKFVKSNAIVYAKDRMTIGVGAGQMSRVNSARIAAIKAEHAGLVVPGSVMASDAFFPFRDGIDQAAAAGIKAVIQPGGSMRDDEVIAAANEHGLAMVFTGTRHFRH

SEQ ID NO: 56293 - DNA, 1521 bp, Anabaena variabilis ATCC 29413
  CDS (1)..(1521): transl_table=11
atggcgcgtctagcactgctgagtgtatctaacaagactggtttaattgacttagctcgtcgcttggtagaagaatttgagtttgatttaatcagcagtggggggacagcccaagccctcaaggatgcgggtttacctgtgacgaaggttgcagattacacgggttcgccagagattttgggtggacgggtgaaaactctccatccccggattcatggggggattttggctaggcgggatgtacctagtgatttgacggatttggaaaataaccaaattcgcccgattgatttggtggtggtgaatctttacccgtttgaggagactattgctaaaccaggggtgacgttggcggaagctgtggaacaaattgatattggcggcccggcgatgttacgggcatcatcaaagaattttgcccatctaacagtcttatgtgatccggcgcagtatgatgaatatctgcaagaattacgacaaaataacggagtagcttccttagaatttcggcaaaaggcagctttgaaggggtttttgcatacggcgagttatgatagtgccattgcctcttacctctcaggtacacaacagcataccctcaacggtacagaattacaatctctgcgttacggtgagaatccccatcagcccgcagcttggtatcaaactggaactacgccaacagggtggacggcagccaagaaactgcaaggcaaggaactcagctacaataatttggttgacttagaagccgcccgccgcattattgcagagttcactgatacgccagccgccacgattattaaacatactaatccctgcggtacggcattggcagataccatcgtggaagcttatcaaaaagcttttaatgctgacgctacttcggcatttggggggattgtcgccctgaaccgccctattgatgcagcgacagccagcgagttaaccaagacgtttttagaatgtgtagttgcgcctgattgcgatgcagaagcgcaaaaaattctggcgaagaaatctaatgtgcgggtgttgactttagcagatttgagtacaggccccaaaactctggtaaaacaaattgctggcggtttcctggtgcaggctgcggatgatattgctgctgacacaattcaatggcaagtagttacagaacgccaacctactgctgatgaattagcagaattgttatttgcatggaaagtctgcaaacacgttaaatctaatgctattgttgtgacaagcgatcgcactactcttggtgtaggtgcaggacaaatgaaccgcattggttcaacgaaaattgccctagaacaagcaggggacaaagccaaaggtgcaatcctcgccagcgatggatttttcccctttgatgataccgtgagaaccgccgccgccgccggtattagcgccattgtccagccagggggaagcctgcgcgatcaagattctgtcaaggctgccaatgaactcggtttgttaatggtgctgactggggtgcggcattttttacattag

SEQ ID NO: 56294 - protein, 506 aa, Anabaena variabilis ATCC 29413
MARLALLSVSNKTGLIDLARRLVEEFEFDLISSGGTAQALKDAGLPVTKVADYTGSPEILGGRVKTLHPRIHGGILARRDVPSDLTDLENNQIRPIDLVVVNLYPFEETIAKPGVTLAEAVEQIDIGGPAMLRASSKNFAHLTVLCDPAQYDEYLQELRQNNGVASLEFRQKAALKGFLHTASYDSAIASYLSGTQQHTLNGTELQSLRYGENPHQPAAWYQTGTTPTGWTAAKKLQGKELSYNNLVDLEAARRIIAEFTDTPAATIIKHTNPCGTALADTIVEAYQKAFNADATSAFGGIVALNRPIDAATASELTKTFLECVVAPDCDAEAQKILAKKSNVRVLTLADLSTGPKTLVKQIAGGFLVQAADDIAADTIQWQVVTERQPTADELAELLFAWKVCKHVKSNAIVVTSDRTTLGVGAGQMNRIGSTKIALEQAGDKAKGAILASDGFFPFDDTVRTAAAAGISAIVQPGGSLRDQDSVKAANELGLLMVLTGVRHFLH

SEQ ID NO: 56295 - DNA, 1620 bp, Pseudomonas fluorescens PfO-1
  CDS (1)..(1620): transl_table=11
atggaaattgagatgaccgaccagactacccgcctgccgatccgccgcgccttgatcagtgtttccgacaagaccgggatcctcgaattcgccagggagctggaagccctgggcgtggaaatcctttccaccggcgggaccttcaaactgctgcaggacaacggcgtggccgcagtggaagtcgcggattacaccggtttcgcagagatgatggacggtcgggtgaaaaccctgcacccgaaaatccacggcgggatcctcggtcgtcgcggtatcgacgacgccatcatgaacgagcacggcatcaagccgatcgatctggtagccgtcaacctgtacccgttcgaagccaccatcagcaagccaggctgcgacctgccgaccgccatcgagaacatcgacatcggcggtccgaccatggtccgttcggcggcgaaaaaccacaaagacgtggccatcgtggtgaatgccagcgattacgccgacgtcctggaaaacctcaaggccggtggcctgacctacgctcagcgtttcgacctgatgctcaaggcgttcgaacacaccgccgcctacgacggcatgatcgccaactacatgggcaccgtgaaccaggccgccgaaaccctgagcaccgaaggtcgcagcgaattcccgcgcaccttcaacagccagttcatcaaggcccaggaaatgcgctacggcgagaacccgcaccagagcgcggcgttctacgttgaggccaagcctgccgaagtcggcatcgccaccgccacccagttgcaaggcaaggaactgtcgtacaacaacgtggccgacaccgacgccgcgctggaatgcgtgaagagcttcgtcaaaccggcctgcgtgatcgtcaagcacgccaacccgtgcggcgtggccgtgagcccggacgccgaaggtggcatccgtcaggcctacgaactggcctacgccaccgacaccgaatccgcgttcggcggcatcatcgccttcaaccgtgaactggatgccgagaccgccaaggcgatcgtcgagcgtcagttcgttgaagtgatcatcgccccaagtgtcagcgaagaagcccgcgccattgtcgccgccaaggccaacgtgcgcctgctggcctgcggcgagtggtcggcggatcgcgttccggcctgggactacaagcgcgtcaacggcggtctgctggtacagagccgcgacatcggcatgatcggtgccgacgacctgaaagtggtgaccaagcgcgcaccgaccgagcaggaagtccacgacctgatcttcgcctggaaagtggccaagttcgtcaaatccaacgccatcgtctacgccaagaaccgccagaccatcggtgtcggcgccggccagatgagccgcgtgaactcggcgcgtatcgccgcgatcaaggctgagcacgccggtctgcaagtggccggttcggtgatggcatccgatgcgttcttcccgttccgcgacggcctggacaatgcggccaaggtcggtatcacggcggtgatccagccaggcggctcgatgcgtgatgctgaagtgattgctgctgctgatgaagccggcatcgcgatggtcttcaccggcatgcgccatttccgtcactga

SEQ ID NO: 56296 - protein, 539 aa, Pseudomonas fluorescens PfO-1
MEIEMTDQTTRLPIRRALISVSDKTGILEFARELEALGVEILSTGGTFKLLQDNGVAAVEVADYTGFAEMMDGRVKTLHPKIHGGILGRRGIDDAIMNEHGIKPIDLVAVNLYPFEATISKPGCDLPTAIENIDIGGPTMVRSAAKNHKDVAIVVNASDYADVLENLKAGGLTYAQRFDLMLKAFEHTAAYDGMIANYMGTVNQAAETLSTEGRSEFPRTFNSQFIKAQEMRYGENPHQSAAFYVEAKPAEVGIATATQLQGKELSYNNVADTDAALECVKSFVKPACVIVKHANPCGVAVSPDAEGGIRQAYELAYATDTESAFGGIIAFNRELDAETAKAIVERQFVEVIIAPSVSEEARAIVAAKANVRLLACGEWSADRVPAWDYKRVNGGLLVQSRDIGMIGADDLKVVTKRAPTEQEVHDLIFAWKVAKFVKSNAIVYAKNRQTIGVGAGQMSRVNSARIAAIKAEHAGLQVAGSVMASDAFFPFRDGLDNAAKVGITAVIQPGGSMRDAEVIAAADEAGIAMVFTGMRHFRH

SEQ ID NO: 56297 - DNA, 1590 bp, Rhodobacter sphaeroides 2.4.1
  CDS (1)..(1590): transl_table=11
atgacgaacctcgttcccgttggccgcgcccttctgtcggtttccgacaagtcgggtctcctcgacctcgcccgtgccctggcagatctggaggtggagctgatctcgaccggcggcacggcggccgcgctgcgggcggcggggctgaaggtgcgggacgtcgccgaggtcacgggctttcccgagatgatggacggccgggtcaagaccctgcatccgatggtccacggcgggcttctggcgctgcgcgacgacgacgagcatctggtggcgatggccgcccacgggatcgagccgatcgacctcctggtggtgaacctctatccgttcgaagcggccgtcgcgcggggcgcctcctacgacgactgcatcgagaacatcgacatcggcgggccggccatgatccgggccgcggccaagaaccaccgtttcgtgaacgtcgtgaccgacacggccgactacaaggcgctgctcgacgagctgcgcgcccatgacggcgccacgaggctctccttccgccagaaactcgcgctgaccgcctatgcgcgcaccgcggcctacgacacggccgtctcgacctggatggcgggcgcgctgaaggccgaggcgccgcgccgccgctccttcgcgggcacgctcgcccagaccatgcgctacggcgagaacccgcaccagaaggccgccttctacaccgacggctcggcccgtccgggcgtcgccaccgcgaaacagtggcagggcaaggagctttcctacaacaacatcaacgacaccgacgcggccttcgagctggtggccgagttcgacccggccgagggcccggcctgcgtcatcgtcaagcacgccaacccctgcggcgtggcccggggcgcgacactggccgaagcctatgcccgcgccttcgactgcgaccgcgtctcggccttcggcggcatcatcgcgctgaaccagccgctcgatgcggccacggccgaaaagatcaccgagatcttcaccgaggtggtgatcgcccccggcgccgacgaggaagcccgcgcgatcttcgccgccaagaagaacctccggctgctgacgaccgaggcgctgcccgatccgctggcgccggggctcgccttcaagcaggtggcgggcggcttcctcgtgcaggaccgcgacgcgggccatgtcgatgcgctcgacctgaaggtggtgacgaagcgcgcgccctcggacgcggaactcgccgacctcctctttgcctggaccgtggccaagcatgtgaaatcgaacgccatcgtctatgtgaaggacggggccaccgtgggcgtgggggcggggcagatgagccgcgtcgactcgacccggatcgctgcgcgcaagtcgcaggacatggcgcaggcgctgggtctggcccagccgctgacgcaagggtccgtcgtggcctccgacgccttcttccccttcgccgacggcctgctcgccgcggccgaggcgggcgccaccgcgatcatccagcccggcggctcgatgcgcgacgacgaggtgatcgcggcggccgacgaggcggggctcgccatggtcttcaccggccagcgtcacttccggcactga

SEQ ID NO: 56298 - protein, 529 aa, Rhodobacter sphaeroides 2.4.1
MTNLVPVGRALLSVSDKSGLLDLARALADLEVELISTGGTAAALRAAGLKVRDVAEVTGFPEMMDGRVKTLHPMVHGGLLALRDDDEHLVAMAAHGIEPIDLLVVNLYPFEAAVARGASYDDCIENIDIGGPAMIRAAAKNHRFVNVVTDTADYKALLDELRAHDGATRLSFRQKLALTAYARTAAYDTAVSTWMAGALKAEAPRRRSFAGTLAQTMRYGENPHQKAAFYTDGSARPGVATAKQWQGKELSYNNINDTDAAFELVAEFDPAEGPACVIVKHANPCGVARGATLAEAYARAFDCDRVSAFGGIIALNQPLDAATAEKITEIFTEVVIAPGADEEARAIFAAKKNLRLLTTEALPDPLAPGLAFKQVAGGFLVQDRDAGHVDALDLKVVTKRAPSDAELADLLFAWTVAKHVKSNAIVYVKDGATVGVGAGQMSRVDSTRIAARKSQDMAQALGLAQPLTQGSVVASDAFFPFADGLLAAAEAGATAIIQPGGSMRDDEVIAAADEAGLAMVFTGQRHFRH

SEQ ID NO: 56299 - DNA, 1515 bp, Carboxydothermus hydrogenoformans Z-2901
  CDS (1)..(1515): transl_table=11
atgggaagtaagcgggctttaatttccgtttacgataaaaagggtatagtggaatttgccgggaaattagtagatttaggctttgaaataatttctaccgggggaagttataaagttttaaaagaggccggtatcccggttacgtatataagtgatattaccggttttccggaaattttagaaggacgggtaaagactttgcatccggcaattcacgggggtatcctggccaaaagaacggaggagcatttaaaggaaatttcagcccagggtataaagcctattgatttggtgatagtaaacctgtatccattccgggaaacggtagcgcggggagctgatcgtgacgaaatcattgaaaatattgacataggtggccccactttaatccgggcagcagccaaaaaccaccggtacgttacggtggtggtcgatccggaagattatgcggaagtggccgaacatctgaaaaagggagaggtgccgcctgaggtcagggaaaggttagctttaaaagcgttccgccatactgccagttacgacattgctattgccaattattttgcgggaaggttagaggatggtggttttcggaaaaaattatatattgaagcggaacaggtggaaatgctgcggtacggagaaaatccccaccagcggggagcggtttaccgggtggaggggacttttggactggttgatgcggaaattttaaacggtaaagccatgagctttaataattaccttgatgccgatgcagcgtaccggttaatctgggagtttcgtgagccggcggcagccataatcaagcacaccgtaccctgcggtgtggctaccggggaaaatttaaaggaagcttacgaaaaagcgtatgccggtgatccggtgtcggcttacgggggaattgttgcttttaacggtgcggttgatgaaaaggtggctgagcttttggttcagcatttttacgaggtaataattgctccggacttttccgatgaagccttaaaaatcttgcgggaaaagaagaatttacgggttataaaggcaaaaccgcttgctttagaggaacttaatttaaggcaaattagcggaggactgttgcttcaggaaaatgatgggaagctttatgaagaattaaaggtggtagcgggtaatgatttaaccgaagggcaaagggaagatatagtttttggtttaaaagtagtgaaatacgttaaatccaatgccatagctgtggtaaaggacgggatgcttttaggagctggcggtgggcagaccagccggattgatgcggtaaaaattgcattaaataaagccggggaaagagcccggggagcggtggtggtttccgatgccttcttcccctttgccgattccatcgaggaactggccaaagcgggggtttcggtggtagtagagccgggaggagcggtgcgcgaccgggaagtaatcgaagaagcggcaaaaagaaatgtaactctcgtttttacgggagtaaggcatttcttacattag

SEQ ID NO: 56300 - protein, 504 aa, Carboxydothermus hydrogenoformans Z-2901
MGSKRALISVYDKKGIVEFAGKLVDLGFEIISTGGSYKVLKEAGIPVTYISDITGFPEILEGRVKTLHPAIHGGILAKRTEEHLKEISAQGIKPIDLVIVNLYPFRETVARGADRDEIIENIDIGGPTLIRAAAKNHRYVTVVVDPEDYAEVAEHLKKGEVPPEVRERLALKAFRHTASYDIAIANYFAGRLEDGGFRKKLYIEAEQVEMLRYGENPHQRGAVYRVEGTFGLVDAEILNGKAMSFNNYLDADAAYRLIWEFREPAAAIIKHTVPCGVATGENLKEAYEKAYAGDPVSAYGGIVAFNGAVDEKVAELLVQHFYEVIIAPDFSDEALKILREKKNLRVIKAKPLALEELNLRQISGGLLLQENDGKLYEELKVVAGNDLTEGQREDIVFGLKVVKYVKSNAIAVVKDGMLLGAGGGQTSRIDAVKIALNKAGERARGAVVVSDAFFPFADSIEELAKAGVSVVVEPGGAVRDREVIEEAAKRNVTLVFTGVRHFLH

SEQ ID NO: 56301 - DNA, 1542 bp, Synechococcus elongatus PCC 7942
  CDS (1)..(1542): transl_table=11
atgccgcgatttgccctgctcagtgtttccgataaaactggcctcgttgattttgcacgtcaactggtcgatcgctttcagtttcagattgtcagtagcggtggcaccgccaagcaactcctagaagcaggtatccccgttacgaaagttgcagaacacacgggctcacccgaaatcctcggtggccgagtcaaaaccttgcatccccgcattcatggcggcattttggcgcgccgcgatcgcgaagaggatcaagcagatttagcggccaacaacattcagccgtttgacttagtcgtcgtcaatctctatcccttcgaggccacgatcgcccgtcctgaagtgacgctggcagatgcgatcgagcaaattgacatcggcgggccagcaatggtgcgggcctcggccaagaaccatgctcacctaacgattctgactaaccccagccagtacgagccctatctgacggccctggccgatggagagggacaaattcccctcgcgttccgccagcagtgcgctctagcggctttccagcacaccgctgcttatgatgcggcgatcgcgacttatctcgctgagcaatttgaagcgaccagcgatcgcttgcaactgagtgctcagccggtgcaagtcctgcgctacggcgaaaacccccaccaggcggcgacttggtatcaaaccggtgctacggccagcggttgggcagcggcgcagcaactacagggcaaagagctgagctacaacaacctagttgacctcgaggcagcacgccaaattattgcggagttcccggcggatggccccgctgctgccgcgattctcaaacacaataatccctgcggagtcgccacagctgaggcattgagtgatgcctatcaaaaagcgtttgacgcggactccgtctctgctttcgggggcattgtggccctgaatcgggcgatcgatgcggcaactgcaacggcgatgaccggcaccttcctcgaatgtattgttgccccatcggttgagccagcagcggctgagattctcgcagctaagaaaaacctacgggtactcaccctggcagatttcaatagcggtccgcagcaaactgtgcgatcgatcgccggcggattcttggtgcaggacagcgatgatcagctggaaaccgttgatgcttggcaggtcgtcacggaacagcagcctagcgaagccgattggcaggagttgctgtttgcttggaaggtggtcaaacatgtcaaatccaatgcgatcgcggtgacggcgaatggcgtcacgctcgggattggtgccggtcaaatgaatcgggtcggttccgtcaaaattgccttggaacaagcgggcgatcgcgctcaaggtgccattcttgccagcgatggtttctttccctttgatgacagtgttcgtaccgcagcggcagctggaattcgggcgatcgtgcaacccggcgggagtctgcgtgatgctgattcaattgcagcggcgaacgaacttggccttgtgatggtctttactggcacgcgccacttcctccactaa

SEQ ID NO: 56302 - protein, 513 aa, Synechococcus elongatus PCC 7942
MPRFALLSVSDKTGLVDFARQLVDRFQFQIVSSGGTAKQLLEAGIPVTKVAEHTGSPEILGGRVKTLHPRIHGGILARRDREEDQADLAANNIQPFDLVVVNLYPFEATIARPEVTLADAIEQIDIGGPAMVRASAKNHAHLTILTNPSQYEPYLTALADGEGQIPLAFRQQCALAAFQHTAAYDAAIATYLAEQFEATSDRLQLSAQPVQVLRYGENPHQAATWYQTGATASGWAAAQQLQGKELSYNNLVDLEAARQIIAEFPADGPAAAAILKHNNPCGVATAEALSDAYQKAFDADSVSAFGGIVALNRAIDAATATAMTGTFLECIVAPSVEPAAAEILAAKKNLRVLTLADFNSGPQQTVRSIAGGFLVQDSDDQLETVDAWQVVTEQQPSEADWQELLFAWKVVKHVKSNAIAVTANGVTLGIGAGQMNRVGSVKIALEQAGDRAQGAILASDGFFPFDDSVRTAAAAGIRAIVQPGGSLRDADSIAAANELGLVMVFTGTRHFLH

SEQ ID NO: 56303 - DNA, 1581 bp, Rhodospirillum rubrum ATCC 11170
  CDS (1)..(1581): transl_table=11
gtgctccattccctgcccatccgccgcgccctgatcagcgtttccgacaagggcgggcttgtgcccttcgcccgtttcctcgccgatcacgacatcgagatcttgtcgaccggaggcagcgccaaggcgctggccgatgccggcattccggtgaccgaggtcgccgatttcaccggtttcccggaaatgctcgatggccgggtcaagaccctgcatccgaagatccacggcggcatcctgggcatccgcgacaatcccgagcaccagcgggcgatggccgcccatgagatcttgccgatcgatctggtggtggtgaacctctatcccttcgaagccacggtggccaagggcgccgccttcgaggactgcgtcgagaacatcgacatcggtgggccggccctgatccgcgccgccgccaagaaccacgaggcggtcaccgtcgtcgtcgatcccgaggattaccagccggtgatggacgccatgaccgccgagggcggcgccaccacgctggagctgcggcgcaagctggcttcggccgccttcgcccgctgcggcgcctatgacggcgccatcagccgctggttccaggggcaggtcggcgacgagactccgcgtcatatcgttttcgccggccgcctgcgccagaccctgcgctatggcgagaacccccatcagaaggcggcgttctatggtcacggcatcgcccgcccgggggtggccagcgccgagcagcttcagggcaaggagctgagctacaacaacatcaatgataccgacgccgcctttgatctggtctgcgaattcgccgagccggcggtggcgatcatcaagcacgccaacccctgcggcgtcgcccagggcgccagcgtcgtcgaagcctataaggccgccctcgcctgcgatccggtcagcgcctttggcggcatcgtcgccctcaaccggccgatcgatcgcgactcggcggtggaaatcaccaagatcttcaccgaggtggtcatcgcccccgatgccgacgccgaggcgcgggcgattttcgcggccaagaaaaacctgcgcctgctgctgaccggcgtggtcgccgataccacggcgcccgggctgaccgtgcgctcggtcgccggcggcatgctggtccaggaccgcgacgccgccgatctgctgtcggccgatctcaaggtggtcagcaagcgcacgccgaccgaacgcgaactggccgacatgctgatcgccttcaaggtctgcaagcacgtcaaatccaacgccatcgtctatgtcaaggatggcgccacggtgggcatcggcgccggccagatgagccgggtcgacagcgcccgcatcgcctcgtggaaggccgatgaggccgccgaggcggccgggctcgcccaatcgccgacccaggggtcggtcgtcgcctccgacgccttcttccccttcgccgatggcctgctggccgcggccaaggccggggcaacggcggtgatccagcccggcggcagcatgcgcgacgacgaggtcatcaaagccgccgacgaggccggcttggcgatggtcttcaccggtttgcgccacttccgccattag

SEQ ID NO: 56304 - protein, 526 aa, Rhodospirillum rubrum ATCC 11170
MLHSLPIRRALISVSDKGGLVPFARFLADHDIEILSTGGSAKALADAGIPVTEVADFTGFPEMLDGRVKTLHPKIHGGILGIRDNPEHQRAMAAHEILPIDLVVVNLYPFEATVAKGAAFEDCVENIDIGGPALIRAAAKNHEAVTVVVDPEDYQPVMDAMTAEGGATTLELRRKLASAAFARCGAYDGAISRWFQGQVGDETPRHIVFAGRLRQTLRYGENPHQKAAFYGHGIARPGVASAEQLQGKELSYNNINDTDAAFDLVCEFAEPAVAIIKHANPCGVAQGASVVEAYKAALACDPVSAFGGIVALNRPIDRDSAVEITKIFTEVVIAPDADAEARAIFAAKKNLRLLLTGVVADTTAPGLTVRSVAGGMLVQDRDAADLLSADLKVVSKRTPTERELADMLIAFKVCKHVKSNAIVYVKDGATVGIGAGQMSRVDSARIASWKADEAAEAAGLAQSPTQGSVVASDAFFPFADGLLAAAKAGATAVIQPGGSMRDDEVIKAADEAGLAMVFTGLRHFRH

SEQ ID NO: 56305 - DNA, 1542 bp, Moorella thermoacetica ATCC 39073
  CDS (1)..(1542): transl_table=11
atgtctaaaagggctctaatcagcgtctccgacaaaaccggtctggtggaactggcccgcggcctggtggaactgggctgggaactcctttccaccggcggcacggcccgcaccttaatcgcagccggcctgcctgtgaccgaagtggcagccgtcaccggctttcccgagatccttgacggccgggtcaagaccctgcacccgaagatccacggcggcatcctggcccggccgacccccgaacacctggcccagctccaggagcagggcatccagcccatcgacctggtggtggtcaacctctaccccttccgggaaactatcgcccggcccggagtgacgccggcggaggccattgaaaacatcgacatcggcggcccggccatggtcagggcggcggccaagaaccacgagagggtgggtattgtcgtcgacccggccagttacaatgaggtgttaacggaactgagggagaaaggaagcttgagcccggagaccaggcgccgcctggcggcggcggccttcgcccataccgccgcctacgacgcggccattgcggcctatttccagcgcctcatgcgcaatgaagaacccttcccggccagcttcgtcttaagcggtgaaaaggtccaggacctgcgctacggcgagaacccccaccagggggccgctttctaccgcttgcccgccccaccccccggcaccctggccggggcccggcagctccagggcaaggagctttcatataataacctcatggacctggacgccgcctggaacctggcctgtgacttcaaagaaccggtggtggcgatcatcaaacataccaacccctgcggggtcgcccgggcaagtaccccggctgcggcctaccgcctggcttacgctgccgaccccgtttccgcctttggcggcatcgtcgcctgcaaccggccggtggacggcgaaatggccggggccatgacggagatattcctggaagcagtcatcgccccgtcttttaccccggaagccatggcgatcctgaaaagcaaatccaacctgcgccttctggccgcgggtgagagggcgggttgccgtacccgggaataccagataaggcccgtcagcggcggcttcctggtccaggagccggactaccatgtcctcgagccggagagcctcaaggtggtaaccgcccgtaaacctgaagccaaagagatggccgacctgctcttcgcctggcaggtagtcaaacacgtcaagtccaacgccatcgtggtggccagggacggcgtcaccctgggtatcggcgccggccagatgaaccgggtgggggcggctcgcatcgccctggagcaggccggggcccgggctaaaggcgccgttctggcttccgacgccttcttccccttcggcgacaccgtggaactggcggccggggccgggatcacagccatcatccagcccggcggctctatccgcgacgaggagtcgatcagggctgccgatgccgcgggtatagccatggttttcaccggcatccgccacttccggcattaa

SEQ ID NO: 56306 - protein, 513 aa, Moorella thermoacetica ATCC 39073
MSKRALISVSDKTGLVELARGLVELGWELLSTGGTARTLIAAGLPVTEVAAVTGFPEILDGRVKTLHPKIHGGILARPTPEHLAQLQEQGIQPIDLVVVNLYPFRETIARPGVTPAEAIENIDIGGPAMVRAAAKNHERVGIVVDPASYNEVLTELREKGSLSPETRRRLAAAAFAHTAAYDAAIAAYFQRLMRNEEPFPASFVLSGEKVQDLRYGENPHQGAAFYRLPAPPPGTLAGARQLQGKELSYNNLMDLDAAWNLACDFKEPVVAIIKHTNPCGVARASTPAAAYRLAYAADPVSAFGGIVACNRPVDGEMAGAMTEIFLEAVIAPSFTPEAMAILKSKSNLRLLAAGERAGCRTREYQIRPVSGGFLVQEPDYHVLEPESLKVVTARKPEAKEMADLLFAWQVVKHVKSNAIVVARDGVTLGIGAGQMNRVGAARIALEQAGARAKGAVLASDAFFPFGDTVELAAGAGITAIIQPGGSIRDEESIRAADAAGIAMVFTGIRHFRH

SEQ ID NO: 56307 - DNA, 1647 bp, Frankia sp. CcI3
  CDS (1)..(1647): transl_table=11
atgacgtcatcgggcgaaggtgtggccggcgagggcggggctgtccgcggatccgaacccggcgaagtggtccccaccgggcggcggccgctgcgacgggcgcttgtcagcgtctacgacaagagcgggctcgacgtcctcgcggaggcgttccttgcggccgacgtcgaggtggtctcgaccggttcgaccgccgacgtcctggcccgtcacgggctggcggtcacaccggtgagcaccgtgaccggatttccggaggtgctgggcggtcgcgtcaagacgctgcacccccacgtgcacgccggtctgttggccgatctgcgtaacgccgagcacgccgcggtgttggccgaactcgacatcgctccgttcgacctggtcgtcgtcaatctgtacccgttcgccgcgacagtcgccgccggtgcgagcgaggacgaggcgatcgagcagatcgacatcggcggtccggccatgatccgcgcggcggcgaagaaccatgcgtcggtcgccgttgtcgtcgcacccggcgactacgccgagctggccgccgcagtccgcggatccggatatgatcttcccgctcgccgccggctcgccgcgaaggcgttcgcccacaccgcggcgtacgacatcgccgtgtcctcgtggttcgccggcgtcgtcgcgccggacgaggtggcgcgggagagcggatggcccgacgtgctgtccgcgcagtggcaccgtacggaggtcctgcgttacggcgagaacccccatcagcgcgccgcgctctacgtggagagcgacgccgagggtcggcccggcctcgcctcggcccgtcagctgcacggcaagcagatgtcctacaacaactacaccgacaccgacgccgcccgccgagcggtgttcgacttcaccgagcccgccgtggccgtgatcaagcacgccaacccctgcggcatcgcgatcggcgccaccatcgccgaggcccaccgcaaggcgcatgcctgcgacccggtctccgccttcggcggggtgatcgcgaccaaccgtccggtctcgggcgagctcgccgaacagatcgcggagatcttcaccgaggtcgtcgtcgcaccggcctacgaacccgccgcggtggagatcctctctcgtaagccgtcgatccggctgctggagtgcccaccgccgccgcaccagcgcgggatcgaactgcgccagatcagcggaggcctgctcctgcagtcgcgggacgccgtcgatgcgccgggcgacgagccgtccggatggacgctggaggcgggatcgcctgcggacgaggccctgctggccgagttgcggttcgcctggcgggcggtgcgctccgtgaagtcgaacgccatcctcctcgcgtccggcggtgccaccgtcggagtcgggatgggccaggtgaaccgggtggacgctgcccggctcgcggtgacccgggcaggggaccgggcgaagggggctgtcgccgcgagcgacgcctatttcccgttccccgacggtttcgaggtgctcgccgaggcgggggtgcgggccgtggtcgaaccgggcgggtcggtgcgcgacgagctcgtcatcacggctgcccgggaggccggcgtcacgctctacttcagcggtgtccgccacttcgcgcactga

SEQ ID NO: 56308 - protein, 548 aa, Frankia sp. CcI3
MTSSGEGVAGEGGAVRGSEPGEVVPTGRRPLRRALVSVYDKSGLDVLAEAFLAADVEVVSTGSTADVLARHGLAVTPVSTVTGFPEVLGGRVKTLHPHVHAGLLADLRNAEHAAVLAELDIAPFDLVVVNLYPFAATVAAGASEDEAIEQIDIGGPAMIRAAAKNHASVAVVVAPGDYAELAAAVRGSGYDLPARRRLAAKAFAHTAAYDIAVSSWFAGVVAPDEVARESGWPDVLSAQWHRTEVLRYGENPHQRAALYVESDAEGRPGLASARQLHGKQMSYNNYTDTDAARRAVFDFTEPAVAVIKHANPCGIAIGATIAEAHRKAHACDPVSAFGGVIATNRPVSGELAEQIAEIFTEVVVAPAYEPAAVEILSRKPSIRLLECPPPPHQRGIELRQISGGLLLQSRDAVDAPGDEPSGWTLEAGSPADEALLAELRFAWRAVRSVKSNAILLASGGATVGVGMGQVNRVDAARLAVTRAGDRAKGAVAASDAYFPFPDGFEVLAEAGVRAVVEPGGSVRDELVITAAREAGVTLYFSGVRHFAH

SEQ ID NO: 56309 - DNA, 1590 bp, Novosphingobium aromaticivorans DSM 12444
  CDS (1)..(1590): transl_table=11
gtgaccgaggttaccatcaagcgggcgctgctttcggtgtccgacaagtccggccttgtcgatctgggcaaggcgctggccgcgcgcggcgtcgaactgctgtccaccggcggtactgccaaggcgctgcgcgatgccggcctggcggtgaaggacgtgtccgagcacaccgggtttcccgaaatgatggacggccgcgtcaagacgctgcacccgacgatccacggaggcctgctggccgtacgagacaatcccgaacacgccgctgcgatggccgagcacgcgatcggtgcgatcgatctcgtcgtggtcaacctctacccgttcgaagcgaccgtggccaagggtgcggagcgtgaggaggtgatcgagaacatcgacatcggcggaccttcgatggtccgttcggcggcgaagaaccacgaatacgtcaccatcctgacggatgcggccgactatgccgcgttccttggcgaactcgaccagaccggcggcgcgacgacactcgccttccgccgcaagatggccgccaaggcctatgccgcaaccgccgcctatgatgcggcaatctcgcagtggttcgcgaccgtggaccagcaggaacacttcccacccgtcctcgccgccgcgcacacccgcgtgaccacgctgcgctatggcgagaaccctcaccaggatgccgcactctacgttccgcgcaatcccgccgtcaccggcctgccgcaggcgacccaggtgcagggcaaggagctgtcctacaacaactacaacgatgccaacgcagcgcttgaactggtcgccgagttcgcgggcgcgaagccgacggtggtgatcgtgaagcacgccaacccctgcggcgtggcaacggcggaaacgctgcttgaagcgtggaaggacgcgctcgagtgcgactcggtctcggcattcggcgggatcgtggcgacgaacgttccgctcgacgggccaaccgcaaacgcaatctgcgagatattcaccgaagtggttgtggcgccgggcgcagatgacgcggcgaaggaagccttcgcacgcaagaagaacctgcgcctgctgctgatcgattcgcttcccgatgcgggccgcaagggcctcgtcaccgtgccgatcgcgggcggtctactggtgcaggaccgcgatgcgggcaagatcgacaagtccgacctcaaggtggtgaccaagcgcgcgccgaccgaacgggagctggaggacgcgctcttcgcctggaccgtggcaaagcacgtcaagtcgaacgccatcgtctatgccaaggacggcgtgacggccggcattggcgcaggccagatgaaccgccgcgacagctcgcgcatcgccgccgcgaaggccagggaagcggccgaaacccatcacttcagcgaagtgcgcacggtaggctcggcagtagcctccgacgcgttcttcccctttgccgatggcctgatggcggccgtggaagcgggagccacctgcgtgatccagcccggtggctcgatccgcgacgaggatgtgatcaaggctgctgatgaagccggccttgccatggtcttcaccggaatgcgccacttccgccactga

SEQ ID NO: 56310 - protein, 529 aa, Novosphingobium aromaticivorans DSM 12444
MTEVTIKRALLSVSDKSGLVDLGKALAARGVELLSTGGTAKALRDAGLAVKDVSEHTGFPEMMDGRVKTLHPTIHGGLLAVRDNPEHAAAMAEHAIGAIDLVVVNLYPFEATVAKGAEREEVIENIDIGGPSMVRSAAKNHEYVTILTDAADYAAFLGELDQTGGATTLAFRRKMAAKAYAATAAYDAAISQWFATVDQQEHFPPVLAAAHTRVTTLRYGENPHQDAALYVPRNPAVTGLPQATQVQGKELSYNNYNDANAALELVAEFAGAKPTVVIVKHANPCGVATAETLLEAWKDALECDSVSAFGGIVATNVPLDGPTANAICEIFTEVVVAPGADDAAKEAFARKKNLRLLLIDSLPDAGRKGLVTVPIAGGLLVQDRDAGKIDKSDLKVVTKRAPTERELEDALFAWTVAKHVKSNAIVYAKDGVTAGIGAGQMNRRDSSRIAAAKAREAAETHHFSEVRTVGSAVASDAFFPFADGLMAAVEAGATCVIQPGGSIRDEDVIKAADEAGLAMVFTGMRHFRH

SEQ ID NO: 56311 - DNA, 1533 bp, Anaplasma phagocytophilum HZ
  CDS (1)..(1533): transl_table=11
atgcagaaaacaaaagtggctcttttatccgtaacggataaggagggagtagaggagttggctcgctttttggtgaaaaacggttttcgtatccttgctacaaaaaatacaaatcttttgctgagggattctggcatagagtcaacagaggtgtcggaatacacagagtatgatgaaattatgggagggcgtgttaagacgctgcatccgaagatttttgctggaattttgtgcaaccgtgggtcgcacatgcaggagggagagaggcttggtattgataatatagatctccttgtggtgaatttgtatccttttgcgcagtgtgtggctcgtgctgatgctacggagcatgatattatagaaaatattgatataggtggtgtggcgcttttaagggctggtgcgaagaattttcaacatgtcactgttgttttgagtgctcaggactatgatgagttgaagggcgagattgagaataatgggggcaatacttcccttgagtatcgtaaaaagatggctgctagggcttttgcattgactgctgcttatgatgcgagggtgcatagctggttgttgtgtgataagcaggatgaggtattaccgagtgagatcgttatacatgggaagaaggttcaggatctgcgtataggtgagaatccgcatcaaaaggctgcgctttattgtgtgggaagttatggtgatgcgcttcctatagagcaaatacatgggaaagatctgagttataataatatcgttgatatagaatctgccataaagatagtggcagactttgatgttcctgcggtttcggttatcaagcatggtaatccttgcggggttgccatttctagtgaaggtattgacgatgcgtatgagaaggctatttcgtgcgatccacgtagtagttttgggggcataatagcgctaaacaaggccatgaccatggatattgctagaaaggtcatgagtatatttatagaagctgtagtagcgcctgactttgatgatggggtgatagatactctaacagcgaagaagaacatgcgcattatgaggtataagccgtatactcctgataggttagtggtaaagagcacattgtctggtgggttgttggtgcaggagtgcgatcgtagcgtggttaatataagtgatttcaagttggctacggaggttagtgcttctcctgaggtgttaaatgatcttttgtttgcttggagagtgtgtaagtacgtacgctcgaatgcgatagtgatcgcacgagatggtcgcgcaattggtgtaggggcagggcaaatgagccgtgttgatagtgtggaaatagcgatacgtaaggctgggaattgtgcaggtgcggttttagcttctgatgccttttttccgtttgcggatagtattcagcatgctgtttctgctggtatagcggctatagtgcagccagggggctcgctgcgggatcaggaagtcatagatgcggcgaatgccagtggtatacctatgtatttcacgggagtgcgcggtttttgccattag

SEQ ID NO: 56312 - protein, 510 aa, Anaplasma phagocytophilum HZ
MQKTKVALLSVTDKEGVEELARFLVKNGFRILATKNTNLLLRDSGIESTEVSEYTEYDEIMGGRVKTLHPKIFAGILCNRGSHMQEGERLGIDNIDLLVVNLYPFAQCVARADATEHDIIENIDIGGVALLRAGAKNFQHVTVVLSAQDYDELKGEIENNGGNTSLEYRKKMAARAFALTAAYDARVHSWLLCDKQDEVLPSEIVIHGKKVQDLRIGENPHQKAALYCVGSYGDALPIEQIHGKDLSYNNIVDIESAIKIVADFDVPAVSVIKHGNPCGVAISSEGIDDAYEKAISCDPRSSFGGIIALNKAMTMDIARKVMSIFIEAVVAPDFDDGVIDTLTAKKNMRIMRYKPYTPDRLVVKSTLSGGLLVQECDRSVVNISDFKLATEVSASPEVLNDLLFAWRVCKYVRSNAIVIARDGRAIGVGAGQMSRVDSVEIAIRKAGNCAGAVLASDAFFPFADSIQHAVSAGIAAIVQPGGSLRDQEVIDAANASGIPMYFTGVRGFCH

SEQ ID NO: 56313 - DNA, 1473 bp, Neorickettsia sennetsu str. Miyayama
  CDS (1)..(1473): transl_table=11
atgataaaaagagcgcttatatccgtttacgataagacggatctcttgcctctggcacacaaattacaagctgcaaatgttgaaatcattgcaactggaaagacacataaatatctcctagagaatcaaatcagagcaatcaatttatctgattatacgcaccaaccagaaatactaggtggtagggtgaaaacgctgcatcccctaatacacgcaggcttgctggcagatccggctttacacgaagctgaaatgcaaacactgacaataaaacaaatagatctggtagttgtaaatctttacccatttgaaaagtgcgtaaatagtggtgccccagaaagtgaaattatagaaaacatagatattggtggtgtttcactattaaggtctgcagctaagaattttaaaaatgtttgtgtcctctctgacccaagcgattacggtacattcgacgtaaacccaactttatctttcagaactaaaatggcaagaaaagcatttgcacgggtcgcaagatatgactgtaagatagcagaatggttcgcttcctctacttctttgccagaggtgctaaatctatctgtcatgaagaaaaatgatttcagatacggtgaaaatccccatcagaacgcatctttctactctaatggagagtttccactcacaaaacttcagggtaaagaactaagttataacaacctgctcgacctagacagcgcattgtcgattgtgacaaacttcactgaacctacttgtgcaattattaaacacagtaatccctgcggtgtagcctcacacaaatccagtctggaacaggcatacgagaaggcactcgctgcagattcgttaagtgcttttggtggtgtagttgcattgaatcaaattgttactaggaacgtggcagaaaagcttttgaataccttctttgaagtcatcgttgcttatggaatcacacaggacgctatatttctcttttcaaacaaaccaaatttacgcatccttacatgcaagggttatactgcaccagaaaaacacatgctcagtttgctcgggggactcttagtacaatctggaaatacaaaattatttcaggactttgatattgtcacaaaaagacaaccaacaaatgaagaagttaatcaacttatttttgcctggaagatctgcaaatatgtcaagtcaaacgcaatagtgactgcccacgattacacaactgtaggaataggtgccggtcaaatgagccgcgttaagagtgtagaaatagcactgggaaaaagcaaagtcgggcagcctcttgcgatggcgtcggatgcgttctttccatttgcggatagtatagagttagcagcaaagagtggtgtaaagtcaattatccaaccaggtggctcaatcagagataaagaagtaatagaagcagccgatcatcataacattgcgatgatatttacgcgaatgaggcatttcagacactga

SEQ ID NO: 56314 - protein, 490 aa, Neorickettsia sennetsu str. Miyayama
MIKRALISVYDKTDLLPLAHKLQAANVEIIATGKTHKYLLENQIRAINLSDYTHQPEILGGRVKTLHPLIHAGLLADPALHEAEMQTLTIKQIDLVVVNLYPFEKCVNSGAPESEIIENIDIGGVSLLRSAAKNFKNVCVLSDPSDYGTFDVNPTLSFRTKMARKAFARVARYDCKIAEWFASSTSLPEVLNLSVMKKNDFRYGENPHQNASFYSNGEFPLTKLQGKELSYNNLLDLDSALSIVTNFTEPTCAIIKHSNPCGVASHKSSLEQAYEKALAADSLSAFGGVVALNQIVTRNVAEKLLNTFFEVIVAYGITQDAIFLFSNKPNLRILTCKGYTAPEKHMLSLLGGLLVQSGNTKLFQDFDIVTKRQPTNEEVNQLIFAWKICKYVKSNAIVTAHDYTTVGIGAGQMSRVKSVEIALGKSKVGQPLAMASDAFFPFADSIELAAKSGVKSIIQPGGSIRDKEVIEAADHHNIAMIFTRMRHFRH

SEQ ID NO: 56315 - DNA, 1548 bp, Francisella tularensis subsp. holarctica
  CDS (1)..(1548): transl_table=11
atgtcaaaaataaaaagggtactaatatctgtatctgataaaacaggtatcattgaatttgccaaagaattaagtaagtataacatcgaaatactttcaacaggtggaacttcaaaaacccttaaagatgctggaataaacgtaatagatgtttcagagcatacacaatttccagaaattatgaatggtcgtgtaaaaacacttcatccactaattcatggtggtatcttagccgatagagataatcctgagcatctcgatgcgatgctaaaaaatcatattggacaaatagatatggtagtcgttaacttatacccttttgtcaatacagttaaatccggtgctgattttgatacctgtatcgaaaacatagatatcggcggaccttctatggtgagatcatgtgcaaaaaatcataaacacacaactatagtgaccaaccctagtcaatatgatctagttatcaaagagatggctgagaatgatggcaaaactactctagcaacacgtcgtgaatttgctaaagaagcgtttgcacatactgccgaatatgatagtcatattgcaaactggtttagtaaagagctagatgaagagtatcctgagaaacttttttctgtaggaactctaaaacaggttttaagatatggcgaaaatcctcatcaaaaagcagctgtatactctacagatgctgactttgtaagcattacaaatgcaagacaattacaaggcaaagaattatcgtataataacctaaatgatgccgatggtgcttttgagatggtttgtgagtattcagaaccctcttgtgcaattatcaaacatgctaatccttgtggtatcgcttctggtaaaaatgcttttgaagcttggacaaaagctctagcttgtgatccaatttcagcttttggtggaattgttgcgtttaactgtgaagttgacaaagagtttgctgaatctctaggtaaaatgtttttagaagtaataattgcaccaagctatactcaagaagctctagatattttagcagctaagaaaaacttacgcgtattagaaactggtaaagtttttgatacaaaatcatcacgtatgataagtaaaaatattcatggtggaatactatctcaatcttatgataacggtggcgttgacattaattactgtaaagttgttacagatagagcgccaactgacaaagagtgggctgatttaatgtttgcctggaaagctgttaaatacgtcaaatcaaatgcaattgtctatgctagagatacccaaacagtaggaattggtgctggacagatgagtcgagttgattctgcacgtattggtgctgaaaaagcccaagctcatcaaggtgctaaaggttctgctgtcgcatctgatgctttcttcccttttgctgacggtttagaagaatgtatcaaagctggagcaacagcggtaattcaaccaggcggttcaaaaaatgatcaagaagttattgatgctgctaacaaagctggtatcactatggtcttcacaaatatgagacattttagacactaa

SEQ ID NO: 56316 - protein, 515 aa, Francisella tularensis subsp. holarctica
MSKIKRVLISVSDKTGIIEFAKELSKYNIEILSTGGTSKTLKDAGINVIDVSEHTQFPEIMNGRVKTLHPLIHGGILADRDNPEHLDAMLKNHIGQIDMVVVNLYPFVNTVKSGADFDTCIENIDIGGPSMVRSCAKNHKHTTIVTNPSQYDLVIKEMAENDGKTTLATRREFAKEAFAHTAEYDSHIANWFSKELDEEYPEKLFSVGTLKQVLRYGENPHQKAAVYSTDADFVSITNARQLQGKELSYNNLNDADGAFEMVCEYSEPSCAIIKHANPCGIASGKNAFEAWTKALACDPISAFGGIVAFNCEVDKEFAESLGKMFLEVIIAPSYTQEALDILAAKKNLRVLETGKVFDTKSSRMISKNIHGGILSQSYDNGGVDINYCKVVTDRAPTDKEWADLMFAWKAVKYVKSNAIVYARDTQTVGIGAGQMSRVDSARIGAEKAQAHQGAKGSAVASDAFFPFADGLEECIKAGATAVIQPGGSKNDQEVIDAANKAGITMVFTNMRHFRH

SEQ ID NO: 56317 - DNA, 1557 bp, Desulfitobacterium hafniense Y51
  CDS (1)..(1557): transl_table=11
atgaatcgtcgagctgtgctcagtgtctccaataaaacaggtcttgtggagcttgcccgaggacttgtggaattgggctttgacttgatttctaccggcggcacctttaaaacgttgaccgaagcggggctgcctgttcgctatgttaccgaggtcacgggatttccggagattctggatgggcgggtcaagacccttcatcccaggattcatgggggtattttggccagggctacggcagagcatttgcagcagctggaggacaatggcatcgggttgatcgatcttgtggtggtcaatctctatccctttaaggagaccattgccaggccgggggtttcgttccaggaggctattgaaaatatcgatattggcggtccttccatggttcgtgcggcggcaaagaatcaggagcgggtgagtatcgtcgtcaatccggagcggtacccggaggtgcttcaggccctgcgtgagcaaggggaaatctcttatgatatgcgtaaacgtttggcggcagaggcctttgcccatacagccgaatatgatcaatgcattgccgggtatttgactgccgcacttgctgaggaatccgtttcctcttcttcttcacctttccctgcaaccataacacttgggggccaaaaggctcaggatcttcgctatggggaaaaccctgctcagaaggcggccttttaccggggggcggatgcagcgggcaccttggcctatggtgaacagattcagggtaaagaattatcctataacaattggatggatatggacgcggcctgggggattgttcaggatttcagtgagccggcctgtgctattattaagcataccaatccctgcggtacagcattggggaaaactgctttggaagcttatgaaaaggccctggcagcggacccggtctcggcctttggcggaattatcgcctttaaccggaccgtcgatgctgaatgtgccgcctcacttaaggctcacttctatgaagttatcgttgcccatgagttcagctctgacgccagggcaatactacaggaaaagaaaaaccttcgtctcgtcaaagtagcacaggacgggaagccagcccatacgccctggaaagttcgttccattcaaggaggatttctaattcaggaagaggatgaggggactacgccgatctccgcatgggaagtcgtcagcaagcgccaacctgaacctgaagaacttcgtgaactggactttgcctggcgggtggtaaagcatgttaaatccaatgccattgtactggctaaagccggtcaaacccttggcgtgggagcgggacagatgaatcgggttggctcagttaagattgctttagaacaggcgggggataaagcccaaggggcttatctggcctccgatgcttttttcccattccccgattccttggaggaggcggctaaggcaggagtgcgggctgtggttcaaccggggggctccgtcagagatgctgaggttatcgaagcggctgaccgtttgaatttgattatggtgtttacgaaccgccgtcactttaagcactga

SEQ ID NO: 56318 - protein, 518 aa, Desulfitobacterium hafniense Y51
MNRRAVLSVSNKTGLVELARGLVELGFDLISTGGTFKTLTEAGLPVRYVTEVTGFPEILDGRVKTLHPRIHGGILARATAEHLQQLEDNGIGLIDLVVVNLYPFKETIARPGVSFQEAIENIDIGGPSMVRAAAKNQERVSIVVNPERYPEVLQALREQGEISYDMRKRLAAEAFAHTAEYDQCIAGYLTAALAEESVSSSSSPFPATITLGGQKAQDLRYGENPAQKAAFYRGADAAGTLAYGEQIQGKELSYNNWMDMDAAWGIVQDFSEPACAIIKHTNPCGTALGKTALEAYEKALAADPVSAFGGIIAFNRTVDAECAASLKAHFYEVIVAHEFSSDARAILQEKKNLRLVKVAQDGKPAHTPWKVRSIQGGFLIQEEDEGTTPISAWEVVSKRQPEPEELRELDFAWRVVKHVKSNAIVLAKAGQTLGVGAGQMNRVGSVKIALEQAGDKAQGAYLASDAFFPFPDSLEEAAKAGVRAVVQPGGSVRDAEVIEAADRLNLIMVFTNRRHFKH

SEQ ID NO: 56319 - DNA, 1581 bp, Saccharophagus degradans 2-40
  CDS (1)..(1581): transl_table=11
atgcccaatgttgcagattatgttcaagttaaacgcgctcttattagcgtttcggacaaaactggcattatcgaatttgcccaagcgctagcgcgccaaggtgtagaaattttttccaccggtggaaccttccgcttgctaagcgaaaacaacatcgcggcaacagaaatttcagactataccggcttcccagaaatgatgagtggacgtgtaaaaaccttacaccccaaagtccacggtggcattttagggcgcagaggcatagacgacgaagtaatgcaggaacacggcattaagccaatcgacatggttgttgttaatctttacccgtttgaaaaaaccgttgcccaaccagactgcgaattagtagatgccatcgaaaatatcgacatcggcggcccaaccatggttcgcgcagcggctaaaaaccacaatcacgtagcgatagttgtaaacagccacagttacgcttctgtgcttacagaaatggaaatgaacaacggtgcactatcgctagctacacgtttcgacttatgtgtacaagcttacgaacatacagccgcgtacgatggcgcaattgccaactacttaggcgctaaagttgaaaaagcggaagacaaattcccgcgcacctttaacacccagtttgttaaagcccaaactatgcgctacggcgaaaacccgcaccaacaagcggctttttatgtagaaaagaattctcgcgaagcaagcatttcaacggctattcaattgcaaggaaaagagctttcgtttaacaacgttgccgataccgatgccgcattagaaaccgttaaattgtttagcgagcctgcatgtgtaattgtaaaacacgccaacccttgcggcgtagcgcaagcagataacttgttagatgcttatcaaaaagcgtttgaaacagacccagaatctgcatttggcggcatcattgcttttaaccgcgagctagatgcaaaaactgcagaagctattgtagaaaagcaattcgtagaagttattatcgcgccctctgtttctcaagcagcttccgatattgttagcgctaagaaaaatgtccgtctactttcttgcggccaatggtctgcagctagcgaacacgcatttgactacaagcgcgttaacggtggcctactggtacaagatcgcgacaacggcatgattgaaacagccgacttaaaagttgttaccaaacgccagcctactgaagacgaaatacgcgatttattattcgcttggaaagtggcaaaaatggttaagtccaacgcaattgtttacggcaaagacagccgtaccattggtgtaggcgctggccaaatgagtcgcgttaactctgcccgtattgccgcaatcaaagccgagcacgcaggcttagaagttaaaggctcggtaatggcatcagacgcgttcttcccgttccgcgacggcatagataacgcagcagccgttggtattgctgccgttattcaacctggtggctctatgcgcgatgaagaaaccatcgcagctgccgacgagcacggcatggccatggtgtttaccggtatgcgccacttccgtcactaa

SEQ ID NO: 56320 - protein, 526 aa, Saccharophagus degradans 2-40
MPNVADYVQVKRALISVSDKTGIIEFAQALARQGVEIFSTGGTFRLLSENNIAATEISDYTGFPEMMSGRVKTLHPKVHGGILGRRGIDDEVMQEHGIKPIDMVVVNLYPFEKTVAQPDCELVDAIENIDIGGPTMVRAAAKNHNHVAIVVNSHSYASVLTEMEMNNGALSLATRFDLCVQAYEHTAAYDGAIANYLGAKVEKAEDKFPRTFNTQFVKAQTMRYGENPHQQAAFYVEKNSREASISTAIQLQGKELSFNNVADTDAALETVKLFSEPACVIVKHANPCGVAQADNLLDAYQKAFETDPESAFGGIIAFNRELDAKTAEAIVEKQFVEVIIAPSVSQAASDIVSAKKNVRLLSCGQWSAASEHAFDYKRVNGGLLVQDRDNGMIETADLKVVTKRQPTEDEIRDLLFAWKVAKMVKSNAIVYGKDSRTIGVGAGQMSRVNSARIAAIKAEHAGLEVKGSVMASDAFFPFRDGIDNAAAVGIAAVIQPGGSMRDEETIAAADEHGMAMVFTGMRHFRH

SEQ ID NO: 56321 - DNA, 1587 bp, Methylobacillus flagellatus KT
  CDS (1)..(1587): transl_table=11
atggctgtgatcaaacgtgcgcttatcagtgtctctgataaaaccggtattctcgaatttgccaaggcccttgccgaattcggtgtggagatactctctaccggcggtacagcaaagctgttccgcgacaacggcattcccgtcacggaggtcagtgactacaccggcttcccggaaatgctggacggacgcgtcaagacgctgcacccgaaaatccacggtggcctgcttggtcgccgcgacctgccggaacatgtcaccgccatgcaagctgccggcatcccggatatcgacatgatcgtggtcaacctctacccgttcgaagcgactgtcgcccgtcctgacgccacactggaagatgcgatcgagaatatcgacatcggcgggcccgccatggtacgttccgctgccaagaactggcaggatgttgcggtattgaccgatgcctcccaatacgaggaagtactggccgagatgcgcagcactggtggcgctaccagcaaggcgacgcgctttgccttgtctgttgccgcgttcaaccgcatcagcaattatgacggcgccatcagcgactacctttcctcctttaatgcagacggcacacgcaacgagttccccggccagatcaatggccgcctggtcaaggtgcaggatctgcgctatggcgagaacccgcatcagcaggcagcgttctaccgcgacctgtatcctgcgcccggctcgctcgtgactgcccaacaattgcagggcaaggagctttcctataacaatattgccgatgccgacgcggcatgggaatgcgtcaagagcttcgacagcacggcctgcgtcatcgtcaagcacgccaatccttgtggcgtggcactgggcgccacaccgctcgaggcctaccagaaagcgttccagaccgatccgacctccgcgttcggcggcatcattgccttcaaccacaccctggatggcgcagcagcagaggccgtttccaagcagttcgtcgaagtgttgattgcaccggactacaccgaggaagccctggcagtattcaaggccaaggccaatgtacgcgtgctcaagatcgccttgccggtaggcggcgacagcccatggagccgaggccgcaactcccatgacaccaagcgcgtcggttccggcgtactgattcagaccgcagataaccatgaaatcagcgcggccgacatcaaggtcgtcaccaagaagcaaccgacgccggaacagctggaagatctgctgtttgcctggcgtgtcgccaaatacgtaaaatccaacgccatcgtcttctgcggcaacggcatgacattgggtgtgggcgctggccagatgagccgcgtcgatagcaccagaattgccgcgatcaaggcgcagaacgccggcctgagcttgcaaggctccgctgtggcgtccgatgcgttctttccgttccgcgacggcgtggatgtcctggcggaagctggtgccagctgcgtgatccagccaggcggcagcatccgcgacgacgaagtgattgcggcggcggatgaacatgggttagtcatgatattcaccaatatccgccacttccgccattga

SEQ ID NO: 56322 - protein, 528 aa, Methylobacillus flagellatus KT
MAVIKRALISVSDKTGILEFAKALAEFGVEILSTGGTAKLFRDNGIPVTEVSDYTGFPEMLDGRVKTLHPKIHGGLLGRRDLPEHVTAMQAAGIPDIDMIVVNLYPFEATVARPDATLEDAIENIDIGGPAMVRSAAKNWQDVAVLTDASQYEEVLAEMRSTGGATSKATRFALSVAAFNRISNYDGAISDYLSSFNADGTRNEFPGQINGRLVKVQDLRYGENPHQQAAFYRDLYPAPGSLVTAQQLQGKELSYNNIADADAAWECVKSFDSTACVIVKHANPCGVALGATPLEAYQKAFQTDPTSAFGGIIAFNHTLDGAAAEAVSKQFVEVLIAPDYTEEALAVFKAKANVRVLKIALPVGGDSPWSRGRNSHDTKRVGSGVLIQTADNHEISAADIKVVTKKQPTPEQLEDLLFAWRVAKYVKSNAIVFCGNGMTLGVGAGQMSRVDSTRIAAIKAQNAGLSLQGSAVASDAFFPFRDGVDVLAEAGASCVIQPGGSIRDDEVIAAADEHGLVMIFTNIRHFRH

SEQ ID NO: 56323 - DNA, 1575 bp, Ralstonia metallidurans CH34
  CDS (1)..(1575): transl_table=11
atgatcaagcaagctcttctctccgtttcagacaaaaccggcatcgtcgacttcgcgcgcgaactcaatgcgcttggcgtcacgctgctttccaccggcggtaccgccaaattgctggccgaggccggcctgcctgtcacggaggtggccgattacacgggcttccccgagatgctcgacggccgcgtgaagacgctgcacccgaaggttcacggcggcattctggcccgtcgcgacctgccggagcacatggcagccctggccgagcacaacattccgacgatcgacctgctggtggtgaacctgtacccgttccagcagaccgtggccaaggatgactgcacgctgccggacgccatcgagaacatcgacatcggcggcccgaccatgctgcgctcggcggccaagaatcaccgcgacgtgaccgtgatcgtcgatccggccgattacgcggtggtactcggcgagatgcgcgccaatggcaacagcgtcggctacgacacgaacttccggctggctaccaaggtgttcgcccacaccgcccaatacgacggcgcaatcacgaactacctgaccagcctcggcgccgacaagtcgcaccaggcccgcagcgcctacccgcagacgctgaacctggccttcgagaaggtccaggaaatgcgctacggcgaaaacccgcaccagtcggccgcgttctaccgcgacctcaaggcctttgacggcgcgctggccaactacgtgcagttgcagggcaaggaactgtcctacaacaacatcgccgatgccgacgccgcgtgggaatgcgtcaagtcgttcgacgccgccaacagcgccgcatgcgtgatcatcaagcacgccaatccgtgcggcgtggcggttggcgcgaacgcgctggaagcctacgacaaggccttcaagaccgactcgacctcggccttcggcggcatcattgccttcaacgtcgaactggatgaagccgccgcgcaagccgtggccaagcagttcgtggaagtgctgatcgccccgtcgttcagcgcggccgcgcgcaacgtgttcgccgccaagcagaacgtgcgtctgctggagattccgctgggcaagggcgtgaatcagtacgacctgaagcgcgtgggcggcggcctgctggtgcagggcccggatgcgcgcaacgtgcagccgtccgaactgcgcgtggtgacgcgccgtcatccgacgccgaaggaaatggacgatctgatgtttgcctggcgcgtggccaagttcgtcaagtcgaacgccatcgtgttctgcggcaacggcatgacgctgggcgtgggcgcgggtcagatgagccgcgtggactcggcacgcatcgccagcatcaaggcccagaacgccggcctcacgctggcgggttcggccgtggcatcggacgcgttcttcccgttccgcgatggtctggacgtggtggtcgacgctggcgcgacttgcgtgatccagccgggcggctcgatgcgcgacgatgaagtgatcgccgccgccgacgagcgcggcatcgccatggtgttgaccggcacgcgccacttccgccactaa

SEQ ID NO: 56324 - protein, 524 aa, Ralstonia metallidurans CH34
MIKQALLSVSDKTGIVDFARELNALGVTLLSTGGTAKLLAEAGLPVTEVADYTGFPEMLDGRVKTLHPKVHGGILARRDLPEHMAALAEHNIPTIDLLVVNLYPFQQTVAKDDCTLPDAIENIDIGGPTMLRSAAKNHRDVTVIVDPADYAVVLGEMRANGNSVGYDTNFRLATKVFAHTAQYDGAITNYLTSLGADKSHQARSAYPQTLNLAFEKVQEMRYGENPHQSAAFYRDLKAFDGALANYVQLQGKELSYNNIADADAAWECVKSFDAANSAACVIIKHANPCGVAVGANALEAYDKAFKTDSTSAFGGIIAFNVELDEAAAQAVAKQFVEVLIAPSFSAAARNVFAAKQNVRLLEIPLGKGVNQYDLKRVGGGLLVQGPDARNVQPSELRVVTRRHPTPKEMDDLMFAWRVAKFVKSNAIVFCGNGMTLGVGAGQMSRVDSARIASIKAQNAGLTLAGSAVASDAFFPFRDGLDVVVDAGATCVIQPGGSMRDDEVIAAADERGIAMVLTGTRHFRH

SEQ ID NO: 56325 - DNA, 1572 bp, Acidobacteria bacterium Ellin345
  CDS (1)..(1572): transl_table=11
atggcaaaaattcgtcgcgctattctctccgttactgacaaaatcggcctgtccgacttcgcacgcacgttggcgaagcatggcgttgaactgatctccaccggcggcacggcgaagatgctgcgcgacgccggcatccccgtcaaagacatctccgaattgaccggctttcccgagatgctcgatggccgcgtgaagacccttcaccccaaggtgcatggcggcatcctgcacctgcgcgccaacgaagagcacgtggcgacggtgaaagagcacggcatccagccaatcgacatggtggtggtgaacctgtacgcgttcgaaaagacggcatcgaagcccggggcgcacttcgaagaaatcatcgagaacatcgatatcggcgggccgagcatggtgcgctcggcgggcaagaatttccaggacgtggcgatcgtcacttcgcccgaccagtacgcgcaggtcgctgaagagatggacaagagcggcggttcggtttccaagcagatgcattggaagctggcgcagcgcgcgttcgccacgaccgccgcgtacgactcagcaattgcttcggcgctggagcgcgtgatggtggacgatgccggaaagttcgacatatcgaacatccacggcggcactggtttccctgagatcttgcgactattgttccgcaaatccatggatcttcgctacggcgagaacccgcaccagaaggcggcgctctactccaacggcaccgatcttggcgtcgccaacggcaagcagctccagggcaaggagctttcgtacaacaatatcgtcgatctgcaggcagcgtgggacctggcgcaggagttcgatgagcccgtctgcgcgatcatcaagcacaccaatccgtgcggcacggcagtcagttcgatacttgtcgaagcgtataaacgtgctctcgaagccgatccggtttcggcgttcgggggtgtgattggcgtaaaccgcgagatcgacgaagcaacagcggaagaaatggcgaagcttttcctcgaagtgatcgccgctccgagtttcagcgagggagcgaaggcgcgcttcgccgcgaagaagaacttgcggctcgtcgaagtaaaggcgctcgaccagaaatacacgctgaagaatgtatccggcggcgtgctggtgcaggacaacgacattcgtccgctgaccgacgcagatttgaaagttgtcagcgagcgcaagcccactgaatccgagatgaaggacctgctcttcgcgtggaaggtctgcaagcatgtgaaatcgaatgcgatcctctacgcgaaagacggccgcagcgtgggcgtgggcgccggccagatgagccgcgtggattcagcgcgcatcggtgcgatgaaagccgtgttgcctctgaagggttgcgtcgcggcgagcgatgcgttcttcccgttccctgatggagtcgaagtcatcgccgaagctggagcgacggcgatcatccagcctggcggatcagtgaaagaccaggaagtgattgacaccgcgaaccggttgggactggcaatggtgctcacgggtgtgcggcacttccggcactaa

SEQ ID NO: 56326 - protein, 523 aa, Acidobacteria bacterium Ellin345
MAKIRRAILSVTDKIGLSDFARTLAKHGVELISTGGTAKMLRDAGIPVKDISELTGFPEMLDGRVKTLHPKVHGGILHLRANEEHVATVKEHGIQPIDMVVVNLYAFEKTASKPGAHFEEIIENIDIGGPSMVRSAGKNFQDVAIVTSPDQYAQVAEEMDKSGGSVSKQMHWKLAQRAFATTAAYDSAIASALERVMVDDAGKFDISNIHGGTGFPEILRLLFRKSMDLRYGENPHQKAALYSNGTDLGVANGKQLQGKELSYNNIVDLQAAWDLAQEFDEPVCAIIKHTNPCGTAVSSILVEAYKRALEADPVSAFGGVIGVNREIDEATAEEMAKLFLEVIAAPSFSEGAKARFAAKKNLRLVEVKALDQKYTLKNVSGGVLVQDNDIRPLTDADLKVVSERKPTESEMKDLLFAWKVCKHVKSNAILYAKDGRSVGVGAGQMSRVDSARIGAMKAVLPLKGCVAASDAFFPFPDGVEVIAEAGATAIIQPGGSVKDQEVIDTANRLGLAMVLTGVRHFRH

SEQ ID NO: 56327 - DNA, 1590 bp, Silicibacter sp. TM1040
  CDS (1)..(1590): transl_table=11
atgaccgacctccaccccgtccgccgcgcccttctgtccgtctctgacaaaaccgggctgatcgagctgggtaaatccctcgctgagcgcggggttgaactgctctcgaccggtggcactgccaaagcgctgcgcgatgccgggctgaccgtgaaggacgtctccgaggtgaccggctttcccgagatgatggatggccgcgtaaaaaccctgcatccgatggtgcatggcggccttctggctctgcgcgacaatgacgcgcatgtggccgcgatgaccgatcatggcattggcgaaatcgatctcttggtggtgaacctctacccctttgaggcggcgctgaagcgcggtgcggcctatgacgaaatgatcgagaacatcgacatcggtggtcccgcgatgatccgcgcggcggccaagaaccacgcgtttgtcaatgtggtggtggatgttgaggattacggcgtcctcttggaggagctggaccagaacgacggtcagacctcctttgccttccgtcagtggctggcacagaacgcctatgcgcgcaccgctgcctatgatgcggctgtgtcgaactggatggccggagcgatcggtcttgatgcgccgcgccgccgtgcctttgctggtcagattgcgcagacgctgcgctatggcgagaacccgcatcaggacgcggccttctacaccgatggcaccgagcgtgtgggcgtggcgaccgcagagcagttgcagggcaaggaactctcctacaacaacatcaacgacaccgacgcagcctttgaactcgtgagcgaattcgcccccgaggacggcccggccgtggcgatcatcaaacacgccaacccctgcggcgtggcgcgtggcgcaaccctcttggaggcatacaacaaggcgtttgactgcgatcgcacctcagcattcgggggcatcgttgcgctcaacatgccgcttgatgccgagaccgcagaggcaatcacccagatctttaccgaagtggtgatcgcaccgggggcctcggatgaggccaaggcgatctttgcggcgaagaagaacctgcgcctcttgatcaccgagggcctgcctaacccgcaggacgcaggcctgaccacccgtcaggtttcgggcgggatgctggtgcaggacaaggacgttggccaccgggccatggacgacctgaaagtggtgaccgaaaaggcaccgaccgaagagcagatggcggatctgctctttgcctggaaggtcgccaaacatgtgaaatccaacgcgattgtctatgtcaaagacggccagacggtgggcgtgggcgcaggccagatgagccgcgtcgactccgccacgattgcaggtgtcaaagcacagcgcatggcggatgcgatggaactgcccgaaagcctcgccaaaggctccgcagtggcgtcggatgctttctttcccttcgctgatggcctgatggaagcagcttccaatggcgccacctgcgtcattcagcccggtggctccatgcgtgatgacgaggtcatcaaggcggcgaatgacgcggggcttgccatggtctttaccggtatgcgccacttccgccactaa

SEQ ID NO: 56328 - protein, 529 aa, Silicibacter sp. TM1040
MTDLHPVRRALLSVSDKTGLIELGKSLAERGVELLSTGGTAKALRDAGLTVKDVSEVTGFPEMMDGRVKTLHPMVHGGLLALRDNDAHVAAMTDHGIGEIDLLVVNLYPFEAALKRGAAYDEMIENIDIGGPAMIRAAAKNHAFVNVVVDVEDYGVLLEELDQNDGQTSFAFRQWLAQNAYARTAAYDAAVSNWMAGAIGLDAPRRRAFAGQIAQTLRYGENPHQDAAFYTDGTERVGVATAEQLQGKELSYNNINDTDAAFELVSEFAPEDGPAVAIIKHANPCGVARGATLLEAYNKAFDCDRTSAFGGIVALNMPLDAETAEAITQIFTEVVIAPGASDEAKAIFAAKKNLRLLITEGLPNPQDAGLTTRQVSGGMLVQDKDVGHRAMDDLKVVTEKAPTEEQMADLLFAWKVAKHVKSNAIVYVKDGQTVGVGAGQMSRVDSATIAGVKAQRMADAMELPESLAKGSAVASDAFFPFADGLMEAASNGATCVIQPGGSMRDDEVIKAANDAGLAMVFTGMRHFRH

SEQ ID NO: 56329 - DNA, 1545 bp, Myxococcus xanthus DK 1622
  CDS (1)..(1545): transl_table=11
gtgctggctctcctgagcgtttctgataagcgaggtctggttcccttcgcccaggggctcgtccgcctgggcttccggttgttgtccaccgggggcacgctggaggcgctcaagggcgcgggggtgcccgtcaacaaggtgtccgagcacacgcagagccccgagattctgggtggccgcgtgaagacgctccacccccgcatccacggcggcatcctgggacggctggagctggaggccgaccgggaggagatgaaggcgcacggcatcgagcccatctccctggtcgcggtgaacctgtatccattccggcagacggtggcctcgggcgccgcggagccggaggtcatcgagcagattgatatcggcgggcccgcgatggtgcgcgcctccgcgaagaacttccggcacgtctcggtggtggtggacccggacgactatccggcggtgctggcggagctggagcagcagaaggcggtgagcgaggacacgcggcgccggctgatgcgcaaggccttcgcgcacacggcggcctacgacgcctccatctccgcgtggctgtccgcgcaggcgggcgagccgttcccgggggagctgtcgttggcgttccagaagtcgcaggacctgcgctacggggagaacccgcatcagcgcggcgccttctaccgcgagcacgccgcgccccaggagccgacggtcgccttcgccaaggtgctgcagggcaaggagctgtcgtacaacaacatcctggacctggacgcggcgctgggcctgctgctggagttcccggaggcccccgcggccgtcatcatcaagcacaacacgccctgcggcgtggcggtggacgccgccttggtgaaggcctaccgcacggcccgcgcggtggacgaggtctccgccttcgggggcatcgtcgcgctcaaccgcgaggtggacgcggccacggcccaggccatggcggagacgttcctggaggcggtcatcgcgccgtcgtactccccggaggcgttgcaggtgctggcgacgaagaagaacctgcggctcctggaggcgggccccgcgttggccagtccccaggcccggccgcgtgcccaactggacgctcgcagcgtgtccgggggcatgctgctgatggaccgggactcggtggagccgccgctgtcgtggaaggtggtctccaagcgggctcccacgccggaggaggagcaggccatgcgcttcgcctggaaggtgtgcaaacacgtcaagagcaacgccatcgtcttcgcctccggtgaccagctcctggcgcagggcggggggcagacgaaccgggtggattcggtccgcatcgcgatgcagcgcggcggagcggccctcaggggcagcgcggtggcctcggacgccttcttcccgttccgggatgggctggacgaggccgcccgggcgggggccacctgtgtcgtacaacccggcggttcggtccgtgacgcggagttgattgccgccgcggatgaacatgggatggccatggtgctgacgggagtgcgacacttccggcactga

SEQ ID NO: 56330 - protein, 514 aa, Myxococcus xanthus DK 1622
MLALLSVSDKRGLVPFAQGLVRLGFRLLSTGGTLEALKGAGVPVNKVSEHTQSPEILGGRVKTLHPRIHGGILGRLELEADREEMKAHGIEPISLVAVNLYPFRQTVASGAAEPEVIEQIDIGGPAMVRASAKNFRHVSVVVDPDDYPAVLAELEQQKAVSEDTRRRLMRKAFAHTAAYDASISAWLSAQAGEPFPGELSLAFQKSQDLRYGENPHQRGAFYREHAAPQEPTVAFAKVLQGKELSYNNILDLDAALGLLLEFPEAPAAVIIKHNTPCGVAVDAALVKAYRTARAVDEVSAFGGIVALNREVDAATAQAMAETFLEAVIAPSYSPEALQVLATKKNLRLLEAGPALASPQARPRAQLDARSVSGGMLLMDRDSVEPPLSWKVVSKRAPTPEEEQAMRFAWKVCKHVKSNAIVFASGDQLLAQGGGQTNRVDSVRIAMQRGGAALRGSAVASDAFFPFRDGLDEAARAGATCVVQPGGSVRDAELIAAADEHGMAMVLTGVRHFRH

SEQ ID NO: 56331 - DNA, 1557 bp, Rhodococcus sp. RHA1
  CDS (1)..(1557): transl_table=11
gtgagtgaacgcaaggcagtacgccgagcgctcgtcagcgtctacgacaagaccggtctggtcgaactggctacgggcctgcacaaggcaggcgtcgagctggtgtcgacagggtcgaccgcagcgaagatcgccgacgccggcatcccggtcacccccgtcgaggcgctgacgggcttccccgaatgcctcgagggccgggtcaagacgctgcatccgcgggtgcacgccggcatcctcgccgacacccggaagccggagcaccttgcgcagctcgaggaactcggcatcgaggcgttccagctggtggtcgtgaacctgtatccgttcacgcagaccgtcgcatcgggtgcgacccccgacgagtgcgtcgagcagatcgacatcggcgggccgtccatggtgcgcgccgccgcgaagaaccacccgtcggtcgcggtcgtggtggatcccgcccgctacgacgacgtgctcaccgcggtcgccgacggcggtttcacgctgcccgagcgcaccgcgctcgccgcgcaggcgttccagcacaccgcgtcgtacgacgtcgcggtcgccagctggatgacgtccacgctggttgaacccggtgactcgcagttccccgagtgggcaggcgccacctgggaccgctcggccgtcctgcggtacggcgagaacccgcaccaggctgccgccctctacgtgaaccctgccgccccggccggtctggcccaggcggagcagttgcacggcaaggaaatgtcgtacaacaactacaccgacggtgacgcagcctggcgtgcggccttcgacttcagtgagccggctgtcgcgatcatcaagcacgcgaacccgtgtggcatcgcggtcggagccgacatcgccgaggcgcaccgcaaggcgcacgcctgcgacccggtcagcgcgtacggcggggtcatcgccgcgaaccgcgagatcaccgtcgagatggccgagcaggtcgccgagatcttcaccgaggtgatcatcgccccgtcctacgcggacggtgcgctcggagtcttgcagcgcaagaagaacattcgcgtcctccttgcccaggcacccaccgcgacgggaatcgaactgcgtcccgtgtccgggggagcgctcctccaggagcgcgacgtgctcgacgccgagggtgacgaccccgccaactggacgctggccgtcggcgacgccgccgacgaacagaccctgaaggatctcgagttcgcgtggcgcgcgtgccgttcggtgaaatccaacgcgatcctgctcgcctccgacggtgcgtcggtcggcgtcggcatgggccaggtcaaccgcgtcgactccgcgcaccttgcggtgcagcgggccggtgaccgggtggtcgggtcggtgggcgcgtcggacgccttcttcccgttccccgacggactgcaggtgctcgcgaacgcaggcgtcaaggcagtcgtgcagccgggtggttccgtccgcgacaacgaggtgatcgatgcggccaaggaagccggcatcaccatgtacctgacgggtgcgcggcacttcgcgcactag

SEQ ID NO: 56332 - protein, 518 aa, Rhodococcus sp. RHA1
MSERKAVRRALVSVYDKTGLVELATGLHKAGVELVSTGSTAAKIADAGIPVTPVEALTGFPECLEGRVKTLHPRVHAGILADTRKPEHLAQLEELGIEAFQLVVVNLYPFTQTVASGATPDECVEQIDIGGPSMVRAAAKNHPSVAVVVDPARYDDVLTAVADGGFTLPERTALAAQAFQHTASYDVAVASWMTSTLVEPGDSQFPEWAGATWDRSAVLRYGENPHQAAALYVNPAAPAGLAQAEQLHGKEMSYNNYTDGDAAWRAAFDFSEPAVAIIKHANPCGIAVGADIAEAHRKAHACDPVSAYGGVIAANREITVEMAEQVAEIFTEVIIAPSYADGALGVLQRKKNIRVLLAQAPTATGIELRPVSGGALLQERDVLDAEGDDPANWTLAVGDAADEQTLKDLEFAWRACRSVKSNAILLASDGASVGVGMGQVNRVDSAHLAVQRAGDRVVGSVGASDAFFPFPDGLQVLANAGVKAVVQPGGSVRDNEVIDAAKEAGITMYLTGARHFAH

SEQ ID NO: 56333 - DNA, 1599 bp, Haemophilus somnus 129PT
  CDS (1)..(1599): transl_table=11
atgcaattaaatcatcctattcgtcaagcattactcagcgtttcagataaatcaggaattgttgaatttgcacaaggtttagttaaacgaggtgtaaaactattatcaacaggggggacggcaaaattactcgctgaaaacgggattcctgttacggaagtatctgattatacaggctttcctgaaatgatggagggacgtgtaaaaaccttgcatcctaaaattcatggaggcattttaggtcgccgtggtatagatgatgaagttatgatgcaacatcaaattgatgctattgatatggttgtagtgaacttatatccttttgcggcaactgtagcaaaacctgattgcacacttgaagatgcagtagaaaacattgatattggcggtccgacaatggtacgttctgccgcaaaaaatcatcaacatgtggctattgtagtcaataatagcgattttaatgcaattcttgctgaaatggatcaaaatcgaaatagtttaacattagagacaagatttgatttagccattaaagcgtttgaacataccgcacaatatgacagcatgatcgccaattatttcggacaaatggtaaaaccttatttcagagctgaagaagaagctgaagcgaagtgcggtcaatttccacgaactttaaatcttaattttatacgtaaacaatctatgcgttatggtgaaaacggtcatcaaaaagcagcattctatgtagaacaagacgtaaaagaagcaagtgtctcaaccgctaaacagttacaaggtaaagcactttcttataataatattgccgacactgatgccgcacttgaatgtgtgaaatcgttttccgagccggcttgtgttattgttaagcatgctaacccttgcggtgtagcactgggcaaggatattctcgaagcctataatcgagcttaccaaacggatccaacctcagctttcggtggaattattgcatttaatcgtgagttagatgaagacacggcaaaagccattattgagcggcaattcgttgaagtgatcattgcaccgaccgtcagttccgccgcccaagaaattgtaaaaagtaagaaaaatgttcgcttattgacgtgtggcaattgggaaagtgcaatacaacgcttggattttaaacgtgtcaatggcggtttgttggtacaagaggctgatttatctatggtggatttagcagatcttgaagtagtcagtaaacgtcaaccgaccaaacaagagttggaagatcttttattctgttggaaagtggcaaaatttgtgaaatccaacgctattgtatacgctaaaaataatcaaactgtagggattggtgccggacaaatgagccgtgtttattcagcgaaaattgcagggatcaaagcaaaagatgaaggtttggaagtaaaaggctgtgtaatggcatcggatgctttctttccgttccgtgatggcattgatgcagccgcaaaagttggtattgaatgcgtaatccatccgggcggttcaatgcgtgatcaagaagttatcgatgccgccaatgagcataatatggtaatggtactcactaaaatgcgtcattttagacattaa

SEQ ID NO: 56334 - protein, 532 aa, Haemophilus somnus 129PT
MQLNHPIRQALLSVSDKSGIVEFAQGLVKRGVKLLSTGGTAKLLAENGIPVTEVSDYTGFPEMMEGRVKTLHPKIHGGILGRRGIDDEVMMQHQIDAIDMVVVNLYPFAATVAKPDCTLEDAVENIDIGGPTMVRSAAKNHQHVAIVVNNSDFNAILAEMDQNRNSLTLETRFDLAIKAFEHTAQYDSMIANYFGQMVKPYFRAEEEAEAKCGQFPRTLNLNFIRKQSMRYGENGHQKAAFYVEQDVKEASVSTAKQLQGKALSYNNIADTDAALECVKSFSEPACVIVKHANPCGVALGKDILEAYNRAYQTDPTSAFGGIIAFNRELDEDTAKAIIERQFVEVIIAPTVSSAAQEIVKSKKNVRLLTCGNWESAIQRLDFKRVNGGLLVQEADLSMVDLADLEVVSKRQPTKQELEDLLFCWKVAKFVKSNAIVYAKNNQTVGIGAGQMSRVYSAKIAGIKAKDEGLEVKGCVMASDAFFPFRDGIDAAAKVGIECVIHPGGSMRDQEVIDAANEHNMVMVLTKMRHFRH

SEQ ID NO: 56335 - DNA, 1554 bp, Trichodesmium erythraeum IMS101
  CDS (1)..(1554): transl_table=11
atgaaacgtttagcattacttagtacatctgataaaacaggtctgattgatttagcaaaaagtctagttacagaatttgactatgaaataattagtagtggcggtactgctaaaactctcaaagatgctggaatttatgttactaaggtatctgactatacgggatttccagaaattttaggaggtagagttaaaacattacatcctcgcattcatgggggtattttagcaagaaaagatttgcctcaagatgttgaagaactaaatgctaataatattcgacctattgacttagttgttgttaatttatacccctttgaagaaacaatttctaaaccagaagttactctggcagaagcaattgaaaaaattgatattggcggacctgcaatgttaagagcatcagctaaaaattttgctcatctgacagttttatgcaaccattttcaatacaattcttatttagaagagttaagaaaaaatgccggggaagtatccttagaatttcgtcaaaaatgtgcattagcaggatttaaacataccgcaacttacgaccaggcgatcgctacttatttacaggagcaacaaacaacttctgagtcggaaaaatcagaaaaagaaatattttttctctctggcaaaaaaattaaaactttgcgttatggagaaaaccctcatcaatatgcaacttggtatcaaagaggaattaatgctagtggttggggtgcaagtaaaattattcaaggtaaagaattaagctataataatttagtagatttagaagcagcaagacggattattatagaattttctgatgctccgactgtagcaattcttaaacatacaaatccttgtggagttgcagttgatgaaactattttggcagcttatgaaagagcttttgccggagattcagtttcagcttttggaggaattgttgctttaaataaatctattgatgcagcaactgctaaggcaatgactaagacctttttggaatgtgtagttgctcctggatgtgaacctgaagcggagaaaatttttaaatctaaatctaaattaagagtcttaatttcaccatatttcaaacagagtgaaccggaaactataaaagtaatttctgggggttttttagtacaagatactgatgatacgatagataattatagtgattggaaaatcgttacagaaaaacaaccaactactgaacaaatagaagaattaatgtttgcttggaaggtggtgaagcacgttaagtctaatgcaattgttgtgacaaaaaatcgagctactgttggtattggtgcgggtcaaatgaatagagtcggggcagtaaaaatagctttggaacaagcaggggaaaaagctattggaggtgtattagctagtgacgcttttttcccttttgatgattccgtaaaaacagcagcagcagcaggagtaactgcaattattcaaccaggtggtagtctgaaagataaagattctattgctgcagcaaatgaattaggtttgataatgatactcaccggaattcgtcactttttacattag

SEQ ID NO: 56336 - protein, 517 aa, Trichodesmium erythraeum IMS101
MKRLALLSTSDKTGLIDLAKSLVTEFDYEIISSGGTAKTLKDAGIYVTKVSDYTGFPEILGGRVKTLHPRIHGGILARKDLPQDVEELNANNIRPIDLVVVNLYPFEETISKPEVTLAEAIEKIDIGGPAMLRASAKNFAHLTVLCNHFQYNSYLEELRKNAGEVSLEFRQKCALAGFKHTATYDQAIATYLQEQQTTSESEKSEKEIFFLSGKKIKTLRYGENPHQYATWYQRGINASGWGASKIIQGKELSYNNLVDLEAARRIIIEFSDAPTVAILKHTNPCGVAVDETILAAYERAFAGDSVSAFGGIVALNKSIDAATAKAMTKTFLECVVAPGCEPEAEKIFKSKSKLRVLISPYFKQSEPETIKVISGGFLVQDTDDTIDNYSDWKIVTEKQPTTEQIEELMFAWKVVKHVKSNAIVVTKNRATVGIGAGQMNRVGAVKIALEQAGEKAIGGVLASDAFFPFDDSVKTAAAAGVTAIIQPGGSLKDKDSIAAANELGLIMILTGIRHFLH

SEQ ID NO: 56337 - DNA, 1590 bp, Synechococcus sp. CC9311
  CDS (1)..(1590): transl_table=11
atggctccaactgccttgctgagcgtgtctgataagcggggggtggtgccccttgctgaggctctccatcggctccatggctatcagctgctgtccagcggtggaaccgccaaagtgcttcaagaggctggattgcctgtcacacgagtggcagaccacaccggtgctcctgagattcttggcggtcgcgttaaaaccctccaccctcgaatccatggcggaatcttggcgcgacgaggagatccagcccatgaggcggatctcctcgaacagcagattgatcccatcgatgtggtggtagtgaacctttatccgtttagggaaaccgttgcaaccccagatgtgagttgggacgctgccattgagaacatcgacatcggcggacccaccatggttcgatctgcggcgaaaaatcatgcccatgtcgctgtgctcaccagtcctgagcagtacgacaggtttttgaaagcgctgtctggatcggctggaggcgtgaacgccaatgtgcgccggcagttggccttagaggcttttgcccatacggctgcgtatgacgtcgccattagtcgctggatgcaatcccgccctgagctgcaacctgatgttgaggccgcggctccagcagaagctttgccttggcttgaagcgcttccgctccggcagacgttgcgctacggggagaacccgcaccagaaagcggcttggtttagcagtcccatgggatgggggggggccaagcagcttcaaggcaaggcgctcagcaccaataatctgctcgatttggaagcggccctggccaccgttcgtgagtttggttatggatcatctggcctccatcccgctcagcaggcggctgcggtggtggtgaagcacaccaatccctgtggcgtggctgtgggtgatggcgtgggcatagccctcactagagctctcgatggcgatcgaatcagcgcctttggcggcattgttgccctgaatgcggtggttgatggccctgcggctaaggagctcaccagcttgtttttggagtgtgtcgtggcgcctgggtacagctcagaggcgcttgagattttggcggccaaaggcaatctccgcctgcttgagttgcctcctgaggcgattgatgctgcccccaaagatcatgtgcgcagcattcttggtggtgtgttggtgcaggatctcgacgatcaaccgatcgatccctccgcttggacggtggcgagccagcgtcaacccaccacggctgaaaccgctgatctcagatttgcttggcagcttgtacgtcacgtgcgttcgaatgcgattttggtcgcacgtgatgggcagagcctgggagttggggctggtcagatgaatcgagttggctctgccagaattgctttagaggctgctggtgagcaagcagtgggggctgtgctcgcgagtgatggtttcttcccgtttgatgacaccgttcgccttgccgcaagccatggtattaaggccgttatccatccaggcggcagccttcgggatgctgactcgatcaaagcctgcgatgaactcggtttggccatggtgctgaccggacgccgtcatttccttcactaa

SEQ ID NO: 56338 - protein, 529 aa, Synechococcus sp. CC9311
MAPTALLSVSDKRGVVPLAEALHRLHGYQLLSSGGTAKVLQEAGLPVTRVADHTGAPEILGGRVKTLHPRIHGGILARRGDPAHEADLLEQQIDPIDVVVVNLYPFRETVATPDVSWDAAIENIDIGGPTMVRSAAKNHAHVAVLTSPEQYDRFLKALSGSAGGVNANVRRQLALEAFAHTAAYDVAISRWMQSRPELQPDVEAAAPAEALPWLEALPLRQTLRYGENPHQKAAWFSSPMGWGGAKQLQGKALSTNNLLDLEAALATVREFGYGSSGLHPAQQAAAVVVKHTNPCGVAVGDGVGIALTRALDGDRISAFGGIVALNAVVDGPAAKELTSLFLECVVAPGYSSEALEILAAKGNLRLLELPPEAIDAAPKDHVRSILGGVLVQDLDDQPIDPSAWTVASQRQPTTAETADLRFAWQLVRHVRSNAILVARDGQSLGVGAGQMNRVGSARIALEAAGEQAVGAVLASDGFFPFDDTVRLAASHGIKAVIHPGGSLRDADSIKACDELGLAMVLTGRRHFLH

SEQ ID NO: 56339 - DNA, 1581 bp, Alkalilimnicola ehrlichei MLHE-1
  CDS (1)..(1581): transl_table=11
atggccacagtaagtgacctccggccggtgcgccgggcgctcatcagtgtttccgacaagaccggcatcgagcggtttgcccgggccctgcacgagcagggggtggagctgctctccaccggcggcaccgcccgactgctgcgcgaggccggcctgccggtcaccgaggtctccgactacaccggtttccccgagatcatggccggccgggtgaaaaccctgcaccccaaggtccacggcggcctgctggggcggcggggcaccgacgatgaggtcatggcggagcagggcattcagcccatcgacctgcttgcggtcaacctctatcccttcgagcgcaccgtggccgatccggactgccgccttgaggaggccatcgagaacatcgacatcggcggtccggccatgctgcgcgccgcggcaaagaaccatgccgatgtggcggtggtcaccgatccggccgaccacgaggcgttgatcgatgagctcaagcgtgaaggcggtctggggcgggccacccgcttcaacctggcagtgaaggcgttcgagcacacggcccgttacgacggggccatcgccagttacctgggtgcccggctgggcgagggtgaaccggcgcggttcccgcgcaccttcaatgtgcagttcgagaaggcgctggatatgcgctacggtgagaacccgcaccaggcggccgccttctaccgcgagcacgatgttgtggagccctgtgtcgccactgccgagcagtatcagggcaaggcgctgtcctacaacaacgtggccgataccgatgcggcgctggagtgtgtcaaggccttcgaggcgccggcctgtgtcatcgtcaagcacgccaacccctgcggggtggccgtcggccaggacctgctgagtgcctatgagcgcgcctttgaggcggaccccacctcggccttcggcggcatcatcgccttcaaccgcgagttggacggcaggaccgcggcggcgatcgtcgagcgccagtttgtggaggtgatcatcgcccccagcgtcaccgcggaggcccgcgaggccgtggccgcccgcaagaacgtccgcctgctggcctgcggccagtgggggccggagcgggccccgggcctggactacaagcgggtgggcggcggcctgctggtgcaggagcgggacatcgcccgggtgccgcagggggcgctcaaggtggtcacccgcaagcagccggacgagcagacctggcaggacctgctgtttgcctgggcggtggtgcgctacgtcaagtccaacgccatcgtattcgccgccgacgggcgcagcctgggcatcggcgccgggcagatgagccgggtgttcagcacccgtatcgcccgcgacaaggctgccgaggccggactggaggtcaagggcgcggccatggcctccgacgccttcttccccttccgcgacggcctcgaccaggcggcggaggcgggcattggggcggtgatccagccgggtggctcgatgcgcgaccaagaggtgatcgacgccgctgacgagcatgggctggtcatggtattcacgggtatgcggcacttccggcactga

SEQ ID NO: 56340 - protein, 526 aa, Alkalilimnicola ehrlichei MLHE-1
MATVSDLRPVRRALISVSDKTGIERFARALHEQGVELLSTGGTARLLREAGLPVTEVSDYTGFPEIMAGRVKTLHPKVHGGLLGRRGTDDEVMAEQGIQPIDLLAVNLYPFERTVADPDCRLEEAIENIDIGGPAMLRAAAKNHADVAVVTDPADHEALIDELKREGGLGRATRFNLAVKAFEHTARYDGAIASYLGARLGEGEPARFPRTFNVQFEKALDMRYGENPHQAAAFYREHDVVEPCVATAEQYQGKALSYNNVADTDAALECVKAFEAPACVIVKHANPCGVAVGQDLLSAYERAFEADPTSAFGGIIAFNRELDGRTAAAIVERQFVEVIIAPSVTAEAREAVAARKNVRLLACGQWGPERAPGLDYKRVGGGLLVQERDIARVPQGALKVVTRKQPDEQTWQDLLFAWAVVRYVKSNAIVFAADGRSLGIGAGQMSRVFSTRIARDKAAEAGLEVKGAAMASDAFFPFRDGLDQAAEAGIGAVIQPGGSMRDQEVIDAADEHGLVMVFTGMRHFRH

SEQ ID NO: 56341 - DNA, 1590 bp, Hyphomonas neptunium ATCC 15444
  CDS (1)..(1590): transl_table=11
atgtccggcgcccccgtcaccctccgccgcgcgcttatctccgtgtccgacaagaccggcctgatcgagcaggcaaagcgcctcgccgccctcggtgtcgagcttgtctctacggggggcacctccaaggcgctgaaagacgccggcctcgcggtcaaagacgtgtcagacctcaccggcttccccgaaatgatggacgggcgcgtcaagacgctccacccggccgtgcatggcggcctcctttacctgcgcgacaacccctcccacgtgaaagacgcggcagaccacggcatcggcgccatcgacctgatctacgtcaacctctaccccttcgaggccacggtggcttctggcgcagactttgaaacctgcatcgagaatatcgacatcggtggccccgccatgctgcgcgccgccgccaagaacggcgccttcgtggccgtctgcaccgatggcggcgatgtcgacgccgtcctcgcccaggccgaggccaatgccggcgcggtgagccacgccctcctccgccgcctcgccgcgaaaacttacgcccgcaccgccgcctatgacgcggccatttccggctggtacgccaagcagatcggcgaggacgcgccggactgggccgccattggtggcaagctccagcaatccctgcgctatggcgaaaacccccaccagaaagccgccttctacgtcaccggcgaaaagcgcccgggcgtggccaccgcgcgccagcttcagggtaaggagctttcctacaacaacatcaacgacaccgacgcggcctatgagctgatcggggagctgggcagcgacaaacccgccgtcgccatcatcaagcacgccaacccctgcggcgtggcgctcggcccgaacatcatcgaagcctacaaagcggccctcgcctgcgaccccacatcggccttcggcggcatcgtcgccctcaaccgcccgctggacgaggaaacggcgaaggtgatcacagagatcttcaccgaagtcgtcatcgcgccgggcgcggacgcggcagctgaagcgatctttgccaagaagaaaaacctccgcctcctgatcactgacgacctgcccgacccggccaccaccggcacgttcgtgaaaaccgtcgccggcggcttcctgctgcaagaccgcgacgcgggccgcatccaccttgacgaccttgaagtcgtcaccaaacgcgcgcccaccgcgcaggaactggaagacatgctgtttgcctggcgcgtcgccaagcatgtgaaatccaacaccatcgtctacgcgaaagacggcgtcaccgccggcatcggcgccggccagatgagccgcatcgacagcgcccgcatcgccgcccgcaaggcccaggacgcccaggaaaccgccggctggtccgacccgcgcaccaaaggctgcgtcgccgcctccgacgccttctttccgtttgcggatggtttgttgcaggcggcctcagccggcgccaccgccgtcatccaaccgggcggctcaatccgcgacgacgaagtgatcgccgcggcggacgaggcggggctcgcgatggtgttcacggggatgcggcacttcaggcattga

SEQ ID NO: 56342 - protein, 529 aa, Hyphomonas neptunium ATCC 15444
MSGAPVTLRRALISVSDKTGLIEQAKRLAALGVELVSTGGTSKALKDAGLAVKDVSDLTGFPEMMDGRVKTLHPAVHGGLLYLRDNPSHVKDAADHGIGAIDLIYVNLYPFEATVASGADFETCIENIDIGGPAMLRAAAKNGAFVAVCTDGGDVDAVLAQAEANAGAVSHALLRRLAAKTYARTAAYDAAISGWYAKQIGEDAPDWAAIGGKLQQSLRYGENPHQKAAFYVTGEKRPGVATARQLQGKELSYNNINDTDAAYELIGELGSDKPAVAIIKHANPCGVALGPNIIEAYKAALACDPTSAFGGIVALNRPLDEETAKVITEIFTEVVIAPGADAAAEAIFAKKKNLRLLITDDLPDPATTGTFVKTVAGGFLLQDRDAGRIHLDDLEVVTKRAPTAQELEDMLFAWRVAKHVKSNTIVYAKDGVTAGIGAGQMSRIDSARIAARKAQDAQETAGWSDPRTKGCVAASDAFFPFADGLLQAASAGATAVIQPGGSIRDDEVIAAADEAGLAMVFTGMRHFRH

SEQ ID NO: 56343 - DNA, 1617 bp, Rhizobium leguminosarum bv. viciae 3841
  CDS (1)..(1617): transl_table=11
atggccgtcatttccaagaagatccccgcccccgacaaggtcgaaatcaagaccgcgctcatctccgtcttcgacaagaccgggatcgtcgacctcgcccgcgccttgtctgccagaggtgtgcgtctgctttcgaccggcggcacgtttaaagcgatcactgctgccggtcttgccgtcaccgatgtttccgaaatcaccggttttccggagatcatggatgggcgtgtgaagacgctgcatccaacggtgcatggcggcctgctggcgatccgtgacgacagcgaacaccaggacgcaatgaaacagcatggcatcgagggcatcgacctcgccgtcatcaacctctatcccttcgaggaagtgcgcgcagccggcggcgactatccgacgaccgtcgagaatatcgatatcggtggtccggcgatgatccgcgcatcggccaagaaccatgcctatgtgacgaccctgacggatccggccgattatgccgagctgctggagcagctttccgcagatgacggcaagacggcctataccttccgccagcgcatggccgccaaggcctatgcccgcaccgccgcctatgatgcaatgatctccaactggttcgccgagacgctatcgatcgacacgccgcgccaccgggtcatcggcggtgcgctgaaggaagagatgcgctacggcgaaaacccgcaccagaaggccgccttctacgtgaccggcgagaagcgtccgggtgtttcgacggccgctcttctccaaggcaagcagctctcctacaacaacatcaacgatacggatgcggcctacgagctcgtcgccgagttcctgcccgagaaggcgccggcttgtgcgatcatcaagcacgccaatccctgcggcgtcgccaccggatcgagcctggtcgaggcctatcggcgggcgctcgcttgcgattccgtctccgccttcggcggcatcatcgcgctcaaccagacactggatgccgaaacggccgaagagatcgtcaagctcttcaccgaagtgattatcgctccggatgtcacggaggaggcaaaggcgatcgtcgcccgcaaaccgaacctgcggctgttgtctgccggtggcctgcccgatccgcgtgccgtgggcctgacggcaaagaccgtttccggtggcctgctcgtccagagccgcgacaacggcatggtcgaggatctggaactcaaggtcgtcaccaggcgtgcgccgacggcgcaggaacttgatgacatgaagttcgccttcaaggtcggcaaacatgtgaagtcgaatgccgtggtctatgccaaggacggccagacggccggcatcggcgccggccagatgagtcgcgtcgattctgcccgcatcgccgcgctgaaggccgaagaggctgccaaggcgcttggccttgcagtgccgatgacgcatggctcggcggtcgcctccgaagcgttcctgccttttgccgacggtcttctgtcgatgatcgccgcaggggcgacggcggttattcagccgggcggctcgatgcgcgaccaggaagtcatcgatgccgccaacgaacacggcgtcgcaatggtctttaccggcatgcgccatttccggcactga

SEQ ID NO: 56344 - protein, 538 aa, Rhizobium leguminosarum bv. viciae 3841
MAVISKKIPAPDKVEIKTALISVFDKTGIVDLARALSARGVRLLSTGGTFKAITAAGLAVTDVSEITGFPEIMDGRVKTLHPTVHGGLLAIRDDSEHQDAMKQHGIEGIDLAVINLYPFEEVRAAGGDYPTTVENIDIGGPAMIRASAKNHAYVTTLTDPADYAELLEQLSADDGKTAYTFRQRMAAKAYARTAAYDAMISNWFAETLSIDTPRHRVIGGALKEEMRYGENPHQKAAFYVTGEKRPGVSTAALLQGKQLSYNNINDTDAAYELVAEFLPEKAPACAIIKHANPCGVATGSSLVEAYRRALACDSVSAFGGIIALNQTLDAETAEEIVKLFTEVIIAPDVTEEAKAIVARKPNLRLLSAGGLPDPRAVGLTAKTVSGGLLVQSRDNGMVEDLELKVVTRRAPTAQELDDMKFAFKVGKHVKSNAVVYAKDGQTAGIGAGQMSRVDSARIAALKAEEAAKALGLAVPMTHGSAVASEAFLPFADGLLSMIAAGATAVIQPGGSMRDQEVIDAANEHGVAMVFTGMRHFRH

SEQ ID NO: 56345 - DNA, 1536 bp, Pediococcus pentosaceus ATCC 25745
  CDS (1)..(1536): transl_table=11
atgaaaactgcattactgagtgtgtcagataaaactggaatcgttgaatttgctagaggtttagttaaggcagattttagaatcatatcaacgggtggaactaaaaaagttttggaagaagctggattatctattgttagtgttgaagctattactaattttccagaaatgttggacggacgagttaagacgctacatcctgccattcacggaggattgttagcgcgccgtgacttaccggaacatttggcagccctcaaagaacataatattgatttgattgatctagtttgtgttaatctttatccgtttaaatcgactattatgcaaaatggagtgacggaagcagaagcaattgaacaaattgatattggcggtcctagtatgttacgctcagcggctaaaaattttgcatcagttttacccgtagttgatcctaaagattatcaaccagttttagctgcactagcccatcagacggacaatgttaaatttcggcgagcgttagctttgaaggtctttcagcatactgctgcttatgacactttgattgctcaatatcttggacaaaacggtgaaatttttccagatgaacttaccaagacttatactaaaaaacaagtaatgcgttatggcgaaaatagtcatcaaaaagcagccttttatgaagatgcgctacctgtaccattttcgattgctcaagctcaacaattgcacggcaaagaattgtcatacaataacatcaaggatgctgatgccgctttaaaaatgagcgccgaatttaatcaaccagccgtggttgcggttaagcatatgaatccatgtgggattggattaggtcaaaatattgaagaagcttgggaccgcgcttatgaagcagactcgatgtcaatttttggtgggattatcgtcttaaatcgaccagtagatttggcgacagcagaaaaaatgcataaactttttcttgaaattattattgcacctagttttgaaaaagaggcttttacagttttagctcaaaaaaagaacttacggattatgacggtcgattttaatcaacatcaggatgctaaagaacttgaaacagtttcagtaatgggcgggctcttggttcaagaacaggatgcggtagttgaaacggcgactgacttcaaagtggtttctaaacgtcagccaacggaaagtgaacttaaggcaatggtatttggtcaaaccgttgttaaacacgttaaaagtaatgcaattgtgattacaactgatcaacaaaccttagggattggtgcaggccaaatgaatcgaattggttcggttgaaattgcggttaaacaggctgaaggttcagccaattttaaaaatgcggtgatggcttcggatgcatttttccctatggaagattgtgttgaatatgctgctaaacatggaattaaagctatcgttgaacctggtggaagtatcaaagatcaagcttcaattgataaggcggatgagttaggaatttcattaatatttagtggacgtcgtcactttagacattaa

SEQ ID NO: 56346 - protein, 511 aa, Pediococcus pentosaceus ATCC 25745
MKTALLSVSDKTGIVEFARGLVKADFRIISTGGTKKVLEEAGLSIVSVEAITNFPEMLDGRVKTLHPAIHGGLLARRDLPEHLAALKEHNIDLIDLVCVNLYPFKSTIMQNGVTEAEAIEQIDIGGPSMLRSAAKNFASVLPVVDPKDYQPVLAALAHQTDNVKFRRALALKVFQHTAAYDTLIAQYLGQNGEIFPDELTKTYTKKQVMRYGENSHQKAAFYEDALPVPFSIAQAQQLHGKELSYNNIKDADAALKMSAEFNQPAVVAVKHMNPCGIGLGQNIEEAWDRAYEADSMSIFGGIIVLNRPVDLATAEKMHKLFLEIIIAPSFEKEAFTVLAQKKNLRIMTVDFNQHQDAKELETVSVMGGLLVQEQDAVVETATDFKVVSKRQPTESELKAMVFGQTVVKHVKSNAIVITTDQQTLGIGAGQMNRIGSVEIAVKQAEGSANFKNAVMASDAFFPMEDCVEYAAKHGIKAIVEPGGSIKDQASIDKADELGISLIFSGRRHFRH

SEQ ID NO: 56347 - DNA, 1530 bp, Oenococcus oeni PSU-1
  CDS (1)..(1530): transl_table=11
atgaaaagagcattgctaagtgtgtccgataaaagaggcttgattgattttgccaagggcctgattaaaaataattacgaaataatttcgaccggtggaactttaaaatttttgacggaggctggtgttaaagcgaaggccgttgaagaaattaccggttttcccgagatattgaatggaagagtaaaaacacttcatccaaaaattcatgccgcattacttgccaaaagagaaaattccgaacatatgaagactttggaggaacaccagattacgccgattgatttactggcagttaatctttacccttttaaggaaacgattgaaaaaaaggatgtttcctatgaccaagcaattgaaaatatcgacattggcggaccgtcgatgcttcgttctgccgctaaaaatgctcgagatgtaattgttgttgtcgatccggatgattacgattcaatattaaaagcaattgcaaacgacgatcttagtcatgactttcgacgacatttacaagcaaaaacttttcgtcatacggcagcttacgatgccttgattgccgattatctttccaaagaagaatatccagaaaagttaacggtaacttatgacaaagacttcgatttgcgttatggtgaaaatcctaatcagaccgcagccgtttatgccgatgccattccgaaagcttattcgattctgcaggcgaaaattcttcacggcaagaagttgagttacaacaatattaaagatgccgatgccgctttaaggacgattgccgattttcaagatcaaccgacagttgtgaccttaaagcacatgaacccggctgggattggccaggcaatcacaattgaaaaggcctgggacaaagctttttatgctgacgatatttctattttcggtggaatagttgttttaaaccgggaagtcgatttagccactgcacaaaaaatgcacacaatttttcttgaaattatcattgcaccaggttttagcgaggaagcttatcaaattttggcaaaaaagaaaaacttacgtttattgaccgtagctatgaccaacacattaccaaaagaactggagcttacttcagttctcggcggagcagttgttcaagaaatggatagattagttgaaaacgctgctgattttgaggtcgtttcatctgctaaaccgaccgatgagcagttggaagccttggtatttgctcaaaaagccgttaaacatgttaaatcgaatgcgattttaattgctgcacaaggtcaaacattgggcattggtgccggtcagccaaatcgaatcgattcggttaaaattgccttcaaacatgcagaagccaaaaagaattttgatcaggccgttttggcttcggatgctttttttccaatggacgattcggtcgaatttgccgctgagcatggaattaaagcgatcgttgaaccaggtggatcgatcaaggacaaagattcgattgcgatggcagataaacttggcgtggttttggttttctcacataatcgtcattttagacattaa

SEQ ID NO: 56348 - protein, 509 aa, Oenococcus oeni PSU-1
MKRALLSVSDKRGLIDFAKGLIKNNYEIISTGGTLKFLTEAGVKAKAVEEITGFPEILNGRVKTLHPKIHAALLAKRENSEHMKTLEEHQITPIDLLAVNLYPFKETIEKKDVSYDQAIENIDIGGPSMLRSAAKNARDVIVVVDPDDYDSILKAIANDDLSHDFRRHLQAKTFRHTAAYDALIADYLSKEEYPEKLTVTYDKDFDLRYGENPNQTAAVYADAIPKAYSILQAKILHGKKLSYNNIKDADAALRTIADFQDQPTVVTLKHMNPAGIGQAITIEKAWDKAFYADDISIFGGIVVLNREVDLATAQKMHTIFLEIIIAPGFSEEAYQILAKKKNLRLLTVAMTNTLPKELELTSVLGGAVVQEMDRLVENAADFEVVSSAKPTDEQLEALVFAQKAVKHVKSNAILIAAQGQTLGIGAGQPNRIDSVKIAFKHAEAKKNFDQAVLASDAFFPMDDSVEFAAEHGIKAIVEPGGSIKDKDSIAMADKLGVVLVFSHNRHFRH

SEQ ID NO: 56349 - DNA, 1527 bp, Leuconostoc mesenteroides subsp. mesenteroides ATCC 8293
  CDS (1)..(1527): transl_table=11
atgacacgagcattacttagcgtttctgataaaagtggtttaatcccttttgccaaaaatttagttgaattaggttatgaattggtatctactggcggtactcataaagtgttgatcgatgccggtttagatgttatttcaattgatgaagtaactgattttccagaaatgttggatggccgtgtaaaaactttacatcctcgtgtccatgctggtttacttgctcgtcgtgacttaccagagcacatggctaaattagcagaatttgatatcacaccgattgatatggtagttgttaatttatatcccttcaaatcaaccatccaaaaagaaggtgttactgaggcggaagcaattgaaaacattgatattggtggaccctcaatgttacgttctgcagctaaaaattttgcatcagttttgccaattgtggatccaaaagattatgatgttgttgtcaataagctaaaagctggtgaagtggatcgtgaatatcgtaagtcattagccgcaaaagtgtttcaacatactgccagttatgatgccttgattgccaattatttgacggaaacatcatttcctgaaaatctaacattagcttacgaaaaatttgatgatatgcgttacggggaaaatccacatcaaccagctgctgcctataagacagccttacctgaagcctattcggttctgaatgctgatattttacacggcaaacaattgtcatataacaatattcgtgacgctgatgcagcccttagaataattgctgaatatgaagaaacgacagttgttacagttaagcacatgaatccagctggaatagggcagggacaaactttggaagctgcttgggatcaagcctttgctgctgacgatatttcaatttttggtggtattgtagcgcttaatcgtgaagttgacgcagcaactgccgaaaagatgcatgatattttccttgaaattattattgcaccaagcttcacaccggaagcatatgaaattttagcagctaaaaaaaatcttcgtttgctgacattaccatttacaacaagtattccacaaaaattggaagtcacttccgtattaggtggggtggttgtacaagagcgtgatttggttggtgagtctgaaaataattttaccgtggtttcaaaagcacagcctactaaagaacagttacaggcaatggtttttgctcaaaaagtagtgaaacatgtgaagtcaaatgctattgttgtcgctcgtaatggtcaaacattaggcatcggtgcaggacagccgaatcgtattgattcagttgtttactcaatccaaaaggcagaaaaaaagccagggtttgatgaagcagtattagcttcagatgcatttttcccaatggatgattctgttcagtatgcagcagaacatggtattaaagcgattgttgagcctggtggatctataaaagacaaggattcgattgccaaggctgatgaattgggcgttgtcttaatcttcagtggaacacgtcactttaaacattaa

SEQ ID NO: 56350 - protein, 508 aa, Leuconostoc mesenteroides subsp. mesenteroides ATCC 8293
MTRALLSVSDKSGLIPFAKNLVELGYELVSTGGTHKVLIDAGLDVISIDEVTDFPEMLDGRVKTLHPRVHAGLLARRDLPEHMAKLAEFDITPIDMVVVNLYPFKSTIQKEGVTEAEAIENIDIGGPSMLRSAAKNFASVLPIVDPKDYDVVVNKLKAGEVDREYRKSLAAKVFQHTASYDALIANYLTETSFPENLTLAYEKFDDMRYGENPHQPAAAYKTALPEAYSVLNADILHGKQLSYNNIRDADAALRIIAEYEETTVVTVKHMNPAGIGQGQTLEAAWDQAFAADDISIFGGIVALNREVDAATAEKMHDIFLEIIIAPSFTPEAYEILAAKKNLRLLTLPFTTSIPQKLEVTSVLGGVVVQERDLVGESENNFTVVSKAQPTKEQLQAMVFAQKVVKHVKSNAIVVARNGQTLGIGAGQPNRIDSVVYSIQKAEKKPGFDEAVLASDAFFPMDDSVQYAAEHGIKAIVEPGGSIKDKDSIAKADELGVVLIFSGTRHFKH

SEQ ID NO: 56351 - DNA, 1578 bp, Nocardioides sp. JS614
  CDS (1)..(1578): transl_table=11
gtgtccgaacccgtgtccacgcccgagcaccgcatcccgatccgccgcgccctcgtctccgtctacgacaagaccgacctcgaggacctggtccgcggcctgcacgacgccggcgtcgagctggtgtcgacgggcggctcagcgaagctgatcgagggcctgggcctcccggtcaccaaggtcgaggacctgaccggcttcccggagtgcctcgacggccgggtcaagacgctgcacccgcgcgtgcacgcggggatcctcgccgaccggcgcctggactcccacgtccagcagctcgccgacctcggggtggagccgttcgacctggtggtctccaacctctacccgttccgcgagaccgtcgcgtcgggcgccacgcccgacgagtgcgtggagcagatcgacatcggcgggccctcgatggtccgggccgccgccaagaaccacccgtccgtggcgatcgtgacctcgccggagcggtacgccgacgtgctggcggccgtcgccgcaggcgggttcaccctcgagcagcgcaaggtgctggcagccgaggcgttcacccacaccgcggcctacgacgtcgcggtcgcgggctggttcgcctcgacgtacgtgccggccgaggacggctggcccgagttcgccggggagacctggcagaaggccgccgtgctgcggtacggcgagaacccgcaccaggacgccgccctctacaccgattcgtcagggggcggcggtctggccggggccgagcagctgcacggcaaggagatgtcctacaacaactacgtcgacaccgacgcggcgcggcgcgcggcgtacgacttcgacgagcctgccgtcgcgatcatcaagcacgccaacccgtgtggcatcgccgtcggcgccgacgtcgccgaggcccaccgccgcgcccacgagtgcgacccggtcagcgccttcggcggcgtgatcgcggtcaaccggcccgtctcggtcgagatggcccgccaggtggccgacgtgttcaccgaggtgatcgtcgcgccgtcgtacgacgagggcgcggtcgagatcctgcagggcaagaagaacatccgcatcctgcgctgcgccgacccggccgaggagcgctccaccgagctgcgccagatcagcggcggcgtgctcgtgcaggtgcgtgaccacgtcgacgcgacgggcgacgacccgtcgacctggacgctggccgcgggggagcccgcctcggcggaggtgctcgccgacctcgcgttcgcctggacggcgtgccgcgccgcgaagtccaacgcgatcctgctcgccaaggacggcgcctcggtcggcatcggcatgggccaggtcaaccgggtcgactcctgccggctcgccgtctcgcgggccggggaccgggccgcgggatcggtcgccgcctccgacgcgttcttccccttcgaggacggcccgcagatcctcatcgacgccggcgtcaccgcgatcgtgcagccgggcggctcggtccgtgacgagctcacggtcgaggcggccaaggccgccggcgtcaccatgtacttcaccggcacccggcacttcttccactga

SEQ ID NO: 56352 - protein, 525 aa, Nocardioides sp. JS614
MSEPVSTPEHRIPIRRALVSVYDKTDLEDLVRGLHDAGVELVSTGGSAKLIEGLGLPVTKVEDLTGFPECLDGRVKTLHPRVHAGILADRRLDSHVQQLADLGVEPFDLVVSNLYPFRETVASGATPDECVEQIDIGGPSMVRAAAKNHPSVAIVTSPERYADVLAAVAAGGFTLEQRKVLAAEAFTHTAAYDVAVAGWFASTYVPAEDGWPEFAGETWQKAAVLRYGENPHQDAALYTDSSGGGGLAGAEQLHGKEMSYNNYVDTDAARRAAYDFDEPAVAIIKHANPCGIAVGADVAEAHRRAHECDPVSAFGGVIAVNRPVSVEMARQVADVFTEVIVAPSYDEGAVEILQGKKNIRILRCADPAEERSTELRQISGGVLVQVRDHVDATGDDPSTWTLAAGEPASAEVLADLAFAWTACRAAKSNAILLAKDGASVGIGMGQVNRVDSCRLAVSRAGDRAAGSVAASDAFFPFEDGPQILIDAGVTAIVQPGGSVRDELTVEAAKAAGVTMYFTGTRHFFH

SEQ ID NO: 56353 - DNA, 1584 bp, Azoarcus sp. BH72
  CDS (1)..(1584): transl_table=11
atgaacgtcacccaagccctgatcagtgtttccgacaaacgcggcgtgctcgacttcgcccgcgaactcgccggcctcggcatcaagctgctgtcgaccggcggcaccgccgccttgctgcgcgacgccggcctgccggtcaccgacgtgtccgagcacaccggcttcccggaaatgctggacggccgggtgaagaccctgcacccgaaggtgcacggcggcatccttgcccgccgcgacctcgccgagcacatggacaccatcgccgcccacgacatcagccgcatcgatctcgtggtggtgaacctctaccccttccaggccaccgtggcccgccccgactgcacgctggaagacgcgatcgagaacatcgacatcggcggccccaccatggtgcgcgccgcggccaagaaccacggcaccgaagccggcggcgtcggcatcgtcaccgatccggaggactacgccggcatcgtcgccgagctcaaggccaacgccaacacgctcagctacaagacccgcttcgcgctggcggtgaaggccttcacccacaccgcgcgctacgactcggcgatctccaaccacctcaccgcgctggtcaccaacgacgccggcgacgtctccaagcaggcctatccggagcgcttccagctcgccttcgacaaggtgcagaacctgcgctacggcgagaacccgcaccagagcgccgcgttctacaaggagccgggcgcggccgaaggcggcatcgccagctacacccagctgcagggcaaggaactgtcgtacaacaacatcgccgacgccgacgcggcgtgggaatgcgtgaaggccttcgacaccggcgcgtgcgtcatcgtcaagcacgccaacccctgtggcgtcgcactcggcgctaccccgctggaagcctacaagaaggccttctccaccgacccgacttccgccttcggcggcatcatcgccttcaatggcgaagtcgaccgcgccgcggccgaagcggtgtccgcccagttcctcgaagtgctgatcgcgccctcctacaccgccgacgcactggagctgctgcgcgccaagcagaacgtgcgcgtgctcacctgcccgctcggcaagccttccggtgcgctcgactacaagcgcgtcggcggcggcctgctggtgcagagcgccgacgaggcccgcatccagctcgccgacctcaaggtcgtcaccaagcgcgcgccgtccgacaccgaactgcgcgacatgctgttcgcctggcgcgtggccaagtacgtcaagtccaacgccatcgtctattgcaaggacggcatgaccatcggcgtcggcgccggccagatgagccgcgtggactccgcccgcatcgccaagatcaaggccgagaacgccggcctcgccatccccggctgcgtggtcgcgtcggatgccttcttcccgttccgcgacggcctcgacgtgctcgcccaggccggcgccaccgcggtgatccagccgggcggctcgatgcgcgacgctgaggtgatcgccgccgccgacgagcagaacatcgcgatggtcttcaccggcttccgccacttccgccactga

SEQ ID NO: 56354 - protein, 527 aa, Azoarcus sp. BH72
MNVTQALISVSDKRGVLDFARELAGLGIKLLSTGGTAALLRDAGLPVTDVSEHTGFPEMLDGRVKTLHPKVHGGILARRDLAEHMDTIAAHDISRIDLVVVNLYPFQATVARPDCTLEDAIENIDIGGPTMVRAAAKNHGTEAGGVGIVTDPEDYAGIVAELKANANTLSYKTRFALAVKAFTHTARYDSAISNHLTALVTNDAGDVSKQAYPERFQLAFDKVQNLRYGENPHQSAAFYKEPGAAEGGIASYTQLQGKELSYNNIADADAAWECVKAFDTGACVIVKHANPCGVALGATPLEAYKKAFSTDPTSAFGGIIAFNGEVDRAAAEAVSAQFLEVLIAPSYTADALELLRAKQNVRVLTCPLGKPSGALDYKRVGGGLLVQSADEARIQLADLKVVTKRAPSDTELRDMLFAWRVAKYVKSNAIVYCKDGMTIGVGAGQMSRVDSARIAKIKAENAGLAIPGCVVASDAFFPFRDGLDVLAQAGATAVIQPGGSMRDAEVIAAADEQNIAMVFTGFRHFRH

SEQ ID NO: 56355 - DNA, 1602 bp, Acidovorax sp. JS42
  CDS (1)..(1602): transl_table=11
atgaatgcactcctttccgtctccgacaagaccggcatcgtcgaatttgcccaggcgctgcatgcgctgggcatccgcctgctgtccaccggcggcaccgccaagctgctggccgagagcggcctgcccgtcaccgaggtggccgaggtcacgcagttccccgagatgctggacggccgcgtgaagacgctgcaccccaaggtgcatggcggcctgctggcgcgccgcgagctgcctgcgcacatggcggcgctgaaggagcacggcatcgacaccatcgacctgctggtggtcaacctgtacccgttcgaggccacggtggccaacgccggctgcacgctggccgacgccatcgagaacatcgacatcggcggccccgccatggtgcgcagcgccgccaagaactggaaggacgtgggcgtggtcacctcggccgaccagtacgacgcggtgctgggcgagttgaaggccgcgggcaagctgtccgacaagctgcgcttcgcgctgtcggtggcggcgttcaaccgcatcgcgcagtacgacggcgccatcagcgactacctgtcgtccatccagttcgacgaggccaagctgtccgagagctacgtgcccgaacgcgcgctgtttcccggccagagcaacggcatcttcaccaagatccaggacctgcgctacggcgagaacagccaccagcaggccgcgctgtaccgcgacctgcaccccgcgcccggctccatcgtcaccggcgtgcagctgcagggcaaggaactctcatacaacaacatcgccgacgccgacgcggcctgggaatgcgtcaagagcttcaagctgccggcctgcgtgatcgtcaagcatgccaacccctgcggcgtggccgtgggcacgagcgcgctggaggcctacagcaaggccttccagaccgacccgacgagcgccttcggcggcatcatcgcgctgaaccgccccgtggacggcgcggccgcgcagcagatcgccaagcagttcgtcgaagtgctgatggcgcccgacttcacgcccgaggcgctggaggtgttcaaggccaaggccaacgtgcgcctgatgaagatcgcgttgcctgcctccggcggtgccacggcgtgggagcagggccgcaacctgatggacgccaagcgcgtgggctcgggcctgctgctgcagacggccgacaaccatgagctgcaactgcccgatgtgaaggtggtgaccctcaagcagcccacgcaggaagagatgcaggacctgatgttcgcctggaaggtggccaagtacgtcaagagcaacgccatcgtgttcgtgaagggcggcatgaccatgggcgtgggtgcgggccagatgagccggctggattcggcgcgcatcgccagcatcaaggcgcaggccgcgggcctgtccctgcagaacaccgtggtggccagcgacgccttcttcccgttccgcgatgggctggacgtggtggtcgacgcgggcgcgacctgcgtggcccagcccggtggttccatgcgcgaccaggaggtcatcgacgcggccaacgagcgcggcgtggccatggtcttcacgggcgtgcgccacttccgtcactga

SEQ ID NO: 56356 - protein, 533 aa, Acidovorax sp. JS42
MNALLSVSDKTGIVEFAQALHALGIRLLSTGGTAKLLAESGLPVTEVAEVTQFPEMLDGRVKTLHPKVHGGLLARRELPAHMAALKEHGIDTIDLLVVNLYPFEATVANAGCTLADAIENIDIGGPAMVRSAAKNWKDVGVVTSADQYDAVLGELKAAGKLSDKLRFALSVAAFNRIAQYDGAISDYLSSIQFDEAKLSESYVPERALFPGQSNGIFTKIQDLRYGENSHQQAALYRDLHPAPGSIVTGVQLQGKELSYNNIADADAAWECVKSFKLPACVIVKHANPCGVAVGTSALEAYSKAFQTDPTSAFGGIIALNRPVDGAAAQQIAKQFVEVLMAPDFTPEALEVFKAKANVRLMKIALPASGGATAWEQGRNLMDAKRVGSGLLLQTADNHELQLPDVKVVTLKQPTQEEMQDLMFAWKVAKYVKSNAIVFVKGGMTMGVGAGQMSRLDSARIASIKAQAAGLSLQNTVVASDAFFPFRDGLDVVVDAGATCVAQPGGSMRDQEVIDAANERGVAMVFTGVRHFRH

SEQ ID NO: 56357 - DNA, 1515 bp, Fusobacterium nucleatum subsp. vincentii ATCC 49256
  CDS (1)..(1515): transl_table=11
atgaaaaaaagagctttaatttcagtatatgataaaataggtatattggattttgcaaagtttctagtcagtaaaggaatagaaattatttctactggtggaacatataaatatttaaaggaaaataatattgaagttattgaagtcagtaaaataacaaattttgaagaaatgttagatggtagagttaaaactttacatccaaatatacatggtggaattttagcattgagagataatgaagaacatatgagaactttaaaagaaagaaatattgacactattgattatgttatagtaaatctgtatcctttctttgaaaaagttaaagaaaatttatcatttgaagaaaaaattgaatttatagatataggtggtcctacaatgcttaggtctgctgctaaatcttttaaagatgtggttgttatttctaatgtcaaagattatgaacttgtaaaagaagaaatgaataagtctaatgatgtttcttatgaaactagaaaaaaattggcaggaaaagtttttaatttaacttcagcttatgatgcagctatatcacaattcttatcagatgaagactttccagagtatctaaatttatcttataaaaaatctatggaaatgagatatggagaaaattctcatcaaaaagctgcatactacattgacaatatgtctgatggagctatgaaagattttaaacaacttaatggaaaagaactttcatataataatattagggatatggatttggcttggaaagttgtttcagagtttgatgaaatttgttgctgtgcagtaaaacattcaacaccttgtggagttgcattaggaaataatgtagaagaagcctataaaaaagcctatgaaacagatccagtatctatttttggtgggatagtagcttttaacagagaagttgatgaggcaactgcaaaattattaaatgaaatatttttagaaattataatagcaccaagtttttcaaaatctgccctagaaattttgactaagaagaaaaatataagactaattgaatgtaaaaataaaccaagtgataaaaaagaattaataaaagttgatggtggaattttagttcaagatacagacaataaattatatgaagatttagaagttgtaacaaaaattaaacctacaagtcaagaagaaaaagatttaatttttgctctaaaggttgtaaaatttgtaaaatcaaatgctattattgtagcaaaaaatttacaaacattaggaataggtggaggagaggtaagcagaatttgggctgctgaaaaagcacttgaaagggcaaaagaaagatttaatgtaacagatattgtactttcttcagatgcattcttcccatttaaagatgttgtagaacttgctgctaaaaatggagttaaagctataatccaacctggaggctctgtaaaagataaagattctattgacaaatgtgataaaaataatatttctatgatattctcaaaattaagacactttaaacattaa

SEQ ID NO: 56358 - protein, 504 aa, Fusobacterium nucleatum subsp. vincentii ATCC 49256
MKKRALISVYDKIGILDFAKFLVSKGIEIISTGGTYKYLKENNIEVIEVSKITNFEEMLDGRVKTLHPNIHGGILALRDNEEHMRTLKERNIDTIDYVIVNLYPFFEKVKENLSFEEKIEFIDIGGPTMLRSAAKSFKDVVVISNVKDYELVKEEMNKSNDVSYETRKKLAGKVFNLTSAYDAAISQFLSDEDFPEYLNLSYKKSMEMRYGENSHQKAAYYIDNMSDGAMKDFKQLNGKELSYNNIRDMDLAWKVVSEFDEICCCAVKHSTPCGVALGNNVEEAYKKAYETDPVSIFGGIVAFNREVDEATAKLLNEIFLEIIIAPSFSKSALEILTKKKNIRLIECKNKPSDKKELIKVDGGILVQDTDNKLYEDLEVVTKIKPTSQEEKDLIFALKVVKFVKSNAIIVAKNLQTLGIGGGEVSRIWAAEKALERAKERFNVTDIVLSSDAFFPFKDVVELAAKNGVKAIIQPGGSVKDKDSIDKCDKNNISMIFSKLRHFKH

SEQ ID NO: 56359 - DNA, 1551 bp, Crocosphaera watsonii WH 8501
  CDS (1)..(1551): transl_table=11
atggcaaggttagccctactgagtgtatcggataaaacaggaattgttgaattagcccgtcaattagtcaaggaatttgattttgaattaatcagtagtggaggtacggccaaaaccctacaagaagccggactcacagttacaaaagttagtgactacacaggttccccagaaattttagggggtagggttaaaaccctccatcctcgcattcatggcggtattttgtcccgtagagagataccccaagatgtagaggatatggatagtaatgatattcgtcccattgacttagtggtggttaatctttatccatttgaagaaaccattgctaaagcagacgtgacagtagctgaagccatagagaaaattgatattggtgggccaactttactccgtgcctcagcaaaaaatttcgcccatgtcaccgttttatccaatcctaaatattacgagagttacttacaagaattaaaggataataacggggaagcctccttaaattttcggcaaaaaatggcaggagaaacctttgccttaaccaacgcctatgacggagcgatcgccgattattttgccagtctttccacaggggaaaccaccaccttacccagtcgttacaccgttgccggaaccgcctttcaaaccctgcgttatggagaaaacccccatcaaagtgccacttggtatcaacggggaagcaaggctacaggatggacggcagcaacgcaattgcaaggaaaagaactcagttataataatttagtagatttagaagcagccagacggattattgctgaatttgacccgaaagaaccagcagcagccgttcttaaacataccaacccctgtggggtagccgtagccgggagtttagccgatgcctacgaacaagcctttaacgctgactctatttccgcctttggggggattgtggccttaaatcagcccttggatggggaaacagcagagaaattaactaaaaccttcttagaatgtgtggtaactccagcttgtacagaagaagcgaaggagattattagtaaaaaagccaaagttagggtcttgttattgcctgatttaagccagggacccaagcaaaccgtaaaagcgatcgccggcgggttattggtgcaagactcagatgatgcggtggatgtaccggataactgggaaatcgtaacagagaagcaaccaactcctgagcaactggcggagttattatttgcctggaaagtagccaagcacgttaaatcaaatgcgatcgttgtcaccaaaaatcgcattactttaggtattggtgccggtcaaatgaaccgtgtaggggcggtgaaaattgccctagaagaagctggagagggaactaatgggggataccttgctagtgatggtttcttcccctttgacgactctgtacgcactgctgctgctgctggaatacaggcgatcgtgcaaccaggcggctctttacgggataaagactctattgctgcggccaatgagttagggctagtgatggtcttgacaaaaatgcgtcattttctccattaa

SEQ ID NO: 56360 - protein, 516 aa, Crocosphaera watsonii WH 8501
MARLALLSVSDKTGIVELARQLVKEFDFELISSGGTAKTLQEAGLTVTKVSDYTGSPEILGGRVKTLHPRIHGGILSRREIPQDVEDMDSNDIRPIDLVVVNLYPFEETIAKADVTVAEAIEKIDIGGPTLLRASAKNFAHVTVLSNPKYYESYLQELKDNNGEASLNFRQKMAGETFALTNAYDGAIADYFASLSTGETTTLPSRYTVAGTAFQTLRYGENPHQSATWYQRGSKATGWTAATQLQGKELSYNNLVDLEAARRIIAEFDPKEPAAAVLKHTNPCGVAVAGSLADAYEQAFNADSISAFGGIVALNQPLDGETAEKLTKTFLECVVTPACTEEAKEIISKKAKVRVLLLPDLSQGPKQTVKAIAGGLLVQDSDDAVDVPDNWEIVTEKQPTPEQLAELLFAWKVAKHVKSNAIVVTKNRITLGIGAGQMNRVGAVKIALEEAGEGTNGGYLASDGFFPFDDSVRTAAAAGIQAIVQPGGSLRDKDSIAAANELGLVMVLTKMRHFLH

SEQ ID NO: 56361 - DNA, 1521 bp, Exiguobacterium sibiricum 255-15
  CDS (1)..(1521): transl_table=11
atgagagcgttaatcagcgtatcagacaaaacaggtatcgtcgaactcggacaggcgatgcatgacgccgggattgaattgatttcgacaggcggaacacatcaagcccttgaagcagcaggacttccggtcattggcatcagtgaagtcacacaattcccggagatgctcgacggccgggtcaagaccctccatccgatggtccatggtggactgctcggacgccgagaccttgaaagtcatcgcgaacagatggcggaacaacagatcaaaccgattgattttgtggtcgtcaacctctatccgtttaaagaaacggtcatgaatgaagatgtctcgtatgccgatgcgatcgagaacatcgatatcggtggaccgagcatgatccgttcggctgccaaaaatcatgccgccgtgacggttgtcgtcgatccggcagattatcaggcggtcatccaggaaattcatcttggtggaacgacattcgaaacccgtcaaaagctggcagccaaagcattccgtcacacagcggcgtatgatgcgttgattgccgattacttcctgacgcagacgggtgaaaagttccccgatcaattgacgattacgctcgaaaaagtgcaggacttacggtacggagaaaacccgcaccaggaagcggccttttacaaaacaccgatctaccgcggggcttcactcgcgtccgcgaagcagctccacggcaaagaattgtcttacaacaacatccaggatgccaatgcggcacttgagattctcgatgagttccgtgaagcggcagcggtcgtcgtcaaacacatgaatccgtgcggcgtcgcggtcggaccgacgattgatgaagcgttccgtcgtgcccatgccgcggatccggtctcgattttcggcggaatcgtcgccttgaaccgggaagtcgatcttgcgacagcagaacaactcagtgggatcttcctcgaaatcatcatcgctccatcctttacggaagaagcgtttacgttgcttgcagcgaagaaaaatctccggttactggaactggacgtcaaacgggttcaatcgatccggtatacggcagttgccggcgggatgctcgttcaagacagtgacgacgagacgctcgatgacgcgtcagcacgtgtcgtgacagaccggaaaccgacggcaggtgaatgggaagacttaaaactcgcttggcgtgccgttaaacacgttaaatcgaatgcaatcgtcatcgcgaaagatgaagtgacggtcggcgtcggtgccgggcagatgaaccgtgtcgggtcagccaatatcgcgattacccaagccggtgctaaagcagtcggtgccgcaatgggctcggatgcgttcttcccgatgggcgatacggttgaggcagctgctacggcaggcattacagcaatcattcaaccgggcggttcgatccgtgaccaggaatcgattgatgcctgcaacaaacatggcattacgatgatctttacgaacgtgcgtcattttaaacactaa

SEQ ID NO: 56362 - protein, 506 aa, Exiguobacterium sibiricum 255-15
MRALISVSDKTGIVELGQAMHDAGIELISTGGTHQALEAAGLPVIGISEVTQFPEMLDGRVKTLHPMVHGGLLGRRDLESHREQMAEQQIKPIDFVVVNLYPFKETVMNEDVSYADAIENIDIGGPSMIRSAAKNHAAVTVVVDPADYQAVIQEIHLGGTTFETRQKLAAKAFRHTAAYDALIADYFLTQTGEKFPDQLTITLEKVQDLRYGENPHQEAAFYKTPIYRGASLASAKQLHGKELSYNNIQDANAALEILDEFREAAAVVVKHMNPCGVAVGPTIDEAFRRAHAADPVSIFGGIVALNREVDLATAEQLSGIFLEIIIAPSFTEEAFTLLAAKKNLRLLELDVKRVQSIRYTAVAGGMLVQDSDDETLDDASARVVTDRKPTAGEWEDLKLAWRAVKHVKSNAIVIAKDEVTVGVGAGQMNRVGSANIAITQAGAKAVGAAMGSDAFFPMGDTVEAAATAGITAIIQPGGSIRDQESIDACNKHGITMIFTNVRHFKH

SEQ ID NO: 56363 - DNA, 1593 bp, Xylella fastidiosa Ann-1
  CDS (1)..(1593): transl_table=11
atggcatccgatttcctgcccgtgcatcgggcactgttatctgtttccgacaaaacagggttggtcgagttggcgcgcgtgctgctggcctacaacattgaattactgtctaccggtgggaccgcgacaatcatccgcgaggctggtctcccagtgcaggatgtggccgatctgacaggcttccctgaaatgatggacggccgcgtaaaaacactgcaccccgtggtacacggtggtttgctcggacgcgccggtatcgacgacgccgtgatggccaaacacggcatcgcaccgatcgacctgctgatactgaatctatatcccttcgaacagatcactgccaaaaaagattgcacgctggccgatgcagtggacaccattgatattggtggcccggcgatgctgcgctcggcggcaaagaatttcgcgcgcgtggctgtggcaacgtcaccggatcagtatcctgatctgcttgctgaactgcaggagcaccacggccaactttcagccgaaaagcgtttcgcattggccgtggcggcattcaaccacgttgcccagtacgatgcggccatcagcaactatctttcgagtgtgtccgacatgcacacaacgttgccgttgcgccatgaattcccagctcagttaaacaataccttcgtaaagatgacagagctccgctacggggaaaatccgcatcaaacaggtgcgttctaccgcgatgtacatccgcaacccgggacgctggccaccttccagcaactccaaggcaagaaactcagctacaacaacctcgtcgatgccgacgccgcatgggaatgcgtacgtcaattcgaagcaccggcctgcgtcatcgtcaaacatgccaacccttgtggcgtcgcagttgggatggcgtgcagtgatgcttatgaagcagcgtatgccactgatccgacgagtgcgtttggcggcattattgcttttaaccgcacgttggatgcggtcactatgaaaagcattctagaccgtcaatttgtcgaggtattcattgcgccgtattacgatgcagacgccctcgcctatgccgccaaaaaagccaatgtgcgcgtgctgcgtatccccagcagcgcagcgatgaaagcaacgaatcagtacgacttcaagcgtatcggctctgggctgctggtccaaagcgccgataccatgcacatccattccgatgttcttaggacggtgaccacacttgcccccaccgataaacaacgacgcgatctgatgtttgcttggcgtgtggtcaagtacgtcaagtccaatgcaattgtgtatgccaaggataatcgcacgattggtattggcgccggacaaatgagtcgcgtgtattcagcgcgtatcgctggtatcaaggcggccgatacacatttggctgtcacaggctcggtgatggccagcgatgcgttctttccattccgcgatggcattgatgccgctgccgcgactggaatcaaggcagtgattcaaccgggcggttcgatgcgcgataacgaggtgatcgcggcggccgatgaacacggcattgccatgctattcaccgggatacggcatttccggcattga

SEQ ID NO: 56364 - protein, 530 aa, Xylella fastidiosa Ann-1
MASDFLPVHRALLSVSDKTGLVELARVLLAYNIELLSTGGTATIIREAGLPVQDVADLTGFPEMMDGRVKTLHPVVHGGLLGRAGIDDAVMAKHGIAPIDLLILNLYPFEQITAKKDCTLADAVDTIDIGGPAMLRSAAKNFARVAVATSPDQYPDLLAELQEHHGQLSAEKRFALAVAAFNHVAQYDAAISNYLSSVSDMHTTLPLRHEFPAQLNNTFVKMTELRYGENPHQTGAFYRDVHPQPGTLATFQQLQGKKLSYNNLVDADAAWECVRQFEAPACVIVKHANPCGVAVGMACSDAYEAAYATDPTSAFGGIIAFNRTLDAVTMKSILDRQFVEVFIAPYYDADALAYAAKKANVRVLRIPSSAAMKATNQYDFKRIGSGLLVQSADTMHIHSDVLRTVTTLAPTDKQRRDLMFAWRVVKYVKSNAIVYAKDNRTIGIGAGQMSRVYSARIAGIKAADTHLAVTGSVMASDAFFPFRDGIDAAAATGIKAVIQPGGSMRDNEVIAAADEHGIAMLFTGIRHFRH

SEQ ID NO: 56365 - DNA, 1533 bp, Croceibacter atlanticus HTCC2559
  CDS (1)..(1533): transl_table=11
atgagccacacaaaaaaagcaacatcagcattaatatctgtctttcataaagaaggtttagaaccaattgttagaaaattaaacgacctaggcgttaccatatactctacaggtggtacagagaaatttataaaaggtttaggtataaactgtgttgccgtagaagatgtgacttcatatccatctatcttaggaggtcgagttaaaacattgcacccaaaagtatttggtggtattttaaatagacaagacaacgagagtgatgtggcacaaatgacagagtttgacattcctcaattagatattgttatagttgatttatatccttttgaaaaaacggttgcatctggtgcaagcgagcaggatattatcgaaaaaattgacataggaggtatttcacttattcgtgctgctgctaaaaactttaaagatgttatttgtgtatcttctatggaagattattcagagtttttagatgttatctctaatggaaatggagaaactactttagcagaccgtaagcgttttgctggtaaagcatttaatgtatcgtctcattatgattcggctatctttaattatttcaatagcgaacacgatgtgccagcattaaagattagcgaaacaaaaggtaaagcattgcgttatggggaaaacccacaccaaaaaggatttttcttcggagattttgatgcaatgtttgataaacttcacggtaaggaattatcttataataacttattagatgttgatgctgctgttaaccttatgaatgagtttaatggagatgcgccaacatttgctattttaaaacataataatgcttgtggtattgcacaaagagatacagtgcttaatgcttacaaagatgcgctagctggagatcctgtttctgcatttggtggtatcttaattagtaatagtgagattgatgtggctactgcaaacgaaattcataaactattttgtgaagttgttatagcaccaaacttttcaaaagatgcagaaaaagttttaaagggtaagaaaaacagaattttattaattcaaaaagaagctaaactacctgaaaccattgtaagaacatgtttaaatggtgctttagtgcaggacagagatcatataacagatgctaaagaaaactttagctatgctacagacacaaagccaaccgaagaacaaatagaagatttattgtttgcctcaaaaatatgcaaacacacaaagagtaacaccatagtactagctaagaacaagcaattatgtgcaagcggtacaggacaaacctcaagagtagatgcgttaagacaaagtattgaaaaggcaaaaagctttgattttgaactagatggtgcggttatggcaagtgatgcatttttcccttttccagattgtgtagagattgcagaccaagcaggaatttctgccgttatacaacctggcggttcaataaaagatcaattaagcatagattactgtaatgaccataaaatagctatggtaatgacaggaacacgccattttaaacactaa

SEQ ID NO: 56366 - protein, 510 aa, Croceibacter atlanticus HTCC2559
MSHTKKATSALISVFHKEGLEPIVRKLNDLGVTIYSTGGTEKFIKGLGINCVAVEDVTSYPSILGGRVKTLHPKVFGGILNRQDNESDVAQMTEFDIPQLDIVIVDLYPFEKTVASGASEQDIIEKIDIGGISLIRAAAKNFKDVICVSSMEDYSEFLDVISNGNGETTLADRKRFAGKAFNVSSHYDSAIFNYFNSEHDVPALKISETKGKALRYGENPHQKGFFFGDFDAMFDKLHGKELSYNNLLDVDAAVNLMNEFNGDAPTFAILKHNNACGIAQRDTVLNAYKDALAGDPVSAFGGILISNSEIDVATANEIHKLFCEVVIAPNFSKDAEKVLKGKKNRILLIQKEAKLPETIVRTCLNGALVQDRDHITDAKENFSYATDTKPTEEQIEDLLFASKICKHTKSNTIVLAKNKQLCASGTGQTSRVDALRQSIEKAKSFDFELDGAVMASDAFFPFPDCVEIADQAGISAVIQPGGSIKDQLSIDYCNDHKIAMVMTGTRHFKH

SEQ ID NO: 56367 - DNA, 1587 bp, Sulfitobacter sp. EE-36
  CDS (1)..(1587): transl_table=11
atgcctgatcttcaccccgtctcccgcgcgcttctttccgtatctgacaagaccggtctggtcgagctggggcaggcgctcgcggcgcatggggtcgaattgctgagcaccggcggcaccgccaaggcgctgcgcgacgcaggtctggaggtcaaggatgtgtccgaggtcaccggcttccccgagatgatggacggtcgggtcaagacgctgcaccccgtcgtgcacggtgggttgctggcgttgcgtgacaatgacgaacacgtcgcggcgatggacaaacatgacattggcgcaatcgatctggttgtggtgaacctgtatccctttgaagaaaccgtcgccaaaggggcggaatatgccgaggtgatcgagaatatcgatatcggtggccctgcgatgatccgctctgccgcgaagaaccacggttttgtgaatgtgatcgtcgatgtcgaagattatgcgacagtgatcaacgaactgtccgagaataacgggcagaccacctatgcgctgcgccagcgtttggcgcagacggcctatgcccgcacggcggcctatgacacggctgtcagcacatggatggccgcgcaggtcggggacaccccgcgtcgtcgtaccgtgggcggcacgctggcgcagaccttgcgctacggcgagaacccccaccagcaagcggccttctacaccgacggctcggcacgtcctggtgttgctacggcgacccagcatcagggtaaagaactgtcgtataacaatatcaacgacaccgatgcagcctttgaactagtcagcgaattcgatccggccaatgggcctgcctgtgcgatcatcaagcacgccaatccctgcggcgtggcgcaaggcacgtcgatggtggatgcctatacccgcgcgttcgactgcgaccgcaccagcgcctttggcgggattatcgcgctgaaccagacgcttgacgccgaaaccgccgaggcgatcagcgcgatctttaccgaggtcgtgatcgcgccgaacgctacacccgaagcaatggaaatttttggcaagaagaagaacctccgcttgctgaccaccaacggtctggccgatccggcacaggcggcgttgtcgttccgtcaggtgtcggggggctatctggtgcaggacaaagacgttggccgcatcaccatggatgacctgaaggtcgtgacaaagcgccagccgtccgatcaagagttgtcggacctgatgttcgcctggaccgtcgcgaaacacgtgaaatccaacgcaatcatctacgtcaaggatggcgcgaccgtgggcgtcggtgccggccagatgagccgcgtcgacagcacgcgtatcgccgcacgcaaagcgcaggatatggccgaagccatgggcttgcccgcaccgctgacgcagggctctgtcgtcgcttccgatgcgttcttcccctttgctgacgggttgatcactgccgcagaagcaggggcgacagcgcttatccagcccggcgggtcgatgcgggatgacgaagtgatcgcggcagcggatgaggccgggcttgccatggtctttaccggcatgcgccacttccgccactaa

SEQ ID NO: 56368 - protein, 528 aa, Sulfitobacter sp. EE-36
MPDLHPVSRALLSVSDKTGLVELGQALAAHGVELLSTGGTAKALRDAGLEVKDVSEVTGFPEMMDGRVKTLHPVVHGGLLALRDNDEHVAAMDKHDIGAIDLVVVNLYPFEETVAKGAEYAEVIENIDIGGPAMIRSAAKNHGFVNVIVDVEDYATVINELSENNGQTTYALRQRLAQTAYARTAAYDTAVSTWMAAQVGDTPRRRTVGGTLAQTLRYGENPHQQAAFYTDGSARPGVATATQHQGKELSYNNINDTDAAFELVSEFDPANGPACAIIKHANPCGVAQGTSMVDAYTRAFDCDRTSAFGGIIALNQTLDAETAEAISAIFTEVVIAPNATPEAMEIFGKKKNLRLLTTNGLADPAQAALSFRQVSGGYLVQDKDVGRITMDDLKVVTKRQPSDQELSDLMFAWTVAKHVKSNAIIYVKDGATVGVGAGQMSRVDSTRIAARKAQDMAEAMGLPAPLTQGSVVASDAFFPFADGLITAAEAGATALIQPGGSMRDDEVIAAADEAGLAMVFTGMRHFRH

SEQ ID NO: 56369 - DNA, 1596 bp, Roseovarius nubinhibens ISM
  CDS (1)..(1596): transl_table=11
atgccctctgcctcgcttgcgcccgtcaaacgcgcccttctttcggtttccgacaagaccggtctcattgaactgggccaggccctcgcggggcttggggtcgaacttctgagcaccgggggcagtgccaaggcgctgcgcgaggcggggcttgaagtgcgcgacgtggccgatgtcacgggctttcccgagatgatggatggccgggtcaagacgctgcacccgatggtgcatggcggtctgctggcgctgcgcgacaatgccgatcacctcaaggcgatggacgagcatggcatcggcgggatcgatcttttggtggtcaatctctacccgttcgaagaaaccgtcgccaagggcgcggattacgagacctgcatcgaaaacatcgacattggcggcccggcgatgatccgtgcggcggccaagaaccacggctttgtcaccaccatcgtcgatgtcgaggattacgacgcgctgctggccgagctgcgcggcaatgacggggcgacgacgctcgccttccggcagaagatggcgatgaccgcctatgcgcgcaccggggcctatgacgccgccgtctcgggctggatggccgatcagcagggcgacaccgcgccgcgccgccgcgccgtggccggcacgctcgcgcaggaactgcgctatggcgagaacccgcatcagcaggcggcgttttatgtcgatggctcgaaccgtcccggcgtcgccaccgcccagcaacatcagggcaaagagctcagctacaacaacatcaacgacaccgacgcggcctttgagctggtgagcgaatttgacccggcgcaaggcccggcctgcgcgatcatcaaacatgccaacccctgtggcgtggcgcggggcgcgacgctcaaagaggcctatggccgcgcctttgattgtgaccgcaccagcgcctttggcggcatcatcgccctcaaccagccgctcgacggggccaccgccgaagagatcgtgcagatctttaccgaggtggtgatcgcgcccggcgccgatgacgacgcccgccgggtctttgccgccaagaagaacctgcgcctgctgaccacccaggcgctcgccgatccggcggcggcggcccgcaccatccgtcaggtctcgggcggataccttgtgcaggacaaggacaatggcgtgatcacccgtgacgatctcaaggtggtgaccaaacgcgcgccctccgagcaggagctcgaggatatgctctttgcctggaaagtggcgaaacacgtcaagtcgaacgccatcgtctatgtcaaggacggcgccaccgtcggcgtcggtgcgggccagatgagccgcgtcgacagctgccgcatcgccgcccgcaaggccgaggacatggccgaggcgctcgggctcgacgcgccgctgacccgcggttcggtcgtggcatcggatgcgttctttccctttgccgacggtctgctgaccgcggccgaggccggggccaccgccgtcatccatcccggcggctcgatgcgcgacgacgaggtgatcgccgccgccgatgaggccgggcttgccgtggtgctcaccggtatgcgccatttccgtcactga

SEQ ID NO: 56370 - protein, 531 aa, Roseovarius nubinhibens ISM
MPSASLAPVKRALLSVSDKTGLIELGQALAGLGVELLSTGGSAKALREAGLEVRDVADVTGFPEMMDGRVKTLHPMVHGGLLALRDNADHLKAMDEHGIGGIDLLVVNLYPFEETVAKGADYETCIENIDIGGPAMIRAAAKNHGFVTTIVDVEDYDALLAELRGNDGATTLAFRQKMAMTAYARTGAYDAAVSGWMADQQGDTAPRRRAVAGTLAQELRYGENPHQQAAFYVDGSNRPGVATAQQHQGKELSYNNINDTDAAFELVSEFDPAQGPACAIIKHANPCGVARGATLKEAYGRAFDCDRTSAFGGIIALNQPLDGATAEEIVQIFTEVVIAPGADDDARRVFAAKKNLRLLTTQALADPAAAARTIRQVSGGYLVQDKDNGVITRDDLKVVTKRAPSEQELEDMLFAWKVAKHVKSNAIVYVKDGATVGVGAGQMSRVDSCRIAARKAEDMAEALGLDAPLTRGSVVASDAFFPFADGLLTAAEAGATAVIHPGGSMRDDEVIAAADEAGLAVVLTGMRHFRH

SEQ ID NO: 56371 - DNA, 1590 bp, Oceanicola batsensis HTCC2597
  CDS (1)..(1590): transl_table=11
atgaccgacctccaccccgtccgccgcgccttgatctcggtttccgacaagaccggcctcgtcgatcttgcaagggaactggccgacatgggcgtccagctcctgtccaccggaggcagcgccggcctcctgagagaggccgggctggaggtcaccgacgtcgccgaggtgacgggctttcccgaaatgatggacggacgcgtcaagaccctgcatcccaaggtgcacggcgggctgctggcactgcgcgacaacgagagccacgtcgcagcgatggaggatcacgggatcgagggaatcgacctgctgatcgtcaacctctacccgttcgaggaaaccgtcgcgaagggcgcggattacgatacctgcatcgagaacatcgacatcggcggaccggccatgatccgcgccgcggccaagaaccacgccttcgtcaccacggtggtcgatgtcggcgactacggcctcctgatcgacgaactgaaggtcaacgaaggccgcacctcgctggccttccgcaagcgcctggcccagatcgcctatgcccgcaccggggcctacgacgccgccgtctcgacctggatggccgccgcgatcggggaaccggcgccccgccgccgcgtcttcgcgggcaccctcgcccagacgctgcgctatggcgagaacccgcatcagacggcggctttctacaccgacggcaccgcccggcccggggtctcgaccgccgaacagcatcagggcaaggaactgtcgtacaacaacatcaacgacacggacgcggccttcgaactggtgtcggagttccttcccgcgaatggcccggcctgcgcgatcatcaagcatgccaatccctgcggcgtggcgcgcggcggcaccctgcgcgaggcctacatgcgcgccttcgactgcgaccggacctcggccttcggcgggatcatcgcgctgaaccggccgctcgacggcgagaccgccgaggagatcgcgcagatctttaccgaggtggtcatcgccccgggtgcggacgacgccgcgaaacgggtcttttcccgcaagaagaacctgcgtctgctgacgacggacggcctcgccgatccggccacggcgaccctgacgctccgtcaggtctcgggcgggcttctggtgcaggacaaggacaacggacgcatcgacatggacgacctcagggtcgtgacgacgcgccggccttcggagaaggagatggccgacctgctctttgcctggaccgtggccaagcacgtcaagtcgaatgccatcgtctacgccagggacggcaagaccgtggggatcggcgccggccagatgagccgcgtcgacagctcgaccatcgccgcccacaaggcgcagcgcatggcggacgagctcggtcttgccgaaacgccggccaaggggtcggtggtggcctcggacgccttctttccgttccccgacggtcttctcgccgcggccgaggcgggggcgaccgcggtgatccagccgggcggttccatgcgcgatgacgaggtgatccgcgcggccgacgacgccgggctggccatggttctcaccggcatgcggcatttccggcactga

SEQ ID NO: 56372 - protein, 529 aa, Oceanicola batsensis HTCC2597
MTDLHPVRRALISVSDKTGLVDLARELADMGVQLLSTGGSAGLLREAGLEVTDVAEVTGFPEMMDGRVKTLHPKVHGGLLALRDNESHVAAMEDHGIEGIDLLIVNLYPFEETVAKGADYDTCIENIDIGGPAMIRAAAKNHAFVTTVVDVGDYGLLIDELKVNEGRTSLAFRKRLAQIAYARTGAYDAAVSTWMAAAIGEPAPRRRVFAGTLAQTLRYGENPHQTAAFYTDGTARPGVSTAEQHQGKELSYNNINDTDAAFELVSEFLPANGPACAIIKHANPCGVARGGTLREAYMRAFDCDRTSAFGGIIALNRPLDGETAEEIAQIFTEVVIAPGADDAAKRVFSRKKNLRLLTTDGLADPATATLTLRQVSGGLLVQDKDNGRIDMDDLRVVTTRRPSEKEMADLLFAWTVAKHVKSNAIVYARDGKTVGIGAGQMSRVDSSTIAAHKAQRMADELGLAETPAKGSVVASDAFFPFPDGLLAAAEAGATAVIQPGGSMRDDEVIRAADDAGLAMVLTGMRHFRH

SEQ ID NO: 56373 - DNA, 1557 bp, Prochlorococcus marinus str. MIT 9211
  CDS (1)..(1557): transl_table=11
atggcccgtatagcattaataagtgtttccaataaagatgggctaattccttttgcgaaaacattaacaacccttcatggttttgagattatttccagtggaggtactgctagagcgctgaaagaagcaaatatccctgtcaaaacagtttctgattacactggagctccagaaattcttggtggccgagtaaaaactcttcatcctcgaatacatggcggaatacttgccaagcaaggaaattcatctcatcaatttgatctcgaaaaagaaaacatcaaaaatattgatcttgtagtcgtaaacctttatccatttcaagaaacaatctctgatccagatgttacatgggataacgcaatagaaaatattgatattggcgggcctgcaatgattcgcgcagcagccaaaaaccatgaatcagtaagtattctgactaatccaaatcaatatgacgcttttcttgaaaaattagaagctggggagatttcaacaactatcaaagcaaaactcgctcttgaagctttcgagcacaccgcaagttatgacatagcaattagccaatggttaagcaagcaaattgaatctaaatattctccatatttaacttctcaaccaattaaacaaactctgaggtatggagagaatcctcatcaaaatgcaaattggtatagcgcagttaatcaagggtgggggcaagctgaacaattacaaggtaaagagctcagcacaaataatcttctagatctagaagctgctgttgcaacaataagagaatttggatatgacttaggcaataaaggcaattcgtgcgagaaagctgcagtcattattaagcacactaatccttgtggagtagctgtaagcaataatctgagcaatgcattcaacctggcccttgagtgcgactcaattagtgcatttggaggaattgttgctcttaactgcaatttagatgctgctacagcaaaagaactaagcagtctatttttagaatgtgtagtagctccagactatgacgctaacgctttagagatcctttcaacgaaaaaaaatttaaggataattaaacttagtcacagctctataaagtcgtccgaacgtaagtatataagaagcattttaggaggaatattggttcaggaagttgatgacaaattaattgaacctaatgaatggaaagttcctacaaaattacaaatgtctattgaagacaaagctgatctagctttcgcctggcgagtagtaagacatgttagatcaaatgcaatagtagttgcatctgctggtcaaactttaggaataggtgcagggcaaatgaatagaataggggcagcaaaaatagctctggaagctgcaggagaaaaagctcaaggtgctgtattagctagtgatggcttctttccctttgatgacacagtacatttggcatcaagatatggaatcaaatcaataattcaaccaggaggaagtattcgagaccaatcatctatagatgcatgcaatcaattaggtctctctatgatatttactggtaaaagacatttccttcattaa

SEQ ID NO: 56374 - protein, 518 aa, Prochlorococcus marinus str. MIT 9211
MARIALISVSNKDGLIPFAKTLTTLHGFEIISSGGTARALKEANIPVKTVSDYTGAPEILGGRVKTLHPRIHGGILAKQGNSSHQFDLEKENIKNIDLVVVNLYPFQETISDPDVTWDNAIENIDIGGPAMIRAAAKNHESVSILTNPNQYDAFLEKLEAGEISTTIKAKLALEAFEHTASYDIAISQWLSKQIESKYSPYLTSQPIKQTLRYGENPHQNANWYSAVNQGWGQAEQLQGKELSTNNLLDLEAAVATIREFGYDLGNKGNSCEKAAVIIKHTNPCGVAVSNNLSNAFNLALECDSISAFGGIVALNCNLDAATAKELSSLFLECVVAPDYDANALEILSTKKNLRIIKLSHSSIKSSERKYIRSILGGILVQEVDDKLIEPNEWKVPTKLQMSIEDKADLAFAWRVVRHVRSNAIVVASAGQTLGIGAGQMNRIGAAKIALEAAGEKAQGAVLASDGFFPFDDTVHLASRYGIKSIIQPGGSIRDQSSIDACNQLGLSMIFTGKRHFLH

SEQ ID NO: 56375 - DNA, 1623 bp, Erythrobacter sp. NAP1
  CDS (1)..(1623): transl_table=11
atgagtgagaaggcaatcaagcgggcgctgctttcagtgtccgacaaaaccggtttggcggatctgggcaaggcgctggcagagcgaggcgttgaactggtcagcaccggcggcacggcgcgcgcgcttcgcgaagcggggcttgaagtgcgcgatgtctccgacctcaccggctttcccgagatgatggatggccgggtgaagacgcttcaccccaaggtgcatggcgggcttctcgcgctgcgcgacaatgacgaacacgtcgccgcgatggaagcgcacgagatcggcgcaatcgacctcgtcgtggtcaatctctacccgttcgaggcaaccgtcgccaaaggcgcagagcgcgccgagatcatcgagaatatcgacattggcgggccttcgatggtgcgctcggcggcgaagaaccacggcttcgtgacgatcatgaccgatgcggcggattaccccgagctgctcgaggaactcgacgccaatgacggcgcgaccagccatgctttccgcatccgaatggcgggcaaggcctatgcgcgcacggcagcctatgatgcggcgatcgccaactggtttgccttcggcgatgccttcaccaatccacttggcatggaagcgctcaaggcaacgcctttcgttgagaccatgccgctcgccttcaagcgcgaagacgtgctgcgttatggcgagaacccgcaccagtctgcggcgatctacgtgcctcaggtgacaggcgcacagggcgtgcctcaggccgagcagcttcagggcaaggcgctgagctacaacaacctcaatgatgccgatgccgcacttgagcttgcggcggaatttgcaggcggcgatccggcagtggtgatcgtcaagcacgccaacccttgcggtgtggcgcagggcgcgacgctgctcgacgcatggaacgcggcgctgcaatgcgacagcgtttcggcattcggcgggatcgtcgcggtcaacaccgagctcgacggtgcgaccgcagaggcgattgcgagcatcttcaccgaagtcatcatcgcgcccaaggtcagcgaagaggctcgcgccatctttgcgaagaagaagaacctgcgcgttctcgaatgcggcacgctgcccgatccgcgccggggcggcttcttcatgaagacgattgcaggcggcatgctgatccagggccgcgacaatggcgcggtggccgaggccgacctcaaggtcgtgaccaagcgcgaacccacagcgcaggaactcaaggactgcttcttcgcctggaccgtggcgcgtcacgtcaagtcgaacgcgatcgtctatgccaaggacggcgcgaccgcagggatcggtgcaggccagatgaaccgccgcgactcggcgcgcatcgctgcgatcaaggcgaaggaagcggctgagacctacgagtgggcagaaccccggaccgtgggcagcgcggtcgcctcggatgcgttcttccccttcgccgatggcctgatcgctgccgccgaagcaggggcgagcgcggtgatccagcccggcggctcgatccgcgacgaagaggtgatcgcggccgccgacgaagcggggctcgcgatggtatttaccgggatgcggcatttcaggcactaa

SEQ ID NO: 56376 - protein, 540 aa, Erythrobacter sp. NAP1
MSEKAIKRALLSVSDKTGLADLGKALAERGVELVSTGGTARALREAGLEVRDVSDLTGFPEMMDGRVKTLHPKVHGGLLALRDNDEHVAAMEAHEIGAIDLVVVNLYPFEATVAKGAERAEIIENIDIGGPSMVRSAAKNHGFVTIMTDAADYPELLEELDANDGATSHAFRIRMAGKAYARTAAYDAAIANWFAFGDAFTNPLGMEALKATPFVETMPLAFKREDVLRYGENPHQSAAIYVPQVTGAQGVPQAEQLQGKALSYNNLNDADAALELAAEFAGGDPAVVIVKHANPCGVAQGATLLDAWNAALQCDSVSAFGGIVAVNTELDGATAEAIASIFTEVIIAPKVSEEARAIFAKKKNLRVLECGTLPDPRRGGFFMKTIAGGMLIQGRDNGAVAEADLKVVTKREPTAQELKDCFFAWTVARHVKSNAIVYAKDGATAGIGAGQMNRRDSARIAAIKAKEAAETYEWAEPRTVGSAVASDAFFPFADGLIAAAEAGASAVIQPGGSIRDEEVIAAADEAGLAMVFTGMRHFRH

SEQ ID NO: 56377 - DNA, 1605 bp, Synechococcus sp. RS9917
  CDS (1)..(1605): transl_table=11
atggcacccaccgccctgttgagcgtgtccgacaagcgtgggctggtgaccctggcggaggccctgcatcgccgtcatggcttccggctgctctccagcggaggcaccgcagcggtgctcgagcaggccggttgtcctgtgactcgggtggcggatcacaccggagcaccggagattctgggtggccgggtgaaaacactgcacccccgcattcatggcggcatcctggcgaagcggggcgatcccaaccacgacgccgacctggcggcgcagcagatcgatcggatcgatctggtggtggtgaacctgtatcccttccgcgaaacggtggccgatccagacgtgacctgggacacggcgatcgaaaccattgatatcggtgggcccaccatggtgcgctcggctgccaaaaaccatgccgatgtggcggtgctcaccagccctgagcaatacgacagggtgatcgcagccctcgaccgccccggtgggatcgatgccggcttgcgtcgccggcttgcgctcgaggcgtttgcccataccgccgcctacgacaccgccatcagcaactggatgaacgaccggatgcggagggccgagaacgccactgggtcacaggagggcgatgacgacgaggctgctgcgctgccctggctggaagccgttcccctgcgtcagcgcctgcgctacggcgaaaacccccatcagcaggccagttggtacagcagcccccgcggcggttgggggggtgccctgcaactgcagggcaaggagctcagcaccaacaacctgctcgatctggaggcggccctcgccaccgtgcgcgagttcggttacggcagcgacgggcgtcaccccgcccagcaacctgccgccgtggtggtgaagcacaccaatccctgcggtgtggccgtcgccgatgcggtggcggcggcgctcacccgggctctggatgcggatcgggtgagtgctttcggcggcatcgttgccctcaacggcgtggtggaggcggcggcggccagggaactcaccggcttgttcctggagtgcgtggtggccccgggctacaccgcggaggcgcgccacatcctggcggcgaaagccaacctgcgcctgctggaactggcacccgcggccatcgacgctgccggccatgcgcatgtgcgcagcatcctcggcgggttgttggtgcaggacctcgatgatcagccgatcgatcccgccagctggaccgtggcgacgcaacgtccgcccacggcccaggagcaggcggatctgcgcttcgcctggcagttggtgcgccacgtgcgttcgaacgcgattgtggtggccagggctggacagagtctgggggtgggggccggccagatgaaccgggtcggttccgctcgcctggcgctcgaggcggccggggatcaggcccggggggcggtgctggccagcgatggctttttccccttcgacgacacggtgcgcctggccgcgagccatggcatcaccgcagtgattcaccccggcggcagcctgcgcgatgccgattcaatcaaggcctgcgatgaactcggtctggcgatgctgctcaccggccgccgtcatttcttgcattga

SEQ ID NO: 56378 - protein, 534 aa, Synechococcus sp. RS9917
MAPTALLSVSDKRGLVTLAEALHRRHGFRLLSSGGTAAVLEQAGCPVTRVADHTGAPEILGGRVKTLHPRIHGGILAKRGDPNHDADLAAQQIDRIDLVVVNLYPFRETVADPDVTWDTAIETIDIGGPTMVRSAAKNHADVAVLTSPEQYDRVIAALDRPGGIDAGLRRRLALEAFAHTAAYDTAISNWMNDRMRRAENATGSQEGDDDEAAALPWLEAVPLRQRLRYGENPHQQASWYSSPRGGWGGALQLQGKELSTNNLLDLEAALATVREFGYGSDGRHPAQQPAAVVVKHTNPCGVAVADAVAAALTRALDADRVSAFGGIVALNGVVEAAAARELTGLFLECVVAPGYTAEARHILAAKANLRLLELAPAAIDAAGHAHVRSILGGLLVQDLDDQPIDPASWTVATQRPPTAQEQADLRFAWQLVRHVRSNAIVVARAGQSLGVGAGQMNRVGSARLALEAAGDQARGAVLASDGFFPFDDTVRLAASHGITAVIHPGGSLRDADSIKACDELGLAMLLTGRRHFLH

SEQ ID NO: 56379 - DNA, 1554 bp, Synechococcus sp. WH 5701
  CDS (1)..(1554): transl_table=11
atggcccccaccgcgctgctgagtgtgtcggacaagcagggcgtggtggaactcgccacggccctgcaccatcgccatggctacagcctgctctccagtggcggcaccgcggccaccctggccgctgccggcctgccggtgacccgcgtggccgatcacaccggtgctccggagatcctcggtggccgggtcaagaccctgcatccgcgcatccacggcggcatccttgcccgccgggaggatccggcccaccgagctgatcttgaggcccaggcgatcacccccatcgatgtggtggtggtgaacctctaccccttccgcgaaacggtggctgacccggccgtgtcctgggagaaggcggtagaaacgatcgacatcggtggtccggccatggtgcgtgccgccgccaagaaccatgccgatgtggcggtgctcaccgaccccggccagtacgccgacttcctctcggccctggccgacgatcgggtcgatgctgccctgcgccgccagctcgccctggaggcgttccgccacacggccagctacgacagcgccatcagcgcctggttggcggagaagttggagcccgcggccgctcagcaggatcttcccctgcggctggagttgcccttgcgtcagaccctgcgctacggcgagaacccccatcagcaggccagctggtacagcgagccccgggctggctggggcggggcccggcagctgcagggcaaggaactcagcttcaacaacctgctcgacctcgatgctgccctggccaccgtgagggagttcggctacggcggcgaggtccagccggcggctgtcgtggtcaagcacaccaacccctgtggggtggccgtgggcagcagcgccgccgaggccctgcagcgggccctggaggcggattcggtttcggcctttggcggcatcgtggccctcaacgcggtggtggatgggaccagcgccgagcggctcaccagcctgttcctggaatgcgtcgtggcgcctgggtacagcgaggaggccctcgcacgcctgggggccaaggccaatctgcgcctgctggagctgcccgcagcggcggtggcgcgggcgccgcggcggcaactgcgcactgtgctcggcggcctcctggcccaggacctcgatgatcagcccgccagcgaagacgattggcaggtcgtcagtcagcggccgcccagccccgccgagctcgacgacctgcgttttgcctggcgcctggtgcgccatgtgcgctccaacgcgatcgtggtggccagcggcggggtcagcctggggatcggtgccggtcagatgaaccgggtgggctccgcccggctcgccctggaggcggccggagcgggcagccagggggctgtgctcgccagtgatggcttcttccccttcgcggacaccgtgcggctggcagcgaagcatgggatcaccgcggtgattcagccaggcggcagcgtgcgcgacggggagtcgatccaggcctgcgatgaactcgatctggcaatggtctgcaccggccggcgccacttcctgcactga

SEQ ID NO: 56380 - protein, 517 aa, Synechococcus sp. WH 5701
MAPTALLSVSDKQGVVELATALHHRHGYSLLSSGGTAATLAAAGLPVTRVADHTGAPEILGGRVKTLHPRIHGGILARREDPAHRADLEAQAITPIDVVVVNLYPFRETVADPAVSWEKAVETIDIGGPAMVRAAAKNHADVAVLTDPGQYADFLSALADDRVDAALRRQLALEAFRHTASYDSAISAWLAEKLEPAAAQQDLPLRLELPLRQTLRYGENPHQQASWYSEPRAGWGGARQLQGKELSFNNLLDLDAALATVREFGYGGEVQPAAVVVKHTNPCGVAVGSSAAEALQRALEADSVSAFGGIVALNAVVDGTSAERLTSLFLECVVAPGYSEEALARLGAKANLRLLELPAAAVARAPRRQLRTVLGGLLAQDLDDQPASEDDWQVVSQRPPSPAELDDLRFAWRLVRHVRSNAIVVASGGVSLGIGAGQMNRVGSARLALEAAGAGSQGAVLASDGFFPFADTVRLAAKHGITAVIQPGGSVRDGESIQACDELDLAMVCTGRRHFLH

SEQ ID NO: 56381 - DNA, 1587 bp, Synechococcus sp. WH 7805
  CDS (1)..(1587): transl_table=11
atggctcccacagcgctgctcagtgtgtctgacaagagtggtctggtgccactggccaagaccctgcatgaacgttgtgggtatcagcttctttccagtggcggcacggccaaggtgttgaaggaggccggcctgccggtcacgccagtggcagagcacaccggtgcccccgagatccttggtggtcgtgtgaagacgctccacccccgcatccatggcggaatcctggctcgtcgtggtgatccagagcatgaagcggatcttctggctcagcagatcacaccgattgatgtggtggtggtcaatctgtatcccttccgtgagaccgtcgctgatcccgctgtggattgggagcgtgcgattgagaacatcgacatcggagggcccacgatggtgcgttccgcagccaagaaccatgaacacgtggctgtactgacggatccggaccaatacgaccgctttctccaggatctggctcaatcaggaggaaccgtgagttctgggctgcggcggcggcttgccctggaggcgtttgctcacacagcggcctatgacgctgcgatcacgcgctggatgcagagcaggtctgagctgcagcaagtcgatgacccttcagcaactgcgctcccatttttgcaagcactgcccctgcgtcagcggctgcgttatggagagaatcctcaccaacgtgcggcctggtacagcgcacccaagactggctggggaggtgccatccagttgcagggaaaggagctgagcaccaataaccttctcgatcttgaagcagccctcgccacggtgcgggaatttggctacggcaagggtggggcctacccggctttgcgtccggcggctgttgtggtcaaacacaccaatccctgcggagtggcggtcgccgatggcgaagcagccgctctcacccgagccctggatggcgatcgggtcagtgccttcggaggcattgtggcggtcaatggtcgcgtggatgcccacgctgcccgtgaactcaccagcttgttcctggagtgcgtggtggcgccggagtatgcgcctgaggccagagagattctcgcgtcgaagggcaatctcagggttttggagcttccacccactgccatcgatgctgccgggcatgaccatgtgcgcagcatcctgggtggtctgctggttcaggatctcgatgaccatccggtcgcggcggacgggtggacggtggccaccgagcgggctcctagtcaggctgagcacgatgacctgtgcttcgcctggcagttggtccgtcatgtccgctctaatgccatcgtcgtggccagagacggtcagagcctcggaatcggcgcaggccagatgaatcgggttggatcagcccgaatcgccctcgaggcttcaggggatcgtgtccgcggtgccgtccttgccagtgatggcttcttcccattcgatgacacggtgcgactggctgcgcagcacggcatcacggctgtgattcaccctggtggcagcaaacgtgacgaggattccgtcaaagcctgcaacgaattggggctggcgatgctgctaacaggccggcgacattttctgcactga

SEQ ID NO: 56382 - protein, 528 aa, Synechococcus sp. WH 7805
MAPTALLSVSDKSGLVPLAKTLHERCGYQLLSSGGTAKVLKEAGLPVTPVAEHTGAPEILGGRVKTLHPRIHGGILARRGDPEHEADLLAQQITPIDVVVVNLYPFRETVADPAVDWERAIENIDIGGPTMVRSAAKNHEHVAVLTDPDQYDRFLQDLAQSGGTVSSGLRRRLALEAFAHTAAYDAAITRWMQSRSELQQVDDPSATALPFLQALPLRQRLRYGENPHQRAAWYSAPKTGWGGAIQLQGKELSTNNLLDLEAALATVREFGYGKGGAYPALRPAAVVVKHTNPCGVAVADGEAAALTRALDGDRVSAFGGIVAVNGRVDAHAARELTSLFLECVVAPEYAPEAREILASKGNLRVLELPPTAIDAAGHDHVRSILGGLLVQDLDDHPVAADGWTVATERAPSQAEHDDLCFAWQLVRHVRSNAIVVARDGQSLGIGAGQMNRVGSARIALEASGDRVRGAVLASDGFFPFDDTVRLAAQHGITAVIHPGGSKRDEDSVKACNELGLAMLLTGRRHFLH

SEQ ID NO: 56383 - DNA, 1593 bp, Pseudoalteromonas tunicata D2
  CDS (1)..(1593): transl_table=11
atggatacacttcgtcctattcgccgcgccctactgagcgtgtctgacaaaactggtattgttgaattcgctcgcgccctagctgctaaaggtgttgatattttatctactggtggaacgtgtaaactcttagccgacaatggcatccaagttacagaagtgtcagattatactggtcaccctgaaattatggacggtcgtgttaaaacccttcacccaaaaattcatggtggcattttagcccgccgtggtactgatgaagcggttatggctcaaaacaacatttctgaaatcgatatggttgtagttaacctttacccatttgcggcaacggttgccaaagaaggatgtagtttagaagatgcgattgaaaacatcgacatcggtggcccaacaatggtacgtgctgcagctaaaaataataaagatgtcaccattattgttaatgcggatgattatagtcgcgttattgctgaaatggatgcaaacaatggcgctacaacctatcaaactcgttttgatttagcgattgccgcttttgagcacaccgcacaatacgatggcatgattgcgaactattttggaactaaagtacctgattacagcgaaaatgcagctgagcatccagattcagctttccctcgcactattaacttccagtttaagaaaaaacaagacatgcgttatggtgaaaattcacaccaaaatgcagcattttatgttgaaaatgacatcgtcgaagcgtcagttgcaacagccaaacaattacaaggcaaagccctttcttataacaacattgctgataccgatgcagccctagagtgtgttaaagaatttgttgagccagcttgtgttatcgttaaacatgcaaacccgtgtggtgtgtctgttggcgcaaacattttagcagcttacgagcgcgcctttaaaacggatccaacatcggcttttggtggcatcattgcgtttaaccaagagttagatgcagacactgcagaagcgattgtatcgcgccaatttgttgaagtaattattgcgccaagcgtgtctgaagaagcggctcaaatagttgcggctaaacaaaatgtacgtttattagaatgtggtcaatggtcagcaaaaacatctggccttgatattaaacgcgttaatggtggcattttagtacaagaccgcgatttaggcatggtgacacaaggcgaccttaaagttgtctcaaaacgccaaccaacagaacaagaattaaacgatttgatgttcagctggaaagttgcaaaatttgttaaatctaatgcgattatttatgctcgtgacggcatgacaattggtgtcggtgcaggtcaaatgagccgtgtttactctgctaaaattgcaggcattaaagcggctgacgaaaaccttgaagtaaaaggttcagtaatggcttctgatgcatttttcccatttagagatggtattgatgcagctgccaatgcaggcataacagccgtaattcaaccaggtggttcgatgcgtgatgacgaagttattgccgcagcagacgagcatggtatggcaatggtctttactggcatgcgtcactttcgccactaa

SEQ ID NO: 56384 - protein, 530 aa, Pseudoalteromonas tunicata D2
MDTLRPIRRALLSVSDKTGIVEFARALAAKGVDILSTGGTCKLLADNGIQVTEVSDYTGHPEIMDGRVKTLHPKIHGGILARRGTDEAVMAQNNISEIDMVVVNLYPFAATVAKEGCSLEDAIENIDIGGPTMVRAAAKNNKDVTIIVNADDYSRVIAEMDANNGATTYQTRFDLAIAAFEHTAQYDGMIANYFGTKVPDYSENAAEHPDSAFPRTINFQFKKKQDMRYGENSHQNAAFYVENDIVEASVATAKQLQGKALSYNNIADTDAALECVKEFVEPACVIVKHANPCGVSVGANILAAYERAFKTDPTSAFGGIIAFNQELDADTAEAIVSRQFVEVIIAPSVSEEAAQIVAAKQNVRLLECGQWSAKTSGLDIKRVNGGILVQDRDLGMVTQGDLKVVSKRQPTEQELNDLMFSWKVAKFVKSNAIIYARDGMTIGVGAGQMSRVYSAKIAGIKAADENLEVKGSVMASDAFFPFRDGIDAAANAGITAVIQPGGSMRDDEVIAAADEHGMAMVFTGMRHFRH

SEQ ID NO: 56385 - DNA, 1593 bp, Photobacterium sp. SKA34
  CDS (1)..(1593): transl_table=11
atggaaaacgctcgtcctattcgccgtgcactgatcagcgtatcagacaaaacaggtattgtggaattcgcacaggctcttgccaatcgcggcgtagaaatcttatcgactggcggtaccgctcgtttacttgccgagaaaaacattcaagttactgaagtttctgattacaccggtttcccagaaatgatggatggccgtgtaaaaacccttcacccaaaagttcatggtggcgtactaggtcgtcgtggtactgacgacgaagtaatggaaaagcacggcattaaccctatcgatatggttgttgttaacctttacccttttgctgaaaccgttgccaaagccggttgtacgctagccgatgcggttgagaatatcgatatcggtggaccaacaatggtacgctctgctgcgaaaaaccataaagatgtagcgattgtcgttaatgcgcatgattacgaccgcgtactaacagaaattagcactaacaatggctcactaactcatgcaacacgttttgatttagctatctcggcttttgaacatactgcggcttacgacggtatgatcgccaactacttcggtaccatggtgccatcttacggcgacaacaaagaaggtgatgaggaatcgaagtttccacgcactttcaatcagcagttcgagaaaaaacaagacatgcgctacggtgaaaacagccaccaagcagcagcattctatgttgaagcaaacccacaagaagcttctgtcgcaacagcaacgcaacttcaaggtaaggcgctatcatacaataatatcgccgatactgatgccgcacttgagtgtgtgaaagagtttgatttacccgcttgtgtgattgtaaagcatgctaacccatgtggcgtagctctcggtgacaatttacttgaagcctacgatcgcgcttacaaaacagacccaacctcagcatttggcggcattattgcgttcaacggtgaattagatgctgcaaccgcacaagcgattgttgaacgtcaatttgtcgaagttattatcgcaccaaaagtatcagcagaagcagcagccgttgttgcaaccaagaaaaacttacgtctgcttgagtgtggcgaatggacaaccaaaaccacaggttttgacgttaaacgtgttaatggtggtttgttggttcaagaccgtgaccaaggtatggtatcggttgatgatttaactgtagtcagtcaacgtcaacctaccacagacgaactgcgtgacgcactattttgctggaaagtagcgaaatacgtgaaatcaaacgcgattgtgtatgcaaaaggcaatatgaccatcggtgtcggcgcaggccaaatgagccgcgtttattctgccaaaattgcaggcattaaagccgctgacgaaaacctagaagttgcgggtagcgtaatggcatcagatgcattcttcccgttccgtgatgggattgatgcagcagcagaagcaggcattacttgtgttatccagccgggtggttcaatgcgtgatgatgaagtcattgctgccgctgacgagcatggcatggcgatggtatttaccggtatgcgccacttccgccactaa

SEQ ID NO: 56386 - protein, 530 aa, Photobacterium sp. SKA34
MENARPIRRALISVSDKTGIVEFAQALANRGVEILSTGGTARLLAEKNIQVTEVSDYTGFPEMMDGRVKTLHPKVHGGVLGRRGTDDEVMEKHGINPIDMVVVNLYPFAETVAKAGCTLADAVENIDIGGPTMVRSAAKNHKDVAIVVNAHDYDRVLTEISTNNGSLTHATRFDLAISAFEHTAAYDGMIANYFGTMVPSYGDNKEGDEESKFPRTFNQQFEKKQDMRYGENSHQAAAFYVEANPQEASVATATQLQGKALSYNNIADTDAALECVKEFDLPACVIVKHANPCGVALGDNLLEAYDRAYKTDPTSAFGGIIAFNGELDAATAQAIVERQFVEVIIAPKVSAEAAAVVATKKNLRLLECGEWTTKTTGFDVKRVNGGLLVQDRDQGMVSVDDLTVVSQRQPTTDELRDALFCWKVAKYVKSNAIVYAKGNMTIGVGAGQMSRVYSAKIAGIKAADENLEVAGSVMASDAFFPFRDGIDAAAEAGITCVIQPGGSMRDDEVIAAADEHGMAMVFTGMRHFRH

SEQ ID NO: 56387 - DNA, 1581 bp, Oceanospirillum sp. MED92
  CDS (1)..(1581): transl_table=11
atggcagagaacatcactccggttcgccgagcactcattagcgtatctgataaatcaggtatcgttgagttcgcacaggccctaaacgctcgcggcgtcgagatcctttcaacaggtggaacgtataagttgttaaaagataacaacattccagcagttgaagtttcggactacacaggcttcccagaaatgatggatggacgtgtaaaaacgcttcacccaaaagttcacggcggcattctgggtcgtcgcggtcaggatgatggcatcatgtccgaacacgggattaacccaatcgatatggttgttgttaacctttatccgttcgctgctactattgctcgccctgattgtgatctacctatggcgatcgaaaatatcgacatcggtggaccaacgatggttcgctcagcggcaaaaaaccataaagatgttgctattgtcgtaaacgcttctgactacgacagtgttgtagctgaaatggattccgaaaaaggtctaacgcacaaaactcgttttgacctagcagtaaaagcgttcgagcacactgcaggctatgacggcatgattgctaactacctgggcgcaatcgttgaaggcgaagatgagaaaccagcggatttcccacgtactttcaacactcagttcgttaaagcacaagatatgcgttacggggaaaaccctcaccagcgcgctgctttctacgttgaagaagagccagcagaagcctctgtttccacagcgcgccagttacaaggcaaggcgctttcttttaataacgtagcggatactgacgctgcccttgaatgcgttaaatcattcaaagagcctgcttgtgtaatcgttaagcacgcaaatccatgtggtgtagcggtcggtgcagacattttggaagcatacaaccgtgctttccagactgatccaacatctgctttcggaggcatcatcgcattcaaccaggaactggatggcaacacagctaaagcgatcgttgatcgccagttcgttgaagtgatcattgcgcccaaagtaactcaggaagcatccgacatcgttgcgactaagccgaatgttcgcctacttgagtgtggcgaatggtctgctaaccgtgcacatggctttgactacaaacgcgttaacggtggtctactagtacaagaccttgatcttggccgtgtagatgcatctgaacttaaagtagtgtctaaagtacagccaacagaacaagagatccgtgatcttcttttctgctgggaagttgccaagttcgttaaatccaatgcaatcgtatacgcaaaggatggtcagacaatcggtatcggtgcaggtcagatgagccgtgtttatagtgccaaaattgctggcattaaagcggcagatgaaggccttaaagttgaaggctcagtaatggcttctgacgcattcttcccattccgtgacggcattgattccgcagctgctgcgggtatcaagtgtgttattcagccaggcggctcgatgcgcgatcaggaagtgattgatgcagcggatgaacatggtatggctatggtcttcaccggcatgcgccacttccgtcactaa

SEQ ID NO: 56388 - protein, 526 aa, Oceanospirillum sp. MED92
MAENITPVRRALISVSDKSGIVEFAQALNARGVEILSTGGTYKLLKDNNIPAVEVSDYTGFPEMMDGRVKTLHPKVHGGILGRRGQDDGIMSEHGINPIDMVVVNLYPFAATIARPDCDLPMAIENIDIGGPTMVRSAAKNHKDVAIVVNASDYDSVVAEMDSEKGLTHKTRFDLAVKAFEHTAGYDGMIANYLGAIVEGEDEKPADFPRTFNTQFVKAQDMRYGENPHQRAAFYVEEEPAEASVSTARQLQGKALSFNNVADTDAALECVKSFKEPACVIVKHANPCGVAVGADILEAYNRAFQTDPTSAFGGIIAFNQELDGNTAKAIVDRQFVEVIIAPKVTQEASDIVATKPNVRLLECGEWSANRAHGFDYKRVNGGLLVQDLDLGRVDASELKVVSKVQPTEQEIRDLLFCWEVAKFVKSNAIVYAKDGQTIGIGAGQMSRVYSAKIAGIKAADEGLKVEGSVMASDAFFPFRDGIDSAAAAGIKCVIQPGGSMRDQEVIDAADEHGMAMVFTGMRHFRH

SEQ ID NO: 56389 - DNA, 1548 bp, Flavobacteria bacterium BBFL7
  CDS (1)..(1548): transl_table=11
atgagcaacatcaccgcaaaatctgcattaatttctgttttccataaagacggattagaacctattgttaagaaaatgagcgaattaggaatcgctatttactcaactggtggtacagaaaaatttattaacgacttagggatacctgtgattccagtagagaatgtaacgtcatatccatctattttaggtggtcgagttaagacattacatcctaaggtatttggagggattttaaatcgtcgtgatcatgaaggtgatgtggcgcaacttgcagagtatgatataccgcaaattgatattgttatagtcgatttgtatccttttgaaaagaccgtagctagtggagcaccagaacaagatattattgaaaaaattgacataggtggtatctcacttatacgcgcagctgcaaaaaactttaaagacacactttgtgtatctaccatggatgattatggtaagttgttaaacgtgctagaagaaggaaatggaacaacaactgtagatcagcgcaaagaatttgccgcaacagcctttgatatttcttctcattatgacagtgcgatatataattattttgctggtgattctgtgaataagtctcttaaaatgagtcaacaagatgtcatgccattgcgttatggagaaaatcctcatcaacgtggctggttctatggtgattttgaaagtatgtttactaagttacatggtaaggcgctttcttataacaatttactagatgtagatgccgctgttaatttgatgagtgagtttgtagatgacgctccgacatttgcagtgtttaaacataataatgcttgtggagtggctcaaagagataccattcaccaggcatatgtagacgctcttgctggtgatccagtatctgcatttggagggattttaatatctaatgtggagatcgatgtagctacagcgacagaaattcataaactattttgtgaggtagtaattgcaccttcattcgatcctgcagcacttgaaattttaaaaggtaagaagaatagaatcatgctggaacttgttggagatgcgctttcgcgaaagcgtaatactaacgctctagaagtaagagctagcttaaatggttatctagtccaggatgctaatctaaaaacagatacaaaggaagatttaaaaacggcaacagagttagctcctacggaagcacaaatagaagatttattatttgcttcaaagctttgtaagcatactaagtctaataccatcgtactggcaaagaataaacaattgtgtgctagtggaactggtcagacgtctcgagttgatgcgttaaatcaggcaattcataaagcgcagtcttttaaatttgatttacaaggtgctgtgatggcaagtgatgcatttttcccttttccagattgtgtagaaattgcagataatgcaggtgttaaagccgtcatacaaccaggtggatctataaaagatgaattatcgatagattattgcaataaaaatgatattgcgatggttttcactggtacaagacactttaaacactaa

SEQ ID NO: 56390 - protein, 515 aa, Flavobacteria bacterium BBFL7
MSNITAKSALISVFHKDGLEPIVKKMSELGIAIYSTGGTEKFINDLGIPVIPVENVTSYPSILGGRVKTLHPKVFGGILNRRDHEGDVAQLAEYDIPQIDIVIVDLYPFEKTVASGAPEQDIIEKIDIGGISLIRAAAKNFKDTLCVSTMDDYGKLLNVLEEGNGTTTVDQRKEFAATAFDISSHYDSAIYNYFAGDSVNKSLKMSQQDVMPLRYGENPHQRGWFYGDFESMFTKLHGKALSYNNLLDVDAAVNLMSEFVDDAPTFAVFKHNNACGVAQRDTIHQAYVDALAGDPVSAFGGILISNVEIDVATATEIHKLFCEVVIAPSFDPAALEILKGKKNRIMLELVGDALSRKRNTNALEVRASLNGYLVQDANLKTDTKEDLKTATELAPTEAQIEDLLFASKLCKHTKSNTIVLAKNKQLCASGTGQTSRVDALNQAIHKAQSFKFDLQGAVMASDAFFPFPDCVEIADNAGVKAVIQPGGSIKDELSIDYCNKNDIAMVFTGTRHFKH

SEQ ID NO: 56391 - DNA, 1602 bp, Oceanobacter sp. RED65
  CDS (1)..(1602): transl_table=11
atggcaagtgcatccgcaattactcctgttcgtcgcgcgcttatcagtgtttctgataaaaccggcatcgtagaattcgctcaagccctagcggcacaaaatgtagagattctctccactggtggtaccttcaaactgttacgcgaaaatggtgttgatgccattgaggtaagcgattacacaggtttccctgaaatgatggatggccgtgtcaaaacgcttcatcctaaaatccacggtggtgttttaggacgtcgcggacaagacgatgccgtcatgagcgagcacggaatcaaccctattgatctagtcgtagtcaatctatacccgtttgaagcgaccacagcgaatcccgattgcacgttggaagatgccattgaaaacattgatatcggtggtccaaccatggttcgaagtgcggcgaaaaataacgcccacgtaggtattgtggtgaatgcatcagactacgatgctgttctagcggatatcgagaataaaaaaggcctaagctcgaaattgcgttttgatctagcactaaaagcgtttgaacacactgctgcgtacgacggtatgattgctaactatcttggtcgcattaatcaacaagcagacgagctgactacagcagatatgtctgaattcccgcgtacgttcaacacccaatttgttaaggcacaggacatgcgctatggtgagaaccctcaccaaaatgcagcgttttatgtggaagccaatcccaaagaagccagcattgcaacggctcaacaaattcaaggtaaagagctttcattcaataacgtggctgatacagatgcagcgcttgagtgtgtaaaatcctttactaaacctgcctgtgtcatcgttaaacacgccaacccttgtggtgtagccgtcagcgaaaatggcatcaaagaagcctacgacttagccttcgccaccgatactgaatctgcattcggcggcatcattgctttcaaccgtgaattagatggcgaaacggctgctgccattgttgagcgtcaattcgtagaagtcatcattgcaccaagtgtttccagcgatgctcgcttagctgttgcaagcaagaaaaacgttcgcttattggaaaccggcgagtggtcaaccgagcgcgtcaatggcttagactataaacgcgtaaacggcggtctattggtgcaagaacgcgacaacggcatgattacagaagccgacctaaaagtggttactcaacgtcagccttctgaaaaagaaatgcatgatcttatctttgcatggaaagtggccaaatttgtgaaatcgaatgccattgtttatgccaagaatcgtcaaactgtcggagtaggcgcgggtcaaatgagccgagttaattctgctcgtatcgctgccattaaagcagagcatgctggtcttgaagtaaaaggttcagtcatggcatcggatgcgttcttcccattccgtgacggtatcgataatgctgcaaaagcgggtatcgcagcagtcattcagccaggcggttcgattcgtgatgaagaagtgattgccgctgcagatgaggcgggaatggcaatggtattcaccgggatgcgtcacttccgccattaa

SEQ ID NO: 56392 - protein, 533 aa, Oceanobacter sp. RED65
MASASAITPVRRALISVSDKTGIVEFAQALAAQNVEILSTGGTFKLLRENGVDAIEVSDYTGFPEMMDGRVKTLHPKIHGGVLGRRGQDDAVMSEHGINPIDLVVVNLYPFEATTANPDCTLEDAIENIDIGGPTMVRSAAKNNAHVGIVVNASDYDAVLADIENKKGLSSKLRFDLALKAFEHTAAYDGMIANYLGRINQQADELTTADMSEFPRTFNTQFVKAQDMRYGENPHQNAAFYVEANPKEASIATAQQIQGKELSFNNVADTDAALECVKSFTKPACVIVKHANPCGVAVSENGIKEAYDLAFATDTESAFGGIIAFNRELDGETAAAIVERQFVEVIIAPSVSSDARLAVASKKNVRLLETGEWSTERVNGLDYKRVNGGLLVQERDNGMITEADLKVVTQRQPSEKEMHDLIFAWKVAKFVKSNAIVYAKNRQTVGVGAGQMSRVNSARIAAIKAEHAGLEVKGSVMASDAFFPFRDGIDNAAKAGIAAVIQPGGSIRDEEVIAAADEAGMAMVFTGMRHFRH

SEQ ID NO: 56393 - DNA, 1563 bp, Synechococcus sp. RS9916
  CDS (1)..(1563): transl_table=11
atggcacctttcgcgctgctgagtgtctccaacaaaacgggcctggtgcctttagcggaggctttgcatcgtcagcatggctatcagctgttgtccagcggcggtacggccaaggtgcttcaagaggccggcttgcctgtgaccaaggtggcggaacacacaggagcacctgagatcctgggaggacgcgtcaagacgctgcatccacgggtgcacggcggcatcctggccaagcgtgaagacgcctcccatcgcgccgatctcgagcagcagcacattccgctgattgacctggtggtggtcaatctctatcccttcagggaaacggtggctcggcccgatgtcacctgggatcaggcgatcgaaaatattgatatcggtggtccggccatggtgcgggctgcagccaaaaaccacgctgatgtggcggtgctcaccagcccggatcagtacgaccacgttttagaagcgctgcaaggctccggtgggggcgtgccggctgatctgcgtcgtcagctcgctctggaggcgtttcagcacaccgctgcctatgacacggcgatcagcacctggatgggggctcaggtggagaccgatgccgctccttggctggatgccgtgccccttcgccagaccttgcgctacggcgagaaccctcaccagcaagcccgttggtacagccagcccaagcagggttggggcggggcgcttcagctccaaggcaaggagttgagcaccaacaatctgctcgacctcgaggcggcactggccacggtgcgggaatttggtttcggcgtggatggtcgccaccctgctcagcaaccagcggctgtggtggtgaagcacaccaacccttgcggtgtggccgtgggtgatggtgtggcccacgcgctcaccagggccctcgatgctgaccgggtcagcgcgtttggcggcatcgtggccatcaatggggaggtggatgcggccgcggcccgggaactcaccagcctgttcctggagtgcgtggtggctccgggattcacggccgaagcccgcgaactgctggctgctaaggccaatctgcgcttactggaactcgctccggctgcgattgacgctgcaggccacaaccacgtgcgcagcatcctcggcggtgtgctggttcaggacctcgatgatcagcccattgatcccaccagctggactgttgccacccagcgccctccgacggatcaggaacgcgctgacttgcaattcgcctggcaactggtgcgccatgtgcgttccaacgccatcgtggtggccaagggtggccagagcttgggcgttggcgctgggcagatgaaccgtgtgggctcggcccgcctggctctcgaggcggctggcgatcaggtcaaaggggctgtgctggccagtgatggctttttcccgtttgacgacacggtgcgtttggcggccagccatggcatcaccgctgtgattcaccccggcggcagcatgcgcgatgccgattcgatcaaggcctgtgatgagctcggcctggcgatgctgctcaccggtcgccgtcattttctgcactga

SEQ ID NO: 56394 - protein, 520 aa, Synechococcus sp. RS9916
MAPFALLSVSNKTGLVPLAEALHRQHGYQLLSSGGTAKVLQEAGLPVTKVAEHTGAPEILGGRVKTLHPRVHGGILAKREDASHRADLEQQHIPLIDLVVVNLYPFRETVARPDVTWDQAIENIDIGGPAMVRAAAKNHADVAVLTSPDQYDHVLEALQGSGGGVPADLRRQLALEAFQHTAAYDTAISTWMGAQVETDAAPWLDAVPLRQTLRYGENPHQQARWYSQPKQGWGGALQLQGKELSTNNLLDLEAALATVREFGFGVDGRHPAQQPAAVVVKHTNPCGVAVGDGVAHALTRALDADRVSAFGGIVAINGEVDAAAARELTSLFLECVVAPGFTAEARELLAAKANLRLLELAPAAIDAAGHNHVRSILGGVLVQDLDDQPIDPTSWTVATQRPPTDQERADLQFAWQLVRHVRSNAIVVAKGGQSLGVGAGQMNRVGSARLALEAAGDQVKGAVLASDGFFPFDDTVRLAASHGITAVIHPGGSMRDADSIKACDELGLAMLLTGRRHFLH

SEQ ID NO: 56395 - DNA, 1587 bp, Alteromonadales bacterium TW-7
  CDS (1)..(1587): transl_table=11
atggatactcatcgtcccattcgtcgcgcacttttaagtgtgtctgataaaaccggtattgttgaattcgcccgcgcactagaagcacaaggtgtagatattttatcaactggcggtacgtgtaaactccttgctgataacggcataaaagtgactgaagtttcagatcacaccggtcaccctgaaatcatggatggccgcgtaaaaacccttcaccctaaaattcacggcggtattttagcccgtcgcggacaagatgaagatgtaatggcagataacaacatttctgcaatcgacatagttgtagttaacttatacccctttgcgaatactgtcgctcaagaaaactgcagccttgaagatgccattgaaaatattgatattggcggcccgacaatggttcgtgcagctgctaaaaatcacaaagacgtaacgattgttgtaaacgcaagcgattacgatcgcgttattagcgaaatgcaaaataacaatggttcaactacgtataaaacacgttttgatttagctattgccgcctatgagcacacagctcaatacgatggcatgattgctaattactttggcaaaatggttcctgattacactgaagaagccgttgaagacactaagttcccacgtactatcaacatgcaattcactaaaaagcaagatatgcgttacggtgaaaactcacatcaagatgctgctttttacgttgaaaacgatgtaagtgaagcatcagttgcaactgctactcagttacaaggtaaagcattgtcgtttaataacattgcagataccgatgcagcccttgagtgcgttaaagaatttgatgtacctgcgtgtgttattgttaaacacgcaaacccgtgtggtgtttcaattggtgaagatattcttagcgcttacgaccgtgcatttaaaacagacccaacatcagcatttggcggcattattgcctttaaccgcgagcttgacgctgcaacagcacaagctattgttgaccgtcaatttgttgaagtgattattgccccgagcatttcaagtgaagctgcaaaaattgttgaagctaaaaagaacgtgcgtttattagtgtgtggacaatggactggcaaagcaacgggccacgatattaaacgcgtaaacggcggcgttttagtacaagatcgcgacctaggtatggttacccaaggcgacttaaaagttgtctctaagcgtcagccatctgagcaagaacttaaagatttactgttttgctggaaagtcgctaagtttgttaaatcaaacgcgattgtgtatgcccgcgacggtatgactattggtgtaggcgcaggccaaatgagccgcgtttactctgctaaaatagcgggtattaaagctgctgatgaaaacctagaagtaccgggttctgttatggcatcggatgcgtttttcccattccgcgatggcatagatgctgctgcagaggctggtataacagcggttattcaaccgggtggttcaatgcgcgatgaagaagttatcgcggccgcggatgaagcgggcatggctatggtgtttactggcatgcgtcacttccgccactaa

SEQ ID NO: 56396 - protein, 528 aa, Alteromonadales bacterium TW-7
MDTHRPIRRALLSVSDKTGIVEFARALEAQGVDILSTGGTCKLLADNGIKVTEVSDHTGHPEIMDGRVKTLHPKIHGGILARRGQDEDVMADNNISAIDIVVVNLYPFANTVAQENCSLEDAIENIDIGGPTMVRAAAKNHKDVTIVVNASDYDRVISEMQNNNGSTTYKTRFDLAIAAYEHTAQYDGMIANYFGKMVPDYTEEAVEDTKFPRTINMQFTKKQDMRYGENSHQDAAFYVENDVSEASVATATQLQGKALSFNNIADTDAALECVKEFDVPACVIVKHANPCGVSIGEDILSAYDRAFKTDPTSAFGGIIAFNRELDAATAQAIVDRQFVEVIIAPSISSEAAKIVEAKKNVRLLVCGQWTGKATGHDIKRVNGGVLVQDRDLGMVTQGDLKVVSKRQPSEQELKDLLFCWKVAKFVKSNAIVYARDGMTIGVGAGQMSRVYSAKIAGIKAADENLEVPGSVMASDAFFPFRDGIDAAAEAGITAVIQPGGSMRDEEVIAAADEAGMAMVFTGMRHFRH

SEQ ID NO: 56397 - DNA, 1575 bp, marine gamma proteobacterium HTCC2080
  CDS (1)..(1575): transl_table=11
atgactgagtcacaccttgcccctgtacgccgcgccctaatcagtgtctctgacaaaaccggcatcgtcgattttgcgaaggcactggtcgatcgtaacgtcgcgttactgtctactggagggacctgcaagttgctccgtgaagcggggctgcctgttaccgaagtttctgaccataccggctttccggaaatgatggacgggcgtgttaaaacacttcaccccactattcatggcggtattttaggtcgtcgcggtaccgacgatggcgtgatggctagccatgacattgcccctatcgacatggtcgtagtcaatctgtatccctttgaggccaccgttgctcgcccggactgcagtctcgaggatgcgattgagaatatcgatatcggcggacccaccatggtccgtgccgcggcaaagaaccaccgcgacgtgaccattgttgtcgacgcaggggactatgcgtgtcttattgaagaactcgacgcccacgacaatgccatcagacacgaaacccgcttcgatctcgctataaaagcctttgaacatacggcacattatgacggcgctattgccaactattttggccagcagctaggtagtggtagcgagggtttccctcgcacgcttaacctacaactcgtcaaagctgaaaccatgcgctacggcgaaaacccccatcagcaagcggctttttacaaagagcactccccaaaagaagttggcatcgcaaccgcgacgcagctgcaagggaaagctctgtcttacaataatgttgctgataccgatgctgcattggagtgcgttaaaaatttccacgagcccgcttgcgtcattgtgaagcacgcaaacccttgtggcgttgccgtctcagactctctaggtgatgcctacgatctcgcgtttcacaccgatcccgaatcggccttcggtggcattattgcgtttaaccgcgaattggacgccgctaccgcccagacaattgttgaccggcaatttgttgaggtgattatcgctccagaggtcaatgccgcggcgttatctgtgattgcagcaaagaaaaatatacgcgttctcaaaaccggtgagtggagcgcgccagtcggcgcccaagactttaagcgggtcaatggtggcttgctagtacaagatcgggacgacgggatgattaatcgggacgacctgaaagtggtcagccaacgccagcccaccgaacaagagtggctcgatttacttttcgcttggaaagtcgccaaatttgtgaagtccaacgccatcatttatgcggccaataaccggacaattggcgtgggtgcaggacaaatgtcccgggtcaattctgcgcggattgctgcgattaaagcagagcatgccaagcttgaagttcggggtgcgatcatggcttcggatgcatttttcccctttcgcgatggtatcgacaatgccgccgagcgtggcattgctgcggtaatccagcctggcggctcaattcgagatgacgaaataattgcggctgccgatgaagcagggatggccatggtatttacaggcatgcgacatttccgtcactaa

SEQ ID NO: 56398 - protein, 524 aa, marine gamma proteobacterium HTCC2080
MTESHLAPVRRALISVSDKTGIVDFAKALVDRNVALLSTGGTCKLLREAGLPVTEVSDHTGFPEMMDGRVKTLHPTIHGGILGRRGTDDGVMASHDIAPIDMVVVNLYPFEATVARPDCSLEDAIENIDIGGPTMVRAAAKNHRDVTIVVDAGDYACLIEELDAHDNAIRHETRFDLAIKAFEHTAHYDGAIANYFGQQLGSGSEGFPRTLNLQLVKAETMRYGENPHQQAAFYKEHSPKEVGIATATQLQGKALSYNNVADTDAALECVKNFHEPACVIVKHANPCGVAVSDSLGDAYDLAFHTDPESAFGGIIAFNRELDAATAQTIVDRQFVEVIIAPEVNAAALSVIAAKKNIRVLKTGEWSAPVGAQDFKRVNGGLLVQDRDDGMINRDDLKVVSQRQPTEQEWLDLLFAWKVAKFVKSNAIIYAANNRTIGVGAGQMSRVNSARIAAIKAEHAKLEVRGAIMASDAFFPFRDGIDNAAERGIAAVIQPGGSIRDDEIIAAADEAGMAMVFTGMRHFRH

SEQ ID NO: 56399 - DNA, 1608 bp, Pseudomonas putida GB-1
  CDS (1)..(1608): transl_table=11
atgaccgaccagactacccgcctgccagtccgccgcgccctgatcagcgtctccgacaagaccggtatcctcgaattcgcccgtgagctgcagcagctcggtgtcgagatcctgtccaccggcggcacctacaagctgctcaaggacaacggcgtgaacgcggtggaagtggccgactacaccggcttcgccgaaatgatggatggccgggtcaagaccctgcacccgaaaatccacggcggcatcctcggccgtcgcggtaccgacgacgccatcatgaacgagcacggcatcaagccgatcgacctggttgcggtcaacctgtacccgttcgaagccaccatttccaagcctggctgtgacctgccgaccgccatcgagaacatcgacatcggcggcccgaccatggtccgctcggcagccaagaaccacaaagacgtcgccatcgtggtcaacgccagcgactacgccggcatcgtcgaaggcctcaaggtcggcggcctgacctacgcccagcgcttcgacctgatgctcaaggcgttcgaacacaccgccgcctacgacggcatgatcgccaactacatgggcaccatcgaccaggccaaggacaccctctcgactgccgatcgcagcgaattcccgcgcaccttcaacagccagttcgtcaaagcccaggaaatgcgctacggcgaaaacccgcaccagagcgcggcgttctacgtcgaagccaaaaaaggcgaagccagcatttccaccgccatccagctgcaaggcaaggaactgtcgttcaacaacgtggccgacaccgacgccgcgctggagtgcgtgaagagcttcgtcaagccagcctgtgtcatcgtcaagcacgccaacccatgcggcgtggccgttgtgcctgaagaggaaggcggcatccgtaaggcctacgacctggcctacgccaccgacaccgagtcggcattcggcggcatcattgccttcaaccgcgaactggacggcgaaaccgccaaggccatcgtcgaccgtcagttcgtcgaagtgatcatcgccccgaaaatttctcaggctgcccgcgacgtggtagcggccaagcagaacgtacgcctgctggagtgcggcgagtggccagccgagcgcgctgccggctgggacttcaagcgcgtcaacggtggcctgctggtgcaaagccgcgatatcggcatgatcactgccgatgacctgaagatcgtcaccaagcgtgccccgaccgagcaagaaatccacgacctggtattcgcctggaaagtggccaagttcgtcaagtccaacgccatcgtctacgccaagcagcgccagaccatcggcgtcggcgctggccagatgagccgcgtcaactccgctcgcatcgctgcaatcaaggccgagcatgctggcctgcaggtgcagggcgcggtcatggcatcggatgcgttcttcccgttccgtgatggcatcgacaatgcggctaaagtgggtatcagcgccgtgatccagccaggtggctcgatgcgtgatgctgaagtcattgccgctgccgacgaagccggcatcgccatggtgttcaccggtatgcgccacttccgccactaa

SEQ ID NO: 56400 - protein, 535 aa, Pseudomonas putida GB-1
MTDQTTRLPVRRALISVSDKTGILEFARELQQLGVEILSTGGTYKLLKDNGVNAVEVADYTGFAEMMDGRVKTLHPKIHGGILGRRGTDDAIMNEHGIKPIDLVAVNLYPFEATISKPGCDLPTAIENIDIGGPTMVRSAAKNHKDVAIVVNASDYAGIVEGLKVGGLTYAQRFDLMLKAFEHTAAYDGMIANYMGTIDQAKDTLSTADRSEFPRTFNSQFVKAQEMRYGENPHQSAAFYVEAKKGEASISTAIQLQGKELSFNNVADTDAALECVKSFVKPACVIVKHANPCGVAVVPEEEGGIRKAYDLAYATDTESAFGGIIAFNRELDGETAKAIVDRQFVEVIIAPKISQAARDVVAAKQNVRLLECGEWPAERAAGWDFKRVNGGLLVQSRDIGMITADDLKIVTKRAPTEQEIHDLVFAWKVAKFVKSNAIVYAKQRQTIGVGAGQMSRVNSARIAAIKAEHAGLQVQGAVMASDAFFPFRDGIDNAAKVGISAVIQPGGSMRDAEVIAAADEAGIAMVFTGMRHFRH

SEQ ID NO: 56401 - DNA, 1581 bp, Marinobacter sp. ELB17
  CDS (1)..(1581): transl_table=11
atggcaaatcaggcaaatactcccgttcgtcgtgcgctgatcagtgtcagtgacaaaaccggcattgttgaatttggtcgcgcgctcagcgagcgcggcatagagttgctgtccaccggcggcacctttcatctgcttaaagaaaacaacgtcgccgtcaccgaagtgtctgactacaccggtttcccggagatgatggatggccgggtaaaaaccctgcacccgaaaattcacggtggcgttttgggccgccgtggcaccgacgacgccgtcatggccgaacacggcatagaccccatcgacatggtggtggtgaatctctatccgtttgaagacaccatcgccaatccggattgcgacttggcgaccgccattgaaaacatcgacattggcggccccaccatggttcgcgcggcagccaagaaccacaacgatgtggccgtagtggtgaatactcgcgattacaaccgggtattgaaagaactggaaagtaacgatggcgaactgacctttgctacgcgttttgacttggccgtaaaagcctttgagcacaccgccggctacgacggtgctatcgctaactacttgggtgggcgcaccgccgataacgacaatgcggatttcccgcgcaccttcaatgcccagtttgtgaaagtgcaggacatgcgctacggcgaaaacccgcaccagcgcgccgcgttctacgccgagcgcaacccgaaagaagcctgtgtggcgaccgctacccagctccagggtaaagcgctgtcgtacaacaacgtggccgacaccgacgccgcgcttgagtgtgtaaaacccttcgccgacccggcttgcgtgatcgtcaagcacgccaatccctgtggtgtagccattggtgccgacattctgcaagcttacgagctggcctatgcaacggatcccacctcagcgtttggcggcatcattgccttcaaccgcgagctggacgcagcgaccgccagagccattattgatcgccagtttgtggaagtgatcatcgctcccagtatcagcgccgaagcagtagaactgatagccgccaagaaaaacgtgcgtttgctggcctgcggcgaatttgacggtgagcgcgccccggcattggattacaaacgcgtgaccggtggcttactggtgcaagaacgtgacctgggcatggttgccatgagtgatgtaaaagtggtcacccaacgccaacccagcgaagaagaactgaacgatttactgtttgcctgggaagtggccaagtacgtcaaatccaacgccattgtgtacgcgaaagcgggccgtaccatcggcgtgggcgccggccagatgagccgcgtgtacagtgccagaattgccggcatcaaagccgccgatgaaggcctggaagtaaaaggctcggtcatgtcgtctgacgccttcttcccgttccgcgacggtattgatgccgccgccgctgccggtattaccgcggtgatccaacctggtggttccatgcgtgatcaggaagtgatcgacgccgccaacgagcacggcattgctatggtgttcactggcatgcgccatttccgccattaa

SEQ ID NO: 56402 - protein, 526 aa, Marinobacter sp. ELB17
MANQANTPVRRALISVSDKTGIVEFGRALSERGIELLSTGGTFHLLKENNVAVTEVSDYTGFPEMMDGRVKTLHPKIHGGVLGRRGTDDAVMAEHGIDPIDMVVVNLYPFEDTIANPDCDLATAIENIDIGGPTMVRAAAKNHNDVAVVVNTRDYNRVLKELESNDGELTFATRFDLAVKAFEHTAGYDGAIANYLGGRTADNDNADFPRTFNAQFVKVQDMRYGENPHQRAAFYAERNPKEACVATATQLQGKALSYNNVADTDAALECVKPFADPACVIVKHANPCGVAIGADILQAYELAYATDPTSAFGGIIAFNRELDAATARAIIDRQFVEVIIAPSISAEAVELIAAKKNVRLLACGEFDGERAPALDYKRVTGGLLVQERDLGMVAMSDVKVVTQRQPSEEELNDLLFAWEVAKYVKSNAIVYAKAGRTIGVGAGQMSRVYSARIAGIKAADEGLEVKGSVMSSDAFFPFRDGIDAAAAAGITAVIQPGGSMRDQEVIDAANEHGIAMVFTGMRHFRH

SEQ ID NO: 56403 - DNA, 1593 bp, Moritella sp. PE36
  CDS (1)..(1593): transl_table=11
atggacaacgctcgacctattcgccgtgcacttatcagtgtgtctgataaaactggtattgtagaattttctcgcggcctagtagaacaaggcgtcgaattattatctactggcgggacagctaaactgctagctgaaaatgacatcccagtaatagaagtttctgactataccgggcatccagaaatgatggatggtcgtgttaaaacactgcatcctaaagtacatggtggcattcttggccgtcgtgatattgatgttgaagtaatgtcagagcacggtatcaacccgattgatattgtagttgttaacctttacccatttgccaacactgttgccaatccagattgcagccttgctgacgccgttgagaatatcgacatcggtggtccaacaatggttcgctctgcagctaaaaaccacaaagacgtgactatcgtcgttaacgcgagcgattatgaccgcgtattaagtgaaatgtctgcaaacaatacctcactgactcataaaacccgtttcgatcttgcgattgcagcatttgagcacacagctgcttatgatggcatgatcgcaaactacttcggtactatggttccgagttatggcgacaatactgaaggtgatgaagaatctaaattcccacgcacattcaacgctcagttcatcaaaaaacaagatatgcgttacggtgaaaacagccaccaaaaagccgcattctatgttgaaaagcataccactgaagcatctgttgcaacagcaacacagctgcaaggtaaagcattatcttataacaacatcgccgatacagacgcggcactcgaatgtgttaaagaattcgatgcacctgcctgtgtgattgtaaaacacgctaacccatgtggtgttgcgattggtgaagatatcctaagtgcttacgacagtgcatttaaaaccgacccaacatccgcattcggtggcatcattgcgttcaaccgtgagcttgacgcagtcactgcacaagcaatcgttgaccgtcaattcaccgaagtgatcattgcgccatcagttagcgctgaagcaagcgtgatcgtggcaagcaagaaaaatgtacgtttacttgaatgtggtaaatggacagctaaaaacggcgagttcgatattaaacgtgttaacggcggtatcttagtacaagatcgtgaccgtggcatggtcggtctagacgacttaacggttgtatctgagcgtcaaccaactgaacaagaactcactgacctactattctgctggaaagtagctaagttcgttaaatcaaacgctattgtttacgcaaaagatggcgttacggtcggtgttggcgcaggtcaaatgagccgcgtttacagtgcgaaagttgctggtattaaagcggctgacgaaggtctagtcgttgaaggttcagtaatggcatctgatgcattcttcccattccgtgacggcattgatgctgcagcggcggcgggtattaaatgtgtgatccaaccaggtggttcaatccgtgataatgaaattatcgatgcggctaacgaacacggtatgaccatggtcttcaccggcatgcgtcacttccgtcactaa

SEQ ID NO: 56404 - protein, 530 aa, Moritella sp. PE36
MDNARPIRRALISVSDKTGIVEFSRGLVEQGVELLSTGGTAKLLAENDIPVIEVSDYTGHPEMMDGRVKTLHPKVHGGILGRRDIDVEVMSEHGINPIDIVVVNLYPFANTVANPDCSLADAVENIDIGGPTMVRSAAKNHKDVTIVVNASDYDRVLSEMSANNTSLTHKTRFDLAIAAFEHTAAYDGMIANYFGTMVPSYGDNTEGDEESKFPRTFNAQFIKKQDMRYGENSHQKAAFYVEKHTTEASVATATQLQGKALSYNNIADTDAALECVKEFDAPACVIVKHANPCGVAIGEDILSAYDSAFKTDPTSAFGGIIAFNRELDAVTAQAIVDRQFTEVIIAPSVSAEASVIVASKKNVRLLECGKWTAKNGEFDIKRVNGGILVQDRDRGMVGLDDLTVVSERQPTEQELTDLLFCWKVAKFVKSNAIVYAKDGVTVGVGAGQMSRVYSAKVAGIKAADEGLVVEGSVMASDAFFPFRDGIDAAAAAGIKCVIQPGGSIRDNEIIDAANEHGMTMVFTGMRHFRH

SEQ ID NO: 56405 - DNA, 1569 bp, Herbaspirillum seropedicae
  CDS (1)..(1569): transl_table=11
atcaaacaagcactcatttccgtatccgacaaggcaggcgtgctcgatttcgcgcgcgcgctgtccgccatgggcgtcaacatcctgtccaccggcggcaccgccaagctgctggccgacaatggcgtgccggtcaccgaagtggccgactacaccggcttcccggaaatgctggatggacgcgtgaagacgctgcatcccaaggtgcatggcggcatcctggcccgtcgtgatttccccgagcacgtcgccgccctgcaacagcatggcatccccaccatcgacatggtggtggtgaacctgtacccgttccagcagaccgtggccaaggaggaatgctcgctggaagacgcgatcgagaacatcgacatcggcggcccggccatgctgcgttcctcggccaagaaccacaaggacgtgatcgtcatctgcgacccgaccgactatgaaggcgtgctggccgagctgaagtccggcggcgacctgccctacgaaaagcgcttcgcgctggccaagaaggtgttcgcccacaccgcgcaatacgatggcgccatcaccaactacttcacctccctgggtgaagacaagcagcacagcacccgcagcgcctatccgtcgaccctgaacctgcacttcgagaaggtccaggacatgcgctacggcgagaacccgcaccagagcgccgccttctaccgcgacatcaagaaggtcgatggcgccctggccaactacacccagctgcaaggcaaggaactgtccttcaacaacatcgccgacgccgacgccgcctgggaatgcgtgaagagcttcgacccggccacggaagctgcctgcgtcatcatcaagcacgccaacccctgcggcgtggccatcggcgccaacccgctggaagcctacagcaaggccctgcagaccgacccgacctcggccttcggcggcatcatcgccttcaaccgcgaagtggatgcagccgctgccgaagccgtggccaagcaattcctggaagtgctgattgccccgtccttcagcgccgaggccaagcagatcttcgctgccaagcagaacgtgcgcctgctggaaatcccgctgggcacgggcctcaatggctatgacttcaagcgcgtcggtggcggcctgctggtgcagtcgcccgatgccaagaacgtgctgctggccgacgtgaaggtggtcagcaagaagcagccgaccccgcagcaactgcaggacctcatgttcgcctggcgcgtggccaagttcgtcaagtccaatgccatcgtcttctgtggcaatggcatgacccttggcgtgggcgctggccagatgagccgtatcgattcggcccgcatcgcttccatcaaggcccagaacgccggcctgaccctggcgggttcggccgtggcctcggacgccttcttcccgttccgcgatggcctggacgtggtggtcgatgcgggtgcgacctgcgtcatccatccgggcggttccatgcgcgaccaggaagtcatcgatgccgccaacgagcgcgatgtcgtgatgctgctgaccggtacccgtcacttccgtcactga

SEQ ID NO: 56406 - protein, 522 aa, Herbaspirillum seropedicae
MKQALISVSDKAGVLDFARALSAMGVNILSTGGTAKLLADNGVPVTEVADYTGFPEMLDGRVKTLHPKVHGGILARRDFPEHVAALQQHGIPTIDMVVVNLYPFQQTVAKEECSLEDAIENIDIGGPAMLRSSAKNHKDVIVICDPTDYEGVLAELKSGGDLPYEKRFALAKKVFAHTAQYDGAITNYFTSLGEDKQHSTRSAYPSTLNLHFEKVQDMRYGENPHQSAAFYRDIKKVDGALANYTQLQGKELSFNNIADADAAWECVKSFDPATEAACVIIKHANPCGVAIGANPLEAYSKALQTDPTSAFGGIIAFNREVDAAAAEAVAKQFLEVLIAPSFSAEAKQIFAAKQNVRLLEIPLGTGLNGYDFKRVGGGLLVQSPDAKNVLLADVKVVSKKQPTPQQLQDLMFAWRVAKFVKSNAIVFCGNGMTLGVGAGQMSRIDSARIASIKAQNAGLTLAGSAVASDAFFPFRDGLDVVVDAGATCVIHPGGSMRDQEVIDAANERDVVMLLTGTRHFRH

SEQ ID NO: 56407 - DNA, 1647 bp, Medicago truncatula
  CDS (1)..(1647)
atggtgttttctattcttaagaataatagttcctggcatttggtgttctgttactatgaaacaggcagcaagcaagctttgatatcgttgtcagacaagaaggatctcgcatttgttggaaacggacttcaggaattaggattcactattgtttcaactggaggaacagcttctgcattggagagtgctggagtcgctgttactaaagttgaacagcttacacagttccctgaaatgcttgatggtcgtgtcaaaactctgcaccctaacatacatggaggtatccttgctcgaagagatcaaaagcatcatattgaagctctcagtacacatggaattggtacttttgatgttgtggtggtgaacttgtatccattttatgataaagttacatcaaccggaggcattgaatttgaggatggaattgaaaacattgacatcggtggtccagccatgattcgtgctgctgcaaagaatcacaaagatgttttggtagtggttgattcagaagattaccccgcccttctggaatttcttaaaggaaacgaagacgaacagttcaggctaaagcttgcatggaaagcttttcagcatgttgcttcatatgattctgcagtatctgagtggctgtggaagcaaagtgtgggagtgacagataaatttcctcctagtttgacagtgcctctttcactcaaaagttctctccgttatggtgaaaatcctcatcaaaaagctgcattctatgttgacaaaagacttgcagaggtcaacgctggtgggattgctacggctatccaacaccatggaaaggaaatgtcatataataactacctggatgctgatgctgcttggaactgtgtgtgcgagtttagaaaccccacatgtgtagttgtgaagcatactaatccttgcggcgtagcttcacgcgatgatattctggaagcctacagactagctgttaaagctgatcctgtcagtgcatttggcggaattgtagctttcaacgtggaagttgatgaggttcttgctaaggaaataagagaatttagaagcccaaccgatggggagacaaggatgttctatgaaatagtggttgcacccagctatacagagaagggacttgaaattcttcgtggaaagtcgaagactttaaggattcttgaagcaaaaaagaatgaagcaggaaagctttcactcagacaagttggtggagggtggttagctcaggattcagatgacttgactccatccgacatcaagttcaatgtagtgtcagagaagactcctcaagatggtgagcttcgcgatgcggagtttgcatggttgtgtgtgaagcatgtcaaaagcaatgctattgtcatagctaaggacaattgtatgttaggtatgggaagcggccaaccgaatcgtgtggagagtttaagaatagcaatgaggaaagctggagctgatgttaaaggcgcagccttggctagtgatgctttcttcccctttgcttggaaagatgctgtggaagaagcatgtgaaagtgggattggtgttattgcagaaccaggtggtagtataagagatcaggatgctgtagactgttgcaataagtatggtgtttcactactcttcaccaatgtgaggcacttcaggcactga

SEQ ID NO: 56408 - protein, 548 aa, Medicago truncatula
MVFSILKNNSSWHLVFCYYETGSKQALISLSDKKDLAFVGNGLQELGFTIVSTGGTASALESAGVAVTKVEQLTQFPEMLDGRVKTLHPNIHGGILARRDQKHHIEALSTHGIGTFDVVVVNLYPFYDKVTSTGGIEFEDGIENIDIGGPAMIRAAAKNHKDVLVVVDSEDYPALLEFLKGNEDEQFRLKLAWKAFQHVASYDSAVSEWLWKQSVGVTDKFPPSLTVPLSLKSSLRYGENPHQKAAFYVDKRLAEVNAGGIATAIQHHGKEMSYNNYLDADAAWNCVCEFRNPTCVVVKHTNPCGVASRDDILEAYRLAVKADPVSAFGGIVAFNVEVDEVLAKEIREFRSPTDGETRMFYEIVVAPSYTEKGLEILRGKSKTLRILEAKKNEAGKLSLRQVGGGWLAQDSDDLTPSDIKFNVVSEKTPQDGELRDAEFAWLCVKHVKSNAIVIAKDNCMLGMGSGQPNRVESLRIAMRKAGADVKGAALASDAFFPFAWKDAVEEACESGIGVIAEPGGSIRDQDAVDCCNKYGVSLLFTNVRHFRH

SEQ ID NO: 56409 - DNA, 1581 bp, Magnetospirillum gryphiswaldense
  CDS (1)..(1581): transl_table=11
gtgtctgatctgcgccccatccgtcgtgcccttttgtctgtttccgacaagaccgggctgatcgattttgcccgtttcctggccgatcaaggcgtcgaattgctctcgaccggcggcacctgcaaggcgattggtgatgcaggtatcgccgtcgttgaagtggccgatcacaccggttttcctgaaatgctggacggtcgcgtcaaaaccctgcaccccaaagtccatggcggcttgttgggtattcgcggcaatgccgggcacgaagccgccatggccgaacatggaatcgcccccatcgaccttctggtggtcaacctgtatccgttcgaggccaccgttgccaggggtgccggctatgacgaatgcgtggaaaacatcgatatcggcgggccggcaatgatccgcgccgcgtccaagaatcacgacgcggtcaccgtggtggtggatgtcgaagactatgcccgggtcatggacgaaatgaaggtcaattcgggcgccaccaccttgggcttgcgcaagcatcttgccgccaccgcctacgcccgaaccggtgcctatgatgccgccatttcccagtggttcgccaaggaactgggggacactttcccgcgccgggtagtcgtcgccggtgagttgaagcagtccctgcggtatggcgagaatccgcaccagcaagccgccttctatgtgaacggcgtcaagcgtccgggcatcgccacggccaagcaggtgcaaggcaaggaactgtcctacaacaatttgaacgataccgatgccgccttcgagctggctgccgaattcgatgaacccaccgtggccatcatcaagcacgccaatccatgcggtgtcgcctccggtaccgacattgtcggcgcctacaaggcggccctggcctgcgacccggtttccgcctttggcggaatcatcgccatcaaccgcaaactggacggggcgaccgccgaggaaatctgcaagctgttcaccgaggtggtgatcgctcccgaggccgatgaggccgctatcgccgcctttgccgccaagaaaaatctgcgccttctggtgacgggcggcatgccgtcgccgatggaagcggcgatgacgctgcgcaatgtctcgggcggctatctgctgcaatccaaggataatggacgcgtaaagctggaagagctgaaggtggtgaccaagcgggcaccgaccgagcgggaactgaaagacatgctgttcgccttccgggtctgcaagcacgtcaagtccaacgccatcatctacgtcaaggacggatgcaccatgggtatcggcgccggccagatgagccgggtcgattcttcgcgcatcgccgcctggaaatccaaggaagctgccgatgccgccggcttggcccagcccggcaccgtcggttcggtggtcgcatccgacgcgttcttcccctttgccgacggcttgctggcggcagcggcagcgggcgccaccgcggtcatccagcccggcggttccatgcgtgaccaggaagtgatcgaggccgccaatgaaaagggcttggccatggtgttcaccggtatgcggcatttccggcactga

SEQ ID NO: 56410 - protein, 526 aa, Magnetospirillum gryphiswaldense
MSDLRPIRRALLSVSDKTGLIDFARFLADQGVELLSTGGTCKAIGDAGIAVVEVADHTGFPEMLDGRVKTLHPKVHGGLLGIRGNAGHEAAMAEHGIAPIDLLVVNLYPFEATVARGAGYDECVENIDIGGPAMIRAASKNHDAVTVVVDVEDYARVMDEMKVNSGATTLGLRKHLAATAYARTGAYDAAISQWFAKELGDTFPRRVVVAGELKQSLRYGENPHQQAAFYVNGVKRPGIATAKQVQGKELSYNNLNDTDAAFELAAEFDEPTVAIIKHANPCGVASGTDIVGAYKAALACDPVSAFGGIIAINRKLDGATAEEICKLFTEVVIAPEADEAAIAAFAAKKNLRLLVTGGMPSPMEAAMTLRNVSGGYLLQSKDNGRVKLEELKVVTKRAPTERELKDMLFAFRVCKHVKSNAIIYVKDGCTMGIGAGQMSRVDSSRIAAWKSKEAADAAGLAQPGTVGSVVASDAFFPFADGLLAAAAAGATAVIQPGGSMRDQEVIEAANEKGLAMVFTGMRHFRH

SEQ ID NO: 56411 - DNA, 1638 bp, Arabidopsis thaliana
  CDS (1)..(1638)
atggcagagtctcagactgctcagaggaatcagccgcaatcctcaggctcctctggggagaagcaagctttgatatctctatctgacaagagggacttggcttctcttggcaacggtctgcaagaattgggatacactattgtttctactggaggaactgcctctactttggagaatgctggagtctctgtgaccaaagtggagaagcttactcattttccagaaatgcttgatggccgtgtgaaaactttgcatccaaacatacatggtggtatcctcgctagaagggatgtggagcatcatatggaagctcttaatgagcatgggattggtacatttgatgttgtggttgtcaatttgtacccgttctatgaaaaagttactgctccaggtgggatcagttttgaggatgggattgagaacattgacattggtggccctgctatgattagagcagctgctaagaaccacaaagacgttctcattgttgtcgattcaggagattatcaagctgttttggagtatctcaaaggaggacagagcgaccaacaattccgcagaaaacttgcgtggaaggcctttcagcatgttgctgcatatgattctgcggtttcagaatggctatggaagcagactgaaggaaaagagaagttccctcccagctttacagttccgcttgtacttaagagttctcttcgttacggtgaaaatcctcatcaaaaagctgcattttatgttgataagagccttgctgaagtgaatgccggtggtatcgcaacagcgattcagcatcatggaaaggaaatgtcatacaacaactatcttgatgctgacgctgcatggaactgtgtgtcggaatttgaaaacccaacatgtgtagtcgtgaagcatacaaatccttgtggtgtggcctctcgtgatgatattcttgaggcttaccggctagctgtaaaagctgacccagttagtgcctttggtggcattgtagctttcaatgttgaagttgacgaggttcttgcgagggagatccgagagttcaggagcccaacagacggggaaactagaatgttttatgaaatcgtggttgctccaaagtatactgctaaaggtcttgaagtcctcaaagggaaatcaaaaactttgaggatcctcgaagctaaaaagaatgaccaagggaaactatcgctcagacaggttggtggcggctggttggctcaggactcggacgatttaactccagaagacatcagcttcaattctgtctcagacaaaactccgactgaaagcgaacttgcggatgcaaaatttgcctggctctgcgttaagcatgtcaagagcaatgccattgtgatagcaaagaacaattgtatgctggggatgggaagcggacagccaaaccgagtagagagtctgagaatagctttcaagaaagctggggaggaagctaaaggagctgccttggccagtgacgcattcttcccattcgcttggaaagatgcggtggaagaggcgtgccagatgggaataggagtgatagcagaacctggaggcagtattagagaccaagacgctattgattgctgcaaaaagtatggagtctctctgctcttcaccaacgttagacatttccgccattaa

SEQ ID NO: 56412 - protein, 545 aa, Arabidopsis thaliana
MAESQTAQRNQPQSSGSSGEKQALISLSDKRDLASLGNGLQELGYTIVSTGGTASTLENAGVSVTKVEKLTHFPEMLDGRVKTLHPNIHGGILARRDVEHHMEALNEHGIGTFDVVVVNLYPFYEKVTAPGGISFEDGIENIDIGGPAMIRAAAKNHKDVLIVVDSGDYQAVLEYLKGGQSDQQFRRKLAWKAFQHVAAYDSAVSEWLWKQTEGKEKFPPSFTVPLVLKSSLRYGENPHQKAAFYVDKSLAEVNAGGIATAIQHHGKEMSYNNYLDADAAWNCVSEFENPTCVVVKHTNPCGVASRDDILEAYRLAVKADPVSAFGGIVAFNVEVDEVLAREIREFRSPTDGETRMFYEIVVAPKYTAKGLEVLKGKSKTLRILEAKKNDQGKLSLRQVGGGWLAQDSDDLTPEDISFNSVSDKTPTESELADAKFAWLCVKHVKSNAIVIAKNNCMLGMGSGQPNRVESLRIAFKKAGEEAKGAALASDAFFPFAWKDAVEEACQMGIGVIAEPGGSIRDQDAIDCCKKYGVSLLFTNVRHFRH

SEQ ID NO: 56413 - DNA, 1704 bp, Ostreococcus tauri
  CDS (1)..(1704)
atggtgatgcccaccgcgcgggcgtcgacgtggacgcggacgttcgggacggatcgcgcggcgacgcgaacgcgggcgcggcgcgcgcgcgtggtcgtcgaggcgagtaaacgcgcgttggtctccgtgagcgataagacgaagatgacggaactcgcgggtgggttagcggcgctcgggtacgagatcgtgagcacgggggggagcgcgagcgcgatcgagaagagcggcacggcggtgacgagcgtcgatcgcgtcaccgggtttccagagatgctggatggacgggtgaagacgttgcatccgggggtgcacggagggattctggccaaacgtgaggatgcgtcgcacatggaggcgatcgcgaagcacgggatcgataccatcgacatcgtggcggtgaacctgtacccgtttcgcgaaaccgtcgcgggaggaggcgatttcgccaagtgcgtggagaacatcgacatcggcggacctgcgatgattcgcgcggcggcgaagaaccatccgcacgtgtacgtcgtcgttgatccgagcgattacgacaagttgatcgagcacttgaagagttcgccgagcgcggaggacgacttgaagttcaagcgagagttggcttggaaggctttccaacactgcgcttcgtacgactccgtcgtcgcggagtatctttggagccaaatcggcggtggtgctcccgcaccggagctttcggtgccgatgacgctcaccgcggcgcttcgttacggcgagaacccgcatcagccggctgccgtgtacgccgacggctctctcgcggaagccgcaggcgagggtgtcgcgcgctcgattcagcaccacggtaaggagatgagctacaacaactacctcgacgccgatgccgcgtacgggtgcgcctgcgattacccgacgagcgacccgacgtgtgtgatcgtcaagcacacaaacccgtgcggcattgccagcgccagcggcgctggcggcgatctcctcgaagcctaccgcatggctgttcgcgccgacccgatctcggcctttggtggtatcgtcgctttcaactgcaccgtcgatgcggacatggcgcgcgagattcgtgagttccgttcgccgacggatggcgagacgcgcatgttctatgaaatcgtcatcgccccgtcctacactccggagggcttggaagtgttaaagggtaagtccaagactctgcgcatcttagagaccaagccgcgatcgggcgcgacgaagagcttgcgtcaagtcggcggtggctggctcgaacaagcctcggactcgctcgttcccgaggacatcgtctttgagcccgtctccgacgtcaagccgacgccggagcaactcgaggcgctcaagttcgcctggcgcgcggtcaagcacgtcaagtccaatgccattaccgtcgccaccaaggggcgacttctcggcatgggctctggtcaacccaaccgcgtgaactcggtgcgcatcgctcttgaaaaggcgggcgacgagacggagggctctgtcctcgcctccgacgccttcttcccgttcgcctggggcgactccgtggagatcgcgtgccaagctggcgtgaaggcgatcgcccaccccggtggctccatgcgtgaccaagacgccattgacgtgtgcaacaagtacggcgtcgccctcgtcaccaccggtcaccgccacttccgccactag

SEQ ID NO: 56414 - protein, 567 aa, Ostreococcus tauri
MVMPTARASTWTRTFGTDRAATRTRARRARVVVEASKRALVSVSDKTKMTELAGGLAALGYEIVSTGGSASAIEKSGTAVTSVDRVTGFPEMLDGRVKTLHPGVHGGILAKREDASHMEAIAKHGIDTIDIVAVNLYPFRETVAGGGDFAKCVENIDIGGPAMIRAAAKNHPHVYVVVDPSDYDKLIEHLKSSPSAEDDLKFKRELAWKAFQHCASYDSVVAEYLWSQIGGGAPAPELSVPMTLTAALRYGENPHQPAAVYADGSLAEAAGEGVARSIQHHGKEMSYNNYLDADAAYGCACDYPTSDPTCVIVKHTNPCGIASASGAGGDLLEAYRMAVRADPISAFGGIVAFNCTVDADMAREIREFRSPTDGETRMFYEIVIAPSYTPEGLEVLKGKSKTLRILETKPRSGATKSLRQVGGGWLEQASDSLVPEDIVFEPVSDVKPTPEQLEALKFAWRAVKHVKSNAITVATKGRLLGMGSGQPNRVNSVRIALEKAGDETEGSVLASDAFFPFAWGDSVEIACQAGVKAIAHPGGSMRDQDAIDVCNKYGVALVTTGHRHFRH

SEQ ID NO: 56415 - DNA, 1788 bp, Aspergillus oryzae
  CDS (1)..(1788)
atgtctcaacaaaagtcagctatcctctccgtctatgacaagaccggactgcttgacctggccaagggcctggccaagaacaatgtccgtctgctcgcctccggtggcactgccaggatgatccgtgaggcaggattccctgtcgaggacgtctctgctatcacccatgctcccgaaatgcttggtggccgtgtcaagaccctccaccccgctgtccacggtggtatcctcgctcgcgacattgagtccgatgagaaggatctggccgaccagaagatcgcgaaggtcgattttgttgtttgcaacctttaccccttcaaggagaccgtcaacaaggtcaatgtcactatcgaagaggccgtcgaggagatcgatatcggcggtgtgaccctcctccgtgctgcggccaagaaccacgctcgcgtcaccatcctttccgaccctcaggactaccctgagttcctcaaggagctcgatgccggcgagattaccgagtccagccggaagttgtatgccctcaaggccttcgagcacaccgcagactacgacactgccatctctggtttcttccgtaagcagtatgcgggcaacggtgagcaacacattgctctgcgttacggtaccaacccccaccagaagcctgcttcggcatacatgctccagggcaagcttccattcaaggccctgaacggctctcccggttacgtcaacctgcttgacgctctcaatgcctgggctttggtcaaggagctcaaacaggcactgggctaccccgctgcggctagcttcaagcatgtttcccccgctggtgctgccgtcggtgtgcccctgaacgagaaggagcgtaaggtctacatggttgatgatatcgctggtatcgagacttctggtctggctcaggcttatgctcgtgcccgtggtgccgaccgcatgtccagcttcggtgacatcctcgctctcagtgacgttgttgatgtacccactgccaagatcatctcgcgtgaggtttcggacggtgtcatcgccgcaggctactctcctgaggctcttgagatcctctccaagaagaagggtggcaagtacctcgtgctccagatggacgagtcctacgttcctccagccgaggagacccgtactttgtacggtgttcagctctctcagcaccgcaacgatgtggtgatctctccccagaagaccttcagcaccatcgtgactcctaaggacctccagagccttcctgactctgctttgcgggatctcactgtagccaccatcgctctgaagtacactcagtccaactctgtctgctacgccctcaacggccaggttgtgggtctgggtgctggccagcagagccgtatccactgcactcgcttggccggtgacaaggctgataactggtggatgcgcttccacgaccgtgtcctcaacattaaatggaagaagggcactaagcgtgctgacaaggccaacgccattgacttgctctgctcgggtaacacccctcgcaacgatgcagagaaggccgagtacgagcgtgtcttcgaagaagtccctactccattcactcaggaggagcgggaatcctggctcgagaagctgagcgaggttgccgtctcgtccgatgctttcttccctttcatcgacaatgttttccgcgcagcccgctccggcgttaaatacatcgctgctcccagcggtagccagaacgatggccctgtcttcgagactgcggagaagcttggcattgttttcgtcgagcagggtactcgtctcttccaccactag

SEQ ID NO: 56416 - protein, 595 aa, Aspergillus oryzae
MSQQKSAILSVYDKTGLLDLAKGLAKNNVRLLASGGTARMIREAGFPVEDVSAITHAPEMLGGRVKTLHPAVHGGILARDIESDEKDLADQKIAKVDFVVCNLYPFKETVNKVNVTIEEAVEEIDIGGVTLLRAAAKNHARVTILSDPQDYPEFLKELDAGEITESSRKLYALKAFEHTADYDTAISGFFRKQYAGNGEQHIALRYGTNPHQKPASAYMLQGKLPFKALNGSPGYVNLLDALNAWALVKELKQALGYPAAASFKHVSPAGAAVGVPLNEKERKVYMVDDIAGIETSGLAQAYARARGADRMSSFGDILALSDVVDVPTAKIISREVSDGVIAAGYSPEALEILSKKKGGKYLVLQMDESYVPPAEETRTLYGVQLSQHRNDVVISPQKTFSTIVTPKDLQSLPDSALRDLTVATIALKYTQSNSVCYALNGQVVGLGAGQQSRIHCTRLAGDKADNWWMRFHDRVLNIKWKKGTKRADKANAIDLLCSGNTPRNDAEKAEYERVFEEVPTPFTQEERESWLEKLSEVAVSSDAFFPFIDNVFRAARSGVKYIAAPSGSQNDGPVFETAEKLGIVFVEQGTRLFHH

SEQ ID NO: 56417 - DNA, 1839 bp, Vigna unguiculata
  CDS (1)..(1839)
  misc_feature (775)..(775): k is g or t
atgtttgtgttgggtgcttcctccgccgcagccaccaccgccgccactaccaccgcagccaccatcccctctcgcattctctgtggaactctccactctccttatcccctcacaaccccccataacttctcttcccatctcctatccaaaactttggtgcggtcatcttcactgcacttcaggggtgttcccatcaaagccatggcggagactgataccatagcagcctctaaaattgcttcttcttcctctgtccctgggaccaagcaagccttgatatcattgtcagataagaaggatcttgcatttgttggcaatgggctccaggaattaggatacactattgtttcaactggaggaacagcttctgctttggagaaggctggagtagctgttactaaagtagaacagcttactcagttccctgaaatgcttgatggtcgtgtcaaaactttgcaccctaacatacatgggggtatcctggctagaagggacctaaaacatcatattgaagctcttaatacacatggaattggtacttttgatgttgtggtagtgaacttgtacccattttacgataaagtcacagcagctggtggcattgagtttgaggatggaattgaaaatattgacattggtggtccagccatgattagagctgctgcaaagaatcacaaagatgttttagtcgtggttgatacagaagattaccctgcccttctggaatttcttaaagggaaccaggatgatgaaaaattcaggctaaaacttgcakggaaagcttttcaacatgttgcttcctatgactctgcagtatctgagtggttgtggaagcagagtgtgggagataaatttcctcctagcttaacagtgcctctttcactcaaaagttctctccgttatggtgaaaatccccatcaaaaggctgcattctatgtcgacaaaaaactttctgaggttaatgctggtggaattgctacggccatccaacaccatggaaaggagatgtcatataataactacttggatgctgatgcagcttggaactgtgtgtgtgagtttaagaaccccacctgtgtagtagtgaagcataccaatccttgtggagtagcatcacgtgatgatattcttgaagcctacagactagctgttaaagcagatcctgtgagtgcatttggtggaattgtagcgttcaacgtggaaattgatgaggcactagctaaagaaattcgagaattcagaagccccacagacggtgagacaaggatgttttatgaaatagtagttgcacccagctacacagagaaggggcttgagattctgcgtggaaagtccaaaactttaaggattcttgaagccaaaaagaatgaaccgggaaagctttcactcagacaggttggtggaggttggttggctcaggattcagatgacttaaccccacaagacatcaagttcaacgtggtctctgggaaggctccacaagatgatgaacttcgtgatgcagagtttgcatggttgtgtgtgaagcatgtcaaaagcaatgccattgtgatagctaagaacaattgtatgctaggtatgggaagtgggcaaccaaaccgtgtggagagtttgagaatagcaatgaggaaagctggagatgatgttaaaggagcagccttggccagtgatgccttcttcccatttgcttggaaagatgctgtggaagaagcatgtgaaagtggaatcggtgttatagcagaaccaggtgggagtatcagagaccaggatgccatagactgttgtaacaagtatggtgtttcactactctttaccaatgtgaggcactttaggcactga

SEQ ID NO: 56418 - protein, 612 aa, Vigna unguiculata
  misc_feature (259)..(259): The Xaa at location 259 stands for Gly, or Trp.
MFVLGASSAAATTAATTTAATIPSRILCGTLHSPYPLTTPHNFSSHLLSKTLVRSSSLHFRGVPIKAMAETDTIAASKIASSSSVPGTKQALISLSDKKDLAFVGNGLQELGYTIVSTGGTASALEKAGVAVTKVEQLTQFPEMLDGRVKTLHPNIHGGILARRDLKHHIEALNTHGIGTFDVVVVNLYPFYDKVTAAGGIEFEDGIENIDIGGPAMIRAAAKNHKDVLVVVDTEDYPALLEFLKGNQDDEKFRLKLAXKAFQHVASYDSAVSEWLWKQSVGDKFPPSLTVPLSLKSSLRYGENPHQKAAFYVDKKLSEVNAGGIATAIQHHGKEMSYNNYLDADAAWNCVCEFKNPTCVVVKHTNPCGVASRDDILEAYRLAVKADPVSAFGGIVAFNVEIDEALAKEIREFRSPTDGETRMFYEIVVAPSYTEKGLEILRGKSKTLRILEAKKNEPGKLSLRQVGGGWLAQDSDDLTPQDIKFNVVSGKAPQDDELRDAEFAWLCVKHVKSNAIVIAKNNCMLGMGSGQPNRVESLRIAMRKAGDDVKGAALASDAFFPFAWKDAVEEACESGIGVIAEPGGSIRDQDAIDCCNKYGVSLLFTNVRHFRH

SEQ ID NO: 56419 - DNA, 1839 bp, Nicotiana tabacum
  CDS (1)..(1839)
atgcttggtctcaccagagctacgacttccgcctccgcctccgcctccgccaccgccgcagccacgtcagctaccgccattgctgccgccactgttcacctctgcactccgcagctccgcaccatcagaacaagaactagtttttgcttcggccaacaacagtcctcaaagacgtcgcatagggtgatggtttatccagtgaaggccatggctgaaactgcagccgctcctcactctgctcccaagtcctccacttctgggaggaagcaagcgttgatatcactttcagataagacggatttggctaagcttggcaatggtcttcaggaattggggtacacaattgtctcaacgggaggcacatcatcggcattggagggtgctggtgtgtctgtcaccaaagtggaagagctgacacgcttccctgaaatgcttgatggccgtgtaaaaactttgcatccaagcgttcatggaggtattcttgctagaagagatcaggagcatcacatggaagctctggaaaagcatgaaattggtacatttgatgttgtagtggtcaacttgtatcccttttatgccaaggtttcttcttcaagcggaatttcatttgaggatggaattgaaaacatcgatattggcggacctgccatgattagagctgctgcaaagaatcatagggatgttttggtcgtagttgattctgaagattacccagctcttttggaatttcttcgaggagataatgatgaccaacaatttcgaaggaagttggcctggaaagcttttcaacatgtcgcttcttatgattctgcagtttcagagtggctgtggaagcagactgtaggagataagttccctcctggcttgacagtgccacttcatctaaaaagcttacttagatatggcgaaaaccctcaccagaaggctgcagtttatgttgacaagtctctatctgaagttaatgctggtggaattgcaactgttatccaacaccacggcaaggagatgtcatataacaactatctggacgccgatgcagcttggaattgtgtgtgtgagtttaataaaccaacatgtgtggttgtgaagcatacaaatccttgtggagtagcatcacggaatgatatcattgaagcatataggctagctgtaaaagcagatccagttagtgcatttggtggtatagtagccttcaatgtcgaagttgatgaggctcttgcaaaggatattcgagaatttagaagccctacagatggtgagactagaatgttttatgaaatagtagtcgcaccaaagtatacagagaagggtcttgaggttctccgtgggaagtctaagactttgagaatcctcgaggcaagtaaaaacagcaagggaaagctttcactcagacaaattggtggtggttggttagctcaggactcggatgacttgacccctgaagatatccaatttaatgtcatgtctgacaaaactccacaagaaaatgagcttaatgatgcacagtttgcctggttatgtgtcaagcatgtcaagagcaatgccatagtaattgcaaagaacaattgtatgttaggaatgggaagtggacagccgaatcgtctagagagtttgcggatagctatgaggaaagctggagatgaagtaaaaggagccgctttggctagtgatgctttcttcccatttgcatggaatgacgctgttgaagaggcgtgtcaaagtggagtgagcgttattgcagagccaggagggagcataagggataaggatgcagtggattgctgtaacaagtatggagtctcgcttgtcttcaccaatgttagacactttaggcattaa

SEQ ID NO: 56420 - protein, 612 aa, Nicotiana tabacum
MLGLTRATTSASASASATAAATSATAIAAATVHLCTPQLRTIRTRTSFCFGQQQSSKTSHRVMVYPVKAMAETAAAPHSAPKSSTSGRKQALISLSDKTDLAKLGNGLQELGYTIVSTGGTSSALEGAGVSVTKVEELTRFPEMLDGRVKTLHPSVHGGILARRDQEHHMEALEKHEIGTFDVVVVNLYPFYAKVSSSSGISFEDGIENIDIGGPAMIRAAAKNHRDVLVVVDSEDYPALLEFLRGDNDDQQFRRKLAWKAFQHVASYDSAVSEWLWKQTVGDKFPPGLTVPLHLKSLLRYGENPHQKAAVYVDKSLSEVNAGGIATVIQHHGKEMSYNNYLDADAAWNCVCEFNKPTCVVVKHTNPCGVASRNDIIEAYRLAVKADPVSAFGGIVAFNVEVDEALAKDIREFRSPTDGETRMFYEIVVAPKYTEKGLEVLRGKSKTLRILEASKNSKGKLSLRQIGGGWLAQDSDDLTPEDIQFNVMSDKTPQENELNDAQFAWLCVKHVKSNAIVIAKNNCMLGMGSGQPNRLESLRIAMRKAGDEVKGAALASDAFFPFAWNDAVEEACQSGVSVIAEPGGSIRDKDAVDCCNKYGVSLVFTNVRHFRH

SEQ ID NO: 56421 - DNA, 1776 bp, Saccharomyces cerevisiae
  CDS (1)..(1776)
atgggcaaatataccaagactgcgatcttgtcagtttatgataagacaggtttattagacttagccaagggattggtagagaacaatgttcgtatcctagcatccggtggtacggccaacatggtcagagaagctggttttccggtcgacgatgtttcttcaattacgcatgcaccagaaatgctagggggtagagtcaagactcttcaccctgctgtgcatgcaggtattcttgccagaaatttagagggcgatgaaaaagatttaaaagagcagcacattgataaggtggattttgttgtatgtaatctatatccgttcaaagaaactgtggctaaaattggtgttacagttcaagaagctgtagaggagatcgacattggcggtgtgactttgttgagagcagccgcaaagaaccattccagagtgactattctttcagaccctaatgactattctatctttctgcaagacctgtctaaggacggtgaaatttctcaggatttaagaaatagatttgcacttaaggcgtttgaacatacggccgattatgatgcggccatttctgactttttcaggaaacagtactccgaagggaaagcccaattaccgctaagatatggttgtaatccccaccaaagacctgcacaagcttatatcactcagcaggaggagttgcccttcaaagtgctctgcggtacaccaggatatataaatcttttggatgccttgaactcatggcccttagtgaaagagttatctgcatcattgaacttgcctgcggcagcatcgttcaagcacgtttctccagcaggtgctgctgtgggacttccattatccgatgtggaaagacaagtttattttgtgaatgatatggaggatttatcaccattggcatgcgcatacgctagggcccgtggtgcagataggatgtcatcctttggtgatttcattgcattgtccaatattgtagatgtcgccactgcaaaaatcatctctaaagaagtttccgatggtgttattgctccagggtatgaaccagaggcattgaatatactatctaagaagaaaaacggaaaatactgtattttacaaatcgatccaaactatgttcctggccaaatggaatcccgagaggtttttggcgtaacgttacaacagaagagaaacgatgcgatcataaaccaatccactttcaaagaaattgtctccaaaaacaaagcactcaccgagcaagccgttatcgatctaactgttgctacgctggttttaaaatacacacaatcaaattctgtttgctacgcaaagaatggtatggttgtggggcttggggccggccaacaatcgcgtatacactgtaccagattagctggtgacaagacggacaactggtggttgagacaacatccaaaggttttgaacatgaagtgggccaagggaattaagagagcggacaagtcgaatgcgattgatctttttgttacagggcaaagaatagaaggcccggaaaaggtggattacgaaagcaaatttgaagaagtccctgaacctttcaccaaagaagaaagactagaatggttaagcaaattaaacaatgtatcgttatcatccgatgcgttctttcccttcccagacaacgtttatagagctgtgcagtctggtgtaaagttcatcacggctccttcggggtctgtcatggacaaagttgtcttccaagcggcggattcatttgatatcgtctacgtggagaacccaattcgtttattccaccactaa

SEQ ID NO: 56422 - protein, 591 aa, Saccharomyces cerevisiae [sequence omitted]

SEQ ID NO: 56423 - DNA, 1779 bp, Saccharomyces cerevisiae
  CDS (1)..(1779)
atggccaattacacaaaaaccgcaatcctatccgtctatgacaagacaggtctacttgatttagccagaggcctcatcgagaagaacgttcgtattctcgcctccggtggtactgctcgtatgattcgtgacgctggttttccaatcgaagacgtttctgctatcacacatgccccagaaatgttgggaggtagagtgaaaactttacatcctgccgttcatggtggtatccttgctagggacatcgatagcgatgagaaagacttgaaggaacagcacattgaaaaagtcgattatgtcgtttgtaacctatacccattcaaagaaactgttgctaaggtgggtgtgactattccagaagcagtagaagaaattgatattggtggtgttactctattaagagcagctgctaagaaccatgctagagtcactattttatctgatccaaaggactactccgaatttttaagtgaattatccagtaatggtgaaatctctcaagatttgagaaacagattggcattaaaggctttcgaacacactgccgattatgatgctgcaatttcagatttcttcaggaaacaatactctgaaggtcaagctcaaattactctacgttatggtgccaatccacaccaaaagccggctcaagcttacgtcagtcaacaagacagtttacctttcaaagtcctatgtggttcaccaggttacattaatttgttggatgctctaaattcctggcccctggttaaggaattatccgcctcgttgaatttaccagcagcagcatcgttcaagcatgtatcaccagctggtgccgctgtgggtatcccattgtctgatgttgaaaagcaagtttattttgttgccgacattgaaaacttatctcccctggcatgtgcctatgctagggcccgtggtgctgatagaatgtcttcctttggtgattggattgctctttccaacatagttgatgttccaacagctaagatcatatctagagaagtttctgatggtgttattgccccaggttatgagcctgaggcgttggccattctatccaagaagaagggaggtaagtactgcatattacaaattgatccaaactatgttccagaagctgtcgaaagaagacaagtatacggtgtgactttggaacaaaagagaaacgatgccataatcaatcaatcaactttcaaagaaattgtttctcaaaataaaaatctcactgaacaagccataattgatttaacggttgccaccattgctattaaatatactcaatctaattccgtatgttatgctagaaatggtatggttgtcggattgggtgcaggtcaacaatctagaatccattgtacaagattagctggtgataaggctgataattggtggttcagacaacaccctagagttttggagattaaatgggctaaaggcgtcaagagaccagaaaaatctaatgctatcgatttattcgtaaccggccaaattccaacagaagaaccagaattgtctgaataccaatcgaagttcgaggagattccaaaaccatttactccagaagaaagaaaggaatggttgagtaaattaaccaacgtttctttgtcatcggatgcatttttcccattcccagacaatgtttacagagcagttaaatccggtgtcaaatacattgccgctccatctggttctgtcatggacaaggttgtattttcagctgccgattcattcgatttggtttacgtagagaacccaatccgtttgttccaccattag

SEQ ID NO: 56424 - protein, 592 aa, Saccharomyces cerevisiae
MANYTKTAILSVYDKTGLLDLARGLIEKNVRILASGGTARMIRDAGFPIEDVSAITHAPEMLGGRVKTLHPAVHGGILARDIDSDEKDLKEQHIEKVDYVVCNLYPFKETVAKVGVTIPEAVEEIDIGGVTLLRAAAKNHARVTILSDPKDYSEFLSELSSNGEISQDLRNRLALKAFEHTADYDAAISDFFRKQYSEGQAQITLRYGANPHQKPAQAYVSQQDSLPFKVLCGSPGYINLLDALNSWPLVKELSASLNLPAAASFKHVSPAGAAVGIPLSDVEKQVYFVADIENLSPLACAYARARGADRMSSFGDWIALSNIVDVPTAKIISREVSDGVIAPGYEPEALAILSKKKGGKYCILQIDPNYVPEAVERRQVYGVTLEQKRNDAIINQSTFKEIVSQNKNLTEQAIIDLTVATIAIKYTQSNSVCYARNGMVVGLGAGQQSRIHCTRLAGDKADNWWFRQHPRVLEIKWAKGVKRPEKSNAIDLFVTGQIPTEEPELSEYQSKFEEIPKPFTPEERKEWLSKLTNVSLSSDAFFPFPDNVYRAVKSGVKYIAAPSGSVMDKVVFSAADSFDLVYVENPIRLFHH

SEQ ID NO: 56425 - DNA, 1617 bp, Agrobacterium tumefaciens
  CDS (1)..(1617): transl_table=11
atggccgtggtgtccaagaaaattcccgcccccgataaggtcaagattcgcacggcgcttctttccgtgtccgacaagaccgatattatcgagttggcaacggtactctccaagctcggcgtcaagctcctgtcgaccggcggtacggcaaaggcgattgccgaagcgggtcttgccgtcacagatgtctccgacgtcaccaattttcccgagatcatggatggccgcgtcaagacgctgcatcccaatgttcatggcgggcttctggcaatccgcgacgatgccgagcatgtcgaggccatgaaggcacatggtatcgaggcgatcgatctttccgtgatcaatctctatccgttcgaggaagtgcgcgccaagggcggcgattatccgacgacggttgagaatatcgatattggcggcccggcgatgatccgcgcttccgccaagaaccatgcctatgtcaccgttgttaccgacccttccgactaccctgcgctggtggaagccctgcaggccgatgacggacagacctcctatgcgctgcgccagcgttttgccgccaaggcctatgcccgcacggctgcttatgatgccgtgatttccaactggtttgccgaagcactggcgatcgagacgcctcattaccgcgccatcggcggtgtgctgaaagaaaagatgcgttatggtgaaaacccgcatcagagcgccggtttctacctgaccggtgaaaagcgccccggcgttgcaacggcgacgcttctccagggcaagcagctctcctacaacaacatcaatgataccgatgcggcttacgagctggtggcggagttcctgccggaaaatgcgccggccgttgccatcgtcaaacacgccaatccctgtggcgttgcgaccggccctacccttgcagaagcctatcggcgggcgctggcatgcgattccgtttccgcctttggcggcgtcattgcgctcaaccgcacgctcgatgcggaaacggcggaagagatcgtcaagctcttcaccgaagtcatcatcgcgcctgacgtgaccgaagaggccaagtccatcatcgcccgcaagccgaacctgcgccttctggccgccggcggcctgccagacccgcgtgcggctggcctcacggcgaagaccgtttccggtggcctgctggtgcagagccgtgacaatggcatggtcgaggatctcgaactcaaggtcgtaaccaagcgtgcaccgacggcgcaagagcttgaggacatgaagttcgctttcaagatcgccaagcatgtgaaatccaatgccgtgatctatgcgaaggacggtcagacggcgggtatcggcgctggccagatgagccgtgtggattccgcccgcatcgccgcccagaaggcggaagatgcagccaaggctcttggccttgccgaaccattgacgcgcggctctgccgttgcgtcggaagccttttatccgtttgcggatggtttgcttgctgcaatcgctgcgggcgccaccgctgtcatccagccgggtggctccatgcgcgatcaggacgtgatcgacgctgcaaacgagcataatgtggctatggtcttcaccggcatgcgccacttccgccattaa

SEQ ID NO: 56426 - protein, 538 aa, Agrobacterium tumefaciens
MAVVSKKIPAPDKVKIRTALLSVSDKTDIIELATVLSKLGVKLLSTGGTAKAIAEAGLAVTDVSDVTNFPEIMDGRVKTLHPNVHGGLLAIRDDAEHVEAMKAHGIEAIDLSVINLYPFEEVRAKGGDYPTTVENIDIGGPAMIRASAKNHAYVTVVTDPSDYPALVEALQADDGQTSYALRQRFAAKAYARTAAYDAVISNWFAEALAIETPHYRAIGGVLKEKMRYGENPHQSAGFYLTGEKRPGVATATLLQGKQLSYNNINDTDAAYELVAEFLPENAPAVAIVKHANPCGVATGPTLAEAYRRALACDSVSAFGGVIALNRTLDAETAEEIVKLFTEVIIAPDVTEEAKSIIARKPNLRLLAAGGLPDPRAAGLTAKTVSGGLLVQSRDNGMVEDLELKVVTKRAPTAQELEDMKFAFKIAKHVKSNAVIYAKDGQTAGIGAGQMSRVDSARIAAQKAEDAAKALGLAEPLTRGSAVASEAFYPFADGLLAAIAAGATAVIQPGGSMRDQDVIDAANEHNVAMVFTGMRHFRH

SEQ ID NO: 56427 - DNA, 1521 bp, Anabaena sp
  CDS (1)..(1521): transl_table=11
atggcgcgtctagcactgctgagtgtatctaacaagactggtttaattgacttagctcgtcgcttggtggaggaatttgagtttgatttaatcagcagtggggggacagcccaagccctcaaggatgctggtttacctgtgacgaaggttgcagattacacgggttcgccagagattttgggtggacgggtgaaaactctacatccccggattcatggggggattttggctaggcgggatgtagctagtgatttgacagatttggaaaataaccaaattcgcccgattgatttggtggtggtgaatctttatccctttgagtctactattgctaaaccaggggtgacgttggcggaagctgtggaacaaattgacattggcggcccggcgatgttgcgggcatcatcgaagaattttgctcatctgacggtattatgtgatccggcgcagtatgacgagtatttgcaagaattacggcaaaataacggagtggcttccttagaatttcggcaaaaggcggctttgaaagggtttttacatacagcaagttatgatagcgctatagcctcttacctctcaggtacacaacagcacaccctaagcggtactgaattacaatctctgcgttacggtgagaacccccatcagccagcagcttggtatcaaacggggactacgccaacagggtggacagcagccgagaaactgcaaggtaaggaactgagttacaataacttggttgacttagaagccgcccgacgcattattgcagagttcactgatacaccagccgcaacgattattaaacatactaatccctgcggtacggcgttggcagataccattgtggaggcttaccaaaaggcttttaatgctgatgctacttcggcatttggggggattgtcgccctgaaccgtcctattgatgcagcgacagccagcgagttaaccaagacgtttttagaatgtgtgattgcgcctgattgtgatgcagaagcgcaaaaaatcctctccaagaaatctaatgtgcgggtgttgactttggctgatttgagtaccggccctaaaactttagtcaaacaaatcgccgggggtttcctggtgcaggctgcggatgatattgctgctgacacaagtcaatggcaagtcgtgacagaacgccaacctacacccgatgaattagcagaattgctgtttgcttggaaagtctgcaaacacgttaaatctaatgctattgttgtgacaagcgatcgcactactctaggtgtaggtgcaggacaaatgaaccgcattggttcaacgaaaattgccttagaacaagctggagacaaagctaaaggtgcaatcctcgccagcgatggatttttccccttcgatgatacagtgagaaccgccgccgccgccggtattagcgccattgtccaaccagggggaagcctgcgggatcaagattctgtcaaagctgctaatgaactcggtttgctgatggtgttgactggggtgcgtcactttttacactaa

SEQ ID NO: 56428 - protein, 506 aa, Anabaena sp
MARLALLSVSNKTGLIDLARRLVEEFEFDLISSGGTAQALKDAGLPVTKVADYTGSPEILGGRVKTLHPRIHGGILARRDVASDLTDLENNQIRPIDLVVVNLYPFESTIAKPGVTLAEAVEQIDIGGPAMLRASSKNFAHLTVLCDPAQYDEYLQELRQNNGVASLEFRQKAALKGFLHTASYDSAIASYLSGTQQHTLSGTELQSLRYGENPHQPAAWYQTGTTPTGWTAAEKLQGKELSYNNLVDLEAARRIIAEFTDTPAATIIKHTNPCGTALADTIVEAYQKAFNADATSAFGGIVALNRPIDAATASELTKTFLECVIAPDCDAEAQKILSKKSNVRVLTLADLSTGPKTLVKQIAGGFLVQAADDIAADTSQWQVVTERQPTPDELAELLFAWKVCKHVKSNAIVVTSDRTTLGVGAGQMNRIGSTKIALEQAGDKAKGAILASDGFFPFDDTVRTAAAAGISAIVQPGGSLRDQDSVKAANELGLLMVLTGVRHFLH

SEQ ID NO: 56429 - DNA, 1521 bp, Aquifex aeolicus
  CDS (1)..(1521): transl_table=11
atgagggcgataatatccgtatacaggaaggaaggaatagacaaactggcaaaagctcttcaggaactcggctacgaaatcgtatcaacgggaggaacggcgaagtacctcagagagaaaggcatctccgtgaaagaggtttccgaaattacaggttttcccgaaatacttgagggaagggttaagaccctccaccctgtagttcacggaggaattttattcagagactgggtagaaaaggacaaggaagaaatagaaaagcatggaataaaacccatagacgttgtcgtcgtaaacctgtacccctttgaagagaaattaaaggaaggtttaacggataaagacttaatggaatttatagacatcgggggacctacgctcataagggcggctgcaaaaaacttcttcagggttgtcatcctcgtagatccggaagattacgactgggtaatagaaaagttaaagaagggaaacctgacacttcaggacagggcttaccttgcatggaaagccttttcccataccgcctactacgacggtgtaatatctcaagcctttaagaagctctattccatagatactttcgggaaggaagaagctctcccccttaagcgtatgcagaaactgaggtacggagaaaacccccatcaaagaggtttcctttacgaaaaccctttggaagatataggaataactaaagctcaggtccttcaaggaaaggaaatgtcatttaacaattatctggacgccgattccgcggttaggttagttgcggaatttcccaatcaaactgtgtgtgcaatcataaaacataacaatccctgtggcgtagctctcggctcttccgtaaaagaagcgtttttgagggcaaaggaagccgatcccgtatccgcattcggggggatagtggcctttaacgataaggttgacggggaaaccgcaaaagaattaacctccatgttccttgaagttgtgattgcccccgattacgacgaagaagctttaagggaattatcaagaaagaaaaatctaagagtcataaggttcttcggctttcaacacgcctttgacgtgaaaaaagttagcggcggttacctccttcaggacgaagacacggtactttacgaaaaactccaagtggtcacgaaaagagaacctacggcagaagaaatggaagatctgttattcgcttggaaagtggtaaaacacacaaagtcaaatgccgtagttatagccaaaaacggacaaactctcggcataggctcgggaaacgtttccagagttgacagtttgaaatgtgctataaacaaagccaaggagtttggttttgacctcaaaggtgccgtggtagcctcggaagctttcttcccgttcagagacagtatagacataatggctaaagaaggaataactgcggtaatccaacccggcggttctataagagatcaggaagtaatagatgcgtgcaatgaacacggaatagcgatgatattcacaggtttaagacactttaaacattaa

SEQ ID NO: 56430 - protein, 506 aa, Aquifex aeolicus
MRAIISVYRKEGIDKLAKALQELGYEIVSTGGTAKYLREKGISVKEVSEITGFPEILEGRVKTLHPVVHGGILFRDWVEKDKEEIEKHGIKPIDVVVVNLYPFEEKLKEGLTDKDLMEFIDIGGPTLIRAAAKNFFRVVILVDPEDYDWVIEKLKKGNLTLQDRAYLAWKAFSHTAYYDGVISQAFKKLYSIDTFGKEEALPLKRMQKLRYGENPHQRGFLYENPLEDIGITKAQVLQGKEMSFNNYLDADSAVRLVAEFPNQTVCAIIKHNNPCGVALGSSVKEAFLRAKEADPVSAFGGIVAFNDKVDGETAKELTSMFLEVVIAPDYDEEALRELSRKKNLRVIRFFGFQHAFDVKKVSGGYLLQDEDTVLYEKLQVVTKREPTAEEMEDLLFAWKVVKHTKSNAVVIAKNGQTLGIGSGNVSRVDSLKCAINKAKEFGFDLKGAVVASEAFFPFRDSIDIMAKEGITAVIQPGGSIRDQEVIDACNEHGIAMIFTGLRHFKH

SEQ ID NO: 56431 - DNA, 1539 bp, Bacillus subtilis
  CDS (1)..(1539): transl_table=11
atgaccattaaacgtgcattaatcagtgtttcagataaaacaaatctcgttcctttcgtaaaagaactgacagagcttggcgttgaagtcatctccacaggcggaacgaaaaagcttcttcaagaaaacggtgtggatgtgatcggaatttctgaagtgacaggctttcctgaaattatggacggccggttaaaaaccctacacccgaatattcacggcggccttctggcggttcgcggcaatgaagagcatatggcgcagatcaatgaacacgggattcagccgattgacctcgttgtcgtcaacctctatccatttaaagaaacgatttctaaagaagacgtcacgtatgaagaagcgatcgaaaatatcgacatcggcggacctggcatgctgcgcgcggcatcaaagaaccatcaggatgtcacggttatcgtcgatccggccgattacagcccagtgctaaatcaaatcaaagaagaaggcagcgtatctcttcagaaaaaacgcgagctcgcggcaaaagtattccgtcatactgcggcatatgatgcactgatcgctgactatctgacaaatgttgtcggtgaaaaagaaccagagcaattcactgtgacatttgagaaaaaacaatcgcttcgctatggagaaaacccgcatcaggaagcaactttctatcaaacagctcttcctgtcaaaggctccattgcgcaagcagaacagcttcacggaaaagagctttcttacaacaacattaaagacgcggatgctgcagttcaaatcgttcgtgaattcactgaaccggctgctgttgctgtgaagcatatgaacccgtgcggcgtgggaacaggaaaaacgatcgcagaagcgtttgacagagcgtttgaagcggataaaacatctatcttcggcggcattatcgcgctgaaccgtgaagtggacaaggcaactgccgaagcgcttcacaacattttcttagaaatcatcattgcgccttcattcagccaagaagcgctcgacgtcctgactgcgaagaaaaatctccgtctcgtgacgcttgacgtatccgccgctgttcaaaaggaaaaacagctgacatccgttcaaggcgggctgctgattcaagatttagatatgcacggcttcgatgatgctgagattagcattccgacaaaaagagagccgaacgagcaagagtgggaagacttgaagcttgcttggaaagtcgtgaagcatgtgaaatcaaatgcgattgttctcgcgaaggacaacatgacagtcggcgtgggagcaggccaaatgaaccgcgtcggatcggcaaaaatcgcaatcgagcaagcaggggaaaaagcgaagggcagcgcgctcggttcggatgcatatttcccaatgccagatactgtcgaagaagcggcaaaagcgggcgttacagccatcattcagccaggcggatcgatccgagatgaggattccatcaaaaaagcggatgaatacggcattgccatggtattcaccggcatcagacacttcaaacattaa

SEQ ID NO: 56432 - protein, 512 aa, Bacillus subtilis
MTIKRALISVSDKTNLVPFVKELTELGVEVISTGGTKKLLQENGVDVIGISEVTGFPEIMDGRLKTLHPNIHGGLLAVRGNEEHMAQINEHGIQPIDLVVVNLYPFKETISKEDVTYEEAIENIDIGGPGMLRAASKNHQDVTVIVDPADYSPVLNQIKEEGSVSLQKKRELAAKVFRHTAAYDALIADYLTNVVGEKEPEQFTVTFEKKQSLRYGENPHQEATFYQTALPVKGSIAQAEQLHGKELSYNNIKDADAAVQIVREFTEPAAVAVKHMNPCGVGTGKTIAEAFDRAFEADKTSIFGGIIALNREVDKATAEALHNIFLEIIIAPSFSQEALDVLTAKKNLRLVTLDVSAAVQKEKQLTSVQGGLLIQDLDMHGFDDAEISIPTKREPNEQEWEDLKLAWKVVKHVKSNAIVLAKDNMTVGVGAGQMNRVGSAKIAIEQAGEKAKGSALGSDAYFPMPDTVEEAAKAGVTAIIQPGGSIRDEDSIKKADEYGIAMVFTGIRHFKH

SEQ ID NO: 56433 - DNA, 1524 bp, Bacteroides thetaiotaomicron
  CDS (1)..(1524): transl_table=11
atgtcagagtctaaaagaataaaaactgcattggtatctgtataccataaggaaggtttggatgaaattattaccaaactttacgaagaaggagtcgagtttctctcaacaggtggaactcgtcagtttattgaatcactaggatatccctgtaaggcagtggaagatttgaccacttatccttccatccttggtggtagagtgaagacattacatccgaagattttcggaggtatcctttgccgtcgtgacctggaacaggatattcaacagattgaaaagtatgaaatccccgaaatagatttggttattgtcgacctgtatccgtttgaagctaccgtagcttccggcgcatccgaagcagacatcattgaaaaaatcgatataggtggaatctctttgattcgtgctgctgccaagaactataacgatgtcatcatcgtggcttctcaggcacaatataagccattgctggatatgctgatggaacatggcgctacttcttcactcgaagaacgtcgctggatggcaaaagaagcgtttgccgtttcttctcactacgactcagctatcttcaattatttcgatgccggcgaaggttctgctttccgttgttcggtaaacaaccagaagcaactccgttacggtgaaaaccctcatcagaaaggttatttctacggaaatctggacgccatgttcgatcagattcacggtaaggaaatctcttataacaacttgctggacatcaatgctgccgtcgatctgatcgacgaatacgaagatttgactttcgctatcctgaaacataataatgcttgcggcctggcttctcgtccaactgtactggaagcatggacagacgcgttggccggtgatcccgtttccgctttcggaggcgtattgattactaacggagtgattgacaaagcagcagctgaagagatcaacaagatattcttcgaagtgattatcgcgccggactatgacgtagacgcgctcgagattttgggacagaaaaagaaccgcatcatcctggttcgcaaagaagccaaactgcctaagaaacagttccgtgctttgttgaacggtgtattggtgcaggacaaagatatgaatattgaaacggttgccgatctgagaactgtgacagacaaagctcctactccggaagaagtggaagatctgttgtttgccaacaagatcgttaagaacagtaaatcaaacgctatcgtgctggcaaaaggcaaacagcttcttgcaagcggtgtgggacagacttcacgggtagacgccttgaaacaagcgattgaaaaagccaaatcattcggattcgatctgaacggtgcggtaatggcttcagatgctttcttccccttcccggattgcgtagaaatagcagacaaagaaggtattacggcagtcatccagccgggcggctcggtgaaagacgatcttacttttgcttactgcaacgagcacggtatggcgatggtgaccaccggtatccgtcattttaaacattaa

SEQ ID NO: 56434 - protein, 507 aa, Bacteroides thetaiotaomicron
MSESKRIKTALVSVYHKEGLDEIITKLYEEGVEFLSTGGTRQFIESLGYPCKAVEDLTTYPSILGGRVKTLHPKIFGGILCRRDLEQDIQQIEKYEIPEIDLVIVDLYPFEATVASGASEADIIEKIDIGGISLIRAAAKNYNDVIIVASQAQYKPLLDMLMEHGATSSLEERRWMAKEAFAVSSHYDSAIFNYFDAGEGSAFRCSVNNQKQLRYGENPHQKGYFYGNLDAMFDQIHGKEISYNNLLDINAAVDLIDEYEDLTFAILKHNNACGLASRPTVLEAWTDALAGDPVSAFGGVLITNGVIDKAAAEEINKIFFEVIIAPDYDVDALEILGQKKNRIILVRKEAKLPKKQFRALLNGVLVQDKDMNIETVADLRTVTDKAPTPEEVEDLLFANKIVKNSKSNAIVLAKGKQLLASGVGQTSRVDALKQAIEKAKSFGFDLNGAVMASDAFFPFPDCVEIADKEGITAVIQPGGSVKDDLTFAYCNEHGMAMVTTGIRHFKH

SEQ ID NO: 56435 - DNA, 1638 bp, Bifidobacterium longum
  CDS (1)..(1638): transl_table=11
atgacaaacacgaaccgaccgatacgtcgagcactggtctcggtctttcataaggaaggcatcgaagtactcgcggaagcgttcgtgaaggccggcaccgaagttgtttccactggttcgaccgccaagaagcttgccgaactgggcgtcaaggtaaccgaggtgtccgatgtcaccggattccccgaatgcctcgacggccgcgtcaagacgctgcacccgtacattcacgccggcattctggctgatatgaccaaccccgaacacgccaagcagctcgaggagttcggcatcaagccgttcgacctggtggtcgtcaacctgtacccgttcgccgacaccgtgcgctccggcgccaacgaggccgataccatcgagaagatcgacatcggcggtccctccatggtgcgcggcgcggccaagaaccacgccaccgtggccatcgtcaccgacccggccgattatgcactggtcgcctcccgcgtggccgacggcaccggcttctccttggacgagcgcaagtggcttgccgccaaggccttcgcgcacaccgccgcctatgacgccaccatcaacgagtggaccgccaagcactggcccaagccggcctctctggacgccgtcgaggtggacaaggacgatcagggcactgaagtcgatcccgccaagttcccggcccagttcacccgcacctgggatcgtgcgcacaccctgcgctacggcgagaactcccaccagcaggccgccctctacatcgacccgctcaaccagaccggtttcgcccacgccgagcagctcggcggcaagccgatgagctacaacaactacgtggacgcggacgccgcctggcgcaccgtatgggatatggctcccgccattgccgtggccgtagtcaagcacaacaatccgtgcggtctggccatcggcgcgaccgcggccgaggcccacaagaaggctcacgcctgcgacccgatgagcgcctacggcggtgtgatcgcctgcaactccaaggtcacccttgagatggccgaaagcgtgcgcccgattttcaccgaagtcatcgtcgcccccgactatgagccggccgcgctcgaactgctgcagaccaagaagaagaacctgcgcatcctcgaggtggccgagccgccgaagggccacgaggccatccgccagatcgatggcggcctgcttgtgcaggacactgatctgatcaacgccgtcggcgacgatccggacgcctggaagctcgtggccggcgaggccgccgacgctgacacgctgaaggacctcgtgttcgcatggcgtgcaatccgctgcgtgaagtccaacgccatcctgctggcccacgaccaggccacggttggcatcggcatgggccaagtcaaccgcgtggactcctgccatttggccgtcgagcgcgccaacacgctggccgatggtgccgatcgcgccaccggtgcggtcgcggcatccgatgcgttcttcccgttcgccgatggtgcccaggtgcttatcgacgcgggcgtcaaggccatcgtgcagcctggcggctccatccgcgatgaggaggtcatcgaagcggccaagaaggccggcgtgaccatgtacctcaccggcacccgccacttcttccactga

SEQ ID NO: 56436 - protein, 545 aa, Bifidobacterium longum
MTNTNRPIRRALVSVFHKEGIEVLAEAFVKAGTEVVSTGSTAKKLAELGVKVTEVSDVTGFPECLDGRVKTLHPYIHAGILADMTNPEHAKQLEEFGIKPFDLVVVNLYPFADTVRSGANEADTIEKIDIGGPSMVRGAAKNHATVAIVTDPADYALVASRVADGTGFSLDERKWLAAKAFAHTAAYDATINEWTAKHWPKPASLDAVEVDKDDQGTEVDPAKFPAQFTRTWDRAHTLRYGENSHQQAALYIDPLNQTGFAHAEQLGGKPMSYNNYVDADAAWRTVWDMAPAIAVAVVKHNNPCGLAIGATAAEAHKKAHACDPMSAYGGVIACNSKVTLEMAESVRPIFTEVIVAPDYEPAALELLQTKKKNLRILEVAEPPKGHEAIRQIDGGLLVQDTDLINAVGDDPDAWKLVAGEAADADTLKDLVFAWRAIRCVKSNAILLAHDQATVGIGMGQVNRVDSCHLAVERANTLADGADRATGAVAASDAFFPFADGAQVLIDAGVKAIVQPGGSIRDEEVIEAAKKAGVTMYLTGTRHFFH

SEQ ID NO: 56437 - DNA, 1593 bp, Bradyrhizobium japonicum
  CDS (1)..(1593): transl_table=11
atgactgaccatccccgccgcgtcacccgtgccctgctttccgtctccgacaagaccggcctgatcgaattcgccaaggcgcttgccgcccatgacgtcgaactggtttcgaccggcggcaccgccaaggcgatcgccgcggccggcctcaaggtgaaggacgtttccgagctgaccggcttccccgagatgatggacggccgcgtcaagacgctgcatccgaaggtgcatggcggcctgctcgcgatccgcgacaacaaggaccatgcggatgcgatgaaggcgcacggcatcgcgccgatcgatttgctcgtcgtcaatctctatccgttcgaggcgaccgtggacaaaggcgcgggcttcgaggattgcatcgagaacatcgacatcggcggccccgcgatgatccgcgccgccgccaagaaccatgacgacgtcgccgtggtggtcgaggccgaggactacaaggcggtgctcgacgagctcgccgccaacaagggcgcaaccacgctgaagctgcgccggcggcttgccgcgaaggcctatgcgcgcaccgcggcctacgacgccgcgatctcgaactggttcaaccggcagctcgagatcgacgcacctgatttccgcgccttcggcggcaaattgatccagtcgctgcgctacggcgagaacccgcaccagacggcggcattctatgcgactcccgacaagcgcccaggcgtctcgaccgcacggcagctgcagggcaaggagctctcctacaacaacatcaacgacaccgatgcggcatacgagtgcatcggcgagtttgacgccaagcgcaccgcggcctgcgtcatcgtcaagcacgccaatccctgcggcgtcgctgagggctccgacctcgtcagcgcctatcgcaaagcgctcgcctgcgattcgacctcggcgttcggcggcatcatcgcgatgaaccgcgcgctcgacgccgacaccgcgcgcgagatcacgaagatcttcaccgaggtgatcatcgcgcccgacgccagcgaggaagcgatcgcgatcatcggcgcgcgcaagaacctccgcctgctgctcgcgggcagcctgcccgatccgcgcgcgccgggcctcaccgccaagacggtggccggcggcctgctcgtgcagagccgcgacaacgccgtggtcgacgacatgaccttcaaggtcgtgaccaagcgtgcgcccacggacgccgagatgcgggacctcaagttcgcgttccgggtggccaagcacgtcaagtccaacaccatcatctacgccaaggatctcgccaccgtcggcatcggcgcgggccagatgagccgggtcgattcagctcgcattgcggcgcgcaaggcgcaggatgcggcggttgagctgaagctcgccgagccgctcaccaagggctcggtggtggcctcggacgcgttcttcccgttcgccgacggcatgctcgcctgcatcgaggccggcgccaccgccgtggtgcagcccggcggctccatgcgcgacgacgaggtgatcaaggccgccgacgagcacggcatcgccatggtgttcacgggaacgcggcatttcaggcactga

SEQ ID NO: 56438 - protein, 530 aa, Bradyrhizobium japonicum
MTDHPRRVTRALLSVSDKTGLIEFAKALAAHDVELVSTGGTAKAIAAAGLKVKDVSELTGFPEMMDGRVKTLHPKVHGGLLAIRDNKDHADAMKAHGIAPIDLLVVNLYPFEATVDKGAGFEDCIENIDIGGPAMIRAAAKNHDDVAVVVEAEDYKAVLDELAANKGATTLKLRRRLAAKAYARTAAYDAAISNWFNRQLEIDAPDFRAFGGKLIQSLRYGENPHQTAAFYATPDKRPGVSTARQLQGKELSYNNINDTDAAYECIGEFDAKRTAACVIVKHANPCGVAEGSDLVSAYRKALACDSTSAFGGIIAMNRALDADTAREITKIFTEVIIAPDASEEAIAIIGARKNLRLLLAGSLPDPRAPGLTAKTVAGGLLVQSRDNAVVDDMTFKVVTKRAPTDAEMRDLKFAFRVAKHVKSNTIIYAKDLATVGIGAGQMSRVDSARIAARKAQDAAVELKLAEPLTKGSVVASDAFFPFADGMLACIEAGATAVVQPGGSMRDDEVIKAADEHGIAMVFTGTRHFRH

SEQ ID NO: 56439 - DNA, 1617 bp, Brucella melitensis
  CDS (1)..(1617): transl_table=11
atggctgtcagctccaagcatattcccgctcccgatcttcatcgggtgcgccgcgccctcctttccgtttccgacaaaaccggcctgatcgatttcgccaaggcgcttcatgccaatggcgtcgaaatcctctcgaccggcggcacagcaaaatcgattgccgccgcaggcattccggtgaaggacgtatccgaaatcaccggctttccggaaatcatggatgggcgcgtcaagacgctgcatccggcagtccatggcggcctgctcgccgtgcgcaacgacccggaacatgtcgcggccatggaagaacacggcattggcggcatcgatcttgccgtcatcaatctttatccgttcgaggaagtccgcttcaagggcggcgactacgacacgaccgtcgagaatatcgacattggcggcccggcgatgatccgcgcttcggccaagaaccacgcctatgtcgcaaccgtcgttgaccctgccgattatgcagacgtcgtggctgaactggaaaagcattccggctccctgccgcttgccttccgcaaaaagcttgccgccaaggccttttcgcgcacggcagcttatgacgcggccatttccaactggtttgccgaagcaatcgacgaagaaacgccgacctatcgcgcggttgccggcaagctgcattccgtcatgcgctacggtgaaaacccgcaccagacggctggcttttatctcaccggcgaaaagcgccccggcgttgccactgcgacccagcttcagggcaagcagctttcctataacaacatcaacgataccgatgcggcttttgagctggtggccgaattcgatcccgcccgcaccgcagccgttgccatcatcaagcacgccaatccatgcggcgtggcggaagcgtccaccattaaggaagcctacctcaaggcactcgcctgcgatccggtttcggcctttggcggcattgtcgcgctcaacaggacgctcgatgaggaagccgctgaagagatcgtgaaaaccttcacagaagtcatcatcgcgcccgatgccaccgaaggcgcacaggccatcgtcgcggccaagaagaacctgcgcctgcttgtcaccggcggcctgccggacccgcgcgccaagggcattgccgccaagacggttgccggtggcctgctggtccagtcgcgcgacaatggtgtggtggacgatctcgatctcaaggtcgtcaccaagcgcgcaccgaccgaagccgagcttaacgatctgaaattcgccttccgcgtcggcaagcatgtgaagtcgaacgccatcgtctatgtgaaggacggcgcaacggtcggcattggcgcaggccagatgagccgcgtggattcagcccgcattgccgcccgcaaggcagaagatgcggccgaagccgccggccttgcagcgccgctcaccaagggctgcgtggtcgcgtccgatgcattcttcccctttgcagacggtctgctttccgctgtcgaggccggtgcaaccgccgtcatccagccgggcggctccatgcgtgacgacgaagtgatcgccgctgccgatgaacatggcatcgccatggtcatgacggggatgcgccacttccgccactga

SEQ ID NO: 56440 - protein, 538 aa, Brucella melitensis
MAVSSKHIPAPDLHRVRRALLSVSDKTGLIDFAKALHANGVEILSTGGTAKSIAAAGIPVKDVSEITGFPEIMDGRVKTLHPAVHGGLLAVRNDPEHVAAMEEHGIGGIDLAVINLYPFEEVRFKGGDYDTTVENIDIGGPAMIRASAKNHAYVATVVDPADYADVVAELEKHSGSLPLAFRKKLAAKAFSRTAAYDAAISNWFAEAIDEETPTYRAVAGKLHSVMRYGENPHQTAGFYLTGEKRPGVATATQLQGKQLSYNNINDTDAAFELVAEFDPARTAAVAIIKHANPCGVAEASTIKEAYLKALACDPVSAFGGIVALNRTLDEEAAEEIVKTFTEVIIAPDATEGAQAIVAAKKNLRLLVTGGLPDPRAKGIAAKTVAGGLLVQSRDNGVVDDLDLKVVTKRAPTEAELNDLKFAFRVGKHVKSNAIVYVKDGATVGIGAGQMSRVDSARIAARKAEDAAEAAGLAAPLTKGCVVASDAFFPFADGLLSAVEAGATAVIQPGGSMRDDEVIAAADEHGIAMVMTGMRHFRH

SEQ ID NO: 56441 - DNA, 1578 bp, Buchnera aphidicola subsp
  CDS (1)..(1578): transl_table=11
atgccatcaaataatcttataaaaaatgcgttaattagcgtttcagacaaaaaaaatattgtagaagtagcagaaaaattaataattaataaaattaatttattttcaacaggaggaacggctcaaattttaaaaaaaaacaatatacctgttacagaaatatcagattatacaaaatttcctgaaatcatggatggacgagtaaaaacattacatccaaaaattatgggtggtattttaggacaaaaacaaaaagatcaggagattatgaaattatataatatttgtccaattgatatagttatcgtaaacttttatccatttgaaaaaatcaaaaacataaaaaaaaatgatatagataatgttgtcaataatattgatataggcggaccgacactcgtacgtgcttctgcaaaaaattataagaacgttatagttatagtagatcttgatgattttcaatctactattgattctattaacaataacacaatgaatatggaaaaaagatttaatttagcatctaaagcatttgaatatacatcatactatgaacaaattatttctcagtatttcattgaacaaaatagcttgtataaaaaaactaataatagtttattcccgaatgaaataaatttttcttttattaaaaaacaagatttaagatatggagaaaactatcatcaaaaatcgtctttttatatagaaaaaaacatgtgtgattccggaacaattagtacagcatgtcaaattcaaggaaaaactttatcatataataatatatcagattctgatatagcattagagtgtgtaaaacaattcactaaaccagcatgtgttattgtaaaacatggaaatccttgtagcgttgccgttagtcataatattttagaatcatatttatctgcatacaattctgatcctatttcagcatttggaggtataatttcttttaactgtaaattagatgaaaaaacagcacaaacaattattaatcaacaatttgttgaagttattattattcccgaaatcagtaaaaaagcagttaaaatattacaaaaaaaacaaaatataagagtactagttactggaaaattacaaaataatacagttggattggatttaaaaaagatcactaatggtctacttgtacaagaatacgattctcataatatagattataactcatggagttttgttacaaaacgtagtccaacaaaaaaagaactcaaagactctatcttttgttggcaagttgctaaatttgtaaaatcaaatgcaattgtatatggttctgatgaaattactatcggaattggtgcgggtcaaatgagcaggatttattcaactaaattagctaatataaaagttaaagatcagggtaaaaatattattggtgccactatggcttctgatgctttttttccttttagagatggtatcgatgaagctgcttctgtcggtattagctctataattcaaccgggaggttctatacgagatgaagaaatcattcgagctgcagatgaacataatataacgatgatttttactaaaaaaaggcattttaaacattag

SEQ ID NO: 56442 - protein, 525 aa, Buchnera aphidicola subsp
MPSNNLIKNALISVSDKKNIVEVAEKLIINKINLFSTGGTAQILKKNNIPVTEISDYTKFPEIMDGRVKTLHPKIMGGILGQKQKDQEIMKLYNICPIDIVIVNFYPFEKIKNIKKNDIDNVVNNIDIGGPTLVRASAKNYKNVIVIVDLDDFQSTIDSINNNTMNMEKRFNLASKAFEYTSYYEQIISQYFIEQNSLYKKTNNSLFPNEINFSFIKKQDLRYGENYHQKSSFYIEKNMCDSGTISTACQIQGKTLSYNNISDSDIALECVKQFTKPACVIVKHGNPCSVAVSHNILESYLSAYNSDPISAFGGIISFNCKLDEKTAQTIINQQFVEVIIIPEISKKAVKILQKKQNIRVLVTGKLQNNTVGLDLKKITNGLLVQEYDSHNIDYNSWSFVTKRSPTKKELKDSIFCWQVAKFVKSNAIVYGSDEITIGIGAGQMSRIYSTKLANIKVKDQGKNIIGATMASDAFFPFRDGIDEAASVGISSIIQPGGSIRDEEIIRAADEHNITMIFTKKRHFKH

SEQ ID NO: 56443 - DNA, 1533 bp, Campylobacter jejuni
  CDS (1)..(1533): transl_table=11
atgagagcattgcttagtgtgagtgataaagaaggtatagtagaatttggcaaagagcttgaaaatttaggctttgagattctttcaacaggtgggacttttaagtttttaaaagaaaatggaataaaagttatggaagtgagtgattttacaaaaagtcctgagctttttgaagggcgtgtaaagactttacaccctaagattcatggtggaattttacacaaaagaagcaatgaaaatcatatcaaacaagcaaaagaaaatgaaattttaggaattgatctagtttgtgtgaatttatatccttttaaaaaaaccactatcatgagtgatgattttgatgaaattatagaaaatatcgatataggtgggcctgcgatgataagaagtgcagcaaagaactataaagatgtgatggtactttgcgatccgcttgattatgaaaaagtcatcgagactttaaaaaaaggtcaaattgatgagaattttcgtttaaatttgatgataaaagcttatgagcatacggcaaattatgatgcttatattgcaaattatatgaatgaacgctttaacggaggttttggagcgagtaaatttatagtaggacaaaaagtatttgatacaaaatatggagaaaatccacatcaaaaaggggctttatacgagtttgatgccttttttagtgcaaatttcaaagcccttaaaggcgaagcaagttttaataatctaaccgatattaacgcagctttaaatttggctagtagtttcgataaagctccagctattgctatagtaaaacatggaaatccttgcggttttgctataaaagaaaatttagtacaaagctatatacatgctttaaaatgcgatagcgttagtgcttatggaggagtggttgcaatcaatggaactcttgatgaggctttagcaaataaaatcaatgaaatttatgtagaagtaatcatcgcagccaatgtagatgaaaaagctttagctgtgtttgaaggtaaaaaacgcattaaaattttcactcaagaaagctcgtttttaatccgcagttttgataaatatgattttaaacatattgatgggggttttgtatatcaaaacagcgatgaagttggcgaagatgagtttaaaaatgcaaagcttatgagtcaaagagaggcaagtaaggaagaattaaaagatcttgaaatcgccatgaaaatagcagcatttaccaaatcaaacaatgttgtttatgtaaaaaatggcgctatggtggctataggcatgggtatgacaagcagaatcgatgcagcaaaggtagcaatcgctaaagctaaagaaatggggcttgatttgcaaggttgcgttttagcaagtgaagccttttttccttttagagatagcatagatgaagcaagtaaagtaggagttaaagctatagtagaaccaggcggaagtataagagatgatgaagtggtaaaggcggctgatgagtatggtatggcgctttattttacaggagtaagacatttcttacattaa

SEQ ID NO: 56444 - protein, 510 aa, Campylobacter jejuni
MRALLSVSDKEGIVEFGKELENLGFEILSTGGTFKFLKENGIKVMEVSDFTKSPELFEGRVKTLHPKIHGGILHKRSNENHIKQAKENEILGIDLVCVNLYPFKKTTIMSDDFDEIIENIDIGGPAMIRSAAKNYKDVMVLCDPLDYEKVIETLKKGQIDENFRLNLMIKAYEHTANYDAYIANYMNERFNGGFGASKFIVGQKVFDTKYGENPHQKGALYEFDAFFSANFKALKGEASFNNLTDINAALNLASSFDKAPAIAIVKHGNPCGFAIKENLVQSYIHALKCDSVSAYGGVVAINGTLDEALANKINEIYVEVIIAANVDEKALAVFEGKKRIKIFTQESSFLIRSFDKYDFKHIDGGFVYQNSDEVGEDEFKNAKLMSQREASKEELKDLEIAMKIAAFTKSNNVVYVKNGAMVAIGMGMTSRIDAAKVAIAKAKEMGLDLQGCVLASEAFFPFRDSIDEASKVGVKAIVEPGGSIRDDEVVKAADEYGMALYFTGVRHFLH

SEQ ID NO: 56445 - DNA, 1572 bp, Chlorobium tepidum
  CDS (1)..(1572): transl_table=11
atgcttgatcctgtcatcaaacgggcgctcgtgtccgtttccgacaaaaccggcatcgtcgatttctgccgcgaactggcctcgatggatgtcgaaatcttctccaccggtggcacgctgaaattacttcaaggtgctggtatcgtcgcgcaatccatttcgaccatcaccggttttccggagatcatggacggcagggtcaagacgcttcatccgaaaatccacggtggtctgcttgccgtgcgcgacaacgccgagcaccagaaggcggcccgcgagaacggtatccagttcatcgatctcgtggtggtgaacctctatcccttcgaggcaactatcgccaaagcggatgtgactttcgaggaggctattgaaaatatcgatattggtggcccatcgatgctgcgcagcgcggccaagaacaacgagtcggtcacggtggttaccgatgtcgccgactacgccaccgtgcttgacgaaatgcgctcgaacggtggcgcgaccacgcgggccacccgtctgacgctcgcggccaaagtgtacgcgctgacctcgcgctacgacacggccattgcggcctacatggctaaagccgctggagtcaagggcgcgggcgacacgatgaccctcaagctcgaaaaagagctgagcatgcgctacggcgagaacccgcaccagagcgccggactctacaaaatggacgatggcaacggcgtgcgttcgttcagcgcgattttcgagaagctgcacggtaaagagttgtcgtataacaatatgcttgacatcgccgctgcgactggtatcatcgaggagtttcgcggcgaggagccgtcggtggtgattgtcaagcacaccaatccgtgcggcgtcgcgcaggcgccgacgctctgcgaggcctaccgcaaagccttctcgaccgacacgcaggctccgtttggcggtatcatcgccttcaaccgcccgctcgacatggagacagccagcgcggtcaacgaaatcttcaccgagattctcatcgctccggctttcgaagatggcgtgctcgagatgctcatgaagaagaaggaccgccgtctcgtgctccagaagcagccgttgccgaaagctggctgggagttcaagtccacgccgttcggcatgctcgtgcaggagcgcgacagtaagacggttgctcctgaagagctgaaggtggtcacgaagcgccagccgaccgctgaagagctggccgacctgatgttcgcctggaagatcgtgcggcacatcaaatccaacacgatcctctacgtcaagaaccgccagaccttcggcgtcggcgcgggccagatgtcgcgcgtcgattcatcgaaaatcgcccgctggaaagcctcggaagtggccctcgatctcaggggatcggttgtcgcctccgacgccttcttccccttcgccgatggccttctcgctgccgctgaagctggggtaaccgccgtcatccagccgggtggttcgatccgcgacaacgaagtcatcgaagccgccgacgccaacaatctcgcaatggtcttcaccggaatgcgccatttcaagcactga

SEQ ID NO: 56446 - protein, 523 aa, Chlorobium tepidum
MLDPVIKRALVSVSDKTGIVDFCRELASMDVEIFSTGGTLKLLQGAGIVAQSISTITGFPEIMDGRVKTLHPKIHGGLLAVRDNAEHQKAARENGIQFIDLVVVNLYPFEATIAKADVTFEEAIENIDIGGPSMLRSAAKNNESVTVVTDVADYATVLDEMRSNGGATTRATRLTLAAKVYALTSRYDTAIAAYMAKAAGVKGAGDTMTLKLEKELSMRYGENPHQSAGLYKMDDGNGVRSFSAIFEKLHGKELSYNNMLDIAAATGIIEEFRGEEPSVVIVKHTNPCGVAQAPTLCEAYRKAFSTDTQAPFGGIIAFNRPLDMETASAVNEIFTEILIAPAFEDGVLEMLMKKKDRRLVLQKQPLPKAGWEFKSTPFGMLVQERDSKTVAPEELKVVTKRQPTAEELADLMFAWKIVRHIKSNTILYVKNRQTFGVGAGQMSRVDSSKIARWKASEVALDLRGSVVASDAFFPFADGLLAAAEAGVTAVIQPGGSIRDNEVIEAADANNLAMVFTGMRHFKH

SEQ ID NO: 56447 - DNA, 1500 bp, Clostridium acetobutylicum
  CDS (1)..(1500): transl_table=11
atgataaaaagagcacttataagcgtatttaataaaaatgggattttaaagctagcaaaatttttaaatgaaaaaggtgtagaaatactttcaacaggtggaacctataagcatcttaaggaaaatggtattcccgtaatagaggtttcagaggttacaggttttgatgaaatacttgatggaagagtaaaaacacttcatcctaaaatacatggtggaattctagcaataagagataataaagaacatatggacactataaagaataaaggaataacaccaattgatatggtagttgttaatttgtatcctttctttgacaaggttaaagagaacataagctttgaagagaaagttgaatttatagatatcggtggtccaactatgataagagcagctgctaaaaattttcaagatgttgttgtattaacagatgtaaatgattatgatgatgtaatagatcaaattgaaaaaaccggggaagtagcttataatacaaagaaaagattagctggtaaggtatttaatttaatgtcggcttatgatggtgcaatcagtagattccttcttgaagatgaatatcctgagtacttagccgtaccttacaaaaagaaaatggatttaagatatggagaaaaccctcatcaaacagcagctttttatgaggcagcttttggagatggagcaatgaagggttttgaacaacttaatggaaaagaactttcttataataacataaaagatatggatatagcttggaaagttgtaaatgaattcgatgaaactgtatgctgtgctttaaaacacaatagtccatgcggcgttgctattggagaaaatcctttagatgcttataaaaaagcttttgagtgtgatgatacttcgatttttggagggatagttgctttaaataaagttatagataagcctgcagcagaagaaatggttaaaatattccttgaaatagttatagcacctgactttacagcggatgcacttgaagttttaaaatctaagaaaaaccttagagtaataaaagctaatgaaaaaccttcagataatttcgagcttgcaaaggtagatggtgcaatgcttgttcaaagtgcagataacaaacttactgaaaaaatggaagtagttacagataagaaaccaacagatgaagaaatgagagatatgatttttggaatgaaggtagtaaaatacgtaaaatccaatgctatagttgttgttaaaaatggagcagcagttggaattggaggaggtcaagtaaacagaatttggccagctaaggatgctatggagagaggaaaaggagcagcagttcttgcatcagacgcatttttcccatttggcgatatagtagaagaggcacataaaaatggaattaaagctataattcaacctggtggttctataagagatcaggaatccattgatggctgcaataaatatggaatttcaatggttatgacaggtataagacattttaaacattag

SEQ ID NO: 56448 - protein, 499 aa, Clostridium acetobutylicum
MIKRALISVFNKNGILKLAKFLNEKGVEILSTGGTYKHLKENGIPVIEVSEVTGFDEILDGRVKTLHPKIHGGILAIRDNKEHMDTIKNKGITPIDMVVVNLYPFFDKVKENISFEEKVEFIDIGGPTMIRAAAKNFQDVVVLTDVNDYDDVIDQIEKTGEVAYNTKKRLAGKVFNLMSAYDGAISRFLLEDEYPEYLAVPYKKKMDLRYGENPHQTAAFYEAAFGDGAMKGFEQLNGKELSYNNIKDMDIAWKVVNEFDETVCCALKHNSPCGVAIGENPLDAYKKAFECDDTSIFGGIVALNKVIDKPAAEEMVKIFLEIVIAPDFTADALEVLKSKKNLRVIKANEKPSDNFELAKVDGAMLVQSADNKLTEKMEVVTDKKPTDEEMRDMIFGMKVVKYVKSNAIVVVKNGAAVGIGGGQVNRIWPAKDAMERGKGAAVLASDAFFPFGDIVEEAHKNGIKAIIQPGGSIRDQESIDGCNKYGISMVMTGIRHFKH

SEQ ID NO: 56449 - DNA, 1551 bp, Corynebacterium ammoniagenes
  CDS (1)..(1551): transl_table=11
atgagtgatgaccgcaagcagatcaagcgtgcactaattagcgtttatgacaagacagggctcgaagagctcgctcgcacgcttgacagcgcaggcgtagagattgtgtccaccggctccaccgccgccaagattgctgatcttggtattaacgtcactccggttgaatctctcaccggattcccagagtgcctcgaaggccgcgttaagaccttgcacccacgcgtgcatgcgggcattttggctgatacccgcaagccggatcaccttaatcagctggaagagcttgagattgagccattccagttggtcgtggttaacctgtacccatttaaagagactgtagcttctggcgcagacttcgatggttgcgtcgagcagattgatatcggcggtccatccatggtccgtgctgctgccaagaaccacccatcggtggcggttgttgtagacccagcgcgttacggcgacatcgctgaggctgtcgctcagggcggattcgatctggcgcagcgtcgtcagctggccgcgactgcgtttaagcacacggcagattatgatgttgcagtttctggctggtttgcccagcagcttgccgatgactctgttgcctctgctgagcttgaaggcgacgcgctgcgttatggtgagaaccctcaccagcaggcttccatcgttcgtgaaggcacgaccggtgttgctaatgcgaagcagctgcacggtaaggaaatgagctacaacaactaccaggacgcggatgccgcatggcgcgcggcttgggatcatgaacgtccatgtgtagcaattattaagcacgctaacccttgcggtatcgctgtttctgatgagtccatcgcagcagcacacgcagcggcacacgcctgtgacccaatgtccgctttcggtggcgttattgcggtcaaccgcgaagtcaccaaggaaatggcaacccaggttgctgacatcttcaccgaggtcatcatcgcaccgtcctacgaagatggagccgtcgagattttgcagggcaagaagaatattcgcatccttgttgctgagcatgaagtaccagcagtagaggtcaaagaaatctctggtggccgtctgctgcaggaagcagacgtttaccaggctgagggcgataaggcttcgagttggactttggctgccggcgaagctgcatccgaggaaaagctcgcggagctggaattcgcttggcgcgcagtacgctcggtaaagtccaacgccatcttgttggcgcatgaaggtgcaaccgttggcgtgggtatgggccaggtcaaccgcgttgattcggcgaagttggctgttgaccgcgcgaatactttggctgattccgcagagcgtgctcgcggttccgtcgcagcatcggatgcgttcttcccattcgccgatggcttgcaggtgcttatcgatgccggcgtttccgccgttgtccagcccggcggctccatccgcgatgaagaagttattgctgccgctgaagcagccggtatcaccatgtacttcactggcacccgccacttcgcgcactaa

SEQ ID NO: 56450 - protein, 516 aa, Corynebacterium ammoniagenes
MSDDRKQIKRALISVYDKTGLEELARTLDSAGVEIVSTGSTAAKIADLGINVTPVESLTGFPECLEGRVKTLHPRVHAGILADTRKPDHLNQLEELEIEPFQLVVVNLYPFKETVASGADFDGCVEQIDIGGPSMVRAAAKNHPSVAVVVDPARYGDIAEAVAQGGFDLAQRRQLAATAFKHTADYDVAVSGWFAQQLADDSVASAELEGDALRYGENPHQQASIVREGTTGVANAKQLHGKEMSYNNYQDADAAWRAAWDHERPCVAIIKHANPCGIAVSDESIAAAHAAAHACDPMSAFGGVIAVNREVTKEMATQVADIFTEVIIAPSYEDGAVEILQGKKNIRILVAEHEVPAVEVKEISGGRLLQEADVYQAEGDKASSWTLAAGEAASEEKLAELEFAWRAVRSVKSNAILLAHEGATVGVGMGQVNRVDSAKLAVDRANTLADSAERARGSVAASDAFFPFADGLQVLIDAGVSAVVQPGGSIRDEEVIAAAEAAGITMYFTGTRHFAH

SEQ ID NO: 56451 - DNA, 1563 bp, Corynebacterium glutamicum
  CDS (1)..(1563): transl_table=11
atgagcgatgatcgtaaggcaattaaacgcgcactaattagcgtgtatgacaagactggcctggaggatctagcccaggcacttcaccgcgagaacgtggaaattgtttccaccggatccactgcggcgaagattgctgagcttggtattcctgttaccccggttgaggagctcaccggtttccctgagtgccttgagggccgtgtgaagacactgcaccctaaggttcacgctggcatcttggcggacacccgcaaggaagaccacctgcgtcagctcaaggaacttgaggtcgccccattccagcttgtcgtggtgaacctgtacccatttgctgagaccgttgcgtccggcgccgatttcgatgcttgcgttgagcagatcgacatcggaggcccatccatggttcgtgctgcggcaaagaaccacccatctgtcgctgtggttgtttcaccgaaccgctacgaggatgtccaggaagctttgaagaccggtggattctcccgcgcggagcgcaccaagttggctgctgaggctttccgccacaccgcaacctacgatgtcaccgttgcaacctggatgagcgagcagctggctgccgaagattctgagactgagttcccaggttggatcggcaccaccaacaccttgtcccgcagcttgcgttacggtgagaaccctcaccagtctgcagctttgtacgtgggcaacacccgcggacttgcacaggctaagcagttccacggcaaggaaatgagctacaacaactacaccgattctgatgctgcatggcgtgcagcgtgggatcacgagcgtccttgtgtagctatcatcaagcatgcaaacccttgtggcattgctgtttctgatgagtccatcgcagcggcacaccgcgaggcacacgcatgtgactctgtgtccgcattcggtggcgtcatcgcgtccaaccgtgaagtcagcgttgagatggctaaccaggttgcagagatcttcactgaggtcatcatcgctccttcctatgaagagggcgctgtggagatcctgagccagaagaagaacatccgtattcttcaggctgaagcacctgtgcgtaagggctttgagtcccgtgagatctccggcggtctgcttgttcaggaacgcgacttgatccacgctgagggcgacaactccgcaaactggactcttgctgccggctctgctgtttctcctgaggttctgaaggacctggagttcgcgtggactgcagttcgttccgtgaagtccaacgcaattctgttggctaagaacggcgctaccgttggcgttggcatgggacaggtcaaccgcgttgactctgctcgcttggctgtcgaccgtgcaggtgcagagcgcgctaccggttccgttgctgcttccgatgcgttcttcccattcgctgacggctttgaggttctcgctgaggctggcatcactgctgttgtgcagcctggtggatccattcgcgacaacgaggtcattgaggcagccaacaaggctggcgtgaccatgtacctgactggtgcgcgacacttcgctcactaa

SEQ ID NO: 56452 - protein, 520 aa, Corynebacterium glutamicum
MSDDRKAIKRALISVYDKTGLEDLAQALHRENVEIVSTGSTAAKIAELGIPVTPVEELTGFPECLEGRVKTLHPKVHAGILADTRKEDHLRQLKELEVAPFQLVVVNLYPFAETVASGADFDACVEQIDIGGPSMVRAAAKNHPSVAVVVSPNRYEDVQEALKTGGFSRAERTKLAAEAFRHTATYDVTVATWMSEQLAAEDSETEFPGWIGTTNTLSRSLRYGENPHQSAALYVGNTRGLAQAKQFHGKEMSYNNYTDSDAAWRAAWDHERPCVAIIKHANPCGIAVSDESIAAAHREAHACDSVSAFGGVIASNREVSVEMANQVAEIFTEVIIAPSYEEGAVEILSQKKNIRILQAEAPVRKGFESREISGGLLVQERDLIHAEGDNSANWTLAAGSAVSPEVLKDLEFAWTAVRSVKSNAILLAKNGATVGVGMGQVNRVDSARLAVDRAGAERATGSVAASDAFFPFADGFEVLAEAGITAVVQPGGSIRDNEVIEAANKAGVTMYLTGARHFAH

SEQ ID NO: 56453 - DNA, 1590 bp, Escherichia coli O157
  CDS (1)..(1590): transl_table=11
  misc_feature (1275)..(1275): r is g or a
atgcaacaacgtcgtccagtccgccgcgctctgctcagtgtttctgacaaagccggtatcgtcgaattcgcccaggcactttccgcacgcggtgtggagctgctgtctacagggggcactgcccgtctgttagcagaaaaaggtctgccggtaaccgaagtttccgattacaccggtttcccggagatgatggatggacgcgtgaagaccctgcatccgaaagtacatggtggcattctgggccgtcgcggccaggacgatgccattatggaagaacatcagatccagcctatcgatatggtggttgttaacctgtatccgttcgcccagaccgtggcccgtgaaggttgctcgctggaagatgcggttgagaacatcgatatcggcggcccaacgatggtgcgctccgccgccaagaaccataaagatgtcgcaatcgtggtgaagagcagcgactacgacgccattattaaagagatggatgacaacgaaggatcgctgacgcttgcaacccgtttcgacctcgccatcaaagccttcgaacacactgccgcctacgacagcatgattgccaactacttcggcagcatggttccggcttatcacggtgaaagcaaagaagccgccggtcgcttcccacgcacgctgaacctgaacttcattaagaagcaggatatgcgttacggcgagaacagccaccagcaggctgccttctatatagaagagaatgtgaaagaagcctccgttgctaccgcaacccaggttcagggtaaagccctctcttataacaacatcgccgataccgatgcggcgctggagtgcgtgaaagagttcgccgagccggcatgtgtgattgtgaagcacgccaacccttgcggcgtggctatcggcaattcaattcttgatgcttacgatcgcgcgtacaaaaccgacccgacctccgcattcggcggcatcattgcctttaaccgcgagctggatgcggaaaccgcacaggccatcatttctcgtcagtttgttgaagtgattattgcgccgtccgccagcgaagaagccctgaaaatcaccgccgccaaacagaatgtacgcgttctgacctgcggtcagtggggcgagcgtgttccgggtcttgatttcaaacgcgtgaacggcggtctgctggttcaggatcgcgatctgggcatggtcggtgcggaagaactgcgcgtcgtcaccaaacgtcagccgaccgaacaggaactgcgtgatgcgctgttctgctggaaagtggcgaarttcgtgaaatccaatgctatcgtctatgccaaaaacaatatgaccatcggtattggcgcgggccagatgagccgcgtgtactccgcgaaaatcgccggtattaaagctgccgatgaaggcctggaagtgaaaggttcctcgatggcttctgacgcgttcttcccgttccgcgacggtattgatgccgccgccgctgcgggcgtgacctgcgtaatccagcctggcggttccatccgtgatgacgaagtgattgccgccgccgacgagcacggtattgcgatgctcttcaccgatatgcgccacttccgccattaa

SEQ ID NO: 56454 - protein, 529 aa, Escherichia coli O157
MQQRRPVRRALLSVSDKAGIVEFAQALSARGVELLSTGGTARLLAEKGLPVTEVSDYTGFPEMMDGRVKTLHPKVHGGILGRRGQDDAIMEEHQIQPIDMVVVNLYPFAQTVAREGCSLEDAVENIDIGGPTMVRSAAKNHKDVAIVVKSSDYDAIIKEMDDNEGSLTLATRFDLAIKAFEHTAAYDSMIANYFGSMVPAYHGESKEAAGRFPRTLNLNFIKKQDMRYGENSHQQAAFYIEENVKEASVATATQVQGKALSYNNIADTDAALECVKEFAEPACVIVKHANPCGVAIGNSILDAYDRAYKTDPTSAFGGIIAFNRELDAETAQAIISRQFVEVIIAPSASEEALKITAAKQNVRVLTCGQWGERVPGLDFKRVNGGLLVQDRDLGMVGAEELRVVTKRQPTEQELRDALFCWKVAKFVKSNAIVYAKNNMTIGIGAGQMSRVYSAKIAGIKAADEGLEVKGSSMASDAFFPFRDGIDAAAAAGVTCVIQPGGSIRDDEVIAAADEHGIAMLFTDMRHFRH

SEQ ID NO: 56455 - DNA, 1590 bp, Escherichia coli
  CDS (1)..(1590): transl_table=11
atgcaacaacgtcgtccagtccgccgcgctctgctcagtgtttctgacaaagccggtatcgtcgaattcgcccaggcactttccgcacgcggtgtggagctgctgtctacagggggcactgcccgtctgttagcagaaaaaggtctgccggtaaccgaagtttccgattacaccggtttcccggagatgatggatggacgcgtgaagaccctgcatccgaaagtacatggtggcattctgggccgtcgcggccaggacgatgccattatggaagaacatcagatccagcctatcgatatggtggttgttaacctgtatccgttcgcccagaccgtggcccgtgaaggttgctcgctggaagatgcggttgagaacatcgatatcggcggcccaacgatggtgcgctccgccgccaagaaccataaagatgtcgcaatcgtggtgaagagcagcgactatgacgccattattaaagagatggatgacaacgaaggatcgctgacgcttgcaacccgtttcgacctcgccatcaaagccttcgaacacactgccgcctacgacagcatgattgccaactacttcggcagcatggttccggcttaccacggtgaaagcaaagaagccgccggtcgcttcccacgcacgctgaacctgaacttcattaagaagctggatatgcgttacggcgagaacagccaccagcaggctgccttctatatagaagagaatgtgaaagaagcctccgttgctaccgcaacccaggttcagggtaaagccctctcttataacaacatcgccgataccgatgcggcgctggagtgcgtgaaagagttcgccgagccggcatgtgtgattgtgaagcacgccaacccttgcggcgtggctatcggcaattccattcttgatgcttacgatcgcgcgtacaaaaccgacccaacctccgcattcggcggcatcattgcctttaaccgcgagctggatgcggaaaccgcacaggccatcatttctcgtcagtttgtcgaagtgattattgcgccgtccgccagcgaagaagccctgaaaatcaccgccgccaaacagaacgtacgcgttctgacctgcggtcagtggggcgagcgtgttccgggcctcgatttcaaacgcgtgaacggcggtctgctggttcaggatcgtgacctggggatggtcggtgcggaagaactgcgcgtggtgaccaaacgtcagccgagcgaacaggaactgcgtgatgcgctgttctgctggaaggtggcgaagtttgtgaaatccaacgctatcgtctatgccaaaaacaatatgactatcggcattggcgcgggccagatgagccgcgtgtactccgcaaaaatcgccggtattaaagcggccgatgaaggcctggaagtgaaaggttcctcgatggcttctgacgcgttcttcccgttccgcgacggtattgatgccgccgccgctgcgggcgtgacctgcgtaatccagcctggcggttctatccgtgatgacgaagtgattgccgccgccgacgagcacggtattgcgatgctcttcaccgacatgcgccacttccgccattaa

SEQ ID NO: 56456 - protein, 529 aa, Escherichia coli
MQQRRPVRRALLSVSDKAGIVEFAQALSARGVELLSTGGTARLLAEKGLPVTEVSDYTGFPEMMDGRVKTLHPKVHGGILGRRGQDDAIMEEHQIQPIDMVVVNLYPFAQTVAREGCSLEDAVENIDIGGPTMVRSAAKNHKDVAIVVKSSDYDAIIKEMDDNEGSLTLATRFDLAIKAFEHTAAYDSMIANYFGSMVPAYHGESKEAAGRFPRTLNLNFIKKLDMRYGENSHQQAAFYIEENVKEASVATATQVQGKALSYNNIADTDAALECVKEFAEPACVIVKHANPCGVAIGNSILDAYDRAYKTDPTSAFGGIIAFNRELDAETAQAIISRQFVEVIIAPSASEEALKITAAKQNVRVLTCGQWGERVPGLDFKRVNGGLLVQDRDLGMVGAEELRVVTKRQPSEQELRDALFCWKVAKFVKSNAIVYAKNNMTIGIGAGQMSRVYSAKIAGIKAADEGLEVKGSSMASDAFFPFRDGIDAAAAAGVTCVIQPGGSIRDDEVIAAADEHGIAMLFTDMRHFRH

SEQ ID NO: 56457 - DNA, 1557 bp, Lactococcus lactis subsp
  CDS (1)..(1557): transl_table=11
atgtcaaaacgtgcacttatcagtgtttcagacaaagaaggtattgtagaatttgctaaggaaattcgagaattaggttgggaaattatctcaacgggtggaacgaaagccgttctggaccaagaagaaattccgaatattgcaattgatgaagtaacaggatttccagaaatgatggatgggcgccttaaaacattgcatccactaattcatggagcccttcttggacgtagagacttggaaagtcacatgaaatcaatgacagaacatcatatttctccaattgatttggttgttgtaaacttatatcctttcaaagaaactttgcttgctgggggcagtcaagcagaaatgattgagaagattgatattggtggtccttcaatgttgcgttcagcagctaaaaaccatgcgtcagtcacagtcgtttgtgacccaaatgattatgaaaaagtactgacagagctgtcagtaaaaggcgaaacaagtttaagttttcgtcagcaacttgcagcaaaagtatttcgccacactgcaagttatgatgctttaattgcacaatatttgacagaagaatttccggtagaaaatgtaaaaccagaaaaattaaccttgacttacgaccttaaacaaggaatgcgttatggtgaaaatccgcaacaaaatgcagatttttatgagtcaggaatacctacgacttattcaattgcccaaagtaagcaaattcatggtaaagaactaagctataacaacgttcgtgatgcagatgctgctttacagattgcaagagattttgaagaaccaacagttgtagccctcaaacatatgaatccatgtgggattggaacagcaacggatatcgaaaaagcttgggattatgcctatgaagcagacccagtttcaattttcggtggaattatcgttttaaatcgagaagtaactttggcaactgcgcaaaaaatgagtaagattttccttgaaattattatcgcaccctcttatagcaaagaagccttggaagttttaagtaaaaagaaaaatattcgacttttaaccgttgatttttctaaaaaagaagcctcagaaaaagaagcgcttgtaacaggggttcttggaggactacttgttcaaaatcaagatgtcattgttgaaaatccaaaagaatggacagtggcgactaaagttcaaccaactgatagacaaatggaggccatgaagtttgcttggaaagcagttaagtttgtcaaatcaaatgggattattgtgaccaatgaccaccagacgcttggtgttggtcctggccaaactaaccgtgtgggctcagtaaaaattgccttagaggcaaccgcagataaatcagtagaacttcaagaaaatgcggttcttggttcggatgcctttttcccatttgctgacaatatcgatgaaattgctaaggcaggaattaaagcaattgttcaaccaggtggctctgtacgagaccaagaagtgattgatgcctgtgataaatatggaattgcgatggtcttcacaggacttcgtcattttagacattaa

SEQ ID NO: 56458 - protein, 518 aa, Lactococcus lactis subsp
MSKRALISVSDKEGIVEFAKEIRELGWEIISTGGTKAVLDQEEIPNIAIDEVTGFPEMMDGRLKTLHPLIHGALLGRRDLESHMKSMTEHHISPIDLVVVNLYPFKETLLAGGSQAEMIEKIDIGGPSMLRSAAKNHASVTVVCDPNDYEKVLTELSVKGETSLSFRQQLAAKVFRHTASYDALIAQYLTEEFPVENVKPEKLTLTYDLKQGMRYGENPQQNADFYESGIPTTYSIAQSKQIHGKELSYNNVRDADAALQIARDFEEPTVVALKHMNPCGIGTATDIEKAWDYAYEADPVSIFGGIIVLNREVTLATAQKMSKIFLEIIIAPSYSKEALEVLSKKKNIRLLTVDFSKKEASEKEALVTGVLGGLLVQNQDVIVENPKEWTVATKVQPTDRQMEAMKFAWKAVKFVKSNGIIVTNDHQTLGVGPGQTNRVGSVKIALEATADKSVELQENAVLGSDAFFPFADNIDEIAKAGIKAIVQPGGSVRDQEVIDACDKYGIAMVFTGLRHFRH

SEQ ID NO: 56459 - DNA, 1536 bp, Leptospira interrogans serogroup Icterohaemorrhagiae serovar
  CDS (1)..(1536): transl_table=11
atgatacaaatcaaaagagctctcatctccgtcagcgataaatccggtttagtggaatttgcaaagtttctaaaccaaaacggagtggaaatcatttccacaggtggaactttaaaacttctaaaagataacggaattgcagccatagctatcgacgattacaccggttttccggaaattttagatggaagagtcaaaacccttcatcctaaagttcacggaggtctattaggtgtaatttccaatcctgctcacaaacaaaaaatggaagaattaaaaattcctaaaatagatttagtcgtagtcaacttatatccttttttaaagaccgtttctaaaccagaagttcaattagaagaagcaatcgaaaacatagatattggtgggccttctatgattcgaagcgccgctaaaaattataaacatactctagtgctcactgatccaaatgattacaaggaaattcaaaatttaatctcctccagtggaatttcagaagaaatttcagcgagttatatgagaaaagcattttctcacactgcgatgtatgatgccgcgatttcttcctggttttacaaacaatcaggagaagtttttccagatgttctcaatctttcctttatcaaaaaacaaaaactgagatacggcgaaaatccgcaccaagccgcctcattttatgaaccactttttacaaagagcgatttttcacctttacaagggaaagagttgtcgtttaacaatatgttagattttgacgctgcctttcatatttctagccttcttcccgaaaatacagtatgtatcatcaaacatctcaatccttgtggaattgcttatgcagacaatccattagaagcatttcaacttgcaagaagaaccgatcctatttccgcatttggtggagtaataggaattaaaggacaagtaaacggagaattggcgacttcgatcactgaaaactttgtagaaggagtgatcgctcaaaaattcactcaagaagctctggaagtattttctaaaaaaccaaatattcgtttaatagaaatccaagatttcaaagaagcccttgatgagttggatttaagaccgatccatcacggtttgcttatacaagatagagattatacaacaatcactgaaaaagatctaaaagtagtcactaaaaaacaaccttctcccgatgatattcgtggtttgatgtttgcttggtcttgtgttcgttttatcaaatccaacgcaatcgtttatacggaagaaaatgcaactctaggaatcggagcgggacaaatgtccagagtcgactcagtgcagttaggcgccaacaaagcgctgaacgtaggtctttccgtagtaggttcttatgttgcaagcgacgcattcttcccattccgagatggaatcgacacacttgcaaaagcaggagcaaaagcgatcattcaaccaggtggttctgtccgagacgaggaagtaattcaagccgcagacgaacacggactgattatggtttttactggaatgaggcattttagacactga

SEQ ID NO: 56460 - protein, 511 aa, Leptospira interrogans serogroup Icterohaemorrhagiae serovar
MIQIKRALISVSDKSGLVEFAKFLNQNGVEIISTGGTLKLLKDNGIAAIAIDDYTGFPEILDGRVKTLHPKVHGGLLGVISNPAHKQKMEELKIPKIDLVVVNLYPFLKTVSKPEVQLEEAIENIDIGGPSMIRSAAKNYKHTLVLTDPNDYKEIQNLISSSGISEEISASYMRKAFSHTAMYDAAISSWFYKQSGEVFPDVLNLSFIKKQKLRYGENPHQAASFYEPLFTKSDFSPLQGKELSFNNMLDFDAAFHISSLLPENTVCIIKHLNPCGIAYADNPLEAFQLARRTDPISAFGGVIGIKGQVNGELATSITENFVEGVIAQKFTQEALEVFSKKPNIRLIEIQDFKEALDELDLRPIHHGLLIQDRDYTTITEKDLKVVTKKQPSPDDIRGLMFAWSCVRFIKSNAIVYTEENATLGIGAGQMSRVDSVQLGANKALNVGLSVVGSYVASDAFFPFRDGIDTLAKAGAKAIIQPGGSVRDEEVIQAADEHGLIMVFTGMRHFRH

SEQ ID NO: 56461 - DNA, 1530 bp, Listeria monocytogenes
  CDS (1)..(1530): transl_table=11
atgaaaagagcgcttattagtgtgtcagataaaaacggcatcgtgccatttgcagaaaaattagtagaacttggagtagaaattatttcgacaggtggaacaaaagcggcatttgaacaagctggcgtaccagtaacaggaatagaagaagtaactgaatttcccgaaatgcttgatggacgcgtaaagacacttcatccagcaattcatggtgggttactggcaagacgcgatacagccgaacatatggaagctattgcggcacataatatcaagccaattgatttagtcatcgttaatttatatcctttccaagaaacgattcaaaaacctggtgttactttagaagaagcaattgaaaatattgatattggcggaccttcgatgttacgatcagctgcgaaaaattatgcagcagtaacggtagtggttgatacagctgattatgatgcagtactcacagaactacaagaacacggtgcaactacttttgaaactcgccaacgtctagctgcgaaagtatttcgacacacagcggcctatgatgctttaattgcagagtacttaacgaacatcactggagaaacattcccagaaaaagtgacgttcacttataatcgaaaacaagtcttgcgctacggtgaaaatcctcaccaagatgcagccttttatacagaaccaggtacgatagaaaactcaattagtgcagctaaacagttgcacggtaaagagttatcttataacaacattcgcgatgcagatgcagcccttaaaattgctagtgaatttacggagccagttgcagttgcagtaaaacatatgaatccatgcggcgttggtgttggcgaaaatattgaagaagcttatttgaaagcctatgaagcggatgaaacgtctatttttggcgggattgttgccttaaataaagaagtggacgcgaaaacagcagaacatatgagtaaaattttcttagaaattgtcattgcaccaagtttttccgaagaagcttttgcgattttagcgaaaaagaaaaatattcgtttgctaactgttccgtttgcgggtaatatggaaggttttgagaaaacgtctgttaatggtggactacttatccaagcgaacgactctcttgtagaagatacaactagttatgaagtagtgacagaaaaacaaccaaccgactcagaaatgaaagctttacttgctcagtggaaaatcgtgaaacatgtcaagtccaacgcgattgtggttggctctgacaaacaaacgcttggaattggtgctggacaaatgaatcgaatcggctccgctttgattgcactagagcaagcgggtgagaaagctaaaggagccgtacttgcttccgatgccttttttccaatggatgatacggttgaagctgcggcgaaatcaggaatcacagcgattattcagcctggtggatctatcaaagataaagaatcaattgcgatggcagataaatatggtatttctatggttctaactcatgtacgacacttcaaacattaa

SEQ ID NO: 56462 - protein, 509 aa, Listeria monocytogenes
MKRALISVSDKNGIVPFAEKLVELGVEIISTGGTKAAFEQAGVPVTGIEEVTEFPEMLDGRVKTLHPAIHGGLLARRDTAEHMEAIAAHNIKPIDLVIVNLYPFQETIQKPGVTLEEAIENIDIGGPSMLRSAAKNYAAVTVVVDTADYDAVLTELQEHGATTFETRQRLAAKVFRHTAAYDALIAEYLTNITGETFPEKVTFTYNRKQVLRYGENPHQDAAFYTEPGTIENSISAAKQLHGKELSYNNIRDADAALKIASEFTEPVAVAVKHMNPCGVGVGENIEEAYLKAYEADETSIFGGIVALNKEVDAKTAEHMSKIFLEIVIAPSFSEEAFAILAKKKNIRLLTVPFAGNMEGFEKTSVNGGLLIQANDSLVEDTTSYEVVTEKQPTDSEMKALLAQWKIVKHVKSNAIVVGSDKQTLGIGAGQMNRIGSALIALEQAGEKAKGAVLASDAFFPMDDTVEAAAKSGITAIIQPGGSIKDKESIAMADKYGISMVLTHVRHFKH

SEQ ID NO: 56463 - DNA, 1533 bp, Oceanobacillus iheyensis
  CDS (1)..(1533): transl_table=11
atgagtaaacgtgcgttaattagtgtgtcagataaaacaaatataatcgaatttgccaaaggtctcaaagaaagtggattcgaaatcttatctacaggtgggacattaagaagtatagctgaagcgggaatcgatgtaacaccagtagatgaagtaactggattcccagagatgttagatggacgtgtgaaaacgttgcatccaatgattcatgggggattacttggtaaacgttccaaccacgagcaccttagccaaatggaagagcatggcatcagatcaatcgatctagtagcagttaatctttatccgtttaaagagactgtgcaaaaaccggacgtaagccatcaagatattatcgagaatatagatattggcggtccatcgatgttacgctctgctgcaaagaactttgaagatgtactagttgtaacgggtcctacagattacaatcgtgtgctagcagcaattacatctgaaacagatacatatgaatttcgtcagcaattagcagcaaaagtatttcgacatactgctagctatgatgcgatgatagcgaattacttcctatctcagacagaagagcaatatccagaaagttatacagttacgtatgaaaaagtgcaagatttacgttatggagaaaatccacatcagcaagccgcattttataaagaaccaattcaatctcgtcctacattagcaacagcaaagcaacttcatggtaaggagctttcttataacaacattcaagatacgaatgcagcgatagaaattgtaaaagagtttgcagaacctgctgcagtcgcagtaaaacacatgaatccttgtggaataggaattggcgaatcgatttcaactgcatttgagcgggcatatcaagcagatccaacctcgatattcggaggaattgtagcgtgtaatcgaccggtggatgcggctactgcagaacaattaagtcagatattcttagaaattgttgtggcaccatcctttgaatcacaagcgctagaaattttaactcaaaagaaaaatatccgactattggagttagatgttacgagtgataataaacaatccaatcgtttaacaacagtagatggtggcgcattaatccaagcttatgatgcaaaagaagtaagtgaagcggaccttgaggtagtcaccaataaacaacctacggaacaagaaatcaatgatatgttgtttgcttggaaagcagtaaaacatgtgaagtcaaatgcaattgtcttagctaaagactcacaaacaattggtgttggtgcgggtcagatgaatcgtattggagctgcagagattgctattaagcaagcgggagataaaagtgaaggagctgttttagcttcagacgcattcttcccgatgccagatacggtggaagctgctgctaaagctggtattaaggcaatcattcagcctggaggatcaaagcgagaccaagattcggttgatgtatgtaaccaatttgggattgctatggtttatacaaaggtaagacactttaagcactaa

SEQ ID NO: 56464 - protein, 510 aa, Oceanobacillus iheyensis
MSKRALISVSDKTNIIEFAKGLKESGFEILSTGGTLRSIAEAGIDVTPVDEVTGFPEMLDGRVKTLHPMIHGGLLGKRSNHEHLSQMEEHGIRSIDLVAVNLYPFKETVQKPDVSHQDIIENIDIGGPSMLRSAAKNFEDVLVVTGPTDYNRVLAAITSETDTYEFRQQLAAKVFRHTASYDAMIANYFLSQTEEQYPESYTVTYEKVQDLRYGENPHQQAAFYKEPIQSRPTLATAKQLHGKELSYNNIQDTNAAIEIVKEFAEPAAVAVKHMNPCGIGIGESISTAFERAYQADPTSIFGGIVACNRPVDAATAEQLSQIFLEIVVAPSFESQALEILTQKKNIRLLELDVTSDNKQSNRLTTVDGGALIQAYDAKEVSEADLEVVTNKQPTEQEINDMLFAWKAVKHVKSNAIVLAKDSQTIGVGAGQMNRIGAAEIAIKQAGDKSEGAVLASDAFFPMPDTVEAAAKAGIKAIIQPGGSKRDQDSVDVCNQFGIAMVYTKVRHFKH

SEQ ID NO: 56465 - DNA, 1602 bp, Pasteurella multocida
  CDS (1)..(1602): transl_table=11
atgcaacctaatcgtcctattcgccaagcattactgagtgtttctgataaaacaggtattgttgagttcgctcaagctcttgttcaacgtggtgtgaaattactttcaacaggtggtactgccaaattattagctgaccacggcttagcggtaacagaagtctcagattacacaggctttccagaaatgatggatggacgcgtgaagacattacatcccaaagtacatggtggtattttagggcgtcgtggtacagatgatgaggtgatgagccaacagggtatcgaaggtatcgatatggtggtggtgaatttatacccttttgctgcaacggttgcgaaaccaaattgcagtttagaagaggcagtggaaaatattgatattggcggaccaacaatggtgcgctcagccgcgaaaaatcatcaagatgttgcaattgtcgttaataatagcgatttcaatgcgattctggctgaaatggatcaacaccaaaatagcctaacgttggaaactcgctttgatcttgcgattaaagcgtttgaacatactgcacaatatgatgccatgattgcgaactattttggtcaattagtcaaaccttattttgttgcagaggaagaagatgccgaggcgaagtgcggtcagtttccacgtactttaaatttaaactttatccgtaaacaaaccatgcgttatggtgagaatgggcatcaaaaagccgctttttatgtggagcaagacgtaaaagaagcttctgtatccaccgcaaaacaattacaaggtaaagccctttcttataacaatatcgctgataccgatgctgcgcttgaatgtgtgaaaagctttgatgagccggcttgtgtcattgtgaaacatgctaatccttgtggtgtggcattaggcgcagacattttagcggcttataaccgggcttatcagactgacccgacttccgctttcggtggcattattgcctttaaccgtgagttagatgccaaaaccgcgcaaacgattattgatcgtcaattcgtggaagtgattattgctccaacagttgctgaagaggcaaaagctttattgaaagcaaagaaaaatgtgcgagtgttagaatgtggtgagtggtcaggtacgcaacaacgcctagatgtaaagcgtgtcaatggcggtttattggttcaagaagctgatttaggcatggtcgatttagccgacttaaaagtggtgagcaaacgtcagccgacagagcaagaattaaaagatttgttattctgctggaaagtggcgaaatttgttaaatcgaatgccatcgtgtatgccaaagataaccaaactattggtattggtgcggggcaaatgagccgtgtctattcggctaaaattgcgggcattaaagcgcaagatgaaggactggatgtggcaggttgtgtgatggcgtctgatgcgttcttcccattccgtgatggaattgatgctgctgccaaagtagggattcaatgcgtgattcatccaggtggttcaatgcgtgatcaagaagtaatcgacgccgccgatgaacataatatggtgatggtattgaccggaatgcgtcactttagacactag

SEQ ID NO: 56466 - protein, 533 aa, Pasteurella multocida
MQPNRPIRQALLSVSDKTGIVEFAQALVQRGVKLLSTGGTAKLLADHGLAVTEVSDYTGFPEMMDGRVKTLHPKVHGGILGRRGTDDEVMSQQGIEGIDMVVVNLYPFAATVAKPNCSLEEAVENIDIGGPTMVRSAAKNHQDVAIVVNNSDFNAILAEMDQHQNSLTLETRFDLAIKAFEHTAQYDAMIANYFGQLVKPYFVAEEEDAEAKCGQFPRTLNLNFIRKQTMRYGENGHQKAAFYVEQDVKEASVSTAKQLQGKALSYNNIADTDAALECVKSFDEPACVIVKHANPCGVALGADILAAYNRAYQTDPTSAFGGIIAFNRELDAKTAQTIIDRQFVEVIIAPTVAEEAKALLKAKKNVRVLECGEWSGTQQRLDVKRVNGGLLVQEADLGMVDLADLKVVSKRQPTEQELKDLLFCWKVAKFVKSNAIVYAKDNQTIGIGAGQMSRVYSAKIAGIKAQDEGLDVAGCVMASDAFFPFRDGIDAAAKVGIQCVIHPGGSMRDQEVIDAADEHNMVMVLTGMRHFRH

SEQ ID NO: 56467 - DNA, 1608 bp, Pseudomonas aeruginosa
  CDS (1)..(1608): transl_table=11
atgaccgaccaaaccacccgcctgcccatccgccgcgcgctgatcagcgtttccgacaagaccggcgtcgtcgacttcgcccgtgagctggtcgccctcggcgtggaaatcctttccaccggcggcacctacaagctgctccgggacaacggcatctctgccgtggaagtggccgactacaccggcttcccggaaatgatggacggtcgggtgaagaccctgcacccgaaggtgcatggcggtatcctcggtcgccgcgacctggacggcgcggtcatggagcagcacggcatcaagccgatcgacctggtggcggtcaacctgtatcccttcgaggccacggtggccaggcccgactgcgacctgcctaccgccatcgagaacatcgatatcggcgggccgaccatggtccgttcggcggcgaagaaccacaaggatgtcgccatcgtggtcaatgccggcgactacgccgccgtgatcgaatccctcaaggccggcggcctgacctacgcccagcgtttcgacctggccctcaaggcgttcgagcacacctccgcctacgacggcatgatcgccaactacctgggtaccatcgaccagacccgcgataccctaggcaccgccgaccgcggcgccttcccgcgcaccttcaacagtcagttcgtcaaggcccaggaaatgcgctacggcgagaacccgcaccagagcgcggcgttctacgtcgaggcgaagaagggcgaggccagcgtctccaccgccatccagttgcagggcaaggaactgtcgttcaacaacgtcgccgacaccgacgccgccctggaatgcgtgaagagcttcctcaagccggcctgcgtgatcgtcaagcatgccaacccctgcggcgtcgccgtggtgccggaagacgaaggcggcatccgcaaggcctacgacctggcctacgccaccgatagcgaatcggcgttcggcggcatcatcgccttcaaccgcgagctggacggcgaaaccgccaaggccatcgtcgagcgccagttcgtcgaggtgatcatcgcgccgaagatttccgccgccgcccgcgaggtggtcgccgccaaggccaacgtacgcctgctcgaatgcggcgaatggccagccgagcgcgccccgggctgggacttcaagcgggtcaacggcggcctgctggtacagagccgcgacatcggcatgatcaaggccgaggacctgaagatcgtcactcgccgcgcgcccaccgagcaggagatccacgacctgatcttcgcctggaaggtggccaagttcgtcaagtccaacgccatcgtctacgccaggaaccgccagaccgtcggcgtcggcgccggccagatgagccgggtcaactccgcacggatcgccgcgatcaaggccgagcacgccggcctggaagtgaaaggcgcggtgatggcttccgacgccttcttcccgttccgcgacggcatcgacaacgcggccaaggccggcatcaccgcggtgatccagccgggcggctcgatgcgcgacaacgaagtgatcgcggcggccgacgaggcggatatcgcgatggtgttcactggcatgcgccatttccgccattga

SEQ ID NO: 56468 - protein, 535 aa, Pseudomonas aeruginosa
MTDQTTRLPIRRALISVSDKTGVVDFARELVALGVEILSTGGTYKLLRDNGISAVEVADYTGFPEMMDGRVKTLHPKVHGGILGRRDLDGAVMEQHGIKPIDLVAVNLYPFEATVARPDCDLPTAIENIDIGGPTMVRSAAKNHKDVAIVVNAGDYAAVIESLKAGGLTYAQRFDLALKAFEHTSAYDGMIANYLGTIDQTRDTLGTADRGAFPRTFNSQFVKAQEMRYGENPHQSAAFYVEAKKGEASVSTAIQLQGKELSFNNVADTDAALECVKSFLKPACVIVKHANPCGVAVVPEDEGGIRKAYDLAYATDSESAFGGIIAFNRELDGETAKAIVERQFVEVIIAPKISAAAREVVAAKANVRLLECGEWPAERAPGWDFKRVNGGLLVQSRDIGMIKAEDLKIVTRRAPTEQEIHDLIFAWKVAKFVKSNAIVYARNRQTVGVGAGQMSRVNSARIAAIKAEHAGLEVKGAVMASDAFFPFRDGIDNAAKAGITAVIQPGGSMRDNEVIAAADEADIAMVFTGMRHFRH

SEQ ID NO: 56469 - DNA, 1608 bp, Pseudomonas putida
  CDS (1)..(1608): transl_table=11
atgaccgaccagactacccgcctgccagtccgccgcgccctgatcagcgtctccgacaagaccggtatcctcgaattcgcccgtgagctgcagcagctcggtgtcgagatcctgtccaccggcggcacctacaagctgctcaaggacaacggcgtaaacgcggtggaagtggccgactacaccggcttcgccgaaatgatggatggccgggtcaaaaccctgcacccgaagatccacggcggtatcctcggccgtcgtggcaccgacgacgccatcatgaacgagcacggcatcaagccgatcgacctggttgcggtcaacctgtacccgttcgaagccaccatttccaagcctggctgtgacctgccgaccgccatcgagaacatcgacatcggcggcccgaccatggtccgttcggcagccaagaaccacaaggacgtggccatcgtggtcaacgccagcgactacgccggcatcgtcgaaggcctcaaggccggtggcctgacctatgcccagcgcttcgacctgatgctcaaggcgttcgagcacactgccgcctacgacggcatgatcgccaactacatgggcaccatcgaccaggccaaggacaccctgagcaccgaggcgcgcagcgaattcccgcgcaccttcaacagccagttcgtcaaggcacaggaaatgcgttatggcgagaacccgcaccagagcgcggcgttctatgtagaagccaagaaaggcgaagccagcatttccaccgctgtccagctgcaaggcaaggaactgtcattcaacaacgtggccgatactgacgccgcgctggaatgcgtaaagagcttcgtcaagccggcctgcgtcatcgtcaagcacgccaacccgtgcggcgtggcagtagtaccggaagacgaaggcggcatccgcaaagcctacgacctggcctacgcgaccgacaccgaatcggcgttcggcggcatcatcgcattcaaccgtgaactggatggcgaaaccgccaaggccattgtcgaccgccagttcgtcgaagtgatcatcgccccgaaaatctcccaggccgcccgcgacgtggtggctgccaaacagaacgtacgcctgctggagtgcggcgagtggccagccgagcgcgctgccggttgggacttcaagcgcgtcaatggcggcctgctggtgcaaagccgcgatatcggcatgatcaccgccgatgacctgaagatcgtcaccaagcgtgccccgaccgagcaagagatccacgacctggtattcgcctggaaagtggccaagttcgtcaagtccaacgccattgtctacgccaagcagcgccagaccatcggcgtcggcgccggccagatgagccgcgtcaactccgcccgcatcgctgcaatcaaggctgagcacgctggcctgcaggtgcagggcgcggtcatggcgtcggatgcattcttcccgttccgtgacggcatcgacaatgcagctaaagtgggtatcagcgccgtgatccagccgggtggttcgatgcgtgatgctgaagtcatcgctgctgccgacgaggccggcatcgcgatggtcttcactggcatgcgccacttccgccactaa

SEQ ID NO: 56470 - protein, 535 aa, Pseudomonas putida
MTDQTTRLPVRRALISVSDKTGILEFARELQQLGVEILSTGGTYKLLKDNGVNAVEVADYTGFAEMMDGRVKTLHPKIHGGILGRRGTDDAIMNEHGIKPIDLVAVNLYPFEATISKPGCDLPTAIENIDIGGPTMVRSAAKNHKDVAIVVNASDYAGIVEGLKAGGLTYAQRFDLMLKAFEHTAAYDGMIANYMGTIDQAKDTLSTEARSEFPRTFNSQFVKAQEMRYGENPHQSAAFYVEAKKGEASISTAVQLQGKELSFNNVADTDAALECVKSFVKPACVIVKHANPCGVAVVPEDEGGIRKAYDLAYATDTESAFGGIIAFNRELDGETAKAIVDRQFVEVIIAPKISQAARDVVAAKQNVRLLECGEWPAERAAGWDFKRVNGGLLVQSRDIGMITADDLKIVTKRAPTEQEIHDLVFAWKVAKFVKSNAIVYAKQRQTIGVGAGQMSRVNSARIAAIKAEHAGLQVQGAVMASDAFFPFRDGIDNAAKVGISAVIQPGGSMRDAEVIAAADEAGIAMVFTGMRHFRH

SEQ ID NO: 56471 - DNA, 1617 bp, Rhizobium loti
  CDS (1)..(1617): transl_table=11
atggccgtcgccgccaagaacattcccgccccggacctcgttcccgtacgccgtgccttgctttcggtcttcgacaagaccggcctcatcgacttcgccagggcattggctgcagccggtgtcgaattggtctcgaccggcggcaccgccaaggcgatcgccgaggccggcctggcggtgcgcgacgtctcggagctcaccggcttccccgagatcatggatggccgcgtcaagacgctgcatccttccgtgcatggcgcgctgcttggcgtgcgcgacgaccccgagcatgcggcggcgatgcgcaaatacggcatcgagccgatcgatctcctcgtctccaatctctatccgttcgaggaagtccgccgttccggcgccgactatgcggccatcgtcgagaacatcgacattggcggcccggcgatgatccgcgcctcggccaagaaccacgcctatgtcgccatcgtcaccgatccgggcgactatgcctcggtgctgaacgcgctggaaatgaacatcggctcgctgtccctggatttccgcaagaagctggcggccaaggcctttgcccgcacagccacctatgacgcggcgatttccggctggttcgccgaggcgctggagatcgagcatccgacctggcgcgccttcggcggcaggctgaccgaagtgatgcgctacggcgaaaacccgcaccagagcgccggcttctacgtcaatggcgacaagcgcccgggtgtcgccacggcgcggcagctgcagggcaagcagctctcctacaacaacatcaacgacaccgacgccgccttcgaactggccggcgagttcgatcccagccgctccgccgcggtcgccatcatcaagcacgccaacccgtgcggcgtcgccgagggcacgtcgctgaaatcagcctatgccaaggcgctcgcctgcgatccggtctctgccttcggcggcatcgtcgctgtgaatcgcaccctcgacgccgaagcggcagaggacattgtgaagaccttcaccgaggtgatcatcgcccctgatgccacggacgaggcggcggcgatcgttgccgcgaagaaaaacctgcgcctgctggtcaccggtggccttcccgacccgcgttcgcccggcacgaccgtcaaatccgttgccggcggcctgctcgtccagggccgggacaacgccgtggtcgacgacctcgaactgaaagtggtgaccaagcgcgcaccgacgccagccgaaatggccgacctgaaattcgccttccgcgtcgccaagcatgtcaagtcgaacgccatcgtctatgcaaaagatggcgccacagtcggcatcggcgcgggccagatgagccgcgtcgattcctcccgcatcgccgcccgcaaggcgctcgacgcggccgaggctgcgggcatgactgagccgctgaccacggggtccgttgtcgcctccgatgccttcttccccttcgccgacggtcttcttgccgcagtcgccgccggcgccaccgccgtcatccagccgggcggctcgatgaacgacaaggacgtcattgcggcggccgatgaacacggcattgcgatggtgtttacgggcgtgaggcatttccggcactga

SEQ ID NO: 56472 - protein, 538 aa, Rhizobium loti
MAVAAKNIPAPDLVPVRRALLSVFDKTGLIDFARALAAAGVELVSTGGTAKAIAEAGLAVRDVSELTGFPEIMDGRVKTLHPSVHGALLGVRDDPEHAAAMRKYGIEPIDLLVSNLYPFEEVRRSGADYAAIVENIDIGGPAMIRASAKNHAYVAIVTDPGDYASVLNALEMNIGSLSLDFRKKLAAKAFARTATYDAAISGWFAEALEIEHPTWRAFGGRLTEVMRYGENPHQSAGFYVNGDKRPGVATARQLQGKQLSYNNINDTDAAFELAGEFDPSRSAAVAIIKHANPCGVAEGTSLKSAYAKALACDPVSAFGGIVAVNRTLDAEAAEDIVKTFTEVIIAPDATDEAAAIVAAKKNLRLLVTGGLPDPRSPGTTVKSVAGGLLVQGRDNAVVDDLELKVVTKRAPTPAEMADLKFAFRVAKHVKSNAIVYAKDGATVGIGAGQMSRVDSSRIAARKALDAAEAAGMTEPLTTGSVVASDAFFPFADGLLAAVAAGATAVIQPGGSMNDKDVIAAADEHGIAMVFTGVRHFRH

SEQ ID NO: 56473 - DNA, 1611 bp, Rhizobium meliloti
  CDS (1)..(1611): transl_table=11
atggctgtcgcctccaagaaaatccccgccccggacgaggtccggatcaaaaccgccctcctttcggtctccgacaagacgggcatcgtcgaactcgcccgcgccctcaacgacaagggtatccggctcatctcgaccggcggtacgcacaaggcgcttgccgatgccggccttcccgtcagcgacgtgtcggagctgaccggctttccggaaatcatggacgggcgcgtcaagacgcttcaccccggcgtccatggcggtcttctcgcgatccgcgacgacgcggagcatgcggacgccatgagcgcgcacggcatcaccgcgatcgatctcgccgtcatcaatctctatcccttcgaagaagtccgggccaagggcggcgactatccgaccacggtcgagaatatcgatatcggcggccccgcgatgatccgggcatcggccaagaaccatgcctatgtgacgatcgtcaccgacccggcggactattcgccgctgctggaggaaatcgcagacggcgcgacgcgctacgcctttcgccagaaaatggcggccaaggcctatgcccgcacggcggcctatgatgcgacgatctccaactggttcgccgaagtgctcgacacgcccatgccgcgccaccgcgtcctcggcggcctgctcagggaagagatgcgctacggcgagaacccgcaccagaaagccggattctacgtgaccggcgagaaacggccgggagtggccacggcggcgctgctacagggcaagcagctctcctacaacaacatcaacgataccgatgccgccttcgaactggtggcggaattcctgccggagaaggcaccggcctgcgccatcatcaagcatgccaacccctgcggcgttgcgaccgcgccctcgctcgcggaagcctatcgccgggcgctcgcctgcgattcgacctcggcattcggcggcatcatcgcgctcaaccaggaactggacgccgagaccgcggaagagatcgtcaagctcttcaccgaggtgatcattgcgccttcggtcagcgacgacgcgaaagccgtcatcgcccgcaaaccgaacctgcggctgcttgcggccggcggcctgccggatccgcgcacgcccggcctgacggcgaagacggtcgccggcggggtgctcgtccagacgcgcgacaacggcatggtcgaggacctggagctcaaggtggttaccaagcgtgcgccgacggcgcaggaactcgaagacatgaagttcgccttcaaggtggcgaagcacgtcaagtccaatgccatagtctatgccaaggacggccagacggcgggtatcggcgccggccagatgagccgcgtcgattccgcgcgcatcgctgccataaaggcggaagaagcggccaaggcgatgggcctcgccgagccgctgacgcgcggttcggccgtcgcttcggaggccttcctccccttcgccgacgggcttctgtcagccatcgctgccggcgcaaccgccgtcatccagccgggtggttcgatgcgcgacgaagaagtgatcgcggcggcgaacgagcacgatgtcgcgatggtcttcacaggcatgcggcatttccggcactag

SEQ ID NO: 56474 - protein, 536 aa, Rhizobium meliloti
MAVASKKIPAPDEVRIKTALLSVSDKTGIVELARALNDKGIRLISTGGTHKALADAGLPVSDVSELTGFPEIMDGRVKTLHPGVHGGLLAIRDDAEHADAMSAHGITAIDLAVINLYPFEEVRAKGGDYPTTVENIDIGGPAMIRASAKNHAYVTIVTDPADYSPLLEEIADGATRYAFRQKMAAKAYARTAAYDATISNWFAEVLDTPMPRHRVLGGLLREEMRYGENPHQKAGFYVTGEKRPGVATAALLQGKQLSYNNINDTDAAFELVAEFLPEKAPACAIIKHANPCGVATAPSLAEAYRRALACDSTSAFGGIIALNQELDAETAEEIVKLFTEVIIAPSVSDDAKAVIARKPNLRLLAAGGLPDPRTPGLTAKTVAGGVLVQTRDNGMVEDLELKVVTKRAPTAQELEDMKFAFKVAKHVKSNAIVYAKDGQTAGIGAGQMSRVDSARIAAIKAEEAAKAMGLAEPLTRGSAVASEAFLPFADGLLSAIAAGATAVIQPGGSMRDEEVIAAANEHDVAMVFTGMRHFRH

SEQ ID NO: 56475 - DNA, 1572 bp, Rhodopirellula baltica
  CDS (1)..(1572): transl_table=11
gtgtctgatgtggtccccgtccgtaacgcattgatcagtgtcagcgacaagatggggctggcagattttgccgccggattgtccgccgctggagtcacgatctacagcaccggtgggactcgtgcccacttggaacaatccggtatcaaggtcgaagatgtggccgagtacaccggttttccggaaatgctggatggtcgcgtcaaaacgctgcacccgcgaattttcgctggcatcttggctcgtcgcgacctcgatgatcacatggacacgatcgctgatcatgacatcgagccatttgatttggtcgtcgtgaatctgtatccattcgccgcaacggtcagtcgttcgggtgcgactcgagccgaatgcatcgagcagatcgatatcggtggccccagccttgtgcgagcggctgcgaaaaaccatggcgatgtcgcgatcgctaccagtcccgagcaatacggcgacgttctcgatcaactggaaacgttgggcggaaccaccgacgagctacgcactcagctcgccgccgaagcattcgatcacaccgccggctacgaccgagccatcgccgattacatgcaaggcgatgcggtgggcggcgagttccccgcttcgatgcacgtgtcactacgacgcaaaacccagttgcgatacggcgaaaacccgcaccaacgagccgcgttgtattccgattcgtcggatcgatccgcgaacttggtgtcggctcgtcagatcagtggcaaagagttgtcttacaacaacctgctggacctcgatgccgctctcgacatcgctcgcggttttgccgaaccagcggtctctgtcatcaagcacaacaacccctgtggtgctgcaaccggtgacactctttccgaagcggtcgacaaagccatggctggtgacccgctgtcagcctttggttccgtcattggcatgaaccgaacgctcgatgaagcgacggccgaatttttgtgtcagcccggattgttcatcgaagccatcgtcgcacccgatttcgaagccggtgcggtcgggctgctgacaaccaaaccgcgttggaaagacaacgttcgcttgatgcaagttggtcgcttggacgaacccgctcgcaaagtgtcgcggcgattcatcagcggcggcatgttggtgcaagacgccgaccgcatggtcagctcacctttgcagtggaacaccgtcacggaaacacccgtcgatgatgacctgtgggacgacatttcctttggttgggaaatggttcgtcatgtgaagagcaacgcgatcgtgctggccaaagacacatcgttgatcggcgtgggtgccggccaaatgagccgcgtcgacagcgtcgagatctcgatcaagaaagccgcagagcgttccgaaggatcgattctcgcgtccgatgcgttcttcccctttcccgattcgatcgaagcagccgcgaaagcgggcgtgctggctatcattcaacccggcggttcgcgtcgcgatgacgaagtgattgccgcctgtgacgaacacgaaatcgcgatggtcttcaccggtcgtcgtcacttcaaacactga

SEQ ID NO: 56476 - protein, 523 aa, Rhodopirellula baltica
MSDVVPVRNALISVSDKMGLADFAAGLSAAGVTIYSTGGTRAHLEQSGIKVEDVAEYTGFPEMLDGRVKTLHPRIFAGILARRDLDDHMDTIADHDIEPFDLVVVNLYPFAATVSRSGATRAECIEQIDIGGPSLVRAAAKNHGDVAIATSPEQYGDVLDQLETLGGTTDELRTQLAAEAFDHTAGYDRAIADYMQGDAVGGEFPASMHVSLRRKTQLRYGENPHQRAALYSDSSDRSANLVSARQISGKELSYNNLLDLDAALDIARGFAEPAVSVIKHNNPCGAATGDTLSEAVDKAMAGDPLSAFGSVIGMNRTLDEATAEFLCQPGLFIEAIVAPDFEAGAVGLLTTKPRWKDNVRLMQVGRLDEPARKVSRRFISGGMLVQDADRMVSSPLQWNTVTETPVDDDLWDDISFGWEMVRHVKSNAIVLAKDTSLIGVGAGQMSRVDSVEISIKKAAERSEGSILASDAFFPFPDSIEAAAKAGVLAIIQPGGSRRDDEVIAACDEHEIAMVFTGRRHFKH

SEQ ID NO: 56477 - DNA, 1590 bp, Salmonella typhimurium
  CDS (1)..(1590): transl_table=11
atgcaacaacgtcgtccagtccgccgcgctctgctcagtgtttctgacaaggccggtatcatcgaattcgcccaggcactttccgcacgcggtgtggagctgctgtctacggggggcaccgcccgcctgttagcagaaaaaggcctgccggtgaccgaagtttccgattacaccggtttcccggaaatgatggatggacgcgtaaagaccctgcatccaaaagtccacggcggcatcctcggtcgtcgcggccaggacgatgccattatggaacagcaccacatcgcccctatcgatatggttgtcgttaacctgtatccgttcgccgagaccgtggcacgcgaaggctgctcgctggaagatgcggtagagaacattgatatcggcggcccgaccatggtgcgctctgctgctaagaaccataaagacgtggccatcgtggtgaagagcagcgactacgacgccattattaaagagatggatgctaacgaaggttctctgaccctcgacacccgtttcgatctcgcgattaaagccttcgaacacaccgccgcctacgacagcatgatcgctaactacttcggcagcatggttccggcctaccacggtgaaagcaaagaagccgccggtcgcttcccgcgtacgctgaatctgaacttcattaagaagcaggatatgcgctatggcgagaacagccaccagcaggcagccttctatatagaagaaaatgtgaaagaagcgtccgttgccaccgcacagcaggttcagggcaaagcgctttcttacaacaacatcgctgataccgacgcggcgctggagtgtgtgaaagagttcaacgagccagcctgcgtaatcgtcaagcacgctaacccgtgcggcgtggcggtgagcaccactattctcgacgcttacgaccgtgcgtataaaaccgacccaacctccgcgttcggcggcattatcgccttcaaccgcgaactggatgccgaaaccgcgcaggccattatctcccgccagttcgtggaagtgatcatcgccccgtccgcaaccgaagaggcgctgaaaatcaccgccgccaaacagaacgttcgcgttctgacctgcggtcagtgggcacagcgtgtgccgggtctggacttcaagcgtgttaacggcggcctgctggttcaggacagggatctgggtatggtgagcgaagctgaactgcgcgtggtctctaaacgccagccgaccgagcaggagctgcgcgatgcgctgttctgctggaaggtcgccaagttcgtgaaatccaacgccattgtgtatgcgaaagagaacatgactatcggtataggcgcaggccagatgagccgcgtgtactccgcgaaaatcgctggcattaaagcggctgacgaaggtctggaagtgaaaggttccgcgatggcctccgacgcgttcttcccgttccgtgacggtattgatgccgctgccgccgttggcgtgagctgtgtgatccagcctggcggttctatccgtgatgacgaagtgattgccgctgccgacgaacacggtattgcgatgatcttcactgacatgcgccacttccgccattaa

SEQ ID NO: 56478 - protein, 529 aa, Salmonella typhimurium
MQQRRPVRRALLSVSDKAGIIEFAQALSARGVELLSTGGTARLLAEKGLPVTEVSDYTGFPEMMDGRVKTLHPKVHGGILGRRGQDDAIMEQHHIAPIDMVVVNLYPFAETVAREGCSLEDAVENIDIGGPTMVRSAAKNHKDVAIVVKSSDYDAIIKEMDANEGSLTLDTRFDLAIKAFEHTAAYDSMIANYFGSMVPAYHGESKEAAGRFPRTLNLNFIKKQDMRYGENSHQQAAFYIEENVKEASVATAQQVQGKALSYNNIADTDAALECVKEFNEPACVIVKHANPCGVAVSTTILDAYDRAYKTDPTSAFGGIIAFNRELDAETAQAIISRQFVEVIIAPSATEEALKITAAKQNVRVLTCGQWAQRVPGLDFKRVNGGLLVQDRDLGMVSEAELRVVSKRQPTEQELRDALFCWKVAKFVKSNAIVYAKENMTIGIGAGQMSRVYSAKIAGIKAADEGLEVKGSAMASDAFFPFRDGIDAAAAVGVSCVIQPGGSIRDDEVIAAADEHGIAMIFTDMRHFRH

SEQ ID NO: 56479 - DNA, 1758 bp, Schizosaccharomyces pombe
  CDS (1)..(1758)
atgtatgctttgttaagtgtctacgataaaactggcttgttagaacttgccaaagcgttaacaagcaaaggcgttaagcttttgggcagtggtggtactgccaagatgatccgtgagagtggaatggaagtcgctgatgtatcttcgatcaccaatgctcctgagatcttgggtggtcgtgtaaagaccttgcatcctgctgtccatggaggcattcttgctcgtgatattccttccgatgaaaaggatctcgttgaacaaagcatcgagaagatcgatatcgtggtttgcaatctttatcccttccgtgaaactattgccaagcctaacgttaccattcctgaagctgttgaggaaattgatattggtggagttactttgttgcgtgccgctgcaaagaaccacgctcgtgtaaccattttgagcgatcccgctgattatgcgactttcactgataagtttttgtcagacaaacttactcaagatgacagaaatacttatgctttgaaggcctttgcttctactgcttcttacgatgctgccatcactgattacttccgcaagcaatatgctgctggcgttgatcaattgactctccgttatggtgctaatccccatcaatctcctgcccaagcctttatggaacaaggaccccttcctttcaaagttttatgtggttcccctggctacatcaatcttatggacgctttgaactcttggcctttggtcaaagagcttcgtgaaaacatcggtattcctgccgctgcttcctttaagcatgtttctcctgccggcgctgctgttggtctacccttgtctgatgttgaaaagaaggtatactttgttagcgacattaccgagttcactcctttggcttgtgcttatgctagagcccgtggagctgaccgtatgtcttcctttggtgactttattgctctctccgatacagttgatgtttgcactgctcgtattatctctcgtgaggtttccgatggtgttattgcacccggttacgagcccgaagccttggagttgttgaagaagaagaagggtggtaaatactgtgtattgcaaatggaccccaagtatgttcccgccgaaattgagactcgccaggtctacggtattagcttacaacagcatcgcaaccatgccaagattgacttcagcctttttgagaaagttgttagtaagaacaaggatttacccaaatctgctcttattgatttggttattgctaccactgctcttaagtatactcaaagtaactctgtttgctatgctaagaatggtatggttgttggacttggtgctggtcaacaatcccgcattcattgcaaccgtttggccggtgataaggctgataactggtggcttcgtcatcaccctaaagtcttgggtatgcaatttaagaagtctgctaagcgtcctgagaaatctaacgctattgacttgtacgtccttgatgccgttcctgctgaaggtagtgaacgtgagcaatgggagtctgcattcgagactattcccgagcctcttactaaaaaggagcgggaggaatttttggctacttgcaaggatgttgtctgtgccagtgatgccttcttccccttccctgacaacatctatcgtcttgcccaaagcggtgtcaaatatgttgctgcacctggcggtagtgtcatggatcaagctgttcgcgacactgctaatgagttcaacatggtcttttccgagatccccttgcgtttgttccaccattaa

SEQ ID NO: 56480 - protein, 585 aa, Schizosaccharomyces pombe
MYALLSVYDKTGLLELAKALTSKGVKLLGSGGTAKMIRESGMEVADVSSITNAPEILGGRVKTLHPAVHGGILARDIPSDEKDLVEQSIEKIDIVVCNLYPFRETIAKPNVTIPEAVEEIDIGGVTLLRAAAKNHARVTILSDPADYATFTDKFLSDKLTQDDRNTYALKAFASTASYDAAITDYFRKQYAAGVDQLTLRYGANPHQSPAQAFMEQGPLPFKVLCGSPGYINLMDALNSWPLVKELRENIGIPAAASFKHVSPAGAAVGLPLSDVEKKVYFVSDITEFTPLACAYARARGADRMSSFGDFIALSDTVDVCTARIISREVSDGVIAPGYEPEALELLKKKKGGKYCVLQMDPKYVPAEIETRQVYGISLQQHRNHAKIDFSLFEKVVSKNKDLPKSALIDLVIATTALKYTQSNSVCYAKNGMVVGLGAGQQSRIHCNRLAGDKADNWWLRHHPKVLGMQFKKSAKRPEKSNAIDLYVLDAVPAEGSEREQWESAFETIPEPLTKKEREEFLATCKDVVCASDAFFPFPDNIYRLAQSGVKYVAAPGGSVMDQAVRDTANEFNMVFSEIPLRLFHH

SEQ ID NO: 56481 - DNA, 1632 bp, Shewanella oneidensis
  CDS (1)..(1632): transl_table=11
atgactgttgcaaatcatgccagacccattcgtcgcgcgctgttaagcgtttcagataaaaccggaattctcgagttcgccaaagcattacacgcccaaggcgttgaactgctatcaactggcggcaccgctcgcctgttagcggataacggtgtacctgttatcgaagtatctgactatacaggacaccctgagatcatggatggtcgcgttaaaactctgcatcctaaagtgcatggtggtattctggctcgtcgtggtcttgatgaaaatgtcatggctgccaacaatatcaatgcaattgatctggttgcagttaacctctacccctttgccgatactgtcgcaaaagccggttgcaccttagaagatgcaattgaaaacatcgatatcggtggtccaacaatggttcgcgctgcggcgaaaaaccataaagatgtgactatcgtggtgaatgctgctgattacaatcgcgtcttagctgaaatggccgtcaacaatggcagtacaactcatgcaacccgttttgatttagcgattgccgccttcgaacacactgccggttacgatggtatgatcgccaactacttcggcactatggttccaatgcatagggttccagcgcatagcactgatgaatgcttccaagattccctatccgttgaaggctcaaagttcccacgcaccttcaacacccaattagtgaagaagcaagatctgcgttacggtgaaaacagccatcaagcggcggctttctatgtcgacactaagatcgatgaagcttcagtagccactgccgttcagctgcaaggtaaggcattgtcttacaacaatatcgccgataccgatgccgcccttgagtgcgttaaagagttcagtgagccagcttgcgttatcgttaaacacgctaacccatgtggcgtagcactgggtaaagacttactcgatgcctacaaccgcgcctatcaaactgacccaacctcagcctttggcggcattatcgccttcaacggcgaattagatgcggccaccgccagcgctatcgttgagcgtcaattcgttgaagtgatcatcgcgccagttgtgagccaaggtgcccgcgatgtggtggctaagaaaactaacgtgcgtctattagagtgtggccagtggaatactaagacccaaaccttagactacaagcgcgtaaacggtggtctgctggtgcaagatcgcgaccaaggcatggttggtttagacgacattaaagtggtgactaagcgtcaacccacagaaagcgaactcaaagatttaatgttctgctggaaagtggctaaattcgttaaatctaacgccattgtttacgctaaagacggcatgacaatcggtgtcggcgctggccaaatgagccgtgtctacagcgccaagatcgccggtatcaaggctgccgatgaaggtttagaagtggtgaactctgtgatggcctccgatgcgtttttccccttccgcgatggtattgatgccgcagcggcagcaggcatcagctgcatcatccagccaggtggctcaatgcgcgatgcggaaatcatcgcagcggccgacgagcacggcatggccatggtgatgactggcatgcgccacttccgtcactga

SEQ ID NO: 56482 - protein, 543 aa, Shewanella oneidensis
MTVANHARPIRRALLSVSDKTGILEFAKALHAQGVELLSTGGTARLLADNGVPVIEVSDYTGHPEIMDGRVKTLHPKVHGGILARRGLDENVMAANNINAIDLVAVNLYPFADTVAKAGCTLEDAIENIDIGGPTMVRAAAKNHKDVTIVVNAADYNRVLAEMAVNNGSTTHATRFDLAIAAFEHTAGYDGMIANYFGTMVPMHRVPAHSTDECFQDSLSVEGSKFPRTFNTQLVKKQDLRYGENSHQAAAFYVDTKIDEASVATAVQLQGKALSYNNIADTDAALECVKEFSEPACVIVKHANPCGVALGKDLLDAYNRAYQTDPTSAFGGIIAFNGELDAATASAIVERQFVEVIIAPVVSQGARDVVAKKTNVRLLECGQWNTKTQTLDYKRVNGGLLVQDRDQGMVGLDDIKVVTKRQPTESELKDLMFCWKVAKFVKSNAIVYAKDGMTIGVGAGQMSRVYSAKIAGIKAADEGLEVVNSVMASDAFFPFRDGIDAAAAAGISCIIQPGGSMRDAEIIAAADEHGMAMVMTGMRHFRH

SEQ ID NO: 56483 - DNA, 1482 bp, Staphylococcus aureus
  CDS (4)..(1482): transl_table=11
gtgatgaagaaagctattttgagcgtatcaaataaaacaggtattgtagagtttgctaaagcgttaacgcaattaaattatgaattatattcaactggtggtactaaacgtatattagatgaagcaaatgtaccagttcgttctgtttcagacttaacacattttccagaaataatggatggccgtgttaaaacattacatccggctgttcatggtggcattttagctgatcgaaataaaccgcagcatttaaatgaattatcagaacaacatatagatttaattgatatggtagtagttaatttatatccattccaacaaactgttgcaaaccctgatgtgacgatggacgaagcaattgaaaatattgatattggtggtccaacaatgttacgtgctgcagctaaaaactataaacatgtaacaacaattgtacatccggcagattatcatgaagtattgacgcgattaagaaacgattcgttagatgagtcatatagacaatcattaatgattaaagtttttgagcatactgcagaatatgatgaagcgattgtacgtttctttaaaggggataaagaaactttaagatatggagaaaatccacaacaatcagcgtattttgtgagaacttcgaatgctaagcacacgattgcaggtgctaaacaattacatgggaaacaattaagctataacaatattaaagatgcagatgctacactagctttagttaaaaagtttgatacacctgctgcagttgcggttaaacacatgaatccatgtggtgttggtatcggtgacacgattgaacaagcatttcaacatgcgtatgaagcggatagtcaatcaatatttggtggaattgttgcattaaaccgagctgtaacacctgagttagcagagcaattgcatagtatctttttggaagtcattattgcaccaaaatttacagatgaagcattagatattttaaaacaaaagaagaatgtaagattattagaaattgatatgactatagacagtaacgaagaagagtttgtttcagtatctggcggatatttagttcaagataaagacaattatgtcgtgccaaaagaagaaatgaaagttgttacagaagtagcacctactgatgaacaatgggaagcaatgttattaggatggaaagttgtaccatcagtaaaaagtaatgcaattattttaagtaataataaacaaactgtaggtataggtgctggacaaatgaatcgtgtcggtgctgctaaaattgcgttagagagagctattgaaatcaatgatcatgtagcgttagtatctgatggatttttccctatgggagatacagttgaacttgcagcacaacatggtataaaggcaattatccaaccgggtggttcgattaaagatcaagattcaattgatatggctaataaacatggtattgcaatggtagtcacaggcactcgacattttaaacactaa

SEQ ID NO: 56484 - protein, 492 aa, Staphylococcus aureus
MKKAILSVSNKTGIVEFAKALTQLNYELYSTGGTKRILDEANVPVRSVSDLTHFPEIMDGRVKTLHPAVHGGILADRNKPQHLNELSEQHIDLIDMVVVNLYPFQQTVANPDVTMDEAIENIDIGGPTMLRAAAKNYKHVTTIVHPADYHEVLTRLRNDSLDESYRQSLMIKVFEHTAEYDEAIVRFFKGDKETLRYGENPQQSAYFVRTSNAKHTIAGAKQLHGKQLSYNNIKDADATLALVKKFDTPAAVAVKHMNPCGVGIGDTIEQAFQHAYEADSQSIFGGIVALNRAVTPELAEQLHSIFLEVIIAPKFTDEALDILKQKKNVRLLEIDMTIDSNEEEFVSVSGGYLVQDKDNYVVPKEEMKVVTEVAPTDEQWEAMLLGWKVVPSVKSNAIILSNNKQTVGIGAGQMNRVGAAKIALERAIEINDHVALVSDGFFPMGDTVELAAQHGIKAIIQPGGSIKDQDSIDMANKHGIAMVVTGTRHFKH

SEQ ID NO: 56485 - DNA, 1572 bp, Streptomyces coelicolor
  CDS (1)..(1572): transl_table=11
gtgaccgccaccgccggaagcaacaagcgggccatccgtcgcgcactcgtcagcgtctacgacaagaccgggctcgaggacctcgcccgcgggctgcacgaggccggcgtcgaactcgtctccaccgggtccaccgccgggcggatcgccgcggccggcgtccccgtcaccaaggtcgaggagctgaccgggttccccgagtgcctggacggccgcgtcaagaccctgcaccccaaggtccacgcgggcatcctcgccgacctgcgcctggagagccaccggcagcagctcgacgagctgggcgtggccccgttcgacctggtcgtggtgaacctctacccgttccgcgagaccgtcgcctcgggcgccaccccggacgagtgcgtcgagcagatcgacatcggcggcccctccatggtgcgcgccgccgccaagaaccacccctccgtcgcggtcgtcaccagccccgcccggtacgccgacgtgctcttggcggtcgagggcggcggcttcgacctggccgcccgcaagcgcctggccgccgaggccttccagcacaccgccgcctacgacgtggccgtcgcctcctggttcgccgccgagtacgccccggtcgacgagtccggcttcccggacttcctcggcgccacctacgagcgcgccaacaccctgcgctacggcgagaacccgcaccagccggccgcgctctacacctcccccgaggggggtggcctcgcacaggccgagcagctgcacggcaaggagatgtcgtacaacaactacacggacacggacgccgcccgccgtgccgcgtacgaccacgccgagccctgcgtcgcgatcatcaagcacgccaacccgtgcggcatcgcgatcggcgcggacgtcgccgaggcgcaccgcaaggcgcacgactgcgacccggtctccgcgtacggcggtgtgatcgcggtcaaccgcccggtctccaaggagatggccgagcgggtcgccgggatcttcaccgaggtcatcgtcgcgccggactacgaggacggcgcgctcgaagccctcaccaagaagaagaacatccgcgtcctgcgcgccccggctgcccccgccgccccggtcgaggtcaagccgatcgacggcggtgccctcctccaggtcaccgaccgcctccaggccgagggcgacgaccccgccacctggaccctcgcgaccggcgaggcgctgtccgaggcggagctggccgagctggccttcgcctggagggcctgccgggccgtcaagtccaacgccatcctcctcgccaaggacggcgcctccgtcggcgtcggcatgggccaggtcaaccgcgtcgactccgcgaagctcgcggtggagcgcgccggcgccgagcgggcgcagggcgcctacgcggcctccgacgccttcttccccttcccggacggcctggagatcctcaccggggccggtgtgaaggccgtggtccagcccggcggctcggtccgcgacgagctggtcgtcgaggcggcgaagaaggccggcgtcacgatgtacttcacggggacgcggcacttcttccactga

SEQ ID NO: 56486 - protein, 523 aa, Streptomyces coelicolor
MTATAGSNKRAIRRALVSVYDKTGLEDLARGLHEAGVELVSTGSTAGRIAAAGVPVTKVEELTGFPECLDGRVKTLHPKVHAGILADLRLESHRQQLDELGVAPFDLVVVNLYPFRETVASGATPDECVEQIDIGGPSMVRAAAKNHPSVAVVTSPARYADVLLAVEGGGFDLAARKRLAAEAFQHTAAYDVAVASWFAAEYAPVDESGFPDFLGATYERANTLRYGENPHQPAALYTSPEGGGLAQAEQLHGKEMSYNNYTDTDAARRAAYDHAEPCVAIIKHANPCGIAIGADVAEAHRKAHDCDPVSAYGGVIAVNRPVSKEMAERVAGIFTEVIVAPDYEDGALEALTKKKNIRVLRAPAAPAAPVEVKPIDGGALLQVTDRLQAEGDDPATWTLATGEALSEAELAELAFAWRACRAVKSNAILLAKDGASVGVGMGQVNRVDSAKLAVERAGAERAQGAYAASDAFFPFPDGLEILTGAGVKAVVQPGGSVRDELVVEAAKKAGVTMYFTGTRHFFH

SEQ ID NO: 56487 - DNA, 1548 bp, Streptococcus suis
  CDS (1)..(1548): transl_table=11
atgacaaaacgtgcgttaattagcgtatcagataaaaatggtattgtagaatttgcccaagaattgaccaagtttggttgggaaattatctcgaccggtggtaccaaggttgccttggatcaggctggtgtaactaccatcgccattgacgatgtgactggttttcctgagatgatggacggccgtgttaagacgcttcatccgaaaatacacggtggtttgttagcacgtcgggatttggacagccacctgcaagcagctaacgaccatgaaataggcttgattgacttggtagtggttaacctttaccccttcaaagagactattttacgtccagatgtgacctatgatttggcggtggagaacatcgacatcggcggaccgtccatgcttcgttctgcagccaaaaaccacgccagcgtgaccgttgtggtggatccggcagattatccgacggttttaggggaaattgcagagcagggggaaacgagctatgcaacacgtcagcgattggctgcaaaggtattccgtcataccgcagcttatgatgccctaatagcagattattttaccaagcaagtaggcgaagataagcctgaaaaattaaccattacttatgacctcaatcagcctatgcgttacggtgaaaatccccagcaaaatgcggatttctaccaaaacgcccttccgacagcctattctattgcagctgctaagcagttaaatggtaaggagttgtctttcaacaacattcgtgatgcggatgcggccattcggattatccgtgattttaaggaccgtccaactgttgtggctctcaaacacatgaacccttgtggtatcgggcaggcagaaaccattgaacaggcttgggattatgcttatgaggctgacccagtatcgattttcggaggcatcgtcgtgctgaacagggaagtggatgctgcgacggctgaaaagatgcacccgattttcttagaaatcatcatcgcaccgggctactcggcagaagcgctagctattttgaccaataaaaagaaaaatcttcggattttggagttggcctttgacgcacaggatgcaagcgaagtggaaaaagagttcacaggcgttgtcggcggactcttggtgcaggatcaggacgtggtggtggaaagcccagtggactggcaggtggtgaccgagcgtcaaccgtccgagcaagagtgggcagccatggagttcgcttggaagtcctctaaatatgtcaagtccaacggcatcatcatcaccaatgacaagatgactttgggcgtggggccggggcaaaccaaccgtgtagcgtccgtccgtatcgctatcgagcaagccaaggaccgtttggagggagccgttttggcgtcggacgccttcttcccatttgctgataacgtggaagaaattgcagctgcaggtatcaaggctatcatccagccaggtggttctgtccgtgaccaagactccattgacatggccaacaagtacggcttgaccatggtctttacaggagtcagacattttagacattga

SEQ ID NO: 56488 - protein, 515 aa, Streptococcus suis
MTKRALISVSDKNGIVEFAQELTKFGWEIISTGGTKVALDQAGVTTIAIDDVTGFPEMMDGRVKTLHPKIHGGLLARRDLDSHLQAANDHEIGLIDLVVVNLYPFKETILRPDVTYDLAVENIDIGGPSMLRSAAKNHASVTVVVDPADYPTVLGEIAEQGETSYATRQRLAAKVFRHTAAYDALIADYFTKQVGEDKPEKLTITYDLNQPMRYGENPQQNADFYQNALPTAYSIAAAKQLNGKELSFNNIRDADAAIRIIRDFKDRPTVVALKHMNPCGIGQAETIEQAWDYAYEADPVSIFGGIVVLNREVDAATAEKMHPIFLEIIIAPGYSAEALAILTNKKKNLRILELAFDAQDASEVEKEFTGVVGGLLVQDQDVVVESPVDWQVVTERQPSEQEWAAMEFAWKSSKYVKSNGIIITNDKMTLGVGPGQTNRVASVRIAIEQAKDRLEGAVLASDAFFPFADNVEEIAAAGIKAIIQPGGSVRDQDSIDMANKYGLTMVFTGVRHFRH

SEQ ID NO: 56489 - DNA, 1557 bp, Synechococcus elongatus
  CDS (1)..(1557): transl_table=11
atggggcgaatggccttgctcagcaccagtaataagcagggactggtggagttggctagggccttggtgcaggagtttggctttacgctcctgagtagtggtggcaccgcaaaggccttgcagaccgcggggattcctgtgacaacagtctctgagtacacaggggcaccagaaattctgggtgggcgggtcaagaccctgcacccgaaaatccatggcggcattttggcacggcgcgatcgcccccaagacgaggccgatctgcaagcccaagccattcatcccattgatttagtggttgttaacctctacccctttgccgaaacaattgcccaacccaacgtcacccttgccgaggcgatcgagcaaattgatattggcgggccgactttgattcgcgctgctgcgaaaaaccatgcccatgtaacagtgctggtagatccgagtcagtacgaaacttaccttcaggaattacgattatacggggacgcccaacctgccttccgcctagcctgtgcccaacaagcgtttgcactgacagcccattacgatcaggcgatcgctgagtatctccaaaaagtaacggccgcgggtactgaaccagaaattctcccccccgtttttcacctcacgggacggcaaaaacaagtcctgcgctatggcgaaaacccccatcaacgggcttcttggtacgtctgtggggcacaccccaggggttgggcagccgcccacctgctccagggcaaagaactcagttacaataacctgctggatttagaagccgcacggggagtgattagtgaattcctaggggacagcccccccgctgccgtcattattaaacacaccaatccctgtggcgttgccgagggcaaaacccttgtggaagcctacgaacgtgcctttgcagccgatagggtctctgcctttggcggcattgttgccctcaatcgccccttggatggggccactgctgaagccttgacccgtacctttttagagtgtgtggtggctcccgcctgtgaggaagcggcgctgccgatcctgaaaaccaagcccaagatgcgggttctcaccttacctgagttgcatagggcgccaaccacggcgattcaaaccattgccggcggcttccttgtccaagagattcaccccctccccattgatccagaggcatggcaggtggtcaccgccactgaacccagtccagagttgatggcggaactgatctttgcctggaaagtcgtgaagcacgtcaagtccaatgccattgttgtcagtcgcgatcgccaaacccaagggattggggcgggtcaaatgaatcgggtcggtgctgtggaaattgccctcagtgctgcgggggaggcggcgcgggggggagtgctggccagtgatggctttttcccttttgccgattctgtggaagcggctgcccttgccggcattgctgccattattcaaccggggggcagtttgcgcgatagtgaatctatccaggcggccaatgcagcgggaattgccatggtctttaccaaccagcgacacttccgccactag

SEQ ID NO: 56490 - protein, 518 aa, Synechococcus elongatus
MGRMALLSTSNKQGLVELARALVQEFGFTLLSSGGTAKALQTAGIPVTTVSEYTGAPEILGGRVKTLHPKIHGGILARRDRPQDEADLQAQAIHPIDLVVVNLYPFAETIAQPNVTLAEAIEQIDIGGPTLIRAAAKNHAHVTVLVDPSQYETYLQELRLYGDAQPAFRLACAQQAFALTAHYDQAIAEYLQKVTAAGTEPEILPPVFHLTGRQKQVLRYGENPHQRASWYVCGAHPRGWAAAHLLQGKELSYNNLLDLEAARGVISEFLGDSPPAAVIIKHTNPCGVAEGKTLVEAYERAFAADRVSAFGGIVALNRPLDGATAEALTRTFLECVVAPACEEAALPILKTKPKMRVLTLPELHRAPTTAIQTIAGGFLVQEIHPLPIDPEAWQVVTATEPSPELMAELIFAWKVVKHVKSNAIVVSRDRQTQGIGAGQMNRVGAVEIALSAAGEAARGGVLASDGFFPFADSVEAAALAGIAAIIQPGGSLRDSESIQAANAAGIAMVFTNQRHFRH

SEQ ID NO: 56491 - DNA, 1527 bp, Thermoanaerobacter tengcongensis
  CDS (1)..(1527): transl_table=11
atgtcaaggagagcgttgataagtgtttcaaaaaaagatggaatagtggaatttgcgaaaaagcttgaagacctgggttatgagataatatctactggcggcacttacaatctccttaaagaaagcggtgtaaaggtgataaaggtctctgaggttacgggttttccagagattatgggaggaagagtaaagactttacaccccaaaattcacggtggaattcttgctgtgagagacaagaaagagcatttaaaagaccttaatgatcatggcattgttcctatagacttggtagccataaatttatacccctttaaagagactatttccagggaaaaggttgctcttgaggaggcaattgaaaatattgacattggcgggcctgccatgataagagcggcggcaaagaactataaatatgtaactgtccttgtggatcctgtagactatgaaaaagtgattgaggaaataaagctttatggggatacaaaagaagagacgaggttttatctggcagcgaaggcttttggtcatacggctttttacgattcgctcatatatgagtattttagagagaagactaatatggaatttcctaaagtcatcacttttgcctatgaaaaagtgcaggatttgagatatggggaaaatccgcaccaaaaagcggccttttacaaaaacccggtcaaatcttacggaattgcagaatgcctgcagttacacggaaaagagctttcttttaacaacataaatgatgcaaatgctgcaatagaacttgtgagggaatttagtgaacctgtggcggtcgctataaaacacaccaatccctgtggcgtagctgttgggaatagcatatatgaggcttacttaaaggcctatgaagctgaccccgtttcaatttttggcggaattgttgcctttaacggaaaagttgatgtagatactgcgaaagagcttgtgaaaatatttctagagattgtaatagctccagattttgaagaggaagctttagagatattaatgtctaagaagaacttgagagtgctcaaattgaaggaaggctattacagagaatttgacctcaaaaaagtagaaggaggagtgttagtccagcaaaaggatgaaatagatttagatgaaagtagtatcaaagtcgtaactaaaagggcgccgacaggaaaagaaatgaaggatttgaagttcgcctggaaagtagtaaagcacgtcaagtcaaatgctatagttttagcaaaggatggggttactgtaggcattggagttgggcaggtcaacaggatttggcctactgagcaggcgataaaacaggcaggagagagggcgaaaggaagtgtcttagcatcagatgctttcttccccttccctgatgtagttgaagcggccgcaagaggaggaattactgcaataattcagcctggcggttcccagaatgaccagctttcaattgaggcagctgacagagcaggtattgcgatgatttttactggaataaggcattttaagcattga

SEQ ID NO: 56492 - protein, 508 aa, Thermoanaerobacter tengcongensis
MSRRALISVSKKDGIVEFAKKLEDLGYEIISTGGTYNLLKESGVKVIKVSEVTGFPEIMGGRVKTLHPKIHGGILAVRDKKEHLKDLNDHGIVPIDLVAINLYPFKETISREKVALEEAIENIDIGGPAMIRAAAKNYKYVTVLVDPVDYEKVIEEIKLYGDTKEETRFYLAAKAFGHTAFYDSLIYEYFREKTNMEFPKVITFAYEKVQDLRYGENPHQKAAFYKNPVKSYGIAECLQLHGKELSFNNINDANAAIELVREFSEPVAVAIKHTNPCGVAVGNSIYEAYLKAYEADPVSIFGGIVAFNGKVDVDTAKELVKIFLEIVIAPDFEEEALEILMSKKNLRVLKLKEGYYREFDLKKVEGGVLVQQKDEIDLDESSIKVVTKRAPTGKEMKDLKFAWKVVKHVKSNAIVLAKDGVTVGIGVGQVNRIWPTEQAIKQAGERAKGSVLASDAFFPFPDVVEAAARGGITAIIQPGGSQNDQLSIEAADRAGIAMIFTGIRHFKH

SEQ ID NO: 56493 - DNA, 1593 bp, Vibrio cholerae
  CDS (1)..(1593): transl_table=11
atgaacaacgctcgtcctattcaccgtgcgcttctcagcgtatcagataaaaccggcattgttgagttcgcaaaagcgcttgcagagcgcggcgttgaacttctctccaccggtggcaccgctcgtctattggctgagcaaggcctgacggtaacggaagtctccgattacaccggtttcccagaaatgatggacggacgcgtcaaaaccctgcatccgaaagtgcatggcggtattttaggccgtcgcggccaagatgacgcggtgatgaatacccacggcattcagccaatcgatatggtggtggtgaacctctatcctttcgcccaaacggtagctaacccaaattgcacgctggctgatgcggtggaaaacatcgatatcggcgggccgactatggtgcgttctgctgcaaaaaaccataaagatgtggccattgtggtgaatgcgcacgattacgaccgtgtgatccgcgaaatggatgccaaccacaactccctgacgttagcgacgcgttttgatctggcgattgccgcttttgaacataccgcggcgtacgatggcatgattgcgaactacttcggcacactcgtaccttcttatggtgataacaaagaaggggatgaagagagcaaattccctcgcacgttcaatgcgcagttcatcaaaaagcaagatatgcgttatggcgaaaacagccaccaagcggccgcgttttatgtagaagccaatccacaagaagcctcagtcgccaccgcgcgccaaattcaaggtaaagccctttcttacaacaacattgccgataccgatgccgcactagagtgcgtcaaagagttcagcgagccagcctgtgtgattgtgaaacacgcgaacccatgtggtgtagcgctgggcgatgatcttctgcaagcttacaatcgcgcttaccaaaccgacccaacctcggcatttggcggcatcattgcctttaaccgcgagctggatggcgaaaccgcaagagcgatcatcgagcgtcagtttgtggaagtgatcattgcgccgaaagtctcgcaagccgcgatcgacatcgtcgcagcaaaacaaaacgtacgtttgctggagtgtggtgaatggcaaggccaaaccacaggatttgatttgaagcgcgtgaatggtggcttattggtgcaagatcgtgaccaaggcatggtggcacaagatgacctacaagtggtttcgactcgtcaacctagcgacgctgagctgaaagatgctctgttctgctggaaagtagcgaaatacgtgaaatccaacgcgattgtgtacgccaaaggcgacatgaccatcggcatcggcgcgggtcaaatgagccgtgtttactccgcgaagatcgccggcatcaaagccgccgatgaaggcttggaagtcgcgggcagcgtgatggcatcggatgccttcttccccttccgtgatgggattgatgctgcggccgaagcgggcattacctgtgttatccaaccgggtggctcaatgcgcgaccaagaggtgattgatgccgccaacgaacacggtatggcgatgatcttcaccggtatgcgtcacttccgtcattaa

SEQ ID NO: 56494 - protein, 530 aa, Vibrio cholerae
MNNARPIHRALLSVSDKTGIVEFAKALAERGVELLSTGGTARLLAEQGLTVTEVSDYTGFPEMMDGRVKTLHPKVHGGILGRRGQDDAVMNTHGIQPIDMVVVNLYPFAQTVANPNCTLADAVENIDIGGPTMVRSAAKNHKDVAIVVNAHDYDRVIREMDANHNSLTLATRFDLAIAAFEHTAAYDGMIANYFGTLVPSYGDNKEGDEESKFPRTFNAQFIKKQDMRYGENSHQAAAFYVEANPQEASVATARQIQGKALSYNNIADTDAALECVKEFSEPACVIVKHANPCGVALGDDLLQAYNRAYQTDPTSAFGGIIAFNRELDGETARAIIERQFVEVIIAPKVSQAAIDIVAAKQNVRLLECGEWQGQTTGFDLKRVNGGLLVQDRDQGMVAQDDLQVVSTRQPSDAELKDALFCWKVAKYVKSNAIVYAKGDMTIGIGAGQMSRVYSAKIAGIKAADEGLEVAGSVMASDAFFPFRDGIDAAAEAGITCVIQPGGSMRDQEVIDAANEHGMAMIFTGMRHFRH

SEQ ID NO: 56495 - DNA, 1584 bp, Xanthomonas campestris pv
  CDS (1)..(1584): transl_table=11
atggcctctgatttcctgcccgtgcgccgggccctgctctccgtttccgacaaaaccggcctgattgacctggcccgcgcgctggtggcgcgcaatgtcgagctgctgtccaccggcggcaccgccaaggcaatccgcgatgcgggcctgccggtgaaggacgtagccgagttgaccggtttcccggaaatgatggacggccgcgtcaagaccctgcacccgctggtgcacggcggcctgctcggccgcgccggtgtcgacgaagcagtaatggccgaacacggcatcgcgccgatcgacctgctggtgctcaacctgtatccgttcgagtcggtcactgccaaggccgactgcacgctggccgatgcggtggaaaacatcgacatcggcggcccggcgatgctgcgcagcgcggcgaagaatttcgcgcgcgtggcggtggccaccgacccggcgcaatacgccgacctgctggccgagctggaggccaacaacggccagctctcggcggcccagcgctttgcgctgtcggtggccgcgttcaaccgcgtggcgcagtacgacgcggcgatcagcaactatctctcggccgtggccgacagtgcggagagcgtgcccacgcgtagcccgttcccggcgcagatcaattccaacttcatcaaggtgatggacctgcgttacggcgagaacccgcaccagtccggcgcgttctaccgcgacctgtatccggtgccgggcacgctggcgaccttccagcagctgcagggcaaggaactgagctacaacaacctggccgatgccgatgcggcgtgggaatgcgtgcgccagttcgatgcgccggcttgcgtgatcgtcaagcacgccaacccgtgcggcgtggcggtgggcgtggcctgcggcgatgcctatgagctggcctatgccaccgaccccaccagcgcgttcggcggcatcctggcgttcaaccgcacgctggatgcggccaccgccaaggccatcctggaccgccagttcgtcgaagtgctgatcgccccggactacgagcccggcgcgctcgactacgcgaccaagaaggccaacgtgcgcgtgctcaagatcccgcacggcgcgggcctcaacaactacgacaccaagcggatcggctctggcctgctgatgcagtcggccgacaaccgcggcatgtccctgggcgagctgagcgtggtgaccaagcgtgcacccagcgatgccgaactggccgatctgctgtttgcctggcgcgtggccaagtacgtcaaatccaacgcgatcgtgtatgccaaggacagccgcaccattggtgtgggcgccgggcagatgagccgcgtggtcagcgccaagatcgccgcgctcaaggccgaagaagccaagcttacggtggccggctcggtgatggcatcggatgcattcttcccgttccgcgacggtatcgatgccgcagcggcggccggcatccaggcggtgatccagccgggcggctcgatgcgcgatggcgaagtgatcgccgccgccgacgaacacggtctggcgatggtgttcaccggcgtgcgccacttccggcattga

SEQ ID NO: 56496 - protein, 527 aa, Xanthomonas campestris pv
MASDFLPVRRALLSVSDKTGLIDLARALVARNVELLSTGGTAKAIRDAGLPVKDVAELTGFPEMMDGRVKTLHPLVHGGLLGRAGVDEAVMAEHGIAPIDLLVLNLYPFESVTAKADCTLADAVENIDIGGPAMLRSAAKNFARVAVATDPAQYADLLAELEANNGQLSAAQRFALSVAAFNRVAQYDAAISNYLSAVADSAESVPTRSPFPAQINSNFIKVMDLRYGENPHQSGAFYRDLYPVPGTLATFQQLQGKELSYNNLADADAAWECVRQFDAPACVIVKHANPCGVAVGVACGDAYELAYATDPTSAFGGILAFNRTLDAATAKAILDRQFVEVLIAPDYEPGALDYATKKANVRVLKIPHGAGLNNYDTKRIGSGLLMQSADNRGMSLGELSVVTKRAPSDAELADLLFAWRVAKYVKSNAIVYAKDSRTIGVGAGQMSRVVSAKIAALKAEEAKLTVAGSVMASDAFFPFRDGIDAAAAAGIQAVIQPGGSMRDGEVIAAADEHGLAMVFTGVRHFRH

SEQ ID NO: 56497 - DNA, 1806 bp, Oryza sativa
  CDS (1)..(1806)
atgccactcaacctcgcctcctctcccgccgccgccgccgccgccaaggtctgcgccggcgtgcgcgcgtccccgcgccacctcctcccccgcgctcttgaccaccagagccgccgcgtcctcagcttgtcgtcctcgtcgtcggcggggcgtgcggcgggtgtgcgggccatggccgcggcggaggccggtgcgtcgacggcgacacaggctaagtcgagcgcaggagtcaaacaagcactgatatcattgtcggataaaacagacttggcctatcttgggaatggccttcaagccttggggttttctattatttcgactggtggcacagcatcaagcctggaagcagctggagttaatgttacaaaagttgaacaaattacaaattttcctgaaatgcttgatggtagagttaaaacattgcaccccagtgtacatggtggtattcttgcaagaagagaccaggagcatcatcttaaggcattgaatgagcatggcattgggacatttgatgtggttgtggtgaacttgtatccattctataacaaggtcacctctggtgtaatttctttcgaggatggcattgaaaacattgatatcggtggacctacgatgatccgagcagcagctaagaatcataaggatgttcttgttatggtggatcatgaagattaccctgctctattagagtatctgcaaggaaaacaagatgaccagcaattccgcaagatgctagcatggaaagctttccaacatgtcgcttcttatgattcagctgtctcagaatggttgtggaagcaatcgaacaaaggagatgtattccccccgaacttcaccgtgcccctgtccctgaaatctacacttcgttatggtgaaaatcctcatcaaaaagctgccttctatggggacaagagtctttctgtagttaatgctggtggtattgcaacagcaattcagcaccatgggaaggaaatgtcttacaacaactacttagatgcggatgctgcatggaactgtgtatcagagtttgagagtcctacgtgtgttgtggttaagcacacaaatccatgtggagtagcatcccgacaggatattcttgaagcatacaggttggctgtaaagggagatcctgttagtgcatttggtgggatagttgctttcaatacgacaattgatgaggatcttgcaaaagaaatccgtgaattcaggagccctacagatggacagacgcgaatgttctacgagattgttgttgcacccggctatacagaaaagggtcttgagatcctcaaagggaaatcaaagacattgaggatactggaggcgaagagaagtggaaaagggatgctatcactcaggcaagtcagtggtggctggttggctcaagagtctgatgatctaacccctgaagatatcaccttcacaacagtgtccgagagagctcctcaagacagtgagctctctgatgccaaatttgcctggctttgtgtaaagcacgtaaagagtaacgccattgtgatagccaagaataactgcatgttaggcatgggaagtggccagccaaacagactggagagtctgagaattgctttcaggaaagcaggagaggaggccaaaggagctgctttggccagtgatgcattcttcccattcgcttggaacgacgccgtggaggaggcgtgccagaacggcatcggcgtgatcgcggagccgagcggcagcatgagggacggcgacgccgtcgactgctgcaacaagtacggcgtctccctcctcttcaccggcgtcaggcacttcaggcactga

SEQ ID NO: 56498 - protein, 601 aa, Oryza sativa
MPLNLASSPAAAAAAKVCAGVRASPRHLLPRALDHQSRRVLSLSSSSSAGRAAGVRAMAAAEAGASTATQAKSSAGVKQALISLSDKTDLAYLGNGLQALGFSIISTGGTASSLEAAGVNVTKVEQITNFPEMLDGRVKTLHPSVHGGILARRDQEHHLKALNEHGIGTFDVVVVNLYPFYNKVTSGVISFEDGIENIDIGGPTMIRAAAKNHKDVLVMVDHEDYPALLEYLQGKQDDQQFRKMLAWKAFQHVASYDSAVSEWLWKQSNKGDVFPPNFTVPLSLKSTLRYGENPHQKAAFYGDKSLSVVNAGGIATAIQHHGKEMSYNNYLDADAAWNCVSEFESPTCVVVKHTNPCGVASRQDILEAYRLAVKGDPVSAFGGIVAFNTTIDEDLAKEIREFRSPTDGQTRMFYEIVVAPGYTEKGLEILKGKSKTLRILEAKRSGKGMLSLRQVSGGWLAQESDDLTPEDITFTTVSERAPQDSELSDAKFAWLCVKHVKSNAIVIAKNNCMLGMGSGQPNRLESLRIAFRKAGEEAKGAALASDAFFPFAWNDAVEEACQNGIGVIAEPSGSMRDGDAVDCCNKYGVSLLFTGVRHFRH

SEQ ID NO: 56499 - DNA, 1803 bp, Oryza sativa
  CDS (1)..(1803)
atgccactcaacctcgcctcctctcccgccgccgccgccgccgccaaggtctgcgccggcgtgcgcgcgtccccgcgccacctcctcccccgcgctcttgaccaccagagccgccgcgtcctcagcttgtcgtcctcgtcgtcggcggggcgtgcggcgggtgtgcgggccatggccgcggcggaggccggtgcgtcgacggcgacacaggctaagtcgagcggagtcaaacaagcactgatatcattgtcggataaaacagacttggcctatcttgggaatggccttcaagccttggggttttctattatttcgactggtggcacagcatcaagcctggaagcagctggagttaatgttacaaaagttgaacaaattacaaattttcctgaaatgcttgatggtagagttaaaacattgcaccccagtgtacatggtggtattcttgcaagaagagaccaggagcatcatcttaaggcattgaatgagcatggcattgggacatttgatgtggttgtggtgaacttgtatccattctataacaaggtcacctctggtgtaatttctttcgaggatggcattgaaaacattgatatcggtggacctacgatgatccgagcagcagctaagaatcataaggatgttcttgttatggtggatcatgaagattaccctgctctattagagtatctgcaaggaaaacaagatgaccagcaattccgcaagatgctagcatggaaagctttccaacatgtcgcttcttatgattcagctgtctcagaatggttgtggaagcaatcgaacaaaggagatgtattccccccgaacttcaccgtgcccctgtccctgaaatctacacttcgttatggtgaaaatcctcatcaaaaagctgccttctatggggacaagagtctttctgtagttaatgctggtggtattgcaacagcaattcagcaccatgggaaggaaatgtcttacaacaactacttagatgcggatgctgcatggaactgtgtatcagagtttgagagtcctacgtgtgttgtggttaagcacacaaatccatgtggagtagcatcccgacaggatattcttgaagcatacaggttggctgtaaagggagatcctgttagtgcatttggtgggatagttgctttcaatacgacaattgatgaggatcttgcaaaagaaatccgtgaattcaggagccctacagatggacagacgcgaatgttctacgagattgttgttgcacccggctatacagaaaagggtcttgagatcctcaaagggaaatcaaagacattgaggatactggaggcgaagagaagtggaaaagggatgctatcactcaggcaagtcagtggtggctggttggctcaagagtctgatgatctaacccctgaagatatcaccttcacaacagtgtccgagagagctcctcaagacagtgagctctctgatgccaaatttgcctggctttgtgtaaagcacgtaaagagtaacgccattgtgatagccaagaataactgcatgttaggcatgggaagtggccagccaaacagactggagagtctgagaattgctttcaggaaagcaggagaggaggccaaaggagctgctttggccagtgatgcattcttcccattcgcttggaacgacgccgtggaggaggcgtgccagaacggcatcggcgtgatcgcggagccgagcggcagcatgagggacggcgacgccgtcgactgctgcaacaagtacggcgtctccctcctcttcaccggcgtcaggcacttcaggcactga

SEQ ID NO: 56500 - protein, 600 aa, Oryza sativa
MPLNLASSPAAAAAAKVCAGVRASPRHLLPRALDHQSRRVLSLSSSSSAGRAAGVRAMAAAEAGASTATQAKSSGVKQALISLSDKTDLAYLGNGLQALGFSIISTGGTASSLEAAGVNVTKVEQITNFPEMLDGRVKTLHPSVHGGILARRDQEHHLKALNEHGIGTFDVVVVNLYPFYNKVTSGVISFEDGIENIDIGGPTMIRAAAKNHKDVLVMVDHEDYPALLEYLQGKQDDQQFRKMLAWKAFQHVASYDSAVSEWLWKQSNKGDVFPPNFTVPLSLKSTLRYGENPHQKAAFYGDKSLSVVNAGGIATAIQHHGKEMSYNNYLDADAAWNCVSEFESPTCVVVKHTNPCGVASRQDILEAYRLAVKGDPVSAFGGIVAFNTTIDEDLAKEIREFRSPTDGQTRMFYEIVVAPGYTEKGLEILKGKSKTLRILEAKRSGKGMLSLRQVSGGWLAQESDDLTPEDITFTTVSERAPQDSELSDAKFAWLCVKHVKSNAIVIAKNNCMLGMGSGQPNRLESLRIAFRKAGEEAKGAALASDAFFPFAWNDAVEEACQNGIGVIAEPSGSMRDGDAVDCCNKYGVSLLFTGVRHFRH

SEQ ID NO: 56501 - DNA, 1818 bp, Glycine max
  CDS (1)..(1818)
atgatgtttgtgttgggtgtttcttcctccgccgcagccgctcctgctgctgccacctcctccactcaccaccttctcagtggaacccttcactctccttcttccctctcaacttcccatctatttcccacaacttcggtgcgttcatcttcactgcacttcaggtgcgttccaatcaaagccatggctgaagttgatactatagcagtgtcaaaaactgcttcttcttctgctccgggcagcaagcaagccttgatatcattgtcagacaagaaggatcttgcatttgttgggaatgggctccaggaattaggatatactattgtttcaactggaggaacagcttctgcattggagagtgctggagtagctgttactaaagttgaaaagctcactaagttccctgaaatgcttgatggtcgtgtcaaaactttgcaccctaacatacatgggggtatccttgcccgaagggaccaaaaacatcacattgacgccctcagtgctcatgggattggtacttttgatgttgtggtagtgaacctgtacccattttacgataaagtcacatcagctggaggcgttgaatttgaggatggaattgaaaatattgacatcggtggtcccgccatgattagagctgctgcaaagaaccacaaggatgttttggtagtggttgatacagaagactaccctgcccttctggaatttcttaaaagaaaccaggatgatcaaaagttcaggctaaagctcgcatggaaagcttttcaacatgttgcttcctatgattctgcagtatctgagtggttgtggaagcagagtgtgggagataaattcccacctagcttgacagtgcctctttcactcaaaagttctctccgttatggtgaaaatcctcatcaaaaagctgcattctatattgacaaaagcatttctgaggttaatgctggtggaattgctacagccatccaacaccatggaaaggagatgtcatataataactacttggatgctgatgctgcttggaactgtgtatgcgagtttaggaaccccacgtgtgtagtggtgaagcatactaatccatgtggggtagcatcgcgtgatgatattcttgaagcctacagactagctgttaaagctgatccggtgagtgcatttggtggaattgtagctttcaatgtggaaattgacgaggcacttgctaaagaaattcgagaatttagaagccccacagatggggagacaaggatgttttatgaaatagtggttgcgcccagctatacagagaagggacttgagattctctgtggaaagtctaagactctaaggattcttgaagcgaaaaagaatgaagctggaaagctttcactcagacaagttggtggaggatggttagctcaggattcagatgacttaaccccacatgacatcaagttcaacgtagtctctgagaaggctccacaggatgatgagcttcgtgatgcagagtttgcatggttgtgtgtgaagcatgtcaaaagcaatgctattgtgatagctaagaacaattgcatgttaggtatgggaagtgggcaaccaaaccgtgtcgagagtttgagaatagcaatgaggaaagctggagatgatgttaaaggagcagccttggtcagtgatgccttcttcccatttgcttggaaagatgctgtggaagaagcatgtgaaagcggaattggtgttattgcagaaccaggtgggagtatcagagaccaggatgccatagactgttgtaacaagtatggtgtttcactgctctttaccaatgtcaggcactttaggcactga

SEQ ID NO: 56502 - protein, 605 aa, Glycine max
MMFVLGVSSSAAAAPAAATSSTHHLLSGTLHSPSSLSTSHLFPTTSVRSSSLHFRCVPIKAMAEVDTIAVSKTASSSAPGSKQALISLSDKKDLAFVGNGLQELGYTIVSTGGTASALESAGVAVTKVEKLTKFPEMLDGRVKTLHPNIHGGILARRDQKHHIDALSAHGIGTFDVVVVNLYPFYDKVTSAGGVEFEDGIENIDIGGPAMIRAAAKNHKDVLVVVDTEDYPALLEFLKRNQDDQKFRLKLAWKAFQHVASYDSAVSEWLWKQSVGDKFPPSLTVPLSLKSSLRYGENPHQKAAFYIDKSISEVNAGGIATAIQHHGKEMSYNNYLDADAAWNCVCEFRNPTCVVVKHTNPCGVASRDDILEAYRLAVKADPVSAFGGIVAFNVEIDEALAKEIREFRSPTDGETRMFYEIVVAPSYTEKGLEILCGKSKTLRILEAKKNEAGKLSLRQVGGGWLAQDSDDLTPHDIKFNVVSEKAPQDDELRDAEFAWLCVKHVKSNAIVIAKNNCMLGMGSGQPNRVESLRIAMRKAGDDVKGAALVSDAFFPFAWKDAVEEACESGIGVIAEPGGSIRDQDAIDCCNKYGVSLLFTNVRHFRH

SEQ ID NO: 56503 - DNA, 20 bp, Artificial sequence
  primer
atggttgtcgtcaggcgatc

SEQ ID NO: 56504 - DNA, 21 bp, Artificial sequence
  primer
ttagtggaggaaatggcgcac

SEQ ID NO: 56505 - protein, 686 aa, Artificial sequence
  consensus sequence
  Variant (3)..(3): Xaa in position 3 is any amino acid
  Variant (6)..(6): Xaa in position 6 is any amino acid
  Variant (9)..(9): Xaa in position 9 is any amino acid
  Variant (11)..(14): Xaa in position 11 to 14 is any amino acid
  Variant (16)..(17): Xaa in position 16 to 17 is any amino acid
  Variant (19)..(23): Xaa in position 19 to 23 is any amino acid
  Variant (24)..(27): Xaa in position 24 to 27 is any or no amino acid
  Variant (29)..(29): Xaa in position 29 is any amino acid
  Variant (33)..(39): Xaa in position 33 to 39 is any amino acid
  Variant (41)..(42): Xaa in position 41 to 42 is any amino acid
  Variant (44)..(45): Xaa in position 44 to 45 is any amino acid
  Variant (47)..(49): Xaa in position 47 to 49 is any amino acid
  Variant (51)..(52): Xaa in position 51 to 52 is any amino acid
  Variant (55)..(57): Xaa in position 55 to 57 is any amino acid
  Variant (66)..(67): Xaa in position 66 to 67 is any amino acid
  Variant (71)..(71): Xaa in position 71 is any amino acid
  Variant (73)..(83): Xaa in position 73 to 83 is any amino acid
  Variant (84)..(88): Xaa in position 84 to 88 is any or no amino acid
  Variant (90)..(90): Xaa in position 90 is any amino acid
  Variant (91)..(92): Xaa in position 91 to 92 is any or no amino acid
  Variant (94)..(94): Xaa in position 94 is any amino acid
  Variant (96)..(96): Xaa in position 96 is any amino acid
  Variant (103)..(104): Xaa in position 103 to 104 is any amino acid
  Variant (106)..(108): Xaa in position 106 to 108 is any amino acid
  Variant (109)..(118): Xaa in position 109 to 118 is any or no amino acid
  Variant (120)..(120): Xaa in position 120 is any amino acid
  Variant (127)..(129): Xaa in position 127 to 129 is any amino acid
  Variant (131)..(131): Xaa in position 131 is any amino acid
  Variant (136)..(138): Xaa in position 136 to 138 is any amino acid
  Variant (139)..(142): Xaa in position 139 to 142 is any or no amino acid
  Variant (144)..(151): Xaa in position 144 to 151 is any amino acid
  Variant (153)..(163): Xaa in position 153 to 163 is any amino acid
  Variant (164)..(171): Xaa in position 164 to 171 is any or no amino acid
  Variant (173)..(174): Xaa in position 173 to 174 is any amino acid
  Variant (177)..(178): Xaa in position 177 to 178 is any amino acid
  Variant (181)..(182): Xaa in position 181 to 182 is any amino acid
  Variant (185)..(185): Xaa in position 185 is any amino acid
  Variant (188)..(189): Xaa in position 188 to 189 is any amino acid
  Variant (191)..(201): Xaa in position 191 to 201 is any amino acid
  Variant (202)..(245): Xaa in position 202 to 245 is any or no amino acid
  Variant (254)..(254): Xaa in position 254 is any amino acid
  Variant (256)..(257): Xaa in position 256 to 257 is any amino acid
  Variant (259)..(269): Xaa in position 259 to 269 is any amino acid
  Variant (270)..(278): Xaa in position 270 to 278 is any or no amino acid
  Variant (281)..(282): Xaa in position 281 to 282 is any amino acid
  Variant (287)..(288): Xaa in position 287 to 288 is any amino acid
  Variant (290)..(291): Xaa in position 290 to 291 is any amino acid
  Variant (294)..(299): Xaa in position 294 to 299 is any amino acid
  Variant (301)..(308): Xaa in position 301 to 308 is any amino acid
  Variant (309)..(318): Xaa in position 309 to 318 is any or no amino acid
  Variant (321)..(321): Xaa in position 321 is any amino acid
  Variant (326)..(326): Xaa in position 326 is any amino acid
  Variant (328)..(334): Xaa in position 328 to 334 is any amino acid
  Variant (335)..(355): Xaa in position 335 to 355 is any or no amino acid
  Variant (357)..(359): Xaa in position 357 to 359 is any amino acid
  Variant (361)..(363): Xaa in position 361 to 363 is any amino acid
  Variant (365)..(366): Xaa in position 365 to 366 is any amino acid
  Variant (368)..(368): Xaa in position 368 is any amino acid
  Variant (372)..(373): Xaa in position 372 to 373 is any amino acid
  Variant (375)..(375): Xaa in position 375 is any amino acid
  Variant (377)..(379): Xaa in position 377 to 379 is any amino acid
  Variant (381)..(383): Xaa in position 381 to 383 is any amino acid
  Variant (385)..(390): Xaa in position 385 to 390 is any amino acid
  Variant (391)..(400): Xaa in position 391 to 400 is any or no amino acid
  Variant (402)..(402): Xaa in position 402 is any amino acid
  Variant (404)..(406): Xaa in position 404 to 406 is any amino acid
  Variant (409)..(413): Xaa in position 409 to 413 is any amino acid
  Variant (415)..(420): Xaa in position 415 to 420 is any amino acid
  Variant (421)..(426): Xaa in position 421 to 426 is any or no amino acid
  Variant (428)..(428): Xaa in position 428 is any amino acid
  Variant (430)..(430): Xaa in position 430 is any amino acid
  Variant (432)..(446): Xaa in position 432 to 446 is any amino acid
  Variant (447)..(457): Xaa in position 447 to 457 is any or no amino acid
  Variant (460)..(460): Xaa in position 460 is any amino acid
  Variant (462)..(462): Xaa in position 462 is any amino acid
  Variant (464)..(465): Xaa in position 464 to 465 is any amino acid
  Variant (467)..(486): Xaa in position 467 to 486 is any amino acid
  Variant (487)..(497): Xaa in position 487 to 497 is any or no amino acid
  Variant (499)..(500): Xaa in position 499 to 500 is any amino acid
  Variant (503)..(506): Xaa in position 503 to 506 is any amino acid
  Variant (508)..(508): Xaa in position 508 is any amino acid
  Variant (515)..(523): Xaa in position 515 to 523 is any amino acid
  Variant (524)..(532): Xaa in position 524 to 532 is any or no amino acid
  Variant (534)..(534): Xaa in position 534 is any amino acid
  Variant (536)..(536): Xaa in position 536 is any amino acid
  Variant (539)..(540): Xaa in position 539 to 540 is any amino acid
  Variant (542)..(547): Xaa in position 542 to 547 is any amino acid
  Variant (549)..(551): Xaa in position 549 to 551 is any amino acid
  Variant (553)..(554): Xaa in position 553 to 554 is any amino acid
  Variant (555)..(624): Xaa in position 555 to 624 is any or no amino acid
  Variant (626)..(626): Xaa in position 626 is any amino acid
  Variant (627)..(628): Xaa in position 627 to 628 is any or no amino acid
  Variant (637)..(637): Xaa in position 637 is any amino acid
  Variant (638)..(639): Xaa in position 638 to 639 is any or no amino acid
  Variant (641)..(648): Xaa in position 641 to 648 is any amino acid
  Variant (650)..(655): Xaa in position 650 to 655 is any amino acid
  Variant (660)..(660): Xaa in position 660 is any amino acid
  Variant (663)..(665): Xaa in position 663 to 665 is any amino acid
  Variant (667)..(678): Xaa in position 667 to 678 is any amino acid
  Variant (680)..(681): Xaa in position 680 to 681 is any amino acid
  Variant (685)..(685): Xaa in position 685 is any amino acid
ALXSVXDKXGXXXXAXXLXXXXXXXXXSXGGTXXXXXXXGXXVXXVXXXTXXPEXXXGRVKTLHPXXHGGXLXXXXXXXXXXXXXXXXIXXXDXVXVNLYPFXXTXXXXXXXXXXXXXEXIDIGGPXXXRXAAKNXXXXXXXVXXXXXXXXYXXXXXXXXXXXXXXXXXXXRXXLAXXAFXXTAXYDXXIXXXXXXXXXXXXXXXXXXXXXXXXXXXXXXXXXXXXXXXXXXXXXXXXXXXXXXXRYGENPHQXAXXYXXXXXXXXXXXXXXXXXXXXGKXXSYNNXXDXXAAXXXXXXFXXXXXXXXXXXXXXXXXXKHXNPCGXAXXXXXXXXXXXXXXXXXXXXXXXXXXXXAXXXAXXXDXXSXFGGXXAXNXXXDXXXAXXXXXXXXXXXXXXXXFXEXXXAPXXXXXAXXXXXXXXXXXXNXRXLXXXXXXXXXXXXXXXXXXXXXXXXXXGGXLXQXXDXXXXXXXXXXXXXXXXXXXXXXXXXXXXXXXDXXFAXXXXKXVKSNAIXXXXXXXXXXXXXXXXXXGXGXGQXXRXXXXXXAXXXAXXXXXXXXXXXXXXXXXXXXXXXXXXXXXXXXXXXXXXXXXXXXXXXXXXXXXXXXXXXXXXXXXXXXXXXXGXXXASDAFFPFXXXDXXXXXXXXGXXXXXXPGGSXRDXXXIXXXXXXXXXXXXTXXRHFXH

SEQ ID NO: 56506 - protein, 31 aa, Artificial sequence
  protein pattern
  Variant (2)..(2): Xaa in position 2 is Ala, Cys, Gly, Asn, Ser, Thr or Val
  Variant (3)..(3): Xaa in position 3 is Ala, Ile, Leu or Val
  Variant (4)..(9): Xaa in position 4 to 9 is any amino acid
  Variant (11)..(13): Xaa in position 11 to 13 is any amino acid
  Variant (14)..(14): Xaa in position 14 is any or no amino acid
  Variant (16)..(16): Xaa in position 16 is any amino acid
  Variant (17)..(17): Xaa in position 17 is any or no amino acid
  Variant (22)..(23): Xaa in position 22 to 23 is any amino acid
  Variant (25)..(27): Xaa in position 25 to 27 is any amino acid
  Variant (28)..(28): Xaa in position 28 is Phe, Ile or Val
  Variant (29)..(30): Xaa in position 29 to 30 is any amino acid
  Variant (31)..(31): Xaa in position 31 is Ala or Cys
DXXXXXXXXGXXXXIXXPGGSXXDXXXXXXX

SEQ ID NO: 56507 - protein, 18 aa, Artificial sequence
  protein pattern
  Variant (2)..(2): Xaa in position 2 is any amino acid
  Variant (9)..(9): Xaa in position 9 is Ala, Ser or Thr
  Variant (10)..(10): Xaa in position 10 is Leu or Met
  Variant (11)..(11): Xaa in position 11 is Ile, Leu or Val
  Variant (13)..(13): Xaa in position 13 is any amino acid
  Variant (14)..(14): Xaa in position 14 is any or no amino acid
  Variant (16)..(16): Xaa in position 16 is any or no amino acid
EXIDIGGPXXXRXXAXKN

SEQ ID NO: 56508 - protein, 14 aa, Artificial sequence
  protein pattern
  Variant (6)..(6): Xaa in position 6 is any amino acid
  Variant (9)..(9): Xaa in position 9 is any amino acid
  Variant (10)..(10): Xaa in position 10 is any or no amino acid
  Variant (12)..(12): Xaa in position 12 is any amino acid
  Variant (13)..(13): Xaa in position 13 is any or no amino acid
RYGENXHQXXAXXY

SEQ ID NO: 56509 - protein, 12 aa, Artificial sequence
  protein pattern
  Variant (2)..(2): Xaa in position 2 is any amino acid
  Variant (3)..(3): Xaa in position 3 is any or no amino acid
  Variant (5)..(5): Xaa in position 5 is any or no amino acid
  Variant (7)..(7): Xaa in position 7 is any or no amino acid
DXXVXVXNLYPF

SEQ ID NO: 56510 - protein, 22 aa, Artificial sequence
  protein pattern
  Variant (2)..(5): Xaa in position 2 to 5 is any amino acid
  Variant (6)..(7): Xaa in position 6 to 7 is any or no amino acid
  Variant (10)..(10): Xaa in position 10 is Ala, Glu, Gln or Thr
  Variant (11)..(11): Xaa in position 11 is Ile, Leu or Met
  Variant (13)..(13): Xaa in position 13 is any amino acid
  Variant (16)..(17): Xaa in position 16 to 17 is any amino acid
  Variant (19)..(20): Xaa in position 19 to 20 is any or no amino acid
  Variant (22)..(22): Xaa in position 22 is Ala or Asp
AXXXXXXGKXXSXNNXXDXXAX

SEQ ID NO: 56511 - protein, 21 aa, Artificial sequence
  protein pattern
  Variant (2)..(3): Xaa in position 2 to 3 is any amino acid
  Variant (4)..(4): Xaa in position 4 is any or no amino acid
  Variant (6)..(6): Xaa in position 6 is any amino acid
  Variant (7)..(8): Xaa in position 7 to 8 is any or no amino acid
  Variant (10)..(11): Xaa in position 10 to 11 is any amino acid
  Variant (13)..(13): Xaa in position 13 is Ala or Ile
  Variant (17)..(17): Xaa in position 17 is Ile or Val
  Variant (18)..(18): Xaa in position 18 is Ile, Leu or Val
  Variant (19)..(19): Xaa in position 19 is Ala, Gly, Ile or Val
  Variant (20)..(20): Xaa in position 20 is any amino acid
AXXXAXXXDXXSXFGGXXXXN

SEQ ID NO: 56512 - protein, 16 aa, Artificial sequence
  protein pattern
  Variant (2)..(4): Xaa in position 2 to 4 is any amino acid
  Variant (7)..(7): Xaa in position 7 is any amino acid
  Variant (8)..(8): Xaa in position 8 is Asn or Ser
  Variant (10)..(10): Xaa in position 10 is Ile or Val
  Variant (11)..(11): Xaa in position 11 is any amino acid
  Variant (12)..(12): Xaa in position 12 is Ala, Cys or Ser
  Variant (13)..(13): Xaa in position 13 is any amino acid
  Variant (14)..(14): Xaa in position 14 is Asp, Glu, His, Lys or Arg
  Variant (15)..(15): Xaa in position 15 is any amino acid
GXXXGQXXRXXXXXXA

SEQ ID NO: 56513 - protein, 8 aa, Artificial sequence
  protein pattern
  Variant (4)..(4): Xaa in position 4 is Ala or Gly
  Variant (8)..(8): Xaa in position 8 is Phe or Met
ASDXFFPX

SEQ ID NO: 56514 - DNA, 981 bp, Synechocystis sp.
  CDS (1)..(981): transl_table=11
atgaaattatccagcaaaaatttagatgcccgtctcgacacggtttacgatgccatcgttttagggggaggcatggggggtttgtccgccgccatctatttagcccgctatggactgaaatgtctggtggtggaaaaagggcggggccgatccttctggatgcaggatttacgcaactatgtggggctagatcccgatacaccggggcgggacatcatcacccacagcacccaacaggctctccattggggcgcagatttgttgcggggttatgtggaagatgtaaccgatgagggagatacccttgccgtgaaggtgaaagtgggtaagaaagatagtctttatccgatttttcggactaaatatgtcatcgccgccacgggcattatcgacaatctaccccagttggaggatatgcaaaatgtttatgactatgccggttacactctgcacgtttgcatgatttgtgacgggtttgatatgtgggatcaaaaggctgtgttgattgcgggcaccgaaggacaaattaatgctgcctttgttttgaattggtttacgccctacattactgttttgacccatgggctttgcactgtcggtgatgaaatgaaagctaagttagcagaccacggttatcctctccacgaagcggcgatcaccaaatttttgggagaagaccacaaaatgagtggggtggaattggtagatggcactgtggtggaagccacaacgggtttgatcaacatgggttctgtgtaccataaccattacctcaagggcattgaaggtttggaatgggacggggaaaatttggtcaccaatgacatggcccaaaccagccatccccggatctttgccctgggagatttgaaaaaaggtttaaaccaggtatccgtagcagtggccgatggcaccctggccgccacccaaatttggcgcaacattcgccgggccagtgaaccccgcaaatggattcattaa

SEQ ID NO: 56515 - protein, 326 aa, Synechocystis sp.
MKLSSKNLDARLDTVYDAIVLGGGMGGLSAAIYLARYGLKCLVVEKGRGRSFWMQDLRNYVGLDPDTPGRDIITHSTQQALHWGADLLRGYVEDVTDEGDTLAVKVKVGKKDSLYPIFRTKYVIAATGIIDNLPQLEDMQNVYDYAGYTLHVCMICDGFDMWDQKAVLIAGTEGQINAAFVLNWFTPYITVLTHGLCTVGDEMKAKLADHGYPLHEAAITKFLGEDHKMSGVELVDGTVVEATTGLINMGSVYHNHYLKGIEGLEWDGENLVTNDMAQTSHPRIFALGDLKKGLNQVSVAVADGTLAATQIWRNIRRASEPRKWIH

SEQ ID NO: 56516 - DNA, 1467 bp, Oryza sativa Japonica Group
  CDS (1)..(1467)
atggcggtcacgcgcctcgccgtggccgccgccctctcggccaaggcgttgcgcgcgtcggctgcccccgccgtcgacgaggaggcccccgcatccccgcctccatcagatcttggcaagggagtggagaacttggtgatcataggctctggcccggcggggtacactgccgcgatttacgccgctcgggcgaacctcaagcccgtcgtgttcgaaggctaccaggttggtggcgttcctggtgggcagctgatgaccaccaccgaggtggagaatttccctgggtttccggatggcgtcactgggcctgatctcatggacaaaatgcggaagcaagcggagcggtggggtgctgagcttcaccaggaggatgttgagtttgtgaatgtgaagagcagaccgtttgttattcgtagcagtgatcgtgaggtgaaatgccatagtgtaatcattgctactggtgctgctgctaagcgccttcgattacctcgtgaagatgaattttggagtagaggtatcagtgcatgtgcaatatgtgatggagcatccccactatttaagggtcaagttcttgcagttgttggaggtggtgatacagctacagaggaagctatatatttgaccaaatatgcacgtcacgttcatttacttgttcgaaaggatcagctacgagcatccaaagctatgcaggaccgagtactcaacaatcccaacataacagtacatttcaatacagaagctgtggatgttgtcagcaatcccaaaggccagatgtctggtattcaactgaagagaaccgacacgggagaggaatcagttcttgaggtgaaaggtctattctatggcataggacacactccaaacagtcagttgttacaaggtcaaattgatcttgacgatgctggttatattttggttgaagaaggcacagcaaaaacatcagttgatggtgtatttgctgctggtgatgtgcaggatcatgaatggaggcaagccgttactgcagctggatccggatgtgtagccgctttgtcggtggaaagatacttagttgccaacgaccttcttgttgaatttcaccagcctgttcgcgaagaaaaggagaaggagattacagatagagatgtcgagatgggctttgacatttctcacacaaagcataggggacagtatgcactccgcaaagtatatcatgaaagtccaaggcttgtctgtgttctatatacttctccaacatgtggtccttgcagaaccttaaagccaattctaagcaaggttatagatgagtacaacgaacacgttcattttgtcgaaattgacatcgaggaggatcctgaaatagcagaagctgcaggcatcatgggaacaccatgtgttcaattttttaaaaataaagaaatgctcaggactgtctctggtgttaaaatgaagaaggaatatagggagtttatcgagtcaaacaaatga

SEQ ID NO: 56517 - protein, 488 aa, Oryza sativa Japonica Group
MAVTRLAVAAALSAKALRASAAPAVDEEAPASPPPSDLGKGVENLVIIGSGPAGYTAAIYAARANLKPVVFEGYQVGGVPGGQLMTTTEVENFPGFPDGVTGPDLMDKMRKQAERWGAELHQEDVEFVNVKSRPFVIRSSDREVKCHSVIIATGAAAKRLRLPREDEFWSRGISACAICDGASPLFKGQVLAVVGGGDTATEEAIYLTKYARHVHLLVRKDQLRASKAMQDRVLNNPNITVHFNTEAVDVVSNPKGQMSGIQLKRTDTGEESVLEVKGLFYGIGHTPNSQLLQGQIDLDDAGYILVEEGTAKTSVDGVFAAGDVQDHEWRQAVTAAGSGCVAALSVERYLVANDLLVEFHQPVREEKEKEITDRDVEMGFDISHTKHRGQYALRKVYHESPRLVCVLYTSPTCGPCRTLKPILSKVIDEYNEHVHFVEIDIEEDPEIAEAAGIMGTPCVQFFKNKEMLRTVSGVKMKKEYREFIESNK

SEQ ID NO: 56518 - DNA, 1590 bp, Arabidopsis thaliana
  CDS (1)..(1590)
atggctgcgtctcccaagataggcatcggtattgcctccgtctcatcgcctcaccgtgtctccgccgcctcatccgctctttctcctcctcctcatctcttctttctcactactactactaccacacgtcacggcggctcctatctcctccgtcaaccaacccgaactcgctcttctgattccctccgcctcagagtctccgccaccgccaattctccgtcttcttcttcttcaggaggcgagattatcgagaatgtagtgattataggctccggtcccgccggttatacggcggcgatatatgcagcgcgcgccaatttgaagccggtggtttttgaagggtatcagatgggcggagttcccggtggacagttgatgacaactactgaagttgagaattttccgggattcccagacggtatcacgggtcccgatttaatggagaaaatgagaaagcaagcagagaggtggggagcagagttgtatccagaagatgttgaatctcttagtgtcacaactgctccttttactgtgcaaactagtgaacgtaaggtcaagtgccatagtattatatatgccactggcgctacagcaaggaggttaaggttacctcgagaggaagaattctggagtagggggataagtgcttgtgctatctgtgatggagcttcgcctttatttaaggggcaagtacttgccgtggttggaggaggagatacggctacagaggaagccttgtatctcacgaaatatgcccgtcatgttcatttgcttgttcgcagagatcagttgagagcttccaaggctatgcaagatagagtgatcaacaatccaaacatcacagtgcattacaacacggaaaccgtggacgtattgagcaacaccaagggacagatgtctggcattctactcagaagacttgatacgggtgaagaaactgagctggaggcaaaaggattgttttatggaatagggcattcgccaaacagtcagttattggaaggccaagtcgaactcgacagctccgggtacgtcttggttcgggaaggaacatcaaatacatcagttgaaggtgtatttgctgcaggagatgtgcaggaccacgaatggagacaagctgtaactgctgctggatcaggatgcatagctgctttgtcagccgagagatacctcacaagtaacaatcttcttgttgaatttcaccagcctcaaactgaagaggccaagaaagaattcacacaacgggatgtccaagaaaagtttgacatcactcttacaaagcacaagggacagtatgctcttagaaaactataccatgagagtccaagagttatattggtactatacacttcaccaacatgtggcccctgtaggactctgaagcctattttgaacaaggtggtcgatgagtataaccatgatgtgcattttgttgagattgacatcgaggaagatcaagaaattgctgaagcagctggaattatgggaaccccatgtgtgcagttcttcaagaacaaggaaatgctcaggactatatcgggtgtgaagatgaagaaagagtaccgagaattcattgaggccaataaatga

SEQ ID NO: 56519 - protein, 529 aa, Arabidopsis thaliana
MAASPKIGIGIASVSSPHRVSAASSALSPPPHLFFLTTTTTTRHGGSYLLRQPTRTRSSDSLRLRVSATANSPSSSSSGGEIIENVVIIGSGPAGYTAAIYAARANLKPVVFEGYQMGGVPGGQLMTTTEVENFPGFPDGITGPDLMEKMRKQAERWGAELYPEDVESLSVTTAPFTVQTSERKVKCHSIIYATGATARRLRLPREEEFWSRGISACAICDGASPLFKGQVLAVVGGGDTATEEALYLTKYARHVHLLVRRDQLRASKAMQDRVINNPNITVHYNTETVDVLSNTKGQMSGILLRRLDTGEETELEAKGLFYGIGHSPNSQLLEGQVELDSSGYVLVREGTSNTSVEGVFAAGDVQDHEWRQAVTAAGSGCIAALSAERYLTSNNLLVEFHQPQTEEAKKEFTQRDVQEKFDITLTKHKGQYALRKLYHESPRVILVLYTSPTCGPCRTLKPILNKVVDEYNHDVHFVEIDIEEDQEIAEAAGIMGTPCVQFFKNKEMLRTISGVKMKKEYREFIEANK

SEQ ID NO: 56520 - DNA, 951 bp, Gibberella zeae PH-1
  CDS (1)..(951)
atgtccaaactctacgacgtactcataatcggcggcggcccagccggcctctccttggcctccactctcgcccgccaagtctactcagtcctcatcctcgactcaggcgtataccgcaacgctcctgcaaaacacatgcacaacgtcctcggcttcgatcacgtcgatccagcttccttccgagctaaagcccgtgaagatctcgagaagcgctaccatagcgttgagttccagtctgcgacggtagctaccgttcgcaagacggacgatggcatctttgaagctgttgaccaggagggaacggtatacaaggggaggaaacttggtcttggaactggtgtgagggatgtttttgatggtctgcctgagggttatgctgattgttggggacgcggcatctttcactgtctttactgccatggctttgaagaacgaggcgcagagtcagtaggtgtctttgcaggcggcatgatctccaacgccgaaatgctcgcccacgtaacgcccatggccaaacgactcgcccactcagtaacagtctacaccaacgccaacacctctctcatcgaacccattcaaagtaagatccacagcagcaaagtacactacgaagaccgtaagataacttcgttcgcgctcgtcaacgacggacccagtgtgaagatcacctttgaggatggatcgtccaaggtagaaggctttgtggtgaatcaccccaacgttgtgcaagcggcgcctttcgcagagcagctgggtttggagaagacagctacgggggatattaaagtcgatgcgccgtggaatgagacgggattgaagggatgctttgcgtttggtgatgcagcgactatgatgaggagtgtgttgcaggcgatgcacatggggggttttgcagcgctgggaatggcgatgcagttacagaaggagtttgatgagaaggatgagctgtga

SEQ ID NO: 56521 - protein, 316 aa, Gibberella zeae PH-1
MSKLYDVLIIGGGPAGLSLASTLARQVYSVLILDSGVYRNAPAKHMHNVLGFDHVDPASFRAKAREDLEKRYHSVEFQSATVATVRKTDDGIFEAVDQEGTVYKGRKLGLGTGVRDVFDGLPEGYADCWGRGIFHCLYCHGFEERGAESVGVFAGGMISNAEMLAHVTPMAKRLAHSVTVYTNANTSLIEPIQSKIHSSKVHYEDRKITSFALVNDGPSVKITFEDGSSKVEGFVVNHPNVVQAAPFAEQLGLEKTATGDIKVDAPWNETGLKGCFAFGDAATMMRSVLQAMHMGGFAALGMAMQLQKEFDEKDEL

SEQ ID NO: 56522 - DNA, 894 bp, Kluyveromyces lactis NRRL Y-1140
  CDS (1)..(894)
atgagcaaggagattaatgatttggtaatcattggaggcagttatgccggcatgtcagcagcacttcaattagttcgtgctagacggaaagtggtgatcatcgatgaaggtataagaagaaacagatttgcaaaagagtcgcatggattcttgggcagtgacggtgcgagccctaatgagatagcagctacagcacgtggacaattgttgaaatacccaacattacaatggatcgatggccgtgctattagtgttgaaggaacgaaagacaatttcgtcatcaccactgcagataagcaggaataccgtgcttccaggatcttgctagcaactggcatccaagactgcttgtcggatatcgaagggctcgaggaaagatggggtaagtctgtttttcattgcccatactgccacgggtacgaattgaatcagggaaacattgcagtaattgccacgtctccgatgtcaattcaccaagggttgttgttgccagagtggggcacaataacattctataccaatggtaccaagttcggagatgatatgctcaatgcgttggaatcgaaatctatgaacgttgtccacggtatcgttcagaaaattgaaaatgaggcagacgttatcctggaagacggttcaaaagaatcattcactgggatctttgtttccactaccgttaaaccgaccgctgatgagttaatcaatcatttaggctgtgatatgttaacgaaccccttgggatctatcgtgaagacggatgagaagaagcaatcatcaaaaccgggggtttacgcatgcggtgacgttggtgtatttccgagcaccgttgccttagcagtaggtgacggtacactagcaggattcaacattcaccgctgcttattggggatgtga

SEQ ID NO: 56523 - protein, 297 aa, Kluyveromyces lactis NRRL Y-1140
MSKEINDLVIIGGSYAGMSAALQLVRARRKVVIIDEGIRRNRFAKESHGFLGSDGASPNEIAATARGQLLKYPTLQWIDGRAISVEGTKDNFVITTADKQEYRASRILLATGIQDCLSDIEGLEERWGKSVFHCPYCHGYELNQGNIAVIATSPMSIHQGLLLPEWGTITFYTNGTKFGDDMLNALESKSMNVVHGIVQKIENEADVILEDGSKESFTGIFVSTTVKPTADELINHLGCDMLTNPLGSIVKTDEKKQSSKPGVYACGDVGVFPSTVALAVGDGTLAGFNIHRCLLGM

SEQ ID NO: 56524 - DNA, 993 bp, Synechococcus sp. JA-3-3Ab
  CDS (1)..(993): transl_table=11
atgaaactaaacagcaagaacctagaagttggcttgaacaaaacctacgacgtcattgtcgccggtggcggcgcaggggggctgtcggcggcaatctatctggctcgctatggcttgagttgtctggtggtggaaaaaggcaaaggccgatctttttggatgcaggatctgcgcaattatctgggcctgccgccaaacacgccaggacgagagctgttgcgacagggaagggagcacgccctcagcttgggggtggactatctatggggctatgtggaaaatgtgaaggatgagggagacctttttgccgtcaaggtcaaggtgggaaaagtcaacagcctctaccccgtttttcgcagcaagtatttgatcgcggcaacaggcatcatcgatcatctgccgcaattgccggacatgcaaaatgtttacgactatgccggctattcattgcatgtctgtatgatttgcgatggctacgaaatgcgggatcaaaaggcagttttaatcgtcggctcagaggctcaaatcaacactgcctttgtcctcaactggtttacgccttatatctcggtgttgactcacggcctctgctcggtcggccctgaaatgcgccaaaaactggccgagcacggctatcccctttacgaatctcccatccgccgctttctgggcgagaaccaccagatgcgcggtgtagagctcgcggatggcacctacatcgaggcaactaccggcctggtggccatgggagccaagtaccacaacgactatttgaaagggatccccaacttgcagtggcagggcgaaaacctcgtgaccgacgagtggtgccgcaccacccatccgcggctgttcgcggtaggagatttgaagcaaggcctcaatcaggtggcgattgcggttgctgacggagcgctggcggccacagccatttggcgggacatccgccgagcctcccctgctcgtcaatgggaagagcgcctgcgctcttag

SEQ ID NO: 56525 - protein, 330 aa, Synechococcus sp. JA-3-3Ab
MKLNSKNLEVGLNKTYDVIVAGGGAGGLSAAIYLARYGLSCLVVEKGKGRSFWMQDLRNYLGLPPNTPGRELLRQGREHALSLGVDYLWGYVENVKDEGDLFAVKVKVGKVNSLYPVFRSKYLIAATGIIDHLPQLPDMQNVYDYAGYSLHVCMICDGYEMRDQKAVLIVGSEAQINTAFVLNWFTPYISVLTHGLCSVGPEMRQKLAEHGYPLYESPIRRFLGENHQMRGVELADGTYIEATTGLVAMGAKYHNDYLKGIPNLQWQGENLVTDEWCRTTHPRLFAVGDLKQGLNQVAIAVADGALAATAIWRDIRRASPARQWEERLRS

SEQ ID NO: 56526 - DNA, 1023 bp, Synechococcus sp. JA-2-3B'a(2-13)
  CDS (1)..(1023): transl_table=11
atgaaactgagcagcaggaatctagaagttgctttgaacaaaatctatgacgtgattgtggccggagggggagcaggggggttgtcggcggcaatctatctggcccgttacggactgagttgcctggtggtggagaagggcagaggccgctctttttggatgcaggatttgcgcaattatctgggattgcctccgaccactcccggacgagagctgttgcgacagggaacagagcatgccctcagcttgggggtagattacctgcgcggttttgtggaagatgccaccgatgagggagacctctttgcggtcaaagtcaaggtgggaaaaatgaacagcctctaccccgtttttcggagcaaatatttgatcgcggcaaccggcattatggacgagctgcctcagttgtcggatatgcagaatgtttacgactacgcgggctattcactgcatgtctgtatgatctgcgacggctatgaaatgcgggatcaaaagtcagtgttgatcgtcaattcggaagatcggatcaatacagcttttgtcctcaactggtttacaccctatatctcggtgttgacccacggcctctgctcggtcggccccgacatgcgcaaaaaactggcggatcatggctaccccctctacgaatctcctattcgccgctttcttggagaaaaccatcaattgcagggtgtggagttggaagatggcacttacatcgaagcaactaccggcttggtggcgatgggcgccagataccacaatgcctatttgaaagggatccccggcttgaaatggcaaggggaaaacctgctaaccgacgagtggtgtcgcactgatcatccgcggctgtttgcgctgggcgatttgaagcagggcctgaaccaagtgtcgattgcggttgccgatggtaccttagctgccacagccatttggcgggacatccgacgggcctcgcctgcacgtaaatgggaagagcggctgctctcggcacccagaagcccagcagggccttccggttaa

SEQ ID NO: 56527 - protein, 340 aa, Synechococcus sp. JA-2-3B'a(2-13)
MKLSSRNLEVALNKIYDVIVAGGGAGGLSAAIYLARYGLSCLVVEKGRGRSFWMQDLRNYLGLPPTTPGRELLRQGTEHALSLGVDYLRGFVEDATDEGDLFAVKVKVGKMNSLYPVFRSKYLIAATGIMDELPQLSDMQNVYDYAGYSLHVCMICDGYEMRDQKSVLIVNSEDRINTAFVLNWFTPYISVLTHGLCSVGPDMRKKLADHGYPLYESPIRRFLGENHQLQGVELEDGTYIEATTGLVAMGARYHNAYLKGIPGLKWQGENLLTDEWCRTDHPRLFALGDLKQGLNQVSIAVADGTLAATAIWRDIRRASPARKWEERLLSAPRSPAGPSG

SEQ ID NO: 56528 - DNA, 948 bp, Bacillus halodurans C-125
  CDS (1)..(948): transl_table=11
atgggtgaagaacaaaaagtatacgatgtggtgattgccggggctggtccagcagggatgacagccgctgtttatacgtcacgggctaatttaagcaccgtcatggttgaacgtggagtcccaggtgggcaaatggctaacacggaagatgtagaaaactatcccggattcgaccatattttaggaccagagctttcaacaaaaatgtttgagcatgcgaaaaaattcggtgcagaatatgcatatggtgatattaaagaaattatcgatcaaggcgatttgaagctagtgaaagcaggaaataaggaatataaagctcgtgcggtcatcgtggcaacaggagctgagtataaaaagctaggtgtcccaggagaaaaagaattaagcgggcgcggtgtttcttactgtgcggtttgtgacggtgcttttttcaaagggaaagagcttgtcgtcgttggtggtggtgactctgcggttgaagaggcggtctacctcacccgttttgcgtcaaaagttacgatcattcaccgtcgcgatcaattgcgagcgcaaaagattttacagcaacgggcgtttgacaatgacaagattgagtttatttgggatcatgtcgtcaaacaaattaacgggacggacggaaaagtgagcagcgtaacgatcgagcatgcgaaaacaggggaacagcaagattttaaaacagatggtgtgttcatttacattggaatgcttccgttaaatgaagcggttaaaaacttaaacattttgaatgacgaagggtacattgtgacaaacgaagagatggaaacgagcgtaccaggtatattcgctgctggtgatgttcgcgagaaatcgcttcgacaaattgttacagcaacgggggacggaagcttagcggcgcaaaatgtgcaacactacattgaagagttggctgaaaaagtaaaaaattaa

SEQ ID NO: 56529 - protein, 315 aa, Bacillus halodurans C-125
MGEEQKVYDVVIAGAGPAGMTAAVYTSRANLSTVMVERGVPGGQMANTEDVENYPGFDHILGPELSTKMFEHAKKFGAEYAYGDIKEIIDQGDLKLVKAGNKEYKARAVIVATGAEYKKLGVPGEKELSGRGVSYCAVCDGAFFKGKELVVVGGGDSAVEEAVYLTRFASKVTIIHRRDQLRAQKILQQRAFDNDKIEFIWDHVVKQINGTDGKVSSVTIEHAKTGEQQDFKTDGVFIYIGMLPLNEAVKNLNILNDEGYIVTNEEMETSVPGIFAAGDVREKSLRQIVTATGDGSLAAQNVQHYIEELAEKVKN

SEQ ID NO: 56530 - DNA, 978 bp, Deinococcus radiodurans R1
  CDS (1)..(978): transl_table=11
atgacggcacctactgcacacgactacgacgtggtgattatcggcggcggcccggcggggctcacggcggcgatctacaccgggcgggcccagctcagcacgctgattctggaaaaggggatgcccggtgggcagattgcctggagcgaggaagtggaaaacttccccggcttccccgagccgattgccgggatggaactcgcccagcggatgcaccagcaggccgagaagttcggcgccaaagtggagatggacgaggtgcagggcgtgcagcacgacgcgacctcgcacccttacccctttaccgtccggggctacaacggtgagtaccgcgccaaggcggtcattctggcgacgggtgccgacccgcgcaaactcggcattcccggtgaggacaacttctggggcaaaggcgtgagcacctgcgccacctgcgacggctttttctataagggcaagaaagtcgtggtgattggcggcggcgacgcagcggtggaagagggaatgttcctgaccaagtttgccgacgaggtgacggtcattcaccgccgcgacacgctgcgagccaacaaggtggcgcaggcccgcgcgttcgccaaccccaagatgaagttcatctgggacaccgccgtcgaggaaatccagggggcggacagcgtgagcggcgtgaaactgcgtaatctcaagaccggcgaagtcagcgagctggcgaccgacggcgtgttcatcttcatcggtcacgtgccgaacaccgcgttcgtcaaggacaccgtgagcctgcgcgacgacggctacgtggacgtgcgcgacgagatttacaccaacatcccgatgctgttcgctgccggggacgtgagcgattacatctaccgccagctcgccaccagcgtgggcgccggcacccgcgccgccatgatgacggagcgccagctcgccgcgctcgaagtggaaggcgaagaggtcacggctgccgactga

SEQ ID NO: 56531 - protein, 325 aa, Deinococcus radiodurans R1
MTAPTAHDYDVVIIGGGPAGLTAAIYTGRAQLSTLILEKGMPGGQIAWSEEVENFPGFPEPIAGMELAQRMHQQAEKFGAKVEMDEVQGVQHDATSHPYPFTVRGYNGEYRAKAVILATGADPRKLGIPGEDNFWGKGVSTCATCDGFFYKGKKVVVIGGGDAAVEEGMFLTKFADEVTVIHRRDTLRANKVAQARAFANPKMKFIWDTAVEEIQGADSVSGVKLRNLKTGEVSELATDGVFIFIGHVPNTAFVKDTVSLRDDGYVDVRDEIYTNIPMLFAAGDVSDYIYRQLATSVGAGTRAAMMTERQLAALEVEGEEVTAAD

SEQ ID NO: 56532 - DNA, 912 bp, Streptococcus pneumoniae TIGR4
  CDS (1)..(912): transl_table=11
atgtacgatactattattatcggtgctggacctgcagggatgactgcggccttgtatgctgctcgaagcaatctaaaagtagctttgattgaaggtggtctgccaggtggtcagatgaataatacatctgatatcgaaaattacccaggatacgctaatattagtggacctgaattggctgaaaagatgtttgaaccacttgaaaatcttggtgttgagcacatttatggttatgttgaaaatgtcgaagaccatggtgattttaagaaagtgatgactgatgaccaaacatatgaaacacgtacagttatcgtagcaactggttctaaacaccgtcctttgggagtgcctggagaagaagaactgaacagtcgtggtgtttcttactgtgctgtgtgtgatggtgctttcttccgtgaccaagatttattggtagttggtggtggagattcagctgttgaagaagccctcttcttgactcgttttgctaagactgttaccattgttcaccgtcgtgaccaacttcgtgcccaaaaggttttacaagatcgcgcctttgcgaatgaaaaaatcagctttatctgggattctgtagtaagggaaatcaagggtgaaaaccgagtagaatcagtcgtatttgaaaatgtgaaaacaggtcaagtgacagaacaagccttcggtggtgtctttatctatgttggtttggaccctcttagcgattttgttaaagaattgaatatccaagatcaggcaggatggattgtgacagataaccacatgaaaactgcagtcgacggtatctttgcagttggagatgttcgcttgaaagaccttcgccaagtaacaacagcggttggagatggagctatcgctggtcaagaagcctataaattcattacagaacatagttaa

SEQ ID NO: 56533 - protein, 303 aa, Streptococcus pneumoniae TIGR4
MYDTIIIGAGPAGMTAALYAARSNLKVALIEGGLPGGQMNNTSDIENYPGYANISGPELAEKMFEPLENLGVEHIYGYVENVEDHGDFKKVMTDDQTYETRTVIVATGSKHRPLGVPGEEELNSRGVSYCAVCDGAFFRDQDLLVVGGGDSAVEEALFLTRFAKTVTIVHRRDQLRAQKVLQDRAFANEKISFIWDSVVREIKGENRVESVVFENVKTGQVTEQAFGGVFIYVGLDPLSDFVKELNIQDQAGWIVTDNHMKTAVDGIFAVGDVRLKDLRQVTTAVGDGAIAGQEAYKFITEHS

SEQ ID NO: 56534 - DNA, 1008 bp, Sulfolobus tokodaii str. 7
  CDS (1)..(1008): transl_table=11
atgcaacaattgaatcaacataatgaaatatatgatgtaatcatagtaggagcaggaattgctgggctaagtgccgctttatatacctcaaggcaaagaatgaaaacgttagttgtctcaaaagatttaggaggacaactaacattaactgatctcatagagaattatcctgtagttgagcctttaagtggacttagtttagcgcgaaaggtagagtcgcaggcaaagaggtttggagctaaattcatctatggagaagaaatatacaagatagataaaaaaggcgatatttttgaacttcaaggtattttaggaagttataaggctaagactgttattttagcgttcggtaagacacctagagaacttaatgtgccgggtgagaaagaatttaaaggtaaaggtgtatcgtattgtgcaatttgtgatgctgcattttttaaagataagccagctgcagttgtaggagaaggagagcctggcgtagaagctatagaacttctttcaaaatatgcaagacctgcttattatatttctatgtctactcagttggttggaggagatgagggcacattaaagtcaatattgaacaatgaaaatataaaaatgtttttaggatataaagtgattagaattattggaaattctaaagttgagggaatagttatacaaaattctaagacaaaagaagataaaattctaaatgtagatggagtaataatagaaatgggttatgttttacgaacagagttcttaaaagattttataaaactcaatgaaaaaggagaaataatagtagatgaattaggaagaactaatgtagaaggaatattcgctgctggtgatgttacaaatactccatacaagcaagctgttgtagctgctgcagaaggagtgaaagctgcactttctgcgtacaactatttaaggagcaagtctggcttacctccagtaaatgttgattggaaagcagaaaaacagaaagctgtagtttcatttaggctctaa

SEQ ID NO: 56535 - protein, 335 aa, Sulfolobus tokodaii str. 7
MQQLNQHNEIYDVIIVGAGIAGLSAALYTSRQRMKTLVVSKDLGGQLTLTDLIENYPVVEPLSGLSLARKVESQAKRFGAKFIYGEEIYKIDKKGDIFELQGILGSYKAKTVILAFGKTPRELNVPGEKEFKGKGVSYCAICDAAFFKDKPAAVVGEGEPGVEAIELLSKYARPAYYISMSTQLVGGDEGTLKSILNNENIKMFLGYKVIRIIGNSKVEGIVIQNSKTKEDKILNVDGVIIEMGYVLRTEFLKDFIKLNEKGEIIVDELGRTNVEGIFAAGDVTNTPYKQAVVAAAEGVKAALSAYNYLRSKSGLPPVNVDWKAEKQKAVVSFRL

SEQ ID NO: 56536 - DNA, 990 bp, Nostoc sp. PCC 7120
  CDS (1)..(990): transl_table=11
atgcaaatatcaaagactaatatttcggaacgtcttgaccatgtttatgatgcaattattgttggtggtggtgctggtggtttatctgctggaatctacttacaaagataccgtctttctagcctaattattgataaaggtaaggcgcgttctttttggatgcaggaattacataactatttagggttgcctccagacactcccggtcgtgtgttgttacaacaagggaaaaaacattatgaatcattggctggagattctttaaccgcctacgttgaagaggttgtggacgaaggtgatacttttgctgtacgagtgaaagttggtcgtcaaaatagtacttactttgtgttgcattctaagtatttgattgcagctagtggcattattgaccatctaccatccttagaaaatatgcagaatgtttttgaatacgctggctataatttgcacgtttgtatggtttgtgatggttatgaaatggtagataaacagtgcggcttttttgcggggagtgaagccagtattgaggaaatggtgtttaatcttagttggtttacaccttacattactatctttactcatggattatttactgtaagtacagaattacgttctaaattacagcagtatggttatcgcttagtggaaacaccaattaagcagtttttaggtcaaagtcatcatatgtcaggtgtggaattggtagatggtacggtagttgagttagaaactggtttaatctcaatgggttctcgctatcacaatacctatttgcaaagaatcgacctagagttaaaagggggtaatctcgtcacagataagatgtgtcgcacctcccacccacgtatttttgccattggcgatctgaaggttggtttaaatcaagtcgtgattgctgctggcgatggtgctttagctgctacacagatttggcgtgatatccgtcgttcctttggtgtacgttgctggcaagagaatctgatttga

SEQ ID NO: 56537 - protein, 329 aa, Nostoc sp. PCC 7120
MQISKTNISERLDHVYDAIIVGGGAGGLSAGIYLQRYRLSSLIIDKGKARSFWMQELHNYLGLPPDTPGRVLLQQGKKHYESLAGDSLTAYVEEVVDEGDTFAVRVKVGRQNSTYFVLHSKYLIAASGIIDHLPSLENMQNVFEYAGYNLHVCMVCDGYEMVDKQCGFFAGSEASIEEMVFNLSWFTPYITIFTHGLFTVSTELRSKLQQYGYRLVETPIKQFLGQSHHMSGVELVDGTVVELETGLISMGSRYHNTYLQRIDLELKGGNLVTDKMCRTSHPRIFAIGDLKVGLNQVVIAAGDGALAATQIWRDIRRSFGVRCWQENLI

SEQ ID NO: 56538 - DNA, 1047 bp, Gloeobacter violaceus PCC 7421
  CDS (1)..(1047): transl_table=11
atgatcctcaagcgcgaacacttcgatgaaaagcaagcccagctctatgatgtgatcatcgccggcggcggcgccggtggtctgtcggcggcggtgtacctggcccgctacaacctcaaagtcctggtgatcgaaaaaggacgcggccgatcgttctggatgcaggatctctggaactatgttccccgggtggttagcggcaaagaactcatcgaaggcggcaaggagatggccctgcactacggggccgactggctcaacggctttgtcgaagcagtcaccgacaccggcgaagaattccaggtgcgcgtcaagtaccgcttcaaaaacagcgactacccggtcttccgcgccaaatacctgatcgccgccaccggtctgatggatgtgctgccgcagctggagaacatgcagaacgtctatgagtacgccgggtacaacctgcacgtctgcttgatctgcgacggctacgagatgaccaaccggcgcgcggccctgatcgcgggcagcgaaaaggcgatcaacaccgccttcgtgctcaactggttcacgccctacatcaccgtgctcaccctgggcgcctatccggtgggggacgaaatgcgcgccaagctcgccgaccacggctatccgctcatcgaaaagccgatcgcccgctttttgggcaaagaccacgtcatggacggcatcgagtttgccgacggcacatcgatcaaagtggatactggcctcatttcgatgggttcgatccgccacgacggctatctcaaaaatctcgatttgctcaccgacggcggcgacatcgtcaccgagtacgactgccgcacttcccacccgcgcgtcttcgcactgggcgatcttaaaaagggtctcaaccaggtgtcgatcgccgtggccgacggcaccctcgccgccaccgccatctggaaggagatccgccgcgccagtgccccgcgcaagtggacagctccgctacaggaagcggctgcccgagcggaggagtcagctcgcccagaaattagccttggagcgccgcggggaggttag

SEQ ID NO: 56539 - protein, 348 aa, Gloeobacter violaceus PCC 7421
MILKREHFDEKQAQLYDVIIAGGGAGGLSAAVYLARYNLKVLVIEKGRGRSFWMQDLWNYVPRVVSGKELIEGGKEMALHYGADWLNGFVEAVTDTGEEFQVRVKYRFKNSDYPVFRAKYLIAATGLMDVLPQLENMQNVYEYAGYNLHVCLICDGYEMTNRRAALIAGSEKAINTAFVLNWFTPYITVLTLGAYPVGDEMRAKLADHGYPLIEKPIARFLGKDHVMDGIEFADGTSIKVDTGLISMGSIRHDGYLKNLDLLTDGGDIVTEYDCRTSHPRVFALGDLKKGLNQVSIAVADGTLAATAIWKEIRRASAPRKWTAPLQEAAARAEESARPEISLGAPRGG

SEQ ID NO: 56540 - DNA, 978 bp, Thermus thermophilus HB27
  CDS (1)..(978): transl_table=11
atggagttcaacctgagcgcactagggagcacccccgccgcggaggaaacctacgatgtggtcatcatcggcggggggcccgcggggcttaccgccgggatctacgccggccgggcccagctcaagacggtcatcgtggagaaggggcttcccggggggcagatcgcccagacggacgaggtggagaactacccgggcttccccgagggcatctccgggccggagctcgcgagccgcatggtgcggcaggcggagaagttcggggcccggatcgtcatggacgaggtcctgggcctggagaaggccgaggggggctacctggtccggggctacgagcggaactaccgcgcccgggcggtgatcgtggccacgggggcgaacccgaggcggcttggggtccccggggaggacaagttttacggccggggggtttccacctgcgccacctgcgacggcttcttctaccgggacaaggaggtggtcgtggtgggtgggggggacgccgccgtggaggaggggatcttcctcaccaagttcgcccgaaaagtgaccctggttcaccgccgggacgagcttagggccaacaaggtggcccagaagcgggccttccagaaccccaagatgcacttcctcttctcccacgtggttaccgagatcctgggggaggaccaggtgacgggggtgcggcttaagaacctaaagacgggggaggagtacgtctaccccacggacggcgtcttcgtcttcatcggccacgagcccaacaccgctttcctcaagggggtggtggagctcaggcccgacgggtacatcgccgtgcgggacgaggtcttcacctcggagcccggcatcttcgccgccggggacgtggccgaccccatctaccgccagctcaccacgagcgtgggggcgggcacccgcgccgccatgatggccgagcgctacctggcggaggaggcggaaaaggtcaagggctag

SEQ ID NO: 56541 - protein, 325 aa, Thermus thermophilus HB27
MEFNLSALGSTPAAEETYDVVIIGGGPAGLTAGIYAGRAQLKTVIVEKGLPGGQIAQTDEVENYPGFPEGISGPELASRMVRQAEKFGARIVMDEVLGLEKAEGGYLVRGYERNYRARAVIVATGANPRRLGVPGEDKFYGRGVSTCATCDGFFYRDKEVVVVGGGDAAVEEGIFLTKFARKVTLVHRRDELRANKVAQKRAFQNPKMHFLFSHVVTEILGEDQVTGVRLKNLKTGEEYVYPTDGVFVFIGHEPNTAFLKGVVELRPDGYIAVRDEVFTSEPGIFAAGDVADPIYRQLTTSVGAGTRAAMMAERYLAEEAEKVKG

SEQ ID NO: 56542 - DNA, 951 bp, Bacillus clausii KSM-K16
  CDS (1)..(951): transl_table=11
atggctgaagagaccatttatgatgtgattattgcaggagcaggaccagctggcatgacagcggctgtgtatacatcccgggccaacttaaatacactcatgcttgagcgtgggatgcctggcgggcaaatggcgaatacggaagacgtggaaaactaccctggttttgaccacattttaggtccggatctttccaataaaatgtttgaacacgccaaaaaatttggcgctgcctatgcgtatggcgacattaaggaaattattgatgaaggcgatacaaaacgggtcattgctggctctaaagaataccgcgccaaggcagtcatcgtttcaacgggagcagaatataaaaaacttggcatccctggcgagcaggaactgagcggcagaggcgtttcctattgcgctgtgtgtgatggtgctttcttcaaagagagggaattgatcgtcgtaggtggcggtgactctgctgttgaagaagctgtctatttaacacggtttgcaaaaaaagtgacaatcgttcacaggcgcgatcaattacgtgcccaaaaaatcttgcaagaccgcgcttttaacaacccgaaagtcgatttcatttggaataaagttgtaacggagattaatgaaaaagacggcaaagtcgggggcgtgacgctaaaagacacgaaaacaggcgaagtctcaaacatggaagctgacggtgtgtttgtatacatcggcatgttgccattaaatgaaagtgttcagaacttagggattacgaatgaggaaggctatattgttacgaatgaggaaatggagacaaaagtgcctggtatatttgcagctggcgatgtacgggaaaaatcgctacggcaaattgtcacagcaacaggcgacggctccattgccgcccaaaatgtccagcattatttagaaaacttgtctgaagctgaaaaagtcgagaaataa

SEQ ID NO: 56543 - protein, 316 aa, Bacillus clausii KSM-K16
MAEETIYDVIIAGAGPAGMTAAVYTSRANLNTLMLERGMPGGQMANTEDVENYPGFDHILGPDLSNKMFEHAKKFGAAYAYGDIKEIIDEGDTKRVIAGSKEYRAKAVIVSTGAEYKKLGIPGEQELSGRGVSYCAVCDGAFFKERELIVVGGGDSAVEEAVYLTRFAKKVTIVHRRDQLRAQKILQDRAFNNPKVDFIWNKVVTEINEKDGKVGGVTLKDTKTGEVSNMEADGVFVYIGMLPLNESVQNLGITNEEGYIVTNEEMETKVPGIFAAGDVREKSLRQIVTATGDGSIAAQNVQHYLENLSEAEKVEK

SEQ ID NO: 56544 - DNA, 999 bp, Anabaena variabilis ATCC 29413
  CDS (1)..(999): transl_table=11
atgcaaatatcaaagattaatatttcggaacgtcttgaccatgtttatgatgcaattattgttggtggtggtgctggtggtttatctgctggaatctacttacaaagataccgtctttctagcctaattattgataaaggtaaggctcgttctttctggatgcaggaattacataactatctaggattgcctccagacactcccggtcgtgtgttgctacaacaagggaaaaaacattatgaatcattggctggagattttttaactgcttacgttgaagaggttgtggacgaaggtgatacttttgctgtgcgagtgaaagttggtcgtcaaaatagtacttactttgtgttgcattctaagtatttgattgcggctagtggcattattgaccatctaccatctttagaaaatatgcagaatgtttttgaatacgctggctataatttgcacgtttgtatggtttgtgacggttatgaaatgatagataaacagtgcggcttttttgcaggtagtgaagctagtattgaggaaatggtgtttaatctgagttggtttacaccttacattactatctttactcatggattgtttactgtaagtacagaattgcgttctaaattacagcagtatggttatcgcttagtggaaacaccaattaagcggtttttaggtcagaatcatcatatgtcaggtgtggaattggtagatggtacggtagttgagttagaaactggtttaatctcaatgggttctcgctatcacaatacctatttgcaaagaatcgacttagagttaaaagggggtaatctcgtcacagataagatgtgtcgcacctcccacccacgtatttttgccattggtgatctgaaagttggtttaaatcaagtcgtgattgctgctggcgatggtgctttagctgctacacagatttggcgtgatatccgtcgttcctttggtgtacgttgctggcaagagaatctgatatcaaatatttag

SEQ ID NO: 56545 - protein, 332 aa, Anabaena variabilis ATCC 29413
MQISKINISERLDHVYDAIIVGGGAGGLSAGIYLQRYRLSSLIIDKGKARSFWMQELHNYLGLPPDTPGRVLLQQGKKHYESLAGDFLTAYVEEVVDEGDTFAVRVKVGRQNSTYFVLHSKYLIAASGIIDHLPSLENMQNVFEYAGYNLHVCMVCDGYEMIDKQCGFFAGSEASIEEMVFNLSWFTPYITIFTHGLFTVSTELRSKLQQYGYRLVETPIKRFLGQNHHMSGVELVDGTVVELETGLISMGSRYHNTYLQRIDLELKGGNLVTDKMCRTSHPRIFAIGDLKVGLNQVVIAAGDGALAATQIWRDIRRSFGVRCWQENLISNI

SEQ ID NO: 56546 - DNA, 942 bp, Novosphingobium aromaticivorans DSM 12444
  CDS (1)..(942): transl_table=11
atgcaaccaaacctcgactgcctcatcattggcggcggccctgctgggctgaccgccgcaatatatctcgcgcgatttcatttgcgcattgccgtggtcgatgccggaggaggccgcgccgcgatgatcccccggacgcgcaaccattccggctttcccggcggaatctcgggcagggatctgctggcgcgcatggaagaacaggcggcggagttcggcgtggtggtcgagcagacgaccgtcgaagcgattgacagggtcgatggcgcctttcgtgccgtggcgcagggtcgggaatggatcgcgcaaacggtgctcgttgcaacgggcgtgatcaacaaccgccccccgatcttgccagaggtccatgatcgggcccttcagcaggggctgcttcgctattgtccgatctgcgacggttacgaagtgaccgaccgcgacgtcggggtaataggaaccggcgatcacggccgcggggaagccctgttcctgcgcgcttacacggccaacatcacgctgattgcgcccgatggtccccatgatctggacgcagaggcccgcagggaactggaagatgttggcgtgcggctcatcgatggcccttgccatgcgctccggatcgacggtggaaatatctttgcttcgaccccagtggcagagcttggtttccatacgatctaccccgctttgggttcaaaaatctgttccgatttggcacgatcgcttggggcggaggcgagcgaagacggttgcctggttatcgaccggcaccagcggacgagcatcgaggggctctacgcagcgggtgacgtgaccaagggactggaccagataagccacgcgatgggcgaagcggcagttgctgcaacggcgatccgcaacgatctgcgcgcacgccgtccgttattgcgcaggcgtgccgcgcccctgacaacggactga

SEQ ID NO: 56547 - protein, 313 aa, Novosphingobium aromaticivorans DSM 12444
MQPNLDCLIIGGGPAGLTAAIYLARFHLRIAVVDAGGGRAAMIPRTRNHSGFPGGISGRDLLARMEEQAAEFGVVVEQTTVEAIDRVDGAFRAVAQGREWIAQTVLVATGVINNRPPILPEVHDRALQQGLLRYCPICDGYEVTDRDVGVIGTGDHGRGEALFLRAYTANITLIAPDGPHDLDAEARRELEDVGVRLIDGPCHALRIDGGNIFASTPVAELGFHTIYPALGSKICSDLARSLGAEASEDGCLVIDRHQRTSIEGLYAAGDVTKGLDQISHAMGEAAVAATAIRNDLRARRPLLRRRAAPLTTD

SEQ ID NO: 56548 - DNA, 1917 bp, Bifidobacterium longum DJO10A
  CDS (1)..(1917): transl_table=11
atgactcagaccaacaatctctatgacgtcgtcgtcattggtggcgggcctgctggcctgacggccggcctgtacctggcccgcgctcgctaccgcgtgctgattctcgaaaaggacgatttcggcggccagatcaccatcaccaacgaagtcgtcaactatccgggcgtgggccgcaccacgggccgcgcactcacccagaccatgcgccagcaggctcaggacttcggtgccgaattcctctccgccgaagccaccggtctcgacgtggatggtgacatcaaaaccgtgcacacctcacgcggcgacctcaagaccttcggcatcctcatcgccaccggcgccagcccgcgcaagctgggcttcgagggcgaggccgagtacgccggccgcggcgtggcctactgcgccacctgcgacggcgagttcttcaccggcaaggaagtactggtggtcggcggcggattcgccgcagccgaggaatccgtgttcctgaccaaatacgcctccaaagtcaccgtgctcgtgcgcgaaccggacttcacctgcgatgccgcagtggccgccgaagccaagaacaacccgaagatcgacgtgcgttatcaggtcgagctgaagggcgtcaccgccggccaaggaggcctgcgagaagcctcaatcctgaaccttgccaccggccagaccgaaacgtggaagcccgccgacgccggcaccttcggcgtcttcgtgttcgccggctatgtgcccgccaccgatttggtgcgcggcgtggtggagctcgacgaccacggttacgtggtcacgcacgactacctcagaacctcggtgccgggcgtgtacgcggccggcgatctgcgcgtcaagaacctgcgccaagtggtcaccgccaccgccgacggtgcgattgccgccgtggaactggagcgttacgccaagcagatgagcgagaaaaccggcttggtgccgccgcgtcccactgcttccgcttatgaggagtccgaggccaaggccgcctccgccgcctcggccgctggcacgacgcccgccccggctcccgccaaacgcagcgccgatgccgcagccgcagccagcgccgccaagaagcccggcgaactgttctccgccgccgtcaagcagcagcttggcgtggtcttcggacgcatgacccgcccggtcacgctcgctctcgagctggacggcactccgctttcggcggaattgcagggtttcatcggcgagatggttgcgctgtccggcggcaagctgaactcggttgccgttgatgccgcagggctgatcacggcggtggatggtgcttctgtgcctacttctttggtggtcggcgaaccgctgtccgtcaccttgccggacggcaccgaactgcccacttatggttcgttggacgattccggccgcgccacattcgacgtcgccggcgtcctgccgctcgcccgtccgaccgtgcgcatctgcgtgccggctgagggcgacggcaaggccggcaaggacggcaatggttcactggtcttcaccggtctggccttccacggcgtaccttccggccatgagttcaactcgttcgtgctcggcctgtacaacgtggccggtcccggccagccgctgggcgacgacctgatcgaacgcgcgaagtccatcacagacccgctgaacatcatgatcctcgtctcgctcacctgcacgatgtgtccggaaaccgtgcttgcttcccagcgcattgcctccctgagcccggccgtgcgcgccgaagcctacgacgtctcgcacttccccgaactcaaggaccagtacggcgcgatgagcgtgccctgcatcgtcatcacccacgccgacggcacccagcaagttgaattcggcaaaaagagcatcccccaaatgctcgaactggtcggcgcgtaa

SEQ ID NO: 56549 - protein, 638 aa, Bifidobacterium longum DJO10A
MTQTNNLYDVVVIGGGPAGLTAGLYLARARYRVLILEKDDFGGQITITNEVVNYPGVGRTTGRALTQTMRQQAQDFGAEFLSAEATGLDVDGDIKTVHTSRGDLKTFGILIATGASPRKLGFEGEAEYAGRGVAYCATCDGEFFTGKEVLVVGGGFAAAEESVFLTKYASKVTVLVREPDFTCDAAVAAEAKNNPKIDVRYQVELKGVTAGQGGLREASILNLATGQTETWKPADAGTFGVFVFAGYVPATDLVRGVVELDDHGYVVTHDYLRTSVPGVYAAGDLRVKNLRQVVTATADGAIAAVELERYAKQMSEKTGLVPPRPTASAYEESEAKAASAASAAGTTPAPAPAKRSADAAAAASAAKKPGELFSAAVKQQLGVVFGRMTRPVTLALELDGTPLSAELQGFIGEMVALSGGKLNSVAVDAAGLITAVDGASVPTSLVVGEPLSVTLPDGTELPTYGSLDDSGRATFDVAGVLPLARPTVRICVPAEGDGKAGKDGNGSLVFTGLAFHGVPSGHEFNSFVLGLYNVAGPGQPLGDDLIERAKSITDPLNIMILVSLTCTMCPETVLASQRIASLSPAVRAEAYDVSHFPELKDQYGAMSVPCIVITHADGTQQVEFGKKSIPQMLELVGA

SEQ ID NO: 56550 - DNA, 1017 bp, Fusobacterium nucleatum subsp. vincentii ATCC 49256
  CDS (1)..(1017): transl_table=11
atggaaagaatttatgatatgatagttattggtggaggacctgctggtctatctgctggaatatatggtggaagagcaaaattagatgttttaattatagaaaaagaaaataaaggtgggcaaattagtcttacaagtgaagttgtaaactatcctggaatattagaaatttctggaagtgaatttatgactcaaactaaaaaacaagcacaaaattttggagttaattttgttcaagaagaagttgttgatatggatttttcacaaaaaataaaaactattaaaactaataaggcagaatacaaaactcttagtgttgtcattgcaacaggagctgcgccaagaaaattaggtttccctggtgaacaagaatttacaggaagaggagttgcttactgtgctacttgtgatggagaattcttcacaggtatggatatatttgttataggagcaggttttgcagcagcagaagaagcaatgtttttaacaaaatatggaaaatctgtaacaattatagcaagagaaccagattttacttgtgctaaatcaataggagataaagtaaaagctcacccaaaaattacagttaaatttaatactgaattaatagaattaactggagatgttaaaccaacagctgctaaatttaaaaataatgtaacaggagaaatcactgaatataaagcaaaagttggagaaacatttggactatttgtatttgttggatatgcaccttcaagtgaaatattcaaaggacatatagaaatagatagagcaggttttatccctactaatgaagatttaatgactaatattgatggagtatttgcagtaggggatattagacctaaaagattaagacaagttgtaacagctgtcgctgatggagctattgcagctacaagtatagaaaaatatgttcatgacttaagagaagaattaggaatcaagaaagaagaaaaagaagaagaaaagacaacttctgttactactgaaaaagaaacatttcttagatga

SEQ ID NO: 56551 - protein, 338 aa, Fusobacterium nucleatum subsp. vincentii ATCC 49256
MERIYDMIVIGGGPAGLSAGIYGGRAKLDVLIIEKENKGGQISLTSEVVNYPGILEISGSEFMTQTKKQAQNFGVNFVQEEVVDMDFSQKIKTIKTNKAEYKTLSVVIATGAAPRKLGFPGEQEFTGRGVAYCATCDGEFFTGMDIFVIGAGFAAAEEAMFLTKYGKSVTIIAREPDFTCAKSIGDKVKAHPKITVKFNTELIELTGDVKPTAAKFKNNVTGEITEYKAKVGETFGLFVFVGYAPSSEIFKGHIEIDRAGFIPTNEDLMTNIDGVFAVGDIRPKRLRQVVTAVADGAIAATSIEKYVHDLREELGIKKEEKEEEKTTSVTTEKETFLR

SEQ ID NO: 56552 - DNA, 1002 bp, Aspergillus niger
  CDS (1)..(1002)
atggccaccacagccgacgtgctcatcatcggaggcggtcccgcgggcctcgccacggccctggcgctatcccgcaagctccattcggtacttctgttcgacagtcaggagtatcgcaaccgccagacgtcccatatgcacaatgtcctcggatttgatcatgtggaacctgcacgtttccgctccgccatccacgacaccctcttgcatcgatacaccaccaataccatcatcaacaagaaaatcacccaagcgcgcaagctaccccacgacggggtaggaacacgcttcgaaattactgatgaagatggaactgcatatcagggctcaaaacttgttctcgctacgggaatacgcgacatcatgcctgccattgaggggtacgctgggaactggggccagctcatcttccactgcctgttctgccatgggtatgaagagcgtggcgcaccgaatgcaggcctacttgtagcagagagctcacaactacacgccaatccctctgtgggcctgatcctcgggcagatggttcgtcgtttcgccgaggaagtaacattattcacacatggcaatgaagagactacggtcgccctacagcaggccggtgcggaagcgcgaggatttactattgaatctcgcccgatttgttcatttgaacgagttgtgtcggctgctgaggattcgcgagacatcctgcgagtctggctgggacagccagacggaagtgatattcctaacagctatgtagatatgggatttctcacgcatatgccggatacagtcgtgacaaatgattggagcagccagctgggactggagctggatgaaagtgggatttataagcaaaaggatgtcacgatggagaccacggtgccgggggtgtttgtggcgggggatcatgcctccgtggcgaaggacgttcccaatgctgctagcaatgccacgtttgtggcttcagcagttgcggtgcagttgacgatggagcactctcagggacagtag

SEQ ID NO: 56553 - protein, 333 aa, Aspergillus niger
MATTADVLIIGGGPAGLATALALSRKLHSVLLFDSQEYRNRQTSHMHNVLGFDHVEPARFRSAIHDTLLHRYTTNTIINKKITQARKLPHDGVGTRFEITDEDGTAYQGSKLVLATGIRDIMPAIEGYAGNWGQLIFHCLFCHGYEERGAPNAGLLVAESSQLHANPSVGLILGQMVRRFAEEVTLFTHGNEETTVALQQAGAEARGFTIESRPICSFERVVSAAEDSRDILRVWLGQPDGSDIPNSYVDMGFLTHMPDTVVTNDWSSQLGLELDESGIYKQKDVTMETTVPGVFVAGDHASVAKDVPNAASNATFVASAVAVQLTMEHSQGQ

SEQ ID NO: 56554 - DNA, 1020 bp, Emericella nidulans
  CDS (1)..(1020)
atggttcactccaaagtagttatcatcggctccggccccgccgctcacaccgccgccatctacctttcgcgggcggaactcaagcctgtcctttacgagggtatgctggccaatggcaccgcagccggtggccagcttaccacgaccactgatgtcgagaactttcccggttttccggacggaattggtggctccgagctgatggacgccatgcgcaagcaatccatccgcttcgggactgaggtcatcaccgagactatctcccgtgtcgacctttcacagaggcccttcaagctgtggactgagtggaacgacggtcccgacaacgagcctgcccgcaccgctgatgctgtcatcattgccactggtgccaatgcccgccgtctcaaccttcctggtgaggatgtatactggcagaacggtatcagcgcctgcgctgtctgcgatggtgccgtgcccatcttccgcaacaagcccctcttcgtcatcggcggtggtgattccgccgctgaggaggccatcttcctcaccaagtacggtagcagcgttaccgtgcttgtccgccgcgacaagctccgcgcttccaaggccatggccagccgcctcttggctaaccccaaggttaccgtccgcttcaacaccgttgctaccgaggttcttggtgagaagaagctcaacggcctgatgacccacctccgcgtgaagaatgtccttactggcgaggaagagaccctagaggctaacggtcttttctacgccgtcggccatgaccccgccactgctcttgtcaagggccaggtcgaactcgatgaggacggatacatcgctaccaagcccggtaccagctttaccagcgttgagggtgtttttgcttgcggtgacgtccaggacaagcgctaccgccaggccatcaccagtgcgggatctggttgcattgctgctctcgaggctgagcgattcatcggcgagtccgagtcaaacgaagagataccccctgctcacgctaaccccgctctgtaa

SEQ ID NO: 56555 - protein, 339 aa, Emericella nidulans
MVHSKVVIIGSGPAAHTAAIYLSRAELKPVLYEGMLANGTAAGGQLTTTTDVENFPGFPDGIGGSELMDAMRKQSIRFGTEVITETISRVDLSQRPFKLWTEWNDGPDNEPARTADAVIIATGANARRLNLPGEDVYWQNGISACAVCDGAVPIFRNKPLFVIGGGDSAAEEAIFLTKYGSSVTVLVRRDKLRASKAMASRLLANPKVTVRFNTVATEVLGEKKLNGLMTHLRVKNVLTGEEETLEANGLFYAVGHDPATALVKGQVELDEDGYIATKPGTSFTSVEGVFACGDVQDKRYRQAITSAGSGCIAALEAERFIGESESNEEIPPAHANPAL

SEQ ID NO: 56556 - DNA, 1155 bp, Aspergillus oryzae
  CDS (1)..(1155)
atggctcctaagtctcttttctacactcttttctcctccctcaccgttgccctcgcggcatccgtccctcaaaccgactatgaagtgatcgtcgtgggaggcggtcccgctggtctcactgcgcttagcggtttatcccgtgtaagacgcaagacggctctcttcgactcccatgagtatcgcaacgctgctacgcggaacatgcacgatgtgatcggcaatgatggcaccgtacccagtgaattccgcggtctggcccgcgagcagatctcccggtacgacaccgcaaccttcatcgacaagagagtcaacacaattgagactgtctctgatgaggccacgaacacctcatacttccgggcccaagacgccgatggcaaggcgtacaccgcccgcaaagtcgtcctgggcacgggtctcgtagacattctccccgacgtaccgggtctgcaggaagcctggggcaagggcgtgtactggtgcccgtggtgcgatggatatgagcaccgggaccagccattcggtatcctgggtgcgctcccggatgtcgtcggcagcgtgttggaagtatacaccctgaacacggatatcattgctttcgtgaacggtacgcagacgccggaccaggaggccgaattggcgaagaaataccccaactgggaggcccagctggaggcgtacaatgtgcgcctggagaacgaaacaattgcgtccttcgagcgcatccaggatggcagctgggtgaaggacaggaacggtaccagacagattgatattttccgtgttcatttcaccaatggctcgtcggttgatcgtaatgccttcattaccaactaccccagtgagcagcggtcggatcttcccaaacagctgggtctggcgatgctcggtaacaagattgatgccactacgaaccctggtatgaggactagcctgcctggtgtctgggctattggcgactgcaacagcgataatagcaccaatgtgcctcacgctatgttcagtggcaagaaggctgctgtatttgctcatgtcgaaatggctaaggaggagtctaacacggccattgacaagcgtgatgactttgtgaaggaggttgaaaagcgtatgggcaatgatatggagaagatctataatcggtctagaggcctgtga

SEQ ID NO: 56557 - protein, 384 aa, Aspergillus oryzae
MAPKSLFYTLFSSLTVALAASVPQTDYEVIVVGGGPAGLTALSGLSRVRRKTALFDSHEYRNAATRNMHDVIGNDGTVPSEFRGLAREQISRYDTATFIDKRVNTIETVSDEATNTSYFRAQDADGKAYTARKVVLGTGLVDILPDVPGLQEAWGKGVYWCPWCDGYEHRDQPFGILGALPDVVGSVLEVYTLNTDIIAFVNGTQTPDQEAELAKKYPNWEAQLEAYNVRLENETIASFERIQDGSWVKDRNGTRQIDIFRVHFTNGSSVDRNAFITNYPSEQRSDLPKQLGLAMLGNKIDATTNPGMRTSLPGVWAIGDCNSDNSTNVPHAMFSGKKAAVFAHVEMAKEESNTAIDKRDDFVKEVEKRMGNDMEKIYNRSRGL

SEQ ID NO: 56558 - DNA, 1032 bp, Cryptococcus neoformans var
  CDS (1)..(1032)
atgcactccaaggttgttatcatcggctctggtcccggtggtcacaccgccgccatctacttggcccgagccaacctcgagcctgtcctctacgagggtatgcttgccaacggtttcgcccctggcggtcaactcaccaccactactgacgtcgagaacttccctggtttccccgaaggcgttaccggtaccgaaatgatggataagttccgagctcagagtgagcgattcggcaccaagatcatcaccgagactgttgcgcgtgtcgacctctctgtccgacctttcaagtactggactgagggtgaggaggaggaacacgagttcatgaccgccgatactatcatcctggctaccggtgcttctgccaagcgacttttccttcctggtgaggagacctattggcagtctggtatctctgcctgtgccgtttgcgacggtgccgtccccatcttcaggcaaaagccccttgccgttattggtggtggtgacagtgctgccgaggaagctacttacctcaccaagtacggttctcacgtttacgtcctcgtcagaagagacgagctccgagcttccaagattatggctaagcgactcacttctcaccccaaggttaccgtcctttggaacactgttgctactgaggccaagggtgacggtgaagtcctcacatcacttaccatcaagaacaccaagactggtgagaccggagacctccccgtcaacggtcttttctatgctatcggccacgagcccgccacttccctcgtcaagtctcaagtcgagcttgacagcgatggatacatcaagactgttcccggtacctcccagacttctgtccatggtgtcttcgccgccggtgacgtacaggacaagaagtacaggcaggctatcacatctgctggttccggttgtattgctgcccttgaggctgaaaggcttatcagcgaggaggaggctgatgacgagagcctccagaccgaagatgtgcatgtccctgccgagcactacttgggcactgacaaggagtaa

SEQ ID NO: 56559 - protein, 343 aa, Cryptococcus neoformans var
MHSKVVIIGSGPGGHTAAIYLARANLEPVLYEGMLANGFAPGGQLTTTTDVENFPGFPEGVTGTEMMDKFRAQSERFGTKIITETVARVDLSVRPFKYWTEGEEEEHEFMTADTIILATGASAKRLFLPGEETYWQSGISACAVCDGAVPIFRQKPLAVIGGGDSAAEEATYLTKYGSHVYVLVRRDELRASKIMAKRLTSHPKVTVLWNTVATEAKGDGEVLTSLTIKNTKTGETGDLPVNGLFYAIGHEPATSLVKSQVELDSDGYIKTVPGTSQTSVHGVFAAGDVQDKKYRQAITSAGSGCIAALEAERLISEEEADDESLQTEDVHVPAEHYLGTDKE

SEQ ID NO: 56560 - DNA, 984 bp, Leptosphaeria maculans
  CDS (1)..(984)
atggcgacttgccccagcatcttcgacgccctggtcattggagccggtcccgctggcctgtctgcggcattggcgctgggacgggtgatgcgaacggcagccatcttcgacactggtgtctttcgaaatgcacctgcaaatcacatgcatacagtgcccacgtgggatcaccagagccccgttgcctaccggcagcagtgcatcaccgagttgcgccagcgttacaatggcaccatccatttcgccaatactggagtcgcctcggtcaaggctggcaaagacagcgactacgtcgtcaccgatgaggcaggcaagacgtggatgggccgaaaagtcatcttggccacgggtgtcaaggacgtgatgccagatgtcaaaggctatgcccaagcatggggccggtacatcttccactgcctcttctgccatggtttcgaacagcgcgggtcagagtcggccggattgctggtcctggacaagacgattctgtcgacggagattgaaatcgccgtccactttggccacctcgccctgcaatttgccaagaagattaccgttttcctagacggccatgttgaattcctagaagatccccgtatcaagggtctggaggcccaaggtttcctcatcaaccccaagcccatttccaaaatcacctatgctgcagatccagagccaggcttcgctaccgtccacctggaagacggaagcgaagaaaacatgtcctttttggttcatcgtccaaggacactacttgccggagactttgccaaccagctgggattggaattaactgaagccggtgacgtcaagaccactcctcccttctacgagacgagcgtcaagggcgtctttgcagccggtgactgtgctgtgccattgaagcaggtcgtctgggcggtgtcgacaggcgtcagtgctggctctggcgtaaacttccagtgcttgggggccgacatggcggcacggtcgaagctctcatga

SEQ ID NO: 56561 - protein, 327 aa, Leptosphaeria maculans
MATCPSIFDALVIGAGPAGLSAALALGRVMRTAAIFDTGVFRNAPANHMHTVPTWDHQSPVAYRQQCITELRQRYNGTIHFANTGVASVKAGKDSDYVVTDEAGKTWMGRKVILATGVKDVMPDVKGYAQAWGRYIFHCLFCHGFEQRGSESAGLLVLDKTILSTEIEIAVHFGHLALQFAKKITVFLDGHVEFLEDPRIKGLEAQGFLINPKPISKITYAADPEPGFATVHLEDGSEENMSFLVHRPRTLLAGDFANQLGLELTEAGDVKTTPPFYETSVKGVFAAGDCAVPLKQVVWAVSTGVSAGSGVNFQCLGADMAARSKLS

SEQ ID NO: 56562 - DNA, 1590 bp, Arabidopsis thaliana
  CDS (1)..(1590)
atggctgcgtctcccaagataggcatcggtattgcctccgtctcatcgcctcaccgtgtctccgccgcctcatccgctctttctcctcctcctcatctcttctttctcactactactactaccacacgtcacggcggctcctatctcctccgtcaaccaacccgaactcgctcttctgattccctccgcctcagagtctccgccaccgccaattctccgtcttcttcttcttcaggaggcgagattatcgagaatgtagtgattataggctccggtcccgccggttatacggcggcgatatatgcagcgcgcgccaatttgaagccggtggtttttgaagggtatcagatgggcggagttcccggtggacagttgatgacaactactgaagttgagaattttccgggattcccagacggtatcacgggtcccgatttaatggagaaaatgagaaagcaagcagagaggtggggagcagagttgtatccagaagatgttgaatctcttagtgtcacaactgctccttttactgtgcaaactagtgaacgtaaggtcaagtgccatagtattatatatgccactggcgctacagcaaggaggttaaggttacctcgagaggaagaattctggagtagggggataagtgcttgtgctatctgtgatggagcttcgcctttatttaaggggcaagtacttgccgtggttggaggaggagatacggctacagaggaagccttgtatctcacgaaatatgcccgtcatgttcatttgcttgttcgcagagatcagttgagagcttccaaggctatgcaagatagagtgatcaacaatccaaacatcacagtgcattacaacacggaaaccgtggacgtattgagcaacaccaagggacagatgtctggcattctactcagaagacttgatacgggtgaagaaactgagctggaggcaaaaggattgttttatggaatagggcattcgccaaacagtcagttattggaaggccaagtcgaactcgacagctccgggtacgtcttggttcgggaaggaacatcaaatacatcagttgaaggtgtatttgctgcaggagatgtgcaggaccacgaatggagacaagctgtaactgctgctggatcaggatgcatagctgctttgtcagccgagagatacctcacaagtaacaatcttcttgttaaatttcaccagcctcaaactgaagaggccaagaaagaattcacacaacgggatgtccaagaaaagtttgacatcactcttacaaagcacaagggacagtatgctcttagaaaactataccatgagagtccaagagttatattggtactatacacttcaccaacatgtggcccctgtaggactctgaagcctattttgaacaaggtggtcgatgagtataaccatgatgtgcattttgttgagattgacatcgaggaagatcaagaaattgctgaagcagctggaattatgggaaccccatgtgtgcagttcttcaagaacaaggaaatgctcaggactatatcgggtgtgaagatgaagaaagagtaccgagaattcattgaggccaataaatga

SEQ ID NO: 56563 - protein, 529 aa, Arabidopsis thaliana
MAASPKIGIGIASVSSPHRVSAASSALSPPPHLFFLTTTTTTRHGGSYLLRQPTRTRSSDSLRLRVSATANSPSSSSSGGEIIENVVIIGSGPAGYTAAIYAARANLKPVVFEGYQMGGVPGGQLMTTTEVENFPGFPDGITGPDLMEKMRKQAERWGAELYPEDVESLSVTTAPFTVQTSERKVKCHSIIYATGATARRLRLPREEEFWSRGISACAICDGASPLFKGQVLAVVGGGDTATEEALYLTKYARHVHLLVRRDQLRASKAMQDRVINNPNITVHYNTETVDVLSNTKGQMSGILLRRLDTGEETELEAKGLFYGIGHSPNSQLLEGQVELDSSGYVLVREGTSNTSVEGVFAAGDVQDHEWRQAVTAAGSGCIAALSAERYLTSNNLLVKFHQPQTEEAKKEFTQRDVQEKFDITLTKHKGQYALRKLYHESPRVILVLYTSPTCGPCRTLKPILNKVVDEYNHDVHFVEIDIEEDQEIAEAAGIMGTPCVQFFKNKEMLRTISGVKMKKEYREFIEANK

SEQ ID NO: 56564 - DNA, 1005 bp, Neurospora crassa
  CDS (1)..(1005)
atgcacagcaaagtagtcatcatcggctctgggccggccgcccacactgccgccatctacctggcccgcgccgagctgaagcctgtactctacgagggcttcatggccaatggtatcgccgccggtggccagctcaccaccacgaccgagatcgagaactttcccggtttccccgatggcatcatgggccaggagctgatggacaagatgaaggctcagtctgagcgtttcggcacccaaattatcagcgagaccgttgccaaggtcgacctctctgcgcgccccttcaagtacgctaccgagtggtcccccgaggagtaccacactgccgactccatcatcctggccaccggcgcctctgcccgcagacttcatctccccggagaggagaagtactggcagaacggtatctctgcctgcgccgtttgcgatggtgccgttcctattttccgcaacaagcacctcgttgtcattggtggtggcgactccgctgctgaggaggccatgtacctcaccaagtatggcagccacgttaccgtgttggttcgcaaggacaagttgagggccagcagcatcatggcccataggttgttgaaccacgagaaggtcactgtcaggttcaacaccgtcggtgtcgaggtcaagggtgacgacaagggtctcatgagccacctggtcgtcaaggatgttaccactggcaaggaggagactcttgaggccaacggtcttttctatgccatcggtcacgatcctgctaccgccctcgtcaagggccagcttgagactgacgccgatggctatgttgtcaccaagcctggcactacccttaccagcgttgagggtgtctttgctgctggtgatgttcaggataagaggtacagacaggctatcaccagtgccggtaccggctgcatggctgccctcgatgccgagaagtttttgtcggagcacgaggaaacccccgccgaacaccgcgacaccagcgccgtacagggcaacctctag

SEQ ID NO: 56565 - protein, 334 aa, Neurospora crassa
MHSKVVIIGSGPAAHTAAIYLARAELKPVLYEGFMANGIAAGGQLTTTTEIENFPGFPDGIMGQELMDKMKAQSERFGTQIISETVAKVDLSARPFKYATEWSPEEYHTADSIILATGASARRLHLPGEEKYWQNGISACAVCDGAVPIFRNKHLVVIGGGDSAAEEAMYLTKYGSHVTVLVRKDKLRASSIMAHRLLNHEKVTVRFNTVGVEVKGDDKGLMSHLVVKDVTTGKEETLEANGLFYAIGHDPATALVKGQLETDADGYVVTKPGTTLTSVEGVFAAGDVQDKRYRQAITSAGTGCMAALDAEKFLSEHEETPAEHRDTSAVQGNL

SEQ ID NO: 56566 - DNA, 924 bp, Treponema pallidum
  CDS (1)..(924): transl_table=11
atggagacagattacgacgttatcatcgtaggcgctggggccgcgggactgtccgcagcgcagtacgcatgtcgcgccaatctcaggacccttgtgattgagagcaaggcacacggtggtcaagcattgcttattgattcgttggaaaactatccgggttatgcaactcctatcagtggcttcgagtacgcggaaaacatgaaaaagcaggcagttgcctttggggctcagattgcttacgaagaagttaccactatcggtaagcgcgatagcgttttccacattaccacgggtacgggagcatatacggcgatgtctgttattcttgccaccggtgcagagcatcgcaagatgggcatcccgggggagagtgagtttttaggccgtggcgtttcctattgtgccacctgcgatggacccttctttagaaacaagcacgtggtggtcattggtgggggtgacgctgcgtgtgatgaatcgctagtactgtctcgcctcaccgatcgggtgacgatgattcaccgcagggacactctgcgtgcacagaaggccattgcagagcgcacacttaaaaatccacatattgccgttcaatggaacactacgcttgaagcggtacgtggtgaaacgaaagtttcctccgttctgcttaaggatgttaagacgggagaaacgcgagagctcgcgtgtgatgctgttttcttcttcatcggtatggttcccatcaccggtcttttgcccgacgcagaaaaggattccaccggttatatcgtcaccgacgacgagatgcgtacctctgtagaggggattttcgctgcgggggatgtgcgcgctaagtctttccggcaggttattactgctacttcggatggtgcccttgccgcgcacgccgccgcgagttacatcgacacactccaaaactaa

SEQ ID NO: 56567 - protein, 307 aa, Treponema pallidum
METDYDVIIVGAGAAGLSAAQYACRANLRTLVIESKAHGGQALLIDSLENYPGYATPISGFEYAENMKKQAVAFGAQIAYEEVTTIGKRDSVFHITTGTGAYTAMSVILATGAEHRKMGIPGESEFLGRGVSYCATCDGPFFRNKHVVVIGGGDAACDESLVLSRLTDRVTMIHRRDTLRAQKAIAERTLKNPHIAVQWNTTLEAVRGETKVSSVLLKDVKTGETRELACDAVFFFIGMVPITGLLPDAEKDSTGYIVTDDEMRTSVEGIFAAGDVRAKSFRQVITATSDGALAAHAAASYIDTLQN

SEQ ID NO: 56568 - DNA, 1548 bp, Oryza sativa
  CDS (1)..(1548)
atggcggtcacgcgcctcgccgtggccgccgccctctcggccgcgccgccgtcctcccgccgccgcagggccttcttccatcactcctgccgcccgctcccttcgtcggcggcggcggcggccaaggcgttgcgcgcgtcggctgcccccgccgtcgacgaggaggcccccgcatccccgcctccatcagatcttggcaagggagtggagaacttggtgatcataggctctggcccggcggggtacactgccgcgatttacgccgctcgggcgaacctcaagcccgtcgtgttcgaaggctaccaggttggtggcgttcctggtgggcagctgatgaccaccaccgaggtggagaatttccctgggtttccggatggcgtcactgggcctgatctcatggacaaaatgcggaagcaagcggagcggtggggtgctgagcttcaccaggaggatgttgagtttgtgaatgtgaagagcagaccgtttgttattcgtagcagtgatcgtgaggtgaaatgccatagtgtaatcattgctactggtgctgctgctaagcgccttcgattacctcgtgaagatgaattttggagtagaggtatcagtgcatgtgcaatatgtgatggagcatccccactatttaagggtcaagttcttgcagttgttggaggtggtgatacagctacagaggaagctatatatttgaccaaatatgcacgtcacgttcatttacttgttcgaaaggatcagctacgagcatccaaagctatgcaggaccgagtactcaacaatcccaacataacagtacatttcaatacagaagctgtggatgttgtcagcaatcccaaaggccagatgtctggtattcaactgaagagaaccgacacgggagaggaatcagttcttgaggtgaaaggtctattctatggcataggacacactccaaacagtcagttgttacaaggtcaaattgatcttgacgatgctggttatattttggttgaagaaggcacagcaaaaacatcagttgatggtgtatttgctgctggtgatgtgcaggatcatgaatggaggcaagccgttactgcagctggatccggatgtgtagccgctttgtcggtggaaagatacttagttgccaacgaccttcttgttgaatttcaccagcctgttcgcgaagaaaaggagaaggagattacagatagagatgtcgagatgggctttgacatttctcacacaaagcataggggacagtatgcactccgcaaagtatatcatgaaagtccaaggcttgtctgtgttctatatacttctccaacatgtggtccttgcagaaccttaaagccaattctaagcaaggttatagatgagtacaacgaacacgttcattttgtcgaaattgacatcgaggaggatcctgaaatagcagaagctgcaggcatcatgggaacaccatgtgttcaattttttaaaaataaagaaatgctcaggactgtctctggtgttaaaatgaagaaggaatatagggagtttatcgagtcaaacaaatga

SEQ ID NO: 56569 - protein, 515 aa, Oryza sativa
MAVTRLAVAAALSAAPPSSRRRRAFFHHSCRPLPSSAAAAAKALRASAAPAVDEEAPASPPPSDLGKGVENLVIIGSGPAGYTAAIYAARANLKPVVFEGYQVGGVPGGQLMTTTEVENFPGFPDGVTGPDLMDKMRKQAERWGAELHQEDVEFVNVKSRPFVIRSSDREVKCHSVIIATGAAAKRLRLPREDEFWSRGISACAICDGASPLFKGQVLAVVGGGDTATEEAIYLTKYARHVHLLVRKDQLRASKAMQDRVLNNPNITVHFNTEAVDVVSNPKGQMSGIQLKRTDTGEESVLEVKGLFYGIGHTPNSQLLQGQIDLDDAGYILVEEGTAKTSVDGVFAAGDVQDHEWRQAVTAAGSGCVAALSVERYLVANDLLVEFHQPVREEKEKEITDRDVEMGFDISHTKHRGQYALRKVYHESPRLVCVLYTSPTCGPCRTLKPILSKVIDEYNEHVHFVEIDIEEDPEIAEAAGIMGTPCVQFFKNKEMLRTVSGVKMKKEYREFIESNK

SEQ ID NO: 56570 - DNA, 25 bp, Artificial sequence
  primer
atgaaattatccagcaaaaatttag

SEQ ID NO: 56571 - DNA, 20 bp, Artificial sequence
  primer
ttaatgaatccatttgcggg

SEQ ID NO: 56572 - protein, 320 aa, Artificial sequence
  consensus sequence
  Variant (2)..(2): Xaa in position 2 is any amino acid
  Variant (4)..(5): Xaa in position 4 to 5 is any amino acid
  Variant (7)..(8): Xaa in position 7 to 8 is any amino acid
  Variant (10)..(11): Xaa in position 10 to 11 is any amino acid
  Variant (13)..(14): Xaa in position 13 to 14 is any amino acid
  Variant (16)..(37): Xaa in position 16 to 37 is any amino acid
  Variant (38)..(44): Xaa in position 38 to 44 is any or no amino acid
  Variant (46)..(47): Xaa in position 46 to 47 is any amino acid
  Variant (49)..(53): Xaa in position 49 to 53 is any amino acid
  Variant (54)..(54): Xaa in position 54 is any or no amino acid
  Variant (56)..(104): Xaa in position 56 to 104 is any amino acid
  Variant (105)..(111): Xaa in position 105 to 111 is any or no amino acid
  Variant (115)..(135): Xaa in position 115 to 135 is any amino acid
  Variant (136)..(138): Xaa in position 136 to 138 is any or no amino acid
  Variant (140)..(141): Xaa in position 140 to 141 is any amino acid
  Variant (145)..(234): Xaa in position 145 to 234 is any amino acid
  Variant (235)..(257): Xaa in position 235 to 257 is any or no amino acid
  Variant (259)..(266): Xaa in position 259 to 266 is any amino acid
  Variant (267)..(278): Xaa in position 267 to 278 is any or no amino acid
  Variant (280)..(288): Xaa in position 280 to 288 is any amino acid
  Variant (289)..(289): Xaa in position 289 is any or no amino acid
  Variant (291)..(295): Xaa in position 291 to 295 is any amino acid
  Variant (298)..(298): Xaa in position 298 is any amino acid
  Variant (301)..(306): Xaa in position 301 to 306 is any amino acid
  Variant (307)..(307): Xaa in position 307 is any or no amino acid
  Variant (309)..(315): Xaa in position 309 to 315 is any amino acid
  Variant (317)..(318): Xaa in position 317 to 318 is any amino acid
GXGXXGXXAXXYXXRXXXXXXXXXXXXXXXXXXXXXXXXXXXXXNXXGXXXXXXGXXXXXXXXXXXXXXXXXXXXXXXXXXXXXXXXXXXXXXXXXXXXXXXXXXXXXXXXATGXXXXXXXXXXXXXXXXXXXXXXXXCXXCDGXXXXXXXXXXXXXXXXXXXXXXXXXXXXXXXXXXXXXXXXXXXXXXXXXXXXXXXXXXXXXXXXXXXXXXXXXXXXXXXXXXXXXXXXXXXXXXXXXXXXXXXXXXXXXXXXXGXXXXXXXXXXXXXXXXXXXXGXXXXXXXXXXTXXXXXFAXGDXXXXXXXQXXXXXXXGXXAA

SEQ ID NO: 56573 - protein, 24 aa, Artificial sequence
  protein pattern
  Variant (2)..(2): Xaa in position 2 is Ala, Gly or Ser
  Variant (4)..(5): Xaa in position 4 to 5 is any or no amino acid
  Variant (7)..(7): Xaa in position 7 is any amino acid
  Variant (8)..(8): Xaa in position 8 is Ser or Thr
  Variant (10)..(10): Xaa in position 10 is Ala, Gly or Leu
  Variant (11)..(14): Xaa in position 11 to 14 is any amino acid
  Variant (16)..(20): Xaa in position 16 to 20 is any amino acid
  Variant (21)..(21): Xaa in position 21 is Ala, Leu or Val
  Variant (22)..(22): Xaa in position 22 is Ile, Leu, Met or Val
  Variant (23)..(23): Xaa in position 23 is any amino acid
  Variant (24)..(24): Xaa in position 24 is Asp, Glu or Ser
GXGXXGXXAXXXXXRXXXXXXXXX

SEQ ID NO: 56574 - protein, 52 aa, Artificial sequence
  protein pattern
  Variant (2)..(18): Xaa in position 2 to 18 is any amino acid
  Variant (19)..(20): Xaa in position 19 to 20 is any or no amino acid
  Variant (22)..(24): Xaa in position 22 to 24 is any amino acid
  Variant (25)..(26): Xaa in position 25 to 26 is any or no amino acid
  Variant (28)..(29): Xaa in position 28 to 29 is any amino acid
  Variant (33)..(41): Xaa in position 33 to 41 is any amino acid
  Variant (42)..(42): Xaa in position 42 is Phe, Ile, Leu or Val
  Variant (43)..(43): Xaa in position 43 is any amino acid
  Variant (44)..(44): Xaa in position 44 is Ala, Gly or Val
  Variant (45)..(50): Xaa in position 45 to 50 is any amino acid
  Variant (51)..(51): Xaa in position 51 is Ala, Asp, Glu, Gly or Asn
  Variant (52)..(52): Xaa in position 52 is Ala, Glu, Ser or Thr
GXXXXXXXXXXXXXXXXXXXGXXXXXCXXCDGXXXXXXXXXXXXXXXXXXXX

SEQ ID NO: 56575 - protein, 32 aa, Artificial sequence
  protein pattern
  Variant (2)..(7): Xaa in position 2 to 7 is any amino acid
  Variant (8)..(8): Xaa in position 8 is any or no amino acid
  Variant (10)..(10): Xaa in position 10 is any or no amino acid
  Variant (13)..(18): Xaa in position 13 to 18 is any amino acid
  Variant (19)..(19): Xaa in position 19 is any or no amino acid
  Variant (21)..(21): Xaa in position 21 is Ala, Ile, Leu or Val
  Variant (22)..(23): Xaa in position 22 to 23 is any amino acid
  Variant (24)..(24): Xaa in position 24 is Ala or Ser
  Variant (25)..(25): Xaa in position 25 is Ala, Thr or Val
  Variant (26)..(26): Xaa in position 26 is Ala, Gly or Ser
  Variant (27)..(27): Xaa in position 27 is Ala, Asp, Glu, Ser or Thr
  Variant (29)..(29): Xaa in position 29 is Ala, Cys, Ser, Thr or Val
  Variant (30)..(30): Xaa in position 30 is any amino acid
  Variant (32)..(32): Xaa in position 32 is Ala or Gly
TXXXXXXXAXGDXXXXXXXQXXXXXXXGXXAX

SEQ ID NO: 56576 - DNA, 804 bp, Synechocystis sp.
  CDS (1)..(804): transl_table=11
atgtccattcaactcggtatcatcggcggtggagtaatggctgaagccatcctggcccgcttaatcgcagaaaagacctatgccccagaagaaataattgtgggggagccccacggtgcccggcgggattatctccaaaaaacctatcaagttcgggtttcccccgataaccaagaggcggctaatgtttctgaagtgctgctgttggccgtcaaaccccaggtgctagaccgggtgctagccagtttagcaggaggagccaatcgtcccctggtaatttccattttggccggggtttctctgcaaagaattcaaaagggttttcccgaccatgccatcatccgggccatgcccaatacccccgccaccgttggggccggtatgacggcgatcgccgcgaataaaatggtggagccggatcagttggctaaggctaaggccatcttttcggcggtgggcaatgtggtggaggtgccggaaaatttaatggatgcggtgacgggggtttccggttcgggaccggcctacgtagctttgatgatcgaagccctggccgatggtggtgttttggccggattacccagggcgatcgcccaaaaattggctttgcaaacagtgttgggcacagcggagttaatcaaggaaacggaggagcaccctgcccagattaaagataaagttaccagtccggggggcaccaccattgctggggtagcggtattggagaagatgggttttcgttccgccatcatcgaagcagtgcgggcggcctatcgccgttcccaggaattgggcaaaaaataa

SEQ ID NO: 56577 - protein, 267 aa, Synechocystis sp.
MSIQLGIIGGGVMAEAILARLIAEKTYAPEEIIVGEPHGARRDYLQKTYQVRVSPDNQEAANVSEVLLLAVKPQVLDRVLASLAGGANRPLVISILAGVSLQRIQKGFPDHAIIRAMPNTPATVGAGMTAIAANKMVEPDQLAKAKAIFSAVGNVVEVPENLMDAVTGVSGSGPAYVALMIEALADGGVLAGLPRAIAQKLALQTVLGTAELIKETEEHPAQIKDKVTSPGGTTIAGVAVLEKMGFRSAIIEAVRAAYRRSQELGKK

SEQ ID NO: 56578 - DNA, 1321 bp, Oryza sativa
  CDS (245)..(1099)
gtggcccccggccaagtgacgagcaaaacccacccaaaaaaaaaatacagcggagacgcgcgacggcggcgcagttccccgctccgccgctccgtgctccgacctccggcgaccccgggcaccggcgagtggccccgacggccatccagcttgtcagcattattaggcctcgaaacctaccttccacatccacgccattcttctccgcctcctcctcctcctcctcctcctcggatccctcgcaatggcggcgccgcctcagcccgtgccggcgcccgcggccgcgtcgccggaggtgttccggctcgggttcatcggcccgggtaacctcgcggagagcatcgctcgcggcgtggcggcgtcgggcgtcctcccggccaccgcgatccgcaccgcgccacaccgccgccccgagcgcgccgaggccttctcatccatcggagctcacatcttggagaccaacgcgcaggtagttgatgacagtgacgtgatcgtcatctctgtgaagccgcagatcgtaaggcaggtactggttgagctaaaacccttgctgtcagaagaaaagcttctggtgtccattgctgctggcatcaagatggaagatctgcagggttggtctggtcatcgaagatttattagagtaatgccaaacaccccttcagctgttggacaagcagcatcagtgatgtgtttgggggagatggctactgagaatgatgaaaaccgtgtaagaagtttattcagtgccattggaaaagtttggacagctgaagaaaaatattttgatgctgtaactgggctaagtggtagtggcccggcttatattttcttagcaatagaggccatggctgatggtggagttgctgctggtcttcctcgggatcttgcacttggtcttgcatctcagacagttcttggtgctgcaaccatggtaaacaagactggaaaacatccgggtcagctgaaggatatggtcacttccccggcaggaacaaccataactgggatacaagagcttgagaagggtgcataccgtgggacgctgataaatgccgttgttgctgctacaaagcgttgccgtgaactttctcagagttaatcctcttgttagttgttagtccattggatgtgcgactctgcgcacgatttcccctagggaagaggatgtgcgaatattgatatttaaacctgatgaggctatcagcaaattttgcttgtagttttatccgaataatttgctgcactttagtggcacgaaatctggatgatgttagattgatacttattctggcagcagctgtttttgatcgtttttgttggg

SEQ ID NO: 56579 - protein, 284 aa, Oryza sativa
MAAPPQPVPAPAAASPEVFRLGFIGPGNLAESIARGVAASGVLPATAIRTAPHRRPERAEAFSSIGAHILETNAQVVDDSDVIVISVKPQIVRQVLVELKPLLSEEKLLVSIAAGIKMEDLQGWSGHRRFIRVMPNTPSAVGQAASVMCLGEMATENDENRVRSLFSAIGKVWTAEEKYFDAVTGLSGSGPAYIFLAIEAMADGGVAAGLPRDLALGLASQTVLGAATMVNKTGKHPGQLKDMVTSPAGTTITGIQELEKGAYRGTLINAVVAATKRCRELSQS

SEQ ID NO: 56580 - DNA, 1220 bp, Glycine max
  CDS (160)..(984)
atgcaagttaaacaaacaactgcaagggaaataggggcctaactttatatatctgcgtgagtgagtgcgtcatttctttctttctctgcttccctaaccaactgaaccagcagcaacatttgcgcaaatcgaaattgattctctgccacttaacctaaaatggaaatctttccgattcccgccgaatcctacactctcggcttcatcggcgccggaaaaatggccgagtccattgcccgaggcgccgtccgctccggcgtcctgccgccttctcgcattcggaccgccgtccacttcaacctcgcccgccgtggcgccttcgagtccttcggcgtcaccgttctcccttcaaacgacgacgtcgttcgcgaaagcgacgtcgtcgttttgtcggtcaaacctcaattagtgaaagacgtggtgtcgaaattgacgccgcttttgacgaagaacaagcttttggtttcggtcgctgctggtaccaaattgaaagatcttcaggaatgggctgggaacgacagatttataagagtgatgcctaataccccagcagctgttggccaggcagcatctgtaatgagcttggggggatctgcaacggaagaagatggaaatattatagcccaattatttgggtcaattggcaaaatatggaaagctgaggaaaagtattttgatgcaataactggcctgagtggcagtggtcctgcttatgtttatttagcaatagaggctttggctgatggaggagtagcagctggtttaccacgtgatctttcattaagtctagcttctcaaactgtattaggggcagcatcaatggtctcccagactgggaagcacccgggacagctcaaagatgacgttacttctccaggtgggacaacaattacgggcattcatgagttagaaaatggtgggttccgtggaacactgatgaatgctgttgttgctgctgctaagcgcagccgagagctttcctgaatcaagagattaggattctactttttttttagaccaaaatctgatttcggtcgaattttcagtcactattatgagaacttggggctcttctttgagaggagtaaacaagaatgtttggccataacagtcttttcgagctagcatcatgaatgcatccgagtctatatgagaacttgaagtttccttgcaaaagaagagtactagcagtaaaaataaaataaaaccacttggccact

SEQ ID NO: 56581 - protein, 274 aa, Glycine max
MEIFPIPAESYTLGFIGAGKMAESIARGAVRSGVLPPSRIRTAVHFNLARRGAFESFGVTVLPSNDDVVRESDVVVLSVKPQLVKDVVSKLTPLLTKNKLLVSVAAGTKLKDLQEWAGNDRFIRVMPNTPAAVGQAASVMSLGGSATEEDGNIIAQLFGSIGKIWKAEEKYFDAITGLSGSGPAYVYLAIEALADGGVAAGLPRDLSLSLASQTVLGAASMVSQTGKHPGQLKDDVTSPGGTTITGIHELENGGFRGTLMNAVVAAAKRSRELS

SEQ ID NO: 56582 - DNA, 816 bp, Mesorhizobium loti MAFF303099
  CDS (1)..(816): transl_table=11
atgacgaacaggcttgttctcgccggctgcggcaatatgggctacgccatgctttcgggctggctgaaatccggcaagctcgcgccctcggcggttttcgttatcgagcccaatgcggagctgcgccagcgcgctgcaacgcttggctgcgccacatcagcggacgccggtgagattccagccgatgcggtgcccgatctcgtcgtcatcgcggtaaaaccccaggtgatccgcgacgtcaccgccgcctacaagcgtttcggcgatggccgcaccaccttcgtcagcatcgccgccggcacgccggtcgccaccttcgaagacatcctcggcaaccgcgcgcctgttgtgcgctgcatgcccaacacgcccgcctccatcggcaaaggcatgatggtggtgttttccaacccgctggtctcggatgataccaagcgctttgtcgccgacctgctgtcggccagcggcgaagtggccaccattgacgacgaaggcctgatggatgcggtgaccgccgtgtcgggatccgggccggcctatatcttccacttcatcgaagcgctgaccgtggccgccgagaaggcggggctgcctagcgcaaccgccaggctgctcgcgatgcagaccgtctatggcgctgcctcgctcgctgccgaaagccaggaggaacccggcgtgctgcgccagcaggtgaccagccccaacggcacgacggctgcggcgcttgccgtgctgatgggcgaagaccggttgaccaatttgctgacgcaggcagtcgaggcggctcggctgcggtcgatcgagttgggaaagtaa

SEQ ID NO: 56583 - protein, 271 aa, Mesorhizobium loti MAFF303099
MTNRLVLAGCGNMGYAMLSGWLKSGKLAPSAVFVIEPNAELRQRAATLGCATSADAGEIPADAVPDLVVIAVKPQVIRDVTAAYKRFGDGRTTFVSIAAGTPVATFEDILGNRAPVVRCMPNTPASIGKGMMVVFSNPLVSDDTKRFVADLLSASGEVATIDDEGLMDAVTAVSGSGPAYIFHFIEALTVAAEKAGLPSATARLLAMQTVYGAASLAAESQEEPGVLRQQVTSPNGTTAAALAVLMGEDRLTNLLTQAVEAARLRSIELGK

SEQ ID NO: 56584 - DNA, 840 bp, Thermoplasma volcanium GSS1
  CDS (1)..(840): transl_table=11
gtgtttataaaaatcttcttaatcacttacagatacaagttgactgttatttcaataattggtggaggcacaatagggtcgtccatagcaatcccgcttaagagatccggcttcgaagttatagtgactaggagaaatacagctgtactcaagcatcttgaaagctacggaatatctgttatgagtgataacaaaactgcgtcgaaggaggcagatgttgtattcttaactcttaagcctgttgacataatcccagaagttaggaagatagaggaaaacataagaggcaagctgctcatatctatggccgctgcaatacctctgaagttaataaaggatgcagctcctcattctatagttgtaagggcgatgacaaatattgctgctaaagtaggtgccggattcacacccttctgtgttgatgatggggatcaagaggttgcgaagagggcaagttcaattctttcagcattgggggaagtctacctggttgaagagaaatacatggatgcacttactgcactgagtgggagcggccctgcctatatacttactattattgaggcaatgatgtatggtggcctaaaattaggtttgccacgcgatctagccctaaaggcatcttatcaaactgttatgggatctgcaaagttactcgcagaaagtggtgaacatccatccgagttaaaagaaaaggtcattaccccagggggaactacaattgatggcatatacgagcttgaagacgctagggtaaggacagcaataatgaaagcaattgaagtttcaacaatgaaggcaaataaaatatcagaatctataaaaaaattagaacaatag

SEQ ID NO: 56585 - protein, 279 aa, Thermoplasma volcanium GSS1
MFIKIFLITYRYKLTVISIIGGGTIGSSIAIPLKRSGFEVIVTRRNTAVLKHLESYGISVMSDNKTASKEADVVFLTLKPVDIIPEVRKIEENIRGKLLISMAAAIPLKLIKDAAPHSIVVRAMTNIAAKVGAGFTPFCVDDGDQEVAKRASSILSALGEVYLVEEKYMDALTALSGSGPAYILTIIEAMMYGGLKLGLPRDLALKASYQTVMGSAKLLAESGEHPSELKEKVITPGGTTIDGIYELEDARVRTAIMKAIEVSTMKANKISESIKKLEQ

SEQ ID NO: 56586 - DNA, 840 bp, Aeropyrum pernix K1
  CDS (1)..(840): transl_table=11
ttgaagactggggcggtccctaagggtctgagagtagctgtgcttggcgtaggaaaaataggcggtgcaatagtcaagtcgctactcagctgtggcgcggtcgttacaggcactggtaggcggagggaaactctcgagaggatttcacgcttaggggctgaggcgactgttgacaacaggctagcggctaaggtttctgacgttgttatacttagtgtaaaaccctaccagctaccgcgcctccttgaggagatccgggatgtgatggaggggaagatagttgtaagtgtagtggccggagtaagactttcgaccctttcccgagccttggagggaagccatgtctatagggcaatgccaaacataaacgctctcatagggaggagcacaactgcagttgctgagtatacaggagacaagcgtgcctcctttgtcgagtcaatactctcctgtatgggaagcgtttactggataccggaggagtggatggacgtgtggaccgcccttgtggggagtatgcccgcctatgtggcggttatgatagactctctaaccttgggcggagtctcggctggcctgcctagggaggtcgcctttaaagctgtaatagatactttaggggctacagcagagcatctaggtaaaagggatatacatccgtccgtccttagggatgaggttacaaccccggcaggtaccactatagaaggcctcaaggttattgagggggagggcgtcgacgccgctctaatacgtacggtcgaagcagctgctagacgggcggcagctattggagaggctattgataatgaagttagaagaagtctcaacctgcggtag

SEQ ID NO: 56587 - protein, 279 aa, Aeropyrum pernix K1
MKTGAVPKGLRVAVLGVGKIGGAIVKSLLSCGAVVTGTGRRRETLERISRLGAEATVDNRLAAKVSDVVILSVKPYQLPRLLEEIRDVMEGKIVVSVVAGVRLSTLSRALEGSHVYRAMPNINALIGRSTTAVAEYTGDKRASFVESILSCMGSVYWIPEEWMDVWTALVGSMPAYVAVMIDSLTLGGVSAGLPREVAFKAVIDTLGATAEHLGKRDIHPSVLRDEVTTPAGTTIEGLKVIEGEGVDAALIRTVEAAARRAAAIGEAIDNEVRRSLNLR

SEQ ID NO: 56588 - DNA, 768 bp, Thermotoga maritima MSB8
  CDS (1)..(768): transl_table=11
atgacaatcggtatcgtcggtgttggtaacatgggttcgatcttcgcagagaaattttcgaaggaggccgaaaggattctccttgttgaaaaggacagtgaaaaactctctcgattcaatgctcctccatacgaaattgccgatctggaaaaagttcgtgaggcagatctgatagtcctcgcagtcaaacctcaggacgctcccatcgtgcttagcgcattgaaaggtttcgacggaatcctgctctcgatagttgccggcttgaaaatcgaagagataagaaagtacggtattcacaaggtggcaaggattatgccgaacgttgctgtgagagtgggagaaggggtgctcgccaccgccttcagcgctgatatgagccttgaagaaagagaactcgtcaaatcactccttgagaaactcggtttcgtcgttgaaatagaggaaaagctcttctcagccgtcactgccctcaccggaagtggccccgctttcatcttcgtcgtggtggaggcgtttctcgacgctgcgctgaagatgggcatcccactcgacacggcgaaagaacttgtttataggctcttcaaaggttccgcggagcttttaacagagacgggcgaacacccggctctgtggaaacacagggtgagttctccagccggaacaaccatagaaggactcatcacaatggagaggttcgctgtgagaagcggtgtcatagaatctctgatctcttcttacagaagagcgctcgaactggaggaaaagtga

SEQ ID NO: 56589 - protein, 255 aa, Thermotoga maritima MSB8
MTIGIVGVGNMGSIFAEKFSKEAERILLVEKDSEKLSRFNAPPYEIADLEKVREADLIVLAVKPQDAPIVLSALKGFDGILLSIVAGLKIEEIRKYGIHKVARIMPNVAVRVGEGVLATAFSADMSLEERELVKSLLEKLGFVVEIEEKLFSAVTALTGSGPAFIFVVVEAFLDAALKMGIPLDTAKELVYRLFKGSAELLTETGEHPALWKHRVSSPAGTTIEGLITMERFAVRSGVIESLISSYRRALELEEK

SEQ ID NO: 56590 - DNA, 819 bp, Vibrio cholerae O1 biovar eltor str. N16961
  CDS (1)..(819): transl_table=11
atggaacagagaagcatcgcctttattggcgcaggtaacatggcacgcgccatcattgcgggattgattgccagtggttacgccgccgataagatcattgcaaccgccccttcactcacgcgccgcgagcctcttgaagcgcaatacggtattcgcaccaccagcgataaccttgctgcggcgcaacaagcggatgtggtggtgttagcggtcaaaccgcagctgatggctgaggtgtgtaaaccgctgcaagcggtcgatttctctggaaagttggttatctcgattgcggcgggtgtgtcagtcaaaagactcaatgagatgctggccacccagctcaatttagtgcgtgtgatgcccaatacgccatcactggtaaaccttggcatgagcggtttgtacgcccctgattcggtgagcgaagcggataaagcctttaccacacaactgatgcaaagcgtgggcgaagtgtgctgggtagacaacgaatccggcatcaacagcgtgattgccgccgcggggagtgctcctgcttatttcttcttgtttatgcaagccatgcagcaagaggcgatggcgcaaggctttgatgaagccaccgcccgtttgttagtacaacaatcggctctcggtgcggccgccatggtcaaagccaaccctgaactctcactggccactttgcgtgaacaagtgacgtcaaaaggcggcaccacggcgcaagcgatccagacgtttaacgatcaccaactcagcgacatcgttgccaaagcgatgcaagcggcggtaacacgcgcgcaagagatggaacaactgttttaa

SEQ ID NO: 56591 - protein, 272 aa, Vibrio cholerae O1 biovar eltor str. N16961
MEQRSIAFIGAGNMARAIIAGLIASGYAADKIIATAPSLTRREPLEAQYGIRTTSDNLAAAQQADVVVLAVKPQLMAEVCKPLQAVDFSGKLVISIAAGVSVKRLNEMLATQLNLVRVMPNTPSLVNLGMSGLYAPDSVSEADKAFTTQLMQSVGEVCWVDNESGINSVIAAAGSAPAYFFLFMQAMQQEAMAQGFDEATARLLVQQSALGAAAMVKANPELSLATLREQVTSKGGTTAQAIQTFNDHQLSDIVAKAMQAAVTRAQEMEQLF

SEQ ID NO: 56592 - DNA, 789 bp, Lactococcus lactis subsp. lactis Il1403
  CDS (1)..(789): transl_table=11
atgaaaacaataggttttattggagttggaaaaatggcaacagctattatttctggacttgacaaaaataaattcaaaatcatcatttccggacacaatttaacaaaaactcaaaaacaagcggaaacccttaatgttacggctacaagtaatcatgaagaactcgttcaagaatctgattttatcattctatcagttaaacctcaagtacttccctctgttttaagtaaattaatcaatcatttaactaaagacaaaacattaatttcaattgcagcgggactcactttatctgacttgaaacatctggctgattcagaaaatcaaccaatcatccgagtgatgccaaatatcaatgcacaaatcggtcagtcaacatcggccattgtcaaaaatgaatttgttgatgattctgcttatgctacagttcaagaaatttttaaatcaactggttctgtccatgaaattgctgaaaaagatttttcaacatttgcagcaattgccggttcaagccctgcttttatttatatgttcattgatgccatggcacgtgccggtgtattgcatggtattcctaaagatcaagccacagcaattgttgccgaaacggttcgtgcttcagctgaaatgattctccaaagtggtgaaaatccttggtcattagtcgataaagtctcaagtcctggtggaactactgtcgctggtgtggtaagtttagaacaaaaccattttatcggaacagttattgatgctattagcgctactatcgaaaaagaaaaaaatctttaa

SEQ ID NO: 56593 - protein, 262 aa, Lactococcus lactis subsp. lactis Il1403
MKTIGFIGVGKMATAIISGLDKNKFKIIISGHNLTKTQKQAETLNVTATSNHEELVQESDFIILSVKPQVLPSVLSKLINHLTKDKTLISIAAGLTLSDLKHLADSENQPIIRVMPNINAQIGQSTSAIVKNEFVDDSAYATVQEIFKSTGSVHEIAEKDFSTFAAIAGSSPAFIYMFIDAMARAGVLHGIPKDQATAIVAETVRASAEMILQSGENPWSLVDKVSSPGGTTVAGVVSLEQNHFIGTVIDAISATIEKEKNL

SEQ ID NO: 56594 - DNA, 792 bp, Neisseria meningitidis MC58
  CDS (1)..(792): transl_table=11
atgaatgtttattttctcggcggcggcaatatggcggctgccgttgcgggcggattggtcaaacaaggcggttaccgcatctatatagccaatcggggtgcggaaaaacgcgaacgtttggaaaaagagttgggggtcgaaacttcggcaaccctgccggagcttcattccgacgatgttttaatccttgccgtcaaaccgcaggatatggaagctgcgtgcaaaaatatccgcaccaacggcgcattggtgctttctgtcgcagccggattgtcggtcggtacgctcagccgttacctcgggggaacacgccgcattgtccgggttatgccgaatacacccggaaaaatcgggctgggcgtatctggtatgtatgccgaagcggaagtatcggaaacagaccgcaggattgccgatcgaatcatgaaatcagtcggtttgactgtttggttggatgatgaggaaaaaatgcacggcattaccggcatcagcggcagcggaccggcttatgtgttttatctgctggacgcattgcaaaatgccgccatccgacaagggtttgatatggcagaagcacgcgcgctcagtctggcaacgtttaaaggagcggttgcccttgccgagcagacgggtgaagatttcgagaagcttcaaaaaaatgtaacgtcaaaaggcgggacaacccacgaagccgtggaagctttcaggcggcatcgtgtcgccgaagccataagcgagggcgtttgtgcctgtgtgcgccgttcgcaggaaatggaacggcaatatcaataa

SEQ ID NO: 56595 - protein, 263 aa, Neisseria meningitidis MC58
MNVYFLGGGNMAAAVAGGLVKQGGYRIYIANRGAEKRERLEKELGVETSATLPELHSDDVLILAVKPQDMEAACKNIRTNGALVLSVAAGLSVGTLSRYLGGTRRIVRVMPNTPGKIGLGVSGMYAEAEVSETDRRIADRIMKSVGLTVWLDDEEKMHGITGISGSGPAYVFYLLDALQNAAIRQGFDMAEARALSLATFKGAVALAEQTGEDFEKLQKNVTSKGGTTHEAVEAFRRHRVAEAISEGVCACVRRSQEMERQYQ

SEQ ID NO: 56596 - DNA, 810 bp, Escherichia coli O157:H7 EDL933
  CDS (1)..(810): transl_table=11
atggaaaagaaaatcggttttattggctgcggcaatatgggaaaagccattctcggcggtctgattgccagcggtcaggtgcttccagggcaaatctgggtatataccccctccccggataaagtcgccgccctgcatgacaagttcggcatcaacgccgcagaatcggcgcaagaagtggcgcaaatcgccgacatcatttttgccgccgttaaacctggcatcatgattaaagtgcttagcgaaatcacctccagcctcaataaagactctctggtcgtttctattgctgcaggtgtcacgctcgaccagcttgcccgcgcgctgggccatgaccggaaaattatccgcgccatgccgaacactcccgcgctggttaatgccgggatgacctccgtaacgccaaacgcgctggtaaccccagaagataccgctgatgtgctgaatattttccgctgctttggcgaagcggaagtaattgctgagccgatgatccacccggtggtcggtgtgagcggttcttcgccagcctacgtctttatgtttatcgaagcgatggccgacgccgccgtgctgggcgggatgccacgcgcccaggcgtataaatttgccgctcaggcggtaatgggttccgcaaaaatggtgctggaaacgggagaacatccgggggcactgaaagatatggtctgctcaccgggaggcaccaccattgaagcggtacgcgtactggaagagaaaggcttccgtgccgcagtgatcgaagcgatgacgaagtgtatggaaaaatcagaaaaactcagcaaatcctga

SEQ ID NO: 56597 - protein, 269 aa, Escherichia coli O157:H7 EDL933
MEKKIGFIGCGNMGKAILGGLIASGQVLPGQIWVYTPSPDKVAALHDKFGINAAESAQEVAQIADIIFAAVKPGIMIKVLSEITSSLNKDSLVVSIAAGVTLDQLARALGHDRKIIRAMPNTPALVNAGMTSVTPNALVTPEDTADVLNIFRCFGEAEVIAEPMIHPVVGVSGSSPAYVFMFIEAMADAAVLGGMPRAQAYKFAAQAVMGSAKMVLETGEHPGALKDMVCSPGGTTIEAVRVLEEKGFRAAVIEAMTKCMEKSEKLSKS

SEQ ID NO: 56598 - DNA, 795 bp, Deinococcus radiodurans R1
  CDS (1)..(795): transl_table=11
atgcaacttgccatcgtcggtgtcggaaaactgggcctgtctctgctgaccggggtcatcgcccggggagtcatcgcgccgcaggacatcgggattatcgaggccaacgcggcgcgggcgcaggacatcgccgcgcagaccggcgtgcaggtcattacgccgccgcagctcgcgcaggtcgggcgcatcgtggtgagcgtgcagccgcgcgtctttcccgaggtcgcgccctggctggcgcaggaaaacgcgggctacatctccaccatggccggggtcagcgccggcaccatcgggcggcggctcggcacccggcgcgtggtacgggtgatgcccaacctcgccgccaccatcgggcgctcgcagaccgccatcaccgggccgcgtgaagcccacgaagcgggtgacatcgccttcgccgagcagctcttcggcgccgtcgggcaggtgtacgagttgcctgagcacctcttcaacgcctttaccggcatgagtgcgtcggggcctgcctacgtcgccgtcgtggccgaggcgctggcagacggcggcgtgcggatgggcttgccgcgtcccctcgccaatgaactcgccgcgcggctgctggcgtccactggcgagctgctgctggagcgggcgcatccggggctgctcaaagacgaggtggcgagtcccgggggcactacgattgccgggctagaggagttggaagcggcgggcgtgcgcggcggcgtgatgagggcggtggtggcggcgacgcggcgggggacggagctggggaaggaccaggaggattga

SEQ ID NO: 56599 - protein, 264 aa, Deinococcus radiodurans R1
MQLAIVGVGKLGLSLLTGVIARGVIAPQDIGIIEANAARAQDIAAQTGVQVITPPQLAQVGRIVVSVQPRVFPEVAPWLAQENAGYISTMAGVSAGTIGRRLGTRRVVRVMPNLAATIGRSQTAITGPREAHEAGDIAFAEQLFGAVGQVYELPEHLFNAFTGMSASGPAYVAVVAEALADGGVRMGLPRPLANELAARLLASTGELLLERAHPGLLKDEVASPGGTTIAGLEELEAAGVRGGVMRAVVAATRRGTELGKDQED

SEQ ID NO: 56600 - DNA, 813 bp, Clostridium acetobutylicum ATCC 824
  CDS (1)..(813): transl_table=11
atggatagcaaagttggatttattggctgcgggaatatggcacaggcaataataaagggaatggttaaggcaaaggtagtaccaaatgaaaatataattgtaagtaatccttctaatgaaaagctagagaagattagtaaagaatgcggagttttaactacaaatgacaacaagcaggttgcattaaaggcagatattattgtattatctgttaaacctaataaatacgaaaaggttataagtgaaatcaaggatttagtacaacaaagtgttataatagttgcaatagcagcgggggtttcaatagagaaaacaagaattatgtttaaaaatagcaatataagagtagtaagggctatgccaaatactccagcgcttgtaggagaggctatgacagctatatcaccatgtgaggaaatagacaaaggtgaactaaaaaatgtaacggagatatttgagtcatttggaaaatgtgaagttgtagatgaagctttaatgaatgcagtaacaggggtaagtggttcatcacctgcttatgtgtatatgtttgtagaagctatggcagatgctgctgttttgaacggaatgactagggaaaaagcatataagtttgcagctcaatcagtacttggagcagctaaaatgattcttgaaacaggagaacatcctggtaaacttaaggatgatgtatgttcaccttctggaactaccattgaagcagtatacgcacttgaaaaaagtggatttagagcttcggtaattgcagcagttgatgcatgcataaaaaaatcaaagctaatgtcatcaaaatag

SEQ ID NO: 56601 - protein, 270 aa, Clostridium acetobutylicum ATCC 824
MDSKVGFIGCGNMAQAIIKGMVKAKVVPNENIIVSNPSNEKLEKISKECGVLTTNDNKQVALKADIIVLSVKPNKYEKVISEIKDLVQQSVIIVAIAAGVSIEKTRIMFKNSNIRVVRAMPNTPALVGEAMTAISPCEEIDKGELKNVTEIFESFGKCEVVDEALMNAVTGVSGSSPAYVYMFVEAMADAAVLNGMTREKAYKFAAQSVLGAAKMILETGEHPGKLKDDVCSPSGTTIEAVYALEKSGFRASVIAAVDACIKKSKLMSSK

SEQ ID NO: 56602 - DNA, 780 bp, Sulfolobus tokodaii str. 7
  CDS (1)..(780): transl_table=11
atgagagtaagtataataggagtaggtaagataggttatgctattttaaaaggactaaaaagccttaatgttgaaatcataggtactggaagaagtgaagagaccttagataaaattaaaaaagaaggcgtagaggctactagagacaatgagtatgctataaaaaagagtgatataattatattggctgtaaaacctcaacatttccattccatcttagacaaggtgagtaaaactgcatgggagggtaaaaaagttgtttcagttatggctggtataaggatttctacgttaactaggctgacgaatgctaaagtatatagggcaatgcctaacataaatgcggtcattggtaaggctacaacagcattagctgaagaaagagatgaggaagttgaaagaatttttaggactattggaaacgtttactggattccagaggaattgtttgatgcatggacagcaataattggtagtggtccagcgtttgttgcagagataatagatgctttcgcactaggtgctgtagcatgtggaatgtcaagagaacttgcctatcaggcaatattagatatggtagaaggtaccgtatatactttaagaaaggataaaactcatccggttctattgagagatcaggtaactactcctgccggtaccactattagggggttaatggttatggaaagtgagggaataaaatcagctattattaagactattgaggctgcatatcaaaggtcaatggcaataggtaaggagatcgataaaatgtattaa

SEQ ID NO: 56603 - protein, 259 aa, Sulfolobus tokodaii str. 7
MRVSIIGVGKIGYAILKGLKSLNVEIIGTGRSEETLDKIKKEGVEATRDNEYAIKKSDIIILAVKPQHFHSILDKVSKTAWEGKKVVSVMAGIRISTLTRLTNAKVYRAMPNINAVIGKATTALAEERDEEVERIFRTIGNVYWIPEELFDAWTAIIGSGPAFVAEIIDAFALGAVACGMSRELAYQAILDMVEGTVYTLRKDKTHPVLLRDQVTTPAGTTIRGLMVMESEGIKSAIIKTIEAAYQRSMAIGKEIDKMY

SEQ ID NO: 56604 - DNA, 819 bp, Sinorhizobium meliloti 1021
  CDS (1)..(819): transl_table=11
gtgagcattgccgtttcgggtccgatcgtgctcgtcggcgccggcaatatgggcggcgccatgctcgcgggctggctgaaaagcggagtccgtggcagcgacgttctcgtcatcgatccgggcccgtcaccggcgatggcaaagctcctggcggatagcggtgtgcaacatgcgacctccgctccggcgggcggtaaggcgggcgcgatcttcctcgcggtcaagccgcaggtgatggaaacggtgctgccacccctgaaagggctcgtcggtccgcaaaccgtgatcgtttcagtggccgccggcaagacgctgggtttcatcgagcggcacctgggtgaggcggcgacggtgcgcgccatgccgaatacgccggccatgatcggacgcggtgtgaccggcgccttcgcgaatgctcgcgtcagcgaggcccagcgcgcgctggtgcatgatctgctgaaggtcagcggcccggtcgaatgggtcgggagcgaagcggatatcgatgccgtgaccgccgtctccggcagcggcccggcctatgtcttctatctcgtcgagtgcatggcggaggccgggcgcaaggccggactcgaggcggacctagccatgcgtcttgctcgggaaaccgtcgcgggggctggtgaactcctccatcagtcccccgacgatgcagcgcgcctgcggcagaacgtcacttcgcccggcggtaccacggcggctgcgctggcggtattgatggcggatgacggcatgcagccgctcttcgaccgggccattgcggcggcgcgcaagcgcgcggaagagctggccgggtaa

SEQ ID NO: 56605 - protein, 272 aa, Sinorhizobium meliloti 1021
MSIAVSGPIVLVGAGNMGGAMLAGWLKSGVRGSDVLVIDPGPSPAMAKLLADSGVQHATSAPAGGKAGAIFLAVKPQVMETVLPPLKGLVGPQTVIVSVAAGKTLGFIERHLGEAATVRAMPNTPAMIGRGVTGAFANARVSEAQRALVHDLLKVSGPVEWVGSEADIDAVTAVSGSGPAYVFYLVECMAEAGRKAGLEADLAMRLARETVAGAGELLHQSPDDAARLRQNVTSPGGTTAAALAVLMADDGMQPLFDRAIAAARKRAEELAG

SEQ ID NO: 56606 - DNA, 783 bp, Caulobacter crescentus CB15
  CDS (1)..(783): transl_table=11
atgacccccatcctccttctcggcgcgggccgcatgggcggggccttgatccagggctggcaggcggccggcgcgtttgacgccgccgatctcatcatccgcgacccccatgtcgacgctgcggccttcgccggcgcggtggtcaatccgccgctcgagaccctgggcgcggccaagaccgtgttgctggcggtcaagccgcagatctggcgcgaggcgattgcggacgtggttccgcacctggcgccggacgcggtgatcgtgtcgatcgccgccggcgtccgcgccgcggacatctcgcaggccttcggcggccgccgcgtggcgcgggtcatgccgaccacggccgtcgccatcgggcagggcgcggccagtctctatgcggacgacgccgaggctctcgcccgcgcccgcgccctgttcgccccgctggccgccgtggcggagctggcgtccgaggacctgatgcacgccgctaccgctgtgtcgggctcggccccggcctatctctacgccttcatcgaggcgctggaggcggcgggcgcggcccagggccttgatcctgcccagagcgcgcgcctcgcccgggcgacgatcatcggcgccgccgccctgatggcgcagagcggcgaggaaccggctgagctgcgcaagcaggtcacctcgcccggcggcacgacggcggcggcgctctcggtgctgatgggcgccggcggtttcggtgacttgctgcccaaggcgctggacgccgccgtggcgcgatcgaaggaactgggcggctag

SEQ ID NO: 56607 - protein, 260 aa, Caulobacter crescentus CB15
MTPILLLGAGRMGGALIQGWQAAGAFDAADLIIRDPHVDAAAFAGAVVNPPLETLGAAKTVLLAVKPQIWREAIADVVPHLAPDAVIVSIAAGVRAADISQAFGGRRVARVMPTTAVAIGQGAASLYADDAEALARARALFAPLAAVAELASEDLMHAATAVSGSAPAYLYAFIEALEAAGAAQGLDPAQSARLARATIIGAAALMAQSGEEPAELRKQVTSPGGTTAAALSVLMGAGGFGDLLPKALDAAVARSKELGG

SEQ ID NO: 56608 - DNA, 810 bp, Salmonella typhimurium LT2
  CDS (1)..(810): transl_table=11
atggagaagaaaatcggttttattggctgcggtaatatgggcaaggctattcttggcggactgattgccagcggtcaggtacttcccggccagatctgggtctataccccctcccccgataaagtcgccgccctgcatgatcagtacggcattaatgcggcgcaaagcgcgcaggaggtcgctcaggtcgcggatatcgttttcggcgcggtaaaaccgggcattatggtgaaagtgctcagtgaaatctcctccagcctgaacaaagactcgctggtggtctctatcgccgcaggcgtaacgcttgatcagcttgcgcgcgcgctgggacacgaccgtaaaatcattcgcgctatgccgaatacgccgtcgctggtcaacgcaggaatgacctccgtcacgcccaacgcgctggtcacaccggaagatacggctgatgtgctgaatattttccgctgctttggcggggcggaagtgattgctgagccgatgatccatccggtggttggcgtgagcggatcttcgccggcctatgtctttatgtttatcgaggcgatggcggacgctgccgttctgggcggtatgcctcgcgctcaggcttataaattcgccgcgcaggccgtcatggggtcggcgaaaatggtactcgaaaccggaaagcatcccggcgaactgaaagatatggtgtgctcgcctggcggaacgacgattgaagccgtacgcgttctggaagaacgtggcttccgcgctgcggtaatagaagcgatgacgaagtgtatggaaaaatcagaggcgctcagtaaatcctga

SEQ ID NO: 56609 - protein, 269 aa, Salmonella typhimurium LT2
MEKKIGFIGCGNMGKAILGGLIASGQVLPGQIWVYTPSPDKVAALHDQYGINAAQSAQEVAQVADIVFGAVKPGIMVKVLSEISSSLNKDSLVVSIAAGVTLDQLARALGHDRKIIRAMPNTPSLVNAGMTSVTPNALVTPEDTADVLNIFRCFGGAEVIAEPMIHPVVGVSGSSPAYVFMFIEAMADAAVLGGMPRAQAYKFAAQAVMGSAKMVLETGKHPGELKDMVCSPGGTTIEAVRVLEERGFRAAVIEAMTKCMEKSEALSKS

SEQ ID NO: 56610 - DNA, 801 bp, Listeria monocytogenes EGD-e
  CDS (1)..(801): transl_table=11
atgaatagaatcggctttattggcgcaggaaatatgggaactgcaatgattcgaggtttagcacaagcgaatttagtgaaaagagaagaaatcattgttggtggtcggaatctcgaaaaattaaaaccacttgaagcggaatttactggcttacaaataacaaccgataccgagaaactcgtagaacaagcagatattattattttagcggtgaaaccttatactataccagaaattttaacgtcggtaaaagagaagcttacacctgataaaatcattatttctgtagcggctggcgtaactatccaagatttagaagaactcacttcagcaaaaacaaaaattgttcgagtgatgccaaatacaccagcgcttgtcggcgaagcaatgtcatccgtttcaccaaatacgaatgtaacatccgaagaacttaaagaagtgacagctatttttactagctttggagaagcagaagtcgtttccgaaaatttgatggatgcggttattggcgtcagcggctcttcaccagcctatgtttatatgttcatagaagctttagcagacggcgcagtgctaagtggcatgcctcgcgataaagcatataaattcgccgcacaagctgtgctaggtgccgcaaaaacggttctggaaactggcgaacatccaggtaaacttaaagatatggttacttctcccggcggaactacaattgaagcagtgaaatcactagaaaatgatggtttccgttccgctgttatcaatgcagttcaagctgctgcaaagaaaaatagttcgatgtaa

SEQ ID NO: 56611 - protein, 266 aa, Listeria monocytogenes EGD-e
MNRIGFIGAGNMGTAMIRGLAQANLVKREEIIVGGRNLEKLKPLEAEFTGLQITTDTEKLVEQADIIILAVKPYTIPEILTSVKEKLTPDKIIISVAAGVTIQDLEELTSAKTKIVRVMPNTPALVGEAMSSVSPNTNVTSEELKEVTAIFTSFGEAEVVSENLMDAVIGVSGSSPAYVYMFIEALADGAVLSGMPRDKAYKFAAQAVLGAAKTVLETGEHPGKLKDMVTSPGGTTIEAVKSLENDGFRSAVINAVQAAAKKNSSM

SEQ ID NO: 56612 - DNA, 813 bp, Nostoc sp. PCC 7120
  CDS (1)..(813): transl_table=11
atgactataaaatttggtttaattggtggcggggtaatgggagaagcgctcttatcccgccttattgcgcggggaatttatcaaccatcagaagtcatagtcagcgaaccgcaaacagcgcgacaagcttttttacaacaaaaatatcatgtgggtgtgaccacagataacagtttggtattcacacaagctcaagacgttgtattcttggcggtgaaaccacaagtgtttagtgcgatcgctcaagaattagcagatacagtattcacagaccattccccccttgtcgtctccattcttgcaggggtgtctctaagccagctagaagcggcgtttccccaatcaccagtcattagagccatgcccaataccccagccactgtaggctcagggatgaccgctatctgctctggtgcctacacttatgcccaacaccaaaaattggcgcaacaaattttttccgcagtaggggaagtagtcgaagtttccgaaagtttgatggatgcagtcaccgggctttctggcagtggcccggcttacgtagctttattggtagaagccctcgctgatgggggagtggcatcgggtttacccagaggaatagccaatcaactagcattacaaactgtgctaggaacagcccaactattacacgaaagtaaactccacccagccgaactcaaagaccgagttactagccctggcggtactaccatcgcggggattgcccaactagaaaaagcgggattccgttcagccttaatcgaagccgtcaaagcagctacatggcgatcgcaagaactaggaaaatag

SEQ ID NO: 56613 - protein, 270 aa, Nostoc sp. PCC 7120
MTIKFGLIGGGVMGEALLSRLIARGIYQPSEVIVSEPQTARQAFLQQKYHVGVTTDNSLVFTQAQDVVFLAVKPQVFSAIAQELADTVFTDHSPLVVSILAGVSLSQLEAAFPQSPVIRAMPNTPATVGSGMTAICSGAYTYAQHQKLAQQIFSAVGEVVEVSESLMDAVTGLSGSGPAYVALLVEALADGGVASGLPRGIANQLALQTVLGTAQLLHESKLHPAELKDRVTSPGGTTIAGIAQLEKAGFRSALIEAVKAATWRSQELGK

SEQ ID NO: 56614 - DNA, 843 bp, Drosophila melanogaster
  CDS (1)..(843)
atggccaagttggacgaaaagatcggcttcatcgggggcggaaacatggcctacgccataggatccggactggtgcgctgtgggatcgtgaaggctagccaggtgcaggtctccggtccccacattgagaacctgcaacggtggcgggatctgggagctgtgacctgcgacgacaactgcatggtcctggagcactcggacatagttttcatctgcgtaaagccacacatgctaacgccgtgtgccgcccagcttaaatacaagcacgtgccgtcggccaaggatgccagcaagctggtggtgtcggttctggcgggtaccagtctcgaaacgctggaggaggccttcagcttcatgggcagttcggagctgaaggtgatacgcaccatgcccaatacatccatgcaggtgggcgagggctgcactgtttacactggcaacgcacgcgtttcgcatcacgacttggaaaagattcacctaatgctcaacgccctgggactggcgcaacaggtgcccgagtccatgatcgacgccgttaccggggtagctggatgcggtccggcatttgtttacaccatcatagaggcactggccgatggcggcgtcaaacagggcgttccgcgtcagatggctcttcagtttgcggctcagacgcttctgggagcggccaaaacggtgctgctcactggaaaacatccggcggtgctgcgggatgaagtctgttctcccggtggcgccaccatagtaggcgttcatgaactggaaaaggggaacctcaggtctactttaataaacgccgtggaaaagtcgtcacagcgctctgctgaactgggaaagaagtga

SEQ ID NO: 56615 - protein, 280 aa, Drosophila melanogaster
MAKLDEKIGFIGGGNMAYAIGSGLVRCGIVKASQVQVSGPHIENLQRWRDLGAVTCDDNCMVLEHSDIVFICVKPHMLTPCAAQLKYKHVPSAKDASKLVVSVLAGTSLETLEEAFSFMGSSELKVIRTMPNTSMQVGEGCTVYTGNARVSHHDLEKIHLMLNALGLAQQVPESMIDAVTGVAGCGPAFVYTIIEALADGGVKQGVPRQMALQFAAQTLLGAAKTVLLTGKHPAVLRDEVCSPGGATIVGVHELEKGNLRSTLINAVEKSSQRSAELGKK

SEQ ID NO: 56616 - DNA, 819 bp, Agrobacterium tumefaciens str. C58
  CDS (1)..(819): transl_table=11
atggtgtacaaggcttccggtccgctcgtcctcgtgggggccggcaatatgggcggcgccatgctttcgggctggctgaaaaagggtgtgccgggatcgaaggtcatcgtcatcgaccctcgcccctccgacgccatgcgcacgacgatagcggaagccggcgcgacccacagcgaaagcgtgcctgagggcgtcaaggccggcattcttttcgtggcggtgaagccgcagatgatggatgccatattgccgtcgctgaagcccctgctgggtccggaaacggtcgttgtctccatcgcggccggtaccaccatcgccactttcgtttcgcatttcggtgcggtcgctgccgtgcgcgccatgcccaatacgcctgccatggtcggccgtggcgtcaccggcgcttatgccaacgatcttgtcacagccgagctgaaaaccgttgtggacgggttgctgaaggtcagcggtccggtcgaatgggttgaggccgaaagcgacatcgacgcggtgaccgcggtttcgggaagcggcccggcctatgtcttctatctggtggaatgcatggcggaagctggccgcaaggccggtctgccggccgacgtggccatgcgtctggcgcgcgaaaccgtggccggtgccggtgaactcctgcatcagtcccccgaggaggccgcgcggctgcgccagaacgtgacctcgccgggtggcaccacggccgcggcgctgtccgtgctgatggccgaagacggcatgcagcccctgttcgacagggccgtcgccgccgcgaaaacgcgcgccgaagaactggcgggctga

SEQ ID NO: 56617 - protein, 272 aa, Agrobacterium tumefaciens str. C58
MVYKASGPLVLVGAGNMGGAMLSGWLKKGVPGSKVIVIDPRPSDAMRTTIAEAGATHSESVPEGVKAGILFVAVKPQMMDAILPSLKPLLGPETVVVSIAAGTTIATFVSHFGAVAAVRAMPNTPAMVGRGVTGAYANDLVTAELKTVVDGLLKVSGPVEWVEAESDIDAVTAVSGSGPAYVFYLVECMAEAGRKAGLPADVAMRLARETVAGAGELLHQSPEEAARLRQNVTSPGGTTAAALSVLMAEDGMQPLFDRAVAAAKTRAEELAG

SEQ ID NO: 56618 - DNA, 717 bp, Pyrobaculum aerophilum str. IM2
  CDS (1)..(717): transl_table=11
ttgacagcaggggttatcggcgccggtaaactgggctcacaaattgcgcttagactacacggcaatagcgttagagttatcgcctctgtcaagaccgagaggtcgaggcagaggctcagcgcccttgggcttgaggtgtacacggacaataaaatagtggttgagaacagcgacgtgctgttcctggcggttaagccggctaacttggcggagttgaatttctacgtcgacaagccgcttatatcctttgtggcgggggcgacgctggagtatttaaagaggctttccgcgaggccctatagggcgatgactaacgtgggcttgacggctatagcagtcgccgggccttacgacgaggaggtgaacaagctcttgagctacatagcgcctactttttgggtggaggagaggttaatagacccgcttactgtactgctcggctcggggccggcaattgtcgcggaactcgccctggctcttataagagccggcgtaaatataggcattccgtgggatttatctagggagatagtgctgtcgttaatggcaagcctcccgtctcttgacgacaagttctcaatggagaaactggcgcagtacgtggcgactcccggcggcactacaataaaagcccttgtggagttgtccccggccggccagttagtgggcagggccgtggaagaggcctatttaagaatttcaaaactccgacagtag

SEQ ID NO: 56619 - protein, 238 aa, Pyrobaculum aerophilum str. IM2
MTAGVIGAGKLGSQIALRLHGNSVRVIASVKTERSRQRLSALGLEVYTDNKIVVENSDVLFLAVKPANLAELNFYVDKPLISFVAGATLEYLKRLSARPYRAMTNVGLTAIAVAGPYDEEVNKLLSYIAPTFWVEERLIDPLTVLLGSGPAIVAELALALIRAGVNIGIPWDLSREIVLSLMASLPSLDDKFSMEKLAQYVATPGGTTIKALVELSPAGQLVGRAVEEAYLRISKLRQ

SEQ ID NO: 56620 - DNA, 786 bp, Pyrococcus furiosus DSM 3638
  CDS (1)..(786): transl_table=11
atgaaggttgctgtaattggagcgggaacaattgggagtgctgttgcaaaggccttggctgaaagtaattacgaagtcattgctacaaggagaagcattgaaaaggttaaatggttggagaaatatggggtaaaacttgaaaaagacaacaaaaaagccagtagggaagcggatatcgtgattatcgcagtaaagccaaataaagtaggaaaggttcttgaagaaataaaggaagaagttgaaagtaaaattgtgatatctttagcggcgggaattccaataaagcttcttaagaggtttgcaaatgcaaaatttgtgagggctatgccaaatatagctgttctcgtaaaagagtcctttacagcctatgcaacggaagatttaagcgaagaggaaattagaactgttgaaaaaatctttgagtcctttgggaagtatataagaatcgacgaagaatatatggatgccataactggattaagtggctctggaccagcttatgtctctgtgtttttagaagccatgatatatggcggtttacgggttggactcccaagagatattgcaaaacttgcggccgctcaaaccctcttaggcactgcgaagctcttactaaattttgagggacaccctgctgaaattagagatatggtaattacccccggaggaacaacgatagatgggatatttgagttggaggaaggaaaaattagaacaacaataatgaaagccattgatgcagcaactaaaaaatcaaagatcttatccacaaggttatctccttaa

SEQ ID NO: 56621 - protein, 261 aa, Pyrococcus furiosus DSM 3638
MKVAVIGAGTIGSAVAKALAESNYEVIATRRSIEKVKWLEKYGVKLEKDNKKASREADIVIIAVKPNKVGKVLEEIKEEVESKIVISLAAGIPIKLLKRFANAKFVRAMPNIAVLVKESFTAYATEDLSEEEIRTVEKIFESFGKYIRIDEEYMDAITGLSGSGPAYVSVFLEAMIYGGLRVGLPRDIAKLAAAQTLLGTAKLLLNFEGHPAEIRDMVITPGGTTIDGIFELEEGKIRTTIMKAIDAATKKSKILSTRLSP

SEQ ID NO: 56622 - DNA, 795 bp, Thermoanaerobacter tengcongensis MB4
  CDS (1)..(795): transl_table=11
atgaaaattggctttataggtgccgggaacatgggcatggcccttataaagggtattttgaagtcagactttgtggaagcagaagacttgatactttatgaccctgtaagagaaaaagtagaaggattggaaagagagtttgggacagttactgctaaagacaatctagaattaactgaaaaatcggatgtagtaatagtagcggtaaagccaaatgtttacgatgaagtgctcaaggaaattagagaaaaagtgacagaggaaaaaataataatcacgatagctccagggattactatagaccatgtaaaaaagcttttgggcagggggaaaatagttaggacaatccctaatactcctgcgttaataggagaaggcataacggccgttacatattccgaagaagtaaaagaagaagacaaagaacttgtgcgaaagatttttagcacttgtggagaaatagtggagatagaagaaaagttaatagatgtggcaatggccgtgtcaagttgcagcccagccttcgtatacatgtttatagaagccttagcagacggaggagtcctgctgggattgccaagagatgtagcttataaactggcttctaaagcggtatctggagcgggaagcatggtatttaagacaggctttcatccaggacagttaaaagacatggtcacttctccggggggaactactatagaaggcataagagttttggaaaaaagcggtatgagaagtgcggtgattgaagctgtgattgcagcttatcagaaggcaaaagggctgaaataa

SEQ ID NO: 56623 - protein, 264 aa, Thermoanaerobacter tengcongensis MB4
MKIGFIGAGNMGMALIKGILKSDFVEAEDLILYDPVREKVEGLEREFGTVTAKDNLELTEKSDVVIVAVKPNVYDEVLKEIREKVTEEKIIITIAPGITIDHVKKLLGRGKIVRTIPNTPALIGEGITAVTYSEEVKEEDKELVRKIFSTCGEIVEIEEKLIDVAMAVSSCSPAFVYMFIEALADGGVLLGLPRDVAYKLASKAVSGAGSMVFKTGFHPGQLKDMVTSPGGTTIEGIRVLEKSGMRSAVIEAVIAAYQKAKGLK

SEQ ID NO: 56624 - DNA, 855 bp, Streptomyces coelicolor A3(2)
  CDS (1)..(855): transl_table=11
atgaccccggaccacgcgcacaccccggagggcaccgaacccatgacccagaaagtcgcagtcctcggcaccggcaagatcggcgaagccctgctcagcggcatgatcggagccggctgggcccccgccgacctcctggtcaccgcccgccgccgggaacgggccgacgaactccgcgcccgccacggagtcacccccgtcaccaacgccgaggccgccaaggccgccgacaccctgatcctcacggtcaagccccaggacatgggcaccctcctcgacgaactcgccccgcacgtcccggccgaccgcctggtcatcagcggcgcggcgggcgtgcccacctccttcttcgaggagcgcctcgcgcccggcaccccggtcgtccgcgtcatgacgaacaccccggctctcgtcgacgaggccatgtccgtcatctcggccggcacccacgcgaccgcggcccacctgacccacaccgaggagatcttcggcgccgtcggcaagaccctccgcgtccccgagtcccagcaggacgcctgcaccgccctctccgggtcgggaccggcgtacttcttctacctggtcgaggccatgaccgacgccggcatcctcctcggtctgccccgcgacaaggcccacgacctgatcgtgcagtcggcgatcggcgcggcgaagatgctccgcgacagcggcgaacacccggtcaagctgcgcgagaacgtcacgtcccccgccggcaccaccatcaacgccatccgcgaactggagaaccacggcgtccgcgccgccctcatcgccgccctggaagccgcccgcgaccgcagccgcgaactggccaccggcaccaaggactga

SEQ ID NO: 56625 - protein, 284 aa, Streptomyces coelicolor A3(2)
MTPDHAHTPEGTEPMTQKVAVLGTGKIGEALLSGMIGAGWAPADLLVTARRRERADELRARHGVTPVTNAEAAKAADTLILTVKPQDMGTLLDELAPHVPADRLVISGAAGVPTSFFEERLAPGTPVVRVMTNTPALVDEAMSVISAGTHATAAHLTHTEEIFGAVGKTLRVPESQQDACTALSGSGPAYFFYLVEAMTDAGILLGLPRDKAHDLIVQSAIGAAKMLRDSGEHPVKLRENVTSPAGTTINAIRELENHGVRAALIAALEAARDRSRELATGTKD

SEQ ID NO: 56626 - DNA, 813 bp, Methanosarcina mazei Go1
  CDS (1)..(813): transl_table=11
atgataaatcgaaaaataggattcattggggcagggaaaatgggttctgctctcatgcagggcataattaaagccggaatcgtgcagcctgaaaatatcggtgcaagcgatgtatacgagccttttttaaaagagcttcagacaaagctggggatcagggtatcaaccgataataccgttattgtccgggagtcggatatcctcattcttgcagtaaagccccagacgcttggttctgtacttgaaaacctgaaaaatgaaattacttccgaaaaactcgtaatatcaattgctgcaggagtgcctctttcaacttacgagggcgctcttcttgaaggcaccagggttgtccgtgtcatgcccaatatagcagcaacagtttcggaggctgcttcgggaatttcccccgggaagaacgcgacccctgaggatatgaaagatgctcttactatcttttctgcggttggtactgcagttcaggttcctgaatccctgatggacgcagttacaggtctttccggcagtgggcctgctttcattttccctgtcatagaggctatggctgacggggctgtactggaaggcatggacaggaaaagcgctcttaccctcgcagcccagaccgtgctcggagccgcaaaaatggcacttgaaacaggcatgcaccccggagaactcaaagatatggttacatctcctgccggtaccactattcagggagttcatgctctcgaggaagcaggaatcagggcagcttttatgaatgcagttataagagcaagcgaacgctcaagagaactcgggaagaagtaa

SEQ ID NO: 56627 - protein, 270 aa, Methanosarcina mazei Go1
MINRKIGFIGAGKMGSALMQGIIKAGIVQPENIGASDVYEPFLKELQTKLGIRVSTDNTVIVRESDILILAVKPQTLGSVLENLKNEITSEKLVISIAAGVPLSTYEGALLEGTRVVRVMPNIAATVSEAASGISPGKNATPEDMKDALTIFSAVGTAVQVPESLMDAVTGLSGSGPAFIFPVIEAMADGAVLEGMDRKSALTLAAQTVLGAAKMALETGMHPGELKDMVTSPAGTTIQGVHALEEAGIRAAFMNAVIRASERSRELGKK

SEQ ID NO: 56628 - DNA, 855 bp, Xanthomonas axonopodis pv. citri str. 306
  CDS (1)..(855): transl_table=11
atgaacacaccggcttcgtcctcgccctcgtcttccgctacgacgtccatcgccttcgtcggcggcggcaacatggcgcgtagcttgatcgccgggctgatccggcagggtacgccggctgccagcatccgcgtagccgagccggtggccgatctgcgcgcagccttggcgcgcgacttcggcgtgcaggtggtcgaggatgcgcgcgccgctgtcgacgcgacgacgacctgggtcttggcggtcaagcctcaggtcctgccaatggtgtgcgcgcaactggccgatctcgcgcaggcccaacaaccgctactggtttccatcgctgccggcatcaccgccacgcagctgcagcgctggtctggcggagatatcgccgtggttcgtgccatgcccaacacacccgccctgctcggcgccggtgtcaccgggctgtacgccaacgcgcgcgtgtccgcagcgcaacgccaacaggcgacccagctactggacagcgccggcgtcaccgtctggatcgacgacgaagcgcagatggatgcggtgaccgccgtctccggcagcggaccggcctatgtctttctcttggccgaagcgatggaagctgccgcgcaagcgcagggcctgcccgccgcagccgcgcgtacgttggtgctgcaaacgctgctcggcgccgcacgcatgctcaccgaatcgggcgaagcaccggaggtcctgcgtcgccgcgtgacctcgcccaacggcacgacccatgccgccatcgagacgttccaggccggcggctttgaggccctcaccgcccaggccattgccgcagcgaccgaacgcggccgcagtttatcggccgccaacgactga

SEQ ID NO: 56629 - protein, 284 aa, Xanthomonas axonopodis pv. citri str. 306
MNTPASSSPSSSATTSIAFVGGGNMARSLIAGLIRQGTPAASIRVAEPVADLRAALARDFGVQVVEDARAAVDATTTWVLAVKPQVLPMVCAQLADLAQAQQPLLVSIAAGITATQLQRWSGGDIAVVRAMPNTPALLGAGVTGLYANARVSAAQRQQATQLLDSAGVTVWIDDEAQMDAVTAVSGSGPAYVFLLAEAMEAAAQAQGLPAAAARTLVLQTLLGAARMLTESGEAPEVLRRRVTSPNGTTHAAIETFQAGGFEALTAQAIAAATERGRSLSAAND

SEQ ID NO: 56630 - DNA, 822 bp, Drosophila melanogaster
  CDS (1)..(822)
atgtcggcaatcggaaagatcggattcctgggaggcgggaatatggccaaggctttggctaagggtttcctagcggccggcctggccaaacccaataccctgatagccagcgtccatccggcagataagctctccctgcagtcctttcaatccctgggagtggaaacagtgatcaagaatgcacccgttgtgcagcaatcggatgtggtcttcgtgtccgtgaaaccccaagtggttccctcggttttgtcggagattcagccattgagctcgggcaaactattcctttccgtggccatgggcatcactttgtccaccatcgagtccagtttatctccacaagctcgcgtcatccgtgtgatgcccaatctgccggctgtcgtgtgttccggttgttcggttttcgttcgcggatccaaggccacagatgcagatgcggatattacccagaagctgctgcagtccgtgggcacttgtgagccggtggatgagtcccagttggatgtggttactgctctgagcggaagtggaccggcctatgtattcgtgatgattgaggccttggcggatggagccgttcacatgggcatgcccagggatctggcctatcgtttggcatcgcaaacagtcctgggcgcaggtcacatggtgcgggacagtggtatgcatcccggacaactcaaggatggggtcacaagtccggcgggatcgacagcagcggcactcagacaactcgagctgtcaggttttcgggctgcggtgtctggagcggtggaacaggcgactctgcgatgccggcaaatctcgggaaagacgaagtag

SEQ ID NO: 56631 - protein, 273 aa, Drosophila melanogaster
MSAIGKIGFLGGGNMAKALAKGFLAAGLAKPNTLIASVHPADKLSLQSFQSLGVETVIKNAPVVQQSDVVFVSVKPQVVPSVLSEIQPLSSGKLFLSVAMGITLSTIESSLSPQARVIRVMPNLPAVVCSGCSVFVRGSKATDADADITQKLLQSVGTCEPVDESQLDVVTALSGSGPAYVFVMIEALADGAVHMGMPRDLAYRLASQTVLGAGHMVRDSGMHPGQLKDGVTSPAGSTAAALRQLELSGFRAAVSGAVEQATLRCRQISGKTK

SEQ ID NO: 56632 - DNA, 801 bp, Chlorobium tepidum TLS
  CDS (1)..(801): transl_table=11
atggcacgactttccatagggtttatcggcaccggacgcattgcccaggcgcttatttccggactttcacacgacccgaacatcgtcatctgcggctacgacaagatgcctgatgcactgcactcggtatccctgcaatacggcgtcaataccgaggagtcaatcgaaagcctcgcgcgcgacgcggagatcatcgtcattgccgtcaagccgtaccagatggccgaagtgctcgcagagctgaaacccgcactccacgggcagcatctcattgtcagcgtggcggcaggaatctcgacaggcttcattgaatcgaactgccctgagggcacgagggtggtgcgagtgatgccgaataccccggcgtttgtgggtgaggggatgaccgccttgtgcaaagggatgcacgccacagcggacgaccttctggttgccgaacggattttcaacgcgattggcaagacggccatcatcgaggagagcggcatggatgccgcgacggcagtgtcgggcagcggaccggcctacatgttcaggatcatcgactcccttgccgaaggtggagaggcgtgcggcctcgaccgcgaaaccgcgcaactgctcgctgcccagacgatgctcggcgcggcgaaaatggtgctctcgggccacaaaagccccgaagagctggtgcgcgaagtgacgactcccggaggtaccaccgaagccgggctgaaagcgatggacgagcgcgacctgcgtggagcgctcatcgacacggtcagggccgccgccgcccgttcgaaagagctgatgaagtag

SEQ ID NO: 56633 - protein, 266 aa, Chlorobium tepidum TLS
MARLSIGFIGTGRIAQALISGLSHDPNIVICGYDKMPDALHSVSLQYGVNTEESIESLARDAEIIVIAVKPYQMAEVLAELKPALHGQHLIVSVAAGISTGFIESNCPEGTRVVRVMPNTPAFVGEGMTALCKGMHATADDLLVAERIFNAIGKTAIIEESGMDAATAVSGSGPAYMFRIIDSLAEGGEACGLDRETAQLLAAQTMLGAAKMVLSGHKSPEELVREVTTPGGTTEAGLKAMDERDLRGALIDTVRAAAARSKELMK

SEQ ID NO: 56634 - DNA, 822 bp, Yersinia pestis KIM
  CDS (1)..(822): transl_table=11
atgcagcatcgcaatattacattcattggtgctggcaatatggcccgcgctattatcgctggtttggttgccgggggatatccggccaaaatgatcagcgtttgcgccccttctgccaaaaaccgtgatgcactagccactgaatttggtgttatcagcagtgatgataatatccgcgagtcacaaaaagcggaggttgtggtgttagcggtaaagccccagttaatggccgatgtatgccagcaattgcaaaaacaggtcgattttagcgataagttggtgctgtcgattgcggcaggtgtccaggttgcacgtttctacgcgcttttggggaataaactgaatctggttcgtattatgccgaataccccctctctggtgggaaaaggaatgagtggcctctacgcccccgagcaggtttcagccgcagatcgtgatttcaccactgaactaatgagtgcaattggcaaagtatgctgggtggacaatgaggatggcattaatagcattattgccgctgcggggagttcacctgcctatttcttcttatttatggaagcgatgcagcaagagactgaacgcttagggtttgacagtgaaaccgcccgtcagttagtgcagcaagccgcttccggggcttgtgctctggtcgaggctaacccacacgtgccactttcggccttgcgagagcaggtcacgtccaaagggggaaccactgccgaggcaatccgcgtgttcaatgaacagcacttacccgaaatggttgccaatgccatgcgagccgctattgctcgcgcaaaagagatggaaaaactgttctaa

SEQ ID NO: 56635 - protein, 273 aa, Yersinia pestis KIM
MQHRNITFIGAGNMARAIIAGLVAGGYPAKMISVCAPSAKNRDALATEFGVISSDDNIRESQKAEVVVLAVKPQLMADVCQQLQKQVDFSDKLVLSIAAGVQVARFYALLGNKLNLVRIMPNTPSLVGKGMSGLYAPEQVSAADRDFTTELMSAIGKVCWVDNEDGINSIIAAAGSSPAYFFLFMEAMQQETERLGFDSETARQLVQQAASGACALVEANPHVPLSALREQVTSKGGTTAEAIRVFNEQHLPEMVANAMRAAIARAKEMEKLF

SEQ ID NO: 56636 - DNA, 822 bp, Thermosynechococcus elongatus BP-1
  CDS (1)..(822): transl_table=11
atgcccaacaacaccatagtgcctagggtgcctgctcttgggatcattggctgtggccgcatggcggaggcaatgcttgcgcggctgcttgcaaagggtctattgccagaccatgtgtgggtatcggcgcgatcgccccagcggcaacagtacttagcccacacctacggggttagagtcacaactaaccttgaagtagccaccgccgaaacgctcctactggcggtcaagccccaggtcttggccgatattgagtcggaactcgcggatacgccggtagctcaggagatgggggttgtcctttctatcatggccgggatccacagtgggcggctgcggcggctttttccccagcggttgatctttcgggcgatgccgaatacaccagcacaggtgggtgctggcgtcattgcccttgccagtgacagtgcagccagtgaactggagattcaaaagattaagaatttgttgggggtgctggggcaggtggtggctgtcagtgaagggcaaatggatgcggtcacggcgctgtctggctctggccctgcctttgttgctctcattgtcgaggctctctgtgatgcgggggtggcagtgggcctatcgcgatcgctgacacaggaactcgtttatggcacaatagcaggcacagtacaattactgaaggagcgtgggctgcatccggcgcaactcaaggatgcggttgccagtcctgcagggacaaccattgcgggtctcgaagtcctggaagctgccggtatgcgtggaaccctcatgcaaacagtaaaagcggcctacgagcgttcccaagccctcaactaa

SEQ ID NO: 56637 - protein, 273 aa, Thermosynechococcus elongatus BP-1
MPNNTIVPRVPALGIIGCGRMAEAMLARLLAKGLLPDHVWVSARSPQRQQYLAHTYGVRVTTNLEVATAETLLLAVKPQVLADIESELADTPVAQEMGVVLSIMAGIHSGRLRRLFPQRLIFRAMPNTPAQVGAGVIALASDSAASELEIQKIKNLLGVLGQVVAVSEGQMDAVTALSGSGPAFVALIVEALCDAGVAVGLSRSLTQELVYGTIAGTVQLLKERGLHPAQLKDAVASPAGTTIAGLEVLEAAGMRGTLMQTVKAAYERSQALN

SEQ ID NO: 56638 - DNA, 813 bp, Oceanobacillus iheyensis HTE831
  CDS (1)..(813): transl_table=11
atgaatcaaacgattgcatttatgggagcaggttcgcttgcagaagcgattatttctggaattacgaaagctcaaattgtcccaaatgaaaatatactcgtaaccaataaaagtgatataaaccgattaaaacgaatagaagaaggctatgacattcaaggaaatacgaataaacaagaagtcattaaacaagcagatattatcattttggcgatgaaaccaaaagacgctgcaacctcattatcttttatgaaagaatacattcgtcctgatcaaatggtgatttctgtaattgcaggacttacaacggaaagaatggaagcgattttagaaaaagagataccagtgattcgaaccatgcccaatacctctgcgttaattggatattcagctaccgccattgcaaaaggatcctatgttactgatgagcaattagcagttgcagaacaattatttcaaactgttggtatgactacaattattaaagaaaaagatatgcatacggttacggctatcgctggcagtgggccggcattcttttactatatggtcgaagcgatggaacaagcagctgtagaagcaggtttggatgcagaaatggcatctcaattaatagctcaaaccgttatcggtgcaggaaaaatgttagaattatctggagacccaataacacttcgaaaaaatattacaagtcctggtggaacaaccgaagccggtgtccagcaattaatgagtgaagattttgcatcaattgtccagtcttgtgttcagagggcacgagaacgttccatggaacttgctgccaagtcatga

SEQ ID NO: 56639 - protein, 270 aa, Oceanobacillus iheyensis HTE831
MNQTIAFMGAGSLAEAIISGITKAQIVPNENILVTNKSDINRLKRIEEGYDIQGNTNKQEVIKQADIIILAMKPKDAATSLSFMKEYIRPDQMVISVIAGLTTERMEAILEKEIPVIRTMPNTSALIGYSATAIAKGSYVTDEQLAVAEQLFQTVGMTTIIKEKDMHTVTAIAGSGPAFFYYMVEAMEQAAVEAGLDAEMASQLIAQTVIGAGKMLELSGDPITLRKNITSPGGTTEAGVQQLMSEDFASIVQSCVQRARERSMELAAKS

SEQ ID NO: 56640 - DNA, 801 bp, Bifidobacterium longum NCC2705
  CDS (1)..(801): transl_table=11
atgtccaatccaaccatcggattcatcggatacggcaatatggcgcaggccatcgccgaaggactcgtcgcagccggcgccgtcgacggtgccgacatcgtggcttgcgccgcgcattacgacaagctggaaaagaccacgatgaaagtgggtgcaaagccattgcacaacgcggccgaagtcgtcgcagcgtccgacatggtcgtcatcgccatcaaaccgtaccaaatcgaaagtgtcatcaagccagtcatcggcgcgattgccgacgaagacaaattcgtcgtatccatcgcggcgggctgggatcttgacaaataccgagacttgttcggcgccgatttcaacgcggcgcatatccaatgcaccattccgaacacgccgatggccgtcggcaagggggtactcgtcaccgaagccgacaacacgctgaccgacacgcaagccgaagtgttcgagcggctgttctcatcgatcagcctcatcgaacgcgttgattccgcgcatatgggcattggcatgtgcatcgcaggctgcgcaccggcattcaccgacatgtatatcgaggcgctcggcgacgcgggcgtgaaatacggcctgcaacgtgccaccgcctaccgtctagccgcgaagatggtggaaggcgtcggtgcgctatacctcaaaaacgaaacccatccgggcgtcatgaaggacgccgtctgctcgccgggcggcaccacaatcaagggtgtgacctcgctggaggaaagcgcgttccgcggtgcggtcatcaaggccgtcgacgccatcgaagcctaa

SEQ ID NO: 56641 - protein, 266 aa, Bifidobacterium longum NCC2705
MSNPTIGFIGYGNMAQAIAEGLVAAGAVDGADIVACAAHYDKLEKTTMKVGAKPLHNAAEVVAASDMVVIAIKPYQIESVIKPVIGAIADEDKFVVSIAAGWDLDKYRDLFGADFNAAHIQCTIPNTPMAVGKGVLVTEADNTLTDTQAEVFERLFSSISLIERVDSAHMGIGMCIAGCAPAFTDMYIEALGDAGVKYGLQRATAYRLAAKMVEGVGALYLKNETHPGVMKDAVCSPGGTTIKGVTSLEESAFRGAVIKAVDAIEA

SEQ ID NO: 56642 - DNA, 816 bp, Brucella suis 1330
  CDS (1)..(816): transl_table=11
atgcaggataaggtagttctggtcggttgcggcaatatgggctttgccatgctgagaggctggctcgacagcggcatcctgaaagctggtgacgtccatgtggtggaaccggctgaggcgctgcgcgagcgcgcagcattggcccatgtacatgtctatgcggatgcggcggacctgcccgccgatcttcaaccacgcatggtgctggttgccgtcaagccgcagatgatggccaatgtgctgcccgcctataaacgcttcgcaccggcttcaacctttgtgagcgtcgccgctggcattccggtcgcgctgtttgaaagccatctgggcaaagacgttgcggtcatccgctgtatgccgaacacacccgccgccatcggcaagggtatgctcgtcaccttcaagaacgccaatgtgagtgacgcaaatgaagcctttgtcacaagccttctcaaaacctccggcaaggtggcaagcgtggatgaggaagggttgatggatgcggtaactgccgtttccggttccggcccggcctatatattccacttcatcgaggcgctgacggatgcgggcgtgaaccttggcctgccgcgcgaaacggccgccctcctcgccatgcagacagtgatgggagccggcgcgctggcagatgccagcacggacagcccgtcaaaactgcgcgaacaggtgacaagcccgaacggcaccacagcagcggcacttgacgtgctgatgggcggcgaccggctcaaagaactcgtggctgaagccgttaaagccgcacacaagcgttcggtcgagctgggcaagagttaa

SEQ ID NO: 56643 - protein, 271 aa, Brucella suis 1330
MQDKVVLVGCGNMGFAMLRGWLDSGILKAGDVHVVEPAEALRERAALAHVHVYADAADLPADLQPRMVLVAVKPQMMANVLPAYKRFAPASTFVSVAAGIPVALFESHLGKDVAVIRCMPNTPAAIGKGMLVTFKNANVSDANEAFVTSLLKTSGKVASVDEEGLMDAVTAVSGSGPAYIFHFIEALTDAGVNLGLPRETAALLAMQTVMGAGALADASTDSPSKLREQVTSPNGTTAAALDVLMGGDRLKELVAEAVKAAHKRSVELGKS

SEQ ID NO: 56644 - DNA, 822 bp, Leptospira interrogans serovar Lai str. 56601
  CDS (1)..(822): transl_table=11
gtgattttgttaggattggaagtgcgatttttggagaaagaaattgatatgaaatatacgataggaattgcgggttgtggaaatatgggaggagcaatttatttctctcttaaagaacgttatccgacacaagtattgggatatgatccttatataatttccaatcaaaagatagaacttatatcttcctgggatgaatttgtttctaagtccgatttaatactcgtttgtgtaaaacctggaaaggtgattgaacttttaagacaaatcaaagttcctaaaaaaattatatccgttgccgctggaattcatatcgatacaattctaaaaaatcttccgacgggatccaatgtagtgagggtaatgcctaatttacctttactagtttcagaaggggcgatcggatttttcggagacgaagagttatacgaaaccgtttccgagatctttcagcctttaggacattctgtaaaactcggtagtgagactctcatggacgcggttactggactttccggatcgggcccggcctatgtttttaaatttatacaagctttagcagaaggtggcgttctttccggcttggggtatcaagaagcgttggatctcagcatacaaacagtgatcggttctgcacagcttcttagaaaagaaagagagaaagatccgacaactcatccagaagtgtggaaaaataaagtaacttctccaggaggaactacgatagctgggcttgtggaattggaaaaaaatggatttagcaatgcggttttagaggcggtaaaagctgcagcaaatcgttctaaagagttgggagtttaa

SEQ ID NO: 56645 - protein, 273 aa, Leptospira interrogans serovar Lai str. 56601
MILLGLEVRFLEKEIDMKYTIGIAGCGNMGGAIYFSLKERYPTQVLGYDPYIISNQKIELISSWDEFVSKSDLILVCVKPGKVIELLRQIKVPKKIISVAAGIHIDTILKNLPTGSNVVRVMPNLPLLVSEGAIGFFGDEELYETVSEIFQPLGHSVKLGSETLMDAVTGLSGSGPAYVFKFIQALAEGGVLSGLGYQEALDLSIQTVIGSAQLLRKEREKDPTTHPEVWKNKVTSPGGTTIAGLVELEKNGFSNAVLEAVKAAANRSKELGV

SEQ ID NO: 56646 - DNA, 819 bp, Shewanella oneidensis MR-1
  CDS (1)..(819): transl_table=11
atgagtcaacaaaaaatctgctttatcggtgcgggcaatatgacccgcagcatcattagcggcttaattcgtagcggttatcctgcatcacaggttcaggcgaccaacccaagccaaggtaaactcgatgccctcgccaccgattttggtgtacgtgtttcccaagacaatgtaagcgccgcacaggatgctgatgtgatcatattgtctgttaaacctcagttgatggagcaagtgtgtcaagcgctgcaaggcattgatatgtcaaataagcttctgataaccattgcagcgggcatcaaagcaagccgctacagcgagtatctggctcaacccattacacttatccgcactatgccaaacaccccaatgcaaatcggtgtaggtatgacgggactctatgcaccgcaatccctatctgatgcacaaaaagccattgccgaacgcttaatgtccagcggcggagaaatagtgtgggtaaatgaagaatctgacattaatcaagtgattgcccttgctggtagttcgcctgcttattttttcctactgatggaatcgatgattgatgcgggcaaacaaatgggcatggatgaagccaaagccagaagcttagtgcagcaagccgcccttggtgctgctatgatggctaaacaaaatcctgagctcacgctgggtaacttacgggaaaatgtcacctctaagggcggcacaacggcgcaagctatcgccacgttcgaagcggcagatctccgtggcgtcgtaaaaaaagccatggaaaactgcattaaccgtgcagaagaaatggcaaaaacgttttaa

SEQ ID NO: 56647 - protein, 272 aa, Shewanella oneidensis MR-1
MSQQKICFIGAGNMTRSIISGLIRSGYPASQVQATNPSQGKLDALATDFGVRVSQDNVSAAQDADVIILSVKPQLMEQVCQALQGIDMSNKLLITIAAGIKASRYSEYLAQPITLIRTMPNTPMQIGVGMTGLYAPQSLSDAQKAIAERLMSSGGEIVWVNEESDINQVIALAGSSPAYFFLLMESMIDAGKQMGMDEAKARSLVQQAALGAAMMAKQNPELTLGNLRENVTSKGGTTAQAIATFEAADLRGVVKKAMENCINRAEEMAKTF

SEQ ID NO: 56648 - DNA, 795 bp, Pseudomonas putida KT2440
  CDS (1)..(795): transl_table=11
atgaaaaccatctacatggtcggtgcgggccacatgggcggggcaatcctgctggggttgaaagcgtatttcaaaagtgccaccgacttgcgtgtgattgaaattgatacgcagcggtcgaacgattggcgtgcgaagggatttgagacgtcttcacggattcaaacactgcaacctcaggattgtgtggtgctcgccgtgccaccgcagcagttcgaaaacatgctcgcggcaaatccggtgctttgtcgccaccgtgggccggtcgtttcggtgatggcgggcatcacacatgccacgctggttcgcctgctagggcatgacgccgtcgtgcgagccatacccaatacgccctcggaagtcgcccaaggcgtcacgatgtattacgcaccctcggatgccgatgcggcgctgatcgacagtgctcggcagattttcgacgtgatcgggctctcgctgagggtcaatgacgaaaggcaaatcgacactggaacggctttggccggcggtgggcctgcattggtcgcgcactttgccgatgcgcttcaggactacgggcttcacatggggctggacagcgagcaggccgcggtcgtcgccctgcagctactcagtggcacagcagcgttgatccaggcgagcggtaagccggcaagccagatctgccaggaggtgcaaacggccggaggcactaccgaacgcgctatccgtgccttggacgcagctggcttcaaagggctggtaaatgcggcactggatgcggcagccaggcgttctgcagagttgggtcagtga

SEQ ID NO: 56649 - protein, 264 aa, Pseudomonas putida KT2440
MKTIYMVGAGHMGGAILLGLKAYFKSATDLRVIEIDTQRSNDWRAKGFETSSRIQTLQPQDCVVLAVPPQQFENMLAANPVLCRHRGPVVSVMAGITHATLVRLLGHDAVVRAIPNTPSEVAQGVTMYYAPSDADAALIDSARQIFDVIGLSLRVNDERQIDTGTALAGGGPALVAHFADALQDYGLHMGLDSEQAAVVALQLLSGTAALIQASGKPASQICQEVQTAGGTTERAIRALDAAGFKGLVNAALDAAARRSAELGQ

SEQ ID NO: 56650 - DNA, 819 bp, Pseudomonas putida KT2440
  CDS (1)..(819): transl_table=11
atgagcaagacacgtattgcctttatcggcgccggcaacatggccgccagcctgatcggtggtctgcgtgcccagggcctggacgcctcgcagatccgcgccagcgacccgggcgccgagacccgcagtcgcatccaggccgagcacggcattgaagccttcgaggacaacgcccaggccatcgatggcgctgacgtcatcgtgctggcggtcaagccacaagtcatgaaaaccgtatgtcaggcactgcaacccaacctgcaggatggccagctgatcgtttccatcgccgccggcatcacatgcgccagcctgcagagctgggtgggcgctcgcccggtggtgcgctgcatgcccaacaccccggcattgctgcgccaaggcgtgagcggcctgtacgccaccgctgaagtgtccggcgaacagcgtctgcaggccgaacaactgctgtcggctgtaggcaccgccctgtggctggagcaggaacagcaactggacgccgtgacagctgtgtccggcagtggcccggcgtacttcttcctgctgatcgaggccatgaccgcggcaggcgaaaaactcggcctgccacgcgaaacggcctcccaactgaccttgcagacagccctgggcgccgcgcgcatggcagttgcaagcgatgtcgatgccgctgaactgcgccgccgcgtcacttcgcccgccggcaccacggaagcggcgatcaagtcgttccaggccagcggcttcgaagccatcgtcgagcaggcgctgcaggctgcagccacgcgctctgccgagctggccgaacaactgggcaaataa

SEQ ID NO: 56651 - protein, 272 aa, Pseudomonas putida KT2440
MSKTRIAFIGAGNMAASLIGGLRAQGLDASQIRASDPGAETRSRIQAEHGIEAFEDNAQAIDGADVIVLAVKPQVMKTVCQALQPNLQDGQLIVSIAAGITCASLQSWVGARPVVRCMPNTPALLRQGVSGLYATAEVSGEQRLQAEQLLSAVGTALWLEQEQQLDAVTAVSGSGPAYFFLLIEAMTAAGEKLGLPRETASQLTLQTALGAARMAVASDVDAAELRRRVTSPAGTTEAAIKSFQASGFEAIVEQALQAAATRSAELAEQLGK

SEQ ID NO: 56652 - DNA, 879 bp, Bradyrhizobium japonicum USDA 110
  CDS (1)..(879): transl_table=11
gtggttatgggtcccggccttcgccgggacgacaccgaatttgtggtgaccacagtggcgaacagcactcttcaaaacatcaccggcaccatccttctcgccggcgccggcaagatgggcggcgcgatgctgaccggatggctggcgggcggactcgatccgcgccgtgtcgcggtggtcgacccgcacatcgcgcctgagatcagcgcgcttgccgccaagggcgtggcgctcaatcccgatgcgaaggcggcaggtcaggtcgagacgatggtcgtcgcggtgaagccgcagatgttccgcgaggccggcgcgaagctgaagcccttcgtctcggagaagacctccgtggtctcgatcatggcgggaaccacgatcgcctcgcttcaggaggtctgcggcggcgctgtcgtgcgcgcgatgccgaacacgccggccgcgatcggccgcggcatcacggtggcggttgcggcgaagaacgtcagcaccgcgcaacgcgcggtggccgacgcgctgctgcgcgccaccggctcggtcgaatgggtcgaggatgagagcctgatggatgcggtgaccgcggtgtccggctcgggaccggcctatgtgttcctgctcgccgaggaacttgcgcgcgccggtgtcgaagcgggattgcccgaggcgctggcgacgaagctcgcgcgcgaaacggtggcaggctcgggcgagctgctgcatcaatccgagctgccctccggcacgctgcgccagaacgtcacctcgcccggcggcaccacggccgcagcgctcggcgtgctgatgggcgagcccggcctgcgcgacctgatgatccgtgcaatcgcagcggcgacgcagcggtcgaaggaattggcgaagtag

SEQ ID NO: 56653 - protein, 292 aa, Bradyrhizobium japonicum USDA 110
MVMGPGLRRDDTEFVVTTVANSTLQNITGTILLAGAGKMGGAMLTGWLAGGLDPRRVAVVDPHIAPEISALAAKGVALNPDAKAAGQVETMVVAVKPQMFREAGAKLKPFVSEKTSVVSIMAGTTIASLQEVCGGAVVRAMPNTPAAIGRGITVAVAAKNVSTAQRAVADALLRATGSVEWVEDESLMDAVTAVSGSGPAYVFLLAEELARAGVEAGLPEALATKLARETVAGSGELLHQSELPSGTLRQNVTSPGGTTAAALGVLMGEPGLRDLMIRAIAAATQRSKELAK

SEQ ID NO: 56654 - DNA, 855 bp, Xylella fastidiosa Temecula1
  CDS (1)..(855): transl_table=11
atgccacacgtcaccctacttcccagcccatcacagatcgcattcatcggcggcggcaatatggcgcgcagcttgatcgcaggcatgatccgccaaggcgcccccagcacgtcaatatgcgtcatcgaaccaatcgccgcactgcgcgatgcacttatcgctgacttcaaaatcaaggccgtcaccacagccacagaagcggccaccgacaccagcacctgggtgctggccgtgaaaccccaagtgatgcctgacgtgtgtgccaccctgccacttccagtgcaacccaacacaccactggttatctcaatcgctgcaggcatcaccacctgcaaactcaaacactggcttggcgacacctgtgcgattgtgcgcgccatgccgaataccccagccctgctaggtgccggcgtaaccggactattcgccacctcacaaaccacgggcacacaacgcaccatcgctgaagaactctttaacagcgtaggcaagaccctatggatcaccgaagaagcgttaatggacgccgtgactgccgtatcagggagcggtccagcctatgcgtttttgcttgccgaagcgatggaaacagcagccatcatgcaaggcctctccaccgcaaacgcacgcacactcgtccagcaaaccctattgggtgccgcacgcatgatgaccgagtcaggggaaacacctgccgcactgcgccaccgcgtcacctcaccgcatgggaccaccgaagcggcaatcacaacatttcaagaaaacgacttccaaacacttgtcgcaaaagcgatagacgccgccacccggcgcgcacgcgccctcggaaagataaacgataccgatcccacctga

SEQ ID NO: 56655 - protein, 284 aa, Xylella fastidiosa Temecula1
MPHVTLLPSPSQIAFIGGGNMARSLIAGMIRQGAPSTSICVIEPIAALRDALIADFKIKAVTTATEAATDTSTWVLAVKPQVMPDVCATLPLPVQPNTPLVISIAAGITTCKLKHWLGDTCAIVRAMPNTPALLGAGVTGLFATSQTTGTQRTIAEELFNSVGKTLWITEEALMDAVTAVSGSGPAYAFLLAEAMETAAIMQGLSTANARTLVQQTLLGAARMMTESGETPAALRHRVTSPHGTTEAAITTFQENDFQTLVAKAIDAATRRARALGKINDTDPT

SEQ ID NO: 56656 - DNA, 792 bp, Lactobacillus plantarum WCFS1
  CDS (1)..(792): transl_table=11
atgaaaatcggattcattggtgccggtaacatgggccgcgcgattattgatgggtggttaaaacaacaagcggtcgtcccagcagatatttatattcacagtgcccatgccgcgagttatcaaccttatgcgcaaaaaaatgggctacaggcctgtgacactaatttggccgtggcacaagctgctgacgttatcgttttggcagttaagccgaacattgcgttggccgcattaaaagaagttcaagcagccttaacgggcaagtgggttattacaatggtatcagggttgagtttggccgattatgccacggttgcccctgatctccccgttctgagaatcatgccgaatgtgaacgtggcgattggtgccgggatgacggcgttggttggtaatgatgccttaacaccagagcaatatgcggctgggcaacaattattcgatgcgattggtgccacgagtgccatcgctgagaaagattttccaactttttcagccttagcaggtagttcgccggcctacatctatttctttattgacgcgatggcccgcgcaggcgtcaagcacggtttgagcaaggatgcagcgactaagattgcggcgcaggccacgctgggcagtgcgcagaatgttttagcttctgataaaattccgtttgacctgatcgatcaagtttcttcacctggtggcacgacggttgctggattactggccatggaagaggccggctttatgaccgcagtggtgaagggaattgatgcaacgattgcgaaggaacttggcgaatcttaa

SEQ ID NO: 56657 - protein, 263 aa, Lactobacillus plantarum WCFS1
MKIGFIGAGNMGRAIIDGWLKQQAVVPADIYIHSAHAASYQPYAQKNGLQACDTNLAVAQAADVIVLAVKPNIALAALKEVQAALTGKWVITMVSGLSLADYATVAPDLPVLRIMPNVNVAIGAGMTALVGNDALTPEQYAAGQQLFDAIGATSAIAEKDFPTFSALAGSSPAYIYFFIDAMARAGVKHGLSKDAATKIAAQATLGSAQNVLASDKIPFDLIDQVSSPGGTTVAGLLAMEEAGFMTAVVKGIDATIAKELGES

SEQ ID NO: 56658 - DNA, 819 bp, Pseudomonas syringae pv. tomato str. DC3000
  CDS (1)..(819): transl_table=11
atgagcaagactcgtatcgccttcgtcggcgccggaaacatggctgccagcctgatcggcggcctgcgcgcgcaaggcgtggaagcatcgctgatctgcgccagtgcgccgggtgccgaaacccgtgagcgcatttccactgaacacggcatcgaggtgttcgccgacaacgccgaggccgtcaagggtgccgacgtcgtggtactggccgtcaaaccgcagatgatgaaaagcgtctgccaggcactcaaggccagccttgaagctcatcaactgattgtctcggtcgcggcgggtatcacctgtgccagcctgactcaatggctgggcgaccagcctgtggtgcgctgcatgcccaacaccccctcgctgttgcgtcagggtgccagcggtctgtatgcgaccgacaaggtctcgccaacacaacgcgagcaggccgagcaattgctgtcggctgttggcgtggcagtgtgggtcgagcaggaaaaacacatggatgccgtgacagcagtgtccggcagcggccctgcctacttctttctgatgatggaagcgatgaccgcggcaggcgtgaagctgggcctgccggaagacatcgccaaaaaactcacgctgcaaacggcgctgggctcggcgctgatcgccactggcagcaatgtggacgcaggcgaattgcgtcgtcgtgtcgcctcaccgggcgggaccaccgaagctgcgatcaaggcctttcaggcaggcggcttcgaggcgctggtagaaacagcactgaccgccgcagaccaccgcgcagccgagctggctgagcaactgggcaaataa

SEQ ID NO: 56659 - protein, 272 aa, Pseudomonas syringae pv. tomato str. DC3000
MSKTRIAFVGAGNMAASLIGGLRAQGVEASLICASAPGAETRERISTEHGIEVFADNAEAVKGADVVVLAVKPQMMKSVCQALKASLEAHQLIVSVAAGITCASLTQWLGDQPVVRCMPNTPSLLRQGASGLYATDKVSPTQREQAEQLLSAVGVAVWVEQEKHMDAVTAVSGSGPAYFFLMMEAMTAAGVKLGLPEDIAKKLTLQTALGSALIATGSNVDAGELRRRVASPGGTTEAAIKAFQAGGFEALVETALTAADHRAAELAEQLGK

SEQ ID NO: 56660 - DNA, 774 bp, Bacteroides thetaiotaomicron VPI-5482
  CDS (1)..(774): transl_table=11
atgaaaatagctattatcggtgcaggaaacatgggtggttctatagcccgcggcctggcaaaaggaagtctgatagcagactcagatatcattgtatccaaccccagcgcaggcaaactggagaaactgaaagaagaatttccgggcatttccaccactctgagcaatacggaagcggcaacgggagcagatgttgtcattctcgccgtgaagccttggtttgtggagtccgtcatgcgcgagttgaagctgaagagcaaacagacgctcgtatccgtagcggcaggtatcagttttgaagaactcgcacactttgtgatagcaccggagatgccgatgttccgcctgattccgaacactgccatcagcgaactggaaagtatgacgcttatcgcggcacgcaacacgaacgatgaacagaacctgtttatgctccgcctgttcaacgaaatgggaatggccatgctcatccccgaagataagatagccgccaccacggcactgacttcctgcggcatcgcttacgtattgaaatacatccaggcagccatgcaggccggcatcgaaatgggcatccgtcccaaagatgcgatggaaatggtagcccagtccgtcaagggagccgccgcattaattctgaacaatgacacccaccccagcgtggaaatcgacaaagtgactactccgggcggaattacgatcaagggaatcaacgaactggaacacaacggatttacctccgccgtcatcaaagcgatgaaagcatccaaataa

SEQ ID NO: 56661 - protein, 257 aa, Bacteroides thetaiotaomicron VPI-5482
MKIAIIGAGNMGGSIARGLAKGSLIADSDIIVSNPSAGKLEKLKEEFPGISTTLSNTEAATGADVVILAVKPWFVESVMRELKLKSKQTLVSVAAGISFEELAHFVIAPEMPMFRLIPNTAISELESMTLIAARNTNDEQNLFMLRLFNEMGMAMLIPEDKIAATTALTSCGIAYVLKYIQAAMQAGIEMGIRPKDAMEMVAQSVKGAAALILNNDTHPSVEIDKVTTPGGITIKGINELEHNGFTSAVIKAMKASK

SEQ ID NO: 56662 - DNA, 783 bp, Enterococcus faecalis V583
  CDS (1)..(783): transl_table=11
atgaaaattggctttatcggtgctggcagtatgggcggtgccatgattaaagggttactgaaagctgaggcagtcaagaaggaacatttatatgtgaaaggcggatcaagtggaaccgcagaagcacttcaaaaagagtggggctttcaacttgtcacagattatgcacttttccaagaatgtaaggttatttttattgcgacaggagcaaaggtcgtgttacctgttcttcaggaattagcccctcatttttccaacgaaagtctattgatttctgttgcaacaggtcataccatacaagaagcacaaatggctcttggcaataaagaagccaaagttgttcatgccattcctaatacaccagttagcgtgaatcaaggcgtgattggcgtagccttggcaccaacaattgaaggccaaacgaaggacctggcaatggaacttcttgctactttagggttagtcaaagaaattcgtgaagcgcaactggaaacttttggtactgtggctggttgcagtccagcttttgttgatatctttatggaagcattgggagatgcagcagtcttagaagggttaccaagagacttatcttatgaaattgtcgctcaaatgataaaaggaacggcgaccttagccttagacacgaaaaaacacccaggagcattgaaagatgaagtgacttctccaggaggaagtacgattcgcggtgtcgtagctctagaaaaaaatggcttccgttatgccgtgatggatgcagttcagcaagccaaccacgaatag

SEQ ID NO: 56663 - protein, 260 aa, Enterococcus faecalis V583
MKIGFIGAGSMGGAMIKGLLKAEAVKKEHLYVKGGSSGTAEALQKEWGFQLVTDYALFQECKVIFIATGAKVVLPVLQELAPHFSNESLLISVATGHTIQEAQMALGNKEAKVVHAIPNTPVSVNQGVIGVALAPTIEGQTKDLAMELLATLGLVKEIREAQLETFGTVAGCSPAFVDIFMEALGDAAVLEGLPRDLSYEIVAQMIKGTATLALDTKKHPGALKDEVTSPGGSTIRGVVALEKNGFRYAVMDAVQQANHE

SEQ ID NO: 56664 - DNA, 825 bp, Coxiella burnetii RSA 493
  CDS (1)..(825): transl_table=11
atgaatacttccaatattacttttatcggcggcgggaatatggcgcgcaatatcgtggtaggattaattgccaacggctacgaccctaaccgtatttgtgttactaatcgaagtttagataaattagatttctttaaggaaaagtgtggagtccatactactcaagataatcgtcaaggagctttgaacgctgatgtggttgtgttagccgttaaacctcatcaaattaaaatggtttgcgaggaattaaaagatattttaagcgaaacgaaaattcttgtaatttccttagcagtaggcgttaccacaccgctcattgaaaaatggttaggcaaggcttcacgtattgtgcgtgctatgcccaatacaccttcctcggtaagagccggtgctacaggtttatttgcaaacgagactgtggataaagaccaaaaaaatctagcggaatcgattatgcgtgcggtggggttggtcatttgggtttcgtctgaggaccaaattgaaaaaatagctgcactttcgggctcgggccctgcttatatttttttaattatggaggcacttcaggaggccgcagagcaattaggtttaacgaaggaaacagcggaattgcttacggaacaaacagttttgggcgcggctcgtatggcacttgaaacggaacaaagtgtagtacaattgcgtcaatttgtaacgtcgccaggtggcaccacggagcaagcgatcaaagtattggaatcaggaaaccttcgtgaattatttattaaagcgttaacagccgcggttaatcgcgctaaagagttatcgaaaacggtagaccaatga

SEQ ID NO: 56665 - protein, 274 aa, Coxiella burnetii RSA 493
MNTSNITFIGGGNMARNIVVGLIANGYDPNRICVTNRSLDKLDFFKEKCGVHTTQDNRQGALNADVVVLAVKPHQIKMVCEELKDILSETKILVISLAVGVTTPLIEKWLGKASRIVRAMPNTPSSVRAGATGLFANETVDKDQKNLAESIMRAVGLVIWVSSEDQIEKIAALSGSGPAYIFLIMEALQEAAEQLGLTKETAELLTEQTVLGAARMALETEQSVVQLRQFVTSPGGTTEQAIKVLESGNLRELFIKALTAAVNRAKELSKTVDQ

SEQ ID NO: 56666 - DNA, 813 bp, Nitrosomonas europaea ATCC 19718
  CDS (1)..(813): transl_table=11
atgaaaattacttttattggtggcggaaacatggctggagccatgatcggcggcctgatacatcatggaagcacaccttcacacatctgtgccgtggaaaccgatgcgatgcgacgacagcaacttgccgaggcatgcggtgtcacggttacggcatcgatacctgatggaattcatggcagtgagattgttattcttgccgtaaagccgcagcagttacgtgctgtggccaatcaagctgcacaatttctgcagaataaacttgtaatttcgattgcagcgggagttcgtgcaagtgatctgagccagtggctgaaccggcatgaatttgtcattcgtgccatgcccaatacacccgctttgatcggagaaggtatcaccggcttatatgcgttacctttggtcgatagccggcagaaggaacaggccactacgattctggaggcaatcggtacagtaatctgggtgaatgaagaagcgcagctggatgcggtgacagctttatctggcagtggcccggcgtatgttttctattttctggaggccatgcaggaggccggaacacagttgggactgacagcagatacggcgaaacagcttgcaatgcagacatttctgggcgcaacacatcttgccgcacaaagtaatgacacgcttgcaacgctgaggatgaaagtgacttcgcaaggtggaacgactgaacaagctttactcagtatggaacaagccgatatcagaggggcgtttattcgtgccatgcatgctgcctgtgatcgttcccggcaaatgggtgaaatattcggacgtacataa

SEQ ID NO: 56667 - protein, 270 aa, Nitrosomonas europaea ATCC 19718
MKITFIGGGNMAGAMIGGLIHHGSTPSHICAVETDAMRRQQLAEACGVTVTASIPDGIHGSEIVILAVKPQQLRAVANQAAQFLQNKLVISIAAGVRASDLSQWLNRHEFVIRAMPNTPALIGEGITGLYALPLVDSRQKEQATTILEAIGTVIWVNEEAQLDAVTALSGSGPAYVFYFLEAMQEAGTQLGLTADTAKQLAMQTFLGATHLAAQSNDTLATLRMKVTSQGGTTEQALLSMEQADIRGAFIRAMHAACDRSRQMGEIFGRT

SEQ ID NO: 56668 - DNA, 855 bp, Helicobacter hepaticus ATCC 51449
  CDS (1)..(855): transl_table=11
atgaaaaaaacccttattgttgtgggctatggcaatatggctaaagctattcttgccaataatagttttgttacacagcgttatcatcttattattacaggtaggtatgctcataaagcttatgattttatcacacaatgtgcccttgatgcctctgtatatgaggctaaagtagaatcttcctcatcaaacaaaagtataattgatatagaaggcaaggatattttgttatgcactaagcccgctggtttggagagttttgtttttaaaggacaagcaaatagtgtatatagtgtattagcaggcacaagtatagcgatgatacaaaagcatcttagtgcgtcttctatcgtgcgacttatgccaaatattgctgctcatagtaagctttcagccacagctttttattatcatatgttagataccaaagattctgcacaggtgcttcataatgaaatacgcccatttatagaatcttttggtgtagccgtgcaagtagatagtgaagcacttatagaatctagtattgctgcaagcggtagtagcatagcttttttggcacttattgctgaatctctcattgatgcgggtattttagaaggattaaacgaacaacaaagtatagcattagtaaagcaaacttttgtaggatttgctacagagttagcccataaaagcccaaatgagcttaaatatgctatatcaagtccgggtggaacaactattagaggcttagcagtgttagaggagagcggtatgcgtggaatattaataaaagcagctcatactgctgcagaacacgcacgtcaggctatacaaaaatattccacgcaagatatgcctaaaaagcgctaa

SEQ ID NO: 56669 - protein, 284 aa, Helicobacter hepaticus ATCC 51449
MKKTLIVVGYGNMAKAILANNSFVTQRYHLIITGRYAHKAYDFITQCALDASVYEAKVESSSSNKSIIDIEGKDILLCTKPAGLESFVFKGQANSVYSVLAGTSIAMIQKHLSASSIVRLMPNIAAHSKLSATAFYYHMLDTKDSAQVLHNEIRPFIESFGVAVQVDSEALIESSIAASGSSIAFLALIAESLIDAGILEGLNEQQSIALVKQTFVGFATELAHKSPNELKYAISSPGGTTIRGLAVLEESGMRGILIKAAHTAAEHARQAIQKYSTQDMPKKR

SEQ ID NO: 56670 - DNA, 831 bp, Rhodopirellula baltica SH 1
  CDS (1)..(831): transl_table=11
ttgaatctcgagatgcaactcaccggattgacggtcattggcggcgggcaaatggctcgcgctctcgttggcggaatgctcgaaagcgggtgtctcaaggcaagtgaactgacgatcgttcacaaaaccaagtcgactggagagtggtggtcgtcgaagtacagcgaatgcaccacgacaaccgatacggtcgaggcggtcgccggtgccaaggtcgtgatgctagcggtgaagccgcacatcatcgcagaagtcctggcggtcaagaatagtgccgggaaatcggccgattggtcggggaaattgatcgtctccattgccgcgggaatcgggttggacaaactcatcgacggagtcggtcacgaccgcgttgttcgcgtgatgccgaacacacctagtctcgtgggcgagggagcgagcggtttttgtgtcagcggcggcgtcagtgatgacgatgtgcagctgatcgaaaccatgctcaatagtgttggcatcgccgcacaagtcactgagccgcaaatgaacggggtcaccggagtcagtgggtcagggccggcctacgtgttcctcatcatcgaagctcttgccgatggcggcgtcgcggcgggtttgcctcgtgcgaccgcgttgcaattggctacacaaactgttttgggagccgcaaaaatggttcgcgaaacgggagagcatcctggctttttgaaggacaacgtctgcagccccggcggaacgaccattgccgcgatgagtgtcctggaacagaatgccgttcgaggggcgatgattcaggccgttcaagcgtccgcgaatcgcagccgtgaactcgcctag

SEQ ID NO: 56671 - protein, 276 aa, Rhodopirellula baltica SH 1
MNLEMQLTGLTVIGGGQMARALVGGMLESGCLKASELTIVHKTKSTGEWWSSKYSECTTTTDTVEAVAGAKVVMLAVKPHIIAEVLAVKNSAGKSADWSGKLIVSIAAGIGLDKLIDGVGHDRVVRVMPNTPSLVGEGASGFCVSGGVSDDDVQLIETMLNSVGIAAQVTEPQMNGVTGVSGSGPAYVFLIIEALADGGVAAGLPRATALQLATQTVLGAAKMVRETGEHPGFLKDNVCSPGGTTIAAMSVLEQNAVRGAMIQAVQASANRSRELA

SEQ ID NO: 56672 - DNA, 834 bp, Bordetella bronchiseptica RB50
  CDS (1)..(834): transl_table=11
atgaaaaacgatctctccatcgcgttcatcggcggcggcaacatggccgccgccctggccagcggcctggccggcaaggtctgcccggcagccaatatccatgtcgtcgacatcaatgcggactcgcacgccggctggcgcgcccgcggcatgagcgccgcggcggcgccggacgccaccctggcaggctgccgggtgtgggtctatgcggtcaagccgcagcatatgcgcgaggccgtggccggcacgcgcccgtggctgcgcccggacacgctgatcgtcagcgtggcggcgggcatccgcgccgatacgctggccggctggctgggcgaaccgggccagccatggcagcgcctggtgcgctgcatgcccaatacgccggcgctggtgggggcggggatgaccggcctggccgccttgccgggcgtgaccccgcaggaccgcgaactggccggccagctgctcacttcggtgggcgaggtggtctgggtcgacggcgacgccgggctggacgccgtgaccgcgctgtcgggcagcggcccggcctatgtgttcctgttcatcgaggcgctgatcgccggcggccgcgccgtcgggctgaccgacgagcaggcgcgccagctggcgctgggcacgctggccggcgccacgcggctggcagcgcaatcggatgaaccgccggccgtgctgcgcgagcgggtcacctccaagggaggcaccaccgccgccgcgctggacgtgtacgcccagggcgacttcgccggcctggtcgagcgcgccatgcaggccgccgcgcgccggtcgcgcgagctggccgaggagttcggccgatga

SEQ ID NO: 56673 - protein, 277 aa, Bordetella bronchiseptica RB50
MKNDLSIAFIGGGNMAAALASGLAGKVCPAANIHVVDINADSHAGWRARGMSAAAAPDATLAGCRVWVYAVKPQHMREAVAGTRPWLRPDTLIVSVAAGIRADTLAGWLGEPGQPWQRLVRCMPNTPALVGAGMTGLAALPGVTPQDRELAGQLLTSVGEVVWVDGDAGLDAVTALSGSGPAYVFLFIEALIAGGRAVGLTDEQARQLALGTLAGATRLAAQSDEPPAVLRERVTSKGGTTAAALDVYAQGDFAGLVERAMQAAARRSRELAEEFGR

SEQ ID NO: 56674 - DNA, 843 bp, Prochlorococcus marinus str. MIT 9313
  CDS (1)..(843): transl_table=11
gtggcctctaatcactccatgccctgctctttgggggtaatcggcctgggtcgaatggcccaggctcttgttttgccgttgttgaagcagggagagcttgctccgcagcagcttgttgcggttgtgggctgtggcgcaagtgttgaacgtctcgcagatcagttgccaatcggtctgcgtttgaaagctgcagatgatcccactgcggcagaggcatggatggcgcccattcaattgctagcggtgaaaccgcagcagcttgaccagatagcggcttcagcagctcgtcttaagaaaactgcagatgggccgcacctgttgatttctgtgcttgctggcgtgagcttggcgcgtttgcagcaggctttccccgctcatgcctgtgtgcgtgccgttccaaatacccctgccttggttggcgctgggcttactggattgtcttggggagagggcgtcacgccagagcaacgcctagcggttgagcgattgtttttgccggtgagcgaggtgctggaattgccggagtcgcagctggatgcttttttggcgttgacgtcatccggccctgcctatgtggcactggtggctgaggcgatggctgatggtgcagtagcggcaggcctgccgagatccttggcccatcatcttgcccatcgcacccttgctggcacagccgccttgcttaagcagcagaaactgcatcctgcggagcttaaagacatggtgacctctccgggtggcaccacgattgccgcactgcgcaagcttgagcgggcaggggttcgttctgctttgattgaggcggttgttgcagctgctcaacgtagccgtgaactggcttga

SEQ ID NO: 56675 - protein, 280 aa, Prochlorococcus marinus str. MIT 9313
MASNHSMPCSLGVIGLGRMAQALVLPLLKQGELAPQQLVAVVGCGASVERLADQLPIGLRLKAADDPTAAEAWMAPIQLLAVKPQQLDQIAASAARLKKTADGPHLLISVLAGVSLARLQQAFPAHACVRAVPNTPALVGAGLTGLSWGEGVTPEQRLAVERLFLPVSEVLELPESQLDAFLALTSSGPAYVALVAEAMADGAVAAGLPRSLAHHLAHRTLAGTAALLKQQKLHPAELKDMVTSPGGTTIAALRKLERAGVRSALIEAVVAAAQRSRELA

SEQ ID NO: 56676 - DNA, 804 bp, Chromobacterium violaceum ATCC 12472
  CDS (1)..(804): transl_table=11
atgcggatcacattcatcggcggcggcaatatggccggcgccatcatcggcgggctggcccgccagggcggccatcgcatccacgtggtcgaacatcagcaggacaagctggaccagctggccgccggcttcggctgcagcggcagccaggcactgcccgagcgcttcgccgccgacgaggtcgtagtgctggcggtcaagccgcagcagctgcgcgagctgtgcctggcgctggcgcctgtgcttaacggcgcgctggtggtatccatcgccgccggcatccgcctggacgcgctggcgcgctggctgggcagccgccgcatcgtgcgggtgatgcccaacaccccggccatggtcggcaagggggtatccggcctgtacgccgacgccgcggtgtccgccgccgaccgcgacgcggccgagaccgtgatgcgcgccgccggcctgaccgtgtggctggccgacgaggccggcatcgacgacatcacctgcgtgtccggcagcggcccggcctatgtgttctatttcatagagagcatgatagaggcggcggcgaaagcgggcttcggcgaggacaaggcgcgcgagctggtgctggcgactttcgacggcgcggtggagctggcgcggcagagcccgttgccggtggccgagctgcgccggaacgtgatgtccaagggcggcaccaccgaacgcgcgatcgcgcgcttcgaggccgaaggcgtcaaggcggccatcgtcgccggcgcgatggattgccgcgaccgctcgatcgagatgggccgcgaactcagccaggagtga

SEQ ID NO: 56677 - protein, 267 aa, Chromobacterium violaceum ATCC 12472
MRITFIGGGNMAGAIIGGLARQGGHRIHVVEHQQDKLDQLAAGFGCSGSQALPERFAADEVVVLAVKPQQLRELCLALAPVLNGALVVSIAAGIRLDALARWLGSRRIVRVMPNTPAMVGKGVSGLYADAAVSAADRDAAETVMRAAGLTVWLADEAGIDDITCVSGSGPAYVFYFIESMIEAAAKAGFGEDKARELVLATFDGAVELARQSPLPVAELRRNVMSKGGTTERAIARFEAEGVKAAIVAGAMDCRDRSIEMGRELSQE

SEQ ID NO: 56678 - DNA, 792 bp, Gloeobacter violaceus PCC 7421
  CDS (1)..(792): transl_table=11
atgaacttaggcattgtcggcggcggtgcgatggccgaggctttgatcgccggcctgatcgccggcgcggtttatgcaccttcggaaattgccgtgagcgacccggtggccgagcgcggcgagtggctccatcgccgctacggcgtggtggccgtcaccgacaatctggttcccgccgctgccccgacgctgcttttggctgtcaagccccaggcttttgccgtggtgagcaaccaggttgccgcccatgtgcgctccgaactggtggtgtcgatcctggcgggcgttccgctggcccgcctgcaggcggcctttaccgggcgggctgtcgtgcgggcgatgcccaacaccccggcgctggtgcgctccggaatcactgccctcagccgctcggagcgcgtcaccccggagcagtttgccgtcgcgcgcacgctcttcgcctgcgtgggtgaagtggtcgaggtgcccgaatccgccatggacgcggtgacgggcttgtcgggctccggtcccggttatctggcgctcgtggtcgaggcgctcatcgacggcggcgtggccgccggtctgccgcgggccaccgccagccagctggtgcttgccaccttgcgcggcagcgcggagttgttgatccaggagaagctgcacccggcggtgctcaaagaccgcgtcaccagccccggcggcaccaccatcgccggcatcgagcaactggagggacgctcggtgcgcggggcgtttatcgaggcggtccaggccgccacccgccgcgcccgggaactgtccgggtag

SEQ ID NO: 56679 - protein, 263 aa, Gloeobacter violaceus PCC 7421
MNLGIVGGGAMAEALIAGLIAGAVYAPSEIAVSDPVAERGEWLHRRYGVVAVTDNLVPAAAPTLLLAVKPQAFAVVSNQVAAHVRSELVVSILAGVPLARLQAAFTGRAVVRAMPNTPALVRSGITALSRSERVTPEQFAVARTLFACVGEVVEVPESAMDAVTGLSGSGPGYLALVVEALIDGGVAAGLPRATASQLVLATLRGSAELLIQEKLHPAVLKDRVTSPGGTTIAGIEQLEGRSVRGAFIEAVQAATRRARELSG

SEQ ID NO: 56680 - DNA, 822 bp, Photorhabdus luminescens subsp. laumondii TTO1
  CDS (1)..(822): transl_table=11
atggagagacgtaaaattaccttgattggtgcaggtaatatggctcacgccatcatagctggattagtaaaaggagggtaccctgctgagctgattaatgtctgcgcaccaagtcatactcgccgtgatgcactcgcaacagagtatggcgttaacagcggtagtgacaatattcgctacgcacaggaagcggacgttgttgttctggcggtaaaaccgcaagtgatggtagatgtctgccagcctctgaaagaaaatgtagatttcagtaacaagctggttctgtctattgcctcaggtatttccgttgcacgttttgatgctttattacaagacaaactcaatattgttcgtatcatgccaaacacgccggcattaattggtcaaggggtgagtggattattcgcatctgagcaagtcagtcagtctgaccgtgatttcactcaagcattaatgaacagtgttggtaaaacttactgggtaaaagatgaaaacggcatcaatgacgttatcgccgcagcaggcagtgcgcccgcttatttcttcctatttatggaatcaatgcaacaggaagcagaacgtttaggttttgataaccaaacagcccgtgaaattattttgcaaacggcaataggttctgcggcactggccgcatcaaatgtagatctcccttttgcaaccctgcgtgaacaggtaacatctaaaggcggtactactgcggaagcattacgtattttttatgaaggcaaattaccggaaaccatatccaacgcgatgcaggcggctattcgccgggcacaggaaatggaaaaacaattttaa

SEQ ID NO: 56681 - protein, 273 aa, Photorhabdus luminescens subsp. laumondii TTO1
MERRKITLIGAGNMAHAIIAGLVKGGYPAELINVCAPSHTRRDALATEYGVNSGSDNIRYAQEADVVVLAVKPQVMVDVCQPLKENVDFSNKLVLSIASGISVARFDALLQDKLNIVRIMPNTPALIGQGVSGLFASEQVSQSDRDFTQALMNSVGKTYWVKDENGINDVIAAAGSAPAYFFLFMESMQQEAERLGFDNQTAREIILQTAIGSAALAASNVDLPFATLREQVTSKGGTTAEALRIFYEGKLPETISNAMQAAIRRAQEMEKQF

SEQ ID NO: 56682 - DNA, 843 bp, Rhodopseudomonas palustris CGA009
  CDS (1)..(843): transl_table=11
atgttcgcgatgaccagctctgctcaatctcccctgcaacagctcggcggcacggtggttcttgccggcgccggcaagatgggcggtgcgctgctcaccggctggctggcgcaagggctggacggcggcgacgtcgtggtgatcgagccgcatccgaccgaggagatcgcggcgctgagcgcacgcggcgtccgcctcaacgcctccgccggcgatgtcggcgcggtgtcgacgctggtggtcgcggtcaagccgcagatgttcgccgaagccgccgccgcgctgcgcggctatgtcggcccctcgaccctggtggtgtcgatcatggccggcaagccgatcgcagcgctgtccgagcagctcggcggccacgtcgtccgggcgatgccgaacaccccggccgcgatcggccgcggtatcaccgtcgcggtcgcggccggtaacgtgacagccgcgcagcgcggcattgccgatgcgctgctgcgagccaccggcggcgtcgaatgggtcgacgacgaggcgctgatcgatgccgtcacggcggtgtccggctcgggcccggcctacgtgttcctgctcgccgaagaactcgcccgcgccggcgtcgaagccggtctgccggaaggcctcgccatgacgctcgcccgtgccaccgtcgccggttcgggcgaactgctgcaccgctccgacctcgatgccgccacgctgcgcaagaacgtcacctcccccggcggcaccaccgccgcggcgctcgaggtgctgatggcgaacgacggcttccgcccgctgctgacccgcgcggtcgccgcagcaacgaagcggtcgaaggaactggcgaagtag

SEQ ID NO: 56683 - protein, 280 aa, Rhodopseudomonas palustris CGA009
MFAMTSSAQSPLQQLGGTVVLAGAGKMGGALLTGWLAQGLDGGDVVVIEPHPTEEIAALSARGVRLNASAGDVGAVSTLVVAVKPQMFAEAAAALRGYVGPSTLVVSIMAGKPIAALSEQLGGHVVRAMPNTPAAIGRGITVAVAAGNVTAAQRGIADALLRATGGVEWVDDEALIDAVTAVSGSGPAYVFLLAEELARAGVEAGLPEGLAMTLARATVAGSGELLHRSDLDAATLRKNVTSPGGTTAAALEVLMANDGFRPLLTRAVAAATKRSKELAK

SEQ ID NO: 56684 - DNA, 819 bp, Bacillus cereus ATCC 10987
  CDS (1)..(819): transl_table=11
atggataaacaaattggattcatcggatgcggaaatatggggatggctataattggcgggatgctaaacaaaaagatagtgtcttcaaataaaatcatgtgttcagatttaaacacgacgaatttagaaaatgctagtgaaaagtacggaataactataactaccgacaacaatgaagtcgctaaaaatgctgatattttaattttatcaattaaaccagacttatacccattagtaattaacgaaattaaagaagtaataaaaaacgatgctatcatcgttacgatcgctgctggtaaaagtattgaaagtactgaaaatgcctttaataaaaaattaaaagttgtacgagtaatgcctaatactcctgctcttgttggagaaggaatgtctgcattatgcccaaatgaaatggtgacagaaaaggatttagaagatgtgctaaacattttcaatagttttggtcaatcagagatcgtaagtgaaaagttaatggatgttgtaacatctgtaagtggctcttcaccagcatacgtatatatgattatagaagcgatggcagatgctgctgtactagatggcatgccaagaaatcaagcatataaattcgctgctcaagcagtattaggctctgcaaaaatggtactagaaacaggaatacatccaggtgaattgaaagatatggtttgttctcctggcggaacaacgatagaagctgtagcaactttagaggaaaaaggcttacgaacagccatcatttcagctatgcaacgttgtacacaaaagtctgttgaactatctggtcaaacgaaaaagtaa

SEQ ID NO: 56685 - protein, 272 aa, Bacillus cereus ATCC 10987
MDKQIGFIGCGNMGMAIIGGMLNKKIVSSNKIMCSDLNTTNLENASEKYGITITTDNNEVAKNADILILSIKPDLYPLVINEIKEVIKNDAIIVTIAAGKSIESTENAFNKKLKVVRVMPNTPALVGEGMSALCPNEMVTEKDLEDVLNIFNSFGQSEIVSEKLMDVVTSVSGSSPAYVYMIIEAMADAAVLDGMPRNQAYKFAAQAVLGSAKMVLETGIHPGELKDMVCSPGGTTIEAVATLEEKGLRTAIISAMQRCTQKSVELSGQTKK

SEQ ID NO: 56686 - DNA, 849 bp, Nasonia vitripennis
  CDS (1)..(849)
atggttgactttagtttcttgataaataaaaatgttggatttgttggcggtggaaatatggcacaagcaattggtcttggacttgttaaaaaaggtgtcataaagcctaataatatatgggtatcaagtcgaactgaaaaaactttgagtgtatgggagagtgttggtatcaacatcaccttcaataactatgaagtagtacaaaattctgatgttatattcttagctgtgaaaccccaaatgctagatgaagcattaagaacttgtaaacctcctcatcataccactggcaaactttttgtttctgtaattgttggaattcctttagatactttagatgaaaaactgcgggcagtcgacagttttcccaagattataagatcgatgccaagcactccaatgatggttggtgaaggaataaccgtttactgcagtttgagaactaatgaagaagaagaatgtgctataaactatttgttctcacaactagggctttgtgaaaaaattcctgaatctcttatgaacagtgcaggaggtctatctggatctggtcctgcttacgcatacatgataatagaagcacttgctgatggtgctgtgaaaaaaggcattccacgagcttcagctacaagatttgcagctcaagtacttgttggtgctggaaaaatggtattagaaactggaaagcatcctggattactgaaggatgaagtatgctcacctggtggctccaccataactggagtccatgcaatggaaactggtggtgtcagagctgcaatgatgaacgctgttgaagcagctgtcaataaatcaaacgagttgacctcgttgttgggtaaaaagtga

SEQ ID NO: 56687 - protein, 282 aa, Nasonia vitripennis
MVDFSFLINKNVGFVGGGNMAQAIGLGLVKKGVIKPNNIWVSSRTEKTLSVWESVGINITFNNYEVVQNSDVIFLAVKPQMLDEALRTCKPPHHTTGKLFVSVIVGIPLDTLDEKLRAVDSFPKIIRSMPSTPMMVGEGITVYCSLRTNEEEECAINYLFSQLGLCEKIPESLMNSAGGLSGSGPAYAYMIIEALADGAVKKGIPRASATRFAAQVLVGAGKMVLETGKHPGLLKDEVCSPGGSTITGVHAMETGGVRAAMMNAVEAAVNKSNELTSLLGKK

SEQ ID NO: 56688 - DNA, 825 bp, Nasonia vitripennis
  CDS (1)..(825)
atgatgaaaatcggcttcgtaggcggcggcaagatggcccaggctctggcgaaaggcttcatcaaagcaggtctgacgaagggcgaaatgatgctcgccagctgtctgccaacggacaagaccagtatccaagaattcgaggcgatgggctcgaaagcggtcttctcgaaccccgaggtagccaatcacagtgatgtcctggtgctgtcggtgaaaccgcaaatcataaagaaaatcctcccagaactaagggacagcatacaaaagaagaagacgcttcttctgtccatagccatgggcgtatcgctcaaaactttagagaacagcgtacctgagggaacgccgatcgtcagggtgatgccgaacattcctgtgctggccggttgcggggcgacggtctacgttcgcggcaagcacgccagttcaaaggacgcagagatcacgaagaagctcttctccgcagtaggactctgcgaagaggtgcccgagagcatgatcaaccccatcacggcactcgccgcttctggtccggcttacgtgtacatgatgatcgaagctctggccgacggcggagtgaagatgggactcccgagagacctggcgtacagactggcctcgcagactgtcctgggcgcaggaacgatggtcaaggagacgaacatacatcccggagtcctgaaggacgacgtgtcatcacctgccggctcgacgataacggcgatccacagtctggagaaaaacggcttccgaggagccgtgatcgacgccgtcgaggcggcgactctcagatgcaaggagttcagtcccaacgatacggataagtga

SEQ ID NO: 56689 - protein, 274 aa, Nasonia vitripennis
MMKIGFVGGGKMAQALAKGFIKAGLTKGEMMLASCLPTDKTSIQEFEAMGSKAVFSNPEVANHSDVLVLSVKPQIIKKILPELRDSIQKKKTLLLSIAMGVSLKTLENSVPEGTPIVRVMPNIPVLAGCGATVYVRGKHASSKDAEITKKLFSAVGLCEEVPESMINPITALAASGPAYVYMMIEALADGGVKMGLPRDLAYRLASQTVLGAGTMVKETNIHPGVLKDDVSSPAGSTITAIHSLEKNGFRGAVIDAVEAATLRCKEFSPNDTDK

SEQ ID NO: 56690 - DNA, 990 bp, Magnaporthe grisea 70-15
  CDS (1)..(990)
atgctgaacaccccgtcagatggcgagctgactctggcggtcttgggctgcggcaccatggggatcgccatcctgtccggcatcctcacctccctccaggacatggcggcaagtggagtgttgtctgcatccgcgtccgggacgtcgactccggtccaccccgaggtccccgaccgccttcccagccggttcatcgcctgcgtgcggcgtcccgagagcgccaagaaggtcaaggtggcgctagcggagcacttgtccgtcgtaaaggtcgtgcagaatgacaacctcgcctcggcccggcaggccggcgtcgtgatcctggcctgcaagccccagatgatcggcgacctgttgagcaagcccggcatcgccgaggccctgcgcggcaagctcctcatcagcatctgcgccggcgtcaccgtgccccagatcgagggtcacctggagcaggccctggggtccaaggacgtcgagaacccctgccgcgtcgtgcgcgccatgcccaacacggcatccatgatccgcgagagtatgaccgtcgtggccacgacagagccgccactgccgcctcaggtttccagcctggtgacgtggatcttcaagcgcatcggagatgtcgtctacctcccggcgagcactatggatgcgtcaaccgcgctttgcggttccggtccagccttctttgccctgatgttggaggcggctgtcgatggcgccgtggccatgggcttgcctcgagctgaggctttgaggatggccgcccagaccatgaagggaaccgccgctttggtacagcatggagaccaccctgccctgctcagggacaaagtcagcacaccgggaggttgcaccattggtggactgctcgtactcgaggaaggtatcgtcaggggtacggttgcgagggcggttagggaggctacagttgtagccagtcagctcggccaaggtgtgcaaggagtgaacgggacgcgacctatgcgacactga

SEQ ID NO: 56691 - protein, 329 aa, Magnaporthe grisea 70-15
MLNTPSDGELTLAVLGCGTMGIAILSGILTSLQDMAASGVLSASASGTSTPVHPEVPDRLPSRFIACVRRPESAKKVKVALAEHLSVVKVVQNDNLASARQAGVVILACKPQMIGDLLSKPGIAEALRGKLLISICAGVTVPQIEGHLEQALGSKDVENPCRVVRAMPNTASMIRESMTVVATTEPPLPPQVSSLVTWIFKRIGDVVYLPASTMDASTALCGSGPAFFALMLEAAVDGAVAMGLPRAEALRMAAQTMKGTAALVQHGDHPALLRDKVSTPGGCTIGGLLVLEEGIVRGTVARAVREATVVASQLGQGVQGVNGTRPMRH

SEQ ID NO: 56692 - DNA, 846 bp, Gibberella zeae PH-1
  CDS (1)..(846)
atgactccctcactacaagacgcaaagatcaccttcctcggcggcggtaacatggccgccgccatcattggtggtctcctcgccaagaacaccaacaagcaaaacatttacgtctctgaaccctgggacgtcaaccgcaacaagatggccgacctcggcgtccgcaccaccgccgacaacaaggaggccgctgctgatgctgatgttgtcatcctcgctgtcaagcctcaggttgccaagggcgtttgcgaagagctcagctcagcttgggctggacgcgatagccttcctgttgtcatctccatcgctgctggcatcacccttgctagcattgcacagtggttcaagggcgatagtggaaaggcccctcatattgtgcgcgtcatgcccaacacgcctgcgctggttggtgagggtgcttcaggcctgtatgctgctgaggatgtcactgctgctgagaaggagttgacttctgctctcctgggcagtgtaagcaaggccaccgagtgggttgacaaggaggagcttctcgatgttgtcaccggtatttctggttctggccctgcttacttctttgctttcgtcgagcacctcatctccagcggcgtcagcctgggactatccgaggagcaagctacccgccttgccacgcagacctgcctcggtgctggaaagatgctcgtcgagtcatccgatgagccttctcaattgcgaaagaacgttacgagccccaacggtactacccatgccgctcttgttagtttcgagagctctggcttgaaggagattgtcaacaaggctgtcaaggctgctgccaaccgtgctcaagagcttggaaagaactaa

SEQ ID NO: 56693 - protein, 281 aa, Gibberella zeae PH-1
MTPSLQDAKITFLGGGNMAAAIIGGLLAKNTNKQNIYVSEPWDVNRNKMADLGVRTTADNKEAAADADVVILAVKPQVAKGVCEELSSAWAGRDSLPVVISIAAGITLASIAQWFKGDSGKAPHIVRVMPNTPALVGEGASGLYAAEDVTAAEKELTSALLGSVSKATEWVDKEELLDVVTGISGSGPAYFFAFVEHLISSGVSLGLSEEQATRLATQTCLGAGKMLVESSDEPSQLRKNVTSPNGTTHAALVSFESSGLKEIVNKAVKAAANRAQELGKN

SEQ ID NO: 56694 - DNA, 957 bp, Apis mellifera
  CDS (1)..(957)
atgactacaggattgaagacgatggaatttctaagattaggccgacgggttcgtcgacgtttaaatgctcgaagcgtgagcgaccaacttcttggcgacggagaggagaagaagaaaagggtcacgttgaacattgacacgaaaatgttaaagattggatttatcggaggtggaaagatggcccaggctttggcaagaggtttcatacggtctggattaagcaaaggtgaaatgatgttggctagctgtcttccaaatgatatgagtagcatagatgcgtttaaggaaataggatcaaatactgtattttcaaaccaacctgtaattgatcatggcgatgttctgattttatcggtgaaaccacaggtggttccaaaggttcttccggaattgaagaattacaagaaacttttactttctattgctatgggtattccattggcatcattagaaaaggccttaccagatggaactccggtaatcagagtaatgcccaatacgccagttcttgtaggttgtggtgcaacggtgtatgctcgtggaaagtatgcaggcgataaagaagctgaaatagcagaaaaattattctcctctgtgggtctatgcgaagaagtacctgaaaatttaattgatcctgttacgggtttagctggttcaggacctgcatatgtatatatgatgatagaggctttggcggatggaggtgtaaaaatgggtctcatgaggccatttgcgtataaattagctgttcaaactgttcttggagctggtactatggtacgagatacgaagacacatccaggacagcttaaagatgatgtagcatcgccagcaggctctaccatagttgcattacattatttagaagagcatggattgagatcagctataattggagcagttgaagtctcaacgaaacgatgtaaagaagttagtttaaatgcagagaaaaaatag

SEQ ID NO: 56695 - protein, 318 aa, Apis mellifera
MTTGLKTMEFLRLGRRVRRRLNARSVSDQLLGDGEEKKKRVTLNIDTKMLKIGFIGGGKMAQALARGFIRSGLSKGEMMLASCLPNDMSSIDAFKEIGSNTVFSNQPVIDHGDVLILSVKPQVVPKVLPELKNYKKLLLSIAMGIPLASLEKALPDGTPVIRVMPNTPVLVGCGATVYARGKYAGDKEAEIAEKLFSSVGLCEEVPENLIDPVTGLAGSGPAYVYMMIEALADGGVKMGLMRPFAYKLAVQTVLGAGTMVRDTKTHPGQLKDDVASPAGSTIVALHYLEEHGLRSAIIGAVEVSTKRCKEVSLNAEKK

SEQ ID NO: 56696 - DNA, 846 bp, Apis mellifera
  CDS (1)..(846)
atggataaaggttatttattgtcaaataaagttggttttattggtggtggaaatatggcaagtgctattggtgctggcttaattcgtaaaggtattttaaatccagataatgtttgggtttctgctcgtacaaataaaactttaggcttttggaatgatcttggtgctcatgctacattaaaaaatggagaagtagtagataattgtgatatcatattcttagcaatgaaacctcatatgtttgatgatgcacttaagggtattagagaaacgatgacaagcaaagcttcacatatactttttgtttcagttcttgtaggagttacattagattgtttagctaataaacttaaatctattgttacatatcccagaataattagatgcatgcctaatactccaatgatggttggagaaggaataacagtatattgttctatgaatacaacaaatcaagatgaaactataatagaaaaattattttcatatattggtgtaattgaaaatgttcctgaatctcttatgaatgctataggtggtctttcaggatctggtcctgcttatgcatatcttgttatagaagcattagcagatggtgctgtgaagatgggtgttccaagaccaatggcaacaaaatttgcagctcaagtattagttggagctggtaaaatggtattagaaacaggtagacatcctggtcaattaaaagatgaagtatgttctccaggaggtacaactattacaggagtacatgctatggaatgtggacaagttagagcttctatgatgaatgcagttgaagctgcagtaagaaaatcaaacgaattaacgtctaatataaaataa

SEQ ID NO: 56697 - protein, 281 aa, Apis mellifera
MDKGYLLSNKVGFIGGGNMASAIGAGLIRKGILNPDNVWVSARTNKTLGFWNDLGAHATLKNGEVVDNCDIIFLAMKPHMFDDALKGIRETMTSKASHILFVSVLVGVTLDCLANKLKSIVTYPRIIRCMPNTPMMVGEGITVYCSMNTTNQDETIIEKLFSYIGVIENVPESLMNAIGGLSGSGPAYAYLVIEALADGAVKMGVPRPMATKFAAQVLVGAGKMVLETGRHPGQLKDEVCSPGGTTITGVHAMECGQVRASMMNAVEAAVRKSNELTSNIK

SEQ ID NO: 56698 - DNA, 852 bp, Candida glabrata CBS 138
  CDS (1)..(852)
atgacatacactttaaccattctaggatgcggtgtgatgggccaagccgttctttctgccatttacaaggcaccaaaggcaacctctgtcatcaaggctttatatccatctaagattattacctgtaaccatgatgaaccaagtgctcaacaagttaccgaccttatctcaacttttgagacttcccctaatggaatcgaagtcgtctctacctatggcaagaatgtcgaagcagtgaagcaatctgatgttatcattttgggtaccaagccatttctggcagagcaagtattgaacggtgttaaagacgttactagtggcaagttgatcatctcattggctgctggctggacaattggtcaattacaggcgtacacaccatctgtctccagagtcatgactaatacaccagctaagtacggttatggttgtgctgtagtttctcattctcctcaggttacagaagaccagaagtcattggtcagcgaactaattagccatgttgggaagtacgttgaactaccagagaagaatatggatgctgccacagcacttgtaggctcaggtccagcgtttgtcctattggtgttggagtctctaatggagagtggtattaagatgggtatcccattgaaggagagcaccgagtgtgcgttgaaagtgctagaaggtactgcaaagatggttgaagaatctggtgttcacccaagtgttctaaagcaccaagtctgcacacctggaggcaccacaattgcaggattgtgtgtcatggaagacaaaggtgtcaagagtggtatcatcagaggtgtcgaagaagctgcgagagttgctgccgaactgggtaagaaatga

SEQ ID NO: 56699 - protein, 283 aa, Candida glabrata CBS 138
MTYTLTILGCGVMGQAVLSAIYKAPKATSVIKALYPSKIITCNHDEPSAQQVTDLISTFETSPNGIEVVSTYGKNVEAVKQSDVIILGTKPFLAEQVLNGVKDVTSGKLIISLAAGWTIGQLQAYTPSVSRVMTNTPAKYGYGCAVVSHSPQVTEDQKSLVSELISHVGKYVELPEKNMDAATALVGSGPAFVLLVLESLMESGIKMGIPLKESTECALKVLEGTAKMVEESGVHPSVLKHQVCTPGGTTIAGLCVMEDKGVKSGIIRGVEEAARVAAELGKK

SEQ ID NO: 56700 - DNA, 858 bp, Kluyveromyces lactis NRRL Y-1140
  CDS (1)..(858)
atgagtcgttacactttagctattgtgggatgtggtgttatgggccaagcattgttgagtgctatttacaatgcaccaaaagccagcgatgaagctcttcaatactatccaagcaagatcatcgcttgcaatgacgttccagccagcgcagagcttgtggagaaattggttagcgggtttgaaacttcgccaaacggaattgaggtcgaaattgctaccaatgataatgaaagagctgttgccgaagcgaaagtaatcattcttggattgaaacctcatatcgtggaaccagtcttgcagcaaatccctaacgaggacgggtccaagcttttgatctctttggctgccggtgttacattgaaccaattgtctcaatactacaaaaaggtttctcgtgttatgaccaacactccagctaaatacggttatggtactgcaattgtgtcacattctactagcgtcgagcctcaggataaagccattgtatcggaattggttagccaagtcggtaaatgtttggaactaccagaaaaaaatatggacgcagctactgcgctagtcggctcgggtccagcttttgtactactaatgctagaatcaatgatggaagccggactaaagatgggcatcccattgaaggagtcccgcgagtgtgctatgaaagtgttggaaggtactgccaagatggtcgagatttcaggacaaagtcctggtgtgttgaagcaccaagtgtgtactccaggaggtactacgatcgctggtctatgtgtcatggaagacaagggcgtcaagtccggcattatccgtggtatcgaagaagcagcaagagtttccaaggaattgggccaaaagaagtga

SEQ ID NO: 56701 - protein, 285 aa, Kluyveromyces lactis NRRL Y-1140
MSRYTLAIVGCGVMGQALLSAIYNAPKASDEALQYYPSKIIACNDVPASAELVEKLVSGFETSPNGIEVEIATNDNERAVAEAKVIILGLKPHIVEPVLQQIPNEDGSKLLISLAAGVTLNQLSQYYKKVSRVMTNTPAKYGYGTAIVSHSTSVEPQDKAIVSELVSQVGKCLELPEKNMDAATALVGSGPAFVLLMLESMMEAGLKMGIPLKESRECAMKVLEGTAKMVEISGQSPGVLKHQVCTPGGTTIAGLCVMEDKGVKSGIIRGIEEAARVSKELGQKK

SEQ ID NO: 56702 - DNA, 828 bp, Debaryomyces hansenii CBS767
  CDS (1)..(828)
atggaagattatactattgctgtgttaggatgtggtgttatgggtactgctgttacttcagctattctcaaagccaagtttgagccatacccatcaaagattatatgctgtaccaattcagaaaaactgtcgaccgaattaaaatcaaaattagatagcgacgtaatagaaacctcatatgggtcagagtcgaacaataaggctgtttcaaaagcagatattgtgattttgggatgtaaaccatttatgttcaaggatgtttacgaacaggtcaaaggctcgttaagtggtgatcaattgattatttcgttattagctggtaccacaattgaagaattgagcattatgtcaccttatgttgccaaggttatgaccaatactccagctcagtttggttgtggtatggctgttgtttcattctcggacgaagctgagtctaagtactctgatttggtcatgaagttgattgatccagttggaaaggccatgaaattgccagaaaagaacatggatgcggccactgcattagtcggttctggacctgctttctgcttgttgattatggaagcattggttgatggtggtgttagaatggggcttccatatgctgttgcgaaggaatccgccgctaaagttatggaaggtactgcaaagatggtcttagaaactggtgaacatcctgctgctttaagaagtaaaatctgtactcctggtggaactacaattggtggcttactaaaaatggaagatgctggtgttagaggaggtattgcaagagccgttgaagaagctgccaacatttccgcctcctttgctaaaaagaaataa

SEQ ID NO: 56703 - protein, 275 aa, Debaryomyces hansenii CBS767
MEDYTIAVLGCGVMGTAVTSAILKAKFEPYPSKIICCTNSEKLSTELKSKLDSDVIETSYGSESNNKAVSKADIVILGCKPFMFKDVYEQVKGSLSGDQLIISLLAGTTIEELSIMSPYVAKVMTNTPAQFGCGMAVVSFSDEAESKYSDLVMKLIDPVGKAMKLPEKNMDAATALVGSGPAFCLLIMEALVDGGVRMGLPYAVAKESAAKVMEGTAKMVLETGEHPAALRSKICTPGGTTIGGLLKMEDAGVRGGIARAVEEAANISASFAKKK

SEQ ID NO: 56704 - DNA, 900 bp, Aspergillus nidulans FGSC A4
  CDS (1)..(900)
atgtccaccaaacctactacccagaccctctgtatcctgggctgtggaaatctcggcaccgccatcctcaaatccgtcctggccaccccagagccggaccggctcttcacccactatattgcctgtataggtagcccctcatctaaagagcgtctcgaatttcagtttaaagatcaagcaaacctcacaattgcactcgatgacaacattgccgccatcagagctgcagacgtggttattctcgctcttgatcctgctctcattccagccggattggcccagccgggcttccgcgacgctctaggacagaaattgttgattagcgtcgcagcggggtggaccgtgaagaagcttacagagacgatctacggcgatgggctagctgaagaggggaaggccagagcaacgattatccgcaccctccccaacatctgcgcccttgtgggacagtccctcacagccatcgaagtcgatcctgcggccaaaacagccgaagaagcgctctccctgacgacctccatcttctccagagtcggcaaaacgctcatcattccaccgagtctcatcgacgccacgactgccgtcgcgggatcgactcctgcaatgttcgctgtcattgtcgactccatgattgatgcgtctgtcgccgtcggtgtaccgagatccatggcgcaggcgatgatctatcagtccatgcgggggtctgcggagatgctgcagagcgggctgcagcctggggacttgagggaccaggggaccagtcccgaaggatgtacgatcggggggctgatggtgatggaggagagaggtgtgagggggggcgtgggcagggcagttcgcgaggcggttagtgttgccaggaggatggatggaaggttgcatcttaatgatactaggtag

SEQ ID NO: 56705 - protein, 299 aa, Aspergillus nidulans FGSC A4
MSTKPTTQTLCILGCGNLGTAILKSVLATPEPDRLFTHYIACIGSPSSKERLEFQFKDQANLTIALDDNIAAIRAADVVILALDPALIPAGLAQPGFRDALGQKLLISVAAGWTVKKLTETIYGDGLAEEGKARATIIRTLPNICALVGQSLTAIEVDPAAKTAEEALSLTTSIFSRVGKTLIIPPSLIDATTAVAGSTPAMFAVIVDSMIDASVAVGVPRSMAQAMIYQSMRGSAEMLQSGLQPGDLRDQGTSPEGCTIGGLMVMEERGVRGGVGRAVREAVSVARRMDGRLHLNDTR

SEQ ID NO: 56706 - DNA, 852 bp, Aspergillus nidulans FGSC A4
  CDS (1)..(852)
atgccggcacttcaatcgagcaagctcgccttcattggcggtggcaacatggcgtcggcaatcatcggcggtctcctcagccaagggatcaacaagcagaacatcaccgtgtctgagccatgggaggtcaatcgcaacaagatcgccgacctgggtgtcaaaactaccacttccaacgtcgttgccgggggtgaagcagacctggtcattatcgcggtcaaaccgcaggtcacaaaggctgtgtgcgaagagctggccgacgcctggtccaagcgtgagacactgccggtggtagtcagcattgctgccggtatcactctgggtagtctacagcagtggctcaagacatctgacggcaggaccacgcatctggttcgcgtcatgccgaacacacctgcgcttgtcggagagggtgcatcgggcctgttcgccagcgcggacgtgactgcggaggagaaggagcttgtcaacgcgcttctcggcagcgtcagcaaggctacggaatgggtggacaaggaggaattgatcgatgtcgtcactggtctttccgggtccggacctgcatacttcttcgccatggtcgagcacctgatcgccagtgccaccgcgctcggcctgccggccgagcaagccacgcgcctggcggcccagacctgtctcggagccggaaagatgctgaccgaatcgtccgacagccctacgcagctgcgcaagaacgtgaccagcccgaacggaacgacgcacgccgctctggagaccttcaatgcgcagcactttgaccaggttgtggataaggctgtgaaggcggctacttcccgcgcggccgaattgggtaacactcttggcaaatag

SEQ ID NO: 56707 - protein, 283 aa, Aspergillus nidulans FGSC A4
MPALQSSKLAFIGGGNMASAIIGGLLSQGINKQNITVSEPWEVNRNKIADLGVKTTTSNVVAGGEADLVIIAVKPQVTKAVCEELADAWSKRETLPVVVSIAAGITLGSLQQWLKTSDGRTTHLVRVMPNTPALVGEGASGLFASADVTAEEKELVNALLGSVSKATEWVDKEELIDVVTGLSGSGPAYFFAMVEHLIASATALGLPAEQATRLAAQTCLGAGKMLTESSDSPTQLRKNVTSPNGTTHAALETFNAQHFDQVVDKAVKAATSRAAELGNTLGK

SEQ ID NO: 56708 - DNA, 825 bp, Candida albicans SC5314
  CDS (1)..(825): transl_table=12
atgaaagactacacgattacagtattaggatgcggtgttatgggcacagctgtaacatcagctattttgaaatccaagtttgacccatacccaaagaaaatcatagcatgtaccattccaagccaagaacaaagcttgaaagaaacctttgctgatcagccattagttcatgtttctgccggagttgaaaacaacaacaaggcagttactgaggcagatgttattattttaggatgtaagccatatatgtatgaaggcatttatgaagaagtcaaggaatcattaactggaaaacaattattaatttcattattggcaggaaccactataaaggaattgtctattttcactccatatgttgccaaagtcatgaccaacactccagctagatttggttgtggaactgcggcaattgcatttgctccagaagttggtgaagaaagccaagagttggtaatgaaattgattgatactgttggtatgactgtaaagattccagagaagaacatggacattgcaacttcattgattgggtccggaccagctttttgtttattgatgatggagtccatgatcgatggtgcagtaagaatgggtatgccatacgatgtagcatctgttgctgccgccaaggtaatggaaggaactgcccgtatggtcttggaaaccggcgaacatccagctgcgttaaagagcaaagtgtgtactcctggtggtactacaattggtggcttgttgaccatggaagatcgtggattaagaagtgctattgctagaggtgttgaagaggctgctaacatatctgcttcatttgccaaaaagtaa

SEQ ID NO: 56709 - protein, 274 aa, Candida albicans SC5314
MKDYTITVLGCGVMGTAVTSAILKSKFDPYPKKIIACTIPSQEQSLKETFADQPLVHVSAGVENNNKAVTEADVIILGCKPYMYEGIYEEVKESLTGKQLLISLLAGTTIKELSIFTPYVAKVMTNTPARFGCGTAAIAFAPEVGEESQELVMKLIDTVGMTVKIPEKNMDIATSLIGSGPAFCLLMMESMIDGAVRMGMPYDVASVAAAKVMEGTARMVLETGEHPAALKSKVCTPGGTTIGGLLTMEDRGLRSAIARGVEEAANISASFAKK

SEQ ID NO: 56710 - DNA, 825 bp, Candida albicans SC5314
  CDS (1)..(825): transl_table=12
atgaaagactacacgattacagtattaggatgcggtgttatgggcacagctgtaacatcagctattttgaaatccaagtttgacccatacccaaagaaaatcatagcatgtaccattccaagccaagaacaaagcttgaaagaaacctttgctgatcagccattagttcatgtttctgccggagttgaaaacaacaacaaggcagttactgaggcagatgttattattttaggatgtaagccttatatgtatgaaggcatttatgaagaagtcaaggaatcattaactggaaaacaattattaatttcattattggcaggaaccactataaaggaattgtctattttcactccatatgttgccaaagtcatgaccaacactccagccagatttggttgtggaactgcggcaattgcatttgctccagaagttagtgaagaaagccaagagttggtaatgaaattgatcgatactgttggtatgactgtaaagattccagagaagaacatggacattgcaacttcattgattgggtccggaccagctttttgtttattgatgatggagtccatgatcgatggtgcagtaagaatgggtatgccatacgatgtagcatctgttgctgccgccaaggtaatggaaggaactgcccgtatggtcttggaaaccggcgaacatccagctgcgttaaagagcaaagtgtgtactcctggtggtactacaattggtggcttgttgaccatggaagatcgtggattaagaagtgctattgctagaggtgttgaagaggctgctaacatatctgcttcatttgccaaatcgtga

SEQ ID NO: 56711 - protein, 274 aa, Candida albicans SC5314
MKDYTITVLGCGVMGTAVTSAILKSKFDPYPKKIIACTIPSQEQSLKETFADQPLVHVSAGVENNNKAVTEADVIILGCKPYMYEGIYEEVKESLTGKQLLISLLAGTTIKELSIFTPYVAKVMTNTPARFGCGTAAIAFAPEVSEESQELVMKLIDTVGMTVKIPEKNMDIATSLIGSGPAFCLLMMESMIDGAVRMGMPYDVASVAAAKVMEGTARMVLETGEHPAALKSKVCTPGGTTIGGLLTMEDRGLRSAIARGVEEAANISASFAKS

SEQ ID NO: 56712 - DNA, 924 bp, Ustilago maydis 521
  CDS (1)..(924)
atggcgggatatacactagctataattgggtgtggtacgatgggcgtggcgattctgtcgggcgtactcgactctcagcggtctcaacaggcgattgcatcatctatggcgtcgtccgtgtcgtcgctgcacgactcaacgacgtgcgatgaccttagcgagctgccgacacgatacattgctactgtgaaccgactggaatctgtgcgtcggctgaagaagacgttttcgcagtatccggatatacagatccatgcggggcagaatgtggccgcggcgcgtgaggccgacgtcatattgctcggttgcaaaccacagatggtacaagacatcatcgccgagtgcggaatgaaagaggctttggacggtaaactggtcatctcgatctgcgctggtcttcgcatctctcaaattgtcgaatgggtcactcctgccaccaaggtcgtcagagcgatgcccaacactccgtgcaagatccgcgaaggaatgaccatcctcaccccgctaccttcaacactcccgaatgcagagctcgaccgcaacatcttgctgagcatcttctcggccgtcggcagatgcaggttcttggacgaaaaacactttgatgcatgcaccgcactcgccggctcaggccccgctttcgcctgcgtcttcttggaagccatggccgacggcggcgtaatgatgggattgcccagacaggaagccctcgaattggctgcacagaccatgcagggagctgcaagaatggtcatgcagtcaggtatgcatcctgccgccatcaaggattcagtcaccacccccggtggttgcaccatcgccggcttgttgaatctggaagatggaaaggtaagaagtaccgttgccagaaccattcaggctgctgctgaacacgcgagcggtctaggtcagaacaggaagtaa

SEQ ID NO: 56713 - protein, 307 aa, Ustilago maydis 521
MAGYTLAIIGCGTMGVAILSGVLDSQRSQQAIASSMASSVSSLHDSTTCDDLSELPTRYIATVNRLESVRRLKKTFSQYPDIQIHAGQNVAAAREADVILLGCKPQMVQDIIAECGMKEALDGKLVISICAGLRISQIVEWVTPATKVVRAMPNTPCKIREGMTILTPLPSTLPNAELDRNILLSIFSAVGRCRFLDEKHFDACTALAGSGPAFACVFLEAMADGGVMMGLPRQEALELAAQTMQGAARMVMQSGMHPAAIKDSVTTPGGCTIAGLLNLEDGKVRSTVARTIQAAAEHASGLGQNRK

SEQ ID NO: 56714 - DNA, 831 bp, Strongylocentrotus purpuratus
  CDS (1)..(831)
atgtcaatcggaacaataggcttcgtaggagctggaaatgtagcattaacgctaataaaaggcctcctttccgcaagtgctgtaggagcagagaggataatggccagtgcaccatcaaacaggaatctacaagttataggggatcttggagccaagacaaccagtagcaacagagagatcttggagacggctgacacaattttcttggccatcaaaccaaacctagctggcgccgtcatcaaagaaatagctccattcgtcaaaagagaccaactcttcatatcacttgctgcaggaatctcattagattttattgaaaataacctaccagaaagatcaagggttgtccgggccatgcccaacacacccaccatcatccgggagggggctaccgtgtttgcgtgtggttcgcacatcaaagagggcgacaatcgcttgatccaatcgctcttctccaagctaggtatctgcatcgagggagacgagagtatcattgacgcagcgatggctgtcagtggttgtgggccggcctatgcctatgtagctattgacgcacttgcagacggtggagttaagatggggcttccaagggacatcgctatcaagctagcagctcaaacactattaggttcagccaagatggtgctgagaggcggcaagcacccatcgcagctcaaggacgatgtgtgttctccaggaggtacaacgatcgatgccatccatgaacttgagagaggtggattcaggaaatgtcttatagaagcagtggaagcagcgtgcaataaggctaggaggctcaacgatgctatgctgtattcaaacaagaaatga

SEQ ID NO: 56715 - protein, 276 aa, Strongylocentrotus purpuratus
MSIGTIGFVGAGNVALTLIKGLLSASAVGAERIMASAPSNRNLQVIGDLGAKTTSSNREILETADTIFLAIKPNLAGAVIKEIAPFVKRDQLFISLAAGISLDFIENNLPERSRVVRAMPNTPTIIREGATVFACGSHIKEGDNRLIQSLFSKLGICIEGDESIIDAAMAVSGCGPAYAYVAIDALADGGVKMGLPRDIAIKLAAQTLLGSAKMVLRGGKHPSQLKDDVCSPGGTTIDAIHELERGGFRKCLIEAVEAACNKARRLNDAMLYSNKK

SEQ ID NO: 56716 - DNA, 930 bp, Tribolium castaneum
  CDS (1)..(930)
atgatttccttcaatactgtagttcacgtgcccaaaaataacaatatcgtccaatgtttgaaaaacgccctgagtggtaaaacctttagcaccactgccaccatcaaaatcaaaaagaaaatcggttttatcggcgatggaaacatggcaaaagcgttatgtaaaagcatcgaaaggagaggcttaataaattactcccaagtctacgtctcaagcccttacataaaaaacctgaacgtatggaaagaacttggcgcgaataccacaacagacaacaccgaagtagcccaaaaatcggacattgtcttcctggctgttaagccgcacatgttgggcgaaatcctcgataaaataatcaaagacgcgacagccagtccaataagcaacaaattgttcgtctcgattttagccggaataactttaagagaactggaggagaaaaccaaagttttccaaggctcgcgtgtgataagagtcatgcccaacacccctgtcgtggtcggcgagggctacacggcctactgccccggccagaacgtcaccgaagaagacctctccatcatcaagtcaatcctcgaggtcaccggaagttgtcaactccttcccgagaaaatgatcaacgctgtgggcgccatctcgagcagcgggccggccttcgtgtacctatttatcgaagccctgtcggatgggggcgtccgaatggggctccaccgagaaatgtcgacgaaaatcgcagcacagacggtcatgggggccgccaaaatggtcctggagaccagcaaacacatggggactttgaaagacgaagtctgctctgctggcggcaccaccattgcaggggtgcacgagctggagaaagggggagtcaggggctctgttatgaacgcggtggaagcggcggcgaaacgagccgacgaacttgcaaaataa

SEQ ID NO: 56717 - protein, 309 aa, Tribolium castaneum
MISFNTVVHVPKNNNIVQCLKNALSGKTFSTTATIKIKKKIGFIGDGNMAKALCKSIERRGLINYSQVYVSSPYIKNLNVWKELGANTTTDNTEVAQKSDIVFLAVKPHMLGEILDKIIKDATASPISNKLFVSILAGITLRELEEKTKVFQGSRVIRVMPNTPVVVGEGYTAYCPGQNVTEEDLSIIKSILEVTGSCQLLPEKMINAVGAISSSGPAFVYLFIEALSDGGVRMGLHREMSTKIAAQTVMGAAKMVLETSKHMGTLKDEVCSAGGTTIAGVHELEKGGVRGSVMNAVEAAAKRADELAK

SEQ ID NO: 56718 - DNA, 873 bp, Tribolium castaneum
  CDS (1)..(873)
atggctctaaatcccgactgtaaatgtggaattacgtgtagaggccgattaaatgaaactattggatttatcggtggtggaaacatggcaaaagcgatagccgaagggattgttaaaaagggtttggtggactataaacagttagttgtctcggggcctcgagatggtagtttagaatattggcggggtttgggctccaaaacaacaacccaaaacggcgacgttgtttgcgacgctgatataattttcctagctgtaaaaccccacattctcccttccgctgtagccaacatttacgaaacaatgaaaaaacccgtcaagggtaaacttttcgtatcaatcctagcaggcatcactttggaagccttagaaaactgtctagcaactttggaaggctctcgggtcatccgcgtgatgcccaacacccccatgatggtgggcgaaggatgcacagtgttctgtcctggccaaagggccagcgatgacgacatagctctagtaaaaactctcttagaaacgtcaggtgtctgtaagcaagtccctgaatcgctgatcaacgctgtgggggccctcgccggcagcggccctgctttcgtctatctgatgattgaagccctgtctgacggtggggttaaaatgggaatcccccgggccatggctacgaatttcgccgctcagactgtgctcggagccgcaaaaatggtcctggaatcggggaaacacacaggggttttgaaagacgaagtgtgctcccctgggggcaccaccattacggggatccacgccctggaaaagggtggcgtgaggggcgcaattatggacgctgttgaagcggcggcgaaaaaatcggcagaactgggacaaaagaaatga

SEQ ID NO: 56719 - protein, 290 aa, Tribolium castaneum
MALNPDCKCGITCRGRLNETIGFIGGGNMAKAIAEGIVKKGLVDYKQLVVSGPRDGSLEYWRGLGSKTTTQNGDVVCDADIIFLAVKPHILPSAVANIYETMKKPVKGKLFVSILAGITLEALENCLATLEGSRVIRVMPNTPMMVGEGCTVFCPGQRASDDDIALVKTLLETSGVCKQVPESLINAVGALAGSGPAFVYLMIEALSDGGVKMGIPRAMATNFAAQTVLGAAKMVLESGKHTGVLKDEVCSPGGTTITGIHALEKGGVRGAIMDAVEAAAKKSAELGQKK

SEQ ID NO: 56720 - DNA, 840 bp, Tribolium castaneum
  CDS (1)..(840)
atgacgagcaatttattaaaaattgggtttatcggaggcggaaaaatggcccaggccatggctaagggattcatctcggcaggtctggccaagggtgagaccatgatttccagctgccatccgtcggacttggcgtcggcgaaggctttcaaggaattaggagccgaatctctgttcgaaaacgtccccgtggtgaaaaaatcggacgttatcatcgtctccgtgaaaccctcagtggtgccgatcgccctcggcgacataaaaaaggccgcagatgtgaaagccgacaaattatttctatcaatcgcgatgggagtgacaataaagcagctggaacagttcttgccttcggagtctcgagtggttcgagtgatgccgaacacgcccgccctcgtccgcagcggcacttccgtcttcgtcaccggcagcagggccaccgagaaggacgccgaaaccaccaagaagctgctccaggccgtggggacgtgcgagcaggtccccgagggcctgctggacgccataacggccctcagcggctcggggccggcatatatttatgtcctcatagaggcgctcgccgacggcggcgtcaagatgggccttccgcgggatttagcatatagattggcctcgcagacggtgctaggggccgcgcaaatggtgagggacacgaatacgcaccccggggtgctcaaggacgacgtcacctccccggcgggctcgacggcggccggattgcattttctcgaacagaaaggtttcagagcagctgtgatcggagcaattgaagccgcgacccagagatgtcgcgaggttgctcaaagcgacccaacaaaataa

SEQ ID NO: 56721 - protein, 279 aa, Tribolium castaneum
MTSNLLKIGFIGGGKMAQAMAKGFISAGLAKGETMISSCHPSDLASAKAFKELGAESLFENVPVVKKSDVIIVSVKPSVVPIALGDIKKAADVKADKLFLSIAMGVTIKQLEQFLPSESRVVRVMPNTPALVRSGTSVFVTGSRATEKDAETTKKLLQAVGTCEQVPEGLLDAITALSGSGPAYIYVLIEALADGGVKMGLPRDLAYRLASQTVLGAAQMVRDTNTHPGVLKDDVTSPAGSTAAGLHFLEQKGFRAAVIGAIEAATQRCREVAQSDPTK

SEQ ID NO: 56722 - DNA, 825 bp, Herminiimonas arsenicoxydans
  CDS (1)..(825): transl_table=11
atgcaaaataatctgaaaataagctttatcggcggcggcaatatggctgctgcactgatcggcggtctggccggaaaactcactgcggcacagaatatccacgtgatcgatatcagtgccgatgcgctggcaaaactgcatgcgcaattcggcgtcacgacttcgatagagattgatgcaaggatcgccggcagcgatgtgatcgtgctggccgtcaagccgcagcaaatgaaaggtgtggcgacgcaaatcctgccgcatatcggcacacaactggtgctgtccatcgccgccggcatacgcgcggccgatttgtcgcgctggttgaatggctatcaggctattgtgcgcacgatgccgaatacgccggccctgatcggcaagggcatcaccggcatggtggcgactgccggcgtaagcgatgtacagcgtgcggcagcagatgccattctgcgtgcggtgggcgagacggtatggctggacgatgaaaaactgattgatccggtgacagcggtctccggcagcggtccggcctatgtattttactttatcgaagcgatgcagcaggcggcgcaggaaatgggcttgaccgcagagcagggcaatgcgctggcagtttccaccttcgtcggcgccgcacagctggcggcacaggcgtccgatccggtttccgtcttgcgcgaacgggtgacatccaaaggcggtactacttatgccgcgctgaccagtatggaagagagcggtgtcaagcaagccatcatcaatgcaatgaaagctgccgccgcacgcggacaggcgctgggtgaggaattcggacgcgactga

SEQ ID NO: 56723 - protein, 274 aa, Herminiimonas arsenicoxydans
MQNNLKISFIGGGNMAAALIGGLAGKLTAAQNIHVIDISADALAKLHAQFGVTTSIEIDARIAGSDVIVLAVKPQQMKGVATQILPHIGTQLVLSIAAGIRAADLSRWLNGYQAIVRTMPNTPALIGKGITGMVATAGVSDVQRAAADAILRAVGETVWLDDEKLIDPVTAVSGSGPAYVFYFIEAMQQAAQEMGLTAEQGNALAVSTFVGAAQLAAQASDPVSVLRERVTSKGGTTYAALTSMEESGVKQAIINAMKAAAARGQALGEEFGRD

SEQ ID NO: 56724 - DNA, 813 bp, Burkholderia vietnamiensis G4
  CDS (1)..(813): transl_table=11
atgaaaatcgcattcatcggcggcggcaacatggccgcggccctgatcggcgggctcgtcaagcgcggcgtcgccgccgacggcctgtacgccatcgacgtcaacgaggacgtgcgcgcgcgtgccgcgcagcagttcgggatccgcaccggcgcggccgtcgacgcgacgctcgccgattacgacgcgatcgtgctcgcggtgaagccgcaggtgctgaaggaggtcgcgcaggcgctcgcgccgcacctgaagtcgcagctggtgatcagcatcgcggccggcatccgcggcgccgacctcgcgcgctggctcggcggctacacgcgtgtcgtgcgcacgatgccgaacacaccggcgctggtcggcatgggcgtgacgggcctcgcggcgctgccgggcgtcgacgcgaccggtcgcgaactggcgtcgagcgtgctcggcgcggtcggcgagatcgtctggttcgccgacgaagtgcagctcgacgcggtcaccgcgatctcgggcagcgggccggcctacgtgttctatttcatcgaagcgctgcaggaggccgcccgccgcctcggcctgaacgacgaacagggccgcgcgctcgcggtcgcgacgttcgccggcgccgcgcagctggccgcgcagtcgggcgagccggcgagcgtgctgcgcgagcgcgtgacgtcgaaaggcggcacgacggccgccgcgctcgcgtcgttcgacgcgcagcaggtgaaggaagcgatcgtgcgcggcgcgctcgctgcgcacgcgcgcgcgcaggaaatgggcgacgagctcggccgcgcgtaa

SEQ ID NO: 56725 - protein, 270 aa, Burkholderia vietnamiensis G4
MKIAFIGGGNMAAALIGGLVKRGVAADGLYAIDVNEDVRARAAQQFGIRTGAAVDATLADYDAIVLAVKPQVLKEVAQALAPHLKSQLVISIAAGIRGADLARWLGGYTRVVRTMPNTPALVGMGVTGLAALPGVDATGRELASSVLGAVGEIVWFADEVQLDAVTAISGSGPAYVFYFIEALQEAARRLGLNDEQGRALAVATFAGAAQLAAQSGEPASVLRERVTSKGGTTAAALASFDAQQVKEAIVRGALAAHARAQEMGDELGRA

SEQ ID NO: 56726 - DNA, 795 bp, Candidatus Protochlamydia amoebophila UWE25
  CDS (1)..(795): transl_table=11
atgcatatcacaattattggctgtggaaatatgggttctggaattgccaaaaggttgtctatgaatcatcaaatttctttatatgatcattatcctgccaccgctgaatctttaactaaacaaatacaagcaaccgcttatgcagatcttttttcagctattgaagaagcagacttaattcttgtggctgtcaaacctcaaaatttagacgatttaacggaacgattagctcccctactcaaaccccatcaaactattgtaagtattttagctggaataaattataaaacattaaaacatcgtttctctcaatcgattgttgtaagaatgatgcctaatctagctttaattcacggaaaaggagtcattggattagttgagaatgatcaattaactgataagctaaaaatgcagttaaaagctctttttgatccgttaggttcagtttattggcttccagaatctaaaattgatgcattaacggctctaactggatctgggccagcttttatatttgctcttgttgaatccatgattgaagctggaatttatatgggatttcaaatgactgacgcaaagtccctcattttccaaatgcttaaaggaagcctagcactcttagaaacaactgataaacatccagcagatttaaagtggcaaattacttcacctgcaggaatgacaattgaaggattaaaaacttttgaagattacggtgttagaagtgggatcatccatacttttcttgcttctttcaataaaataaaacaagtttctgattctttaaagaattag

SEQ ID NO: 56727 - protein, 264 aa, Candidatus Protochlamydia amoebophila UWE25
MHITIIGCGNMGSGIAKRLSMNHQISLYDHYPATAESLTKQIQATAYADLFSAIEEADLILVAVKPQNLDDLTERLAPLLKPHQTIVSILAGINYKTLKHRFSQSIVVRMMPNLALIHGKGVIGLVENDQLTDKLKMQLKALFDPLGSVYWLPESKIDALTALTGSGPAFIFALVESMIEAGIYMGFQMTDAKSLIFQMLKGSLALLETTDKHPADLKWQITSPAGMTIEGLKTFEDYGVRSGIIHTFLASFNKIKQVSDSLKN

SEQ ID NO: 56728 - DNA, 837 bp, Acinetobacter sp. ADP1
  CDS (1)..(837): transl_table=11
atgagtgcgacattaaaatcaaatatcacatttattggtggtggtaacatggcgcaagccctcatcggagggctgattgcgcgtggattaccttcaactcggattatggtttctgatccagtagaagcgattcgccaagtattgcaagaaaaagagattcaagcacttaacaacaatgttgaagcaattcagcatgcagatgttgttgtattagcagttaagccacaagttttggctaccgtcctcaaacctttacagggtttattcgatggaaaactgattgtttcgattattgcaggtgcagagattgaaactattgctgaattatctggtacagaccgaattgtacgtgtgatgccaaatacccctgctttagttcaaacgggtgcacatggtttatatgccaatgaaaatgtcggtagtgatgaccgtgatctcgcgagccagattttagctgcaacaggtttaacgatttgggttaattcagaagcccagattgatgcagtcactgcagtttcaggttcgggtcctgcatattttttctacttgatggaaagtatgattcgtgcaggtaaaaatatggggctggacgaaaaagttgcaacagcattaactttgcaaacagctttgggagcggcacaaatggcaattaccagttcaaataccccatctgaattacgtaagaatgttacgtctccaaatggaacgacacaagccgcacttgaagtatttgatcgtgcccagatttcacaaaatattcagactgcacttgctgcagcccaaaaaagaagtcaagagttagcccatgagctcagtgacagcaccaaaacgacttaa

SEQ ID NO: 56729 - protein, 278 aa, Acinetobacter sp. ADP1
MSATLKSNITFIGGGNMAQALIGGLIARGLPSTRIMVSDPVEAIRQVLQEKEIQALNNNVEAIQHADVVVLAVKPQVLATVLKPLQGLFDGKLIVSIIAGAEIETIAELSGTDRIVRVMPNTPALVQTGAHGLYANENVGSDDRDLASQILAATGLTIWVNSEAQIDAVTAVSGSGPAYFFYLMESMIRAGKNMGLDEKVATALTLQTALGAAQMAITSSNTPSELRKNVTSPNGTTQAALEVFDRAQISQNIQTALAAAQKRSQELAHELSDSTKTT

SEQ ID NO: 56730 - DNA, 822 bp, Erwinia carotovora subsp. atroseptica SCRI1043
  CDS (1)..(822): transl_table=11
atgcagcaacgtaaaatagcgtttattggtgccggaaatatggcgcaggccattatcgccgggttggtcaacggcggttatcccgctcaacacatcagcgtctgcgcgccttcgggtaaaaaccgcgatgtgctggctgcacaatatggcgtcatcagcagcgcggataatgtacgctgcgctcaggaagcggacgtcattgttctggccgtcaaaccgcaaatgatggcgacggtttgcgaaccgttacatgaacaggtcaatgtcgcgggcaagctggtgctctcgattgccgcgggaatcaacatcgcccgttttcaggcgctgctgggtgagccgctgaatatcgtgcgcattatgcccaacacgccgtctctggtcggaaaagggatgagcggaatgtacgcccccgcatccgtcagtcaggctgataaagacttcaccgcacagctgatgcagagcgtcggtaaaatttgctgggtggatagtgagcaaggcattaacagcgtgatcgccgcagcgggaagcgcaccggcctatttcttcctgtttatggaagcgatgcagcaggaagccattcgccaagggttcgatcaggaaaccgctcgcctgctggtgcaacaggccgcctcaggcgctgctgcgctggttgaggccaatcccgatacgccgctgtcgaccttgcgggaaaatgtcacctccaaaggtggcaccacggcagaagcactacgggtgtttaacgaacagcagttgacgcaaaccgtggccgaggccatgcaggcggcaattgctcgcgcacaggaaatggaaacgcttttttaa

SEQ ID NO: 56731 - protein, 273 aa, Erwinia carotovora subsp. atroseptica SCRI1043
MQQRKIAFIGAGNMAQAIIAGLVNGGYPAQHISVCAPSGKNRDVLAAQYGVISSADNVRCAQEADVIVLAVKPQMMATVCEPLHEQVNVAGKLVLSIAAGINIARFQALLGEPLNIVRIMPNTPSLVGKGMSGMYAPASVSQADKDFTAQLMQSVGKICWVDSEQGINSVIAAAGSAPAYFFLFMEAMQQEAIRQGFDQETARLLVQQAASGAAALVEANPDTPLSTLRENVTSKGGTTAEALRVFNEQQLTQTVAEAMQAAIARAQEMETLF

SEQ ID NO: 56732 - DNA, 792 bp, Propionibacterium acnes KPA171202
  CDS (1)..(792): transl_table=11
atgagcgggaagattgccgtcctgggctgtggaacgatggctggggcgcttgttggtggactcattgacgctggacaaatgaaggccgaggacgtcgtggcaaccgcgcgatcggcgtcccatcgcgacgaaatcgccaacactttgggtgtaactacgagcggtgacaacaccacagctgtgcgggacgccgacctcgtcatcctcggcgtcaagccttacgcggccgttgacgtgctggaagaagtctcgggtgctctgaaagctgatgcggtggttgtctccattgctgccggtgtcactactgagaagttgctcatggcatggcagggaaagatcgtccgtgtaatgccaaacaccccagttcgggtgggcaaaggggcgttcattgtgagttccgctcccggctccgaggatgcggctaagaaggtgggtgacctactcgaatcggtgggagtcgtcgtcactgtgcctgaggagctgcataatgctgccacagccgtgtcgggatcgggtccggcgtacgttttcttggtagcagaggccatgatcgatgctgccgtcgcgctgggtgtgccgcgcgaccaggctagccaacttactgtagcgacgttagccggttcggctgagttgttggcaggaggcgagcaccctgcggtcctgcgatccaaggtgacgagcccgggtggtaccactgcggctgccgtagccgcattggaggccggaggtgtgcgctccgttttcgccgatgcgatgacggcatgtcgggaccgcgccgctggcctgtcctga

SEQ ID NO: 56733 - protein, 263 aa, Propionibacterium acnes KPA171202
MSGKIAVLGCGTMAGALVGGLIDAGQMKAEDVVATARSASHRDEIANTLGVTTSGDNTTAVRDADLVILGVKPYAAVDVLEEVSGALKADAVVVSIAAGVTTEKLLMAWQGKIVRVMPNTPVRVGKGAFIVSSAPGSEDAAKKVGDLLESVGVVVTVPEELHNAATAVSGSGPAYVFLVAEAMIDAAVALGVPRDQASQLTVATLAGSAELLAGGEHPAVLRSKVTSPGGTTAAAVAALEAGGVRSVFADAMTACRDRAAGLS

SEQ ID NO: 56734 - DNA, 810 bp, Leifsonia xyli subsp. xyli str. CTCB07
  CDS (1)..(810): transl_table=11
atgcttggcgccgggtcgatgggccgggccatcctgtccggcctcaccgctcccggcgtgaccgtgaccggcggcatccgtgcgaccaatcgctctgctgccagcgccgaagggttgggcgacctgcccggcgtcaccgcgtacgccactgaggccgacccggacgccaaccgtctggccgtggccggcactgagatcgtggtcgtggccgtcaaacccgggatggtccccggtctgctgcgcgagatcgccccttcgctcactcccggggccgtcgtggtgagcgtcgccgccggtgtgaccaccgcgacattcgagtccctcctgccggagtccgtggctgtcgtgcggtcgatgccgaacacccccgccgtcgtcggcagggccgtcaccggtatcagcgccggcacccgttcggaacccgatgacctcgccctcgtccgctccctcttcgagaccgtcggcgaggtggtcgacgtccccgagtcgcagctcgacgctctcggcaccatctccggctccgggcccgcctatgtcttcttcctcgtcgaggccctcaccgccgccgccctcgagaaaggcttcacacccgagcaggcgcgcacccttgttaacggcacctttctcggcgccgctgacctcctcgtcgcctcgggcgaagaccccgccgacctccgccgccgcgtcaccagtcccggcggcaccaccgagcgcgccatcggggtcctcgccgccgctgacctccccgccctcttcgcccgcgccaccgacgccgccctcgcccgctcccgcgaacttgccgccacctga

SEQ ID NO: 56735 - protein, 269 aa, Leifsonia xyli subsp. xyli str. CTCB07
MLGAGSMGRAILSGLTAPGVTVTGGIRATNRSAASAEGLGDLPGVTAYATEADPDANRLAVAGTEIVVVAVKPGMVPGLLREIAPSLTPGAVVVSVAAGVTTATFESLLPESVAVVRSMPNTPAVVGRAVTGISAGTRSEPDDLALVRSLFETVGEVVDVPESQLDALGTISGSGPAYVFFLVEALTAAALEKGFTPEQARTLVNGTFLGAADLLVASGEDPADLRRRVTSPGGTTERAIGVLAAADLPALFARATDAALARSRELAAT

SEQ ID NO: 56736 - DNA, 819 bp, Desulfotalea psychrophila LSv54
  CDS (1)..(819): transl_table=11
atgacaacagaaaatataggttttatcggtggcgggcaaatggccgaagcacttatcaaaggccttacccaatcgggctcctatcctgcagaaaacatctatgtacttgatccctctccagaaagaaaagatttcttaacagccacctataatatcaacaccattgaggactgtggggctgcctttgccacctgtcaaaagatctttctcgccgttaaacctcaggtaatgtccctcgtattacaaaattgccaaggaattatcaacgaagatcatctgcttattaccatcgccgccggcctccccatctcgtcctatgtaaagacattggccctgcccagacttaaaattatccgggtaatgcccaatacccccgccttggttggacagagtgcctccgcccttacggcaagcccctatgtaagccaggaagaactcgataaagtacaaaatatttttaatcaaattggcacaacaacggtgctcgaagagtgtcatcttgatgcagtcaccggcctcagtggctcggggcctgcctatgttttttcctttatagaggcccttattgatgccggtgttgccgagggactcaatcgacaggtttcgaccaatcttgccctgcaaaccgttgcgggttccgttgagcttctccgccaaaatggagaacatccagcggtggaacgcgcccgcgtctcctctcctggtgggacaacaatagcagcatccaaaatattagagagatcaggttttcaggcaattatcatggatgccgtcgctgctgcaactgaaaaatcaaaagagcttggcaaggggaagtga

SEQ ID NO: 56737 - protein, 272 aa, Desulfotalea psychrophila LSv54
MTTENIGFIGGGQMAEALIKGLTQSGSYPAENIYVLDPSPERKDFLTATYNINTIEDCGAAFATCQKIFLAVKPQVMSLVLQNCQGIINEDHLLITIAAGLPISSYVKTLALPRLKIIRVMPNTPALVGQSASALTASPYVSQEELDKVQNIFNQIGTTTVLEECHLDAVTGLSGSGPAYVFSFIEALIDAGVAEGLNRQVSTNLALQTVAGSVELLRQNGEHPAVERARVSSPGGTTIAASKILERSGFQAIIMDAVAAATEKSKELGKGK

SEQ ID NO: 56738 - DNA, 855 bp, Symbiobacterium thermophilum IAM 14863
  CDS (1)..(855): transl_table=11
gtggagcggatgcttacgggcaatgtgggatttctgggtgcgggcgcgatcgccgaggccctgatccgcggcatgctgaatgccggggtcgtacagcctgaacaggttctggtgagcaaccgctccgatcgggagcgcctggccgacctgaaccggcgctacggcgtgcgcacggcggggagcaaggggtacgtggtggacgtctgccaggtggtggtgctggcctgcaagcccaaggacgtggccggtctgctggccgaggtgggtggccggttccgcccggggcagatcgtgctctccctggctgcggggatcgcgacgtcgttcatcgaggagcgggtggccgacggggtgatggtcgtacgggcgatgcccaacacctcctgccaggtgggcgagtcggccacggcggtctgcctcggccgcgcggctacgcccgaggcgatgcggctcgtcaccgagatgctggccagcgtcgggcaggtgtataccgtgcccgaggaacagatggacgccgtgaccggcctttccggcagcgggcccgcgtacgtgtactacatcgtcgaggcaatgatcgaggccggcgaggcggtgggcctcgcccccgaggtggcccgggcgctgaccctgcagacgctgaagggcgcggcgctgacgctggccaccaccggggccgaccccgccgtgctgcgagagcaggtgacctcgcccgggggcaccaccgcggcgggcctgcaggtgctgcgggaggccggcttcgcccaggcgctcatcagcgcgatcgtccgggccaccgagaggtcccgggagctgggccggatgccggcgcaggccgccacggaggtcggcgattga

SEQ ID NO: 56739 - protein, 284 aa, Symbiobacterium thermophilum IAM 14863
MERMLTGNVGFLGAGAIAEALIRGMLNAGVVQPEQVLVSNRSDRERLADLNRRYGVRTAGSKGYVVDVCQVVVLACKPKDVAGLLAEVGGRFRPGQIVLSLAAGIATSFIEERVADGVMVVRAMPNTSCQVGESATAVCLGRAATPEAMRLVTEMLASVGQVYTVPEEQMDAVTGLSGSGPAYVYYIVEAMIEAGEAVGLAPEVARALTLQTLKGAALTLATTGADPAVLREQVTSPGGTTAAGLQVLREAGFAQALISAIVRATERSRELGRMPAQAATEVGD

SEQ ID NO: 56740 - DNA, 822 bp, Bacillus licheniformis ATCC 14580
  CDS (1)..(822): transl_table=11
atgaaacgaataggatttatcggagccggttcgatggctgaagcgatgattaaggggcttgtcaaaagcggtgcaatggaacctgaggcgatattcgttacgaatcagtcgaatacggccaggcttcgtgaattaagcgagacttacggggtatgcggagaagcagatacggcaaaagtcgccgcccggtcggatacactcgttttggcgatgaagccgaaagacgcggcaggaggaatagccgcactccgcccctatttgcgaaaagaacagctgctgatctctgttcttgcaggcattccgattcatacgatccagcactatgccgggcttgagctgcctgttgtgagagccatgccgaatacatcggccgccattcaaaaatcagccacagcctttgcggcaagcccgcttgtcacgaaagagcagatgcaggaagcggctgacctctttgcgacggtcggcagcgttacaatcgttgaggaatctgcccttgatgctgtgacagccgtagccggaagcgggcccgcttttgtttatcggtttgtcgaagccctgcaggcgtcggctgccgagctggggcttcctgaaaaaacggcgaaacagctgattatcgatatgatggcaggagcggctcaaatgcttgaaaccggcagagatccttctgtcatgaggaaagagatcacaagcgccggagggacaacggaagcaggccttaggatgcttgacgaccatcaatttgaacagaccgtcatatcctgcgtcaaagaagcggcgaatcgttctgcggaactcagggatatgtttgccgccaaaatttaa

SEQ ID NO: 56741 - protein, 273 aa, Bacillus licheniformis ATCC 14580
MKRIGFIGAGSMAEAMIKGLVKSGAMEPEAIFVTNQSNTARLRELSETYGVCGEADTAKVAARSDTLVLAMKPKDAAGGIAALRPYLRKEQLLISVLAGIPIHTIQHYAGLELPVVRAMPNTSAAIQKSATAFAASPLVTKEQMQEAADLFATVGSVTIVEESALDAVTAVAGSGPAFVYRFVEALQASAAELGLPEKTAKQLIIDMMAGAAQMLETGRDPSVMRKEITSAGGTTEAGLRMLDDHQFEQTVISCVKEAANRSAELRDMFAAKI

SEQ ID NO: 56742 - DNA, 816 bp, Mannheimia succiniciproducens MBEL55E
  CDS (1)..(816): transl_table=11
atgaaaaataaattgctcacctttatcggcggcggaaatatggcgcaggcgatagtgttcggattgttgaataaaggatattcggcggcaaaattaattgtttgcgatcgtaatgaggctaaacgcaacttatttgcccaaaaaggcgttgaggtcaatttaacgaatgtagaggcggcggaaaaagcggaagtggtggtgcttgcggtaaaacctcaggcgatggcggaaacctgcggcccattaagtgcggtggattttagcggaaaattggtcatttccattgctgccgcagtttccgtaagccgtttatcggcgctgcttccgacggcgaaaaatattgtgcgggtaatgccgaacacgccggcgctggtgtcggaaggcatggcgggtttatttgcatcggcagggcttaacggggaatatcaggatttcgctgaagatttgctgaatgcggtagggaaaacctgctggctacaaaaagaagaggatatgcacgccgttaccgcaggatccggctcaagccccgcttatttctttctatttatggaagctatggaaaaaacattatcaagcatgggaatttcaccggaaaatgcccgcactttggtgcagcagtccgctttaggtgcggcaaaaatggtggaaaacaatccgcagctgcccctttcgacattacgcgaaaatgtcacttcaaaaggaggaaccactgcggcggcgttggcggtgtttaatcaatatcaattagataaaatcgtgcaacaggcgatggaagcctgcgttgcccgttctcaggaaatggaaaaattattttaa

SEQ ID NO: 56743 - protein, 271 aa, Mannheimia succiniciproducens MBEL55E
MKNKLLTFIGGGNMAQAIVFGLLNKGYSAAKLIVCDRNEAKRNLFAQKGVEVNLTNVEAAEKAEVVVLAVKPQAMAETCGPLSAVDFSGKLVISIAAAVSVSRLSALLPTAKNIVRVMPNTPALVSEGMAGLFASAGLNGEYQDFAEDLLNAVGKTCWLQKEEDMHAVTAGSGSSPAYFFLFMEAMEKTLSSMGISPENARTLVQQSALGAAKMVENNPQLPLSTLRENVTSKGGTTAAALAVFNQYQLDKIVQQAMEACVARSQEMEKLF

SEQ ID NO: 56744 - DNA, 789 bp, Legionella pneumophila subsp. pneumophila str. Philadelphia 1
  CDS (1)..(789): transl_table=11
atgaatatcagttttattggttatgggaatatggcgaaagcaattgcctgccacttacaaaagcaaaataaatactcattgtcagctgcctcaccatccttatctgcgggcattagtaaagaaaatattcgcactcattacgataataaagaagtggctaaagacgcagacgtcattatattggcagtaaaacccgcacaaatgcgtgaggtagtcaatgagattaacccttttatttcatcaggttgccttctaatctcagtggcagccggattgtccctgacctggtttgccaaatattgtaaaaaaggacaagcggtcgtaagaaccatgcctaataccccggctatagttggatttgcagcaacatcaatgattgcaaatgaatttgtaaacgagaaacaaaaaaaatgggcagaacaattattttcaagcattgggattactgattgggttaaagatgaagaagacatggacaccctgacagccctttctggcagtggccctgcttacgtatttttgtttcttgaagcgatgattaatgcaggggtccaattgggcctggaagaaacggttgccaaacactttgccatacagacattttcaggatcgcttcaattagctcaacatagccagttaagtttgactgaactgagaaaaaaagtaacttctccgggaggtacaacagccgcagctttggaaatcctgcatggagatttggatgagctcattttttctgctatgaaagctgcgaaacaaaaagctcatgaattaggaaaagttgaataa

SEQ ID NO: 56745 - protein, 262 aa, Legionella pneumophila subsp. pneumophila str. Philadelphia 1
MNISFIGYGNMAKAIACHLQKQNKYSLSAASPSLSAGISKENIRTHYDNKEVAKDADVIILAVKPAQMREVVNEINPFISSGCLLISVAAGLSLTWFAKYCKKGQAVVRTMPNTPAIVGFAATSMIANEFVNEKQKKWAEQLFSSIGITDWVKDEEDMDTLTALSGSGPAYVFLFLEAMINAGVQLGLEETVAKHFAIQTFSGSLQLAQHSQLSLTELRKKVTSPGGTTAAALEILHGDLDELIFSAMKAAKQKAHELGKVE

SEQ ID NO: 56746 - DNA, 825 bp, Methylococcus capsulatus str. Bath
  CDS (1)..(825): transl_table=11
atgaagcataagaccttggggttcatcggggcaggcaacatggcctcgagcctggtgggagggctggtggccgacggttatccggcccggaccatttgggtgtcggacgtggatgaggcgaagctggacgcgctttctctgaagttcggagtcaacgtgagcggggacaaccggcaggtggcgagactggcggaaatcctgatcctggccgtgaagccgcagattctgcgggaagtggcggaggggctggccgacatcgttgcggaaacccggccgctggtcctgtcggtcgcggccggtgtcgcagagtcctccctcgaccgctggctcggcggcgaccaggccctcgtccgctgcatgccgaacaccccggctctggtcaagagttccgccaccgcgctgcatgcgaacggcaagacgacctcagcccaacgtagcgaggccgaaagcatcctgcgcgccgtcggtgtgaccgtctgggtcgagcgggaggaagcgctggacgccgtcacggcgatttccggcagcggaccggcctactttttcctgctgatggaagcgatggaaaacgccgccgccagcctggggctcgatcccgagaccgcacgcctcttggtgcagcagacagcgctcggagccgcccgcatcgccatcgagtccgaagaaggtccggcccagctgcggcagagggtgacctctcccaagggaacgaccgagcgggcgatcggcgtgttcgaggagcgggggctgcatgagatcgtgagagatgccgtggcggcggctcatgccagagcggtcgaattggcgcgggaactgggggcttga

SEQ ID NO: 56747 - protein, 274 aa, Methylococcus capsulatus str. Bath
MKHKTLGFIGAGNMASSLVGGLVADGYPARTIWVSDVDEAKLDALSLKFGVNVSGDNRQVARLAEILILAVKPQILREVAEGLADIVAETRPLVLSVAAGVAESSLDRWLGGDQALVRCMPNTPALVKSSATALHANGKTTSAQRSEAESILRAVGVTVWVEREEALDAVTAISGSGPAYFFLLMEAMENAAASLGLDPETARLLVQQTALGAARIAIESEEGPAQLRQRVTSPKGTTERAIGVFEERGLHEIVRDAVAAAHARAVELARELGA

SEQ ID NO: 56748 - DNA, 795 bp, Synechococcus elongatus PCC 6301
  CDS (1)..(795): transl_table=11
atgatcagcagcttgggcatcattggcggtggcgtgatgggagaagccttgctcgcccgactgttggcccaaggacaggtggccgcgacggccgttactgtcagtgaaccctttgctgctcggtgtgagttcctgaacgatcgctacggcgttcgttgcgttgatgacaatgctgaagctgctcaggctgattgggttttgctggcgatcaaacctcaggtctttgatccggcagtggcaggcctagcaaatttgcgcagcgatcgtttgatcctgtcgatcttggcaggagtacctttggccaagctggaggctgcttttccgcatgaagcggtgattcgggccatgccgaacacgccggcgacggtgggtgctggggtaacggcgatcgcagctggacagcaggtaacggcggatcagctcagccaagcacaggaattttttgcggcagtcggtcgcgttgtcaccgtaccggaatcgcaattggatgccgtgacaggactgtctggttccggccccggctatgtcgctctgattgttgaagccctcagtgatggcggtgtcgctgctggtctgccccgcgcgatcgcgactgaactggcgattcaaacggtgcggggaacggcggaattgctccaagaaaccggctggcatccgggcgaactcaaagatcgcgtctgtagccccggcggtaccacaattgcgggggtagcgacccttgaacaaaatggactgcgatctgccctgatcgaagcggtcaaagcagcagcgctgcgatcgcaacaattgggctag

SEQ ID NO: 56749 - protein, 264 aa, Synechococcus elongatus PCC 6301
MISSLGIIGGGVMGEALLARLLAQGQVAATAVTVSEPFAARCEFLNDRYGVRCVDDNAEAAQADWVLLAIKPQVFDPAVAGLANLRSDRLILSILAGVPLAKLEAAFPHEAVIRAMPNTPATVGAGVTAIAAGQQVTADQLSQAQEFFAAVGRVVTVPESQLDAVTGLSGSGPGYVALIVEALSDGGVAAGLPRAIATELAIQTVRGTAELLQETGWHPGELKDRVCSPGGTTIAGVATLEQNGLRSALIEAVKAAALRSQQLG

SEQ ID NO: 56750 - DNA, 804 bp, Dehalococcoides ethenogenes 195
  CDS (1)..(804): transl_table=11
atgaaaatagcatttatcggcgggggaaatatgggcgaggccattttgggcgcccttatccaaaagaatatctgcccgcctaaggatattaccgtaagtgagattaaagccgaacgccgcactttccttgaaaatacctatggcataaagaccaccccttcaaacccggaggccataaaaaacgccgaagtagtcctgctggctataaaaccccagaacctggctgaactgagcgccggacttaagggcaaactggcagagacacagctggtcatatccattattgccggggcaactctaagtaaactgtccggcgggcttgaacacaaagccgtagtaagggttatgcccaacaccccggctatgataggcatgggcatgagcgtctggactgccctgccggcggtaagccccgcccagaaagaacaagctaaaagcatactttccgccatgggcaaagaaatatataccggcaaagaaaccatgctggatgcggctaccgccatctcaggttcaggcccggcttatttcttcctgtttatggaaagtctggaaaaagcggctcaggaaatgggctttacccctgaggaagcaacggtactggtatcccagacagccgccggttcggctgtttatgcggaaaaatccggcctgccgcttgcccagctccgcaaaaatgtaacctctcccggcggcactaccgccgaagctataaaggtatttgagcaagccggactggaaacaaccgtgattaaggctgccaaagcggcttttgaccgttcggtagagctgggaaagggctaa

SEQ ID NO: 56751 - protein, 267 aa, Dehalococcoides ethenogenes 195
MKIAFIGGGNMGEAILGALIQKNICPPKDITVSEIKAERRTFLENTYGIKTTPSNPEAIKNAEVVLLAIKPQNLAELSAGLKGKLAETQLVISIIAGATLSKLSGGLEHKAVVRVMPNTPAMIGMGMSVWTALPAVSPAQKEQAKSILSAMGKEIYTGKETMLDAATAISGSGPAYFFLFMESLEKAAQEMGFTPEEATVLVSQTAAGSAVYAEKSGLPLAQLRKNVTSPGGTTAEAIKVFEQAGLETTVIKAAKAAFDRSVELGKG

SEQ ID NO: 56752 - DNA, 834 bp, Psychrobacter arcticus 273-4
  CDS (1)..(834): transl_table=11
atgtcagtattggataataagaaaatcagctttatcggtggcggaaatatggcgcaggctttaattagcggcatggtgagctgtggtatcaagcccaatctcattactgtctctgatccaagtagcgaggcacgtgagcaattagctgctaaaggattgaatactgttgacccaatgacggatgccaaagcagcggttattgatgctgatattgtggtgctggcagtcaagccgcaagtgatgaaagcggtggtcagtgccttcgctgatgtcttggataagcagttggtgatttcggtagctgcaggcttatcgaccgatgttttatctagcatgcttggcggctatcgtaatattgtgcgtgcgatgccaaatacgcctgcgatgattcagatgggtgccactggtctttatggtactgatgacatctctgctgagcaaaaacaattggcaactgcggttatggaagcatcagggcttgtgatgtgggtcgaggacgaagcgcacatgcatgcagttaccgcagtatcaggttcagcgcccgcttatatgttttacattattgaagctatggttgatggggcagtagctctaggattggataaagagcaagcgtcagcactggcaatgcaaaccatgctaggtgcggcaaaaatggcaatgggcagcgaagatgcgcccgctgagctacgtcgtaaagtgacttcaccaaatggtactacccaagccgcgattgaatcaatgcaagccaatgatattggtcgtcaaattagtgaagccatgcaagcatgctatgaccgcagccaagccctaagcgaagagatgagtaaatag

SEQ ID NO: 56753 - protein, 277 aa, Psychrobacter arcticus 273-4
MSVLDNKKISFIGGGNMAQALISGMVSCGIKPNLITVSDPSSEAREQLAAKGLNTVDPMTDAKAAVIDADIVVLAVKPQVMKAVVSAFADVLDKQLVISVAAGLSTDVLSSMLGGYRNIVRAMPNTPAMIQMGATGLYGTDDISAEQKQLATAVMEASGLVMWVEDEAHMHAVTAVSGSAPAYMFYIIEAMVDGAVALGLDKEQASALAMQTMLGAAKMAMGSEDAPAELRRKVTSPNGTTQAAIESMQANDIGRQISEAMQACYDRSQALSEEMSK

SEQ ID NO: 56754 - DNA, 822 bp, Colwellia psychrerythraea 34H
  CDS (1)..(822): transl_table=11
atgaataaaatagcctttataggtgccggcaatatggcacgtgccataattattggtttagttaattctggtatcactccccaagacattatagtagccaacccttctgaaactaagagactcaatttagcgacagagtttggagtgttacaaacaaacgataatatcaaagccagtgagttcgccgatgttattgtgctttgtgttaaaccacactttatcactgatgtttgttttcaaataagccaagcaatcgatatagcaggaaaactattcatttctgttgccgcaggtactaccgttgcacaaattcaatcagcgttatcaaaagacgacactttaaaccttgctcctgtagtccgtgtcatgccaaataccccttctcaacttggtttaggcatgagtggtctatttgcttcaaaagaagtggcggtagagcaaaaggctaatgcagaaaaaattactaacgcggttggcaaaagtatttggctcgacacagaagataagattaataatattatcgctgttgctggttctgctccagcctactatttcttatttatggaagcgatggaacagcaagcaaagcagtatggtttttctgcagaagaaagccgtatgctagtgcaacagaccgcgcttggtgctgcccaaatggtcgctcacaacagcgcccctatcagtgagttgcgcgctaatgtcacctcaaaaggcggtacaacacatgccgcaatagaacgttttaaggctgatggtatagaagaaatagttaaaaatgccatgaatgctgcaattgctcgtgctgtagaaatggctaaataa

SEQ ID NO: 56755 - protein, 273 aa, Colwellia psychrerythraea 34H
MNKIAFIGAGNMARAIIIGLVNSGITPQDIIVANPSETKRLNLATEFGVLQTNDNIKASEFADVIVLCVKPHFITDVCFQISQAIDIAGKLFISVAAGTTVAQIQSALSKDDTLNLAPVVRVMPNTPSQLGLGMSGLFASKEVAVEQKANAEKITNAVGKSIWLDTEDKINNIIAVAGSAPAYYFLFMEAMEQQAKQYGFSAEESRMLVQQTALGAAQMVAHNSAPISELRANVTSKGGTTHAAIERFKADGIEEIVKNAMNAAIARAVEMAK

SEQ ID NO: 56756 - DNA, 813 bp, Dechloromonas aromatica RCB
  CDS (1)..(813): transl_table=11
atgaaaattgttttccttggcggcggcaacatggccaacgcgctgatcggcggtatggtgaagcaaggcttttctgcagcggatatccacgtgatcgacccgggtgcagaggcgctggccaaactggccagcgcttatggcgtcaactgccacgccagcgccgatgcagcaccagcttcacccgatgtgcttattctggcggtcaagccgcagcagatgaaggacgctgtcgcaccgctcgtcggcaagctgggcaaggcgctgatcatcagcatcgccgccggcctcgacatgacggcactatcacgctggctgggcggccatcgccagattgttcgctgcatgcccaacacgccagccctgatcggcgctggtataaccgggctatgcgccctgccggaagtaagcactgaccaacgcgctgtagccgaccgcgtgctgcgtgccgtcggcaccaccgtctggatagacgacgaagcaaagattgatggtgtgaccgccatctccggcagtggcccggcctacgtttttctgttcatcgaagcgctgcaacaggctgctgccgatctcggtttcacgccggagcagggccgccagctggccatcgaaactgtccagggggcagccgcgctggctgcgcaatcgaccgagccggcttccatcctgcgtgaacgggtgacctccaaaggaggcacgaccgctgcagccctgaacgtcatggccgaacgcggcgtaaaagaaggcattgttgccggctgcatggcggccgccgcgcgtggccaggaactcggcaagatccttggggctgactga

SEQ ID NO: 56757 - protein, 270 aa, Dechloromonas aromatica RCB
MKIVFLGGGNMANALIGGMVKQGFSAADIHVIDPGAEALAKLASAYGVNCHASADAAPASPDVLILAVKPQQMKDAVAPLVGKLGKALIISIAAGLDMTALSRWLGGHRQIVRCMPNTPALIGAGITGLCALPEVSTDQRAVADRVLRAVGTTVWIDDEAKIDGVTAISGSGPAYVFLFIEALQQAAADLGFTPEQGRQLAIETVQGAAALAAQSTEPASILRERVTSKGGTTAAALNVMAERGVKEGIVAGCMAAAARGQELGKILGAD

SEQ ID NO: 56758 - DNA, 795 bp, Thermobifida fusca YX
  CDS (1)..(795): transl_table=11
atgatcgcgatcattggggcagggcggatgggtgaagccctgctcgccggaatcctccacaccgggcgggacgccgcggaggtgctcatcagcgaagcgcgcgaagaccgcgccgcagaactctgccagcgctacggggtcgccgccgcctccccggccgaagccgccgcccgcgcagacacgctgctgctcgcagtcaaaccgcaggacatggtcgcggcgttgaacgagattgccccggcactgccccccgggcgcctggtgatctccgtagccgccggaatcaccacagccgtgctggaaaagcaccttcccgcggagaccgccgtggtccgagccatgcccaacacccctgccctggtcggccaggggatgaccgccatcgcagccggaacccacacccttgaggagcacctcgaccgcgcggagaccctgctccgatcggtgggcgaggtcgtgcgcgtaccggagaagcacctggacgcggtcaccgccctctccggaagcggccctgcctacttctacctcgtcgcggaagcgatgatcgaagccggagtgctcctggggctgccgcggccgaccgccgagcggctcgtcacccagaccgcggtgggctccgcggcaatgctgcgcgactccggggaccatccgaccctgttgcgggaagcagtgacctcgcccgggggaacgaccgccgctgccctgcgggaactcgaacgccacggcctgcgcagcgcgttcgctgacgcggtggaagccgcgtgccggcggagcgcggaactcgctgaaggctga

SEQ ID NO: 56759 - protein, 264 aa, Thermobifida fusca YX
MIAIIGAGRMGEALLAGILHTGRDAAEVLISEAREDRAAELCQRYGVAAASPAEAAARADTLLLAVKPQDMVAALNEIAPALPPGRLVISVAAGITTAVLEKHLPAETAVVRAMPNTPALVGQGMTAIAAGTHTLEEHLDRAETLLRSVGEVVRVPEKHLDAVTALSGSGPAYFYLVAEAMIEAGVLLGLPRPTAERLVTQTAVGSAAMLRDSGDHPTLLREAVTSPGGTTAAALRELERHGLRSAFADAVEAACRRSAELAEG

SEQ ID NO: 56760 - DNA, 837 bp, Ralstonia eutropha JMP134
  CDS (1)..(837): transl_table=11
atgctcgacaccctgaccttcggcttccttggcggcggcaatatggccaccgcgctgatcagcggcctgatcgcccgcggcgtgcccgccggttcgatccgcgtggtcgatccgttccccgatgcgcagcagcgcctggtgcgcgacctgcgcgtgcatgtcgccggcgcacccgacgcggcgttcggtgggtccgacgtcctggtgctggccgtcaagccacagcagttccgtgaagccgccgccagcttgctgccgcacctgcctgcgactggcgccggcaacctgatcatcagcgtcgccgccgggattcgcctgcaggacatggagcgctggctgggcggccgcacgcgtctggtgcgcgccatgccgaatacgcccgcactgtcgggcatgggtatgacgggcttggccgcgcccgccggactatcgcaacacgatcgcgcgattgcctccgccgtggcggaagccgtgggcaagagcgcatgggtcgatggcgatgagcagatcgacgcggttacggccatttcgggcagcggtccggcttatgtgttctatttcatcgaagcgatggaacgtgcggcgacggaactcggcctgaccacgcagcagggtcgcgagcttgcggtgcagactttcctcggggcagccacgctggccgggcaatcgacggaaccggtcgctacgttgcgcgagcgggtgacatccaagggtggcacgacgtatgcggcgctcactgccatggaaagcgctggaatcggcgatgctttcgtgcgcgccatgcaggctgcagcggcgcgtgggaaggagatgggggaagagttcgggaaggattga

SEQ ID NO: 56761 - protein, 278 aa, Ralstonia eutropha JMP134
MLDTLTFGFLGGGNMATALISGLIARGVPAGSIRVVDPFPDAQQRLVRDLRVHVAGAPDAAFGGSDVLVLAVKPQQFREAAASLLPHLPATGAGNLIISVAAGIRLQDMERWLGGRTRLVRAMPNTPALSGMGMTGLAAPAGLSQHDRAIASAVAEAVGKSAWVDGDEQIDAVTAISGSGPAYVFYFIEAMERAATELGLTTQQGRELAVQTFLGAATLAGQSTEPVATLRERVTSKGGTTYAALTAMESAGIGDAFVRAMQAAAARGKEMGEEFGKD

SEQ ID NO: 56762 - DNA, 816 bp, Thiobacillus denitrificans ATCC 25259
  CDS (1)..(816): transl_table=11
atgcataaagtcagcttcatcggcggcggcaacgtggccgccgcgatcatcggcggcctcgtcgcgagcggcaccgcgccgaccgatatcgaggtcgtcgaaatcaacgcggacgcgcgcgacaagctcgcgacgcgcttcggcgtcgtcacccataccgatctttcgcaggcccgcctgcacgcgctcgtcgtgctcgcggtcaagccgcagaccttgcccgaagtcgcggccgcgctcgcgcagcggctgagcggccagctcgtcgtctcgatcgcggccggcgtgcgcgtcgccgatctcgcgcgctggctcggcggtcatgcgcgcatcgtgcgcgcgatgcccaataccccggcgctggtgcaggccgggatcacgggcctgttcgcccccgacgccgtcagccaggagtcgcgttcgcaggccgagagcgtgctccgcgcagtcggcggcgtcgtttgggtcgacgacgaaccgcagctcgacgcggtcacggccgtgtcgggcagcggccctgcctacgtcttctatttcatcgaatcgctcgaagccgcggccgaggcccagggtctcgcaccgggggtcgcgcgtcagctcgcgctgcagaccttcttcggtgcgaccaagctcgcgctcgaatcgggcgaggagccggcgctgctgcgccagcgcgtcacgtccaaggggggcacgaccgaacgcgggcttgccgcgctcgacgcggccggggtcaagcaggcggtcggccaggcggtcgacgccgccagccggcgcggcgccgaactcggcgacgaattgggacgcctcgcatga

SEQ ID NO: 56763 - protein, 271 aa, Thiobacillus denitrificans ATCC 25259
MHKVSFIGGGNVAAAIIGGLVASGTAPTDIEVVEINADARDKLATRFGVVTHTDLSQARLHALVVLAVKPQTLPEVAAALAQRLSGQLVVSIAAGVRVADLARWLGGHARIVRAMPNTPALVQAGITGLFAPDAVSQESRSQAESVLRAVGGVVWVDDEPQLDAVTAVSGSGPAYVFYFIESLEAAAEAQGLAPGVARQLALQTFFGATKLALESGEEPALLRQRVTSKGGTTERGLAALDAAGVKQAVGQAVDAASRRGAELGDELGRLA

SEQ ID NO: 56764 - DNA, 813 bp, Anabaena variabilis ATCC 29413
  CDS (1)..(813): transl_table=11
atgactataaaatttggtttaattggtggcggggtaatgggagaagcgctcttatcccgccttattgcgcggggaatttatcaaccatcagaagtcatagtcagcgaaccgcaaacagcgcgacaagcttttttacagcaaaaatatcatgtgggtgtgactacagataacagtttggtattcacacaagctcaagacgttgtattcttggcggtgaaaccacaagtgtttagtgcgatcgctcaagaattagcagatacagtattcacagaccattccccccttgtcgtctctattctcgcaggggtgtctttaagccagctagaagcggcatttccccaatcaccagtcattagagctatgcccaataccccagccactgtaggcgcagggatgaccgctatctgctctggtgcatacacttacgcccaacaccagaaattggcgcaacaaattttttcggcagtgggggaagtagtcgaagtttccgaaagtttgatggatgcagtcactgggctttctggtagcggcccggcttatgtcgctttattagtagaagccctcgctgatgggggagtggcatccgggttacctagaggaattgccaatcaactggcgttacaaactgtgctaggaacagcccaattattacacgaaagtaaactccacccagccgaactcaaagaccgagttaccagccccggtggtactaccatcgcggggattgcccaactagaaaaagcgggatttcgttcagccttaattgaagccgtcaaagcagctacctggcgatcgcaagaattgggcaaatag

SEQ ID NO: 56765 - protein, 270 aa, Anabaena variabilis ATCC 29413
MTIKFGLIGGGVMGEALLSRLIARGIYQPSEVIVSEPQTARQAFLQQKYHVGVTTDNSLVFTQAQDVVFLAVKPQVFSAIAQELADTVFTDHSPLVVSILAGVSLSQLEAAFPQSPVIRAMPNTPATVGAGMTAICSGAYTYAQHQKLAQQIFSAVGEVVEVSESLMDAVTGLSGSGPAYVALLVEALADGGVASGLPRGIANQLALQTVLGTAQLLHESKLHPAELKDRVTSPGGTTIAGIAQLEKAGFRSALIEAVKAATWRSQELGK

SEQ ID NO: 56766 - DNA, 780 bp, Carboxydothermus hydrogenoformans Z-2901
  CDS (1)..(780): transl_table=11
atgaaaccagctgtaggaataattggtgttggccaaatgggcggggcaattgcccggggcttattaaaacaacaaccttctccgataaaaaaactttacctgtccgataaaaatcaggagtgtttaaaaccttttttagagcaggcagagccggttaccaatgaactactggttaaaaaagctgatgtggtcattgttgcggtaaagccgtacctggtagaaagtgtgataaaagaaatctctccggggctttccggtaaaattttagtttcagtggcggccggggtttccttgaaaaaaatagccgagtggggggttcctggcgaatgtgaggtggtaagggtaatgcccaatactccggctttaattggccagggttttatagcgattacgccatccaaagcaaatgctttattagcggaaatttttgattctttaggagaagtggtgtttctcgaagagaaatattttgatcagattacagccttagcgggaagtggacctgcttatatttatttagtagcggaagcattaattgatggagcggtccgcttgggtcttccacgggatgtggcaaggagcgcggttgtccagactttgataggggcaggagcaatgctcaaagaaactcaggaacatccgggaattctccgggatgcggtagtaacccccggtgggaccacggcggcgggtttataccaattggaaaaacaggggattcgaggcatgtttgctgactgcttagaaagtgcttacgaacgggccaaaaatcttacttaa

SEQ ID NO: 56767 - protein, 259 aa, Carboxydothermus hydrogenoformans Z-2901
MKPAVGIIGVGQMGGAIARGLLKQQPSPIKKLYLSDKNQECLKPFLEQAEPVTNELLVKKADVVIVAVKPYLVESVIKEISPGLSGKILVSVAAGVSLKKIAEWGVPGECEVVRVMPNTPALIGQGFIAITPSKANALLAEIFDSLGEVVFLEEKYFDQITALAGSGPAYIYLVAEALIDGAVRLGLPRDVARSAVVQTLIGAGAMLKETQEHPGILRDAVVTPGGTTAAGLYQLEKQGIRGMFADCLESAYERAKNLT

SEQ ID NO: 56768 - DNA, 813 bp, Synechococcus sp. CC9605
  CDS (1)..(813): transl_table=11
gtgcagcctgctttcggtgtgatcggcctgggccgcatggctcaggcccttgtgcttcctcttttggagcgtggtcggattccggccgaccagctgttggcggtggttggagaatctgtttctcttgagcaacggcgtggggccttgccggctggcatcggtttggttgccgctgatgatccttcagcacagcaggtttggacggcgccggtgcagctgcttgcggtgaagccacagcaactggatgccgttgctgcggtttcaggaccggttgtgggggagccgctgctgatctctgtgttggcgggggtgtctctggcgcggttgcagcatttgtttcccggtcatcgctgtgtgcgggcggtgcccaacactcctgcgttggtgggcgccggtttgacggctctggcctggggggaggggatcgacccagagcaacaggatcaggtgcggcagctgttcgccgatgtgggcgaagtgctggagttggcggaagccaagctcgatgcctttctggcgctcacctcatcgggccctgcctttgtggccctggtggcggaagccatggctgatggtgctgttgccgctggtcttcccagagacctggccctgcggctgagccaccgcaccctggctggaacggctgagctgctggaccgtcgcgatctgcaccctgcccagctcaaggacatggtcacctcccctgggggcaccaccatcgccggcgtccgcgcgctggaacggatcggtcttcgctccgccttgatcgaagcggttgttgctgctgcggaacgcagccgagaactcgcctag

SEQ ID NO: 56769 - protein, 270 aa, Synechococcus sp. CC9605
MQPAFGVIGLGRMAQALVLPLLERGRIPADQLLAVVGESVSLEQRRGALPAGIGLVAADDPSAQQVWTAPVQLLAVKPQQLDAVAAVSGPVVGEPLLISVLAGVSLARLQHLFPGHRCVRAVPNTPALVGAGLTALAWGEGIDPEQQDQVRQLFADVGEVLELAEAKLDAFLALTSSGPAFVALVAEAMADGAVAAGLPRDLALRLSHRTLAGTAELLDRRDLHPAQLKDMVTSPGGTTIAGVRALERIGLRSALIEAVVAAAERSRELA

SEQ ID NO: 56770 - DNA, 813 bp, Geobacter metallireducens GS-15
  CDS (1)..(813): transl_table=11
atgctgaagggatgcagagtggggttcatcggcggcggcaacatggcggaggcgatcatcaggggacttctggccggcggggtaacggcggcggaactggtggtggcggagcccatggccgagcggcgggaatttctgcgggagacctacggtattgatgcccgtgccgacaacggcgaggtggccacgatgaccgacgccctgatcgttgccgtgaagccccaggtatttcggggcatggctgcggccctcggggcagcaggctttgccgggaagctcgtcatctccatcatggcggggatatccatcaacggcatcgaggaggtctgcggcgactcttcccgggtgatccgggtcatgccgaacacgccggccctggtgctggagggggcctcggccctctcccgagggaagaacgccaccgacgacgatttgttcttcgcccagggaatcttcgagctggtgggaaccacctgcgtcgtggacgagaaactcatggatgccgtcaccggcctctcggggagcgggcctgcctacgtgttcatgttcatcgaggccctctccgatgccggcgtgaagaacggcctcccccgcgacgtagcaacccgccttgcggcccagacggtcctgggctccgcgagactccttctggagaccggcgaccaccccggagtcctcaaggaaaaggtcacctcccccggcggcaccaccatcgccggcgtagccgccttggaacggggctccttccgggggacggtcatggcggccgtggacgcggccaccgcccgctctgccgagttggggaaaaaataa

SEQ ID NO: 56771 - protein, 270 aa, Geobacter metallireducens GS-15
MLKGCRVGFIGGGNMAEAIIRGLLAGGVTAAELVVAEPMAERREFLRETYGIDARADNGEVATMTDALIVAVKPQVFRGMAAALGAAGFAGKLVISIMAGISINGIEEVCGDSSRVIRVMPNTPALVLEGASALSRGKNATDDDLFFAQGIFELVGTTCVVDEKLMDAVTGLSGSGPAYVFMFIEALSDAGVKNGLPRDVATRLAAQTVLGSARLLLETGDHPGVLKEKVTSPGGTTIAGVAALERGSFRGTVMAAVDAATARSAELGKK

SEQ ID NO: 56772 - DNA, 795 bp, Moorella thermoacetica ATCC 39073
  CDS (1)..(795): transl_table=11
gtggacgtaaaaatcggttttcttggtgccggggctatggccgaggcccttattcgcggtatcatccaggccaggctggtgcagccggagcggttatgggcctatgacatccgggctgcaaggttgaaggaactggagcaacgattcggattggtggcggcagctagcagggaagaactggcggccgctgcggacatcataattctggccgtaaaaccccagaatgtggaagcggctctgactggattgcaggtcaagggggataagctggtgatctccattattgccggcgtaaccctttcccgcctggcgggatacctgggtgacgtgcctttagtcagggtagtgcccaataccccggccctggttggtgctggggtttccgccctggccgcgggcgcccgggtgggacaggaagacctggagaaagccttggccattttccgctctgtaggcgaggccatggtgttaccggaagaacagctaaacgccgtgaccggcctgagtgggagcgggccggcttacgtttatatgatcattgaagccctggccgacggcggcgtgcgccagggactggccaggccggtagccctggaactggcggccaggaccctcttaggaggagcacagatggtcctggccaccggtgagcacccgggggtcctgaaggatagggtaacctccccggcggggacaactatagccggcctcgccgtactggaagaccggggcgtgcggggagccctcatccgggctgtcgaggctgctaccctgcgggccggcgaacttgaataa

SEQ ID NO: 56773 - protein, 264 aa, Moorella thermoacetica ATCC 39073
MDVKIGFLGAGAMAEALIRGIIQARLVQPERLWAYDIRAARLKELEQRFGLVAAASREELAAAADIIILAVKPQNVEAALTGLQVKGDKLVISIIAGVTLSRLAGYLGDVPLVRVVPNTPALVGAGVSALAAGARVGQEDLEKALAIFRSVGEAMVLPEEQLNAVTGLSGSGPAYVYMIIEALADGGVRQGLARPVALELAARTLLGGAQMVLATGEHPGVLKDRVTSPAGTTIAGLAVLEDRGVRGALIRAVEAATLRAGELE

SEQ ID NO: 56774 - DNA, 819 bp, Syntrophus aciditrophicus SB
  CDS (1)..(819): transl_table=11
atgtttgaaaatcagaagatcgggcttgttggttgcggcaagatgggaacgattctgctgtccgggatgctccgtaatcgtctggttgctgaaagtcagataagggttgctgatgtggtaaaagaacgccttgaggaaatccatgaggcttatcccgacattgttcaggaaagcaatcaaccacttgctcgttcggtcgacatccttattcttgcggtaaagcctcagaatctgccggaacttcttaatgagcttacagaagatatccattccgggcaattgatcgtttcggttgcagccggcatttccacccgattgatcgaaaagcacctttccggaccggtacgtgtcgtgcgggccatgccgaataccccggctctcgtcggtgagggtgtgaccgctcttgccgcgggtgcttatgcaacacaaaaagatgttgagactgtcgccaggctgttcgaagccgtgggcttgacagttaaaatcaatgaaaatctcatggatgctgtaaccggcctcagtggcagcggacccggttatgtgtttgttatcctggaagcactcgccgatgctggggtgtttctcggtctgccgcgggaaacagccttgaagctggccgcacagactttgcttggctctgcaaaactctatctccggaccgggaagcatcccggagaactcaaggatatggtgacgtctccgggagggacaaccattgcaggtttgaaagccttagaagagggccggttgagagcgactctgatgacggcggttgaggccgccacccggcgttccaaggtcctggccggggatgaataa

SEQ ID NO: 56775 - protein, 272 aa, Syntrophus aciditrophicus SB
MFENQKIGLVGCGKMGTILLSGMLRNRLVAESQIRVADVVKERLEEIHEAYPDIVQESNQPLARSVDILILAVKPQNLPELLNELTEDIHSGQLIVSVAAGISTRLIEKHLSGPVRVVRAMPNTPALVGEGVTALAAGAYATQKDVETVARLFEAVGLTVKINENLMDAVTGLSGSGPGYVFVILEALADAGVFLGLPRETALKLAAQTLLGSAKLYLRTGKHPGELKDMVTSPGGTTIAGLKALEEGRLRATLMTAVEAATRRSKVLAGDE

SEQ ID NO: 56776 - DNA, 804 bp, Frankia sp. CcI3
  CDS (1)..(804): transl_table=11
atggtcatgatcgttgcggtcatgggggcgggacggctcggcggggcgatgctgtcggggctgctgcggtccgggcatgccgctcaggacatcgtcgtggccgaacgtgatgccgaccgggctggtgagatcgtggcgcgtcacggcgtcgaggtgcaggcgccgacggtggccgcagccaaggcggatgttctgatcatcggggtgaagccccaggacgtcgggaccctgctggccgagatcgggtcggtggtcgcgaacgggacgctcgtggtgtcgttggcggcgggcatcaccactgatcttctcgaggagcggctaccttcgcttcccccggtggtccgggtgatgacgaacaccccgctgctcgtcggggaggcgatgtcggcgatctgcgggggccgctacgccgaggagaagcacctcgccacggcagaagccctgctgacgccggtcggccgggtgacgcgggtggcagagtcccagctcgacgcggtgacggccctgtccggcagcggaccggcgtacttcttctatcttgtcgatgcgatgatcgaggcgggtgtgctccttgggctgccccgcaccctggccgcggaactcatgacccagaccgccctgggctcggcgcggatgctgcgcgagagcggtgagcatccggcgctgttgcgggaggccgtcacctctccggccgggaccacgatcgcggcactgcgggagctggaccgtcgcggtgtgcgcgcggcgctcatggacgccctggaggcggcgagcagtcggtcgcgggaactcggccgtagttga

SEQ ID NO: 56777 - protein, 267 aa, Frankia sp. CcI3
MVMIVAVMGAGRLGGAMLSGLLRSGHAAQDIVVAERDADRAGEIVARHGVEVQAPTVAAAKADVLIIGVKPQDVGTLLAEIGSVVANGTLVVSLAAGITTDLLEERLPSLPPVVRVMTNTPLLVGEAMSAICGGRYAEEKHLATAEALLTPVGRVTRVAESQLDAVTALSGSGPAYFFYLVDAMIEAGVLLGLPRTLAAELMTQTALGSARMLRESGEHPALLREAVTSPAGTTIAALRELDRRGVRAALMDALEAASSRSRELGRS

SEQ ID NO: 56778 - DNA, 810 bp, Novosphingobium aromaticivorans DSM 12444
  CDS (1)..(810): transl_table=11
atgaccaagacctttctccagttcggctgcggcaacatgggcggagccatgctcaagggctggcttgccggcggtctggcgccggaaaccttcaccgtggtcgatccctatctcgaagcggcgccgcacggcgttcgcctgctcgaagctgcgcccgccggcgaggatgcgttcgacatcgtcctgctcggcttcaagccgcagcagttgcccgacgcggcgcaggccgtgcgccccttcgtcgggccgcgcaccctgttgctgtcgatacttgcgggcgtcgacctcgccaccttgcgccgtactttccccgaagcgcgtgcaatcgtccgcgtcatgcccaacctggccgccgcgctaggcaagtccccgatcgcgctgttcggcgatgcggacgaggccgcccgtgccgagactgacgcgctgatggcaccgttggggcaggcggaatggctctcgggcgaggatcagatggaccttgtcaccgcgctcgctggttcgggtcctgccttcgtgtaccgcttcatcgatgccctggccgaaggcgctgccgctctcggcctgccgcgcgaccaggctgaccgcctggcgctgtcgatggtggagggttcggccatgctcgccgccgcctccgaacactcgccgggtgaactcgcgcgccgggtcgccagccccggcggggtcacgcaggttggcatcgacatcctcgacgccgagcgccgtcttgcgcgcctcgtggaggacaccttgcgcggtgcgcgcgaccgcagcgccgagatgacggagcaggcgcgggcgcgtcagcaataa

SEQ ID NO: 56779 - protein, 269 aa, Novosphingobium aromaticivorans DSM 12444
MTKTFLQFGCGNMGGAMLKGWLAGGLAPETFTVVDPYLEAAPHGVRLLEAAPAGEDAFDIVLLGFKPQQLPDAAQAVRPFVGPRTLLLSILAGVDLATLRRTFPEARAIVRVMPNLAAALGKSPIALFGDADEAARAETDALMAPLGQAEWLSGEDQMDLVTALAGSGPAFVYRFIDALAEGAAALGLPRDQADRLALSMVEGSAMLAAASEHSPGELARRVASPGGVTQVGIDILDAERRLARLVEDTLRGARDRSAEMTEQARARQQ

SEQ ID NO: 56780 - DNA, 804 bp, Desulfitobacterium hafniense Y51
  CDS (1)..(804): transl_table=11
atgaaaaagatcagttttatcggagcaggaaacatggctgaggccattatcaaagggctgacgggggcgggaagctatgagattcgggtgaccaatcgctctaatcaggctaagctggcccaaatgaaggaagactatgggattataccggcttcttttatggaggcggtcaaggattcggagatcatccttttagcggtgaaacccaaggatgttggagaagtgttggcccaagccagagagggtatgaagtcaaaccagctcctgatcagcgtggcggcaggaattcccctggtcttgctggaaaaacatttgcctcattgtcccattatccgggctatgcccaatacctcaagcgccgttttgcattccatgaccggcttggtcaaagggcagagcgtcactgaagagaaccaaagagatgtggaagctatttttggggcggttgggaagtatatctggataactgaggagcagatgaatcccctgatcgccatgagtggcagcggaccggcttatttttacctcttcaccgaggctctggtcaaggctggggtggatatgggcttcagccaggaggcggccgagaatctggccaaagaaaccttaatgggagcggctaagatgctggcccagagcgggaaatcccccggtgagctgagggtggccgtaacctcgcccaaaggaaccacccaggaggctctgaatgtcttcctggagaaggggttggaagagctggtggcccaagcggctaaagcctgcaagcatcgtgcacaagcaatggaaagggagtatttggggtga

SEQ ID NO: 56781 - protein, 267 aa, Desulfitobacterium hafniense Y51
MKKISFIGAGNMAEAIIKGLTGAGSYEIRVTNRSNQAKLAQMKEDYGIIPASFMEAVKDSEIILLAVKPKDVGEVLAQAREGMKSNQLLISVAAGIPLVLLEKHLPHCPIIRAMPNTSSAVLHSMTGLVKGQSVTEENQRDVEAIFGAVGKYIWITEEQMNPLIAMSGSGPAYFYLFTEALVKAGVDMGFSQEAAENLAKETLMGAAKMLAQSGKSPGELRVAVTSPKGTTQEALNVFLEKGLEELVAQAAKACKHRAQAMEREYLG

SEQ ID NO: 56782 - DNA, 858 bp, Saccharophagus degradans 2-40
  CDS (1)..(858): transl_table=11
ttgagcgaaacaaacttagttaacgacgcaaaaatcgcctttattggcgccggcaacatggccgccgccattattgctgggcttgttaaacagggcgtagcacctgcaaatatcgaagtgtgcgctcccagcgaaggcaatcgcgcgcgcctagccagcgagtacggagtagtacacagtgccgacaacaacgccgctgcggcaaaggcagatattttggtactggcagtaaaaccgcaaatgatgcgcgaggtgtgcgcgcaactggccgagcaccgcaaccccaactgcgttgtcttatctgtagcggcgggtattacctgccaaagcttggccaattggctggctacacccgctcaacctgccgaaaacattgccgttgtgcgcactatgcccaacacaccgtcacacattggtttaggcgcatgcggcctatttgccagcagcgcagtagcacaaacacaaaaagaccaagcgcaggccattatggcagcggtaggcttggcggtttgggtaaatagcgaagacgaaataaacattgttacggcggtttcgggcagcggcccggcctatttctttttagtttttgaagccatgatagacgcggcagaaaaaatgggcctagatagacaaacagcgacgcaacttaccttgcaaaccgcactgggtgcagccaaactagcgcaaaccagtgaggacgatgcagtgaccttgcgcaaaaaagtgacctcgcccaacggcaccaccgagcgcgcgatagcatcttttgaacaaaacaaactgcgcgatacctttgccgcggccatgcaggcctgcagcgatcgcgcgcaacaacttgccaccgaactagcgaaataa

SEQ ID NO: 56783 - protein, 285 aa, Saccharophagus degradans 2-40
MSETNLVNDAKIAFIGAGNMAAAIIAGLVKQGVAPANIEVCAPSEGNRARLASEYGVVHSADNNAAAAKADILVLAVKPQMMREVCAQLAEHRNPNCVVLSVAAGITCQSLANWLATPAQPAENIAVVRTMPNTPSHIGLGACGLFASSAVAQTQKDQAQAIMAAVGLAVWVNSEDEINIVTAVSGSGPAYFFLVFEAMIDAAEKMGLDRQTATQLTLQTALGAAKLAQTSEDDAVTLRKKVTSPNGTTERAIASFEQNKLRDTFAAAMQACSDRAQQLATELAK

SEQ ID NO: 56784 - DNA, 810 bp, Methylobacillus flagellatus KT
  CDS (1)..(810): transl_table=11
atgaaaatcagctttatcggcggcggcaacatggcgcgcgccatcatcggcggcctgaagcaaaaaggctacagcatggcgaccatcagcgtcatcgaacttgacgctgcgaagcgggagcaattgacggaagaattcggtatccatgccaccgagcatttgcccagcgttgccaatgccgacatcatcgtgctggccgtcaagccacagcaattgcgcgacctggcaatattcctcgccagcttcctcaaccagcagctcgtcatctcgatcgcagccggcattccctgcgctgcactcagccgttggctgaacggctaccgcgccatcgtgcgtgccatgcccaatacgcccgcccagatacaggtcggcatctctggcctctatgcggcggatggcgtcagcatcgagcaacgcgagcaggctgacctgctgttgtcagcagcaggcagcacactctgggtcgatgacgagcaaaagattgatgcagtgaccgcaatttcaggcagcggcccagcttatgtattctatttcattgaggcgttggaacaggcggccctggaactgggcttcgctccctaccaggcacgcgccttgagcctgcaaaccttcctcggcgccagcaagctggccagccagagcgatgcgcccgccgccaccttgcgtgcccaggtgacatccaagggcggcaccaccgagcgcgcaatcctctccatggagcaggccggcatcaaacaagccattatccaggccgcgcaggccgccgctaagcgcgcgcgcgaactgggcgaacagttaggaaaggactaa

SEQ ID NO: 56785 - protein, 269 aa, Methylobacillus flagellatus KT
MKISFIGGGNMARAIIGGLKQKGYSMATISVIELDAAKREQLTEEFGIHATEHLPSVANADIIVLAVKPQQLRDLAIFLASFLNQQLVISIAAGIPCAALSRWLNGYRAIVRAMPNTPAQIQVGISGLYAADGVSIEQREQADLLLSAAGSTLWVDDEQKIDAVTAISGSGPAYVFYFIEALEQAALELGFAPYQARALSLQTFLGASKLASQSDAPAATLRAQVTSKGGTTERAILSMEQAGIKQAIIQAAQAAAKRARELGEQLGKD

SEQ ID NO: 56786 - DNA, 843 bp, Acidobacteria bacterium Ellin345
  CDS (1)..(843): transl_table=11
atgaccagcaaagcgaaatcgacctcgaagctctcccaacagaccgtcgcgatcctcggactcggcaagatcggcagcatcctgctgcaagccatgttgcgcgaaggactgctctcgccgaagcgcgtgcgcgcgacggtgaaccatgcagataagaccgccaagctcacgcaggagttcggcattcaggttggcaccgataacgccgcggcaatcaaaggcgcggacatcatcctcgtcgcactaaagccgcagcagattggtactgttctcaccagtttgcgtgacgagatcaagccgaaccagctgctgatctcggtagcggcatcggttccgacggcctacatggaagagcggctcgcggcgaaggtgccgatcattcgcgccatgccgaatacaccctcaatgctgggtgcgggcatgacgggcatctgcaaaggtgcgcacgctactgcggctcaactcgatctggcgcaggcgatgttcaatacggtgggccgcacggctatcgtggaagaaaaacatatggatgccgtgaccgggctgtcggcgagcgggccagcgtttatctacatcatcatcgagtccctggcggaagcaggcgtgaaggtcggcttaccgcgcgatctggcgacgcttttggcagcacagacaacgatgggcgcggcgcaagttgtgctggaaaccgggcaacatccggcgcaattgaaggacgccgtaacgacgccggcaggctgcacaattgatggcatcctcgaactggaagagggcaagttgcgggtgacgctgattaaagcggtggtgaaggctgcgcagcgcgcgaaggagttggtgttcagttaa

SEQ ID NO: 56787 - protein, 280 aa, Acidobacteria bacterium Ellin345
MTSKAKSTSKLSQQTVAILGLGKIGSILLQAMLREGLLSPKRVRATVNHADKTAKLTQEFGIQVGTDNAAAIKGADIILVALKPQQIGTVLTSLRDEIKPNQLLISVAASVPTAYMEERLAAKVPIIRAMPNTPSMLGAGMTGICKGAHATAAQLDLAQAMFNTVGRTAIVEEKHMDAVTGLSASGPAFIYIIIESLAEAGVKVGLPRDLATLLAAQTTMGAAQVVLETGQHPAQLKDAVTTPAGCTIDGILELEEGKLRVTLIKAVVKAAQRAKELVFS

SEQ ID NO: 56788 - DNA, 816 bp, Silicibacter sp. TM1040
  CDS (1)..(816): transl_table=11
atggatatgaatgagatcgcagcgcgagggttggtgcttttgggctgcggcaaaatgggatccgcgatgctcaagggctggctcgaaggggggctgccgcgtgaagctgtctatgtaatggaccccaacccctccgactggctcaagggaaccggcgtgcatatcaacgccacggtgcctgagcagcccgcaatcgttctggttgcggtcaagccgcaggtgatgggcgcggcgcttccttctgccaaatcctatgggggcggtgggaccctgtttatctccgttgcggcaggcacaccgatttcgacgtttgagacgatgctcggtgagagcaccccgattgtacgcgccatgcccaacacacccgcagccgtggggcggggcattacggccctcatcgggaacgcccatgtggatgaggccaagatggcgcaggccgacgccctgttgcaggctgtgggccagacggtgcggctggacgacgaaggtcagatggatgcagtcaccggggtgagcggatccggccctgcctatgtcttccacctcattgagacgctggccgctgcgggtgtggcgcagggtctgcccgagccgctggcgatgcaactggccaaggccacggttgccggagccggggctctggctgaggcggcagaagaggatcccagcgcgcttcgggtcaatgtgaccagcccgaatgggacaacgcaggccgcgcttgaggtcctgatggatgaggagacaggcttcccgccgctcctgcagcgcgcggttgcggcagcggccaagcgttcggaggaactgtcccgtggctga

SEQ ID NO: 56789 - protein, 271 aa, Silicibacter sp. TM1040
MDMNEIAARGLVLLGCGKMGSAMLKGWLEGGLPREAVYVMDPNPSDWLKGTGVHINATVPEQPAIVLVAVKPQVMGAALPSAKSYGGGGTLFISVAAGTPISTFETMLGESTPIVRAMPNTPAAVGRGITALIGNAHVDEAKMAQADALLQAVGQTVRLDDEGQMDAVTGVSGSGPAYVFHLIETLAAAGVAQGLPEPLAMQLAKATVAGAGALAEAAEEDPSALRVNVTSPNGTTQAALEVLMDEETGFPPLLQRAVAAAAKRSEELSRG

SEQ ID NO: 56790 - DNA, 789 bp, Rubrobacter xylanophilus DSM 9941
  CDS (1)..(789): transl_table=11
ttgaggcgcgtaggggtaataggggcgggcaagatcgggggctccctcctgagccggctggccgagtcgggggacttcgagctggccgtgagcgacgtccaccccgagcaggttgagcgcttccggcgctacgaccgggtgcgcccggcctcctccaacctcgagctcgcggaggcgagcgagatcgtgatcgtggccgtaaagccctgggacgtggccggggtgctcgaggagatctcgcccgccatgggctccggggggcgctcggtgaccagcgtcgctgcgggggtggagatcaggaccatcgagtcctacctgccggagggcacgccggtgctccgggtgatgcccaacgtgtgcgcctcggtggggctcggcgccgccgtgatcaccgcgaacgagcccggccggcgggtgctgcccgaggtgatggacatcttcgggcgggtgggcgaggtgatggagctgcccgagcgcctcttcgacgcggccaccgcgctgcacggctcgggaccggcctacgtggcgctcttcgccgacgccctcatccaggccggggttcgggaggggctgccgcgggaggttgcgcgcaggctggtggtgggcaccctcgccgggaccgccgtgctgctcaaggaccggagcgcccaccaggtgcgcgacgaggtgatgacccccggcggcaccacggcggcggccttcgtggccatggagaaggccggtttcgtgggcgcggtctacgacggggtcaacgccgccacccggcgggcccgggagctcggcggatga

SEQ ID NO: 56791 - protein, 262 aa, Rubrobacter xylanophilus DSM 9941
MRRVGVIGAGKIGGSLLSRLAESGDFELAVSDVHPEQVERFRRYDRVRPASSNLELAEASEIVIVAVKPWDVAGVLEEISPAMGSGGRSVTSVAAGVEIRTIESYLPEGTPVLRVMPNVCASVGLGAAVITANEPGRRVLPEVMDIFGRVGEVMELPERLFDAATALHGSGPAYVALFADALIQAGVREGLPREVARRLVVGTLAGTAVLLKDRSAHQVRDEVMTPGGTTAAAFVAMEKAGFVGAVYDGVNAATRRARELGG

SEQ ID NO: 56792 - DNA, 807 bp, Cytophaga hutchinsonii ATCC 33406
  CDS (1)..(807): transl_table=11
atgaaaatagcaattttaggtggaggcaatatgggtatgacttatgcaaaagcatttgtcagcagaaaaattgtttcgaaagatgaattattgattattgaaaaacatgatgaaaaaagagaacaattaaaacaggaaggagtagcttctttgtctgctgatatcgatgattcgattaagaattacgatattttaattgttgcagtaaaaccacaggattttagagttttatctgaaacgctgaaaaaatatctgacagaaaatcaaatgatactttccattatggcgggtattcagattgctcagattcaaaccttacttgaacataaaaacgtagtacgtgccatgccgaatacacctgcgcagttgggctttggtattacagcatttacagttgctaaagatgcttcgtttgaaaatataagtgttgtagatatgcttttggaaactaccgggaaagcaatttttatgaaagacgaaaccatgctggatgcagtaacagcattaagcggaagcggccctgcgtatttttattatatcgttcagaacatgatcgaagccggtaaacaaatgggcgtggacgaaaatgtggctggcatgctcgtgaaagaaaccatgatgggcgcttttcagattttgaaccattcaaaatcatccattgatgaattgattgccatggttgcttcaaaaggtggtacgacagaggctgctttaaatacgttaaaacagagagaagttggtgcgcatatcatcgaagcactgaaaaatgccgaaaaaagggcaaaagaactctccgggaacgcctaa

SEQ ID NO: 56793 - protein, 268 aa, Cytophaga hutchinsonii ATCC 33406
MKIAILGGGNMGMTYAKAFVSRKIVSKDELLIIEKHDEKREQLKQEGVASLSADIDDSIKNYDILIVAVKPQDFRVLSETLKKYLTENQMILSIMAGIQIAQIQTLLEHKNVVRAMPNTPAQLGFGITAFTVAKDASFENISVVDMLLETTGKAIFMKDETMLDAVTALSGSGPAYFYYIVQNMIEAGKQMGVDENVAGMLVKETMMGAFQILNHSKSSIDELIAMVASKGGTTEAALNTLKQREVGAHIIEALKNAEKRAKELSGNA

SEQ ID NO: 56794 - DNA, 816 bp, Rhodococcus sp. RHA1
  CDS (1)..(816): transl_table=11
atgacgagaattgcggtaatcggaggcggcaagatcggcgaggccctcatctcggggcttctgcaggcaggtcacgccgtcaaggatctggtggtggccgagcagcatccggcgcgcgccgacgagctggccgcggcgtacgcggtgcgggtcaccaccccctccgacgccgcggaaggcgccgacgtcatcgtgatcgccgtcaagccgggcgacgtcgaggccgcgctcaccgaggtgtccaaggtggaactcgacggcgagcgcgagcagctgctcgtgtcgctcgctgccggtatccccactgccttctacgagacgagactgcccgccgggttcccggtggtccgggtcatgcccaacacgcccatgctggtcggtgagggcgtcagtgtgctcgcccccggcaggcatgtgaagaaggagcacctcgaactggtgcgcggcgtcctgtcgtcggtcggcaaggtcgtcgtcgtccccgaatcgcagatcgacgccgtcaccgccgtctccggctccggtcctgcctatttcttcctggtcgccgaggccatgatcgacgcgggcgtcgggctgggactgacccgggcgaccgcttccgaactggtcgtgcagaccatggtcggctccgcggcgatgctcgacaggtcgggggagagtgcgaccgaactccgtgccgccgtgacctcgcccggcggaaccaccgcggccgcgatccgccggctggagggaaacgggctccgaacagcctttttcgacgctctcgaagccgcgaagattcgttccgccgaactcggtacgtcgaccgaatga

SEQ ID NO: 56795 - protein, 271 aa, Rhodococcus sp. RHA1
MTRIAVIGGGKIGEALISGLLQAGHAVKDLVVAEQHPARADELAAAYAVRVTTPSDAAEGADVIVIAVKPGDVEAALTEVSKVELDGEREQLLVSLAAGIPTAFYETRLPAGFPVVRVMPNTPMLVGEGVSVLAPGRHVKKEHLELVRGVLSSVGKVVVVPESQIDAVTAVSGSGPAYFFLVAEAMIDAGVGLGLTRATASELVVQTMVGSAAMLDRSGESATELRAAVTSPGGTTAAAIRRLEGNGLRTAFFDALEAAKIRSAELGTSTE

SEQ ID NO: 56796 - DNA, 828 bp, Trichodesmium erythraeum IMS101
  CDS (1)..(828): transl_table=11
atggcaattactaagttgggtttaataggtggtggggtaatgggagaggctttgctatcccgcctaattaaacaaaatgtttatctaccctcggaaattttagttagtgacccccagcaacaaaggcggaatttgttgacacaagagtatggtgtacaagtgactacagataatagtttggtagtgacaagtacaacggaggttttattgctggcagttaagcctcaaatatttgatagtgtagtgtcacagttgggagactggcaagttgctggtaagacaacaactttacctttgctaatttctattatggctggtgtgcctttgcaaaagctggaagcatttttctgtgggcaacctgtggttagagttatgccgaatactccagcaacagtgggtgtaggtatgagcgctatcgctctggggaaaaatgttcaaccatcacatcgggagttagctacttgtattttagcatctataggtcaggtagttgaagtgtcagaaagtttaatggatgcagttacggcagtgtctggttcgggacctggttatgtaacaatttttatagaatctttgacagatgggggtgttcgtgctggtttacctagggcgatcgcttatcaattggcattgcaaactgttctgggaacagcggttttattgcaggagtcaggaatgcacccggcacagttgaaagatcgggtgacaagtccagggggcacaactattgctggaattgctgagttagaaagtgcgggttttcgttctgctattattgaggctgtcctggcagcaaaggagaaagcggaagagttaggaaatagttga

SEQ ID NO: 56797 - protein, 275 aa, Trichodesmium erythraeum IMS101
MAITKLGLIGGGVMGEALLSRLIKQNVYLPSEILVSDPQQQRRNLLTQEYGVQVTTDNSLVVTSTTEVLLLAVKPQIFDSVVSQLGDWQVAGKTTTLPLLISIMAGVPLQKLEAFFCGQPVVRVMPNTPATVGVGMSAIALGKNVQPSHRELATCILASIGQVVEVSESLMDAVTAVSGSGPGYVTIFIESLTDGGVRAGLPRAIAYQLALQTVLGTAVLLQESGMHPAQLKDRVTSPGGTTIAGIAELESAGFRSAIIEAVLAAKEKAEELGNS

SEQ ID NO: 56798 - DNA, 828 bp, Alkalilimnicola ehrlichei MLHE-1
  CDS (1)..(828): transl_table=11
atgagcaacaacaccctgtgctttatcggcggcggcaacatggcccgctcgctgatcggcggcctgctggccgacggtttcgacccgcaggcggtacgggtggccgacccggacgccggcaagcgcgatgacctggccaaccgtttcggcgttcgggtctacgccgacaacctggaggcggccgccgacgccgacaccgtgatcctggcggtcaagccccaggtggtgcgtaccgcctgcgagcagttggtggccggcagcggcgacgccgggcggctgtttatctccatcgcggcgggcgtgcgcgagccggacctgacccgctggctcgggggccaggccgcagtggtgcggaccatgcccaacaccccctcgctggtgggcaccggcgccacggcgctgtacgccaacgaccgggtcaaggagcggcagcgggagctggcggaatcattgatgcgcgccgtggggctggtggtctggctcgacgacgaggcccagatggataccgtgaccgcggtttccggcagcggcccggcctacttcttcctgctcatggaggccatcgaggacgccgcgcgggacctgggtctgcccggtgagaccgcccgcctgctgaccatcgagacggcgctgggcgcggccaagatggccttggagagcgatgagtccccggcccaattgcgccagcgggtgacctcccccgggggcaccaccgagcatgcgctgcatgtgttggaggatggcgagtaccgcgccctgatgacccgtgcggtgcaggccgccgccaaacgcgcccaggagctgggccagatgctgggggagcagtga

SEQ ID NO: 56799 - protein, 275 aa, Alkalilimnicola ehrlichei MLHE-1
MSNNTLCFIGGGNMARSLIGGLLADGFDPQAVRVADPDAGKRDDLANRFGVRVYADNLEAAADADTVILAVKPQVVRTACEQLVAGSGDAGRLFISIAAGVREPDLTRWLGGQAAVVRTMPNTPSLVGTGATALYANDRVKERQRELAESLMRAVGLVVWLDDEAQMDTVTAVSGSGPAYFFLLMEAIEDAARDLGLPGETARLLTIETALGAAKMALESDESPAQLRQRVTSPGGTTEHALHVLEDGEYRALMTRAVQAAAKRAQELGQMLGEQ

SEQ ID NO: 56800 - DNA, 807 bp, Hyphomonas neptunium ATCC 15444
  CDS (1)..(807): transl_table=11
atgaagccagcagcgtccctgacccttgtcggcgcgggccgaatgggctccgcgctgctgcatggctggctgaagggtcccgagcgcgaaatttcggtgattgaaccttcgccgcgtcccgagatacgggcgttggcggaggaggggcgtatccagctcaatccggcgccgtctgaaagcagcatcattgtgctggcggtaaagcctcagcagtttgcggcggtctccgagcaggccaaagccttcgtcggccctaaatcggttgccatctcgatcatggcgggtgtgcgcctggcgcagctttcgcggcggctcggcacggagcgggtgatccgctccatgccgaacacgcccggcgctatcgggcagggcgttaccgttttcaccgcgcccgaaggggccaagcgcaccgatctgtctgccgcgcgcgagctgctcgcgccgctgggcgaggtgcatgggccggtggacgaggccatgatgtcggcggtcacggcgctgtcgggctctggcccggcttatattttcctgttggccgaggtgatggcggaagccggcgtggcgcagggcctgccgcgcgatcttgcgcttagtctcgcccggcgcactgtcgaaggcgccgccgccctgatgggcgagagtggcgacagccccgaagcgcttcgcaaagccgtgacttcacccggcggaaccacccaggcggcacttgacatccttatggacacgggtgggatgcccgccttgttcaggaacgctctcagcgccgctgccaaccgcgaccggcagctgtcccaagaggcggactga

SEQ ID NO: 56801 - protein, 268 aa, Hyphomonas neptunium ATCC 15444
MKPAASLTLVGAGRMGSALLHGWLKGPEREISVIEPSPRPEIRALAEEGRIQLNPAPSESSIIVLAVKPQQFAAVSEQAKAFVGPKSVAISIMAGVRLAQLSRRLGTERVIRSMPNTPGAIGQGVTVFTAPEGAKRTDLSAARELLAPLGEVHGPVDEAMMSAVTALSGSGPAYIFLLAEVMAEAGVAQGLPRDLALSLARRTVEGAAALMGESGDSPEALRKAVTSPGGTTQAALDILMDTGGMPALFRNALSAAANRDRQLSQEAD

SEQ ID NO: 56802 - DNA, 786 bp, Oenococcus oeni PSU-1
  CDS (1)..(786): transl_table=11
atgaaatatggttttctaggtgccggtaatttatcatcggcaattatcatgggtttactaaaagctggttttagatcggaagacatttttgtcagttctccacatagcgccgctcttctgtcaaaaagactggctatcaataatgttgacgaagatcggctgcttgctgattgcgatttaattgttttggcttttttgcctgaacagttaggtagcattgtccagcaggttggttcggaaaagtttgcaaacaaattaattgtttcggttctaggatcaacaagccttaaagaactaacggaatttttgccaacagcaaaaatagttcgcgttcttccaaacgttaatgcagaatttaataattcattgacctcggttgctttcgggcagaacttgtccaatgaggatcttaaattaacaaaaaactttttgcaggcttttggtacgattattgaactggccgaaagggattttccggctttttcggcgattgccggatcgggtcccgcctttgtcgcattgtttatcaaagctttgcaggaagcaggaataaagcagggaatcgatagcaaggaatctttgcagattgctttacatacgattaaaggatcaaccgagaatattcttcaaagcggaaaaactgctgatcaattagtcaaaaaagttgcttcaccaggtggatcaactgccgatggagtcgaatcgcttgaggagaaccactttattgaaactgttaataatgctattctagcaactatcaaccatggcagaaaaaagtttcgataa

SEQ ID NO: 56803 - protein, 261 aa, Oenococcus oeni PSU-1
MKYGFLGAGNLSSAIIMGLLKAGFRSEDIFVSSPHSAALLSKRLAINNVDEDRLLADCDLIVLAFLPEQLGSIVQQVGSEKFANKLIVSVLGSTSLKELTEFLPTAKIVRVLPNVNAEFNNSLTSVAFGQNLSNEDLKLTKNFLQAFGTIIELAERDFPAFSAIAGSGPAFVALFIKALQEAGIKQGIDSKESLQIALHTIKGSTENILQSGKTADQLVKKVASPGGSTADGVESLEENHFIETVNNAILATINHGRKKFR

SEQ ID NO: 56804 - DNA, 813 bp, Magnetococcus sp. MC-1
  CDS (1)..(813): transl_table=11
atgtccagtcagcccccaatcgcctttctcggtggtggtaatatggccagtgccatcatcgctggtctgcacaaggtcggctatcccgccgcaaagctgcgtgtaggagagcccaacgccacccagcgagaggccttaatccgccaatttgccatccagggccatgcccataatccggatgccgtggcagaggcggcttttgtggtggtggcggtaaaacccaatctggtcgctcaagtgttgcgtgatgtggccccgcagctggcccccactgcggtggtgctctctatcgcggcgggggtggatctaaccaccatggcggcggccttgccagcgggtcaacccatcattcgggccatgcccaataccccggcgctggtgggccaaggcatgaccgtactatgccccaatggacatgttgatgcagagcaactcgcccaggcacaacgcttgctggaaagtgtgggccaggtcgcggtggtcaaacaagagagtctcatggatggggtaaccgccctctctggctcagggccagcctatctgtttttaatcgccgaggcgctctcggatgggggggtggcctgtggtctacccagagctctggccgatcaactggcggtgcagacactgttgggctccgccaccctgctacgggagagtggtgagcaccccggtgtgttaaaaaatcgagtgacttctcccggcggtaccaccattgcgggtctgggcgtgctggagcggcaaggagtgcgaggtgccctaatggctgcggtagaggccgcttggaaccgatccaaggcattgggtcaataa

SEQ ID NO: 56805 - protein, 270 aa, Magnetococcus sp. MC-1
MSSQPPIAFLGGGNMASAIIAGLHKVGYPAAKLRVGEPNATQREALIRQFAIQGHAHNPDAVAEAAFVVVAVKPNLVAQVLRDVAPQLAPTAVVLSIAAGVDLTTMAAALPAGQPIIRAMPNTPALVGQGMTVLCPNGHVDAEQLAQAQRLLESVGQVAVVKQESLMDGVTALSGSGPAYLFLIAEALSDGGVACGLPRALADQLAVQTLLGSATLLRESGEHPGVLKNRVTSPGGTTIAGLGVLERQGVRGALMAAVEAAWNRSKALGQ

SEQ ID NO: 56806 - DNA, 804 bp, Nocardioides sp. JS614
  CDS (1)..(804): transl_table=11
atgtcccagaccgccatcctcggcgccggcgtgatgggcgagaccctgctctccggcctggtgcgcgccggccgccgcgtcgaccacctgctggtcggcgagaagcgccccgagcgcgcccaggagctcgaggagcggtacggcgtcgccgtggtcggcaacgccgaggcggcccgcaaggccgacacgctcgccctggtcgtcaagccccaggacatgggcgacctgctcgaggagatcgccggcgagctgcgcccgggccagctggtcgtctcccttgcggccggcatcaccaccgccttcatcgaggcccgggtccccgagggcgtcgccgtggtccgggtgatgccgaacacgcccgcgctggtcgacgaggggatggctgcggtctctcccgggtcgcactgcagcgaggagcacctcgccgaggccgagtcgctgatggcgtcggtcggccgggtgctccggatcccggagcgccagcaggacgccgtcaccgcgatctccgggtccggcccggcctacatcttcttcgtcgtggagtcgatgatcgaggccggcgtccacctgggcctgccgcgtgcgaccgccaccgacctggtcgtccagaccgtcgtgggctcggccaagatgctgcgcgagaccggcacccacccggccgtgctgcgcgagcaggtcacctccccggccggcaccaccgcggcggccctgcgcgagctggagatccacaaggtgcgcgccgcgttcctcgccgccatggaggccgcgcgcgaccggtcgcgtgcgctcgccgagggcagctga

SEQ ID NO: 56807 - protein, 267 aa, Nocardioides sp. JS614
MSQTAILGAGVMGETLLSGLVRAGRRVDHLLVGEKRPERAQELEERYGVAVVGNAEAARKADTLALVVKPQDMGDLLEEIAGELRPGQLVVSLAAGITTAFIEARVPEGVAVVRVMPNTPALVDEGMAAVSPGSHCSEEHLAEAESLMASVGRVLRIPERQQDAVTAISGSGPAYIFFVVESMIEAGVHLGLPRATATDLVVQTVVGSAKMLRETGTHPAVLREQVTSPAGTTAAALRELEIHKVRAAFLAAMEAARDRSRALAEGS

SEQ ID NO: 56808 - DNA, 825 bp, Azoarcus sp. BH72
  CDS (1)..(825): transl_table=11
atgaaaattaccttcctcggcggcggcaacatggctgcagccctgatcggtggtctggtggaacgcggctttgcggccgcagatctgtgcgcgatcgacctcgatggcgcaacccgcgagcgcctcgccgcacgtttcggcgttcgcaccgcagatgcggcggacgacgccgcgctcgcatgcgacgtgctggtgctggcggtgaagccgcagcagatgaaggcggcgctggcaccgatcgcggggcgcctgtccgcacaactggtggtcagtatcgctgccggtctgcgcgttgccgacctcgggcgctggcttggtgaggcgggcaagccctatgcgcggatcgtgcgctgcatgcccaacaccccggcgctgatcggcgctggcgttaccggtctgtacgcgggtgcggtggtggatgcggcgggacgcgaggcggccgaacgggtgctcgccgcggtcggcagcaccgtatgggtgcaggacgaagcacagatcgacgcggttaccgcggtttccggcagcggcccggcctacgtcttccatttcatcgaggcgctggaggcggccgggcgtgcgctcggcttcgacgaggcggttgcgcgcaagctcgcgctcgacacgaccctgggcgccgcgcgcctcgcggccggttcggacgaggcgccggcggtgctgcgcgaacgcgtgacctccaaaggcggtaccaccgccgccgcgcttgccagtcttgcgaccgccggctggcatgacgcgctgggtgttgcggtggctgccgccgctgcgcgcggacgcgaactgggcgacgagttgggccgggattga

SEQ ID NO: 56809 - protein, 274 aa, Azoarcus sp. BH72
MKITFLGGGNMAAALIGGLVERGFAAADLCAIDLDGATRERLAARFGVRTADAADDAALACDVLVLAVKPQQMKAALAPIAGRLSAQLVVSIAAGLRVADLGRWLGEAGKPYARIVRCMPNTPALIGAGVTGLYAGAVVDAAGREAAERVLAAVGSTVWVQDEAQIDAVTAVSGSGPAYVFHFIEALEAAGRALGFDEAVARKLALDTTLGAARLAAGSDEAPAVLRERVTSKGGTTAAALASLATAGWHDALGVAVAAAAARGRELGDELGRD

SEQ ID NO: 56810 - DNA, 867 bp, Acidovorax sp. JS42
  CDS (1)..(867): transl_table=11
atgccgcctgacctcatcgcttccccgccccatcccatgacagccagcgcatctcctcttccccccattgccttcatcggcggcggcaacatggccagcgccatcatcggcggcctgctgcagcgcggcctgccggccggccagatcgaggtggtcgaacccttcgagcccgcgcgcgccgcgctgcgggagaagttcggcatcaccgcgcagcccgcggctggcgatgcgctcgcgcgcgccgcgctggtcgtctgggccgtcaagccccagaccttcaaggaagccgccgccgccacccgcgcccacaccgccaccgccctgcacctgagcgtggccgccggcatccccacggacagcatcgcgcgctggctggacacgcagcacatcgtgcgcgccatgcccaacacccccgcgctggtgggcaagggcatcaccggcctgttcgcccgcccgcaagtggacccgcagggcaaggcgctggtggaacgcgtgatcgccaccaccggccagttcgtctgggtggaggccgaggagcagctcgacgcggtcaccgcgctgtcgggctccggcccggcctatgtgtttctgttcctcgaagccatgacccaggccggcgtggacatgggcctgccccccgcgcaggcctaccagctggccgtggccacgttccagggcgcatcggagctggccgcgcgctcgcccgagagcgccgaggtgctgcgccagcgcgtgaccagcaagggcggcaccacgcacgccgccatcacgcacctgcaggctgcacaggtgcccgcgcacttcatcgccgccatgcgcgcggcagaggcccgtgccaaggaactggcggccgagttcggcgcctga

SEQ ID NO: 56811 - protein, 288 aa, Acidovorax sp. JS42
MPPDLIASPPHPMTASASPLPPIAFIGGGNMASAIIGGLLQRGLPAGQIEVVEPFEPARAALREKFGITAQPAAGDALARAALVVWAVKPQTFKEAAAATRAHTATALHLSVAAGIPTDSIARWLDTQHIVRAMPNTPALVGKGITGLFARPQVDPQGKALVERVIATTGQFVWVEAEEQLDAVTALSGSGPAYVFLFLEAMTQAGVDMGLPPAQAYQLAVATFQGASELAARSPESAEVLRQRVTSKGGTTHAAITHLQAAQVPAHFIAAMRAAEARAKELAAEFGA

SEQ ID NO: 56812 - DNA, 819 bp, Actinobacillus pleuropneumoniae serovar 1 str. 4074
  CDS (1)..(819): transl_table=11
atgaatcatcaaaaacttgcctttatcggcaccggcaatatggcatacgctatcattcaaggcttactcaaaagccattatcccgcctcgcaaatcatcgcttgcaacaaaagcaatttagttcgccgagcagaattacaagcggtcggaattgcgacaaattttaccaatcgtgcagcagttgaacaggcggaagtcgttgtgttagcggtcaaaccgcaaatgatggcggaggtttgtagtgaattttcagcggtggatttttcgaataaaacagtgatctctgtcgcagcagggatttcagttgctcgtttagaacagcttttaccgacagcaaaaaatattatccgcaccatgccgaataccccttcgctaatcggtgagggaatgaccgggttatttgcaaaaaaatcagtaaattcgaccgcttgccaatttgccgagagtttaatgtcggcggtcggaaaatgctattgggtcgaacaagaacagcaaatcaatcacattattgcagtgaccggttccagccctgcctatttcttccgttttatggaagcgatgcaacaaagtgcaatgcaaatgggatttagcgaagctgatgcacgtttactggtgcaacaagctgcattaggcgcagccaaattagtcgaagcaaatccgaatacacctctttcaaccttgcgagaaaacgttacttcaaaaggcggaacaacggctaaagcattggaagtttttgaacaacacgcattagcggaaacagtcgatcaagcaatgtgggcagccattcaccgtgcagaagaaatggagcagcagctatga

SEQ ID NO: 56813 - protein, 272 aa, Actinobacillus pleuropneumoniae serovar 1 str. 4074
MNHQKLAFIGTGNMAYAIIQGLLKSHYPASQIIACNKSNLVRRAELQAVGIATNFTNRAAVEQAEVVVLAVKPQMMAEVCSEFSAVDFSNKTVISVAAGISVARLEQLLPTAKNIIRTMPNTPSLIGEGMTGLFAKKSVNSTACQFAESLMSAVGKCYWVEQEQQINHIIAVTGSSPAYFFRFMEAMQQSAMQMGFSEADARLLVQQAALGAAKLVEANPNTPLSTLRENVTSKGGTTAKALEVFEQHALAETVDQAMWAAIHRAEEMEQQL

SEQ ID NO: 56814 - DNA, 771 bp, Exiguobacterium sibiricum 255-15
  CDS (1)..(771): transl_table=11
atgaatattttaatggtaggggcaggttcgatgagtgagtcgttagtcaaaggctggctggattccgggatatctcctcaaatgattacgatgaccaatcgagcggaccggtcgcgtctgtttgctctggcggagcagtacggtgtccggacgacggctgaggaacaggtggatcaatttgatgtcgtcgttttggcaatgcagccggacggagtgctcgactacatcaaacagcagacttggaggacggatcaattggtcgtgtccgtcgccgcgcacattacaccggcagaaatcgaagcacatatttcatgtggtgccgtctgcgcgatgccgaatacacccgtcgcatttcggacagggatgaccggactttggtttggtgaccttgtatcggacgagaaaagacaacaggcgacggcattatttggacgcgtgggtgagacggtcgaaacgaatgcggcgacgatgccgtatctgatggcagcagcagggtgcagtcccgcatttttctatgaaatcgtcggcgcgatgacacctgtgttgacgaaagccggtttcgatgcttcttctgcccggagaatcattgcccaggcgatgaaaggatcagcggaactgctgttgcatgaagaacgtccgacagaagaactgatcaaggatgtggcagcaccgggtggcccgacggatcgtggagtccgtgtgttgcgtgaacatgacttggcacaagcgatgtatgaggctttgatggagagcgctcgcgaaaaaaattaa

SEQ ID NO: 56815 - protein, 256 aa, Exiguobacterium sibiricum 255-15
MNILMVGAGSMSESLVKGWLDSGISPQMITMTNRADRSRLFALAEQYGVRTTAEEQVDQFDVVVLAMQPDGVLDYIKQQTWRTDQLVVSVAAHITPAEIEAHISCGAVCAMPNTPVAFRTGMTGLWFGDLVSDEKRQQATALFGRVGETVETNAATMPYLMAAAGCSPAFFYEIVGAMTPVLTKAGFDASSARRIIAQAMKGSAELLLHEERPTEELIKDVAAPGGPTDRGVRVLREHDLAQAMYEALMESAREKN

SEQ ID NO: 56816 - DNA, 801 bp, Prosthecochloris aestuarii DSM 271
  CDS (1)..(801): transl_table=11
atgcagcagctatctatcggctttgtgggcacaggacgtatagcccgtgcattaatttccggcctcgtcaatgacccggcaaaccgtatctgcggatacgataaggatcccgacgccattgctgccgtcgtgaagcagttcggcatcgaaggaacatcctctgccgcagaggtcgcgcgcgatgccaggattatcattcttgccgtcaagccctaccagatcggcgaggttgtcgaagaactcaggccacacctgacaaccgggcatctgctcatcagcgtcgctgcaggcatcacgtcagagtttatccggcagcactccattgatgctatgagggttatccgcgtcatgcccaatacgcctgcgtttaccggccagggaatgactgccctcagtaaaggcatcatggccacacaagaggacatcgctcttgcgacaacgatgttcagcgcaatcggcagggtcgccgtgctcgatgaacgcctgatggatgccgcgacagccgtttccggcagcggtcccgcctatatgttttctctcatcgcatcgatagccgagggcggacgccaatgcggactatcgatgcaagacgccatcctgctcagcgcccagaccatgctgggagcggcaaccatggtccttaacggcgaaaaaactccggaagagcttatcagggaggtcaccactccgggaggcacaacggaagcagggctcaaacagatggacgcacaccatgtccggcaggcgatgatcgaaacagttaaagctgccgccgcgcgatcaaacgaactgaagcagtaa

SEQ ID NO: 56817 - protein, 266 aa, Prosthecochloris aestuarii DSM 271
MQQLSIGFVGTGRIARALISGLVNDPANRICGYDKDPDAIAAVVKQFGIEGTSSAAEVARDARIIILAVKPYQIGEVVEELRPHLTTGHLLISVAAGITSEFIRQHSIDAMRVIRVMPNTPAFTGQGMTALSKGIMATQEDIALATTMFSAIGRVAVLDERLMDAATAVSGSGPAYMFSLIASIAEGGRQCGLSMQDAILLSAQTMLGAATMVLNGEKTPEELIREVTTPGGTTEAGLKQMDAHHVRQAMIETVKAAAARSNELKQ

SEQ ID NO: 56818 - DNA, 804 bp, Kineococcus radiotolerans SRS30216
  CDS (1)..(804): transl_table=11
gtgagcgggaccctggccctggtgggggcgggggtgatggggcagacgctgctgggcggtctgctgcgcgccggccgcgaacccggcggcgtcctggtggtggaccgccgccccgggcgggcgcgggagctgcacgagcggttcggggtccgcgtcgtggacgacgtgggcgcggtggcgggggcctcgacggtcctgctcgcggtcaagccgcaggaccttctcgcgctgctggactccctcgcggggcacctggccccggacgcgctggtggtctcgctcgcggcgggggtcacgaccgcggcgatcgaggcgcggctgcccgcgggcacggccgtggtgcgggtcatgcccaacaccccctccctcgtcgacgaggggatggcgggcctctcgggcggctcggcctgcggcgacgagcagctggccgaggccgaggacctgctgcgctcgtgcgggcgcacggtcgtgctggccgagaagcacctggacgcggtgacggcgctgagcggttccgggcccgcgtacgtgttctacgtggtggaggccatggtcgaggccggggtgctgctggggctgccgcgcgcgacggcgaccgagctggtcgtgcagaccgtcgtgggcgccggcgcgatgctgcgcgagacggggcagcaccccacggtcctgcgcgagcaggtcacctccccggcggggacgacggcggccgcgctgcggcagctggacgactcgggggtgcgggccgcgctggtcgcggccgtcgaggcggccgcggcccgctcccggcagctctcggggagctga
